United States Patent Application Publication US 2011/0252501 A1 - sequence listing, part 2

SEQ ID NO: 4337 - protein, 509 aa, Triticum aestivum
MEGNTRGGGHSDALKNYNVGRTLGIGTFGKVRIAEHKHTGHKVAIKILNRRQMRTMEMEEKAKREIKILRLFIHPHIIRLYEVIYTPTDIFVVMEYCKYGELFDCIVEKGRLQEDEARRIFQQIISGVEYCHRNMVAHRDLKPENLLLDSKYNVKLADFGLSNVMHDGHFLKTSCGSPNYAAPEVISGKLYAGPEVDVWSCGVILYALLCGTLPFDDDNIPKLFKKIKGGIYILPSHLSALARDLIPRMLVVDPMKRITIREIREHPWFQNRLPRYLAVPPPDTAQQAKMIDEDTLKEIVNLGYDKDHVCESLCNRLQNEATVAYYLLLDNRFRATSGYLGADYLQSMGRSFNQFTSLESASPSTRQYLPASNDSQGSGLRPYYPVERKWALGLQSRAQPREIMIEVLKALQELNVCWKKNGHYNMKCRWCPGFPQVSDMLDANHSFVDDSTIMDNGDANGRLPAVIKFEIQLYKTKDDKYLLDMQRVTGPQLLFLDFCAAFLTNLRVL

SEQ ID NO: 4338 - protein, 554 aa, Colwellia psychrerythraea 34H
MCSIFGILDIKTGADALRPTALECSRLLRHRGPDWSGIYHSDNAILVHERLSIVDTEHGAQPLYNGDKSNVLAVNGEIYNHKALASALNVDYEFQTASDCEVILPLYEEFGVEFVDKLQGMFAFIVYNEKDNSYLIARDHIGIIPLYTGYDSEGNFYVASEMKALMPICKTVEEFPPGHILDSRVGKLQQYYKRNWQEYAAIKDNTTSTTKIREALEESVKSHLMTDVPYGVLLSGGLDSSLISAITQKFAARRIEDNDLAEAWWPKVHSFACGLAGSPDLIAAQTVADSIGTIHHSVVFTEQEGIDALKEVIYHLETYDVTTIRASTPMYLMARKIKAMGIKMVLSGEGADEIFGGYLYFHKAPNAQEFHEELNRKLDRLHKFDCLRANKSMSAWGIEARVPFLDKNFMDVAMRINPEDKLCGNGKMEKAILRESFEGYLPKEILWRQKEQFSDGVGYSWIDGLKAHVESLVTEQQLENAHIRFPVNTPDNKEGYYYRTVFEDKYPLATAADCVIGGKSVACSTEEALAWDESFQNNADPSGRAVLSVHNESY

SEQ ID NO: 4339 - protein, 176 aa, Gossypium barbadense
LFSFILILTHFLLKSSIRIQVLGWICVAISVSVFAAPLNIMARVIRTESVEFMPFTLSFFLTLSAVMWFAYGLFIKDLCVALPNVLGFILGMLQMLLYAIYRHSEKVNIEEKKLPAEQMKSINVVLTTLGASEVHPVVLDIHTDDTKEEDNKNNEPTGEPDKQTDVKMEDANESPV

SEQ ID NO: 4340 - protein, 570 aa, Aspergillus nidulans FGSC A4
MRRSLLRAVESTKPLARVSRSVSRGYSTVNETGTKDPAELDQITTLPNGIRVATESLPGPFAGVGVYVDAGSRYEDASLRGVSHIMDRLAFKSTKTRTADQMHETLESLGGNIQCASSRESLMYQSASFNSAVPTTLGLLAETIRDPLITEEEVLQQLATAEYEINEIWAKPELILPELVHTAAYKDNTLGHPLLCPRERLTEINKAVVEKYRATFFRPERMVVAFAGVPHHEAVRLTESLFGDMQGPSTNNGPSLSGTGVDTTLSDSKSEGQFAAAPQFTPTSTVASAPATTDSSILSKLPFLKKFGSNNPSSSESAPVDLTQASHYTGGFLTLPPIPPPANPMLPRLSYIHLAFEALPISDPDIYALATLQTLLGGGGSFSAGGPGKGMYSRLYTNVLNQHGWVESCIAFNHGYTDSGIFGISASCSPTRINQMVEVMCRELQNLTLDTGYTSLQPQEVNRAKNQLRSSLLMNLESRMVELEDLGRQVQVHGRKIGVTEMCKHIESLTVEDLRRVARKVFGGQVHNKGQGTGKPTVVLQEGELEGFKLRPFAWDEIQERIARWKLGRL

SEQ ID NO: 4341 - protein, 407 aa, Pseudomonas putida KT2440
MAIEIKAPTFPESVADGTVATWHKKPGEAVKRDELIVDIETDKVVLEVLATADGVLGDIVKGEGDTVLSDELLGSIVEGGAAAAPAAAAAPAAAPAAAAADAGEDDPIAAPAARKLAEENGIDLATVAGTGKGGRVTKEDVVAAVAKKKSAPAAAPAAKPAAAAAAPVVVAAGDRTEKRVPMTRLRAKIAERLVEAQSNMAMLTTFNEVDMTEVMALRSKYKDLFEKTHNGVRLGFMSFFVKAATEALKRFPAVNASIDGNDIVYHGFADVGVAVSSDRGLVVPVLRNAESMSLAEIENGIATFGKKARDGKLSIEEMTGGTFTITNGGTFGSMMSTPIVNPPQAAILGMHNIIQRPMAINGQVVIRPMMYLALSYDHRLIDGKEAVTFLVTIKNLLEDPSRLLLDI

SEQ ID NO: 4342 - protein, 431 aa, Synechococcus sp. WH 5701
MGGTIGAGILRTPGLVAEQLGSAPLIVAAWVAGALYALLGAFAVAELSTSMPRAGGWTVYARRALGDQAGFSVGWIDWVGHCAGLAWVAVTIGDYTIGLLPALPVGSKVVALLVLLAFALIQQLGLEAGSLSQKILSLGKAIAFLGLITACFLHPPVRELAGLSEPLLEAAGPADPLAAGGISLGIGAVFAMQAVITTYDGWHSPIYFAEEFAEPSKDLPRSLVGGVLSVAGLYLLVNLALLRLLPVSRIAGSVLPLADAAEVIFGSWSSQLIVVLALISSFGLVNAVVMGAPRILYGLSRDGLFLPQFAAVSAGGTPVLALVLTASTAGLLVAFGDFTILLGIASFLYVLLYLSGITSLLLLRWREPGLERPFRDPGYPISALIVWLGSLAFLIAAIRNDTANSAAALGLILLSLPLHQMTRRLAPSPEA

SEQ ID NO: 4343 - protein, 183 aa, Crocosphaera watsonii WH 8501
MSEVVNANRIRNTLIAVAAITLSIAIFFGFQTQTGSVSLESQAKDSTPIEVAIANGKPTLTEFYADWCTSCQAMAPELAQLKQKYGDSVNFVMFNVDNNKWLPEILRYRVDGIPHFVFIDDQGKEIAQAIGEQPSSVMQANLEALIDHQTLPYAASTGETSDLKSPNNPISDPRSHSSQAKSG

SEQ ID NO: 4344 - protein, 420 aa, Pyrococcus endeavori
MVEQDPFEIAVKQLERAAQYMKISEEALEFLKRPQRIVEVTIPVEMDDGTVKVFTGFRVQYNWARGPTKGGIRWHPEETLSTVKALAAWMTWKTAVMDLPYGGGKGGIIVDPKKLSDREKERLARGYIRAIYDVISPYEDIPAPDVYTNPQIMAWMMDEYEAISRRKTPAFGIITGKPLSIGGSLGRNEATARGASYTIREARKVLGWGDLKGKTIAIQGYGNAGYYLAKIMSEDYGMKVVAVSDSKGGIYNPDGLNADEVLKWKQEHGSVKDFPGATNITNEELLELEVDVLAPAAIEEVITKKNADNIKAKIVAEVANGPVTPEADEILFEKGILQIPDFLCNAGGVTVSYFEWVQNITGYYWTLEEVREKLDKKMTKAFYDVYNTAKEKNIHMRDADYVVAVQRVYQAMLDRGWVKH

SEQ ID NO: 4345 - protein, 452 aa, Oryza sativa (japonica cultivar-group)
MAAAAGKAAMERHQSIDAQLRLLAPGKVSEDDKLVEYDALLVDRFLDILQDLHGPHLREFVQECYELSAEYENDRDEARLDELGRKLTSLPPGDSIVVSSSFSHMLNLANLAEEVQIAHRRRIKLKRGDFADEASAPTESDIEETLKRLVTQLGKSREEVFDALKNQTVDLVFTAHPTQSVRRSLLQKHGRIRNCLRQLYAKDITADDKQELDEALQREIQAAFRTDEIRRTPPTPQDEMRAGMSYFHETIWKGVPKFLRRIDTALKNIGINERLPYNAPLIQFSSWMGGDRDGNPRVTPEVTRDVCLLARMMAANLYFSQIEDLMFELSMWRCSDELRIRADDLHCSSRKAAKHYIEFWKQIPPNEPYRVILGGVRDKLYYTRERTRHLLTTGVSEIPEEATFTNVEEFLEPLELCYRSLCACGDKPIADGSLLDVNVKGGLIWLLQPDPK

SEQ ID NO: 4346 - protein, 467 aa, Arabidopsis thaliana
MATSNLRRHLSASRLRLNRFISTSSSYHSHRRVVVTGLLLSPCLGMVTPLGRGVETTWRRLIDGECGIRGLTLDDLKMKSFDEETKLYTFDQLSSKVAAFVPYGSNPGEFDEALWLNSKAVANFIGYAVCAADEALRDAEWLPTEEEEKERTGVSIGGGIGSICDIVEAAQLICEKRLRRLSPFFIPKILVNMASGHVSMKYGFQGPNHAAVTACATGAHSIGDATRMIQFGDADVMVAGGTESSIDALSVAGFSRSRALSTKFNSSPQEASRPFDCDRDGFVIGEGSGVIVLEEYEHAKRRGAKIYAELCGYGMSGDAHHITQPPEDGKGAVLAMTRALRQSGLCPNQIDYVNAHATSTPIGDAVEARAIKTVFSEHATSGTLAFSSTKGATGHLLGAAGAVEAIFSILAIHHGVAPMTLNVKNPDPIFDKRFMPLTTSKKMLVRTAMSNSFGFGGTNASLLFASI

SEQ ID NO: 4347 - protein, 1193 aa, Dechloromonas aromatica RCB
MAPSSQIPAEALEEALMIAGVGCWSWHTETRQFRISRNFHSLLGYSPDALPETPEAWLALAHADERPQLSTLFARLSANTARGYPPFTLRLKHTNGLWHWFEVRTPCTGTGDGAAPLVITFNEITQQKQAEAALRDSQLRFRALYNTSPLAFILWDRQGHITEWNRRAEQMFGWKAAEVIGKQVHHLLLSTEHHEAFADTVRAVMHGTGTGKFTGPAHGKDGVLLVCNWYNVALRTAQGKLVGILSLLLDITEERLTHQRIEKSEKIYRTLVETSPDAILLLGLDGGLKTANQQAHRLFGLDEMLDLDSTNVRDLLPDNASTEHFLDDPEDFNGFIVTRQLSMQRLDGGRFDADTAFTTIMDSTGQPTGIVLFARDVTGKLQAERELEAHREDLERLVQERTYDLENAHDTLAKIIDGSPVPTLVLDADHKITHWNEACEQIIGVKAGDIVGTSNQWKAFYPSQRPIMADLVLNGEMAQIQALYSDKYRRSRLVQGGYEAEDFFPMFKRWLFFTAAPLYDKQGRIVGAIETLQDITERKQAEIALTEAKHAAEAAAEAKAAFLANMSHEIRTPMNAVIGLAHLLLKGDLSGKQRDYISRIHGSGQMLLGLINDILDFSKIEAGRMVLEETEFALDDVLDNVTSVLLHRAQEKGLIMQYVVEPDVPTNLLGDPLRLAQILINLLGNALKFTASGSITVFVRRLPGNTARAELEIDVQDTGVGMSQEQQQVLFQAFSQADSSITRKYGGTGLGLTICKRLAQLMRGDIWVTSQSGVGSTFTFTVNLGLSTLEANPPLSAMRRALVVDDSPLARAILIRLLEKHGYSAIPAESGAEALGLLADTRTAPFEFVTIDFNMPGMDGLELSEAIRNQISPCPRLVMVTASDTAALGSDERLHCVDAVLSKPVTAAQIGKLVRDRELQNHAKPNAPAPLAGLRILLVDDMPTNLLIAGEMLESFGITVDTADNGVLALKKVIDEGNDYDIVLMDIQMPEMDGLEATRRLRAVERSQSLPIIAMTANAQDSERQRCLAAGMNDFLTKPIDPGLLQDTLFRWRPRQDTTAPTRKQETIPMTPADGLPDLPGINTAEGLRRMMNKPSLYEKVLRDFHARFTDEAKAIRAAISAGDFSTAERRAHSTKGLAGTIGAVGLQNAALNLEQALHNGEAALESIFDQFENELSIVIGSIARAFGIDLAG

SEQ ID NO: 4348 - protein, 405 aa, Trichodesmium erythraeum IMS101
MLNCNIDWFSSQDSCFGEHGFSTKIEIKISNYNLEYTVSSTVKANKNVNTSVKSAVPRSRAVFPFTAIVGQEEMKLALLLNVIDPKIGGVMIMGDRGTGKSTTIRALADLLPEIKIVVDDPFNSDPYDPDLMSDSVRDRLVKQEEIPIFTRKVQMVDLPLGATEDRVCGTIDIEKALSEGVKAFEPGLLAKANRGILYVDEVNLLDDHLVDVLLDSAASGWNTVEREGISIRHPARFVLVGSGNPEEGELRPQLLDRFGMHAEIRTVKDPILRVEIVEQRSAFDQNPQGFLGKYTSQQEELQNKLVDAQQKLTFVEVDHDLRVKISQVCSELDVDGLRGDIVTNRAAKALAAFEGNTEVSLEDVGRVITMCLRHRLRKDPLESIDSGDKVKKVFNRVFGLAEVEQ

SEQ ID NO: 4349 - protein, 488 aa, Methanosarcina acetivorans C2A
MGSDFSVKDAAGKIMQPAAEVQEEVPGKGPIHVRTEKEITRVVIIGGGACGMAAATKIRRQSDFKITVLSSDSHTAYSHCGIPFVLGREIENFEKLIVKPPGFFREKNIDVKLNEKVMSINLAKRVVLTGKGTYPYDKLVIATGSLPFIPRKSKANILPYGIFTLRSLADGKLFGKALETAQTVCIIGGGIIGIECASALTKRGIKTILITRSKDLLSSQFDSDMAAIVRAHLEALGVRVITGEPLFLPENFWKEKTVYIKDRHFPADLMLLATGVKPEVCLASEAGIDTGKAGGIVVNEMLQVKAGGEFLPNVYAGGECAEVTDLLTGESRLSPLGTTARRMADVIGNNITDKYSTFGPLADPWVAVAGDLQFGGVGLTPEQVKRQGIKVVSGFSRGRTRASYYPGRKDIYIKLFFKDGCLAGAQLAGGEGIKERIDALSLAIRKKTTIKDLLNLETCYAPPVSMLVDPLTPAVKAAVRNIRKAKTE

SEQ ID NO: 4350 - protein, 258 aa, Sulfitobacter sp. EE-36
MTNKIKVERHGPVTVLRLDDAETMNALTSAMALELRDLLEREAQTARAIVLAGSPRAFSAGANLKQGTIESGKELDAGAALENAYNPLMMTLRDLPVPVVSAVQGAVAGVGASIALACDVIVAGRDAYFLEAFARIGLIPDGGATWLLTRAVGRVRAMEMMLLAEKIPAPTAFDWGLVTRLVENDAVDATALEIAIKLANGPVRSLALIRKAAWSAADTDFDTALANERKWQKEAGNTPDFKEGVAAFLEKRAPRFNG

SEQ ID NO: 4351 - protein, 516 aa, Gentiana scabra
MPIKMSPIYATLTLHLAAALFLFFHVQKLVHYLHGKATGHRLPPGPTGWPILGALPLLGNMPHVTFANMAKKYGPVMYLKVGSHGLAIASTPDAAKAFLKTLDLNFANRPPNAGATHLAYNAQDMVFAHYGPKWKLLRKLSNLHMLGGKALENWADVRKTELGYMLKAMFESSQNNEPVMISEMLTYAMANMLSQVILSRRVFNKKGAKSNEFKDMVVELMTSAGYFNIGDFIPSIGWMDLQGIEGGMKRLHKKFDVLLTRLLDDHERTSHERKQKPDFLDFVIANGDNSDGERLNTDNIKALLLNLFTAGTDTSSSIIEWALAELLKNRTLLTRAQDEMDWVIGRDRRLLESDIPNLPYLQAICKETFRKHPSTPLNLPRIASEPCEVNGYYIPKGTRLNVNIWAIGRDPSVWGDNPNEFDPERFLYGKNAKIDPRGNDFELIPFGAGRRICAGTRMGILLVEYILGTLVHSFDLKLGLPEEELNMDETFGLALQKAVPLAAMLIPRLPLHVYAP

SEQ ID NO: 4352 - protein, 376 aa, Buchnera aphidicola (Cinara tujafilina)
MNKEYTISVLPGDGIGPEIMLQAYKILDIINKNCMIKINIHQYDIGGIALDKYGTALPQKTLDGCKKSDAILFGSVGGPKWSSLPANIQPERGGLLPLRKFFNFFINIRPAKLYKILGYLSPLKNEIVKNGIDIICVRELIGGIYFGSPKGRKKINSKNFYAFDTETYSTYEIERIATIAFQLASKRKNIVCSIDKANVLESSILWREVVTHVSKKFPNIKLTHLYIDNAIMQIIKKPNTFDVLLCSNLFGDILSDECAILTGSIGMLPSASLNDTLFGLYEPSGGSAPELTGKNIANPIAQILSLAMLFRYSLKLNDISNLIELAVLKTLKDGYRTFDITDNENYITTDMMGTKISKKLLQMIRKNEKNIISKNF

SEQ ID NO: 4353 - protein, 507 aa, Arabidopsis lyrata subsp. petraea
MASSLLTSSGMIHTTGSTVVGRSLLPFQSSLHSLSLTHSYKKPAYFISYCSSVSKNGATNATDLKPVVERWPEYIPNKLPDKNYVRVFDTTLRDGEQAPGGSLTPPQKLEIARQLAKLRVDIMEVGFPGSSEEELETVKTIAKTVGNEVDEETGYVPVICAIARSKQRDIEAAWEAVKYAKRPRILIFTSTSDIHMKYKLKKTKEEVIEMAVSSIRLAKSLGFNDIQLGCEDGGRSDKEFLCKILGEAIKAGVTVVNVADTVGINMPHEYGELVTYLKANTPGIDDIVFSVHCHNDLGLATANSIAGIRAGARQVEVTINGIGERSGNASLEEVVMALKCRGAYVINGVYTRIDTRQIMATSKMVQEYTGLYVQPHKPIVGANCFVHESGIHQDGILKNRSTYEILSPEDIGVVKSQNSGLVLGKLSGRHAVKDRLNELGYELDDEKLNDVFSRFRDLTKHKKRITDADMKALVTSSDEISLEKLNSANGLKSNGYVPVPQVSSNML

SEQ ID NO: 4354 - protein, 351 aa, Rickettsia rickettsii
MTNSIRIGTRKSPLALIHTNLVIQQIKQFFPDINCEIVPIITSGDLIQNKPLYDIGGKALFLKEIEQALLDKKIDLAVHSLKDVPGRIPEPLVIAAVLEREDPRDVFVCLKYKSIEELPQNAVIGSSAVRRKAFIQKIRPDLKVTVFRGNVDSRIKKLMTGEVDATILAYTGLKRLEVFNPEYCHLIEYSQMLPCIGQGVIAVEIRKDDNAMLEICNQINHLPTFELIKPERAFLEYLDANCRTPIAAYSQYLDANPRHLSKLAYREVFEGNTEALATAAYKSNRTDASTGLTYKLPLEVEFGKMSNIQTNFMLGNLDGSKITFHTETTNIKTSTEAGIKAAKMMLEAICK

SEQ ID NO: 4355 - protein, 502 aa, Arabidopsis lyrata subsp. petraea
MASFLLTSSSMITTTCPSMVLRSGLSIGSSLPSLRLTRPYNKPTLFTACYSSESKKVASSADLKPAVERRPEYIPNKLPHKNYVRVLDTTLRDGEQSPGAALTPPQKLEIARQLAKLRVDIMEVGFPVSSEEEFEAIKTIAKTVGNEVDEETGYVPVICGIARCKNRDIEAAWEALKYAKRPRVLLFTSTSDIHMKYKLKKTKEEVIEMAVNSIKYAKSLGFTDIECGCEDGGRTEKDFLCKILGEMIKAGATTVGFADTVGINMPPEFGELVAYVKENTPGADDIVLTIHCHNDLGVATANTISGICAGARQVEVTINGIGERSGNAPLEEVVMALKCRGEYLMNGVYTNIDTRQIMATSKMVQEHTGMYVQPHKPIVGDNCFVHESGIHQDGILKNRSTYEILSPEDVGIVKSENSGIVLGKLSGRHAVRDRLKELGYDISDEKFNDIFSRYRELTKEKKRITDADLKALVVNGDEISSDKLNSKGINNLMSSPQISSVV

SEQ ID NO: 4356 - protein, 185 aa, Triticum aestivum
MAAGLSGSTMASFAVKNPLLAAAARFRTLPSRAGRPLPFSPFTRTARRRGQETVTCFVPQEGQAPGPAPEPVPSLEEEAASAAERRVAERKARKQSERRTYLVAAVMSSLGVTSMAIASVYYRFAWQMEGGEVPMTEMLGTFALSVGAAVGMEFWAQWAHKALWHASLWHMHESHHRPRDGPFEL

SEQ ID NO: 4357 - protein, 898 aa, Streptococcus suis 89/1591
MAIQKLENYNNKEAIREEVTILTSILEKVAAQMMPAETFAKIVELSQLSRQDDYRALIAIISQLNNDELAVISRYFAVLPLLINISEDVDLAYEINHQNNIDQDYLGKISTTIDMVSKQENAAEILEKLNVVPVLTAHPTQVQRQSMLDLTKHIHELLRRYRDVKLGLLNKNKWEDELRCYIEIIMQTDMIREKKLKVTNEITNVMEYYNSSFIKAVTKLQREYKRLAAEKGIVLNNPRPITMGMWIGGDRDGNPFVTAETLKLSALTQCEVIMNYYDDQLYKLYRNFSLSTSIVNVSTAVKMLADLSEDSSIYRENEPYRRAFHYIQMKLANTRDYLVHNKPSDVRYSNVAEFKADLLAIKQSLVENKSMALLKGDFTELLEAVEAFGFYLASIDMRQDSSIHEASVAELLASARIVEDYSSLSEEAKCHVLLKQLETDPRILSATHMPKSEQLEKELAIFAAARELKDKLGEEIIKQHIISHSESVSDLLELAVLLKEVGLVDVDKARVQIVPLFETIEDLDNAPDTMRQYLQLDLAKRWIAGNKYYQEIMLGYSDSNKDGGYLSSGWTLYKAQNELTQIGQDYGVNITFFHGRGGTVGRGGGPSYDAITSQPFGSIKDRLRLTEQGEVIGNKYGNKDAAYYNLEMLVSATLDRMVTQMITDPNEIDGYRETMDEIVSDSYRIYRDLVFNNPHFYDYFFAASPIREVSSLNIGSRPAARKTITEIGGLRAIPWVFSWSQNRVMLPGWYGVGSSFKRFIDKHPDNLSKLQKMYESWPFFRSLLSNVDMVLSKSNMNIAFEYAKMCESEEVRNIFHVILDEWQLTKEIILSIEQNDELLAELPFLKASLDYRMPYFNVLNYIQIELIHRLRRGELSKEQENLIHITINGVATGLRNSG

SEQ ID NO: 4358 - protein, 107 aa, Cyanidium caldarium
MPSPIQVTDFSFEKEVVNSEKLVLVDFWAPWCGPCRMISPVIDELAQEYVEQVKIVKINTDENPSISAEYGIRSIPTLMLFKDGKRVDTVIGAVPKSTLTNALKKYL

SEQ ID NO: 4359 - protein, 503 aa, Arabidopsis lyrata subsp. petraea
MASLLLTSFGMITTTGPTLVVRSVLPIGSSQPSIRLTRPCNKPTLFMSCCSSESKKVVTSATDLKPIVERWPEYLPNKLPDKNYVRVLDTTLREGEQAPGGSLTPPQKLEIARQLAKLRVDIMEVGFPGSSDEEFETVKTIAKTVGNEVDVETGYVPVISTLARCINRDIEAAWKAVKYAKRPRICIFTSTSDIHMNYKLKKTKEEVIEMSLSSIRFAKSLGFHDIQFGCEDGCRSEKEFVCKILGEAIKAGATSVCIADTVGITMPHEFGELVTYVKANTPGIDDVVFSVHCHNDLGLATANTIAAVCAGVRQFEVTVNGIGERSGNAPLEEVVMALKCRGAYLMDGAYTRIDTRQIMATSKMVQEHTGLYVQPHKPIVGDNCFVHESGIHQDGILKNRSTYEILSPEDVGIVKSQISGIVLGKLSGRHAVKGRLKELGYEINDEKFNEIFSRFRDLTKQKKRITDADLKALVVNGDKITSEKSSSKGNNNLMSSPHISSVV

SEQ ID NO: 4360 - protein, 516 aa, Buchnera aphidicola (Cinara cedri)
MNEKIIIFDTTLRDGEQALLTSLTSNEKIQIALALERLGVDVIEVGFPVSSPGDFKSVQMLSKIIKNSKICSLARCLPNDITIAADAMQFSKNFRIHLFLGTSDLHVSSKLKKNFNEIIEMAVASVKQAKKFTNDIEFSCEDAGRTTLQNLYCIIEAVIKAGATTVNIPDTVGYTTPTQFKKIITMLFNHVKNIHQAIISVHCHNDLGMAVANSISAVEAGVRQIEGTMNGLGERAGNAALEEVIMTLNVHKNSLKVSTDINIKEIHRTSKIVSQFCNTPIPLNKAIIGKNVFSHSSGIHQDGVLKNRKNYEIIDPNSIGFTDYCSLNLTSRSGRAAVKHHMKKMGYENSDYNLNELYIDFLKLADKKGRIFDYDLEALAFFKKQQNTEEYYKLEYFDVQSKLSGLSTAYIVLICGSQTNIQKATTYNGPVDAIYQALNKATLYSIVLKKFHLEANGEGKDALGKVNIIVQYKLRNFHGVGLATDIIEASAQAMVNVLNYIWKSQQVNKELERLQK

SEQ ID NO: 4361 - protein, 402 aa, Clostridium tetani E88
MVKMFKFNSIEEAIADIKEGKMVIVVDDEDRENEGDLLMAAEKVTPENINFMIKYGRGLVCMPIIGERLKELNLNQMVDINTDTNGTAFTVSIDFIDTTTGISAYERAHTISKVLDSSVKGEDFKRPGHVFPLEAKEGGVLKRAGHTEASVDLARLAGFYPAGVICEIVGEDGKMARLPQLMEYSKEHNLKIINIADLIAYRRKKETLVKRVVEAKMPTRWGEFKIIGYENKINGEHHVALVMGDIENGEDVLVRMHSECLTGDALGSVRCDCGYQYEAAMKAISEERRGVLVYMRQEGRGIGLINKLKAYNLQDKGMDTVEANIALGFPPDLRDYGIGAQILNDLGIKKINLMTNNPKKITSLSGYGIKIVKRVPLEIHENEESEFYLKTKKEKMGHLLHF

SEQ ID NO: 4362 - protein, 546 aa, Arabidopsis thaliana
MASRIINHSKKLKHVSALLRRDHAVAVRCFSNSTHPSLVGREDIFKARLNYSSVERISKCGTGNVTMLSGISTTSTKLSSPMAGPKLFKEFIRYLPDAISERIFIQFRYLVLYYLPPHQEIGMPSLSPTMTEGNIARWLKKEGDKVAPGEVLCEVETDKATVEMECMEEGFLAKIVKEEGAKEIQVGEVIAITVEDEDDIQKFKDYTPSSDTGPAAPEAKPAPSLPKEEKVEKPASAPEAKISKPSSAPSEDRIFASPLARKLAEDNNVPLSSIKGTGPEGRIVKADVEDFLASGSKETTAKPSKQVDSKVPALDYVDIPHTQIRKVTASRLAFSKQTIPHYYLTVDTCVDKMMGLRSQLNSFQEASGGKRISVNDLVIKAAALALRKVPQCNSSWTDEYIRQFKNVNINVAVQTENGLYVPVVKDADKKGLSTIGEEVRFLAQKAKENSLKPEDYEGGTFTVSNLGGPFGIKQFCAVINPPQAAILAIGSAEKRVVPGTGPDQYNVASYMSVTLSCDHRVIDGAIGAEWLKAFKGYIETPESMLL

SEQ ID NO: 4363 - protein, 507 aa, Arabidopsis cebennensis
MASSLLTSSGMIHTTGSTVVGRSVLPFQSSLHSLPLTHLYKKPAYFISCCSSVSKIGATNATDLKPVVERWPEYIPNKLPDNNYVRVFDTTLRDGEQAPGGSLTPPQKLEIARQLAKLRVDIMEVGFPGSSEEELETVKTIAKTVGNEVDEDTGYVPVICAIARSKHRDIEAAWEAVKYAKRPRILIFTSTSDIHMKYKLKKTKEEVIEMAVSSIRLAKSLGFNDIQLGCEDAGRSDKEFLCKILGEAIKAGVMVVNVADTVGINMPHEYGELVTYLKANTPGIDDIVFSVHCHNDLGLATANSIAGIRAGARQVEVTINGIGERSGNASLEEVVMALKCRGAYVINGVYTRIDTRQIMATSKMVQEYTGLYVQPHKPIVGANCFVHESGIHQDGILKNRSTYEILSPDDIGIVKSQNSGLVLGKLSGRHAVKDRLNELGYELDDEKLNDVFSRFRDLTKHKKRITDADMKALVTSSDEISLEKLNGANSIKSNVYVPVPQVSSNML

SEQ ID NO: 4364 - protein, 424 aa, Frankia sp. CcI3
MKPNRRVVITGIGVRAPGGGGAKNFWNLLTAGRTATRRISFFDAGPFRSQVAGEVDFDAQAEGLTPRQIRRMDRAAQFAVVCTRDAVEDSGLELDRVEPHRIGVSLGSAVAAATSLEAEYLVLFDSGRTREMDTRHLTPHMFDHMVPSVMAAEVAWTVGAEGPVTMVSDGCTSGLDAIGHALHLIEDGVVDVMAAGATDTPISPIVLACFDAIKATTSYNDEPATASRPFDRSRNGFVLAEGCAMFVLEEYEHARRRNAEIYAEVTGYATRLNAFHMTGLKPDGREMAEAIRTALAQSRLDPSDVDYVNAHGSGTRQNDLHETAAVKASLGEHARRVPISSIKSMVGHSLGAIGSIEVAACALALRYSVIPPTANLRLPDPQCDLDYVPRVAREATLDTVLTIGSGFGGFQSAMVLRQPGGRAA

SEQ ID NO: 4365 - protein, 367 aa, Buchnera aphidicola (Cinara cedri)
MKKKKEYRIAVLPGDGIGPEVMQEAYKILNVINKKFDFNIYTNEYDIGGIAIDKYGAPLPKKTLNGCIESHAILFGSIGGKEWTHLPADEQPERGGLLPLRKFFNLFVNLRPIKLHFSLKKLSPLKKEIIQDGFDILCVRELIGGIYFGLPKGKNTFDKKNISAFDTEIYSTKEIEKIADIAFQLSLKRKKKVFSIDKANVLESSMLWREVVIQVSKRYPNVELIHLYIDNAAMQLIKNPNQFDVILCSNLFGDILSDECAALTGSLGMLPSASLNESFFGLFEPAGGSAPDLKGKNIANPIAQILSLALLFKYSLQLEKISHLIELSVLKTLEKGYRTLDISNGKKYITTDQMGNYIAKTLSELIN

SEQ ID NO: 4366 - protein, 373 aa, Cryptococcus neoformans var. neoformans JEC21
MADKTFKITVLPGDGIGPEVVAEAVRVLETIVNHSDLKLDLKSYDFGGAAIDNHGVPLPDETLKACKEADAVLMGSVGGPKWGVGPVRPEQGILKLRKELGLYANIRPANFASESLLKRSPLKEDTARGTDIIVLRELIGGIYFGERQETNDEGVAWDQCIYSKPEIERITRVAAQIALAAEPPLPITSVDKANVLATSRLWRKTVSELMAKEYPQLKLEHQLVDSAAMIMIANPRKLNGVLLTENMFGDILSDESSVIPGSLGLLPSASLAGAPDAKSTTMGLYEPIHGSAPDIAGQGIANPIGTILSAAMMLRYSLGKGREAALIEQAVQKVLDSAESGGFDYRTKDLGGQRSTKEVGDKVVEVLKGLLGA

SEQ ID NO: 4367 - protein, 380 aa, Arabidopsis thaliana
MMMSDLPLDLVEEILSRVSATSLKRLRSTCKQWNTLFKKRSFSQKHFHIAPKESMVLMLKEYRVCSMNINLNVSPPSVEFQGTLGIKDDSHSNLGQVEIVEVYHCDGLLLCATRDNRLVVWNPCLGETRWIQLKDECRRYSTFALGYENNKFCRRNYKILRYWGWFHDHIPDDGGRFRFEIYDFRSDSWKVLDDVPDDRFPPVSVVSLKGNTYWFGSNKKDFLRSFDFTTERFNHIGLPPSRDHGFMALSVVGEEQLSVLQEIETSKMEIFVTNKVGTEEAALLWSKSFIVDLPIGGHCSEVFASLLINEEKKVALCCNLDFETDGNLIFTIGEDNKYYSEIPYATNKPWWLCRFSEKFTKKWWWFPFIYNYVPSLVQIL

SEQ ID NO: 4368 - protein, 390 aa, Robiginitalea biformata HTCC2501
MSKDKVQIFDTTLRDGEQVPGCKLDTEQKLIIAERLDALGVDVIEAGFPISSPGDFKSVSEISRLVKNATVCGLTRAVKKDIEVAAEAIKDAKKPRIHTGIGTSESHIKYKFNSTQDEVLRRAVEAVKYAKTFVEDVEFYAEDAGRTENEFLARICEAVIQAGATVLNIPDTTGYCLPEEYGAKMKYLRENVRDIDKAILSCHCHNDLGLATANSIAGVINGARQIECTINGIGERAGNTSLEEVVMILRQHPHLNLDTGINSKLLYDTSQMVSRKMGMPVQPNKAIVGSNAFAHSSGIHQDGVIKKRETYEIIDPVDVGVTESSIVLTARSGRAALAYRAKKVGYELTKLQLDKVYDQFLVFADRKKEIEDADIHSIVEASGVNIESIA

SEQ ID NO: 4369 - protein, 95 aa, Methanococcoides burtonii DSM 6242
MAKKYTKKGRVSRSAGRFGTRYGRRDRKLVADLEEKMHAAHKCASCARLTVKRVGTGIWKCKKCGYTFAGGTYIPATTVGKTVLRTVKKATEQVE

SEQ ID NO: 4370 - protein, 372 aa, Robiginitalea biformata HTCC2501
MKLKIALLPGDGIGPEVAAQAVACLQAVEEAFGHQFEFTKAPVGAIAIDQTGNPLPDDTLELCKQSDAVLFGAIGDPKYDNDPESKVRPEQGLLRLRKELGLFSNIRPVKVFPTLIDKSPLRKERIENTDFVIYRELTGGIYFGEKFLSEDGNTASDLCIYSEEEISRIAHLAFKAAKGRRKKLTLVDKANVLESSRLWRRVVTRIGESYPDVELHYLFVDNAAMQMILNPSQFDVILTENMFGDILSDEGSVIGGSIGLLPSASVGESSAMFEPIHGSYPQATGKNIANPIASILSAAMLLDHFGLDEEAAAVVRSVNKALKKGMVTPDLDPKSKHGTDDVGQFIAGHISDSDDFKGLNQENIGLGKSTII

SEQ ID NO: 4371 - protein, 470 aa, Acidithiobacillus caldus
MTRLLIIGGSDAGISAALRAHELDPQTEVSVLLADEYPNYSICGLPFYLSGETPDHRQLAHRTAFDGIEILTNHRAVSVHPAAKTVDVVRGANGSVKTLRYDHLVIATGAVPVRPQGLPGLDLPGVYLLHTMGDGFAVHSRLMGGETRSAIIIGAGYIGVEMADALRHRGIDVTLVSHTDPVFPSVDPSFGRLIGEELSRHGVRVVVGCTVERIEAADNRRGLTVSGSGGFTASADLVLVATGARPDTTLAAAAGIALGPSGAIRVTQRMETTLPGIWAAGDCAETWHRILQRPAYLPLGTTAHKQGRVAGENAVGGERLFAGSVGTQTVKVFELAIARTGLREAEARTADFDPVTIETETWDHKAYYPGAQKLRVRVTGDRRTGRLLGAQILGPWRSEVSKRIDVFATALFHGMGVEDLNDLDLSYTPPFGSPWDAVQMGAQAWTSVMKNEVASCSPPIDPQILGRSTP

SEQ ID NO: 4372 - protein, 208 aa, Arabidopsis thaliana
MDQNVPISKKLWNIVRFLLYMIRKGVSKNKLIADFNATLKRGKNLMFHQRRRVHAGSTASAALNATSATASSRQEYEFSCSNTPNYSFPFSNMAFMRKKSHNNLFTCGQTPQTLDDDVAAARAVLELLNGVGDKGNVTPADLTVALSPYFPGFGQTPLVRPLRVTDSPFPLTPENGDVANGHVDKAADDFIKKFYKNLNQQKKMIEFS

SEQ ID NO: 4373 - protein, 335 aa, Synechococcus sp. WH 5701
MATENGGPVDIIGNCHNGPAGGSPTAARTSLRLIYSILEKPRRWDELSGNGLSNIARFYSWEAHAKAYLSMLQPVVSKPKPLVQPPATHQFSSYRNRALFTAIDNTLLGDTEALEQFAKVVRTHRRQFLFGIATGRRLDSVLTILKRYNIPTPDVLITSLGTEIYYTSELFADIAWSHHIDHSWTPQVLRRVLESLPGLSPQPKNEQSRFKVSYYYDAELAPPLEDIHAFLRQQELSVNATLSFGQYLDIVPARASKGQALRYVANQYNIPLERTLVTGGSGGDADMLRGNTLGVVVSNRHQEELSNLSENEQIYFANGAHAWGILEAIRHYGFF

SEQ ID NO: 4374 - protein, 279 aa, Synechococcus sp. WH 5701
MTRLLLCTDLDRTLLPNGESPESAGARDRFAALVARPEVTLAYVSGRHLALVEQAIEQFGIPRPDWVIGDVGSRMYQWQPPGYWLESTAWQVEIATDWPGLSSGAISEAFTTIEDLTLQGQDRQSTYKLSYFLPLGVDLGSLRRVMEARLRELQARSSWIYSVDEQAQVGLLDILPERATKLHAVEFLMQQQGFLPSSTVFAGDSGNDLPILVSPVPSVLVANAHPDVLRDASAGSSQRGTDQSLYVAKGDFLGMNGNYSAGILEGLVHFHPETKGWIL

SEQ ID NO: 4375 - protein, 453 aa, Triticum aestivum
MFGQTHQTSHQPLQHYCSAGTSSASPRQGRMDRLDGSARLMIVSDLDQTMVDHCDPENSALLRFEALWESEYSQDSLLVFSTGRTPVSYKGLRERKPLLTPDITIMSVGTVIAYGQEMTPDVGWEEFLNNKWDRDIVVQETAKFPHLKPQPERNQGPHKVSFFVDKQGAHEVINYLPQKLEQLGLDVKIIYSSGEALDVLPRGAGKGQALIYLLEKFSLSGKPPSNVPVCGDSGNDADLFSVPSAYGVMVSNAQEELLQWYEENGKDNLKLLHATERCASGIMQAIGHFKLGPSFSVRDLEFPYLKVDTIKPADVVVKFYVLYEKWRRGEVQKSPSVVQYLKSITLQNGTLIHPCGMERSLHASIDALSSCYGDKQGQKFRAWVDRLFTSPISTSNWLVRFDNWEMEGDVQYCCRTTLLLNTKPETPEGLELTHIHKTWLEGYSAGNDHTFIL

SEQ ID NO: 4376 - protein, 334 aa, Phaeodactylum tricornutum
MPVSLGINGFGRIGRLVMRAALEHPDATVVAVNDPFLTPEYAAYQFKYDSVHGTYSEDVSFEEGYLVVGDKKIRFFSERNPEEIGWGSVGAEIVCESTGVFTTIDKAQAHINGGAEKVVISAPSADAPMYVMGVNHTTYSGATVFSNASCTTNCLAPLAKVLHEEFGIVEGLMTTIHAGTATQLVVDGPAKRGKDWRAGRSSLANLIPASTGAAKAVGKVIPELNGKLTGMAVRVPTADVSMVDLTIRTEKAVSAAELKAALKKASEGPMKGILGYTEDAVVSQDFVHDPRSSIVDASAGIALNDNFHKVIAWYDNEWGYSNRLVDLAIYTSGK

SEQ ID NO: 4377 - protein, 428 aa, Arabidopsis thaliana
MTMTTTISHLPTELLDEIISRVPLKSTRAVRLTCKNWDSLFKNRSFMKEEAAAKEGESRMIVLMDKNLFAMSIFFNGIDIDPSAEQRGKLTCLYDDSEQVKISQVFHCEGLLLCVLEDDKCSLVVWNPYWGQTRWIEPRYFSRIQNCYGRYMYVYALGYNNKSRSHKILRFIDGAFDFPFWYEIYDFDSDLWTTLDVTPQWFINFPPRGCYNRGVTLKGNTYWCAIRRKSNTNWFVDLDHIICFDFTSERFGPLMPLPFVRYTSGSLVTLSCVREEKLAVLFCNNATVEVWITTKIETDKISWSKFLTVNMYVDLLEGSFFIDEVKKVAMIFDIPMNRETVYIVGEAGNVKELHLGQPVDVDKHFSPLFVCSYVPSLVQIKQPPGCQRKQESSLEKRRCDDENISRLIAHEETYVVYGRYVPSRKKPR

SEQ ID NO: 4378 - protein, 168 aa, Zea mays
MDSILSSSPLPGGEEEEGFTLNPSDPGVSGVMQFLRGSGGGGGGGGFPGVAWEVLRRHFSKKRSVDVRRINPKVPKEEAVAISGRLLQILSDHGPLTVGNTWNHAKDAGIAGLNSKTHMKILLKWMTGRNVVKLTCVHVGNAKKFLYSPSTESSSSAGASPSSTSASQ

SEQ ID NO: 4379 - protein, 339 aa, Odontella sinensis
MTVSLGINGFGRIGRLVMRAALENPDTTVVAVNDPFMNIDYAAYQIKHDSVHGMYPGSVEVDGDSLVFDGTTKVKFFAERDPASIPWGASGAEYVCESTGVFTTIEKASLHLKGGAKKVIISAPSANAPMFVMGVNHKSYDGSADVVSNASCTTNCLAPLAKVLHENFGIEEGLMTTIHAATATQLVVDGPSKGGKDWRGGRSAMANMIPASTGAAKAVGKVLPELNGKLTGMAVRVPTPDVSMVDLTVRTTKACTGAEIDAALKAASESEDLKGILGYTDLPVVSQDFVHDKRSSIVDSTACIHLSDTFHKVISWYDNEWGYSNRLVDLCLFMKTVDN

SEQ ID NO: 4380 - protein, 466 aa, Sinorhizobium meliloti
MDTRPEPFEPPAPVPRTGIPSRLEIIRTVLRNPLELWGEPSYTLPWIETKFINQRTLIVNDPGLIRYILVENAANYEMSNVRRLILRPILRDGLLTAEGEVWKRSRKAMAPVFTPRHAQGFAGQMLRVCEAFVDRYAGASSEPFVTNVAVDMTELTFEILAETLFSGEIAVEKQGFAANVEELLHRMGRVDPMDLLVAPSWVPRLTRIGGRKVLDRFRGVVSETMSLRRRRTTEAPGDVPNDFLTLLLQLEGPDGLSTSEIEDNILTFIGAGHETTARALAWCFYCVANTPAYRETMEQEIDSVLASGADPVDWLGRMPHVLAAFEEALRLYPPAPSINRAAIEEDAWTSPEGERVPIRKGISVLVMPWTLHRHALYWQKPRAFMPERFLPENRDKINRFQYLPFGAGPRVCIGATFALQEAVIALAVLMHRFRFDLTDETHPWPVQRLTTQPRGGLPMKVSARVK

SEQ ID NO: 4381 - protein, 221 aa, Triticum aestivum
GDIPRAAFVQKSSLVPVRNSRDIVDPRVRVNDAMSRCAAPAAPATASVSQKLARHRDILHEFTQEFRRTRGNLSSMREHADLLSSVRGDITESKATGGMSPRVHLLRERASIHGSVTQIDEVIGQAQSTRAALSNQRALFGDVQGKVKQLGEKFPGVRGLLGAIKRKKSKDTFISSAEIAACTIFLIIYWLSKDRSVVGKAREREFLSHPQITDQCTQMAQ

SEQ ID NO: 4382 - protein, 615 aa, Odontella sinensis
MISGTARALASSASNASKRAFHASARSDARKFFVGGNWKCNGSVQQVNDLVSMLNQSTLSTDTEVVVCPSQVYVQGVSEKLRKDIGVGAQDCWVQGNGAFTGETSADMLADMGVGWVVIGHSERRGKGEADEEVARKAKYALDKGLKVIACCGEPLESREAGTTNDFVFPQIKAYADVFSKEDWANVVIAYEPIWAIGTGLTATPEQAQDTHADIRQYLGEVAGADVAESTRILYGGSATGATAPGLSAKPDIDGFLVGGASLKPEFADIVNCQGGETSLKPVNIGINGFGRIGRLVMRAAQNDPMVNIVSVNDPFIPVNYMEYMLQYDTVHGEYPGTVKQTGDDTLSIDGKDVKVFGEMDPSKIQWGSVGADYVIESTGVFTSTEKASMHMKGGAKKVVISAPSGDAPMFVMGVNQEKYESSMDVVSNASCTTNCLAPLAKVINDEFGLKEGLMTTVHAVTATQQTVDGPSQKDWRGGRAACYNIIPSSTGAAKAVGKVIPELNGKLTGMSFRVPTANVSVVDLTARLDKGASYETICAAIKEASEGKMKGILGYQDKDIVSSDFISDRHSSIFDEKAGIALTDDFVKLVSWYDNECGYSNRVLDLIKHMDVSK

SEQ ID NO: 4383 - protein, 391 aa, Oryza sativa
MATAAAASLQYALHGAASASAKPRSAAPGRSVRVVAARRSVRARGGAVVARAAVTASADATAESKSGGHEVLLFEALREALIEEMKEDPTVCVFGEDVGHYGGSYKVTKGLAEMFGDLRVLDTPIAENSFAGMGVGAAMKGLRPIVEGMNMGFLLLAYNQISNNCGMLHYTSGGQFKIPIVIRGPGGVGRQLGAEHSQRLESYFQSIPGLQMVACSTPYNAKGLMKAAIRSENPVVLFEHVLLYNLKEKIPDEEYICCLEEAEMVRPGEHVTILTYSRMRYHVMQAAKTLVNKGYDPEVIDIRSLKPFDLHTIGNSIKKTHRVLIVEECMRTGGIGASLRSAIIDNFWDYLDAPIMCLSSQDVPTPYAATLEDATVVQPAQIVAAVEQICQ

SEQ ID NO: 4384 - protein, 112 aa, Populus deltoides x Populus maximowiczii
TFVGKKWFVTYHAYAMGRMESIWGKNCRDFVPERWLENGIYRQESPFKFPVFHAGPRMCLGKDMAYIQMKSIAASVIERFEIDVQNKEKCPDHLLSLTLRMKGGLQVKVKER

SEQ ID NO: 4385 - protein, 357 aa, Prochlorococcus marinus subsp. pastoris str. CCMP1986
MKRYKVVLLSGDGIGPEISEISITILKKLSKKYGFNLDIKEEYFGGIAYEKHNDPAPKETLDQCKASDAVLLACVGDVKYDTLPRELRPESGLLKLREALNLFANIRPVKIRKSLLDSSSFKKEVIENVDLIVVRELIGGIYFGQPRGEITQTKIKKAFNTMVYDSNEIERITEVAIKIANQRSKKICSVDKSNVLEVSQLWRDTVSLVASKENDLALSNMYVDNAAMQLVKDPGQFDVILTSNLFGDILSDLAAMITGSIGMLPSASLSNSGPGVFEPVHGSAPDIAGKNIANPIAMALSTSMMLKIGLNEIEAADDIEIAIDNVLSKGYRTSDLDNGNCQVLSCSEIGEKIIQEI

SEQ ID NO: 4386 - protein, 307 aa, Campylobacter jejuni RM1221
MKLIIATRKSQLALWQSEHVAQILKNTHQIEVLLEGFKTKGDVLLDSPLAKIGGKGLFTKELEESMLRKEAHLAVHSLKDVPSFFPQGLVLAAVSKREQSNDAMLSQNYKDFLSLPKGAKIGTTSLRRKMQLLLLRPDLDIISLRGNVNSRIEKLKNNDFDAIILAMAGIKRLNLDKQVNFVYEFSKDELIPAASQGALGIESINDEKILELLKCLNDENALIETSIEREFIATLEGGCQVPIGINAELLGDEICVRAVLGLPDGSEILKDKRMIKKNDFKGFGESLAKEFIAKGAKELLKKAESMI

SEQ ID NO: 4387 - protein, 243 aa, Azotobacter vinelandii
IPPIPPVDFAKYGEIEEVPMTRLMQIGATNLHRSWLNVPHVTQFESADITELEAFRVAQKAVAEKAGVKLTVLPLLLKACAYLLKELPDFNSSLAPSGQALIRKKYVHIGFAVDTPDGLLVPVIRNVDQKSLLQLAAEAAELAEKARSKKLGADAMQGACFTISSLGHIGGTAFTPIVNAPEVAILGVSKASMQPVWDGKAFQPRLMLPLSLSYDCRVINGAAAARFTKRLGDLLADIRAILL

SEQ ID NO: 4388 - protein, 243 aa, Azotobacter vinelandii
IPPIPPVDFAKYGEIEEVPMTRLMQIGATNLHRSWLNVPHVTQFESADITELEAFRVAQKAVAEKAGVKLTVLPLLLKACAYLLKELPDFNSSLAPSGQALIRKKYVHIGFAVDTPDGLLVPVIRNVDQKSLLQLAAEAAELAEKARSKKLGADAMQGACFTISSLGHIGGTAFTPIVNAPEVAILGVSKASMQPVWDGKAFQPRLMLPLSLSYDHRVIDGAAAARFTKRLGDLLADIRAILL

SEQ ID NO: 4389 - protein, 434 aa, Coccidioides immitis RS
MEDYDPSVTEEQEEEISEEKVINEEYKTWKKNAPFLYDMILSTALEWPTLTTQWLPDKQEVPDKPYSTHRLLIGTHTSNDAQNYLQIAHVQLPNPKAPDVEDYDDDRGEIGGYGSSGSQRTPMEVKFHIVQKIDHKGEVNKARYQPQNPNVIATMCTDGRVMIWDRSKHPSLPTGTVNPELELLGHTKEGFGLSWSPHSAGHLATGSEDKTVRLWDLTQYTKGNKALKPVRTYTHHSSIVNDVQYHPLHSSLIGTVSDDITLQILDIRESDTGRSAASAKGQHKDAINSIAFNPAAETVLATGSADKSVGLWDLRNLKSKLHALECHQDSVTSLAWHPSEEAVLASSSYDRRIMFWDLSRAGEEQTQEDSQDGPPELLFVHGGHTNRISDFSWNLNDPWVLCSAAEDNLLQVWKVADAIVGKDMEDVPTEELET

SEQ ID NO: 4390 - protein, 364 aa, Glycine max
MATTRSAPLLKHLLTRLNPSRSVTYMPRPGDGTPRGVTLIPGDGIGPLVTGAVEQVMEAMHAPLYFEKYEVHGDMKAVPAEVLESIRKNKVCLKGGLATPMGGGVNSLNVQLRKELDLYASLVNCFNLPGLPTRHDNVDIVVIRENTEGEYSGLEHEVVPGVVESLKVITKFCSERIAKYAFEYAYLNNRKKVTAVHKANIMKLADGLFLESCREVATRYPGIKYNEIIVDNCCMQLVSKPEQFDVMVTPNLYGNLVANTAAGIAGGTGVMPGGNVGADHAVFEQGASAGNVGNDKVVEQQKANPVALLLSSAMMLRHLQFPAFADRLETAVKKVILEGKYRTKDLGGTSTTQEVVDAVIDALD

SEQ ID NO: 4391 - protein, 423 aa, Brucella melitensis 16M
MARIVMKFGGTSVADLERIYNVARHVKREVEAGNQVAVVVSAMSGKTNELVDWVQNMPKVCGASSPFYDAREYDTIVASGEQVTSGLLAIALQSIGVDARSWQGWQIPIQTDNAHGAARIQEIDGSQIIRRMEMGQVAVVAGFQGIGPDNRVATLGRGGSDTSAVAVAAAVKADRCDIYTDVDGVYTTDPRIEPKARRLPKISFEEMLEMASLGAKVLQVRSVELAMVHKVRTFVRSSFTDPDAPGMGDPINPPGTLICDEEEIVEQQVVTGIAFAKDEAQISLRRVADRPGVSAAIFGPLAEEHINVDMIVQNVSEDGSKTDMTFTIPTGDIDKALKVLDKAKSEISFDNIQSETGLAKISVIGIGMRSHAGVAATAFKALAEKGINIRAITTSEIKISILIDGPYAELAVRTLHAVYGLDK

SEQ ID NO: 4392 - protein, 177 aa, Plantago major
MASSMLSTSSTAVAGRAQATMVAPYAGLKSTSVFPATRKTGNAKLARNAGKVRCMQVWPPLGKKKYETLSYLPDLTVEQLAKEIDYLLRSKWIPCLEFELEHGFVYRENNRSPGYYDGRYWTMWKLPMFGCTDASQVIAELEECKKEYPNAWVRIIGFDNVRQVQCISFIAAKPPGL

SEQ ID NO: 4393 - protein, 296 aa, Triticum aestivum
  misc_feature (25)..(25): Xaa can be any naturally occurring amino acid
  misc_feature (86)..(86): Xaa can be any naturally occurring amino acid
  misc_feature (123)..(123): Xaa can be any naturally occurring amino acid
  misc_feature (147)..(147): Xaa can be any naturally occurring amino acid
  misc_feature (160)..(160): Xaa can be any naturally occurring amino acid
  misc_feature (174)..(174): Xaa can be any naturally occurring amino acid
  misc_feature (179)..(180): Xaa can be any naturally occurring amino acid
  misc_feature (196)..(196): Xaa can be any naturally occurring amino acid
  misc_feature (254)..(254): Xaa can be any naturally occurring amino acid
  misc_feature (267)..(267): Xaa can be any naturally occurring amino acid
  misc_feature (275)..(275): Xaa can be any naturally occurring amino acid
MGNASARAVENGHAAAPMEQVAVAXSAGAPRRPRRRPDAVMRELPPPVPYVFAPQVPVAPMQIPNEFSPAFNHSWMNGSDESTNNXPREVEIPTLITWSQGGNEVFVEGSWDNWTSRKVLEKXSGKDHAVLLVLPSGIYHYKDDCLXGAKYFPELTQSTXDKKGKVATPFKSNXIPKIXXKTWREFDAPPSPEHSXYNMDFPTDEELTKQDPPALPPQLLMTALGGTDHFDEHALKPKPQHVVLNHLFIREVGXRASLLALGVIHRXQSKYVNFXVYKPLVRKVTDLLMEDGQAAD

SEQ ID NO: 4394 - protein, 112 aa, Dechloromonas aromatica RCB
MKFVTAIIKPFKLDEVREALSAIGVQGITVTEVKGFGRQKGHTELYRGAEYVVDFLPKVKIEAAVRDDQLDQVIEAIEKSASTGKIGDGKIFVFDVEQVIRIRTGETGTDAL

SEQ ID NO: 4395 - protein, 243 aa, Azotobacter vinelandii
IPPIPPVDFAKYGEIEEVPMTRLMQIGATNLHRSWLNVPHVTQFESADITELEAFRVAQKAVAEKAGVKLTVLPLLLKACAYLLKELPDFNSSLAPSGQALIRKKYVHIGFAVDTPDGLLVPVIRNVDQKSLLQLAAEAAELAEKARSKKLGADAMQGACFTIASLGHIGGTAFTPIVNAPEVAILGVSKASMQPVWDGKAFQPRLMLPLSLSYDHRVINGAAAARFTKRLGDLLADIRAILL

SEQ ID NO: 4396 - protein, 422 aa, Schizosaccharomyces pombe
MDRRHRVYRVFNQEMYVEPNFKVVKELGQGAYGIVCAARNVASKDQEAVAIKKITNVFSKSILTKRALREIKLLIHFRNHRNITCIYDLDIINPYNFNEVYIYEELMEADLNAIIKSGQPLTDAHFQSFIYQILCGLKYIHSANVIHRDLKPGNLLVNADCELKICDFGLARGCSENPEENPGFMTEYVATRWYRAPEIMLSFSSYHKGIDVWSVGCILAELLGGTPLFKGKDFVHQLNLILHQLGTPDEETLSHISSSRAQEYVRSLPKQRPIPFETNFPKANPLALDLLAKLLAFDPNRRISVDDALEHPYLAVWHDPSDEPVCDSVFDFSFEYIEDANELRRVILDEVLNFRQKVRRRSHPTNPTVNIPQPAQTVPSNDNGSFNVSSSSSSQTSNKKRHDHSYNETAAIDHKSDDNRHN

SEQ ID NO: 4397 - protein, 502 aa, Arabidopsis cebennensis
MASFLLTSSSMITTTCPSMVLRSGLPIGSSLPSLRLTRPYNKATLFTACYSSESKKVASSADLKPAVERRPEYIPNKLPHKNYVRVLDTTLRDGEQSPGAALTPPQKLEIARQLAKLRVDIMEVGFPVSSEEEFEAIKTIAKTVGNEVDEETGYVPVICGIARCKNRDIEAAWEALKYAKRPRVILFTSTSDIHMKYKLKKTKEEVIEMAVNSVKYAKSLGFKDIEFGCEDGGRTEKDFLCKILGESIKAGATTVGFADTVGINMPPEFGELVAYVKENTPGADDIVFTIHCHNDLGVATANTISGICAGARQVEVTINGIGERSGNAPLEEVVMALKCRGEYLMDGVYTKIDTRQIMATSKMVQEHTGMYVQPHKPIVGDNCFVHESGIHQDGILKNRSTYEILSPEDVGIVKSENSGIIFGKLSGRHAVKDRLKELGYEISDEKFNDIFSRYRELTKEKKRITDDDLKALVVNGDEISSDKLNSKGINNLTSSPQISAVV

SEQ ID NO: 4398 - protein, 575 aa, Vibrio fischeri ES114
MDVDKTIELLNRKIKREKAARKAAEGLLERKSHELYMAKQLVEDTLFTVQEKAEKDVVLLEFKSYLDSILLDYNQRLLKEQPTQMLLQSLINDLGCLNSIQSVCLSFSSNANETLTQLYAGKHQEFETLSQASYPVQWNESLTQITVFFELENIESGAIQLIFNTSPNTMWRDTIEKQFSLISEMINAAFERKYLLDKTLKEKKRAESSERATRDFVAMINHELRTPLNGLLGSAELMEDTEITDYQKKLLETIHQSGQMLRIIINDLLDFSKMSAGMLELKMANFKPCILVKTIEQIFTPQMAEKCLRFDIHIADNLPQTLMGDIDRVQQILVNLIGNAFKFTKSGHISLKVGWQKNALVLIVSDTGCGIPQDKQKLLFEPFTQVDNSSQRQFEGTGLGLSICKLLVDAMSGELSFKSELGEGSEFQVKLPLEVVCEQRTHSSEDNQLSFSIENLSILAVEDIKMNQVILNMMLKKLGITPDFANDGMEALTYLQEHDVDIVLMDCRMPILDGFETTKRLRKQGYKKPILALTAGTTSMEVEACIEAGMDDTLSKPYKAIELEAMLKLWGSKYV

SEQ ID NO: 4399 - protein, 504 aa, Arabidopsis cebennensis
MALSLLTSSGMIHTTGSTVVGRSVLPFQSSLHSLPLTHLYKKPAYFISCCSSETKKVVTSATDLKPIVERWPEYKPNKLPDKNYVRVLDTTLREGEQAPGGSLTPPQKLEIARQLAKLRVDIMEVGFPGSSEEEFETVKTIAKTVGNEVDVETGYVPVISTLARCINRDIEAAWKAVKYAKRPRICIFTSISDIHMNYKLKKTKEEVIEMSLSSIRFAKSLGFHDIQIGCEDGCRAEKEFVCKILGEAIKAGATSVCIADTVGITMPHEFGELVTYVKANTPGIDDVVFSVHCHNDLGLATANTIAAVCAGVRQFEVTVNGIGERSGNAPLEEVVMALKCRGAYLMDGAYTRIDTRQIMATSKMVQEHTGLYVQPHKPIVGDNCFVHESGIHQDGILKNRSTYEILSPEDVGIVKSQNSGIVLGKLSGRHAVKGRLKELGYEINDEKFNEIFSRFRDLTKQKKRITDADLKALMVNGDKITSEKSSSKGINNNLMSSPHISSVV

SEQ ID NO: 4400 - protein, 504 aa, Boechera divaricarpa
MASSLLTSSGISPTTGSTVVVGSVLPFRTSMLSLRLTRPYKKPALFISCCSSESRKTATNATDLKPVVERWPEYIPNKLPDKNYVRVFDTTLRDGEQAPGGSLTPPQKLEIARQLAKLRVDIMEVGFPGSSEEELETVKTIAKTVGNEVDEETGYVPAICAIARSKHSDIEAAWEAVKYAKRPRILIFTSTSDIHMKYKLKKTKEEVIEMAASSVRFAKSLGFNDIQFGCEDGGRSDKEFLCKILGESIKAGATVVNVADTVGINMPHEYGELVTYVKANTPGIDDIVFSVHCHNDLGLATANSIAGIRAGARQVEVTINGIGERSGNASLEEVVMALKCRGAYVLDGVYTGIDTREIMATSKMVQEYTGLYVQPHKPIVGANCFVHESGIHQDGILKNRSTYEILSPEDVGVVKSQNSGIVLGKLSGRHAMKGRLKELGYELDDEKLNDVFSRFRDLTKHKKRITDADLKALVTSSDEISFEKLNRANGKMSNGYIPVPQVSL

SEQ ID NO: 4401 - protein, 257 aa, Bordetella bronchiseptica RB50
MARADDIEVRVADQVAWVTINRPQRMNALARATFAQLVEVSLELDQDPGVKVVVYTGAGERAFSAGVDLKELDAAGRMTHPMGGPARNLNEVVLEMATPTIAAINGVAAGGGCELALACDIRVAASTARIGLPEARVGMGANFGSVVLPQLIPRGVALELLYTGELIDMALAHRLGLVNHVFEPAELMAQTAGLARRIADNAPLSVQRMKAMAFKSIGLPTAAALRLSVGPDPYNSEDRLEGARAFVEKRKPRFQGR

SEQ ID NO: 4402 - protein, 75 aa, Vaccinium myrtillus
  misc_feature (4)..(4): Xaa can be any naturally occurring amino acid
KDSXNEVIKPTINGVLSIIKSCTKAKTVKRLVFTSSAGTVNVQEHQQPVFDENNWSDLDFIYKIKMTGWMYFGSF

SEQ ID NO: 4403 - protein, 503 aa, Boechera divaricarpa
MASLLHTSSSMITTISPTMVARSVLPIGSSLPSIRLTRPFNKPTLFISCSSSESKKAATSGTDLKPIVERWPEYIPNKLPHKNYVRILDTTLRDGEQSPGAALTPPQKLEIARQLAKLRVDIMEVGFPVSSEEEFEAIKTIAKTVGNEVDEETGYVPVICAIARCKQSDIEAVWEALKYAKKQRVIIFTSTSDIHMKYKLKKTQEEVIEMAVSSIKYAKSLGFTDIQLGCEDGGRSEKEFLCKILGESIKAGATTVGFADTVGINMPQEFGELMAYVKENTPGFNDIVFAIHCHNDLGVATANTIAGICAGARQVEVTINGIGERSGNAPLEEVVMALKCRGEYLMDGVYTKIDTRQIMATSKMVQEHTGMYVQPHKPIVGDNCFVHESGIHQDGILKNRSTYEILSPEDVGIVKSQNSGIVLGKLSGRHAVKERLKELGYEINDENFNDIFSRFRDLTKHKKRITDADLKALVVSGDEISLEKLNSKGINKLMSSPQIPSVV

SEQ ID NO: 4404 - protein, 576 aa, Cryptococcus neoformans var. neoformans JEC21
MTTASPFLFQSSLHDTGLIHEMLSNPLKFGAPVNKKSLGFEAGLFPSTFDLSWPEAIATAKRAAGLHNPSMACYANATLQVLLHTPPVLRIALTHDEGSCSQIKKKNFCMLCSLKHMAEGSHWSGRKAYAPGIHRSLSQIKKGFSKNRQEDTHEFFRFVTDALQNTALAKLPKCVLPYNHRKFAHTTSRDTPEKIKHTSWVYRIWGGRVRSRVVCSRCNNPSDTFDSFLDLSLDVNKQGKKSVLGMLAGFTKEDRLEGDNKYHCERCKRKANATKSFKIDQAPPILTLHLKRFSVNYNPYSGRARAEKFNQPIKFEQTLDIAPYMVDPASPGTKYRLFGVTCHRGTELRFGHYTSYVRGPSGQWFHADDDEVSPVQLEQVLNDKTAYLLSYIRVDNGNEGLCESPAVRDRVKGLVNGSAKGMRDDESESQSEAESSSHKSSSPIKRKSTYDPEDPPRMKIGAFVNNKAYAPSTNKSESPFSDGENKMPPELPKFGYKPKPTIRAPAPVEASSFYTSPVARPSNSLAGMSKKEKKKFKHKEKGKPRHSATPMPFAQGRVGNGRNRQPGVLSRMKGRA

SEQ ID NO: 4405 - protein, 662 aa, Oryza sativa
MANSIAIFRRSTTYGPLQKAALTTICCMLAVAAGPNPQECLPFSCGDLGNISYPFRLQGDSRQCVSTPRPWYNLSCSRGKATIHINTRKYYVISINYTRENFLVVDATMQLDDDTNGTSCPLPRSDHLPYMIYWSDLSSIDSYGFKDLVTASDTWACFVNCSRAITNDSRYKPVTCLSGNNSFPYVYVYIYDDYGCCPVKRLQPSCRYLGMIPFDYVYQPGSYDDDIMSNVLQSASYRDIVGFIRKGFRVNFPLYNNDQRAPTIVERCLNNSMRFVLAPLVVLTFLAHKYWKTRIAIDAVEKFLRMQEMLGPKRYAYTDIIAITSHFRDKLGQGGYGSVYKGVLLPGDIHVAIKMLDGKSDCNGEDFISEVATIGRIHHINVVRLVGFCSEEMRRALVYEYMPRGSLNRYIFSSERSFSWDKLNEIALGIARGINYLHQGCEMQILHFDIKPDNILLDDNFIPKVADFGLAKLYPREKSFVSDRALRGTFGYMAPEMACRSFGVISSKSDVYSFGMLLLEMAGGRKNADPNANSNSSRAYYPAWVYDQLIVDQQVDEISSAIDMHEKERKLWLVVFWCIQMKSYDRPTMSEVIEMLEGDVDALQVPPRPFFCDGDSTPPPPVPVMDSICLYSSELTAISEEEDVDGITQLDSSCLLGYERSI

SEQ ID NO: 4406 - protein, 563 aa, Rhodopseudomonas palustris CGA009
MADSSSEDDRPDASQARPVDRHDQTFPVLTATEIDRIRRFGEVRSYADGARLFETGQPGPGMFVVLSGHVAVTQRDGLGHITPVAEQGPGQFLAEIGQLSGRVALVDGIAEGEVECLLIPPDRLRGLLVAEADLGERIMRALILRRVNLIQGGVGGPVLIGSANASDAVRLMGFLTRNGWPHHLLDPATDHDAAELVARYSPTPRDLPLVVTPDGTVLRNPSESELALAMRMNGHIDRSKLYDVAIVGSGPAGLSTAVYAASEGLTVAVCDQRAFGGQAGASARIENYLGFPTGISGMALTARAYNQAQKFGADIMIPTEVKSLVCGCNDGTFKLTLDDGGELRARAIVVASGARYRRPQIERLAEFEGRGVYYWASPIEARLCKQQEVILVGGGNSAGQAAVFLSGHAARVHMVVRGGGLAASMSRYLIERIESTPNIELVFNTEVVALDGSADSGLQQATLRSRLSGEDRIMAVSNLFLFVGADPATAWLDGCGVTLDRAGFVVTGAPSADEGQRPAQALETSVPGVFAVGDVRSGSVKRVGGAIGEGAQVVAALHGYLAG

SEQ ID NO: 4407 - protein, 481 aa, Boechera divaricarpa
MASVLLTSSGMITTTGPTVVVRSVLPIKSSLPSIHLTRPCNKPTLFISCCSSESKKAATSATDLKPIVERWPEYIPNKLPDKNYVRVLDTTLREGEQAPGGSLTPPQKLEIARQLAKLRVDIMEVGFPGSSEEEFETVKVIAKTVGNEVDVETGYVPVISTLARSKNRDIEAAWKAVKYAKRPRICIFTSTSDIHMKYKLKKTQEEVIEMSLSGIRFAKSLGFHDIQFGCEDGCRSEKDFVCKILGEAIKAGATSVCIADTVGITMPQEFGELVTYVKANTPGINDVVFSVHCHNDLGLATANTIAAVCAGVRQFEVTINGIGERSGNAPLEEVVMALKCRGEYLMDGVYTRIDTRQIMATSKMVQEYTGLYVQPHKPIVGDNCFVHESGIHQDGILKNRSTYEILSPEDVGIVKSQNSGIVLGKLSGRHAVKERLKELGYEINDEKLKDIFSQFRDLTKQKKRIADADLKALVVNGVERN

SEQ ID NO: 4408 - protein, 70 aa, Prunus persica
FTVIGVYLEDKAVPLLAVKWKGKTAQELTESVEFLREIVTGPFEKFTQVTTILPLTGQQYSEKVTENCVA

SEQ ID NO: 4409 - protein, 498 aa, Oryza sativa (japonica cultivar-group)
MATCAADLAPLLGPVAANATDYLCNRFADTTSAVDATYLLFSAYLVFAMQLGFAMLCAGSVRAKNTMNIMLTNVLDAAAGALFYYLFGFAFAFGTPSNGFIGKQFFGLKHMPQTGFDYDFFLFQWAFAIAAAGITSGSIAERTQFVAYLIYSAFLTGFVYPVVSHWIWSADGWASASRTSGPLLFGSGVIDFAGSGVVHMVGGVAGLWGALIEGPRIGRFDHAGRSVALKGHSASLVVLGTFLLWFGWYGFNPGSFTTILKTYGPAGGINGQWSGVGRTAVTTTLAGSVAALTTLFGKRLQTGHWNVVDVCNGLLGGFAAITAGCSVVDPWAAIICGFVSAWVLIGLNALAARLKFDDPLEAAQLHGGCGAWGILFTALFARQKYVEEIYGAGRPYGLFMGGGGKLLAAHVIQILVIFGWVSCTMGPLFYGLKKLGLLRISAEDETSGMDLTRHGGFAYVYHDEDEHDKSGVGGFMLRSAQTRVEPAAAAASNSNNQV

SEQ ID NO: 4410 - protein, 349 aa, Pseudendoclonium akinetum
MSDTVIVESRPVFPFTAIVGQDEMKLSLILNVIDPKIGGVLIMGDRGTGKSTTVRALVDLLPEINVVANDPFNSDPLDPELMSEQVRQKFQKGETLEVKKKKITMIDLPLGATEDRVCGTIDIEKALTEGVKAFEPGLLASANRGILYVDEVNLLDDHLVDVLLDSAASGWNTVEREGISISHPARFILVGSGNPEEGELRPQLLDRFGMHAEIGTVREPDLRVQIVEQRAAFDEAPLEFRTNYENSQKALSQKLVEARELLKKAELDYDLRVKISQICSELNVDGLRGDIVTNRAAKALAVFEGRTSVTSNDIFRVIPLCLRHRLRKDPLETIDSGNKVREIFQKVFE

SEQ ID NO: 4411 - protein, 115 aa, Arabidopsis thaliana
MAFALRFFTCLVLTVCIVASVDAAISCGTVAGSLAPCATYLSKGGLVPPSCCAGVKTLNSMAKTTPDRQQACRCIQSTAKSISGLNPSLASGLPGKCGVSIPYPISMSTNCNNIK

SEQ ID NO: 4412 - protein, 375 aa, Streptomyces coelicolor A3(2)
MPDVLDASPYDALLLLSFGGPEGPDDVVPFLENVTRGRGIPKERLKEVGQHYFLFGGVSPINDQNRALLDALRKDFAEHGLDLPVYWGNRNWAPYLTDTLREMVGDGRRRILVLATSAYASYSGCRQYRENLADALAALESEGLELPKIDKLRHYFNHPGFVEPMVDGVVRSLAELPAEVRDGAHIAFCTHSIPTSAADGSGPVEEHGDGGAYVRQHLDVARLIADAVRERTGVDHPWQLVYQSRSGAPHIPWLEPDICDHLEERQAAGVPAVVMAPIGFVSDHMEVLYDLDTEATAKAEELGLPVRRSATVGADPRFAAAVRDLVLERAGDERGQEVTPCALGTLGASHNLCPVGCCPARAPRPAAAGADSPYA

SEQ ID NO: 4413 - protein, 527 aa, Triticum aestivum
MALEAAFHYLQLAGIHGTSTPAVLLTILLLLIIRLAWVRTTTASTRFGKQQQLPPSPPGKLPIIGHLHLLGSQTHISIRDLDAKHGRNGLLLLRIGAVPTLFVSSPSAAEAVLRTHDQIFASRPPSMAADIIRYGPTDIAFAPYGEYWRQARKLLTTHMLSAKVVHSFRHGRQEEVRLVINKIHEAATRGTAVDMSELLSGYTNDVVCRAVLGESHRKEGRNRLFSELTEINVSLLGGFSLENYIPPNMVMADVLLRLVSVKARRLNKRWDELFNEIIEEHLHPSKPSSGEQQAVDFIDLLLSLKEEYGLTTDNIKAILVDMFEAGIETSYLTLEYGMAELMNNRHILKKLQEEVRSQGKKLDMITEEDLGSMAYLRATIKETLRLHPPAPFLLPHFSTADCKIDGYLIPSNTRVLVNAWALGRDPSSWERPEDFLPERFLQDQDGDVDTQMRGKDLRFLPFGFGRRICPGMNFGFATMEVMLANLMYHFDWDVPNMVGTGAGVDMAESFGLTLRRKEKLQLVPRIP

SEQ ID NO: 4414 - protein, 614 aa, Phaeodactylum tricornutum
MLASSRTAAASVQRMSSRAFHASSLTEARKFFVGGNWKCNGSVQQAADLVSMLNQSSLSQDTEVVICPSQVHLQSVQSTIRGDVAVGAQDVWTQGNGAFTGETSANMLKDLGVKWAVIGHSERRGKGEPDAQVAAKAKYALDQGLSVIACCGEPLEAREAGTTNEYVFPQIKAYVDALEPKDWDRVVIAYEPIWAIGTGLTATPEQAQDTHEAIRQYLGQVAGAEVAANTRILYGGSASAKTAPGLSAKPDIDGFLVGGASLKPEFADIVNCQGDTKSLKPVNIGINGFGRIGRLVMRAAQNDPMINIVAVNDPFIPTDYMEYMFQFDSTHGLYTGTVNMVDESNIAVDGKPIRVFNERDPSKIQWGSAGADYVVESTGVFTTTEKASAHMVGGAKKVVISAPSGDAPMFVMGVNQEKYESSMDVVSNASCTTNCLAPLAKVINDEFGLKEGLMTTVHAVTATQQTVDGPSQKDWRGGRAACYNIIPSSTGAAKAVGKVIPALNGKLTGMSFRVPTIDVSVVDLTCRLDKGAPYATICAAIKAASEGPMKGILGYQNKDVVSSDFISDSHSSIFDEKAGIALTDDFVKLVSWYDNEAGYSMRVLDLIKHMEKSK

SEQ ID NO: 4415 - protein, 516 aa, Methanocaldococcus jannaschii DSM 2661
MMCGINGIIRFGKEVIKEEINKMNKAIKHRGPDDEGIFIYNFKNYSIGLGHVRLAILDLSEKGHQPMGYNVDEDKIIYRDDELDRADIIIVYNGEIYNYLELKEKFNLETETGTDTEVILKLYNKLGFDCVKEFNGMWAFCIFDKKKGLIFCSRDRLGVKPFYYYWDGNEFIFSSELKGILAVKEINKKENINKDAVELYFALGFIPSPYSIYKNTFKLEARQNLIFDLDKREIRKYYYWELPDYKPIYDKKKLIEEGKKLLYDAVKIRMRSDVPVGAFLSGGLDSSTVVGVMREFTDLSKLHTFSIGFEGKYDETPYIKIVVDYFKTQHHHYYFKERDFEELIDKYSWIYDEPFGDYSGFPTYKVSEMARKFVTVVLSGDGGDEVFGGYMTHLNGYRMDFIRKLPKFLRVVGSKLPVKKDLNGIANLYLLKEAFRLSLINPEEFYAESIKEDAIRPEIYKKWTIEKLRYCLNKGDNKLGEALRIFDLLFNTLCDNFLVKVDRASMLTLWKLEVHF

SEQ ID NO: 4416 - protein, 544 aa, Arabidopsis thaliana
MASLQLYGVKTPGLALSSKRLEFASKGACFSVTLPSSSAVFRDVEHSCRNIGLRVSCEALRVDLLQRKEPETCDSSGTGKELTCVMKFGGSSVGSAERMKEVANLIFSFPDERPVIVLSAMGKTINKLLKAGEKAVTCGVTNVESIEELSFIKELHLRTAHELGVETTVIEKHLEGLHQLLKGISMMKELTLRTRDYLVSFGECMSTRLFSAYLNKIGHKARQYDAFEIGFITTDDFTNADILEATYPAVSKTLVGDWSKENAVPVVTGYLGKGWRSCAITTLGRGGSDLTATTIGKALGLREIQVWKDVDGVLTCDPNIYPGAQSVPYLTFDEAAELAYFGAQVLHPLSMRPARDGDIPVRVKNSYNPTAPGTVITRSRDMSKAVLTSIVLKRNVTMLDIASTRMLGQYGFLAKVFTTFEDLGISVDVVATSEVSISLTLDPAKLWGRELIQRVNELDNLVEELEKIAVVKLLQRRSIISLIGNVQKSSLILEKVFQVFRSNGVNVQMISQGASKVNISLIVNDEEAEQCVRALHSAFFETDP

SEQ ID NO: 4417 - protein, 181 aa, Brassica napus
MTMMMMSLPKMKVSSLQPHLHLSSRRLLPAAKVSPSSSISTRPSCRVQCRRLTVESNRTKLEKTQPLGLEKKQLGQALVTGVSVGLMVALVMGMDGEKAMALGPEGPLMEEFWDNVRRYGLYALTVSTGALSAVFEPIFELLKNPISAVLIVIILGGSFYIVSQVVSAMVGVNEFAYDYGY

SEQ ID NO: 4418 - protein, 80 aa, Populus x canadensis
QAQNNGWAGIVVNGCIRDVDEINGCDIGVRALASHPMKANKKGIGEKHVPITIGGTRISDGEWLYADADGILISRTELAV

SEQ ID NO: 4419 - protein, 174 aa, Plantago major
MASAMMSSAATVTAQTSMVGQFSGLKFGSTFPIAKKTGRVSSPSSGLKVRCMQVWPPTGKKKYETLSYLPDLTVEQLAKEIDYLLRSKWIPCLEFELEHGFVYRENARSPGYYDGRYWTMWKLPMFGCTDASQVIAELEECKKEYPNAWVRIIGFDNVRQVQCISFIASKPPGL

SEQ ID NO: 4420 - protein, 446 aa, Oryza sativa
MGCLRRALRLGLRRGLSSSSAAPAAAEQAELPPPRPSAGRRVVVTGLGAVTPLGRGVGPTWDRLVAGGCAVRALAAEDLRLPGGADAGRTLEQLPSRVAAPVPRGKGDAEFDEEAWTKDNKSISGFIAYALCAADEALRDANWLPSEDEKKERTRLRRLSPYFIPKILINMASGHVSMRYGFQGPNHAAVTACATGAHSIGDATRMIQSRDADVMVAGGTESSIDALSIAGFSRLRALSTKYNSLPQAASRPFDCGRDGFVIGEGCGVMVLEALDHAKERGAKIYAEVRGYGMSGDAHHITQPQNDGRGATLAMKRALDQSGLQADQIDYLNAHATSTPLGDAVEANAIKSVFGDHATSGGLALSSTKGAIGHLLGAAGSVEAIFTVLAIHHGIAPPTLNLEKPDTLFEGAFMPLSSPKKMPIRAAISNSFGFGGTNTSLLFSCPP

SEQ ID NO: 4421 - protein, 464 aa, Listeria innocua
MLYSKENKESYLEPVFGSSAEDRDIPKYTLAKEPLEPRIAYRLVKDELLDEGSARQNLATFCQTYMEDEATKLMSETLEKNAIDKSEYPRTAELENRCVNIIADLWHAPKDQKFMGTSTIGSSEACMLGGMAMKFAWRKRAEKLGLDIYAQKPNLVISSGYQVCWEKFCVYWDIDMRVVPMDKDHMQLNTDQVLDYVDEYTIGVVGILGITYTGRYDDIYALNEKLEEYNSKTDYKVYIHVDAASGGFFTPFVEPDIIWDFRLKNVISINTSGHKYGLVYPGIGWVLWKDESYLPEELIFKVSYLGGEMPTMQINFSRSASHIIGQYYNFLRYGFEGYRTIHQKTSDVAQYLAHAVEQTGYFDIYNDGSHLPIVCYKLKDDANVKWTLYDLADRLQMRGWQVPAYPLPKNLENIIIQRYVCRADLGFNMAEEFIQDFQASIQELNNAHILFHDTQQSGVHGFTH

SEQ ID NO: 4422 - protein, 556 aa, Legionella pneumophila str. Lens
MAIKVTKRGMDLLRDPIVNKGTAFSLQERDEFALHGLIPTTVETLEQQVIRCLDAYSAKENPLEKHIYLRALQDRNEVLFYRFIIDNLVDILPIIYTPVVGQACEMFSHIYRQPRGVFLSYPERDKLDSIIQNIASTRSIKVIVVTDGERILGLGDQGAGGLGIPIGKLSLYTSCGGIHPSNTLPIILDVGTNNKERLDDPEYIGWRHARISGKEYDDFVDQFVQSIKRHMPHVLLQFEDFAQQHAYPLLERYKNQLCTFNDDIQGTASVAVAAILAATRVTNTPLKEHRVALLGAGSAGCGISEQLVHAMINQGLSEEEARSRFYLVDRYGLLHDEMTDLLPFQKGFVRSSTSLQNWKLEKKGEITLTDVINNAQPTILLGVSGQPNQFKEAMIKTMLSYCERPIIFPLSNPTSRAEAIPQDLLNWTAGKALIATGSPFEPVVINGHKIEIAQCNNSYIFPGVGLGVVAGQAKRVTDLMMMAAAVALSELAPAIRTGEGRLLPELNSIREVSQHIARAVILQGIKEGHIEPMNNNKIDESIKRTMWTPQYEPYVL

SEQ ID NO: 4423 - protein, 159 aa, Plantago major
MSDEEHQFEAQADAGASKTFPQQAGTIRKNGYINIKNRPCKVVEVSTSKTGKHGHAKCHFVAIDIFNGKKLEDIVPSSHNCDVPHVNRVDYQLIDISEDGFVSLLTDNGSTKDDLRLPTDDALATQIKEGFAEGKDLVVSVMSAMGEEQINAIKDVGPK

SEQ ID NO: 4424 - protein, 257 aa, Pseudomonas sp. Y2
MPHTLSVDAPEQGVRLITLQRPEALNALNTQLLDELAAELALAEQDAETRAVVLTGSRKAFAAGADIKEMAERDLVGILEDPRVAHWQRIAAFSKPLIAAVNGFCLGGGCELAMHADILIAGEDARFGQPEINLGIMPGAGGTQRLLRAVGKSLAMQMVLSGQAIDARHAQRAGLVSEVTLPELTIERALAIARVIAQKAPLAVRLAKEALLKAEDTDLASGLRFERHAFTVLAGTADRAEGIRAFQEKRRPEFTGR

SEQ ID NO: 4425 - protein, 369 aa, Sulfitobacter sp. EE-36
MSKNLSQRLADYAAVAADLGVDAVALVPGPNFSRAVGHRFMSNERPFVLVIPADKPAAVLLPNLELGSWDMVGFDGAVFDWRDQTGYADAFAALTQHLGITSLAVEGQVMRVFVHHAFKDAQPDLTITDAEREISALRMIKTPEDIAALREAIGISERALQRTLDSVKLGQSEKQIEQTLVQALFAEGADDLSFGPIVAAADGSARPHAHAREDYAVKAGDALLLDFGARKNGFAADITRTVFLDHVTDEGRDVYDTVLRANMAGLAVTRAGVTAHDIDDAVISVLEASPYGDRIRTKTGHGLGREVHEAPYIMRGNHMALPAGTVYTNEPGLYEIGNFGVRIEDDVLITDDGYETLTNFPKELMVIKC

SEQ ID NO: 4426 - protein, 462 aa, Glycine max
MNSIAFKSLVGLRQSSPEAPHFAAQPRPATPHRKFRVLAGKFSPKLNGRNLRVAVVGGGPAGGAAAETLAKGGVETFLIERKMDNCKPCGGAIPLCMVGEFDLPLDIIDRRVTKMKMISPSNVAVDIGRTLKPHEYIGMVRREVLDAYLRDRAKEYGANVINGLFLKMDIPKDKNSPYVLHYSSYDGKTNGAGEKRTLEVDAVIGADGANSRVAKSIDAGDYEYAIAFQERVKIPDDKMVYYENLAEMYVGDDVSPDFYGWVFPKCDHVAVGTGTVTHKGDIKKFQLATRKRAEDKILGGKIIRVEAHPIPEHPRPRRLLGRVALVGDAAGYVTKCSGEGIYFAAKSGRMCAEAIVEGSENGKRMVEEGDLRKYLEKWDKTYWPTYKVLDILQKVFYRSNPAREAFVEMCADEYVQKMTFDSYLYKTVVPGNPLEDLKLAINTIGSLVRANAIRREMNKLNV

SEQ ID NO: 4427 - protein, 507 aa, Arabidopsis lyrata subsp. lyrata
MASSLLTSSGMIHTTGSTVVGRSLLPFQSSLHSLSLTHSYKKPAYFISCCSSVSKNGATNATDLKPVVDRWPEYIPNKLPDKNYVRVFDTTLRDGEQAPGGSLTPPQKLEIARQLAKLRVDIMEVGFPGSSEEELETVKTIAKTVGNEVDEETGYVPVICAIARSKHRDIEAAWEAVKYAKRPRILIFTSTSDIHMKYKLKKTKEEVIEMAVSSIRLAKSLGFNDIQLGCEDGGRSDKEFLCKILGEAIKAGVTVVNVADTVGINMPHEYGELVTYLKANTPGIDDIVFSVHCHNDLGLATANSIAGIRAGARQVEVTINGIGERSGNASLEEVVMALKCRGAYVINGVYTRIDTRQIMATSKMVQEYTGLYVQPHKPIVGTNCFVHESGIHQDGILKNRSTYEILSPEDIGVVKSQNSGLVLGKLSGRHAVKDRLNELGYELDDEKLNDVFSRFRDLTKHKKRITDADMKALVTSSDEISLEKLNSANGLKSNGYVPVPQVSSNML

SEQ ID NO: 4428 - protein, 502 aa, Arabidopsis lyrata subsp. lyrata
MASFLLTSSSMITTTCPSMVLRSGLSIGSSLPSLRLTRPYNKPTLFTACYSSESKKVASSADLKPAVERRPEYIPNKLPHKNYVRVLDTTLRDGEQSPGAALIPPQKLEIARQLAKLRVDIMEVGFPVSSEEEFEAIKTIAKTVGNEVDEETGYVPVICGIARCKNRDIEAAWEALKYAKRPRVLLFTSTSDIHMKYKLKKTKEEVIEMAVNSIKYAKSLGFTDIECGCEDGGRTEKDFLCKILGEMIKAGATTVGFADTVGINMPPEFGELVAYVKENTPGADDIVLAIHCHNDLGVATANTISGICAGARQVEVTINGIGERSGNAPLEEVVMALKCRGEYLMNGVYTNIDTRQIMATSKMVQEHTGMYVQPHKPIVGDNCFVHESGIHQDGILKNRSTYEILSPEDVGIVKSENSGIVLGKLSGRHAVRDRLKELGYDISDEKFNDIFSRYRELTKEKKRITDADLKALVVNGDEISSDKLNSKGINNLMSSPQISSVV

SEQ ID NO: 4429 - protein, 503 aa, Arabidopsis lyrata subsp. lyrata
MASLLLTSFGMITTTGPTLVVRSVLPIGSSQPSIRLTRPCNKPTLFMSCCSSESKKVVTSATDLKPIVERWPEYLPNKLPDKNYVRVLDTTLREGEQAPGGSLTPPQKLEIARQLAKLRVDIMEVGFPGSSDEEFETVKTIAKTVGNEVDVETGYVPVISTLARCINRDIEAAWKAVKYAKRPRICIFTSTSDIHMNYKLKKTKEEVIEMSLSSIRFAKSLGFHDIQFGCEDGCRSEKEFVCKILGEAIKAGATSVCIADTVGITMPHEFGELVTYVKANTPGIDDVVFSVHCHNDLGLATANTIAAVCAGVRQFEVTVNGIGERSGNAPLEEVVMALKCRGAYLMDGAYTRIDTRQIMATSKMVQEHTGLYVQPHKPIVGDNCFVHESGIHQDGILKNRSTYEILSPEDVGIVKSQNSGIVLGKLSCSHAVKGRLKELGYEINDEKFNEIFSRFRDLTKLKKRITDADLKALVVNGDKITSEKSSSKGNNNLMSSPHISSVV

SEQ ID NO: 4430 - protein, 318 aa, Bordetella bronchiseptica RB50
MLNLCVRSITYEAEGIRSFELVHPLGKDLPPFEAGAHIDVSIPGGFTRQYSLCDPSWQRKHYRIAVLEDRGGRGGSVALHTALRAGDMIEVSEPRNLFPLDSGAGHKVLLAGGIGITPVLAMAEALQRSGHSFELHYCTRSPERTAFRERLQTLAAQDKAFFHHDMGDPARGLDIAALLARPEPGSQLYFCGPPGFMKAVQAASAHWPQGSVHYEYFGVNPALTEKLAGTGQAAGEVRLAKSDKILAVRPGQTLLQAIREAGVACESSCESGVCGTCKVRYFSGQPEHNDYVLSDEERTEFVLVCCAGAGPQALLLDL

SEQ ID NO: 4431 - protein, 482 aa, Salmonella enterica subsp. enterica serovar Typhi str. CT18
MQLNDSTLFRQQAFIDGDWRDARGGDVIPVSNPANGKPLGNVPKMGAEETRDAINAANRALPAWRALTAKERANILRRWFNLMMEHQDDLARLMTLEQGKPLAEAKGEISYAASFIEWFAEEGKRIYGDTIPGHQTDKRLLVIKQPIGVTAAITPWNFPSAMITRKAGPALAAGCTMVLKPASQTPFSALALAELAQRAGILAGVFNVVTGSAGDIGGELTSNPLVRKLSFTGSTEIGRQLMEQCAKDIKKVSLELGGNAPFIVFDDADLDKAVEGALASKFRNAGQTCVCANRLYVQDGVYDRFAEKLNQAVNKLAVGDGLQADVAIGPLIDEKAVAKVQEHIADALEKGARVITGGEAHKLGGNFFQPTILADVPDNAKVAKEETFGPLAPLFRFSDEADVIRQANDTEFGLAAYFYARDLSRVFRVGEALEYGIVGINTGIISNEVAPFGGIKASGLGREGSKYGIEDYLEIKYMCIGL

SEQ ID NO: 4432 - protein, 484 aa, Bordetella bronchiseptica RB50
MENLGYPARLELYVAGQWRGVEGRRTQVVVNPSTQQPLGELPLASVEDIDDALAAADQAFGDWARTTAWERADILQRAAALIEARRDRLAVVLTLENGKPLADSHGELDRVVETILWCAEEGKRTYGRVLPARAQRLSQSSLKRPVGPVAAFVPWNFPAVLAARKLAAAMAAGCTVVLKPAEETPAICIELVRAFVDAGTPAGVVNLLYGVPAQVSERLIASPIIRKVSFTGSVAVGRLLASMAAGHLKPATMELGGHAPVVVFDDVDADRVAKMCVGFKYRNAGQVCLSPSRFYVHERIADRFAESFVRHAGLLRVGDGMEEGVQMGPLNNVRRLQAAERLVEQAVGAGASLALGGRRIGQRGYFYPPTVLEGVPDAADILAEEPFCPVAPIMRFGSMDEVIGRANHPSLGLAAYAFTNRMATSAEFAERIEAGWIGINNFVPALADAPIGGMKDSGLGYEGGPEGLDAYLHARFVSQLNVEV

SEQ ID NO: 4433 - protein, 121 aa, Zea mays
  misc_feature (80)..(80): Xaa can be any naturally occurring amino acid
MARGQCAISGAVVAAVLLLATAATTSEADITCGQLSSAIAPCLSYAHGTRSGPSGSCCSDVTNLKSAASTADDRRASCNXLKNTARHVSSLNRHNAVSIPSKCSSSIPYTISTFTDCSKVN

SEQ ID NO: 4434 - protein, 305 aa, Desulfovibrio desulfuricans G20
METRQVDVLILGGGVAGMTAAVYAARAGLRVTLLEENACGGLVNWTRVVENMPSYISIPGMELADRMAEQVAALGVDVEEAACIEEISLAAGDKTVVADDVRYEARAVIAATGRRPVLLDCAGDCCQVHYCAICDGSAYKGRHVLVVGGGNSGFDEALALLDTGVARVTLIEAQDRFFAAAAAQRALAAREGAVMYTSTRVTQLHGTDALESVTLTRADGSEQQLPCDGIFVFMGQEPSTQLFRGQLELDAQGYIVTDGLMATSVPGVFAAGDVRPKRYRQITTALSDGTVAALEAERYIRRTAG

SEQ ID NO: 4435 - protein, 466 aa, Mesembryanthemum crystallinum
MASSMAFKPFTGLRQSTLTTPETTTTTPITFTKLPSSKTAIRAAITSPKLTGRNLRVAVIGGGPAGGSAAETLAKNGIETFLIERKLDNCKPCGGAIPLCMVGEFDLPLDIIDRRVTKMKMISPSNVAVDIGRTLKPHEYIGMVRREVLDEYLRERAAGFGATVINGLFLKMDLPEGKDGSYKLHYTGYDAKSGGAGERRMLEVDAVIGADGANSRVAKAIGAGDYEYAIAFQERIKIPDAKMQYYEDLAEMYVGDDVSPDFYGWVFPKCDHVAVGTGTVTHKSDIKKFQLATRTRAMDKIQGGKIIRVEAHPIPEHPRPKRVLDRVALVGDAAGYVTKCSGEGIYFAAKSGRMCAEAIVEGSANGKRMVDESDLRKYLEKWDKKYWPTYKVLDILQKVFYRSNPAREAFVEMCADEYVQKMTFDSYLYKTVVPGNPLDDLKLAVRTVGSLVRAYGLRREMEKIEA

SEQ ID NO: 4436 - protein, 104 aa, Colwellia psychrerythraea 34H
MKQLTSADSIDDLLSQHQYSLLYFTASWCGPCKSMSPIVEDVSGLMNGRFNTIKIDIDNMANVAADYGIRSVPTLMLVKNNEIIDQRVGGLPPQQMMQWLDKLA

SEQ ID NO: 4437 - protein, 490 aa, Oryza sativa
MALKSPVDFAGSITSGQKDPCCFGVPGCNPRCVRYNKKSRTCRLVTRAISVDRPQLDFSNSDWKKQFQEDFDRRFSLPHLKDVIDVEPRPTTFSLKSRTPLENVNGSMQGSWNGYVNDDDRALLKVIKFASPTSAGADCIDPDCSWVEQWVHRAGPRKQIYFEPQYVKAGIVTCGGLCPGLNDVIRQIVLTLEKYGVKNIVGIQHGFRGFFEDHLAEVPARRLDMLFVLGGNGTHAGANLIHEECRKRKLKVSIVGVPKTIDNDILLMDKTFGFDTAVEAAQRAINSAYIEAHSAFHGIGLVKLMGRSSGFITMHASLSSGQVDICLIPEVPFTLDGPNGVLQHLEHLIETKGFALICVAEGAGQEHLQQSNATDASGNMILGDIGVHLHQKIKAHFKEIGVHSDVKYIDPTYMVRAVRANASDAILCTVLGQNAVHGAFAGFSGITTGICNTHNVYLPISEVIKSTRFVDPNSRMWHRCLTSTGQPDFH

SEQ ID NO: 4438 - protein, 490 aa, Arabidopsis thaliana
MPYVSSIIEDRKLVICLDCTDLIVIYLNRRFIFPALGGLLFGYDIGATSGATLSLQSPALSGTTWFNFSPVQLGLVVSGSLYGALLGSISVYGVADFLGRRRELIIAAVLYLLGSLITGCAPDLNILLVGRLLYGFGIGLAMHGAPLYIAETCPSQIRGTLISLKELFIVLGILLGFSVGSFQIDVVGGWRYMYGFGTPVALLMGLGMWSLPASPRWLLLRAVQGKGQLQEYKEKAMLALSKLRGRPPGDKISEKLVDDAYLSVKTAYEDEKSGGNFLEVFQGPNLKALTIGGGLVLFQQITGQPSVLYYAGSILQTAGFSAAADATRVSVIIGVFKLLMTWVAVAKVDDLGRRPLLIGGVSGIALSLFLLSAYYKFLGGFPLVAVGALLLYVGCYQREQISFGPISWLMVSEIFPLRTRGRGISLAVLTNFGSNAIVTFAFSPLKEFLGAENLFLLFGGIALVSLLFVILVVPETKGLSLEEIESKILK

SEQ ID NO: 4439 - protein, 150 aa, Triticum aestivum
AYLGDTIEQVCTKKQAGTGPEFPGYGGGNQEAKDRPGRSEVANDAVVEIREDGTVPPVPASAPPPMPDTQREARMSIADVLQASPEDERTVGREGGLLQAGSSRRCHGEHSKDGGGRAPPDAPTKKLPPAGRSCFSGKGGGRGKDSGPPV

SEQ ID NO: 4440 - protein, 334 aa, Colwellia psychrerythraea 34H
MKIKVGINGFGRIGRFVFRAAVERDDIEVVGINDLMDIEYMAYMLKYDSTHGRFKGTVDVVDGKLIVNGNPVRVTAERNPENLQWNDIDVDVVVEATGLFLTDETARKHITAGAKQVVLSAPSKDDTPMFVCGVNLNEYKGQEIVSNASCTTNCLAPIAKVLNDNWGIQDGLMTTVHATTATQKTVDSPSTKDWRGGRGAGQNIIPSTTGAAKAVGKVIPALNGKLTGMAFRVPTPDVSVVDLTVNLIKPATYAEICQAMSAAAEGELNGILGYTEDAVVSNDFIGETCTSVFDAKAGIALTDTFVKVVSWYDNEIGYSNKVLDLVAFISQYEK

SEQ ID NO: 4441 - protein, 385 aa, Arabidopsis thaliana
MKKMYNLPRDLPEEVLCRIPLTSLRPVRSTCKKWSTLSKCGSFAKKHLAQAKVLADAKEFMVVLMMNFRVYLMRVNLQNNVVESSSSSSSSSSSCIKREAKLISLGDEEADISQVFHCDGLLLCISITESKTRLVVWNPYWGHTRLFEPTHQFNKFDSYSYALGYDKSRKSHKILRGITCLDPFKIYDFNSDLWRDLDVTPEWHLWQMLHGVSLKGNAYWFARENYTETMDTDHFFLLCFDFTSETFGPPLPLPFEFAVSEDTMSVSSVREEQLVVLYQPWDYLQLDIWVTSKIEPNAVSWNSKVFLSVSLKQLVSPQFQLTFGSFFIDEEKKVAVVFDKDYDNKRNIAYIFGVDGSFKAVDLGDSDRKCFPLVCSYVPSLVQLN

SEQ ID NO: 4442 - protein, 309 aa, Ureaplasma parvum serovar 3 str. ATCC 700970
MNQEVYDLVIIGAGPAGLAAAVYAKRSGLNVIIVEKQFPGGKIALTSNVENYLGINSIPGPELAYKMYEQVLNLNVSIIYEAADEISLKEKYKKIKLTTQTLITKTVIIATGTENRRLNILGELEFENKGISYCAICDGPLYKNKAVSVIGSGNSAVEEAIYLATIAKEVHLIANKPQFKAEQQLVQIANNTPNIKIYYNKQTFEFFGHQFLEGLKFRDLITNEVTTLNIEANFTFIGLLPSRINTNNLCIFNEVNGFITTDKNMQTSVCGIFAAGDIVDKNVRQIATATNDGVIAALYAKEYITRNNW

SEQ ID NO: 4443 - protein, 289 aa, Campylobacter jejuni RM1221
MSILVNKNTKVIVQGFTGKEATFHAEQCMAYGTNIVGGVTPHKGGQTHLGKPVFDTVADAVKATKADVSLIFVPAFAVGDSVIEAADAGIKLAVVITEHTPVKDMMFAKQYANKKGMKIIGPNCPGIITSEECKLGIMPGFIFKKGCVGLISKSGTLTYEAANQVVQGGYGISTAVGIGGDPIIGLAYKELLSEFQKDDETKAIVMIGEIGGSLEVEAAKFIKENISKPVVAFIAGATAPKGKRMGHAGAIVGSADESAAAKKEALKSYGIHVVDSPALIGEEIQKILG

SEQ ID NO: 4444 - protein, 401 aa, Rhizobium leguminosarum
MDRRVVITGIGGLCGLGTNAASIWKEMREGPSAISPIITTDLYDLEGTVGLEIKAIPEHDIPRKQLVSMDRFSLLAVIAATEAMKQAGLSCDEQNAHRFGAAMGLGGPGWDTIEETYRSILLDGVTRARIFTAPKGMPSAAAGHVSIFLGLRGPVFGVTSACAAGNHAIASAVDQIRLGRADVMLAGGSDAPLTWGVLKSWEALRVLAPDTCRPFSADRKGVVLGEGAGMAVLESYEHAAARGATMLAEVAGIGLSGDAYDIVMPSIEGPEAAMRSCLADAELNPDDVDYLNAHGTGTVANDEMETAAIKRVFGDHAFQMSVSSTKSMHAHCLGAASALEMIACVMAIQEGVIPPTANYREPDPQCDLDVTPNVPREQRCGSMSNAFAMGGTNAVLAFRQV

SEQ ID NO: 4445 - protein, 706 aa, Oryza sativa
MAKSNASRASATRRKFYFLQKSLLVSSLLAVVAADVVGAGPNQQCFPSSCGDLGNISYPFRLASDSRPCVGTLRPWYNLSCSSGRATIQINTRTYYVTSINYTGEIFSVVDATLQDDDTNGTSCPLPRSDHLPYIDYWPPYLGESSTDSYGFVYLATASDTWACFVNCSRARTDTMPWYRPVTCLLPNNSFVFVSFDDCAVGELQPSCRYLAMIPVDRWNLPDNSSQLQNASYTDIIGFIRKGFSVRFPYRPDQYQSPRMSARECLKDSNRYFKERISHPSILNLTRAIFWSETNSEVDCGYEVAPQKDRIFLGTIVSAIDIIKFHFVLFRLVLGSLVVFIFLAHKYWKTGITIDAVEKFLRMQQMIGPTRFAYTDIIAITSHFRDKLGQGGYGSVYKGVLLPGNVHIAVKMLTGSSSCNGDEFISEVSTIGRIHHVNVVRLVGFCSEEMRRALVYEYMPRGSLDKYIFSSEKSFSWDKLNEIALGIARGINYLHQGCEMQILHFDIKPHNILLDDNFVPKVADFGLAKLYPRDKSFVPVSAARGTVGYIAPEMISRSFGVISSKSDVYSFGMLLLEMAGGRRNADPNAANSSQAYYPSRVYRELTRRETSEISDIADMHELEKKLCIVGLWCIQMRSCDRPTMSEVIEMLEGGSDELQVPPRPFFCDDERFPGVESYNMPSDLTAISEEHEDDDDESICLFESYQ

SEQ ID NO: 4446 - protein, 263 aa, Pseudomonas sp. Y2
MTFEHILFSVEAGVATLSLNRPEQLNSFNAAMHGEVREALKRVRQNPEVRVLLLTGEGRGFCAGQDLADRNVAPGAEAPDLGESIEKFYNPLIRTLRDLPLPVICAVNGVAAGAGANIPLACDLVLAARSASFIQAFCKIGLIPDSGGTWSLPRLVGLARAKALALLGERLTAEQAEQWGLIYRVVDDAELRDEALKLARHLATQPTYGLALIKRSLNASLNNDFDAQLDLERDLQCLAGRSEDYREGVAAFMAKRTPVFKGR

SEQ ID NO: 4447 - protein, 557 aa, Schizosaccharomyces pombe
MCGILAVHHVAEDIEAFKPKALHLSKQLRHRGPDWSGKAIRNQTILCHERLAIVGVESGAQPLVSDDGKLVLTVNGEIYNHLKLRENLKGNYKFKTYSDCEVILYLYREHGPACANMLDGMFSWVLYDQDKDKVVAARDPIGITTLYQGFSSDSPDTAYFASELKALHPVCDKIIAFPPGHYYDSETKQTVRYFKPSWWDENKIPSNPVDYKLLRETLEASVRKRLMAEVPYGVLLSGGLDSSLIASIAARETEKLANSTSQSEEARTITAWPKLHSFAIGLPGSPDLLAARKVADFLHTFHHEHTFTIDEGLDALRDVIYHLETYDVTTIRASTPMYLLSRKIKAQGVKMVLSGEGSDEIFGGYLYFGNAPSREAFHSECVRRVKNLHLSDCLRANKSTMAWGLEARVPFLDKDFLEVALNIDPEEKMYINGRKEKYILRKAFDTTHDSSLQPYLPQDILWRQKEQFSDGVGYSWIDALKDTAELCISDDEFALPRREWGDDIPTTKEAFWYRKLFDEIFPRQCADTVMRWVPKAEWGCPEDPSGRYQAGHVAALK

SEQ ID NO: 4448 - protein, 81 aa, Oryza sativa (japonica cultivar-group)
MLAPCIMYATGRVSAPTGGCCDGVRTLNSAAADHQTTCACIKQQTSGMGGLRPDLVAGIPSKCGVNIPYAISPSTDCSRVH

SEQ ID NO: 4449 - protein, 357 aa, Streptococcus pyogenes MGAS315
MSGFLEQRLGHCLRQMVEKGLEALLVTHLTNSYYLTGFSGTAATVLITAKRRVLITDSRYTLLAKASVEGFDIIESRTPLKVVAELLEADQIDCLGFEDQVSFSFYQAMQAELSGITLLAQSGFVEHLRLIKDASEIETIAKACSISDKAFEDALDFIKPGTTTERDLANFLNFRMRQYGASGTSFDIIVASGYRSAMPHGRASDKVIQNKESLTMDFGCYYNHYVSDMTRTIHIGQVTDEEREIYALVLAANKALIAKASAGMTYSDFDGIPRQLITEAGYGSHFTHGIGHGIGLDIHENPFFGKSEQLLQAGMVVTDEPGIYLDNKYGVRIEDDLVITKTGCQVLTLAPKELIVL

SEQ ID NO: 4450 - protein, 453 aa, Listeria innocua
MKVIKFGGSSLASGIQLNKVFQLVAEDSERKIVVVSAPGKRFKDDTKVTDLLIDCAAKALLGEDTSELFEAVIARYAGIALDTGMDDAIITQIRADLQKTISSDKSDPDKFLDRMKASGEDNNAKLIAAYFKFKGLNANYVNPKDAGLFVTDEHASAQVLPESYDRLFALREREGIIVFPGFFGYTKDGEISTFSRSGSDITGAIVANGAQAELYENFTDVDAVYAVNPAIVKNPKKVLELTYREMRELSYAGFSVFHDEALIPAFHAGIPVHIKNTNNPDSCGTRVVHERENNNGPVVGIASDDGFCSIYISKYLMNREIGFGRKVLQILEDAGLNYEHMPSGIDDLTIIIRENQFGEDTERTIMTRLKEELNADQVIMQHGISLIMVVGEAMRHNVGITSRASKALSDAKVNIEMINQGSSEVSIMFGVKEEQENTAVRALYNEFFSEVLV

SEQ ID NO: 4451 - protein, 396 aa, Stigmatella aurantiaca
MAKEKFERNKPHVNIGTIGHVDHGKTSLTAAITKVLAKTGGATFLAYDQIDKAPEERERGITISTAHVEYQTKNRHYAHVDCPGHADYVKNMITGAAQMDGAILVVSAADGPMPQTREHILLARQVGVPYIVVFLNKVDMLDDPELRELVEMEVRDLLKKYEFPGDSIPIIPGSALKALEGDTSDIGEGAILKLMAAVDEYIPTPQRATDKPFLMPVEDVFSIAGRGTVATGRVERGKIKVGEEVEIVGIRPTQKTVITGVEMFRKLLDEGMAGDNIGALLRGLKREDLERGQVLANWGSINPHTKFKAQVYVLSKEEGGRHTPFFKGYRPQFYFRTTDVTGTVKLPDNVEMVMPGDNIAIEVELITPVAMEKELPFAIREGGRTVGAGVVADIIA

SEQ ID NO: 4452 - protein, 107 aa, Glycine max
  misc_feature (51)..(51): Xaa can be any naturally occurring amino acid
  misc_feature (97)..(97): Xaa can be any naturally occurring amino acid
MASLKVASLAAVLCMVVVSAPMAHAAITCGQVTSSLANSIGYLQKGGTPSXGCCNRVKSLNAFAKTTVDRQTAGNCLKYDPSQNSGFNANNANFIPXKCGVSIPYKI

SEQ ID NO: 4453 - protein, 321 aa, Haemophilus influenzae R2846
MIKKIAVLTSGGDAPGMNAAIRGVVRSALAEGLEVFGIYDGYQGLYNNKIKQLNRYSVSDVINRGGTFLGSARFPEFKDPNIRAKCAEILRSHGIDALVVIGGDGSYMGAKLLTEEHSFPCVGLPGTIDNDVAGTDYTIGYQTALQTAVDAIDRLRDTSSSHQRISIVEIMGRHCSDLTISAGIAGGCEYIVASEIEFNREELIQQIERSIIRSKRHAIIAITELLTDVHSLAKEIEARVGHETRATVLGHIQRGGSPCAFDRILASRMGAYAVDLLLQGKGGYCVGIQNEQLVHHDIIDAINNMQRVFKADWLKVAKRLE

SEQ ID NO: 4454 - protein, 513 aa, Oryza sativa
MAWYSLVLMTSLLFPLLVLLVMRCYVTRSGAKLLDKLPSVPGRLPVIGHLHLIGSLPHISLRDLATKHSPDMMLLHLGAVPTLVVSSSRVAQSILHTHDDIFASRPYSPIANILFYGATDVGFSPYNEYWRQIKKITTTHLLTMKKVRSYVSARQREVRIVMARITEAASKHVVVDLTEMLSCYSNNIVCHAVCGKFSLKEGWNQLLRELVKVNTSLLGGFNIEDYFPSFTRLAAVRRLLLSCAKAHNINKRWDQLLEKLIDDHTTKHIRSSSMLNHYDEEAGFIDVLLSIQHEYGLTKDNIKANLAAMLMAGMDTSFIELEYAMAELMQKPHVMGKLQAEVRRVMPKGQDIVTEEQLGCMPYLKAVIKETLRLHPPAPLLMPHLSISDCNINGYTIPSGTRVIVNVWALARDSNYWENADEFIPERFIVNTLGDYNGNNFHFLPFGSGRRICPGINFAIATIEIMLANLVYRFDWELPADQAAKGGIDMTETFGVAVHRKEKLLLIPHLHLR

SEQ ID NO: 4455 - protein, 415 aa, Coccidioides immitis RS
MAAIRPIWASPLPHLFIRAIPSLSVFQSSTSSRLLQYLPRSFALSSKTIAPGAIVLGLPSILSGLWESILRAVPKKKTSHMKKRHRQMAGKALKDVKNMTNCPGCGQPKRAHLLCPTCVSAHPVDIFSLAVTPTQILSASGSSSLNVHSTTEAEFPIAQSMTKAHKIGCHHIVATQDGLRAASAGFSGEVKLWAYENGMWSEDTNYTGKICNVWAIILSSDGHYLAGTTHDGHIKVWDLQNGAHQIHDFETKGSFGMCIDISPDGRFTASGHQSGSVYIFDNSTGRMPYSLSGLVEPVRAVAFSPGGKLLAAAGDSRVIMLYETSSGEQVANFSGHSAWIMSLDWSHTGEYLLSGSFDGKVKVWSIERKACVATLSESDKALWCVKWLPKMGKAEGFATAGANRSIAFYREATGG

SEQ ID NO: 4456 - protein, 478 aa, Arabidopsis thaliana
  misc_feature (388)..(388): Xaa can be any naturally occurring amino acid
MTMSENSRNLEAGLLLRKNQNDINECRITAVVLFSTFVSVCGSFCFGCAAGYSSVAQTGIINDLGLSVAQYSMFGSIMTFGGMIGAIFSGKVADLMGRKGTMWFAQIFCIFGWVAVALAKDSMWLDIGRLSTGFAVGLLSYVIPVYIAEITPKHVRGAFVFANQLMQSCGLSLFYVIGNFVHWRNLALIGLIPCALQVVTLFFIPESPRLLGKWGHEKECRASLQSLRGDDADISEEANTIKETMILFDEGPKSRVMDLFQRRYAPSVVIGVGLMLLQQLSGSSGLMYYVGSVFDKGGFPSSIGSMILAVIMIPKALLGLILVEKMGRRPLLLMNDLYLQASTGGMCFFSLLLSFSFCFRSYGMLDELTPIFTCIGVVGFISSFAVGXMGGLPWIIMSEIFPMNVKVSAGTLVTLANWSFGWIVAFAYNFMLEWNASGTFLIFFTICGAGIVFIYAMVPETKGRTLEDIQASLTDFLQ

SEQ ID NO: 4457 - protein, 573 aa, Glycine max
LILMALPICLTVIAIFTLCCVINCNNGVEAFHDIYPDLQSISARSVSKLQRTGYHFQPHPNGPMYYNGIYHLFYQYNPKGAVWGNIVWGHAVSKDLINWKELEPALYPSKPFDKYGVWSGSATVLPGKGPVILYTGVIDKQSNEVQLYAIPENKSDPFLRKWVKPKAFNPIVVADHSMNASVFRDPTTAWWSKDGHWRMLIGGRRKDRGMAYLYRSKDFVKWIQAKHPIHSAASTGMWECPDFYPVSLKGKNGLDISVVGSSSIKHVLKNSLDLTRYEYYTIGTYFKNKDKYIPDNTSEDGWGGLRYDYGNFYASKSFFDPSKNRRILWAWANESDSKEDDVKKGWAGIQSIPRTVWLDYGGKQLVQWPVEELNSLRKKEVKISHQKLKKGQHVEVKGITAAQADVEVTFSFSSLDRAEPFDSRWVNAQDLCSQKGSKVQGGVGPFGLLTLASEKLEEFTPVFFRIFKAPNKHVILMCSDARSSSLKRELYKPSFAGFVNVDLAKNKKLSLKSLIDHSVVESFGAGGRTNILSRVYPTLAIKKKAHLFVFNNGTEHITVEYLKAWSMKSARRN

SEQ ID NO: 4458 - protein, 116 aa, Glycine max
FKVLDSGAKKIKTDTPHVINGDLALRKGPHASGKKGQGKGVYQLVHLHGANVDGYSPIYDTKDCSPTGDGYAGGTTGWPIWSVTLLTLLAGGALLVYNTDALAQHTLRIDDLSSYL

SEQ ID NO: 4459 - protein, 366 aa, Pseudomonas syringae pv. syringae B728a
MSQSFLSPVTTQTWANGRHLVRVVKVIQETWDVRTFCFMADQPIMFFFKPGQFVTLELEIDGLPIMRSYTISSSPSVPYSFSITVKRVPGGRVSNYLHDTLIEGQELAVHGPVGLFNAIDFPNPKILYLSGGVGITPVMSMARWFYDTNANVDMVFVHSARSPKDIIYHRELEHMASRIDNFNLHLVCEKHGLGEPWAGYRGYLNQKMLELMAPDFMEREVFCCGPTPYMTAVKRLLQENGFNMAQYHEESFGATPPEARADAVEQAEIAADAPDVDIADLHQVEFTDTGKSIRVGPGETVHAAAAKLGLMIPKACGMGICGTCKVMKLSGEVEMEHNGGITDEDVAEGYILSCCSVPKGDVRIEY

SEQ ID NO: 4460 - protein, 687 aa, Saccharomyces cerevisiae [sequence omitted]

SEQ ID NO: 4461 - protein, 905 aa, Capsicum chacoense
MAHASVASLMRTIESLLTFNSPMQSLSCDHREELCALREKVSSLEVFVKNFEKNNVFGEMTDFEVEVREVASAAEYTIQLRLTGTVLGENKSQKKKARRRFRQSLQQVAEDMDHIWKESTKIQDKGKQVSKESLVHDFSSSTNDILKVKNNMVGRDDQRKQLLEDLTRSYSGEPKVIPIVGMGGIGKTTLAKEVYNDESILCRFDVHAWATISQQHNKKEILLGLLHSTIKMDDRVKMIGEAELADMLQKSLKRKRYLIVLDDIWSCEVWDGVRRCFPTEDNAGSRILLTTRNDEVACYAGVENFSLRMSFMDQDESWSLFKSAAFSSEALPYEFETVGKQIADECHGLPLTIVVVAGLLKSKRTIEDWKTVAKDVKSFVTNDPDERCSRVLGLSYDHLTSDLKTCLLHFGIFPEDSDIPVKNLMRSWMAEGFLKLENDLEGEVEKCLQELVDRCLVLVSKRSRDGTKIRSCKVHDLIYDLCVREVQRENIFIMNDIVLDVSYPECSYLCMYKMQPFKRVTGDEINYCPYGLYRALLTPVNRQLRDHDNNNLLKRTHSVFSFHLEPLYYVLKSEVVHFKLLKVLELRHRQIDGFPREILSLIWLRYLSLFSYGNFDVPPEICRLWNLQTFIVQRFRSDIIIFAEEIWELMQLRHLKLPRFYLPDCPSGSVDKGRHLDFSNLQTISYLSPRCCTKEVIMGIQNVKKLGISGNKDDYKSFRDSGLPNNLVYLQQLEILSLISVDYSLLPVIISSAKAFPATLKKLKLERTYLSWSYLDIIAELPNLEVLKLMDDACCGEEWHPIVMGFNRLKLLLIKYSFLKFWKATNDNFPVLERLMIRSCKNLKEIPIEFADIHTLQLIELRECPPKLGESAARIQKEQEDLGNNPVDVRISNPLKESDSDSEEH

SEQ ID NO: 4462 - protein, 354 aa, Enterococcus faecalis V583
MMARVEKLRELMKENNLQGFLVTSPYNLRYLTNFTGTTGLAMITLDKAFFVTDFRYTEQAAEQATGFTIVKNTGHIFDEVADLAERLQLDNLAFEETQVSFADYSLLEEILPCELVPVMGLIEELREVKDEEEVAIIEKACAIADQGFAFVLEMIKPGMTEIEVANQLDFFMRSKGASGVSFETIVASGLRSAMPHGVASHKVIEKGELITLDFGCYYEGYVSDMTRTFAIGSIQPKLKEIYDIVLEAQLKVLAEAKPGLTGIQLDAIARDHIASYGYGDAFGHSTGHGIGLEIHEGPNVSFRADKQFVPGNVITDEPGIYLPGIGGVRIEDDLLITAEGNRVLTHAPKELIIL

SEQ ID NO: 4463 - protein, 483 aa, Thermococcus kodakarensis KOD1
MCLIAGGMGGNLREKLIKMAIAGKHRGPESFGVWTDGGVLKSDDFSKLTEIPDGRIGLLQCRLAITGSKSFTQPFINDLALVHNGEIYNHAALREYLERRGVSFESDVDSEVVLRLIEFLREEHLSYPEIVKKLFWMLEGDYAVAFSDGERIYLFRDPLGIRPLYFSRNGLFASEKKVLWAVGEREVEPVQPGELVVLEKNGVRRARLFSLENLKSKAKCERKDPVGGVGKLLRYAVKNRVSKKTGVLFSGGLDSTLVAYLASQYSDVILYTAGTEDSPDIEWARKVADHFGWALRERTFEVEDVRDAVKRVMYAIEEPNPMNLAIGLPLYFASGLASSDGTRVLLSGQGADELFGGYAKYLERPELMEEDIALISERNLARDDKITMLNGVEGRYPFLALPVVSFALKLPLEAKIVDGTRKVILRKLALRLGIPEWIAEREKRAAQYGSRAQKLLEKIAREEGLTLREFAEKLFRETFPNAF

SEQ ID NO: 4464 - protein, 590 aa, Pyrococcus furiosus DSM 3638
MRIAVIDYDKCNPDKCGHFLCERVCPVNRMGGEAIIIDEENYKPIIQEASCTGCGICVHKCPFKAISIVNLPEQLEEDCVHRYGVNAFVLYRLPVVKEGMVVGIVGPNGTGKSTAVKILAGQLIPNLCGDNDSWDGVIRAFRGNELQNYFEKLKNGEIRPVVKPQYVDLIPKAVKGKVIELLKKADETGKLEEVVKALELENVLDREIQHLSGGELQRVAIAAALLRNATFYFFDEPSSYLDIRQRLNAARAIRRLSEEGKSVLVVEHDLAVLDYLSDIIHVVYGEPGVYGIFSQPKGTRNGINEFLRGYLKDENVRFRPYEIKFTKTGERVEIERETLVTYPRLVKDYGSFRLEVEPGEIKKGEVIGIVGPNGIGKTTFVKMLAGVEEPTEGKIEWDLTVAYKPQYIKADYEGTVYELLSKIDASKLNSNFYKTELLKPLGIIDLYDREVNELSGGELQRVAIAATLLRDADIYLLDEPSAYLDVEQRLAVSRAIRHLMEKNEKTALVVEHDVLMIDYVSDRLMVFEGEPGKYGRALPPMGMREGMNRFLASIGITFRRDPDTGRPRANKEGSVKDREQKEKGEYYYIA

SEQ ID NO: 4465 - protein, 924 aa, Campylobacter jejuni RM1221
MNRRDFIKNTAIASAASVAGLSVPSSMLGAQEEDWKWDKAVCRFCGTGCGIMIARKDGKIVATKGDPAAPVNRGLNCIKGYFNAKIMYGEDRLVMPLLRMNEKGEFDKKGKFQQVSWQRAFDEMEKQFKKAYNELGVTGIGIFGSGQYTIQEGYAALKLAKAGFRTNNIDPNARHCMASAVVGFMQTFGVDEPSGCYDDIELTDTIITWGANMAEMHPILWSRVSDRKLSNLDKVKVVNLSTFSNRTSNIADIEIIFKPNTDLAIWNYIAREIVYNHPEAMDMKFIKDHCVFATGYADIGYGMRNNPNHPKFKESEKDTVEKENVITLDDEEATSLSYLGVKAGDKFEMKHQGVADKNWEISFDEFKKGLAPYTLEYTARVAKGDDNESLEDFKKKLQELANLYIEKNRKVVSFWTMGFNQHTRGSWVNEQAYMVHFLLGKQAKPGSGAFSLTGQPSACGTAREVGTFSHRLPADMVVANPKHREISEKIWKVPAKTINPKPGSPYLNIMRDLEDGKIKFAWVQVNNPWQNTANANHWIAAAREMDNFIVVSDCYPGISAKVADLILPSAMIYEKWGAYGNAERRTQHWKQQVLPVGAAMSDTWQILEFAKRFKLKEVWKEQKVDNKLTLPSVLEEAKAMGYSEDDTLFDVLFANKEAKSFNPNDAIAKGFDNTDVKGDERKIQGSDGKEFTGYGFFVQKYLWEEYRKFGLGHGHDLADFDTYHKVRGLRWPVVNGKETQWRFNTKFDYYAKKAAPNSDFAFYGDFNKMLTNGDLIAPKDEKEHSIKNKAKIFFRPFMKAPERPSKEYPFWLATGRVLEHWHSGTMTMRVPELYRAVPEALCYMSEKDGEKLGLNQGDLVWVESRRGKVKARVDMRGRNKPPVGLVYVPWFDENVYINKVTLDATCPLSKQTDFKKCAVKIYKA

SEQ ID NO: 4466 - protein, 407 aa, Streptomyces coelicolor A3(2)
MTDPSLAVTGLGLVTAAGMGVDATWEGVLRGRSAGARDERLAGLPVDIACAVPGLQPARHVDRRSVLIHDRFVQLAIVAAREAVADAGLDPLTWDGARVGVVVGCGLGGVTTWETQHRRLLERGPEAVSALLVPMLVPNMAAGHLAMDLRALGPNLVTATACASGGTALGTAARLLRDGTCDIVVAGGTEAGVSPLMVTGFAQMGALSRRVDDPAAASRPFDADRDGFVIGEGSGMLVLERAADAEARGATVRARLLGHGASADAHHVTAPDPEGAGALRAMEAALAQAGVTGRDIDHVNAHGTSTPLNDAVEAAVLGRLLGDRATVTSAKGVLGHTLGAAGAIEAALTVLSIERSTVPPTANLRRRDPAVDLDVVADAPREQKVELAMSNSFGFGGQNAVLVFASP

SEQ ID NO: 4467 - protein, 478 aa, Rubrobacter xylanophilus DSM 9941
MLRKTFVLAAASALLTLALPALGLAQEEAPPGNRELSLALDTVWVLVAAVLVLFMQAGFAMLEVGFSRMKNVGSVVAKILANLAIAAVLFWAVGFAVAFGTGNALFGTQGWFLAVPEGAVDEVYAGLAWTQVPLSAKFLFQVAFCAVSLAIVWGTMLERTKFAVYLVFAVVFAGIIYPMVGHWVWGGGWLTELGMQDFAGSTVVHLSGAMAALAGTLLLGPRLGKYDDEGRPVTIPGHNMPLAVLGVLILWIGWYGFNPGSTMAATPQIADIALTTTLAAACGVLGAMAMSYLYRRHVDVGMAGNGAIAALVAITAPCAFVAPWASAIIGFVAGVIMYATLLFVDRIGVDDPLGAIAAHGMGGVWGTLSAGLFTTPELAAVGRPGLLYGGGLYQLGVQALGILAAGGFVFLASLLVFAALKATIGLRVKPEQELNGLDVSEHGVYGYAGFPEHLIATDHPVNGNGGGAPRNAPAEGAA

SEQ ID NO: 4468 - protein, 372 aa, Mycobacterium tuberculosis CDC1551
MTHSQRRDKLKAQIAASGLDAMLISDLINVRYLSGFSGSNGALLVFADERDAVLATDGRYRTQAASQAPDLEVAIERAVGRYLAGRAGEAGVGKLGFESHVVTVDGLDALAGALEGKNTELVRASGTVESLREVKDAGELALLRLACEAADAALTDLVARGGLRPGRTERQVSRELEALMLDHGADAVSFETIVAAGANSAIPHHRPTDAVLQVGDFVKIDFGALVAGYHSDMTRTFVLGKAADWQLEIYQLVAEAQQAGRQALLPGAELRGVDAAARQLIADAGYGEHFGHGLGHGVGLQIHEAPGIGVTSAGTLLAGSVVTVEPGVYLPGRGGVRIEDTLVVAGGTPKMPETAGQTPELLTRFPKELAIL

SEQ ID NO: 4469 - protein, 315 aa, Sulfitobacter sp. EE-36
MKDTTFGPKGWTPDRLGSLKGKTYLITGTTAGAGFQATRILLSKGAKVVMLNRNADKSIAAVKTLKDTFGPNAEVSFVRMDLSDLASVRAAAEEVQSTVPRIDALICNAAIAQVPTQQLTVDGFESQLGTNHYGHFLLCGMLFDRIQESAGRIVVVSSLGYNMGIKTIQFDDMNWDKNYSANAVYSQSKLAQMMFAYELQDRLKATDSRVEVYVCHPGASATSLISTSGGLFTRVTWWMMSKTPMVQSAEKGAYPEVMCATEDGLAQRALYGPTGWLQTGGPVGKGTLNPHAYDKPVMEKLWTVSEKATGFHWEI

SEQ ID NO: 4470 - protein, 292 aa, Rickettsia akari str. Hartford
MAILINKKTKVICQGFTGSQGTFHSEQAIAYGTNMVGGITPGKGGHTHLDLPVYNTVHEAKAKTGANASVIYVPPSFAADSILEAIDAKIEVVVCITEGIPILDMVKVKRALVGSKTRLIGPNCPGVITPGECKIGIMPGHIHKRGTIGIVSRSGTLTYEAVAQTTAVGLGQSTCVGIGGDPVNGTNFVDCIDMFLKDDETKAIIMIGEIGGNAEEDAAEFIKQSKIKKPIVSFIAGITAPPGKRMGHAGAIIAGGQGSAEDKLEVLQSAGVTITKSPADIGKTMFDLLNKG

SEQ ID NO: 4471 - protein, 390 aa, Arabidopsis thaliana
  misc_feature (123)..(123): Xaa can be any naturally occurring amino acid
MSPPPQRIGLPWPELNDGLAYKDAISSSESELTTVSEFYFTKYKSSAPLLGWIQRIQNGQIQIDGEVVKDPNTLLRSGSKLVYSRLPWKEPDTPYSLEVLYEGDDLIALNKPSGLQVFPGGLXFQQRTVLTQLQWCFGKNDSYIGSRESPHPVPVHRLGRGTSGILLCAKTKLAKTKLAAYFAEGTSLVGSGNLDQECGTGRKLSKIYRALADGIVEEDEVVIKQPIGVVRYPGVAQGLYVASPEGKPAFSKVFVLERDREKNCSLVKVEIQSGRPHQIRIHLAYMGHPLWSMIEMTMFTGSECLRADQSAGDPLYVAGGQPKCFDPDLVDDAAAFAEDGGYRRPNQAVPGDCGYHLHAHQVELPNLLNTHKVVKIVAPLPPILQTRCET

SEQ ID NO: 4472 - protein, 103 aa, Eremothecium gossypii
MSGKGGKAGSAAKASQSRSAKAGLTFPVGRVHRLLRKGNYAQRIGSGAPVYLTAVLEYLAAEILELAGNAARDNKKTRIIPRHLQLAIRNDDELNKLLGNVTI

SEQ ID NO: 4473 - protein, 355 aa, Burkholderia cepacia
MKIAVLPGDGIGPEIVTEAVKVLNALDEKFELEQAPVGGAGYEARGHPLPDATLKLAKEADAILFGAVGDWKYDSLERALRPEQAILGLRKHLELFANFRPAICYPQLVDASPLKPELVAGLDILIVRELNGDIYFGQPRGVRAAPDGPFAGEREGFDTMRYSEPEVRRIAHVAFQAAQKRAKKLLSVDKSNVLETSQFWRDIMIDVSKEYADVELSHMYVDNAAMQLAKAPKQFDVIVTGNMFGDILSDEASMLTGSIGMLPSASLDKNNKGLYEPSHGSAPDIAGKGIANPLATILSAAMLLRYSLNRAEQADRIERAVKTVLEQGYRTGDIATPGCKQVGTAAMGDAVVAAL

SEQ ID NO: 4474 - protein, 332 aa, Streptococcus thermophilus CNRZ1066
MAEEKIYDITIIGGGPVGLWAAFYAGLRGMTVNIIESLSELGGQPAILYPEKKIYDIPAFPQTTGAELIENLLIQLKRFEDRVSIHLKEEVQTFKKTDGIFTIATSKGQHLSKAIVIACGNGAFAPRPLGVDNEEDFANNNLLYNVHSLDQFAGKKVVIAGGGDSAVDWANHLDGVAESVTLIHRRDAFRAHEHSVELLYQSSVNVMTPYVPLEIKGENGHAQSLTVQRVKSDEVVELPIDALIVSFGFSTNNKNLRNWNVDYKRSSITVNAQFETSQEGVYAIGGAAEYDGKIDLIAVGMGEAPIAINQAIQYIEPDGKNRPVHSTSLIEE

SEQ ID NO: 4475 - protein, 195 aa, Plantago major
VTTIFYLLCGCMGYAAFGDQAPGNLLTGFGFFDPYWLLDIANIAIVVHLVGAYQVYCQPLFAFIEKWSVRKWSRSDFVTAEYDIPIPLCGVYQLNLFRLVWRTIYVVFTTLIAMLLPFFNDVVGILGALGFWPLTVYFPVEMYIAQNKVRKWTSQWIGLQLLSIACLLVSVAAAVGSIAGVILDLRTFKPFKTVY

SEQ ID NO: 4476 - protein, 412 aa, Cyanophora paradoxa
MAFVVGVPAIAGKAPAAQKNATCSQGKGFASFMGMKAVKNTPKFAYAAEEERSLFTVVDAQTAAGGETVAEATTMKVKVAVNGFGRIGRNFVRCLEGRKQTNLELVAINDTGGAKLSAHLLKYDSILGRFDADVKYVDDGAISVNGKTIKVVSTRDPTTLPWKELGVEIVIESTGVFIDGPGAGKHIAAGAKKVVITAPAKGSDIPTYVVGVNHKDYNPSTDHIVSNASCTTNCLAPFVKVLDEKFKIIKGTMTTTHSYTGDQRLLDASHRDLRRARAAAMNIVPTSTGAAKAVALVLPNLKGKLNGLALRVPTPNVSIVDLVVQVEKKTFADEVNAALREAANTDLKGVLVVSDEPLVSCDFRCTDQSSTIDASLTMVMGDDMVKVIAWYDNEWGYSQRVVDLAEIVAQSM

SEQ ID NO: 4477 - protein, 420 aa, Thermus thermophilus HB27
MGPLLVWHRGDLRLHDHPALLEALARGPVVGLVVLDPNNLKTTPRRRAWFLENVRALREAYRARGGALWVLEGLPWEKVPEAARRLKAKAVYALTSYTPYGRYRDAKVQEALPVPLHLLPAPHLLPPDLPRAYRVYTPFARRFLGVEAPLPAPEALPKGPEEGEIPREDPGLPLPEPGEEAALAGLRAFLEAKLPAYAEERDRLDGEGGSRLSPYFALGVLSPRLAAWEAERRGGEGARKWVAELLWRDFSYHLLYHFPWMAERPLDPRFQALPWQEDEALFRAWYEGRTGVPLVDAAMRELHATGFLSNRARMNAAQFAVKHLLLPWKRCEEAFRHLLLDGDRAVNLQGWQWAGGLGVDAAPYFRVFNPVLQGERHDPEGRWLKRWAPEYPSYAPKDPVVDLEEARRRYLRLARDLARG

SEQ ID NO: 4478 - protein, 206 aa, Zea mays
MTGVSTGLLTGLRRVMEQQRISTAFCRQSRVSSSTVSFSDLDEKGDMEYDDNSPNSKRELRPQGVDPNKGWEFRGVHRAIICGKVGQVPVQKILRNGHTVTVFTVGTGGMFDQRVIGPKDLPKPAQWHRIAVHNDYLSAYAVQKLVKNSAVYVEGDIETRVYNDSVNDQVKNIPEICVRRDGKIQLVKSGDSAANISLDELREGLF

SEQ ID NO: 4479 - protein, 268 aa, Brassica napus
MAASIGIMDSAYFVGRNEILTWINDRLHLNLSRVEEAASGAVQCQMLDMTFPGVVPMHKVNFDAKNEYDMIQNYKVLQDVFNKLQITKPLEINRLVKGRPLDNLEFLQWLKRFCDSTNGGIMNENYNPVERRSKGGREKSVKGSNKMPKSLQTNNTPPNSSSVGLTKASGPKPANTAQVQALSKELTDLKLSYDHLGKERDFYFSKLRDVELLCQTPELEDLPIVVAVKKILYATDANESALEDAQEYLNQSLGVKAEDEENGEQEDY

SEQ ID NO: 4480 - protein, 522 aa, Deinococcus radiodurans
MAMTQTENQTAPQQHIRIFDTTLRDGEQSPGVALNHAQKLEIAHTLARMGVDVIEAGFPIASPGDLEGVSRIAREVRGPVITALARANRADIEAAAKGVEAAEKSRIHTFIATSPIHMQKKLNLEPDAVIERAVEAVRLARQYVDDVEFSAEDATRSEWDFLSRIFKAAVEAGATTINVPDTVGYTTPEEMRKLFAYLKAKLPAHVILSSHCHDDLGMAVANSIAAAEGGARQIECTINGIGERAGNASLEEIVMAFHTRRDVYGYETGIRTRELYRASRLVSRLSGMPVQPNKAIVGDNAFAHESGIHQDGVIKARETYEIMNAELVGREAAVLVMGKHSGRAAFRKALTDLGYGDIPDDKVQHLFGRFKDLADRKGQIYAEDLRALVDARSDVPQTFSLEGFQITSGMNMMPVAFVRLHTPDGPVDATAHGDGPVEAAFQAISKITGISPTLESYRIQSVTRGDDALGEVSIHVRHGETQLNGTGVATDIVEASARAWIRVMNMIVAGMGKNKAITQMTP

SEQ ID NO: 4481 - protein, 395 aa, Pseudoalteromonas tunicata D2
MFDYMEQHSEEAVIKVIGVGGGGGNAVEHMVKRQIEGVRFITANTDAQALRKSSADITVQLGTKITSGLGAGANPNIGRQSAEEDIDTIRASLEGADMVFIAAGMGGGTGTGAAPVVARLAKEMGILTVAVVTRPFDFEGKKRAAAADQGIAELAEVVDSLITIPNNKLLKVLGKGTTLLDAFAKANDVLYGAVQGIAELITRSGLINVDFADVRTVMSAMGTAMMGTASATGPDRAQEAAEAAISSPLLEDVDLTGAKGILVNITAGMNIAIEEFETVGNHVKALASENATVVVGAVIDPEMTDELRVTVVATGLGGDRRPQFGIVESSAKKVAGSDVSSNPGMFVPSFASQTSTQQTSSNVEAPVVKEPTAAPKKQAEGDYFDIPAFLRKQAD

SEQ ID NO: 4482 - protein, 681 aa, Arabidopsis thaliana
MAVNTSFCYEFMKSIPQIATLDIYDLTKFLINYDFQITLDLTKHFQSLTNNTTDRSSKDSYKLCLDLFSLIDPLETALKALAANDYDTLNTNVGVMSQYAEECGSELSSIIKPISKLSKGVSIVENVSDIVLNTAGPAKGQAVALRVSGDAVVIYRCRIDAYQDTLYAHSYRQFYRDCFITGTVDFIFGHASAIFQNCRIEARKPMEGQSNVITAQQSDKPGTSGFSIQNCSITASSDLVPVKRMVKTFLGRPWGDFSTVVFMESYLDDMIDPMGWTPWNSSTTGRLSTLYYGDEKASFIEITTRIGEEKNQIRVVIGHEEEEAAKTRLPNDILKKVQRLGQIENLTKIKPNKQKAQAQTQNNSQLQRAVNASFCYEFMKSSTQVATLDTYDLAKFLINYDFQNTFDLIKHFQSLTNSTTDPSSKGSYELCLHLFNLINPLETALKALATNDYDTLNRNVDAMSQFAMECESELSSVIKPIPKLLKRVSIVENNVEEEAMDSIVSSSTILMRSYLTPPVRSCSPATSVSVKPLSSVQVTSVAANRHLLSLSSGARRTRKSSSSVIRCGGIKEIGESEFSSTVLESAQPVLVEFVATWCGPCKLIYPAMEALSQEYGDKLTIVKIDHDANPKLIAEFKVYGLPHFILFKDGKEVPGSRREGAITKAKLKEYIDGLLNSISVA

SEQ ID NO: 4483 - protein, 496 aa, Colwellia psychrerythraea 34H
MSIVGHLINGENRTDATRHQDIFNPSTGQVSNQLAIAGKATVEEAIEAANAAFPAWRATPPAKRARVMFRFKELLEQHADKIITLIGEEHGKISHDAQGELQRGIESVEYACGAPELLKGEHSRNVGPSIDSWSEFQPLGVVAGITPFNFPAMVPLWMYPMAIVCGNTFILKPSERDPSSTLFIAQLLEEAGLPPGVLNVVNGDKEAVDTLLHSPKIQAVSFVGSTPIAEYIYATASANGKRCQALGGAKNHAIVLPDADMDNAVNQLLGAAFGSSGERCMALSVAVTVGNAAGDALVAKMKQAMTGLKVGAHNDSSNDFGPVITKQHQEKVVGYINSAEEDGAKIVVDGRNPKIAGFSEGFFVGGTLIDNVTPEMISYKEEIFGPVLQVVRVESMQEAMNLIDAHEYGNGTCVFTRDGEAARYFSDHIQVGMVGINVPLPVPVAYHSFGGWKRSLFGDLHAYGPDSVRFYTKRKTITQRWPSTGVREGAEFAFPS

SEQ ID NO: 4484 - protein, 217 aa, Shigella flexneri 2a str. 301
MNQTLLSSFGTPFERVENALAALREGRGVMVLDDEDRENEGDMIFPAETMTVEQMALTIRHGSGIVCLCITEDRRKQLDLPMMVENNTSAYGTGFTVTIEAAEGVTTGVSAADRITTVRAAIADGAKPSDLNRPGHVFPLRAQAGGVLTRGGHTEATIDLMTLAGFKPAGVLCELTNDDGTMARAPECIEFANKHNMALVTIEDLVAYRQAHERKAS

SEQ ID NO: 4485 - protein, 281 aa, Enterococcus faecalis V583
MSTVINGRELADQMQAEIQKDVEKMTQQGIQPGLVVLLVGENPASQTYVRNKERAAAKIGILSKVEKLPETISEEELLAEIDKYNQDSRFHGILVQLPLPKHIDEEKILLAIDPKKDVDGFHPMNLGRLFVGKPEMIPCTPYGIMKMFEAYDIDLTGKRAVVIGRSNIVGKPMAQLLLMKNATVTIAHSKTEHLAEVAKEADILVVAIGRGHFVTKEFVKPGAVVIDVGMNRNQEGKLIGDVAFDEVSEIASYITPVPKGVGPMTITMLMYQTVEAAKKQK

SEQ ID NO: 4486 - protein, 558 aa, Arabidopsis thaliana
MAEEAKSKGNAAFSSGDYATAITHFTEAINLSPTNHILYSNRSASYASLHRYEEALSDAKKTIELKPDWSKGYSRLGAAFIGLSKFDEAVDSYKKGLEIDPSNEMLKSGLADASRSRVSSKSNPFVDAFQGKEMWEKLTADPGTRVYLEQDDFVKTMKEIQRNPNNLNLYMKDKRVMKALGVLLNVKFGGSSGEDTEMKEADERKEPEPEMEPMELTEEERQKKERKEKALKEKGEGNVAYKKKDFGRAVEHYTKAMELDDEDISYLTNRAAVYLEMGKYEECIEDCDKAVERGRELRSDFKMIARALTRKGSALVKMARCSKDFEPAIETFQKALTEHRNPDTLKKLNDAEKVKKELEQQEYFDPTIAEEERKKGNGFFKEQKYPEAVKHYSEAIKRNPNDVRAYSNRAACYTKLGALPEGLKDAEKCIELDPSFTKGYSRKGAIQFFMKEYDKAMETYQEGLKHDPKNQEFLDGVRRCVEQINKASRGDLTPEELKERQAKAMQDPEVQNILSDPVMRQVLVDFQENPKAAQEHMKNPMVMNKIQKLVSAGIVQVR

SEQ ID NO: 4487 - protein, 91 aa, Methylococcus capsulatus str. Bath
MPSIKIENNPPETRLGELGVRRWPTWSCGVSSFPWTYDESETCYILEGEVTVTPQGGEPVRIGKGDLVTFPPGMSCTWDVHVPVKKHYTFG

SEQ ID NO: 4488 - protein, 578 aa, Desulfotalea psychrophila LSv54
MSSDLYRFKYDEFGNTRDIAVYGTGPSIMSCSYTNKSTAFSSKERDDFGLQGSLPPGFRDLEAQVENCHIKLGEKESEEEKYIFIRSLFDRNVTLAHALIQSDLEKFMGIIYTPTVGLAVQKYSAMFRQANGLHFSPDTIDQAEDILRRFAHRDIRVAVVTDNQGILGIGDQGAGGIAICLGKLMLYTQGAGIAPWHCLPISLDIGTDNEALLADKHYLGWRQKRLVGDEYTAFIDRFARAFRNVFPNALCQWEDFSKQNAFDIRDKYRHSMVSFNDDVQGTGAITFSAILSAMKVKRAKLTDQVFLIHGAGAGGVGIGEQIQVALMAEGLSEEEARDKVFTIDSRGVVTVDRKIEAYKKKFAKDGAKLSWLADPENHKLENVIKQAGVTVLIGTSGQGGCFTETVVKNMLGNTERPVIFPLSNPTHMAEAQPKDIYAWTNGQALVATGSPFAPVEHDGKTSRIGQCNNVFVFPGVGLGVLASGAREVLPEFFTAAAYAVSNSLSQEALDRGCLVPEVSEISKVSEKVALAVATCAIEHGVSRPCVYSDFSHNNDPARMKVLISKMRWSPEYLPMTAM

SEQ ID NO: 4489 - protein, 134 aa, Synechococcus sp. WH 5701
MRLLHTMLRVGDLERSLAFYTEVLGMRLLRRREYPSGRFTLAFLGYGEESDSTVIELTHNWDTTSYEIGTGYGHIAIGVDDIAGTCDAIAGKGGRVVRPPGPMKHGSTVIAFVEDPDGYKVELIQLAPRVDAAA

SEQ ID NO: 4490 - protein, 447 aa, Desulfotalea psychrophila LSv54
MEKSMKKSDIIIIGGGAAGIVAVNTIHALNPGLSLTLIKDEEALVNRCSIPYGMGREKGIENYIVPNSHITATGADLVIGRVEEIDTRKKEVILQTGESYAYGQLLLATGSRPILPQLPGIESERILVVRSLGDLERLRVSVRSGRRALVVGGGYVGVELATELQQLGLRVSLVEMRERILLATTEPEFITEVEQMLEGRGIHLMTGRQVTAFEDDGRERVGVRLDDGTVLEVDLVVFSAGVVPNMELAQRAGIATSSLGIITDKSLRTSVRDVFAAGDCAEKQAFVTGQPTRGDFGTNAVFMGSVAGQNMAGMAASFMGTINANVSMVYDTSFGSAGLTEAGARQAGIDVVVGFSETLDKYPMIDGAAPLRTKLIFTRSNGVLIGGSVMKEGRGVAPHIDLISLAIQKRTTIEEFLCHQYATHPQLAAVPTENSCLLATMAAMASR

SEQ ID NO: 4491 - protein, 501 aa, Rubrobacter xylanophilus DSM 9941
MGIMRTKSIEQSIRDTDHPDFRLRKALGALDLTLFGIGVIIGTGIFVLTGVAAATNAGPAIALSFVVAGVACALAALCYAEFASTVPVAGSAYTFSYAALGEFLAWIIGWDLVLEFIVGASAVSVGWSGYFNSVLQSFFGITLPESLLAAPGDGGVVNLPAVGIVVLLVIVLVLGITLSSRVNQVITTIKLLVVLFFIVYGIWFVNPENWSPFLPPREPAPAGEGFSFSQTTLWELLFGSAGSFGFTGMITGASIVFFAYIGFDIVATTAEETRNPQRDLPIGILGSLAICTVLYVLVSLIMTGLVPYQQLNTASPMATALSRLGLDWAAGLVSIGAICGLTTVTMILMLGQSRVAFAMSRDRLLPPWFAKVHPRFRTPYRITITTGVVVALLAGFVPLGTLAELVNIGTLFAFVLVSIGVIVLRRTRPDLHRAFRTPLVPVVPILAALVCIYLMLNLAVGTWIRFLVWMAIGLVLYFVYSMHHSRLAVGEDIEEVAEEAR

SEQ ID NO: 4492 - protein, 378 aa, Glycine max
  misc_feature (279)..(279): Xaa can be any naturally occurring amino acid
MLPLRLSAVVSSLILCFLFPPLLCLGIRSFPTTADDGAFFHYSEAPEYRNGAGCPVSSTRVSLPSWDPSLVHIAMTLDSGYLRGSIAAVNSVLRHSSCPENVFFHFIAAEFDPASPRVLTRLVGSIFPSLNFKVYIFREDTVINLISSSIRQALENPLNYARNYLGDMLDACVSRVIYLDSDVVVVDDVGKLWRAPITRERVIAAPEYCHANFTKYFTDEFWNDPLLSRVFSTRKPCYFNTGVMVMDLAKWREGNYRRKIENWMELQRKKRIYELGSLXPFLLVFGGNVEAIDHRWNQHGLGGDNLNGVCRSLHPGPVSLLHWSGKGKPWVRLDEKKPCPLDRLWEPYDLYKQVKDSVRDQNWGFSSSILVGYAHDLL

SEQ ID NO: 4493 - protein, 304 aa, Zea mays
FGSRQNKGVVPLDNALFKPLTPNKEMVDPNTLLHYTNVLDAMVDAAYFSMKNLNITDVVVLVTETGWPAKGDSKEPYATKDNADTYNSNLIRHVFDRSGTPLHPETTSSVFIYELFNEDLRSPPLSEANWGLFYGNTTPAYLLHVSGIGTFLANDTTNQTYCIAMDGFDSKTLQAALDWACGPGRANCSEIQPGESCFQPNNVKNHASYAFDSYYQKEGKAQGSCDFKGVAMITTTDPSHGSCIFPGSKKVSNKTKEVVNSTISSNAGEKLRFKTFNSIKISAIGNILHILLAAYLPTLLLVLL

SEQ ID NO: 4494 - protein, 733 aa, Blastopirellula marina DSM 3645
MYIQLISLHGLIRASNIEMGRDADTGGQVRYVLELAQNLAALPEVEGVDLFTRRIKDKRVSSDYSEPIEELGPNCRLIRLPCGPGRYLRKERLWPYVDEFVDAMITFTRREGRSPTLVHGHYADAGYIAKEVASVFDVPFVFTGHSLGKPKLAYLMDEGWTREDADKELAMDRRIQVEQDCLSVADLVITSTRHERDQQYADYFKEEDLNFRVIPPGTDLDRFFPYYDYEMSSNGIDEQFKQARMRMRRELNRFHFAPDKPMILALCRPDRRKNINALISAYGESKELQAIANLAVFAGIRDDIESMPENEQKVLTDMLMAMDRYDLYGKMAIPKNHSSEFDVPELYRLAASDRGIFVNSAFIELFGLTSIESSATGLPFVATQEGGPQDIAENCKSGIAVDVTDSKALTDAMLTLLTDHEKWDECSSNGVNLVRKLYSWETHCRHYLEAIREIVSSPSRTPSAVGKPAVGPRMINVERMLITDIDNTLLGDDQALAQLKQVLKDNRSRIGFGVASGRALELIDDVLEKHGIHDIDVIISSVGAEMYYGPDRVPVKGWGAHLRSRWKPDRVHAALDGLPFLHLQPESHSQREFKISYSLDDALEPKEALPLIRDALSQTGVAHSLIFSHGRFLDILPHRASKGKAIRYLSSKWNIPLTNIATAGDSGNDMDMLTGETAGIVVGNYDPELEKLRESKSSRVYFAQAHCAGGILEGLEHYGFIGSPSATLRAVGA

SEQ ID NO: 4495 - protein, 193 aa, Plantago major
VFYMLCGCMGYAAFGDLAPGNLLTGFGFYNPFWLLDIANAAIVIHLVGAYQVYCQPLFAFIEKYANAKWPDREFITNDIEIPIPGLQEPYRLNFFRLVWRTAFVILTTVISMLLPFFNDVVGILGAFGFWPLTVYFPVEMYIAQKKIPKWSTKWICLQMLSMACLVISIAAAAGSVAGVILDLKVYKPFKTSY

SEQ ID NO: 4496 - protein, 215 aa, Leptospira interrogans serovar Copenhageni str. Fiocruz L1-130
MKISASILATKLTELVKTVPNYDPTAIDLIHMDVMDGNFVPQISFGEALTKEVKSLTSIPLDVHLMVAKPENHVFKYYEFNPYCITFHIETTDFPIRLAQEIKSHGTKVGVSLNPGTPVSSLENVLPYVDLILLMTVEPGFYGQKFIINGMDKIRKVKELIGSRPIELEVDGGVNDTNIQELRKNGVDIVVVGAGLYKTGNPVENAKNLKYLARV

SEQ ID NO: 4497 - protein, 250 aa, Triticum aestivum
NPDSAIWGNKIAWGHAASRDLVRWRHLPVATSPDQWYDINGVWSGSATVLPDGRIVMLYTGSTNASVQVQCLAFPTDPSDPLLINWTKYENNPVMYPPPGVGEKDFRDPTTAWFDGSDDTWRLVIGSKDDRHAGMVMTYKTNDFINYELVPGLLHRLPGTGMWECIDLYPVGGKRGIDMTEVVAAASTNGGDDVLHVMKESSDDDRHDYYALGRYDAAKNTWTPLDADADVGIGLRYDWGKFYASKTFFD

SEQ ID NO: 4498 - protein, 303 aa, Campylobacter jejuni RM1221
MKLVLFLNMGGATNLQDCEVFLKNMFNDPYILGIKNRFLRKFVAWIITKARVKAMQENYKKMGGKSPLNELTQSLCDKLNLKQDEFKFDFVNLYVPPFATEILQKYTLNASDEIILFPLYPHHSCTTVTSSLEVLQNEISKQKIQAKVKTIDIFYKNELYNEMIVSHILDKKSKFDAKILIFSAHSLPQSIIDKGDLYEKHVNDHVEILKEKLKDHFDEFILAYQSKLGPVKWLEPNTSDVLANLNDKALIYPISFCIDCSETIFELGMEYKHLAKCDYDLISCPNNSDEFMKFILKYLSDLN

SEQ ID NO: 4499 - protein, 146 aa, Brucella suis 1330
MRYLHTMVRIRDIDESLDFYVNKLGLEEIRRIENEKGRFTLIFLAAPSDTDRARAERAPELELTYNWDPETYTGGRNFGHLAYMVDDIYATCEKLKSAGVTINRPPRDGHMAFIKSPDGISIELIQKGERLAPQEPWASAENIGTW

SEQ ID NO: 4500 - protein, 383 aa, Oryza sativa
  misc_feature (94)..(94): Xaa can be any naturally occurring amino acid
MAPSSSSCHDAAASMLLCAEDNSSILWLEDEEGEVGERRSGGCRSMVGVGDLAGGGGGGGGGVEEEEEMFPPQSEECVASLVEREQAHMPRADXGERLRGGGGDVDLRVRSEAIGWIWEVYTYYNFSSVTAYLAVNYLDRFLSQYELPEGRDWMTQLLSVACLSIAAKMEETVVPQCLDLQIGEPRFLFEVETIHRMELLVLTNLNWRMQAVTPFSYIDYFLRKLNGGNAAPRSWLLRSSELILRIAAGTGFLEFRPSEIAAAVAATVAGEATGVVEEDIAEAFTHVDKGRVLQCQEAIQDHHYSMATINTVQPKPASTRRGSASASSSSVPESPVAVLDAGCLSYKSDDTDAATIASHGGGRRKSCFDSSPVTSKKRRKLSR

SEQ ID NO: 4501 - protein, 154 aa, Arabidopsis thaliana
MALRATTQRTIRIAATLRRVARPFATDAVVESDYKRGEIGKVSGIPEEHLSRKVIIYSPARTATQSGSGKLGKWKINFVSTLKWENPLMGWTSTGDPYANVGDSALAFDSEEAAKSFAERHGWDYKVKKPNTPLLKVKSYSDNFKWKGNPQPEN

SEQ ID NO: 4502 - protein, 409 aa, Pseudomonas aeruginosa UCBPP-PA14
MAIEIKAPTFPESVADGTVATWHKKPGEAVKRDELIVDIETDKVVIEVLAEADGVLAEIIKNEGDTVLSNELLGKLNEGGAAAPAAPAAAAPAAAPAAQAAAPAAAGGDDAILSPAARKLAEEAGIDPNSIAGTGKGGRVTKEDVVAAVEAKKNAPAALAKPAAPAAEAPIFAAGDRVEKRVPMTRLRAKVAERLVEAQSAMAMLTTFNEVNMKPIMDLRSKYKDLFEKKHNGVRLGFMSFFVKAATEALKRFPGVNASIDGNDIVYHGYQDIGVAVSSDRGLVVPVLRNAEFMSLAEIEGGIANFGKKAKEGKLTIEDMTGGTFTISNGGVFGSLLSTPIVNPPQTAILGMHKIQERPMAVNGQVVILPMMYLALSYDHRLIDGKEAVSFLVAIKDLLEDPARLLLDV

SEQ ID NO: 4503 - protein, 157 aa, Zea mays
MASPLRRSFPSLGRALLTPAPARMLSAEASDALVEIKPGEIGMVSGIPEEHLRRKVVIYSPARTASQQGSGKVGRWKINFLSTQKWENPLMGWTSTGDPYANVGEAGLTFNSAESAKAFAEKHGWNYVVRKRHTPLLKPKAYAENFKWKGPPKAEQA

SEQ ID NO: 4504 - protein, 218 aa, Actinobacillus pleuropneumoniae serovar 1 str. 4074
MYGQYKKLRNEFTSVLTGKSLTWGGSLIRPEATGYGAVYFADAMLATHGQGFDGKRVVISGSGNVAQYAAEKAIQKGAKVLTVSDSNGYVLFPDSGMTEKQLADLLVLKNERRERLSVYAKEQGVQYFEGQKPWGVKCDIALPCATQNELDGEAAKELVKNGCFCVAKGANMPTTLEGVEVFIAAKILYAPGKAANAGGVAHFRFRNEPKRNALSLDS

SEQ ID NO: 4505 - protein, 489 aa, Schizosaccharomyces pombe
MLKTQEIYSSEDEDDMCCPLCMEEIDISDKNFKPCQCGYRVCRFCWHHIKEDLNGRCPACRRLYTEENVQWRPVTAEEWKMDLHRKNERKKREKERKEVELSNRKHLANIRVVQKNLAYVNGLSPKVANEENINVLKGPEYFGQYGKIIKIAINKKAAANSANGHVGVYITYQRKEDAARAIAAIDGSVSDGRHLRASYGTTKYCTSYLRNQQCPNPSCMYLHEPGDEVDSYTKEDLASLQHTRPLSTKPNVVNGATHSPSPSLPFKTPLLPVTKTPLEEANSSPAAQNQHITTVDHVHPQVSMTPSLSTNNTATSVPAPYSSAASVNVVPGHATTILHHEESSALPPTAAWAKLSPSVLQERLRAAVNQQPLDALKSSSTQTSIPKIQKLKAAKLPSEEENTTKWLNKAINDLVSSLSKINFSTEGTEFDKKQIEMIQNLPPLFVFNARSVIDKEVVPEQEKSAENQPPTSLGINNGNPVMPPPGFQS

SEQ ID NO: 4506 - protein, 244 aa, Mycoplasma genitalium G37
MSKIQVNNIEALNNAMDLALERDQNVVLYGQDAGFEGGVFRATKGLQQKYGSERVWDCPIAENSMAGIGVGAAIGGLKPIVEIQFSGFSFPAMFQIFVHAARIRNRSRGVYTAPLVVRMPMGGGIKALEHHSETLEAIYAQIAGLKTVMPSNPYDTKGLFLAAIESPDPVIFFEPKKLYRAFRQEIPSDYYTVPIGEANLISEGSELTIVSYGPTMFDLINLVYSGELKDKGIELIDLRTISPW

SEQ ID NO: 4507 - protein, 310 aa, Listeria monocytogenes str. 4b H7858
MIYTITLNPAIDRLLFIQGELEKRKTNRVKKTEFDCGGKGLHVSGVLSKFGIKNEALGIAGSDNLDKLYAILKEKHINHDFLVEAGTSTRECFVVLSDDTNGSTMIPEAGFTVSQTNKDNLLKQIAKKVKKEDMVVIAGSPPPHYTLSDFKELLRTVKATGAFLGCDNSGEYLNLAVEMGVDFIKPNEDEVIAILDETTNSLEENVRKLAGKIPYLVVSLGAKGSLCAHNGKLYQVIPPKVQERNDTGAGDVFVGAFIAGLAMNMPITETLKVATGCSASKVMQQDSSSFDLEAAGKLKNQVSIIQLEER

SEQ ID NO: 4508 - protein, 284 aa, Zea mays
  misc_feature (11)..(11): Xaa can be any naturally occurring amino acid
  misc_feature (61)..(61): Xaa can be any naturally occurring amino acid
NLCFKYLYPEXFDELSTKLIEIYNIDMIAATTRRLEQALQVRGLSYYAIYGRHKSMYSIYXKARKKLVMDKIYDIHGVRVILENKADCFATLEIIHHLWPRIPGKFKDYINSPKPNRYQSLHTVVLTEQTLPLEIQIRTRDMHLQAEFGIAAHWRYKEGYPSSLACDASSKETHTIPSHSDACLLSYSKQCDHKGPVLVILLENEKMSVQEIPQNWTILDLLKRSSNYGMPLRLRLNCHAVHNWNQELKMGDVLELIPSTPCKSRGHTRKLHQKFDHRLAVSQS

SEQ ID NO: 4509 - protein, 965 aa, Solanum tuberosum
MTTRNLDKLASIDAQLRQLVPAKVSEDDKLVEYDALLLDRFLDILQDLHGEDLKETVQECYELSAEYEAKHDPKKLEELGNVLTSLDPGDSIVIAKAFSHMLNLANLAEEVQIAYRRRQKLKKKGDFGDESNATTESDIEETFKKLVGDLKKSPQEVFDAIKNQTVDLVLTAHPTQSVRRSLLQKHGRIRDCLAQLYAKDITPDDKQELDEALQREIQAAFRTDEIRRTPPTPQDEMRAGMSYFHETIWKGVPKFLRRVDTALKNIGINERVPYNAPLIQFSSWMGGDRDGNPRVTPEVTRDVCLLARMMAANLYYSQIEDLMFELSMWRCNEELRVRADDLQRSSRRDEKHYIEFWKQVPPNEPYRVILGDVRDKLYQTRERARQLLGHGYSEIPEEATYTNIEQFLEPLELCYRSLCACGDLSIADGSLLDFLRQVSTFGLSLVRLDIRQESDRHTDVLDAITQHLEIGSYRDWSEERRQEWLLSELSGKRPLFGPDLPKTEEIADVLDTFHVIAELPADCFGAYIISMATAPSDVLAVELLQRECRVRQPLRVVPLFEKLADLDAAPAAVARLFSIEWYRNRINGKQEVMIGYSDSGKDAGRLSAAWQLYKAQEELIQVAKEFDVKLTMFHGRGGTVGRGGGPAHLAILSQPPETIHGSLRVTVQGEVIEQSFGEEHLCFRTLQRFTAATLEHGMHPPVSPKPEWRALMDEIAVVATEKYRSIVFKEPRFVEYFRLATPELEYGRMNIGSRPSKRKPSGGIESLRAIPWIFAWTQTRFHLPVWLGFGAAFKYAIEKDIKNLRMLQEMYNAWPFFRVTIDLVEMVFAKGDPGIAALFDKLLVSEDLWSFGELLRSKYEETKSLLLQIAGHKDLLEGDPYLKQRLRLRDSYITTLNVCQAYTLKRIRDPDYSVTPRPHISKEYMEAKPATELVNLNPTSEYAPGLEDTLILTMKGIAAGMQNTG

SEQ ID NO: 4510 - protein, 237 aa, Gossypium hirsutum
MSDADVSKQIQQMVRFIRQEAEEKANEISVSAEEEFNIEKLQLVEAEKKKIRQEYEKKEKQVEIRKKIEYSMQLNASRIKVLQAQDDVVNAMKESASKDFLNVSHDHHVYKRLLKDLIVQSLVRLKEPGVLLRCRKEDLHLVESVLDSAKEEYASKVNVHPPEIIVDDVHLPPGPSHHHGFFHHHAEAHGPFCSGGVVIASRDGKIVFENTLDARLDVAFNKKLPEIRKWLFGQVAA

SEQ ID NO: 4511 - protein, 115 aa, Vibrio cholerae
MQAILHTLAKQNKSGVTYLYACNSAKEHIFAQEAAQLIAQQGWMQQVWYRDESADDVLQGEMQLAELILPIEDGDFYLCGPIGFMQYVVKQLLALGEDKARIHYEVFGPHAQLAA

SEQ ID NO: 4512 - protein, 511 aa, Thiobacillus denitrificans ATCC 25259
MNDRLFIFDTTLRDGEQSPGASMTKDEKLRIARQLEKLGVDVIEAGFAAASPGDADAIRAIAETVRNSTVCSLARANERDIHAAGGAIKPAKSGRIHTFIATSPIHMEKKLRMQPDQVVEAAVKAVKLAREYTDDVEFSAEDAVRSDMDFLVRIFDEVIKAGAKTINVPDTVGYSIPALWGERMKALIERVPGSDKVIWSTHCHNDLGMAVANSLAAVMNGARQVECTINGLGERAGNASLEEIVMAVRTRRDVFGCDTRIDATQIVPSSKLVSTITGYPVQPNKAIVGANAFAHESGIHQDGVLKHRETYEIMRAEDVGWNANRLTLGKLSGRNAFKTKLAELGIVLDSEEALNAAFARFKDLADKKREIFDEDLQALVSDEGYATEDERFKLLSMKVCSETGEVPRAQLVFTDDGAEKQASGEGSGPVDATFKALESVVHSGADLLLYSVNNITSGTDAQGEVTVRLAQDGRVVNGQGADTDIVVASAKAYLHALNKLHSKRERAHPQV

SEQ ID NO: 4513 - protein, 340 aa, Candida albicans SC5314
MPHHIMSINDSNHVQIGGRKSKLAVVQSEIVKKVIEDTFPNLSCSILALSTLGDKVQTQPLYTFGGKSLWTKELEILLLDSVDEFPKLDLIVHSLKDMPTNLPEEFELGCIFQREDPRDAIVMKQGSSYKSLKDLPAGAIVGTSSIRRSSQLIKNYPHLRFESVRGNIQTRLNKLDQPNNEYCCLILASAGLIRLGLGHRITSYLDDMYYAVGQGALGIEIRKGDDNIKSILKKIEDPIATICCLAERSLMRYLEGGCSVPLGVHSDYNESKQELTLKGIIVSPDGTVSIEDEVIKRITCDEDCEQVGIELGDKLKAKGAKEILDKIDMTRNINARPTEV

SEQ ID NO: 4514 - protein, 421 aa, Ehrlichia canis str. Jake
MSPSITQFRNNFTIITDTMPHVESISINIWINVGSRYENTNITGISHFLEHMAFKGTKTRTALDIAQIFDDIGGNFNAHTDREHTVYHVKTLKRDIKIAIEVLADIILNSQFPQEEIDREKGVVLQEIYQTNDSPTSIIFDKYIEAAYPNQIFGKSILGTPESVTNLSKEDLQTYMSEYYHAGNMLLSVAGNITHEEVIDLVSQHFSNMKKSEPKTAAPSVYYSGEYREIRNLEQVHLVIGFPSVSYKDDLFYTIQILDSILGNGMSSRLFQKIREQLGLVYTISSFNSSYSDNGIFSIYAATDKNNLIQLLTTIASEVKSITMNLEENEITRAKGKLISEILMSRESTTARAESLGYYYSHYNRYILKEELIKKISEITLTDLQNCIHNLLGSNNKITLAAIGQIENLPSYGDIVQMFHT

SEQ ID NO: 4515 - protein, 109 aa, Arabidopsis thaliana
  misc_feature (10)..(10): Xaa can be any naturally occurring amino acid
  misc_feature (22)..(22): Xaa can be any naturally occurring amino acid
  misc_feature (43)..(43): Xaa can be any naturally occurring amino acid
  misc_feature (49)..(49): Xaa can be any naturally occurring amino acid
MASSMLSSAXVGTAPAQATMVXPFTGLKSSAAFPVTRKTNKGXSSIASXWGRVSYIKVWPPIGKKKFETLSYLPDLSDVQFAKEVDLPFPHQGDSLVLLLLSHKHRIWN

SEQ ID NO: 4516 - protein, 107 aa, Azotobacter vinelandii
MQVNISGHQLDVTDALRDYVEEKISRLERHFDRITSVQVIMTVEKLKQKIEATLHVSGAEVVANAEHEDMYAAIDLLADKLDRQLIKHKEKQIERQQGQRPADSPVP

SEQ ID NO: 4517 - protein, 588 aa, Bradyrhizobium sp. BTAi1
MGGGCMGGGRKEFYPSLMALPSLTPEQRQNIEAQARGWISSGTDEIARAQDALRHANAAGDTAGAEQAASRLRDALNQVKSGTTTLRSLAEGTPPQQIALDWFKGQMSLVADRHDQDVVGPLGLSWFHLITMSLVATFAAAMLAIYLVRMRRANALVDRLVSAAPAHFAAAPSLAGTTPPAPASSGGTSGPANPTTPPSPAPAGPPSSVAGFAPAGQPARTGLWKGKLRVAAIFDETPNVKTFRLRDPGGGPIPFSFAPGQFLTYSAEIDGKLVKRSYTIASSAAQTAYVETTIKREDKGIFSDYMHQKVSEGDLLDVMGPSGAFTFTGKEADSVVLIGGGVGITPLMAAIRYLDDTAWPGEIFLIYGAQTTEHFIFRSELEDRQRRMRNLHVAATMARAAGTSWMGAEGQINRDFLTQSVPDLVKRRIHLCGPPGMMQAMKKLLTEIGVPAGQIKTEAFGPALGAVPPPGLTVVSELRSPVSPQATVSAPSEANAPVTGPATALIRFSKSNKVAPLPPDKSVLEVAESVGVPIDYSCRAGICGVCKTQLIEGKVTMEVQEALTADEKAHGLILACQAKSIGNLVVES

SEQ ID NO: 4518 - protein, 396 aa, Rhodospirillum rubrum ATCC 11170
MSKEKFARTKPHCNVGTIGHVDHGKTSLTAAITKVLAEAGGATFQAYDQIDKAPEERARGITISTAHVEYETEARHYAHVDCPGHADYVKNMITGAAQMDGAILVVSAADGPMPQTREHILLARQVGVPALVVFLNKCDMVDDEELLELVELEVRELLTSYDFPGDDIPIVKGSALAALEDSDPKLGHDAILELMKAVDDYIPQPERPKDKPFLMPIEDVFSISGRGTVVTGRVERGIVKVGEEIEIIGIRDTQKTTCTGVEMFRKLLDQGEAGDNIGALLRGTKRDDVERGQVLAKPGSITPHTKFKCEAYILTKEEGGRHTPFFSNYRPQFYFRTTDVTGTIELPEGTEMVMPGDNIGMTVQLIAPIAMDEGLRFAIREGGRTVGAGVVASIVQ

SEQ ID NO: 4519 - protein, 640 aa, Alopecurus myosuroides
MATATATSTAVAFSGAAAVALPKPTLPRYLPASRRALAARIRCSAVSPSPAPPATALRPWGPSEPRKGADILVEALERCGVSDVFAYPGGASMEIHQALTRSPAITNHLFRHEQGEAFAASGYARASGRVGVCVATSGPGATNLVSALADALLDSIPMVAITGQVPRRMIGTDAFQETPIVEVTRSITKHNYLVLDVEDIPRVIQEAFFLASSGRPGPVLVDIPKDIQQQMAVPVWDAPMSLPGYIARLPKPPATELLEQVLRLVGESRRPILYVGGGCSASGEELRRFVELTGIPVTTTLMGLGNFPSDDPLSLRMLGMHGTVYANYAVDRADLLLAFGVRFDDRVTGKIEAFASRSKIVHIDIDPAEIGKNKQPHVSICADVKIALQGLNTLLLNESKTRKCSDFSSWHEELDQQKREFPLGYKTFGEAIPPQYAIKVLDELTNGDAIIATGVGQHQMWAAQYYTYKRPRQWLSSSGLGAMGFGLPAAAGAAVANPGVTVVDIDGDGSFLMNIQELALIRIENLPVKVMILNNQHLGMVVQWEDRFYKANRAHTYLGNPENESEIYPDFVTIAKGFNVPAVRVTKKSEVRAAIKKMLETPGPYLLDIIVPHQEHVLPMIPSGGAFKDIIMEGDGRISY

SEQ ID NO: 4520 - protein, 390 aa, Scherffelia dubia
MATTACSIPTVARSVAGQRRAAKSFNGDASVFAARPARASVAARAVVVVTEAKAKVAINGFGRIGRNFLRCWHGRGASSGLDVVAINDSGGVKQASHLLKYDSTLGTFGADVQIVDDSHISVDGKVITVVSARDPLKLPWKEMGIDIVIEGTGVFLDSEGAGKHITAGAKKVVITAPAKGKDVPTYVIGVNDKDYNPKTDHIVSNASCTTNCLAPFVKVVDEKFGIVKGMMTTTHSYTGDQRLLDASHRDLRRARAAALNIVPTTTGAAKAVALVLPGLKGKLNGFALRVPTPNVSVVDLVVQVEKKTFAEEVNQAFRDAAAGPMKGVLAITDIPLVSVDFRCTDVSTTVDAALTMVMGDDMVKIVAWYDNEWGYSQRVVDLAELVAKKM

SEQ ID NO: 4521 - protein, 499 aa, Citrus sinensis
MNASMMMINSMSVSPDMPSSSPFQSQSLSTPTSSPPSTSLPLRTIPGSYGWPLLGPISDRLDYFWFQGPETFFRKRIEKHKSTVFRTNIPPTWPLFLNVNPNVIAVLDCKSFAHLFDMEIVEKKNILVGDFMPSVKFTGGLRVSAYLDTSEPKHAQLKGFAMDTLKRSSKLWVSEVVSSLDTLFDTVEKELSEKNSISYMVPLQKCVFNFLSKSIVGADPKADAEIAENGFSMLDKWLALQILPTVSINILQPLEEIFLHSFAYPFALVSGDYNKLHNFVEKEGKEVVQRGQDEFGLTKEEAIHNLLFILGFNAFGGFSILLPKLINAIASDTTGLQAKLRSEVKEKCGTSALTFESVKSLELVQSVVYETLRLNPPVPLQFARARKDFQLSSYDSVYDIKKGELLCGYQPLVMRDSKVFDDAESFKAERFMGEKGSELLSYLYWSNGPQTGTPNDMNKQCAGKDYVTLVACLTVAYVFQRYESITGNSSSITAVEKAK

SEQ ID NO: 4522 - protein, 321 aa, Brassica napus
  misc_feature (215)..(215): Xaa can be any naturally occurring amino acid
MSSLVFKLFLFVSLFQISISARKLAQDEPNQFQSLKYHKGALLSGKISINLIWYGEFKPAQRAIISDFITSLSHSSSKTPNQPSVATWWKTTEKYYKLAAGDKTPSPSLSLTLKSQILDETYSLGKSLTDRDIRKLASKGDQYDAVNVVLTSADVAVTGFGMSRCGTHGHARGNTGKRGSKFAYIWVGNSETHWHCVTQFPGQCAWPFHAPVYGXPQNPPLVAPNNDVGLDGMVINLASLLAGTATNPFGNGYYQGPQNAPLEAASACPGVYGKGAYPGYAGNLLVDTTTGGSFNAYGANGRKFLLPALYDPTTSDCSTMV

SEQ ID NO: 4523 - protein, 177 aa, Pseudoalteromonas tunicata D2
MQYNTSELCDQFADLIDVLEPMFVNFGGRTSFGGQIKTIKCFESNQLIRTTLEKDGTGLVLLIDGGGSTRRALIDIELAELALENNWEGIVVYGAVRHVDELDELDLGIQAIASIPVAADDNNNGEAGVPVNFAGVSFYDDDFLYADSTGIIIAPEDLEGNDSEELVEDDFEDSEVQ

SEQ ID NO: 4524 - protein, 179 aa, Apium graveolens
KASKSPEMLEPLSRGVAQGVSEKRFRQATAEPAYPWTNDMLSQQRTSFHFQPQENWMNDPNGPLFHMGWYHLFYQYNPDSAIWGNITWGHAISTDLINWLHLPFAMQPDQWYDINGVWTGSATILPDGKIVMLYTGDTDDLVQVQNLAYPANLSDPLLLDWIKYPDNPVMFPPPGIGST

SEQ ID NO: 4525 - protein, 350 aa, Rhodopseudomonas palustris CGA009
MATTFAAAIRDGLATALAVDDDVICFGLGTDDPKGVFGTTLDLHKQFGPDRVFDMPTSEAAMTGFAIGAALNGMRPVMTHQRLDFALLSLDQLVNNAAKWRFMFGGKRGVPITIRMIIGRGWGQGPTHSQSLQSWFAHIPGLKVVMPTTAEDAKGLLLGAIFDDDPVIFLEHRWLHNMKGEVPAGDVRSPLGKARIVRQGDAVTIVAMSYMTVEALHAVDHLAAQGIACDLIDLRSIRPLDWPAVIASVQKTGRLLALDSGHLTGGVAGEIVARVATDHFASLKSAPQRLAAPDVPEATSPALTKNYHVRAEHIAEAVGRMLGREVEIASLVAQRTFPHDVPGTWFSGPF

SEQ ID NO: 4526 - protein, 441 aa, Cryptococcus neoformans var. neoformans JEC21
MAKSAKSAPAATVKVDKKDKKSKKDEKPVPAPAPAKAAKKDVKEKKEKKSKKAKTPTPPPESSTSESEDSEEDSSDSESSSSEDEKPAAKTAAPAAKAKEEEPSTEESSDSDSESEEEFKTETKKEVNEESESDSDSDSGSDSNSSEDEDEKVEETKEEAKPQANGNKRKAEEESIAPAKKARADGGDEEATTNVFVGQLSWNVDNDWLKSEFESCGEVVSARVVFDRDSQKSRGFGYVEFADLESSAKAIEKDGSEIDGRAIRVNYATQRKPNEAAEKRARVFNDKQSPPAETLWIGSLSFSVTEDQVYEAFGQHGDVQSVRLPTDRDTGAPKGFGYVQFSSVDDASAALKAMNGAEIAGRAIRVDFAPPKQDNGERGGFGGGRGGGGFGGRGGGRGGGRGRGGFDRGGRGGGRGRGGPPRGGARTGGIVKPEGQKVTFD

SEQ ID NO: 4527 - protein, 107 aa, Arabidopsis thaliana
  misc_feature (106)..(106): Xaa can be any naturally occurring amino acid
MASSMLSSAAVVTSPAQATMVAPFTGLKSSASFPVTRKANNDITSITSNGGRVSCMKVWPPIGKKKFETLSYLPDLTDVELAKEVDYLLRNKWIPCVEFELEHGFXY

SEQ ID NO: 4528 - protein, 122 aa, Glycine max
MASLSTRIFFIMSLVCLALGPMAQGEMTCGQVVSNLTPCISYVVYGGTNVPEQCCNGIRNLYGMAQTKPDRQAVCNCIKNGVRNSGFNYSDFNLNLAANLPKKCGVNIPYQISPNTDCTRVQ

SEQ ID NO: 4529 - protein, 379 aa, Cryptococcus neoformans var. neoformans JEC21
MFARSASKSVVSSLRTVQAPVGVRYYASAFNSSTPTSAFAGKKGADGNYTVTLIPGDGIGPEIANSVKQIFKAAQVPIVWEEVDVTPILKDGKTVIPDDAIKSIKKNTVALKGPLATPIGKGHVSLNLTLRRTFSLFANVRPCVSIKGYKTPYDNVNTVLIRENTEGEYSGIEHEIVDGVVQSIKLITREASERVARYAFHYASESGRNKVTAVHKANIMKMSDGMFLTACRDVAKEYPNISYDEDLLDRVCLRIASDPSPFADRVMVMPNLYGDILSDLSAGLIGGLGLTPSGNIGKDASIFEAVHGSAPDIEGKGLANPTALLLSSLMMLRHMSLYELADKIEKAALSTIAEGKAITRDLGGKAGTKEYTDAILSKL

SEQ ID NO: 4530 - protein, 316 aa, Arabidopsis thaliana
  misc_feature (172)..(172): Xaa can be any naturally occurring amino acid
  misc_feature (177)..(177): Xaa can be any naturally occurring amino acid
  misc_feature (181)..(181): Xaa can be any naturally occurring amino acid
MGRKRKHSETVTAAPVKDSAPERPQRTLLGWKDKKEDAENSKPAYASVFRNKEKVLVTCSRRINFRYRHLMLNMVSLLPHCKKDSKVEAKSSRGATLNELIELKGSSSCLFFECRKHKDLYMWMVKSPGGPSVKFLVNAVHTMEELKLTGNHLKGSRPLLTFSSNFENDAHXWKLLXEMLXQIFGIPEGHRKSKPYHDHVFVFSIVDDHIWFRNYQISVPHNESDKIARGDLDKMTLIEVGPRFCLNPIKIFGGSFGGTTLYENPFYVSPNQIRALEKRNKAGKFAKKIKAKTRRKMHELSNPLEPDEFTDMWNDE

SEQ ID NO: 4531 - protein, 602 aa, Pseudomonas fluorescens Pf-5
MSTQPSTNGVVPQRLAHVRQLMSREGIHALLVPSADPHLSEYLPGYWQGRQWLSGFHGSVGTLIVTADFAGVWADSRYWEQATKELKGSGIELVKLQPGQPGPLDWLAEQTPQGAVVAVDGAVMALASARTLGSKLQERGASLRTDIDLLQEAWNDRPSLPDQPVYQHLPPQATQSRVEKLAALRATLKERGADWHFIATLDDIAWLFNLRGADVSFNPVFVSFALISQQQATLFVALSKVDEALRAQLEVDGVSLRDYSEVSAALQAVPEGVALQIDPARVTAGLLEHLNPGVKLLEGLNPTTLAKSRKSLADAEHIRQAMEQDGAALCEFFAWLDSALGRERITELTIDERLTAARERRPGYVSLSFNTIAAFNANGAMPHYHATPEEHAVIEGDGLLLIDSGGQYLGGTTDITRMVPVGTPSAEQKRDCTRVLKGVIALSRAQFPRGILSPLLDAIARAPIWAEGVDYGHGTGHGVGYFLNVHEGPQVIAYQAAATPQTAMQPGMITSIEPGTYRPGRWGVRIENLALNREAGKTEFGEFLNFETLTLCPIDTRCLEPSLLTEDEREWFNGYHAEVRRRLSPLLEGPALEWLQVRTAAI

SEQ ID NO: 4532 - protein, 604 aa, Arabidopsis thaliana
MAAALECWSSRAGDGGDPDNDLVDQVLMRTHDRSESVITSLPETSLEVEGSTTVFDQSSSAMQKRFQRLSRNVSEAIVSLKNTLNLDSARDNQSFGGAMTPKAEVSGGGGGRKLVWATVVKNLAKMYPGSQLPEKLVSNLKKHYDSLPFSYSQADFDMKEVFLHVKLIEQAAGDDNPVFMIQEVSTEEPRGSVLRLTFACNSFLSWSTMSGVLDSASICCKKIQIFEKKGLTLGVVLLLDQSGQHSLFKTRVENTLKVATKKPKPTSVKLPFGLCGCQEQNGGVGELGGVEEESIQHSSRLGIENLNSTIQIQVPLPSSSFAVSVDEWQTIQSGGNEIGKWLLNSDSFEFGDQIGPTSLKGIFRGKRVGIEKLKGCDKGNSYEFELRKDYLELMACGHKSILQFYGVCIDENHGLCVVTKLMEGGSLHELMLKNKKLQTKQILRIAIDIAEGLKFVNDHGVAYRDLNTQRILLDKHGNACLGNIGIVTACKSFGEAVEYETDGYRWLAPEIIAGDPENTTETWMSNAYSFGMVLWEMVTGEAAYASCSPVQAAVGIAACGLRPEIPKECPQVLRTLMINCWNNSPSKRPNFSHIHNTLLRAVSR

SEQ ID NO: 4533 - protein, 260 aa, Hydrilla verticillata
MFSSYALARTGHLSCNPCTELRPKVSKGGSSCVYQRTFVRCCGNGAPSRRVATASLEARNSVVLKEPEAMEGALNGSAVVDSPSAVSGGVRDTYGEDRATEDQLLTPWTASVASGNSLLRDPRLNKGLAFTEKERDAHYLRGLLPPVFLTQEIQEKKLMTNLRQYQVPLQRYMAMMDLQERNERLFYKLLIDNVEELLPVVYTPTVGEACQKYGSIFRRPQGLYISLREKGKILEVLKNWPERNIEVIVVTDGERILGLG

SEQ ID NO: 4534 - protein, 334 aa, Arabidopsis thaliana
MATATSHQSVVSFASLRSSPSSTISQCGFKIDSSLSFTSKKTNFCKIKAMASSVSYDNTLLSPSKTIPDNSQKKSNEAALILIRRGESLWNEKNLFTGCVDVPLTEKGVEEAIEAGKRISNIPVDVIFTSSLIRAQMTAMLAMIQHRRKKVPIILHDESEQAKTWSQVFSDETKNQSIPVIPAWQLNERMYGELQGLNKQETAERYGKEQVHEWRRSYDIPPPKGESLEMCAERAVAYFQDNIEPKLAAGKNVMIAAHGNSLRSIIMYLDKLTCQEVISLELSTGIPLLYIFKEGKFMKRGSPVGPTEAGVYAYTKRLAQYRQKLEDDSEVLCA

SEQ ID NO: 4535 - protein, 421 aa, Corynebacterium glutamicum
MALVVQKYGGSSLESAERIRNVAERIVATKKAGNDVVVVVSAMGDTTDELLELAAAVNPVPPAREMDMLLTAGERISNALVAMAIESLGAEAQSFTGSQAGVLTTERHGNARIVDVTPGRVREALDEGKICIVAGFQGVNKETRDVTTLGRGGSDTTAVALAAALNADVCEIYSDVDGVYTADPRIVPNAQKLEKLSFEEMLELAAVGSKILVLRSVEYARAFNVPLRVRSSYSNDPGTLIAGSMEDIPVEEAVLTGVATDKSEAKVTVLGISDKPGEAAKVFRALADAEINIDMVLQNVSSVEDGTTDITFTCPRSDGRRAMEILKKLQVQGNWTNVLYDDQVGKVSLVGAGMKSHPGVTAEFMEALRDVNVNIELISTSEIRISVLIREDDLDAAARALHEQFQLGGEDEAVVYAGTGR

SEQ ID NO: 4536 - protein, 410 aa, Enterococcus faecalis V583
MEFSLDNNINNGAVIKVIGVGGGGGNAVNRMIEENVKGVEFITANTDVQALKHSKAETVIQLGPKYTRGLGAGSQPEVGQKAAEESEQVISESLQGADMIFITAGMGGGTGTGAAPVVAKIAKELGALTVGVVTRPFSFEGPKRGRFAAEGIALLKENVDTLLIISNNRLLEVVDKKTPMLEAFREADNVLRQGVQGISDLITAPGYVNLDFADVKTVMENQGTALMGIGVASGEERVIEATKKAISSPLLETSIDGAEQVLLNITGGLDMTLFEAQDASDIVTNAASGDVNIILGTSINEDLGDEIRVTVIATGIDESKKDRKPHRQTRQAVQPMQQTTQSVEMDQPKSQEEASAFGDWDIRREQNTRPKVDESSLEQVDKKEFDTFHREEPNHNDDELSTPPFFRRKR

SEQ ID NO: 4537 - protein, 607 aa, Debaryomyces hansenii CBS767
MSDKNTRIAIVSTDRCKPKKCKQECRKACPVVKTGKLCIEVTPTSKIAFISETLCIGCGICVKKCPFDAINIINLPTNLESETTHRYSANSFKLHRLPTPRPGQVLGLVGTNGIGKSTALKILAGKQKPNLGRYDDPPDWEVILKHFRGSELQNYFTKVLEDDIKAIIKPQYVDNIPRALVKSKVKHVEGILQAKLERKDQWDYILNILELRGVLDRDVANLSGGELQRFALGMTCVQEANVYMFDEPSSYLDVKQRLRAAEIIRSLLHPTCYVICVEHDLSVLDYLSDFVCIIYGVPSVYGVVTLPSSVREGINIFLDGHIPTENMRFRTESLQFKLADAAEGLELDKSNALSYPTMEKTQGDFHMKVESGDFTNSEILVMMGENGTGKTTFCKLLAGAIKPDNGLQIPKLNVSMKPQKIAPKFPGTVRQLFFKKIRASFLHPQFQTDVVKPLKIDDIIDQEVQTLSGGELQRVAIVLSLGMPADIYLIDEPSAYLDSEQRIICSKVIRRFILHSKKTAFVVEHDFIMATYLADRVIVFEGKPSKDALAKAPESLLTGCNRFLKNLNVTFRRDPNSYRPRINKLDSQMDKEQKSAGTYFFIDNSEL

SEQ ID NO: 4538 - protein, 416 aa, Campylobacter jejuni RM1221
MIAYEKIQLKNKLEVYALPVNKNSDVISVDIFYKVGSRNEIMGKSGIAHMLEHLNFKSTKNLKAGEFDEIVKGFGGVDNASTGFDYTHYYIKCAKKNLDKALELFAELMENLNLKDEEFQPERAVVLEERRWRTDNNPLGYLYFRLFNHAFMYHPYHWTPIGFFKDIENWSIEDIKEFHSIYYQPKNAILLVSGDIESKEVFELSKKHFEKIKNTKTIPKIHTKEPKQDGAKRIYLHKNSDTELLALAYKIPNFKHKDIPALNALSELLGSGKSSLMSEILIDKLNLINDYYAYVNDCIDDNLFIFICNCNPNVNAEKVEKELLKIIDKLKMGKISQKDLQRVKNNVKSDFIFSLNNASAVANIYGSYLARGDINPLLNYEKDIQNLELKDLISCAKKYFIQENSTTVILRKDSNG

SEQ ID NO: 4539 - protein, 221 aa, Arabidopsis thaliana
MKNLYLAILYLLAASTLPFAIASDPSPLQDFCIGVNTPANALFVNGKFCKDPKLVTADDFYFSGLDKARTTESSPVGSNVTTVNVNQIPGLNTLGISLVRIDYGINGQNPPHTHPRATEILLVQEGTLFVGFFSSFPENRLFNKTLNKGDVFVFPEGLIHFQVNIGKQPAVAFASLSSQNPGVIIIGNTLFGSKPPIDPNVLAKAFQLDPKVIIQLQKKFG

SEQ ID NO: 4540 - protein, 399 aa, Azotobacter vinelandii
MAIDIKAPTFPESIADGTVATWHKKPGEPVKRDELIVDIETDKVVMEVLAEADGVIAEIVKNEGDTVLSGELLGKLTEGGAATAAPAAAPAPAAAAPAAAEAPILSPAARKIAEENAIAADSITGTGKGGRVTKEDAVAAAEAKKSAPAGQPAPAATAAPLFAAGDRVEKRVPMTRLRAKVAERLVEAQSSMAMLTTFNEVNMKPVMELRAKYKDLFEKTHNGVRLGFMSFFVKAAVEALKRQPGVNASIDGNDIVYHGYQDIGVAVSSDRGLVVPVLRNAEFMSLAEIEGGINEFGKKAKAGKLTIEEMTGGTFTISNGGVFGSLLSTPIVNPPQTAILGMHKIQERPMAVNGQVVILPMMYLALSYDHRLIDGKEAVTFLVTMKDLLEDPARLLLDV

SEQ ID NO: 4541 - protein, 440 aa, Mycobacterium tuberculosis CDC1551
MRRPLDPRDIPDELRRRLGLLDAVVIGLGSMIGAGIFAALAPAAYAAGSGLLLGLAVAAVVAYCNAISSARLAARYPASGGTYVYGRMRLGDFWGYLAGWGFVVGKTASCAAMALTVGFYVWPAQAHAVAVAVVVALTAVNYAGIQKSAWLTRSIVAVVLVVLTAVVVAAYGSGAADPARLDIGVDAHVWGMLQAAGLLFFAFAGYARIATLGEEVRDPARTIPRAIPLALGITLAVYALVAVAVIAVLGPQRLARAAAPLSEAMRVAGVNWLIPVVQIGAAVAALGSLLALILGVSRTTLAMARDRHLPRWLAAVHPRFKVPFRAELVVGAVVAALAATADIRGAIGFSSFGVLVYYAIANASALTLGLDEGRPRRLIPLVGLIGCVVLAFALPLSSVAAGAAVLGVGVAAYGVRRIITRRARQTDSGDTQRSGHPSAT

SEQ ID NO: 4542 - protein, 126 aa, Rubrobacter xylanophilus DSM 9941
MRYLHTCYRVLDLERSIDFYTNKLGLELVRKVPIGEEATNAFIGVPGDPEPRLELTLNHDRQTPYELGEGYSHVAFAVEDLDALAERLERAGGVEFESRPHAISTGTRLFFVRDPDGYRIEFVERR

SEQ ID NO: 4543 - protein, 127 aa, Oryza sativa
MSGVWVFRNGVVKLVENPPASANSGGGGGGGGGGGGGGIRRKALLHMPTGEVVTSYASLERKLAALGWERYYSGGGGAAAAAAMMLQFHKRSSVDLISLPKDFSQFGSVHMYDIVVKNRDAFRVIDV

SEQ ID NO: 4544 - protein, 487 aa, Burkholderia sp. 383
MHIKQLYIDGAWQPAAAGGQRAIIDPATGEAIARVAYGSAADAGHAIRAARAAFDAGEWPHLPAEERAACLRRLANALRDEAPALARIETANTGKTLAESSSDVHDAASAFDYFASLAVTETGSMNAAKPHVISVTLREPVGVCGLITPWNYPLLQAAWKLAPALVAGNTVVVKPASLTPLSTHRLVELAHDAGLPRGVLNLVTGGADVGDALAASPQVDLISLTGSNAAGASVMRAAAGNFKRVSLELGGKNPNLVFADADVDTALDYALNAAFFNAGQMCSAGSRLLVERTLHDAFVDALAARIAAIRVGRGDDDATRMGPVISAQQRDRVLALIGEAARDGARIVCGGRAPAGDAFATGFWVEPTLIAGVRTTMAIAREEVFGPVLTVEAFDSEDEAVALANDTPFGLAGAVWTRDFARANRVMRRLRAATVWINDYNVTLPGAPWGGYKASGIGRELSRSGLDEYTELKHAYLNFEASPQRWF

SEQ ID NO: 4545 - protein, 364 aa, Coccidioides immitis RS
MAEFVRAQIFGTTFEITTRYTDLQPVGMGAFGLVCSARDQLTNQAVAVKKIMKPFSTPVLAKRTYRELKLLKHLRHENVISLSDIFISPLEDIYFVTELLGTDLHRLLTSRPLEKQFIQYFLYQILRGLKYVHSAGVVHRDLKPSNILINENCDLKICDFGLARVQDPQMTGYVSTRYYRAPEIMLTWQKYDVEVDVWSAGCIFAEMLSGRPLFPGKDHVNQFSIITELLGSPPDDVIKTICSANTLQFVQSLPKRERQPLSEKFKGAEPLAVDLLERMLVFDPKKRITAAEGLAHEYLAPYHDPTDEPVAETQFDWSFNDAELPIDSWKVMMYSEILDYHNVDQDSQGIHGTPLNTEAQRVPM

SEQ ID NO: 4546 - protein, 582 aa, Bacillus subtilis subsp. subtilis str. 168
MGYYLTWLTISRKKEICLNNIKKTKEGHLETTLRGKEVLSIPTLNKGVAFSLEERQELGLEGLLPPTVLSLDQQAQRAYEQFQAQPDRLRQNVYLSDLANRNEVLFYKLLKNHLREMLPVVYTPTVGEAIQEYSHEYRRPQGIYLSIDNIDGIEKAFENLHATAGDIDLIVATDSESILGIGDWGVGGINIAIGKLAVYTAAAGIDPSRVIPVVLDVGTNNEKLLNDPLYIGNKHERVQGERYEAFIDAYVKAALKFFPKALLHWEDLGNKNARNIMKKYNHEILTFNDDIQGTGAITLAGVLAAMKKTGASIKDQRVVIFGAGSAGIGIADQIRDTMVLAGLSEEEANKRFYTLDYRGLLTEDIEGILDFQKPYLRNADEVKDWKRDEKGQIPFDEVVRQAKPTILIGTSGVSGAFTEEIVKEMASHVDRPVIMPMSNPTHLAEAVPEDLFKWTDGKVLIATGSPFDNVEYNGVSYEIGQSNNAFAFPGLGLGSIVAEARIITPAMFAATADAIAEMVDLETPGAGLLPSIDKLQEVSIQVAIAVAEAAIKDGVANRQPEDVKQAVLDAMWTPEYKKVIAK

SEQ ID NO: 4547 - protein, 162 aa, Triticum aestivum
  misc_feature (19)..(19): Xaa can be any naturally occurring amino acid
RVRRGQTPKKRGDERGGGXTLGSTAWEAFRRHFSRKRAVDIRRINPKVSKEEAVAISGRLLQILADHGPLTVGSTWNHAKDAAIDGLNSKTHMKILLKWMWGRRIIKLSCTQAGNTKKFLYSPFTAEDTEAAEEPAEEQPKRKGWKGKHPKYQTKKQPATAA

SEQ ID NO: 4548 - protein, 364 aa, Glycine max
MARRSLPLLKHLLLSRRIPARSVTYMHRPGDGSPRPVTLIPGDGIGPMVTGAVEQVMEAMHAPVYFEKFEVHGHMKAVPPEVLDSIRKNKVCLKGGLVTPMGGGVSSLNVQLRKELDLYASLVNCFNLPGLPTRHDNVDIVVIRENTEGEYSGLEHEVVPGVVESLKVITKFCSERIAKYAFEYAYLNNRKKVTAVHKANIMKLADGLFLESCREVATRYPGIKYNEIIVDNCCMQLVSKPEQFDVMVTPNLYGNLVANTAAGIAGGTGVMPGGNVGAEHAVFEQGASAGNVGSDKIREQKKANPVALLLSSAMMLRHLQFPAFADRLETAVEKVILEGKCRTKDLGGTSTTQEVVDAVIDALD

SEQ ID NO: 4549 - protein, 468 aa, Burkholderia sp. 383
MSLFRKKNVDRMIAGAHAAGLKKALGAIDLTFLGIGAIIGTGIFVLTGTGAVQAGPALMLSFVIAAIACGLAALSYAEFASTIPVAGSIYTYSYATLGELVAWIIGWDLMLEYGLASSAVSVGWSGYLQSLLQGFGLTLPTVLTAAPGAVPGVVTWFNLPAFLVMIVITTLLSIGIRESTRINNIMVFIKVSVVLLVIAVGVFHVTPANWKPFMPHGWNGVFGAAAVMFFAFIGFDAVSSAAEEVKNPKRDLPIGIIASLAVCAVLYVTVAAVATGIVPSAQYANISHPISYALQKAGETWVAGFIDLGAVLGMLTVILVMSYGQTRVIFAMSRDGLLPAALSRVHPRYATPFLTTWLVGLFFGLIAALVPLNVLAELINIGTLAAFSMVSIAVLVLRRTHPDLPRAFRCPGVPVVPILAVASCLFLMLNLQPITWAAFGIWLVIGLVIYFLYSRHHSKLAHGHHDAH

SEQ ID NO: 4550 - protein, 396 aa, Rhodospirillum rubrum ATCC 11170
MSKEKFARTKPHCNVGTIGHVDHGKTSLTAAITKVLAEAGGATFQAYDQIDKAPEERARGITISTAHVEYETEARHYAHVDCPGHADYVKNMITGAAQMDGAILVVSAADGPMPQTREHILLARQVGVPALVVFLNKCDMVDDEELLELVELEVRELLTSYDFPGDDIPIIKGSALAALEDSDQKLGHDAILELMKAVDDYIPQPERPKDKPFLMPIEDVFSISGRGTVVTGRVERGIVKVGEEIEIIGIRDTQKTTCTGVEMFRKLLDQGEAGDNIGALLRGTKRDDVERGQVLAKPGSITPHTKFKCEAYILTKEEGGRHTPFFSNYRPQFYFRTTDVTGTIELPEGTEMVMPGDNIGMTVQLIAPIAMDEGLRFAIREGGRTVGAGVVASIVQ

SEQ ID NO: 4551 - protein, 260 aa, Nocardia farcinica IFM 10152
MPHCLVEKRDHVLIVTMNRPEARNALSGEMMTIMKDAWDQVDNDPDIRAAILTGAGGAFCAGADLKAMTSTHPGDQFSGGGWDLSRIEALLKGRRLTKPLIAAVEGPAIAGGTEILQGTDIRVAGESAKFGVSEARWGLFPLGGSAVRLVRQIPYTVAADILLTGRHISAAEAKEIGLIGHVVPDGTALDKALELAAQIAANGPLAVQAILRTIRETEGMHEDEAFKIDAELGTAVFKSADAKEGPRAFAEKRKPNFTGA

SEQ ID NO: 4552 - protein, 620 aa, Nicotiana tabacum
MVKSAKKSATKVDAAVVAPTKPLKKGKREAGEEIEKIMSAKKQKKDMAVAQAVEKKKSDTKTQKKKKQESSSSDDSSESEDEKPTKAVAPPKKVAPAKYGKLASSSDDSDSSDEDDAPPPKKVVAASAKNGVAAMKKDESSDDSSSEDDSSSEEDVPAAKKPAANGSAAVSKKDESSDQSSSEDDSSSEDDAVAKKTAPKKGLAAAASKKEESSEDSSDDSSSDDDEPASKVAAAQPAKAAKKTGDGSEETDSDEDDSDSDVDKGKAAAVSKKKVESSSDSSDEESEESDEEGSQKKKIKPSSTPATVSKKESSSEESSEEDESEEEEDQKPSKTPKKDADVEMVDADSSKAQKTPITPKAQTPGSKTLFVGNLSYSVEQADVENFFKDAGEVQEVRFSTHEDGSFKGYGHVEFVTAEAAHKALELNGQDLLGRAVRLDLARERGEYTPRTGREENSFQRQGRSEGTTIFVRGFDKNEAEDQIRSSLEEHFASCGKIFKTRIPTDPEGYIKGMAYIEFANGDSDALNKALELDGSEVGGYNLTVQEAKPRGDSSGGGRGFGGRSGGRGGGRDGGGRLGGRGGGGRFGGGGRGGGGGGRGRGTPNRPSFTPSGKKTTFNDE

SEQ ID NO: 4553 - protein, 462 aa, Nitrosomonas europaea ATCC 19718
MKISFHFSYFATLLCITLAWPLPATANSHEYLLDNGLKLVVKEDHRSPVVIQQVWYKAGSMDEVNGTTGVAHALEHMMFKGTDSVLAGEFSRKIAAIGGKENAFTSRDYTAYYQQLHQRHLPMAMELESDRMHNLQLTEEAFAKEIQVVMEERRLRTDDQAHSLLYEKMMATAFQTHPYRRPVIGWMNDLENMQVNDARDWYQRWYAPNNAVLVVVGDVDPENVFVLAKKYYGRFSAARVPALSERKPQIEPPQTGIKRLVVKASAQLPYLIMGYKVPVLKDPKNEWEPYALTILAEVLDGNASARLNKTLVRETRVAISADASYNAIERGPGTFFIDGAPSEDKTVDDLEQSIRTEIGKIIQSGVTQEELARVKAQVVANHIYQLDSTFAQAMQIGRLESVGLSHRDADIILEGLQAVTAEQIRKVAEKYLIDDSLTIAVLDPQPLPETTHPRNSNIELKH

SEQ ID NO: 4554 - protein, 345 aa, Oryza sativa (japonica cultivar-group)
MSNSTSGFSQNQGQHRPASSHSLAKAPAQPLQTPQYLLLHDNKNMGQLQQANQFIFPDYGYPSYQFPGIPLMSNVQAESHQTKPATTNYRTSIDSPKQSSSAEKSQDIPSRPLMMTPQEKIEKLRRRQQMQALIAIQQQQQQFGQDGSGSDTMVPQAYSPKSKNPDSLGSSVVIDDNANKVFSLELIPTGHEEIQKSSGIPDDPFIEEKIYYQLQDALAKLDTRTRRCIRDSLLRLAHSVSERQITSDRSSANKSNKDDDEVSEDTSKRRSPASEAETNTNPIDRIVAHLLFHKPCSKVSTPAKEEIKSSTPLPTEPDSKIPTDAPGGPSENHQNGQEMTLQPSL

SEQ ID NO: 4555 - protein, 532 aa, Citrus sinensis
MASTSLSFSLLPTEFQSPRKSSKLYTPRVRSAAIRPRPITASISEKQSVPVPPPIIISPSDEQPTKLPIRKIPGSYGLPYLGPIKDRQDYFYNLGRDEFFKSKIQKYGSTVFRANMPPGPFISSNPKVIVLLDGKSFPVLFDVSKVEKKDLFTGTYMPSTDLTGGYRVLSYLDPSEPNHAKLKQLLFFLLMNRRDKVIPELHSTYTEAFETLERDLAAKGKADFSGANEQAAFNFLARAWFGKNPADTTLGSDAPTLIGKWILFQLAPLLSLGLPKLVEEPLLRTRPLPPALVKKDYQRLYDFFHESSGFVLDEAEKLGVSREEACHNLVFATCFNSFGGMKILFPNMVKWIGRGGVKLHMQLAEEIRSVVRSNGGKVTMAGMEQMPLMKSVVYEVLRMEPPVALQYGKAKRDLIISSHEASFEVKEGEMLFGYQPFATKDPKIFEQAEEFVADRFVGEGEKMLKHVLWSNGPETENPPVGNKQCAGKDFVVLASRLLLVELFLRYDSFDIQVGKSAIGSSVTLTSLKRASF

SEQ ID NO: 4556 - protein, 116 aa, Glycine max
  misc_feature (98)..(98): Xaa can be any naturally occurring amino acid
  misc_feature (107)..(107): Xaa can be any naturally occurring amino acid
ASLKVAFLAAVLCMVVVSAPMAHAAITCRQVTNSLINYIIYLQNRRTPPSECCNRVKILNAATKTTTNHHTAYNYLKSTTSQISSFKSNNATSLPNKXQFSIPYKIXTSTNYATIN

SEQ ID NO: 4557 - protein, 124 aa, Actinobacillus actinomycetemcomitans
MSSSVPSLGAFLAKVEQRDGNQPEFLQAVREVFTSIWPFLEQNPKYCSEALLEALVEPERAIQFRVAWTDDKGQVQVNRAFRIQFKSAIGPFKGGMRFHPSVNQSILKFLGFEQIFKNALTTFA

SEQ ID NO: 4558 - protein, 263 aa, Spermatozopsis similis
EIVSARDPLQLPWKAMGIDIVIEGTGVFIDEAGAGKHLTAGAKKVIITAPAKDKSIPTFVIGVNDKDYKHEYPIVSNASCTTNCMAPFCKVLDAKFGIVKGVMTTTHSYTGDQRLLDASHRDLRRARAAALNIVPTTTGAAKAVALVLPNLKGKLNGFALRVPTPNVSIVDLVIQVEKKTFAEEVNNAFREAAAGEMKGVLAVCDEPLVSVDFRCTDVSVSIDSSLTMVMGDDMVKIVAWYDNEWGYSQRVVDLAELAASKWA

SEQ ID NO: 4559 - protein, 119 aa, Glycine max
MKKVFVAFLTLQVVLVLTIIAAEPAGKGYNCEKAKSSVTPCIKYLTSKVDTPSAACCNGVKEVKSSAPTKDEKIAACQCLKEVTTHIPNLKEDRATALPKQCGVDVGFLITKKNCSSIA

SEQ ID NO: 4560 - protein, 498 aa, Aspergillus oryzae
MGHTVPPLKDQSLFIEKAYVNGEWVGAQSGETFEVHDPASGKLIGTCPEFNAADTEKAIQAATEAFPKFRTTLARERARMLRRWYQLMIDNAEDLATLITWENGKPLADAKGEVNYAAAFFEWFSEEAPRIYGDTIPSSVAGNRVMTLKQPVGVCSLITPWNFPAAMITRKAGPALAAGCTVVVKTPGETPFTANALAELAHRAGIPKGVFNIVTSLKNTPEVGEALTTHPEVRKVSFTGSTNVGKLLMKQSSSTVKKVSWELGGNAPFIVFDDVEDLDAAVAGAVASKFRSSGQTCVCANRIYVQRGIYDEFVKRFVEKVKGFKVGAGFEEGVTHGPVIHGRAIEKIDEHVRDAESKGAKVAVGGRKLSDLGPNFYDMTVLTDMNKDMLVASEETFGPVAGLFPFETEKEVVDLANRAEVGLAGYFFSGNVKRIFRVAEALEVGMVGVNTGLISDVASPFGGVKQSGFGREGSKYGIDEFLTIKSVTFGGMGEPLQS

SEQ ID NO: 4561 - protein, 310 aa, Agrobacterium tumefaciens str. C58
MRKLWKRPEMTKWTEANIPNQRGRSAVVTGTGGLGLETALALARAGCDVTIAGRNPEKGSDAVSRIQRAAPHVTVSFEKLDLADLTSIALFAQRMENDRESLDLLVNNAGIMVPPKRQETRDGFELQFGTNYLGHFALTAHLMPLLKKGTDARVVTVSSVAARAGKINFADINSEKNYHPMRAYSQSKLACLMFALELQDRSRAAGWGVSSIAAHPGVSRTDLLHNAPGRNSLQGLARTFLWFLFQPVAQGALPQLFSATSKEVKSGGYYGPDRLGETRGHPQPARIPPEALDRVAGKQLWEISQRMTGL

SEQ ID NO: 4562 - protein, 370 aa, Campylobacter jejuni RM1221
MSEFLVEEMQHNKGAKIKVIGCGGGGGNMINHMVKMGLNDLDLIAANTDAQAISISLAKTKIQLGEKKTKGLGAGMLPEVGAESARESFEEIKASLSQSDIVFIASGFGGGTGTGATPVIAQAAKEIGALTVSVVTMPFAFEGKQRKKLAESGLLELKKESDSILVIQNEKLLSIIDKKAGIKDAFRLVDDILARAVKGMVSILLDNGDINVDFADVRTIMSHRGLALMGVGSASGENAIEEALSNAIESPLLDGMDIKGAKGVILHFKTSSNCSLFEISAAANSIQEIVDENAKIIFGSTTDDSMEDRVEVTIIATGFEDKDTVAKKSTEEAQASKKNPYLSLKKVSGGYDEEIMAQIETPTFLRRQMD

SEQ ID NO: 4563 - protein, 320 aa, Vibrio cholerae
MNNHKKLGILLANLGTPQAPTSQAVKAFLSQFLHDQRVVDMSRWLWCPLLHGIILPTRSPKVAKLYQSIWMDEGSPLMVYSRRQRDKLAELSQRPVELGMTYGEPSLLEGVRKLQQQGVEQIVVLPLYPQYSATTTAAVFDGLAKALRQLPVVPELHFIRDYHDHPLYIQALAKSVRASWQQHGQGDLLLCSYHGIPKRYAQNGDIYPEHCLKTTELLAQALGLPQDKVMMTYQSQFGKEEWLQPYTDKTMEALPRQGIKKLDVICPAFSVDCLETLEEIAEQNQEIFLHSGGEAFHYVPCLNDSQSHIELMAALVKVDC

SEQ ID NO: 4564 - protein, 622 aa, Streptomyces griseus
MCGIAGWVVRQDGRPREDPAVAEAMAGAMACRGPDEQGVRGGRHVTLVHTRMAVIDLLGGRQPMAADESEDPAATLTYCGEIYNAAELRSDLAGRGHRFRTRSDTEVVLRAYLEWGERCPERLEGMFAFAVWDARTRSLFLARDRFGVKPLYYAETGDGLVFGSEPKALLVHSDVSPEVDLDGLRVLFSMARAPGECVYRSLSDLPPAHTLRFGPDGRLSLRRYWQLEARPHEEDLAGTVATVRGLLESSVARELVSDVPLSVLLSGGLDSSTVAALAARALADGDGGPVRTTTVTYSGYGDNFQPDLVRSAPDSPYARAVAEHIGAEHLEIELTTADLIDPVARRTVLRAQDVPAPFGDMDTSTYQAFAGVRRHSRVALTGESADEIFGGYSWVHIPDLAHEEQFPWVAFEQWHPGTRRGLGQGLLSPAFKDRLDMGSYYAERYAQAMSRIPRLPREGEEERRAREICDLHLTHWLPRLLERNDRLSMVSGLEVRVPFCDHRLVQYAYNIPWAMKTFDGREKSVLRAAARDLLPERVLDRPKAPFPVSQDATYTKALHQELTEVLADPASPVLPLLDLEAARAVVAREGGADLQDWLHRMNVEMVLQVDAWLRELGGDVEL

SEQ ID NO: 4565 - protein, 110 aa, Ehrlichia canis str. Jake
MVSVMIEQISDSDFHSKVISCNEDILILVDFWAPWCGPCKTLEPQLEKLAQQYAEQVKIYKLSIEDNQDVAIQYGVSAVPTTLMFKNGKKLSQVIGADIAKIINELNNHI

SEQ ID NO: 4566 - protein, 362 aa, Polaromonas sp. JS666
MKTYKIACIPGDGIGKEVVPAGQTVLEALAATQNKFKFEFTSFDWGGDYFRQHGVMMPEDGLDALRDKDAILFGSAGDPHIPDHITLWGLRLKICQGFDQYANVRPTRILPGIDGPLKRCKPEDLNWVIVRENSEGEYSGVGGRAHQGHPIEVATDVSMMTRAGVERIMRFAFKLAQLRPRKLLTVITKSNAQRHAMVMWDEIALQISKEFPDVKWDKELVDASTARMINRPASLDTIVATNLHADILSDLAAALAGSLGIAPTGNIDPERRYPSMFEPIHGSAFDIMGKGLANPVGTFWSCVMMLEHLGEPEAARVLMDAVEAITADPALHTGDLGGKATMAQVTEAVCALFAAAPVRQAA

SEQ ID NO: 4567 - protein, 81 aa, Triticum aestivum
  misc_feature (56)..(56): Xaa can be any naturally occurring amino acid
  misc_feature (58)..(58): Xaa can be any naturally occurring amino acid
  misc_feature (71)..(71): Xaa can be any naturally occurring amino acid
  misc_feature (74)..(74): Xaa can be any naturally occurring amino acid
  misc_feature (77)..(77): Xaa can be any naturally occurring amino acid
MAEESGRPLPKFGDWDVNDPASADGFTVIFNKARDEKKGGNGQDTESPSKDTRTEXVXESYAAKPSTKKWXCCXKSXPTQS

SEQ ID NO: 4568 - protein, 589 aa, Candida albicans SC5314
MSIYKSGWVSPLKALETLSLTLSRGMKRAASPRAEQPPHSKKVVDAKGFRVRQQNIDKHKITSESTATQKSIHEEETEGANYVIEGRLRRVTPYFYTYLTYCKLRWQDRKLIDVFIDEFRDRTPDAYRMAVEEGLVKVNSQVANLETILRNGDLISHRSYRREPPVSSRDIKIVFEDDDLLVIDKPGGIPVHPTGRYRYNTVTKIFEHEKGKIVHPCNRLDRLTSGLMFLGKSSKGANNMMSQIRDRNVTKEYIARVKGEFPLDRIIVDKPLSTKSPKLTLNVVDMENGKEAKTEFQRVSYDPITNTSVVKCHPLTGRTHQIRVHLQFLGYPIANDPIYSSEFVWGKNLGENGEADLDQVMERLDLIGKSRAATSWIHPEGDGEVALDEICPITGLPLYSDPGSNDLDLWLHAYKYEADDKSWSYKTEYPEWALEPSRKFMEMAIEEAEKCGETQTQFNVGCVLVHNGQVISTGHSRELPGNTHAEQCALEKYFSKNGGEREVPAGTEIFTSMEPCSLRLSGNLPCVDRILQTKNIKTCFVGVLEPDIFVKNNSSYKKLLDHGVEYIHIPGYEETCLEIAKRGHEHIQE

SEQ ID NO: 4569 - protein, 481 aa, Chlamydomonas reinhardtii
MSSTPSATAIDHGATYSDLLIIQGAIVFFLQVGFVSLEVGYGRSKNVKNILLKNTVNILLCAICWWAVGYAFSYGSSTDGFIGTSGFFHDGGLGAAKLWFYSWTFCLSTVTIVSGCLAERTSLVAYPVFTVLMASWVHPVVVHWAWSRDSWLLGISSECRFLDFAGGTVVHICGGMMGLVGAALVGPRIGRFEEGRAKELPGHDVSSVAIGTLFLWFGWFGFNCGSAYVYMGNMAAAAAEAAASAVASGDTSADVYASAAAAVSAAVTSGANATLHPGSTPADRVALNMTLCASVSGLTALLLSSLRSGTVDLCVCCNSLLAGLVMSTPACGFITSWAAVIYGLVAAALYMGGTRMLVRFHVDDPLESSAIHFGCGGVGTLLLALLARPTYVQELTGYDCGGLVYGGRKGAILLGLQLLGIAAITAWTAFFSVLVFYLLRRLGRLRVDQVTELAGLDNMEHGGPAYPEFNLVPYNTGSAER

SEQ ID NO: 4570 - protein, 494 aa, Triticum aestivum
MSATCAADLGPLLGAAAANATDYLCNRFADTTSAVDSTYLLFSAYLVFAMQLGFAMLCAGSVRAKNTMNIMLTNVLDAAAGALFYYLFGFAFAFGTPSNGFIGKHFFGLKDMPQTGFDYSFFLFQWAFAVAAAGITSGSIAERTQFVAYLIYSAFLTGFVYPVVSHWIWSVDGWASAARTSGPLLFKSGVIDFAGSGVVHMVGGIAGFWGALIEGPRIGRFDHAGRSVALKGHSASLVVLGTFLLWFGWYGFNPGSFVTILKSYGPPGSINGQWSGVGRTAVTTTLAGSVAALTTLFGKRLQTGHWNVVDVCNGLLGGFAAITAGCSVVDPWAAVICGFVSAWVLIGLNALAGRLKYDDPLEAAQLHGGCGAWGIIFTALFAKKQYVEEIYGAGRPYGLFLGGGGRLLAAHIVQILAIAGFVSCTMGPLFLALKKLGLLRISAEDEMAGMDLTRHGGFAYVYHDDDEHDKSVGGFMLRSAQTRVEPAAAANSQV

SEQ ID NO: 4571 - protein, 1029 aa, Coccidioides immitis RS
MLVWNPDNIKDVAESVGINALNEEVVDHLARDVEYRVSQVLEESHKFMRHGKRTLLTTQDVSNALRVLDVEPLYGYESTRPLKFGEATIGPGQPLFYVEDDEVDFEKLINAPLPRVPREITFTAHWLAVEGVQPTIPQNPTSADSRNLELISKGPNANANLAAMSGNENVTVKPLVKHILSKELQLYFERVCSAFLDESNEEYRLSAFASLKEDPGLHQLVPYFVQFISEKVTHSLKDLFVLTQVMHMTEALIQNKTLYVDPYVASLIPPVLTCVIGRQLEGGSDPLDHFTLRDLAGSLIGMISKKYSHSSHTLKPRLARTFLKNFMDPSKPFGTHYGAIIGLHSIGGPDVIRELIIPNLPTYEVVLKDVAGDEGLRKSEAEKVIGVILAALSTIQDEKAPLTNGVANGAMETLSKQLTKKIGGILASRIIDSGNPEDEKGRQRGALASEFQPASLICTVCACRPSTLQFDGLVKYFVPVRCRYVTTTSRRGFGELDDPLAILPENYIMPRFRVTTFVYPDNTSSTRVDPPHLPFSCLPEIFLYQTQISSSVRPDTFTSIGIYLDSSNAFEGPEKLLEVWFSPSAHDLAGTAVPTGLKAVSPEIWKGMLDLVNCQVLSIVESDDVDAYLLSESSMFVFPHKLILKTCGTTTLLLGLPRILEIAALHAGFPKNSPPCYGGISSAAAPYRVFYSRKNFLFPDRQRGPHRSWRDEVKTLDKLFLGGSAYMIGKMNGEHWYLYLTEPFTSLTPPTTPNHETSIKTLTLPEAMNGMQPENGRCDESDETLEILMTDLDEKNAKQFYLDHASAVAEDRHRSLHQNNDHHLDVFSNNSSDNSDIESDAGQSLPPELTSEGHALGTVVSDSCGLSDVYPVNKYPDARVDAYLFTPCGFSANGVVPSPDNKSGTHYFTVHVTPEPHCSYASFETNVPHAQSGRETADIVKHVVEIFKPGRFSVTLFEAKPPHADAPSVYDSKALQRHAVLRNAKMEHIPGYRRVDRIVHDLDGYDLVFRYYERNDWRGGAPRIGETGF

SEQ ID NO: 4572 - protein, 372 aa, Chenopodium rubrum
MAPSFDLLCAEDNSSIFDEVDDNYYGVVDDDVLQICNLQQQHGNLRNFDDFTLILLIIIKEHNFEALISGFFVANHECLASLFDNERQHFLGLDYLKRFRNGDLDLGARNLVIDWIHKVQSHYNFGPLCVYLSVNYLDRFLSAYELPGKAWMMQLLGVACLSLAAKVDETDVPLILDLQVSESKFVFEAKTIQRMELLVLSTLKWRMQSVTPFSFIDYFLYKLSGDKMPSKSLIFQAIQLILSTIKGIDLMEFRPSEIAAAVAISVTQQTQIVEFTDKAFSFLTDHVEKERLMKCVEIMHDLRMSSRSNGALASTSVPQSPIGVLDASACLSYKSDDTSTTPSGSCGNSAHSSPASAPPPKRRKLDRTSQIS

SEQ ID NO: 4573 - protein, 304 aa, Solibacter usitatus Ellin6076
MLNRGYAYTTIISSKYPGQTLLSHLASLYPHSTSEAWQQNLNNGEVTLNGVAATGSESVRSGQILIWNRPPWIEPDVPKHFEVLFEDPHLLAVNKPSGLPTLPGGGFLENTLLRLVQKHTPNANPVHRLGRATSGIVLFARTPQAASNLFANWNTPKIRKIYRALAQNIAQHDAYEILTPIGLVPHPRIGSVWAANPSGKPSKSLAKVISRSTSTTTFEVSLNSGRPHQIRIHLASIGHPLVGDPLYGLTGQPLENLPGLPGDGGYFLHAQFLQFQHPITGEQINLEAALPSGFSSHQQVHGGS

SEQ ID NO: 4574 - protein, 129 aa, Nitrosomonas europaea ATCC 19718
MRILHTMLRVGNLERSIRFYTDVLGMQILRRKDYPEGKFTLAFVGYQSETEGTVLELTHNWETDHYDLGTGFGHIAIEVDNAYEACEKVRNLGGRVTREAGPMKHGATVIAFIEDPDGYKIEFIQKKTA

SEQ ID NO: 4575 - protein, 1645 aa, Nostoc sp. PCC 7120
MLIDYQRTKVLLIDNSLENWHCLSGFLAETKYLLQRVGTAKISISSVSELMPDIILIDSSIDKIDGHYFCQNLKAEETLQNISILLLTYIDQLSEYSSYFQIGVSDFISKPLCQEELFLRMRNQLKISSQQKNQLEEYHEPFPIGNGLISLNNAVNHNVISNKKECCFQLSDLNNEESINQSLNSQSLVSSNNKITRSKNNTQEYQINAVKLYKHNLVLTKLAKNQVLYQGNLKTALAEITNVAAHNLGIERASIWLYDETLTKIQCADLFEYSRNQHSAGLSLSAKEYPTYFQALHQDEAIAVDDAYTDPRTKEFAQSYLTPLNITAMLDTPIRLAGKTVGVLCLEAVKLPHHWTPEDQNFARSLTNLVSLALEARERQRAEAAHRISEQKLASAFRASPDPIALCTYPETRYIEVNDSFCRLFGYSRSQVIGNTDKELNIWVNLEECHFLSQILEKAKAIRNHEVDFRTSNGEIKTTLFSAEMIEIDGQKYILGTAKDITERKQAEAESRLLLLTTQAIARAVDVKSALTLVLRVICQTIGWDFGEAWTPNRESHVLEHSLVCYCEEASLEEFCHQSQNLRIAPGEGLPGRVWQTKQSEWIEDVSLVKQGQFLRSPQAAKVGLKAGFGIPIIAGKEVLAVLIFFKRSSIPVDKRLLMLLGAVATQLGSLIERKLIESAHRNSEERLQLALEASDLGLWDWNITTGKIYRDWQWQKMLGYTQEDIEDDERVIEQLLHPEDLATVKSAITAHLQGVTPVYEMEFRMRCAAGGWKWVQSRGQIVERNEQGQPLRMTGTTKDITERKILEKELELREARLNAFFSGAPVGMSILDNQLRFVQINELIAHIHGKPAQEHIGKTLEEIAPRIAPLVTPLCQKVLLTGQPILNVELSLPAVNQADSLRHFLVSYFPIPGEGNQLSGVGKVIVEISDVYDELRLRKRAEEALKESIERERAIAQVIQRMRQTLDLDTIFAATTEELRQVLNCDRAVVYRFDSQGSGEFVAESWGKGWISLIEKQKNVPHLTENTAKDQSCLAKLLEYTPQATPDKNFLCVADIYQAGFGSCYIEFLERLQAKAYIIVPILSGDQVWGLLATYQNSGPRQWKTGEINIVIQIGNQLEVALQQAQLLTQTQRQSQALEAAAIAADAANRAKSEFLANMSHELRTPLNAILGFTQIMSHDKTLSKDNQQNLTIINRAGEHLLDLINDVLEMSKIEAGRTTLNINSFDLIHLLDNLQEMMQGRATAKGLHLKFEYAPNIAQHIQADESKLRQVLLNILGNAIKFTETGSIILRVKMGTGDWGLGTEEDTKTHLSIPNTQSPITNPQSLIFEIQDTGIGICDDEVCVLFEAFGQTEAGRKSQQGTGLGLAISRKYVQLMGGDISVSSAVGVGSTFSFQIQVGLVSAHEIPYQPTTRSVIGLAPQQRECRILVVDDVADSRLLLVKLLSSVGFVVQEAANGQEALAIWQQWHPQLILMDMRMPIMDGYEATHFIRSAEIENHTTIPNPHTIIIALTAHAFEEQRQAMLQVGCDDLINKPFSEKEILEKLNKYLGIKYLYQEDSSQTLKARTKIFTHDNLLPLLSTLPRDWLINLYNAAAQCSDDLILKLVGEISAENTALKEYFVDLAHNFQFEKIMEIVSTIKDIS

SEQ ID NO: 4576 - protein, 489 aa, Burkholderia sp. 383
MSVFGLQRLYIGGGYVDATSGKTFDTFDPATGELLAQVQQASAADVDRAVASAQEGQREWAAMTAMQRSRILRRAVDLLRERNDELAALETRDTGKPIGETLAVDIVTGADVIEYYAGLATAIEGLQVPLRAESFVYTRREPLGVCAGIGAWNYPIQIACWKTAPALAAGNAMVFKPSEVTPLTALKLAEIYTEAGVPAGVFNVVQGDGSVGALLTGHPDIAKVSFTGGVETGKKVMSLAGASSLKEVTMELGGKSPLIVFDDADLDRAADIAVTANFFSSGQVCTNGTRVFVHRSIKDAFTQRVLERVKRIRVGKPTDADTNFGPLVSAAQLDKVLGFIESGKAEGAKLLAGGTRLTDGHFGSGQYVAPTVFGDCRDDMKIVREEIFGPVMSILDFESEDEVIARANDTHYGLAAGVVTENLSRAHRTIHRLEAGICWINTWGESPAEMPVGGYKQSGVGRENGITTLEHYTRIKSVQVELGRYNPVF

SEQ ID NO: 4577 - protein, 108 aa, Brassica napus
  misc_feature (14)..(14): Xaa can be any naturally occurring amino acid
  misc_feature (54)..(54): Xaa can be any naturally occurring amino acid
MAGLMKWACWVWAXLIGAGPIPPNAVLSWGTVSGNWAACLGYLTQKGPFPRGGXTGVPNLNNLARTTPDAKQVGRCLVGAVNSFLTLNVAQAVGLLKACGVNFPYKIS

SEQ ID NO: 4578 - protein, 425 aa, Medicago truncatula
MAVEYTCCESEFFIHILVIIFLVVFAGLMSGLTLGLMSLSLVDLEVLAKSGTPNDRKHAVKILPVVRNQHLLLCTLLICNAAAMEALPIFLDSLVTAWGAILISVTLILLFGEIIPQSVCSRYGLAIGASVTPFVRVLVWICYPVAFPISKLLDYLLGHRNEALFRRAELKTLVDLHGNEAGKGGELTHDETTIIAGALELSEKTASDAMTPISETFAIDINSKLDRELMTEILEKGHSRVPVYYEQSTNIIGLILIKNLLTIHPEDESPVKSVTIRRIPRVPESMPLYDILNEFQKGHSHMAVVVRQCDKTKQPSSKNDSNDSVKEVKVDIDGEKPLQEKVLKPKIPIQKWKSFPNTNKSNRGGSRSRKWSKNMYSDILEIDGSPLPNIPEEEEAVGIITMEDVIEELLQEEIFDETDHHFEDS

SEQ ID NO: 4579 - protein, 227 aa, Cryptococcus neoformans var. neoformans JEC21
MSRSGALDDNEIQSEMNKMVAFISQEAREKAREIQVKADEEFAIEKAKIVRQESLAIDAQFEKKRKQAEVSWKISQSTAINNSRLKILQSRNDHLQTLFDEANKKVMELSAGDRYKDALVNLILEVLLKLLSADITLSHRPKDAELVEKSAQEAQKRYKDIAGRESNISFDPSLPDDSPGGVIGTSMGGRIKVDNTLEERLRILEEKMLPELRHDLFGPNENRKFYS

SEQ ID NO: 4580 - protein, 276 aa, Triticum aestivum
  misc_feature (170)..(170): Xaa can be any naturally occurring amino acid
  misc_feature (265)..(265): Xaa can be any naturally occurring amino acid
MSADLNRDYEIGEEIGRGRFGVVHRCTSRSTGEAFAVKSVDRSNLADDLDRELAEIEPKLAQLAAAGNPGVVQVHAVYEDDSWTHMVMDLCSGPDLLDWVRLRRGAPVPEPVAADIVAQLAQALALCHRRGVAHRDVKPDNVVLDVEDDGENSSPRARLADFGSAAWIGXNGGRTEGLVGTPHYVAPEVVSGGDYGDKADVWSAGVVMYVLLSGGALPFGGETAKDVLSAVMRGSVRFPPRLFSGVSPAAKDLMRRMMCRDEWRXFSAEQSSPPCS

SEQ ID NO: 4581 - protein, 309 aa, Mycobacterium tuberculosis H37Rv
MIRIGTRGSLLATTQAATVRDALIAGGHSAELVTISTEGDRSMAPIASLGVGVFTTALREAMEAGLVDAAVHSYKDLPTAADPRFTVAAIPPRNDPRDAVVARDGLTLGELPVGSLVGTSSPRRAAQLRALGLGLEIRPLRGNLDTRLNKVSSGDLDAIVVARAGLARLGRLDDVTETLEPVQMLPAPAQGALAVECRAGDSRLVAVLAELDDADTRAAVTAERALLADLEAGCSAPVGAIAEVVESIDEDGRVFEELSLRGCVAALDGSDVIRASGIGSCGRARELGLSVAAELFELGARELMWGVRH

SEQ ID NO: 4582 - protein, 249 aa, Brassica napus
MKFNVANPTTGCQKKLEIDDDQKLRAFYDKRLSQEVSGDALGEEFKGYIFKIMGGCDKQGFPMKQGVLTPGRVRLLLHRGTPCFRGHGRRTGERRRKSVRGCIVSQDLSVLNLVIVKKGEKDLPGLTDTESRMRGPKRASKIRKLFNFIKEDDVRKYVNTYRRKFTNKKGKEVSKAPKIQRLVTPLTLQRKRARIADKKKRIAKANAQAADYQKLLASRLKEQSDKRSESLAKKRSRLSSAAAKPSVTA

SEQ ID NO: 4583 - protein, 217 aa, Arabidopsis thaliana
  misc_feature (41)..(41): Xaa can be any naturally occurring amino acid
MRVSQSLIPFAIIALVLSFVNAYDPSPLQDFCVAIDDLKGXFCKDPRRVDAKDFFFSGLNVPGNTNNQVGSNVTTVNVDQIPGLNTMGISLVRIDYAPHGQNPPHTHPRGSEILVLVEGTLYVGFVSSNQDNNRLFAKVLHPGDVFVFPIGMIHFQVNVGKIPAVAFAGLSSQNAGVITIANTVFGSNPPIYPELLARAFQLDASVVKELQAKFGSI

SEQ ID NO: 4584 - protein, 407 aa, Rheum australe
MDGVAQISDTDMAEAAPPPSDPSQPQPAAPDPSQHQPLPQQPQQINIPATLSHGGRFIQYNIFGNIFEVTAKYKPPIMPIGKGAYGIVCSALNSETSEHVAIKKIANAFDNKVDAKRTLREIKLLRHMDHENVVAIRDIIPPPLRDSFNDVYIAYELMDTDLHQIIRSNQGLSEEHCQYFLYQILRGLKYIHSANVLHRDLKPSNLLLNANCDLKICDFGLARVTSETDFMTEYVVTRWYRAPELLLNSSDYTTAIDVWSVGCIFMELMDRKPLFPGRDHVHQLRLLMELIGTPSEAELGFLNENAKRYIRQLPQYTRQSIPGKFPHVHPLAIDLVEKMLTFDPRQRITVEDALAHPYLNSLHDISDEPVCMTPFSFDFEQHALSEEQMRELIYREALAFNPEYQQG

SEQ ID NO: 4585 - protein, 114 aa, Desulfotalea psychrophila LSv54
MLMKKIEAIIKPFKLDDVKSALSEVGITGMTISEVRGYGRQKGHSEMYRGAEYVVEFVPKIKLEIVVSADRATEVVAKIREHAYTGKIGDGKIFVSPIEYAVRVRTGEENKEAV

SEQ ID NO: 4586 - protein, 344 aa, Rhododendron simsii
MKDVNGSPATTVCVTGAAGFIGSWLVMRLLERGYVVRATVRDPANIKKVKHLLELPKADSNLTLWKADLNEEGSFDEAIEGCFGVFHVATPMDFESKDPENEVIKPTINGVLSIIKSCTKAKTVKRLVFTSSAGTVNVQEHQQPVYDENNWSDLDFINEKKMTGWMYFVSKTLAEKAAWDAAKENNIDFISIIPVLVVGPFIMPTFPPSLVTALSPITGNEPHYSIIKQGQFVHLDDLCESHIFLFEHPEAEGRYICSSHDATIYDLAKMMREKWPEYNVPTEFKGIDKDIPKVSFSSEKLIGMGFKFKYSLEDMFRGAIDTCREKGLLPYSNATTANGTNGTI

SEQ ID NO: 4587 - protein, 464 aa, Alkaliphilus metalliredigenes QYMF
AIASPGDFNAVKEIAKIVKNATVASLARALPKDIDRAYEAVKYAENPRIHTFIATSDIHMKYKLKSTEEEVLAQAVAMVKRAKGYCNDVEFSAEDASRSRTEFLYRIFEAVIKAGATVINVPDTVGYTTPDEYYRLIKGIKENVANIHRAEISVHCHNDLGMAVANTLAAAAAGATQLECTINGIGERAGNAALEEIVMGINTRKDLYGMYTNIDTGQIYAASRLTSKVTGMKVQHNKAIVGENAFAHESGIHQHGMLANKSTYEIMTPESIGLSKNQLVLGKHSGSHALEDRLKELGYEISKEKLNEVFKEFKILADRKKVIYDRDLEALVQDQKQNFEEIYQLKEFVINCGNIITSTANIKLIKDGKELEEVAKGFGPIDAAFKAIDNIVGGDFKLEDYSVESVTEGEDALGEAVVKIKRNNEIYNGRGLSTDVVEASIKAYINAINKMMSENIPQGQQAAM

SEQ ID NO: 4588 - protein, 361 aa, Alkaliphilus metalliredigenes QYMF
MAYQITLIPGDGIGPEVIKEAVRVLETVGDTFGHQFDFEEVLVGGCAYDATGEPLPRESLDSCQKSDAVLLGAVGGEKWDGLPGHQRPEAALLGLRKGLGLYANLRPAILHESLKNACPLRSDIVGEGIDICIVRELMGGIYFGEKGRRTNNDDMGEEAFDVEAYSVGEVERIGRLAFEMALKRDRKVTSVDKANVLESSRLWRSVMIEIAKDYPEVTLEHMYVDNAAMQLIRNPRQFDVLVTTNMFGDILSDEASMITGSIGMLPSASLGEGKFGMYEPIHGSAPDIAGQDKANPIATILSAAMMLRISFDLENEAKEIEEAVTRVLEGGYRTPDIMSDGCKLVGTAEMGNLIIQAMSFE

SEQ ID NO: 4589 - protein, 166 aa, Triticum aestivum
  misc_feature (111)..(111): Xaa can be any naturally occurring amino acid
  misc_feature (152)..(152): Xaa can be any naturally occurring amino acid
  misc_feature (154)..(154): Xaa can be any naturally occurring amino acid
MATSSAKSVHDFTVKDAKGNDINLGDYKGKVLIIVNVASQCGLTNSNYTELSQLYEKYKQKGLEILAFPCNQFGAQEPGSNEQIQEFVCTRFKAEFPVFDKVDVNGDKAAXLYKYLKSSKGGLFGDGIKWNFSKFLVDKEGNVVDRYAPTTXPXSIEKDLLKLLDA

SEQ ID NO: 4590 - protein, 157 aa, Zea mays
MSKIYMNEVTEAVHAWKGFTILKTPYLVKRKKQHFHHLEKYNVDLILDCNGFIWVGEHVVVGEKPKTTGGQQGFSTEAENFTPLETRKHICRLANSVRVLSALGFTLTVELIIETMEASVSSNVEINDMLGAEFYVQTAEREAKRRADLLRKKNGAN

SEQ ID NO: 4591 - protein, 501 aa, Zea mays
MGRAFCYVILGGGVAAGYAALQFIRLGCETAAQAGEFCIISDEAVPPYERPTLSKGYLFPEGGARLPAFHTCVGANDQLLDADWYREYGIELILGTKVISVDVRRKTLDTSAGETISYERLIVATGARAVKLEEIGVNGGSDAENVCYLRDIADADKLVRVMRSCPAGADAVVVGGGYIGMECAAALVANRMKVTVVFPGKHLMANLFTPKIAEFYENYYESKGVTFIKGTAVSSLQISSGKVTAAILRDGRRLPADMVVVGIGARANTELFEGQLAMEKGGIKVDGQMRTSDASVYAVGDVAAFPVKLLGGEVRRLEHVDCARMTARHAVAGALEPLGPITGEINYVPFFYSRVFALSWRFYGDNAGEAVHFGDLDFSASPSPPSAPKFGALWVRAGRVTGAFLEGGSPEEYEALARAVRRRTTVPDVAVLLARWGLAFIVQDQEGRSGATRSGRLCGSGNTSNYAWAWHATVGVAAAVSIAAFAYWYGWKAPYLAKRHF

SEQ ID NO: 4592 - protein, 94 aa, Triticum aestivum
  misc_feature (27)..(27): Xaa can be any naturally occurring amino acid
MGSRQDQPAVNGEQGNGAGAAYVRYRXCQRNHAIGIGRYAVDGCQEFTVLMGVDEAAMLLCAACGCHRNFHRREVVNEFGADYHAPRTPPANEN

SEQ ID NO: 4593 - protein, 516 aa, Leptospira interrogans serovar Copenhageni str. Fiocruz L1-130
MTKVETRLEILDVTLRDGEQTRGVSFSTSEKLNIAKFLLQKLNVDRVEIASARVSKGELETVQKIMEWAATEQLTERIEILGFVDGNKTVDWIKDSGAKVLNLLTKGSLHHLEKQLGKTPKEFFTDVSFVIEYAIKSGLKINVYLEDWSNGFRNSPDYVKSLVEHLSKEHIERIFLPDTLGVLSPEETFQGVDSLIQKYPDIHFEFHGHNDYDLSVANSLQAIRAGVKGLHASINGLGERAGNTPLEALVTTIHDKSNSKTNINEIAITEASRLVEVFSGKRISANRPIVGEDVFTQTAGVHADGDKKGNLYANPILPERFGRKRSYALGKLAGKASISENVKQLGMVLSDVVLQKVLERVIELGDQNKLVTPEDLPFIIADVSGRTGEKVLTIKSCNIHSGIGIRPHAQIELEYQGKIHKEISEGDGGYDAFMNALTKITNRLGISIPKLIDYEVRIPPGGKTDALVETRITWNKSLDLEEDQTFKTMGVHPDQTVAAVHATEKMLNQILQPWQI

SEQ ID NO: 4594 - protein, 485 aa, Propionibacterium acnes KPA171202
MMTNDRSLPSDLPTQLLIDGEWVDAEASRTFDVINPATEKPLVAIADASVDQGTDALDAAVRAQHSWADTAPRERAEILRKTFNLVTERKDDFARLMTLEMGKPLAESYGEVTYGSEFLRWFSEEAVRIRGDYGLLPEGNIRQLVTKRPVGPCLFITPWNFPLAMATRKIAPALAAGCTVVIRPASATPLTTLLLAKTFLEAGLPAGVLNVITGLDHAVTDAILEDPRLRKLSFTGSTGVGANLLGKAAKHVLRTSMELGGNAPFIVFDDADLDQAIIGAKGAKMRNMGEVCIAANRFIVHESVAEEFTDKMIEMMSGLVVGDGLDEKSEVGPMITERDREKVDGLVRSAIEAGATLRCGGEIPEDKGWFYPPTVLSGVPADAEIMQTEIFGPVAPITTFRTEEEALALANSVPVGLAGYVFTSDTARILRMGQKLETGMIGANLGVFSNAAAPFGGVKESGLGREGSYQGIEEFLETIYVALPA

SEQ ID NO: 4595 - protein, 483 aa, Nostoc sp. PCC 7120
MFSCHSPCRSDMLCYIKRSRYEFVINIMSNPTVENLVIIGSGPAGYTAAIYAARANLKPVVFEGFQAGGLPGGQLMTTTEVENFPGFPQGITGPELMDRMKAQAERWGAELYTEDVISVDLSQRPFTVRSEEREVKAHTIIIATGATAKRLGLPSEHEFWSRGISACAICDGATPIFHGAELAVIGAGDSAAEESIYLTKYGSKVNLLVRSEKMRASKAMQDRVLSNPKIQVHWNTEVVDVFGNGHMDGVKVRNNQTGEETNVHAKGLFYAIGHKPNTSLFQGQLELDEIGYVVTKHGSPETSVEGVFAAGDVQDHEYRQAITAAGSGCAAALLAERWLSANALIQEFHQEATINNELETQPVAQKTEAEQEAGFDVNATRHAGGYALRKLFHESDRLLIVKYVSPGCGPCHTLKPILNKVVDEFDSKIHFVEIDIDQDRDIAENAGVTGTPTVQFFKDKELVKEVKGVKQKSEYRLLIEGNL

SEQ ID NO: 4596 - protein, 178 aa, Rickettsia rickettsii
MRLKEPYSVLKKMKRKEVPIDALKDLIACRIIVKSKALCYNALDIVKSSPHLDWLYTKDYINRPKSNGYQSLHNIMQLLHSKRNFEIQIRSENMHKDAELGRAAHLNYKEEQDRHLQKVFDITNDTILFKARQMVKQFEGFEEQIVEYEKEIMRIWHTKYDEMLKWANTAEVLIFNKD

SEQ ID NO: 4597 - protein, 127 aa, Oryza sativa (japonica cultivar-group)
MARKMIRVLLVEDEEINRVVARAALKAAGGGDVVDEAENGEVAVQRVRDAAAPYDLVLMDKQMPVMDGHEATRRIRGMGVTTPIVAVSSDGLPADVDAFITAGADDFTSKPLSKEKLGVILAKFRLA

SEQ ID NO: 4598 - protein, 116 aa, Solibacter usitatus Ellin6076
MKNIFVGNLDFAATESSIRSLFEPYGSVDRVNLVTDRDTGRSRGFAFVEMTDAAEADRAIAALNGHELDGRALNINEARPKPQGGGGGGRGFGGGGGGGRPGGGGGGRPPRREPRW

SEQ ID NO: 4599 - protein, 421 aa, Arabidopsis thaliana
MVYVNVGFAHSNSPKPLLLILKHRIYMGDHSFSKMYKSGELTNFEYTASPYISYYNNNIDNKIAPTDAGTKEVNITMVETGPKTGNRDGLTNVPKPDPRQQIPISPTKSCHSETSNNSTTSFAFPTLGEYQQERKTSLNTKSESGKRELSRLDSKTGLYPDDSKQGGAGAGAGGWLSCCLCFSVIAVQETRDIRQERAIMRVSQSLIPFAIIALVLSFVNAYDPSPLQDFCVAIDDLKGVFVNGRFCKDPERVDAKDFFFSGLNVPGNTNNQVGSNVTTVNVDQIPGLNTMGISLVRIDYAPHGQNPPHTHPRGSEILVLVEGTLYVGFVSSNQDNNRLFAKVLHPGDVFVFPIGMIHFQLNIGKIPAIAFAGLSSQNAGVITIANTVFGSNPPIYPELLARAFQLDANVVKELQAKFGSI

SEQ ID NO: 4600 - protein, 145 aa, Brassica napus
MATATRFLRRLQRSLKLRPTLLRSNVTRVLSSFAHKTNEPFESRIRHDSSIIIRSFSSQGAPIDYSSILQEDEFHRLANVTINNLLEKIEDYGDNVQIDGFDIDYGNEVLTLKLGSLGTYVMNKQTPNRQIWMSSPVSGPSRFDW

SEQ ID NO: 4601 - protein, 225 aa, Anabaena variabilis ATCC 29413
MVTAILFDLDGTIVNTDPIHYQAWQQMLWKYNIEIDEKFYKSRISGRLNPEIVKDILPELSSAAGREFADEKEALFRQLASHLQPLNGFAELIAWTELHQLKRALVTNAPRLNAEFMLEVLGITESFHQIVLADDCVAGKPDPAPYQVALGKLGISAEKAIALEDSPSGIRAAVGAGIRTIGIASTHDPDVLQEVGSFMAIHDFTDLHLWTLLNSLIEPDLIRST

SEQ ID NO: 4602 - protein, 66 aa, Lotus corniculatus
GTYGEAEATAIEKFAEAFRTVDFPPGSSVFYRQSTDGKLGLSFSLDDTIPEKEAVVRENKALSEAV

SEQ ID NO: 4603 - protein, 861 aa, Burkholderia pseudomallei K96243
MSTGKQRASIMKIVVIGHGMVGHKLLECIAAGAPGALAAPRVAVVCEEPRPAYDRVHLSEFFAGKSADDLSLVEPGFFERHPNFRLLLNTKAVAIDRAARTVALSTGETLAYDKLVLATGSTPFVPNVPGRERAGCFVYRTIEDLEAMRACGARANSGVVVGGGLLGLECAKALRDMGLAAHVVEFAPRLMAVQVDEGGGRMLREKIEALGVQVHTGKNTLEIVDGETGAHRMAFADGTHLDADMIVFSAGIRPRDEIARACGLEIGPRGGVAIDERCRTSDEDIYAIGECAAWNGQTFGLVAPGYDMARVVARQLAGGEGAFAGADLSTKLKLMGVDVASIGDAHGRTPGSRAYQFADERRGVYKKLVVSECGKALLGAVMVGDAADYGTLLQMMLNRIELPRSPEFLILPQADGAAKPALGVDALPDAAQICSCNNVTKAQLREAVAGGATSLGALKGCTGAGTSCGGCVPLVTQVLKAEMKKQGLAVNNHLCEHFPYSRQELYHMVRVERFKTFGALLKKHGRGLGCDVCKPAVAGILASCWNEFVLKKEHAALQDSNDYYLANIQRDGTYSVVPRMPGGEVTPEGLIAVGEVARKYGLYTKITGGQRVDLFGARVEQLPLIWEELIAAGFESGHAYGKSVRTVKSCVGSTWCRYGVGDSVGLAIELENRYKGLRAPHKLKFGVSGCTRECAEAQGKDIGVIATEKGWNLYVCGNGGMKPRHAELLAADLDRATLVRYVDRFLMFYIRTADRLQRTSVWRDNLEGGLDYLIDVVVHDKLGLAAELEAEMQHVVDTYECEWKRAVTDPATRRRFRHFVNSDAPDSTIAFVEARGQIRPVTPDERDAEGQADRQPETETA

SEQ ID NO: 4604 - protein, 213 aa, Zea mays
MTSVWKTKVLPGLNKIFDKDGKKAAAAGFLKSFNKEEIDKEIEDKKTELEPKVVEAYEASPPEVKALFKDKKPVKVSKKNSAAVTKFLDELAKIDFPGAKVVSEAVAKSGTSPLLPAITFILDKVAPFIPKEEPKAEPAAEATSREVAVEEKKEEAEPAAATEAAPAPAETPSEAAVVEEKKEEEKKEEEDKPAAEEEAAPPAAAAAAAAEEK

SEQ ID NO: 4605 - protein, 417 aa, Ehrlichia canis str. Jake
MERILVKKFGGTSLQDIKCINKVVEIIKQDINNNYKVVVIVSAMGKFTDNIISQIKQISDVKSPSERSEYDLIISSGEQISCGLLSLALQKVGINAQSWLGWQLPIVTTEDHTKARIIDINVNSLQDSLANNDVAIVAGFQGMHKNNRVTTLGRGGSDTSAVAIAVALGVDLCYIYTDVDGIYTADPNLVPKAHKLDYITYDEMIEMSSLGAKVLQVRSVEIAMKYNIKLCILSTFNPGKGTMLCKKGESHMESQLITGVTCNNKTASITLKQVKTLSGITTVFNAIAEKNINVDMIIQNMNDNNANDITFTISEEDLPTTKKFLTEIQSELMYQDLIINSEVAKVSIIGVGMISHSGIAYKMFDTLTSNNIKILAVTTSEIKISVLIYRKDSQLATVALHSAFELDSTESNLYTIS

SEQ ID NO: 4606 - protein, 979 aa, Debaryomyces hansenii CBS767
MSSQVVTNLEETTNQHKAINNPNVVKRIHREVRFGLYILGSTLGEGEFGKVKLGWRKDGKHPSQVAIKLIKRDTIMKDSESEIKIHREINSLKMLNHPNIVNLVEVMKSGKYIGIVLEYASGGELFDYILQHKYLKENVAKKLFAQLVSGVDYMHSKGLIHRDLKLENLLLDKHKNVIISDFGFVNSYNKDKNDLMKTSCGSPCYAAPELVLTQAPYEGRKVDTWSLGVILYAMLAGYLPFDDDPENEDGSDIVRLYHYICKTPLTFPEYISPLARDLLRKIIVPDPKKRITIKNIKNHPWLTPYVNLLSVTQPEWDKVHKDNKTVNPKSAATANNSYTNLIHSNTNKRFSMINEKTNSSSLMMPAGRSYSSTNVVNQLYSNPSAPTTSSSLANAVALSKPKDPASDRSRTPSPTKQLPNGNNYSSTNYQRGHAKSTSISNPYSSASNALKAMVTENDSKRNSLVSLDSTTSSMISLTSSTKPAQHNHLPSPHLPRSTTYTGSAISTIAESPSKPSPATHLAVDNESNVTHHNTASSSNITNLKPNSSSRESAKLPHANKKPRPTSYHPSSMSASLMSSNGSSLQDYIKIPTPLLPIPQLLSTSPTKASPSSETSSPVFTDTNNSSPTMRSNASINSRRNSVVTHVHVNGVLTSESNANHNENKRNSVLSYLEDKMDALELTELHSPLKSNKPGFTDNASDTNITPQINQLPMFDGQTESPIIHTSKAEESQVKDQSEEGNKIETDEHPFVNVANQVDENKVVDLALEKESISEAPEEPNVSHSQDRTNQQENITLEFEEPKYTLEAQPAEPVSQTFKDEPVVSLDEQLIKRDHVNIIDEQEKENLDRKTTNTKKETSREINKSSAKEIKDNKKRNRFSLLSFYSNYNGSSSSNVVLQQAPTSNVSHSGKRILEPSLEQNVPTQPQDQKRNVSNSSGKSSTSKKSNNSGTAHISSNNGKEASAARKVMDFFKRRSVKIG

SEQ ID NO: 4607 - protein, 591 aa, Streptococcus pneumoniae
MTQGKITASAAMLNVLKTWGVDTIYGIPSGTLSSLMDALAEDKDIRFLQVRHEETGALAAVMQAKFGGSIGVAVGSGGPGATHLINGVYDAAMDNTPFLAILGSRPVNELNMDAFQELNQNPMYNGIAVYNKRVAYAEQLPKVIDEACRAAISKKGPAVVEIPVNFGFQEIDENSYYGSGSYERSFIAPALNEVEIDKAVEILNNAERPVIYAGFGGVKAGEVITELSRKIKAPIITTGKNFEAFEWNYEGLTGSAYRVGWKPANEVVFEADTVLFLGSNFAFAEVYEAFKNTEKFIQVDIDPYKLGKRHALDASILGDAGQAAKAILDKVNPVESTPWWRANVKNNQNWRDYMNKLEGKTEGELQLYQVYNAINKHADQDAIYSLDVGSTTQTSTRHLHMTPKNMWRTSPLFATMGIALPGGIAAKKDTPDRQVWNIMGDGAFNMCYPDVITNVQYDLPVINLVFSNAEYGFIKNKYEDTNKHLFGVDFTNADYGKIAEAQGAVGFTVDRIEDIDAVVAEAVKLNKGGKTVVIDARITQHRPLPVEVLELDPKLHSEEAIKAFKEKYEAEELVPFRLFLEEEGLQSRAIK

SEQ ID NO: 4608 - protein, 456 aa, Anabaena variabilis ATCC 29413
MSNPTVENLVIIGSGPAGYTAAIYAARANLKPVVFEGFQAGGLPGGQLMTTTEVENFPGFPQGITGPDLMDRMKAQAERWGAELYTEDVISVDLSQRPFTVRSEEREFKAHSIIIATGATAKRLGLPSEHQFWSRGISACAICDGATPIFHGAELAVIGAGDSAAEESIYLTKYGSKVNLLVRSEKMRASKAMQDRVLSNPKIQVHWNTEVVDVFGNGHMDGVKVRNNKTGEETTVHARGLFYAIGHKPNTSLFQGQLELDEIGYVVTKHGSPETSVEGVFAAGDVQDHEYRQAITAAGSGCAAALLAERWLSANALIQEFHQEPTINNELETQPVAQKTEAEQEAGFALSATRHAGGYALRKLFHESDRLLIVKYVSPGCGPCHTLKPILNKVVDEFDGKIHFVEIDIDQDRDIAENAGVTGTPTVQFFKDKELVKEVKGVKQKSEYRQLIEANL

SEQ ID NO: 4609 - protein, 314 aa, Wolbachia endosymbiont of Spalangia cameroni
LGINLTKGLGAGALPDVGKGAAEESIDEIMEHIKDSHMLFITAGMGGGTGTGAAPVIAKAAREARAAVKDRAPKEKKILTVGVVTKPFGFEGVRRMRIAELGLEELQKYVDTLIVIPNQNLFRIANEKTTFSDAFKLADNVLHIGIRGVTDLMVMPGLINLDFADIETVMSEMGKAMIGTGEAEGEDRAISAAEAAISNPLLDNVSMKGAQGILINITGGGDMTLFEVDAAANRVREEVDENANIIFGATFDQAMEGRVRVSVLATGIDGRNNKSETSPISQSEDSEKEKFKWPYSQSESTQDKTLETKPAEQV

SEQ ID NO: 4610 - protein, 336 aa, Wolbachia endosymbiont of Spalangia cameroni
QALEKSLCDKKIQLGINLTKGLGAGALPDVGKGAAEESIDEIMEHIKDSHMLFITAGMGGGTGTGAAPVIAKAAREARAAVKDRAPKEKKILTVGVVTKPFGFEGVRRMRIAELGLEELQKYVDTLIVIPNQNLFRIANEKTTFSDAFKLADNVLHIGIRGVTDLMVMPGLINLDFADIETVMSEMGKAMIGTGEAEGEDRAISAAEAAISNPLLDNVSMKGAQGILINITGGGDMTLFEVDAAANRVREEVDENANIIFGATFDQAMEGRVRVSVLATGIDGRNNKSETSPISQSEDSEKEKFKWPYSQSESTQDKTLETKPAEQVSEGAKWGSN

SEQ ID NO: 4611 - protein, 230 aa, Synechocystis sp. PCC 6803
MTNAALDDKTIVRDYFNSTGFDRWRRIYGDGQVNFVQKDIRVGHQQTVDSVVAWLVADGNLPGLLVCDAGCGVGSLSIPLAQAGALVYGSDISEKMVGEAQQKAQEVLAYGNQPTFMTQDLAQLGGKYDTVICLDVLIHYPTEEASAMISHLASLADRRLILSFAPKTLGLTVLKKIGGLFPGPSKTTRVYQHKEADIRKILGDNGFSIARTGMTSTRFYYSRILEAVRS

SEQ ID NO: 4612 - protein, 734 aa, Arabidopsis thaliana
  misc_feature (423)..(423): Xaa can be any naturally occurring amino acid
MMLVFLLIRRQWRSASVRREEVIRLIALATEESYLAEEVRPATVDYGGDSVSDVYRCAVCLYPTTTRCSQCKSVRYCSSKCQILHWRRGHKEECRSPDYDEEKEEYVQSDYDAKESNVDFPSRGTAYESSSNVSVDVACDMSTSRPSIHKVQPRSEAVDFTTSLNIKDNLYETRPLSRKKSRNRTDKVESASNYSKGKTDAKLRKLGNQNSRRSGDSANMSISDQFLSVGFEEEMNALKHERITSEPSSASAAMSSSSTLLLPSKANSKPKVSQASSSGLKTSVQKVVQHFRPPQSSKKSQPSSSIDEMSFSYELFVKLYCDRVELQPFGLVNLGNSCYANAVLQCLAFTRPLISYLIRGLHSKTCRKKSWCFVCEFEHLILKARGGESPLSPIKILSKLQKIGKHLGPGKEEDAHEFLRMPXCAVDTMQSVFLKEAPAAGPFAEETTLVGLTFGGYLHSKIKCMACLHKSERPELMMDLTVEIDGDIGSLEEALAQFTAYEVLDGENRYFCGRCKSYQKAKKKLMILEGPNILAVVLKRFQSDNFGKLSKPIHFPELLDISPYMSDPNHGDHPVYSLYAVVVHLDAMSTLFSGHYVCYIKTLDGDWFKIDDSNVFPVQLETVLLEGAYMLLYARDSPRPVSKNGGRKSKQRRNLAAIPSRKGNKKQRDGDNNSLLPRVDWSSGSLSSMFSSSDTTSSCSTKDSSGIENLSDYLFGGVEPVWKWDRHNKSQTFD

SEQ ID NO: 4613 - protein, 339 aa, Wolbachia endosymbiont of Spalangia cameroni
PQALEKSLCDKKIQLGINLTKGLGAGALPDVGKGAAEESIDEIMEHIKDSHMLFITAGMGGGTGTGAAPVIAKAAREARAAVKDRAPKEKKILTVGVVTKPFGFEGVRRMRIAELGLEELQKYVDTLIVIPNQNLFRIANEKTTFSDAFKLADNVLHIGIRGVTDLMVMPGLINLDFADIETVMSEMGKAMIGTGEAEGEDRAISAAEAAISNPLLDNVSMKGAQGILINITGGGDMTLFEVDAAANRVREEVDENANIIFGATFDQAMEGRVRVSVLATGIDGRNNKSETSPISQSEDSEKEKFKWPYSQSESTQDKTLETKPAEQVSEGAKWGSNIL

SEQ ID NO: 4614 - protein, 450 aa, Mannheimia succiniciproducens MBEL55E
MANLSVAKFGGTSVANYAAMTACAKIVIADPNTRVVVLSASAGVTNLLVALANGCEATQRAKLLAEVRQIQENILNELKDAGTVRLEIEELLTNIEYLAEAASLATSSALTDELISHGEMMSTKIFVQVLRELNAQATWVDVRTVVATNSNFGKAAPDDEQTQKNSDNVLKPLIDRGELVITQGFIGRDPNGKTTTLGRGGSDYSAALIAEVLNAKDVLIWTDVAGIYSTDPRIVPNAQRIDTMSFAEAAEMATFGAKVLHPATLLPAVRSNIPVYVGSSKAPEQGGTWVTRDPQPRPTFRAIALRRDQTLLTLSSLNMLHAQGFLANVFNILAKHKISVDTITTSEVSVALTLDKTGSASSGAELLSSDLLNELSEVCTVKVDTGLALVALIGNDLHLSAGIAKRIFGTIEEYNIRMISYGASTNNICTLVHSAHADDVVRALHKELFE

SEQ ID NO: 4615 - protein, 332 aa, Wolbachia endosymbiont of Spalangia cameroni
  misc_feature (328)..(329): Xaa can be any naturally occurring amino acid
PQALEKSLCDKKIQLGINLTKGLGAGALPDVGKGAAEESIDEIMEHIKDSHMLFITAGMGGGTGTGAAPVIAKAAREARAAVKDRAPKEKKILTVGVVTKPFGFEGVRRMRIAELGLEELQKYVDTLIVIPNQNLFRIANEKTTFSDAFKLADNVLHIGIRGVTDLMVMPGLINLDFADIETVMSEMGKAMIGTGEAEGEDRAISAAEAAISNPLLDNVSMKGAQGILINITGGGDMTLFEVDAAANRVREEVDENANIIFGATFDQAMEGRVRVSVLATGIDGRNNKSETSPISQSEDSEKEKFKWPYSQSESTQDKTLETKPAEQXXEGV

SEQ ID NO: 4616 - protein, 234 aa, Pseudomonas syringae
MKIYLIWGATCTGKTEHSIKLSKSTGWPVIVLDRVQCCFDIATGSGRPHPEELQSTRRIYLDNRRISEGVISAEEANDRLKLEVNKHIDSGGVILEGGSISLLKLISKDPYWCDRFIWSQHRMRLQDTDVFMDKAKARVRRMLVGSTETTGLLDELVAAQSDLNAKLAIQDIDGYRYIMNYAQARRLSITQLLNVMTGDMKEELINGIALEYYEHAKWQERDFPAEWLAERSTR

SEQ ID NO: 4617 - protein, 501 aa, Rhodospirillum rubrum ATCC 11170
MSSLVSYTHFVNGAHTAPAGGRSAPVFLPMTGEIQARVDLASRAEVDAAVALAAQAQPAWAAQNPQKRARVLMRFLELARRDNEALALLLAREHGKTIADAKGDIQRGLEVVEFAIGIPHLLKGEYTDSAGPGIDLYSMRQPLGVVAGITPFNFPAMIPLWKAAPAIACGNAFILKPSERDPGVPLRLAELFLEAGLPPGIFNVVNGDKEAVDALLDNPTVKAIGFVGSTAIAQYIYGRGTAAGKRVQCFGGAKNHMIIMPDADLDQTVDALIGAGYGSAGERCMAISVAVPVGEATAEALMDKLIPRVRALKIGPSTDPEADFGPLVTREAVDRVTAAVAQGVAEGADLVVDGRDFSLQGYENGFYMGGCLFDRVTPAMAIYREEIFGPVLSVVRAADYEQALRLPNEHAYGNGVAIFTRDGDAARDFAARVEVGMVGINVPIPVPLAYFTFGGWKRSGFGDLNQHGPDAVRFYTKTKTVTSRWPSGIRDGAEFVIPTMR

SEQ ID NO: 4618 - protein, 202 aa, Brassica napus
VDPRVRTSKTQICLCFIIFLYIWSSGSSREVVGQLESDCFSSDGRSKSSGICSPRASYLRKLADVASNGELLDWPKNDTRRFFHVVYRVGDLDRTIKFYTECFGMKVSRQRDVPKEKYSNAFMGFGSEKSHFAVELTYNYGVSSYDIGDGFGHFTISTQDVYKMVETVRAKGGNVTREPGPVEGGSSIIAIVKDPDGLPFEL

SEQ ID NO: 4619 - protein, 78 aa, Arabidopsis thaliana
  misc_feature (72)..(72): Xaa can be any naturally occurring amino acid
MAPSMRLCFSMDASPARGGFDRAFYGLKSSAAFPATRKANNDITFITSNGGRVNCMQEWPPTGKKKFETLSXYPPDLT

SEQ ID NO: 4620 - protein, 402 aa, Propionibacterium acnes KPA171202
MIATMDRSVVGAIHGRMGTTRHRSGVVMSKKKKVGILTAGGDCPGLNAAIRGFGKAAIRQHDMELIGIQDGFLGLAGNRTISLDPRALSGILTVGGTILGTSRDKVNHMIIDGEERDMVPTIVENYEKLGLDALVTLGGGGTAKNAYKLAKAGLNVLHLPKTIDNDIVGTDDSFGFSTALEIATEAIDRLHSTAHSHHRIILAEIMGHRAGWLALGSGIAGGADVILLPEVPYKLDSIVQAVENRQKQGLNFSVIAVAEGARDEADSAAMAGAQALVDASKTSETKAAAKKAKKDLEHSMRDNTLKLATQLEEATGLESRVSILGYVQRGGIPCAHDRLLATRLGTVGAKLVDDGEFGIMVAAQGGDATTVPLKDVAGKVKYVPADHPWVKAARQVGTGLGD

SEQ ID NO: 4621 - protein, 339 aa, Mycobacterium tuberculosis CDC1551
MTEPAAWDEGKPRIITLTMNPALDITTSVDVVRPTEKMRCGAPRYDPGGGGINVARIVHVLGGCSTALFPAGGSTGSLLMALLGDAGVPFRVIPIAASTRESFTVNESRTAKQYRFVLPGPSLTVAEQEQCLDELRGAAASAAFVVASGSLPPGVAADYYQRVADICRRSSTPLILDTSGGGLQHISSGVFLLKASVRELRECVGSELLTEPEQLAAAHELIDRGRAEVVVVSLGSQGALLATRHASHRFSSIPMTAVSGVGAGDAMVAAITVGLSRGWSLIKSVRLGNAAGAAMLLTPGTAACNRDDVERFFELAAEPTEVGQDQYVWHPIVNPEASP

SEQ ID NO: 4622 - protein, 135 aa, Actinobacillus pleuropneumoniae serovar 1 str. 4074
MRILHTMLRVGDLDRSIKFYTEVLGMRLLRTSENPQYKYSLAFVGYADESESAVIELTYNWGVESYELGTAFGHVALGVDDIYATIESVRAAGGKITREPGPVLGGTTVIAFAEDPDGYKIEFIENKNAQAALGN

SEQ ID NO: 4623 - protein, 451 aa, Streptococcus suis 89/1591
MKVIKFGGSSLASAEQLEKVFNIVQSDSERRFVVVSAPGKRNAEDTKVTDALIKYYKEYVNGKDVTASQEWIINRYQAMVDELGFTANSMKKIADSIISLASLPIDDNEFLYDAFLAAGEDNNAKLIAEYFTHRGLPARYVHPKKAGIIVSSEPGNARILPSSYDKIEELRDTDEVLIIPGFFGVTVDNQICTFSRGGSDITGSIIAAGVKADLYENFTDVDGIFAAHPGIIKNPHSIKELTYREMRELAYAGFSVLHDEALLPAYRGRIPLVIKNTNNPTHPGTRIVHKHTEQTVPVVGIAADDGFVSINLSKYLMNREVGFGRKVLQILEDLNIRWEHMPTGIDDLSIVVRERELTPIKEEEILRQLNTKMEVDKAEIEHGLSIIMIVGENMKSHVGVTATATTALSKQNVNLAMISQGASEVSVMFVVKTEEKKRALHALYEAFFNEQ

SEQ ID NO: 4624 - protein, 577 aa, Medicago truncatula
MKNFAVQLLLLLISFLLNSRNGIEASTCSNSIDPIKYRIPKEQPYRTSYHFQPPQNWMNAPMYYKGVYHLFYQHNPLAATFGDIIVWAHSVSYDLINWIHLNIALEPSGPYDINSCWSGSATILPGEKPAILYTGIDHYKNEVQNLAIPKNLTDAFLREWEKHPQNPVMTPPTGVEEDNFRDPSTAWHGKDGKWRVIVGAQNGDEGKTILYQSEDFVNWTVNPNPFFATDNTGVCECPDFFPVYINSTNGVDTSVDNSSVRHVLKISYLRKQHDYYFLGKYVSDKENFVPDVEFTGTSKDLRFDYGKFYASKSFFDYAKNRRILWGWVNESDSTQDDIEKGWAGLQTIPRKVWLDKSGKRLMQWPIEEIENLRHKQISITGEKLEGGSTLEISGINVSQVDVEVLFELPELESGDWLEDPSEVDPQLLCSKQHASRSGKIGPFGLLALASKDLTEETAVSFQIFRASNRYLCLMCSDQSRSSLRNDLDKTTYGTIFDIDPNLKTISLRTLIDKSIIESFGDGGKAVITSRVYPLLAIEKDAHLYVFNNGSQSVVISKLNAWSMKQAEIGHEGNINCA

SEQ ID NO: 4625 - protein, 178 aa, Rickettsia montanensis
MRLKEPYSVLKKMKRKEVPIDALKDLIACRIIVKSKALCYNALDVVKSSPHLDWLYTKDYINRPKSNGYQSLHNIMQLLHSKRNFEIQIRSEDMHKDAELGRAAHLNYKEEQDRHLKKVFDVTNDTILFKARQMVKQFEGLEEQIVEYEKEIMRIWHTKYDEMLKWANTAEVLIFNEK

SEQ ID NO: 4626 - protein, 495 aa, Escherichia coli K12
MSRNTEATDDVKTWTGGPLNYKEGFFTQLATDELAKGINEEVVRAISAKRNEPEWMLEFRLNAYRAWLEMEEPHWLKAHYDKLNYQDYSYYSAPSCGNCDDTCASEPGAVQQTGANAFLSKEVEAAFEQLGVPVREGKEVAVDAIFDSVSVATTYREKLAEQGIIFCSFGEAIHDHPELVRKYLGTVVPGNDNFFAALNAAVASDGTFIYVPKGVRCPMELSTYFRINAEKTGQFERTILVADEDSYVSYIEGCSAPVRDSYQLHAAVVEVIIHKNAEVKYSTVQNWFPGDNNTGGILNFVTKRALCEGENSKMSWTQSETGSAITWKYPSCILRGDNSIGEFYSVALTSGHQQADTGTKMIHIGKNTKSTIISKGISAGHSQNSYRGLVKIMPTATNARNFTQCDSMLIGANCGAHTFPYVECRNNSAQLEHEATTSRIGEDQLFYCLQRGISEEDAISMIVNGFCKDVFSELPLEFAVEAQKLLAISLEHSVG

SEQ ID NO: 4627 - protein, 410 aa, Bacillus thuringiensis serovar konkukian str. 97-27
MKIIVQKFGGTSVRDENGRKHALHHIKKSLDAGYKVVTVVSAMGRKGEPYATDTLLSLVNQEESHISNREQDLLLSCGELISAIVFSNMLNENGIKAAALNGAQAGFVTNDDFTNAKIIEMNCDRIHEELENVDVIVVTGFQGQTKKGDTTTLGRGGSDTSASALGVALHAEYIDIFTDVEGVMTADPRIVKDARHLQTVTYNEICNMAYQGAKVVHPRAVEIAMHAKVPLRVRSTYSDSEGTLIAAYDGATKGQDVEERPVTGIAHVSNVTQIKVLAKETAYDIQQHVFKEMANEGISVDLINISPTGVAYTVNDNVSARAVEVLKQLGYEPIVTEHCAKVSIVGAGMAGIPGVTAKIVTALAEKGIQILQSADSHTTIWVLVKETDLVEAVNALHSAFELSKEKQLEQ

SEQ ID NO: 4628 - protein, 551 aa, Medicago truncatula
MENIREDASPNNINSEQPYRTWYHFQPLKNWMNDPNGPMYYKGVYHLFYQYNPDAATFGHEKMVWGHSISNDLINWTHLNDAIVPTIPGDINSCWSGSATILPGEKPAMLYTGIDQNRHQVQNLAMPKNLSDPYLREWEKHPQNPLMTPPSGVEVGEFRDPSTAWQGKDGKWRVIIGAQNGDEGKIILYKSEDFVKWIVDPIPFFATDDTGVCECPDFFPVYINNTNGVDTTMENSSVRHVLKISYLRRRHDYYFIGKYVSDKEEFVPDVKYTGTWKELRFDYGKVYASKSFFDHAKNRRILWAWAEESDTSEDDIQKGWAGLQTIPRKFWLDKNGKQLMQWPIEELEKLRGKQINITGETLQSGSTLEVKGITASQADVEVLFELPNLQSAELLEPSEVDPQELCKEQYASRNGMIGPFGLQALASKDQTERTTISFRIYRAGDGFKCLMISDQTRSSLREDVEKTSYATIFDIDPNLKTISLRSLIDRSIIESFGDGGRACITSRAYPLFATDKDAHLFVFNDGSQSVVISQLNAWSMKQAQFGTESII

SEQ ID NO: 4629 - protein, 834 aa, Mannheimia succiniciproducens MBEL55E
MGNIMELNRRDFMKANAAVAAAAAAGITIPVKNVHAADDDMGIRWDKAPCRYCGTGCSVLVGTKDGRVVATQGDPDAEVNRGLNCIKGYFLSKIMYGADRVQTPLLRMKDGKFHKEGDFTPVSWDQAFTVMADKIKAILKEKKDPNAIGMFSSGQTTIFEGYAKVKLWKAGLRSNTIDPNARHCMASAAVAFLRTFGMDEPMGCYNDIEKTDAFVLWGSNMAEMHPILWSRISDRRLSSDKVKVVVMSTFEHRSFELADTPIIFKPHSDLAILNYIANYIIQNDKVNWDFVNKHTKFKRGETDIGYGLRPEHPLEVAAKNRKTAGKMYDSDFEEFKKIVAPYTLEEAHRISGVPKDQLETLAKMYADPQQNLVSFWTMGFNQHTRGVWVNHMVYNVHLLTGKISKPGCGPFSLTGQPSACGTAREVGTFVHRLPADMVVTNPKHVEIAENIWKLPKGTISNKPGFPAVQQSRALKDGKLNFLWQLCTNNMQGGPNINEEIFPGWRNPDNLIVVSDPYPSASAVAADLILPTCMWVEKEGAYGNAERRTQFWRQQVKGPGQSRSDLWQIVEFSKYFKTEEVWSEELLAQMPEYRGKTLYEVLYLNGEVNKFQTPTNVPGYINDEAEDFGFYLQKGLFEEYASFGRGHGHDLADFDTYHQVRGLRWPVVDGKETLWRYREGYDPYVKAGEEVSFYGYPDKKAIILGVPYEAPAESPDEEYDLWLCTGRVLEHWHTGTMTRRVPELHKAFPNNLCWMHPTDAKKRGLRHGDKVKLITRRGEMISHLDTRGRNKCPEGLIYTTFFDAGQLANKLTLDATDPISGETDYKKCAVKVVKA

SEQ ID NO: 4630 - protein, 366 aa, Brassica napus
  misc_feature (316)..(316): Xaa can be any naturally occurring amino acid
  misc_feature (357)..(357): Xaa can be any naturally occurring amino acid
MAGTGIFTEILDGEVYKFYADGEWRTSSSGKSVAIVNPATRKTQYKVQACTQEEVNKVMEMAKSAQKSWAKTPLWKRAELLHKAAAILKDNKAPIAESLVKEIAKPAKDSVTEVVRSGDLISYCAEEGVRILGEGKFLLSDSFPGNERTKYCLTSKIPLGVVLAIPPFNYPVNLAVSKIAPALIAGNSLVLKPPTQGAVSCLHMVHCFHLAGFPKGLISCITGKGSEIGDFLTMHPAVNCISFTGGDTGISISKKAGMIPLQMELGGKDACIVLEDADLDLVASNIIKGGFSYSGQRCTAAKVALAVESVADELVXEKVKAKVAKLTGGPPEENCDITAAVLESSGNFIERLVMDAXEKGATFCPE

SEQ ID NO: 4631 - protein, 305 aa, Xylella fastidiosa Temecula1
MPLLRIATRKSLLAMWQSEYVAARLRMLCPDLDVVLVPMSTRGDEILDRSLAAIGGKGLFLKELELAMLRGDADCAVHSLKDVPMDLEPPFMLAAVLSRDDPADALISNVYLSLESLPIGARVATSSLRRQAQLRFYRPDLRLFDLRGNVNTRLAKLDNGDYDAIVLACAGLRRLGLEQRMTARLAPPEWLPAPGQGAIAVESLTEDARIGTLLAGLDDLPTRKCVIAERTMNRALHGSCHVPVGAYASYEVGGMRLQGLVGCVADGRLVRAELCSAKDEGDMLGRAVAQCLLDAGAAELLAATA

SEQ ID NO: 4632 - protein, 981 aa, Desulfovibrio desulfuricans G20
MMNNMLRYGVRGVQTRICLLTLVVSTLVALAFGSYEYVTALDAEYARLERFAVSQADRVARLLLVPVWNVDRQASMSIIDTEMDDERVHAVIVYDEGGSIFIGRQRGSGGVLVNTSRSIPRGEFIVTSRPLRQGSLRFATLQLYVTPEYVHRTMKDNVVAAVMHMLALELVLVLGILLVVRRSLIVPLSALTAWVRRESPLYDYGTRIPKQADDELGELVDSMNGMLSEIEKRDRMLNDHSKHLEKLVAERTQELEHARHTAEQASKAKGDFVASMSHELRTPMNAIIGMIEIALKTELTVKQREYLTIIRSSARSLLGVVNDILDISKIEAQKMELEHIPFSTQEMLEEVTDLFRERVGMKGVELVLDIEADVPAVLVGDPLRLKQVLVNLVTNAFKFTKQGEVRIRVAVGSRSQDVVQLEFSVRDTGLGIGEEARNRLFDTFSQAEGSTARLFGGSGLGLSIARELVRLMGGTITVASEPGKGSDFRFTGRFSLPVEAVEARHHRTGEAPRGRVLLVEDNESNRLVMTRMLERLGYDCDALQDGYTAYERLKRQAALYDLILLDWRLPGVDGLEVLEKLRAEKQPLPPVFMMTAFGREAELERAEELGVASFLSKPVKLSSLSDAIRAMRGEMTPEEQTDTAMIRQFDGMRALLVEDNIINRHVALDMLQDMGFSVVSAEHGEEALAVLDDVEPPSGPGFDVVFMDIQMPVMDGIEATRVIRQHPRWRHIPIIAMTAHVMSEDRDKALEAGMNDYVTKPVDRMMLLQVLQRHVGEHAARAAEDGARRIRQSFDARSEHLQEHNILHMHGMGVAGAEQEGAVGGVSSGHAGAGVPEQGTDIISDGGPDGVPPMPARLPGLILEEGVDRLGGKQDIYFEILKKFAEVYAQAADAVRQAAEQNHRDVVAEKAHAIAGAAANISAGELRESALALERAARDGAPMELELEQFAYWLEQVVRSIGVLKSRMRPVPDAPEDGMHP

SEQ ID NO: 4633 - protein, 182 aa, Anabaena variabilis ATCC 29413
MEQARQVKISKFLSKHLRHTPERLGLVLAPGGWVAVDELLSACASHQFPISRADLEQVVSNNDKQRFSFDETATKIRANQGHSVEVDLQLQPQLPPPILYHGTGEKSVPAILKSGLLKMSRHHVHLSKDIETARTVGIRHGKPVIFSVDAMVMYQSGFTFYCSDNGVYLVDHVPPEYLHMMN

SEQ ID NO: 4634 - protein, 371 aa, Ceratium horridum
KLGISLTEQKRLTGVAVDAVIDSVSVATTFKDTLGRLGIIFCSFSEAVKEHPELVRKHMGTVVPTSDNYFAALNSAVFSDGSFAYIPKGVRCPMELSTYFRINAANTGQFERTLIVADEGSYVSYLEGCTAPQRDENQLHAAVVDIKAAKDAEVKYSTVQNWYPGDKNGNGGIYNFVTKRGICEGDNSKISWTQVETGSAVTWKYPSCILKGDNSQGEFYSVAVTNNYQQADTGTKMIHIGKNTKSRIVSKGISAGYSQNSYRGQVQVMKRAENARNFSQCDSLLMGNKCGAHTFPYIDIENSSAQVEHEATTSKIGEDQIFYCQQRGIDEESAVALIVNGYAKEVLNKLPMEFAVEAQKLLALTLEGSVG

SEQ ID NO: 4635 - protein, 374 aa, Debaryomyces hansenii CBS767
MSSIIRRTFSTSTAALKSLKIGLIAGDGIGREVMPAGQAVLENLPSKHDLQFEFVNLDAGFEYFQKNGTALPQETVDILQKECDGALFGAVSSPTTKVEGYSSPIVALRKKMGLYANVRPVKSVEGNARSVDMVIVRENTEDLYIKEEKSYTKEDGTRVAEAIKRITETATSRIAKMAYDIALQRQAIRKANPGLKSLHEKPSVTVTHKSNVLSQSDGLFREVCRQVYDENADKYKDIAHKEQIVDSMVYRMFREPEIFDVVVAPNLYGDILSDGAAALVGSLGVVPSANVGDNFAIGEPCHGSAPDIQGKGISNPIATIRSTALMLEFMGYPEPAADIYAAVDANLTEDKIKTPDLGGSSSTQEVIDDIIRRF

SEQ ID NO: 4636 - protein, 320 aa, Enterococcus faecalis V583
MKRIGILTSGGDAPGMNAAIRAVVRKSIFDGIEVYGINYGFAGLVAGDIRRLDVADVGDKIQRGGTFLYSARYPEFATEEGQLKGIEQLKKFGIEGLVVIGGDGSYHGAMALTKRGFPAVGIPGTIDNDIPGTDFTIGFDTAINTVLESIDRIRDTATSHVRTFVIEVMGRNAGDIALWSGVAGGADEIIIPEHDFDMKNVAKRIQEGRDRGKKHCLIILAEGVMGGNEFADKLSEYGDFHTRVSILGHVVRGGSPSARDRVLASKFGSYAVELLKEGKGGLCIGMLDNQVVAADIIDTLENNKHKPDLSLYELNHEISF

SEQ ID NO: 4637 - protein, 367 aa, Thiobacillus denitrificans ATCC 25259
MKYAEEPEYAHGTPLCAGVLLVNLGTPEAPTAAALRPYLKEFLSDPRVVEIPRALWWLVLNGIILNTRPRKSAEKYAAIWTSEGSPLKVHTEKQAKLLKGWLGEHAAAPVVVDYAMRYGRPGIPEVLARMKAAGCDRILVLPAYPQYAASSTATAFDAAFDWLRRTRNQPALRTLKHYHDHPEYIRALAANLRDYWQMHGRPDVLVMSFHGVPRYTLDKGDPYHCECQKTARLLAAALGLEPGQFRVTFQSRFGRAEWLKPYTDKTLEALGREGVGRVDVVAPGFTADCLETLEELAMEGRASFLAAGGKEFHYVPALNEHPQWIAALGRIALANLAGWLDEGWTPDADEASRQLSRSRALALGAQR

SEQ ID NO: 4638 - protein, 450 aa, Glycine max
MGKTPFSFRRSASRRRPKKTAAPPPPPSPPQHPYAAGFAASPDDNNRLIAAAAGSSALTKAKKKTGNVRLWMRFDRSGRSELVELEKNAIVRHAAIPARDLRILGPVFSHSSNILAREKAMVVNLEFIKAIVTAEEVLLLDPLRQEVLPFVEQLRQQLPGKSQPKLLGGTEEQEGEMHVSNGRQWLPTPEAADGLQSELPFEFQVLEIALEAVCTYLDSNVADLERGAYPVLDELARNVSTKNLEHVRSLKSNLTRLLARVQKVRDEIEHLLDDNEDMAQLYLTRKWLQNQQFEEAHLGATTSNNFPNTSRSVRQLGSIRSESLVTSHYEDDNNVEDLEMLLDAYFMQLDGTRNKILSVREYIDDTEDYVNIQLDNHRNELIQLQLTLTIASFAIAIETLIAGAFGMNIPCNLYNIDGVFWPFVWTTSAACVLLFLLILAYARWKKLLGS

SEQ ID NO: 4639 - protein, 519 aa, Orobanche ramosa
MTEQLGAAAKFRRSGGSPTKALINKPKKNMYALLISVMASMTSILLGYDTGVMSGATLYIKKDLKITDVQVEILVGLINIYSLIGSAVAGRTSDYLGRRITIVIASVIFFVGAAVMGLANNYAVLMVGRFVAGLGVGYALMIAPVYAAEVAPASSRGFLTSFPEVFINFGVLLGYLSNYAFAKFSLKLGWRLMLGVGALPAIFIGLAVIVMPESPRWLVMQGRLGDAKKVLDRTSDSPQEAQLRLADIMEAAGLPEDCHDDVVPVLKQDRGGGGVWKELIVHPTKPVLHITIAAVGCQFFQQASGIDAVVMYSPRIYEKAGITSDEKKLLATIAVGLCKTVFILVTTFMVDRIGRRVLLLTSCGGLVLSMLTLATGLTVIDHYGADRFPWVVVLCVLTTYSSVAFFSMGMGPIAWVYSSEIFPLKLRAQGCGLGVAINRATNGVILMSFISLYNAITIGGAFYLFSGIGIVTWIFFFTLLPETRGRTLEDMEVLFGTFFKWRTTMRELHKKEAEDALYA

SEQ ID NO: 4640 - protein, 590 aa, Candida albicans SC5314
MTTADEYKAEGNKYFAAKDFEKAIEAFTKAIEASPEPNHVLYSNRSGSYASLKDFNNALKDAQECVKINPSWAKGYNRIAGAEFGLGNFDQAKSNYEKCLELDPNNAMAKEGLKSVESALVSGGGDDDKDLGFGKILNDPNLYTKLKNNPKTSEFMNDPQFVAKLERLKTNPQLGNPDMFSDPRLLTAFAALMGIDMDLPNMGFTAPNESQSNASEPKSEPKSVPESKPEPKAEQKEEESTSAKDEDTPMTDAQDDTNDNDAKTQADNAKAEGNALYKKRQFDEAIAAYNKAWELHKDITYLNNRAAAEYEKGDYDAAIATCEKAIDEGRDMRADYKLIAKSFARLGNIYLKKDELPEAVKNFEKSLTEHRTPDVLNKLRSTQREIKTRELNAYIDPEKAEEARLQGKEYFTKGDWPNAVKAYTEMIKRAPEDARGYSNRAAALAKLLSFPDAIQDCNKAIEKDPNFIRAYIRKANAQLAMKEYSHVMDTLTEARTKDVELGGKSIHEIDELMNKATYQRFQAIEGETPEQTMERVSKDPEIVQILQDPVMQGILAQARENPAALQDHMKNPEVYKKINMLIAAGVIRTR

SEQ ID NO: 4641 - protein, 125 aa, Brassica napus
STHASAHQVSFRPSARNVPLQATMTVTDEPGYYEDGNFGIRLENVLVVNDAETEFNFGDKGYLQFEHITWAPYQVKLIDLKQLTREEIDWLNTYHLRCKDILAPFLNQAEMEWLKKATEPVSVLA

SEQ ID NO: 4642 - protein, 357 aa, Dioscorea gracillima
LKQKIDRMYNGEKINCTENRSVLHIALRAARDKVIESDGKNVVPDVWHVLDKIKEFSEIIRSGSWVGATGKALTDVVAVGIGGSFLGPLFVHTALQTDPEAAECAKGRQLRFLANVDPIDVARSIAGLNPETTLVVVVSKTFTTAETMLNARTLREWISGALGPQAVAKHMVAVSTNLTLVEKFGIDPANAFAFWDWVGGRYSVCSAVGVLPLSLQYGFSVVHKFLNGAASIDDHFHSTPFEKNIPVLLGLLSVWNVSFLRYPARAILPYSQALEKFAPHIQQVSMESNGKGVSIDGIPLPFETGEIDFGEPGTNGQHSFYQLIHQGRVIPCDFIGVMRSQQPIYLKGEVVSNHDEL

SEQ ID NO: 4643 - protein, 112 aa, Azospirillum brasilense
MKKIEAIIKPFKLDEVKEALHEVGIKGITVTEAKGFGRQKGHTELYRGAEYVVDFLPKVKIEVVMEDSLVERAIEAIQQAAHTGRIGDGKIFVTPVEEVVRIRTGEKGGDAI

SEQ ID NO: 4644 - protein, 632 aa, Bacillus cereus G9241
MCGYVGCLYNTAKRYSETEKIQFENMTNLLYHRGPDDQGYFRDEHVQFGFRRLSIIDLDAGHQPLAYENERYILMFNGEIYNYIELREMLIKQGACFSTQSDTEVIVALYAQVKEECVNYLRGMYTFVIWDRQEKKLFGARDHFGIKPLYIAQQNDITFFASEKKSILHVMQDKGVNPTALQHYFTYQYGPEPETLTNDINKIEPGHYFIKEIGKELEVYRYWKPYFNASDKTKEDHIRAIRDVLYDSVKVHMRSDVPVGAFLSGGIDSSIIASIAKEINPNLLTFSVGFEHRGFSEIDVAKETAEKLGVKNYSVLVTPQEFMNEFPKIMWHMDDPLADPAAVPLYFVAKEARKHVTVVLSGEGSDELFGGYNIYREPNSLKMFSYIPTSGKTVLKALSGVLKEGFKGKSFLERGCTPIEERYYGNAKIFREEEKIKLIKSYNESVNYKDVTKPLYNEIKNYDDVSKMQYIDMYTWLRGDILLKADKMSTAHSLELRVPFLDKEVFDVASKIPTELKIANRTTKVILREAVRGIVPDHVLDRKKLGFPVPIRHWLKDEMYDWALNIIKESKTEHLIDKQYVLNLLEAHCADKGDYSRKIWTVIAFMVWHQIYIEHKYDTNLFSEECRVYNLV

SEQ ID NO: 4645 - protein, 413 aa, Arthrobacter globiformis
MQTLAIVGASLAGLSAARAARAQGFTGRLVIIGDEEHRPYDRPPLSKDFLLGSITAEDLSLETETDDLDAEWLLGTRAVSLDADSKTVSLANGQVVQADGIVIATGARARQLPALAGLSNVFSLRTLADAQSLAPELVPGSKMAVIGAGFVGAEVASSAASRGMDVTLVDTKPVPFAAQLGMEMGSVVGGLHTAKGVRLISSAVIEDFYAGEGNVTGLRLADGTFVAADVVVVGIGAEPNVEWLAGSGVQVDGGVLCDAMGRTNVPGIVAVGDCAAWFDAAVDRHRRVEHWTGALERAALAVQGLLDDDAPAQPLKPPYFWSDQHGVKIQFAGHSAGYDRLDVEAGDAAEHSLLAVYYRDDVPVAVLGMNQPRLFTKWRRSLVPSAPKPAAAVVPSVLTPAGGPALAGAAAGL

SEQ ID NO: 4646 - protein, 357 aa, Dioscorea nipponica
LKQKIDRMYNGEKINSTENRSVLHIALRAARDKVIESDGKNVVPDVWHVLDKIKEFSDRIRSGSWVGATGKALTDVMAVGIGGSFLGPLFVHTALQTDPEAAECAKGRQLRFLANVDPIDVARSIAGLNPETTLVVVVSKTFTTAETMLNARTLREWISGALGPQAVAKHMVAVSTNLTLVEKFGIDPANAFAFWDWVGGRYSVCSAVGVLPLSLQYGFSVVHKFLNGAASIDDHFHSIPFEKNIPVLLGLLSVWNVSFLGYPARAILPYSQALEKFGPHIQQVSMESNGKGVSIDGIPLPFEAGEIDFGEPGPNGQHSFYQLIHQGRVIPCDFIGVMRSQQPIYLKGEVVSNHDEL

SEQ ID NO: 4647 - protein, 111 aa, uncultured episymbiont of Alvinella pompejana
WTMVAGGGASVVYADTIADFAGIEDLANYGEYSGGPTTGETKFYAETIFDLMTREPDPQGRGKVLIIGGAIANFTDVAKTFTGIIQAFENYQDKLKEVGTKIYVRRGGPNY

SEQ ID NO: 4648 - protein, 477 aa, Helianthus tuberosus
HEWVLGVGKPKNLPPGPTRLPIIGNLHLLGALPHQSLAKLAKIHGPIMSLQLGQITTLVISSATAAEEVLKKQDLAFSTRNVPDAVRAYNHERHSISFLHVCTEWRTLRRIVSSNIFSNSSLEAKQHLRSKKVEELIAYCRKAALSNENVHIGRAAFRTSLNLLSNTIFSKDLTDPYEDSASGKEFREVITNIMVDSAKTNLVDVFPVLKRIDPQGIKRGMARHFSKVLGIFDQLIEERMRTGRFEQGDVLDVCLKMMQDNPNEFNHTNIKALFLDLFVAGTDTTSITIEWAMTELLRKPHIMSKAKEELEKVIGKGSIVKEDDVLRLPYLSCIVKEVLRLHPPSPLLLPRKVVTQVELSGYTIPAGTLVFVNAWAIGRDPTVWDDSLEFKPQRFLESRLDVRGHDFDLIPFGAGRRICPGIPLATRMVPIMLGSLLNNFDWKIDTKVPYDVLDMTEKNGTTISKAKPLCVVPIPLN

SEQ ID NO: 4649 - protein, 357 aa, Dioscorea quinquelobata
LKQKIDRMYNGEKINCTENRSVLHIALRAARDKVIESDGKNVVPDVWHVLDKIKEFSERIRSGSWVGATGKALTDVVAVDIGGSFLGPLFVHTALQTDPEAAECAKGRQLRFLANVDPIDVARSIAGLNPETTLVVVVSKTFTTAETMLNARTLREWISGALGPQAVAKHMVAVSTNLTLVEKFGIDPANAFAFWDWVGGRYSVCSAVGVLPLSLQYGFSVVHKFLKGAASIDDHFHSTPFEKNIPVLLGLLSVWNVSFLGYPARAILPYSQALEKFAPHIQQVSMESNGKGVSIDGIPLPFETGEIDFGEPGTNGQHSFYQLIHQGRVIPCDFIGVMRSQQPIYLKGEVVSNHDEL

SEQ ID NO: 4650 - protein, 111 aa, uncultured episymbiont of Alvinella pompejana
WTMVAGGGASVVYADTIADLAGIEDLANYGEYSGGPTTAETRFYAETILDLMTREKDPQGRDKILIIGGAIANFTDVAKTFTGIIQAFEEYADKMKDTGVRIYVRRGGPNY

SEQ ID NO: 4651 - protein, 357 aa, Dioscorea septemloba
LKQKIDRMYNGEKINCTENRSVLHIALRAARDKVIESDGKNVVPDVWHVLDKIKEFSERIRSGSWVGATGKALTDVVAVGIGGSFLGPLFVHTALQTDPEAAECAKGRQLRFLANVDPIDVARSITGLNPETTLVVVVSKTFTTAETMLNARTLREWISGALGPQAVAKHMVAVSTNLTLVEKFGIDPANAFAFWDWVGGRYSVCSAVGVLPLSLQYGFSVVHKFLNGAASIDDHFHSTPFEKNIPVLLGLLSVWNVSFLGYPARAILPYSQALEKFAPHIQQVSMESNGKGVSIDGFPLPFETGEIDFGEPGTNGQHSFYQLIHQGRVIPCDFIGVMRSQQPIYLKGEVVSNHDEL

SEQ ID NO: 4652 - protein, 111 aa, uncultured episymbiont of Alvinella pompejana
WTMVAGGGASVAYADTIADLAGIEDLANYGEYSGGPTTAETRFYAETILDLMTREKDPQGRDKILIIGGAIANFTDVAKTFTGIIQAFEEYADKMKDTGVRIYVRRGGPNY

SEQ ID NO: 4653 - protein, 357 aa, Dioscorea tenuipes
LKQKIDRMYNGEKINCTENRSVLHIALRAARDKVIKSDGKNVVPDVWHVLDKIKEFSERIRSGSWVGATGKALTDVVAVGIGGSFLGPLFVHTALQTDPEAAECAKGRQLRFLANVDPIDVARSIAGLNPETTLVVVVSKTFTTAETMLNARTLREWISAALGPQAVAKHMVAVSTNLTLVEKFGIDPANAFAFWDWVGGRYSVCSAVGVLPLSLQYGFSVVHKFLNGAASIDDHFHSTPFEKNIPVLLGLLSVWNVSFLRYPARAILPYSQALEKFAPHIQQVSMESNGKGVSIDGVPLPFETGEIDFGEPGTNGQHSFYQLIHQGRVIPCDFIGIMRSQQPIYLKGEVVSNHDEL

SEQ ID NO: 4654 - protein, 413 aa, Bacillus thuringiensis serovar konkukian str. 97-27
MIKKYTCKNGVRIVMENIPTVRSVAIGIWIHAGSRNENEKNNGISHFLEHMFFKGTETRSAREIAESFDSIGGQVNAFTSKEYTCYYAKVLDEHAKYALDVLADMFFNSTFDEEELKKEKNVVCEEIKMYEDAPDDIVHDMLTKATYETHPLGYPILGTEETLNTFTGDTLRQYIKDHYTPENVVVSIAGNIDEAFLQTVEQYFGSYEGTTNREQVHSPIFHFNKVARKKETEQAHLCLGYKGLQMGHEDIYNLIVLNNVLGGSMSSRLFQEVREQRGLAYSVFSYHSSYEDTGMLTLYGGTGSQQLDTLYETMQETLETLKNTGITEKELMNSKEQLKGNLMLSLESTNSRMSRNGKNELLLRKHRSLDEIIESVNTVTKENVDELIRNMFTDEFSAALISPDGKLPKGIKL

SEQ ID NO: 4655 - protein, 424 aa, Bacillus subtilis
MSAKQVSKDEEKEALNLFLSTQTIIKEALRKLGYPGDMYELMKEPQRMLTVRIPVKMDNGSVKVFTGYRSQHNDAVGPTKGGVRFHPEVNEEEVKALSIWMTLKCGIANLPYGGGKGGIICDPRTMSFGELERLSRGYVRAISQIVGPTKDIPAPDVYTNSQIMAWMMDEYSRLREFDSPGFITGKPLVLGGSQGRETATAQGVTICIEEAVKKKGIKLQNARIIIQGFGNAGSFLAKFMHDAGAKVIGISDANGGLYNPDGLDIPYLLDKRDSFGMVTNLFTDVITNEELLEKDCDILVPAAISNQITAKNAHNIQASIVVEAANGPTTIDATKILNERGVLLVPDILASAGGVTVSYFEWVQNNQGYYWSEEEVAEKLRSVMVSSFETIYQTAATHKVDMRLAAYMTGIRKSAEASRFRGWV

SEQ ID NO: 4656 - protein, 107 aa, Mannheimia succiniciproducens MBEL55E
MSEVLHATDASFEADVLRSDVPVLVDLWAPWCGPCRMVAPILDDLAAELAGKVKIVKINIDENQGTPAQFGVRSIPTLLMFKDGQLVGTQVGALPKNQLAAFVEKNL

SEQ ID NO: 4657 - protein, 328 aa, Propionibacterium acnes KPA171202
MAQRPVYPFCAIVGQEEMKLALILATISPDLSGVLIRGEKGTAKSTAVRGLAALLPQHREIPGPYHLSPDEYPTHAVALNLPEVMPEPRTVQVPVVELPVGATEDRVTGTLDMETALREGRRRFEPGLLAAAHRAILYVDEVNLLDDHVVDLLLDSAAMGVNTVEREGVSVTHPARFTLVGTMNPEEGELRPQLLDRFGLCVTVSGEDDPDKRTEVIRRRMAFEDDPGGFSRTWEQDGHKLSERIQRATELVTQVVISDETLTTAARTCINAHVDGHRADIMMVRAARTLAAWNGCTEITTEDLSQAARLVLPHRMRRQPLESVGRAV

SEQ ID NO: 4658 - protein, 111 aa, uncultured episymbiont of Alvinella pompejana
WTMVAGGGASVVYADTIADLAGVEDLANYGEYSGGPTTGETKFYAETILDLMTREKDPQGREKILIIGGAIANFTDVAKTFTGIIQAFEEYADKMKDVGVKIYVRRGGPNY

SEQ ID NO: 4659 - protein, 654 aa, Propionibacterium acnes KPA171202
MTYPFTAVVGQDEARLALLLCAVNPRIGGVILSGEKGTAKSTVVRGLVELLPGHIMRTLALGTTEDRLVGGLDLEATLVAGRSVLQPGLLSEVDGGVLYIDEVNLLDDHLVDLVIDACAGTVRVEREGLTASLPSRFVLVGTMNPEEGALRPQLLDRFGLCIDVHGESDPAVRAEIIRRRLDHDADPAEFDHRWQSDQNRQAAVIERARHIVAGVRLDEVVTELISCLCRQNHVAGHRADIVMAEATRAHAALVGRGVATEDDVLTISEMVLRHRRRVETPSESPPPRNQHPDDQPDQPEQRPREPERPDPDVEKWQAGENLATPPSSSGEQQPEYHDGPQNQRDDGQHDPRKQPSGSGEQVVAAGDPFAVRPLEPSQDRFARRACGRRLRTRSNDRRGRYVSARPTDRPDDLALDATLRAAAVHQKSRRATERPDLAVHVKPIDWRAKVRAGRAASCVIFVVDASGSMGSRGRMTASKGAVLSLLLDAYVKRDRVCLIGFRRDRAEVLVPVTSSVEVAQHGLAELPVGGRTPLSAGLIKACEVVRPLLLKDPGLRPLLILVTDGRGNVSLDGRPNSQATDEAIRVATKLGVDTRLSWVVIDTEDPRGIQLSRARDIATALGGPCLRIDDLRADDLVNVVSRLDPSHQSPRKDR

SEQ ID NO: 4660 - protein, 1364 aa, Xanthomonas campestris pv. campestris str. ATCC 33913
MPHGRWDLRRKYGRRASIGAVLLLSAGLIAAFLVGFAVHRHNELERERRFDMVVRVLARNISERMYTFEHGLRGARGAVIGAGSDVISRDRFTRYSRSRDYPREFPGVLGYGYIHRVAAADEAAFLDAARADGAPDIQRRLLAPWDGERFIVLYFEPESSGNRPLGLDVASEPRRRIAAIAAARSGQPTMTSPVSLSGYQTPSEGGFLVLLPVYREGMPLQTPQQRMDATTGWAYAPLSVKQMLESTLGDRDDVAISLSDREDTQHTFYRSGIAAPESMRRAAHTQLLPIYGRTWVLTARPTLHFIGSLNQNSPWLMGSLVLGTAILLAALLGLYFSNGLRREEVLRKQMELAALVSHSSEAIVAETPDGEITHWNPAAEAMFGYPADVAIGQDLTTLLSPQPYAMPQIDQDEAPPVAALSAAQTMRHRDGHQVFVLASKAPIIEHDNAVSGHSHFFRDISERVRSHQRIVDLNASLEHQVAERTSELVQFSVLQRAILAHAGYAIIATDSSGFVTMFNPAAEKLLGYSADDVIGRRKASQFIEADELQERALRLAEQTGTPVAGTLEAVAALTSLGRSDTSEWTYVSQDGRRLPVLLTLSTLRDDNDQVIGYLGVAVDLTEQKLHEKQLRLAMDAARSANQSKSDFLANMSHEIRTPMNAILGMLYLLQRSELPGAAQDMVTKIDRSARSLLEIINDILDFSKIEAGRIDLERAPFDLNQLFDNIADLMRSSLSAKPVEMIVEPLPRECRWLLGDALRINQVLVNLVGNAIKFTEQGEVVLSVRRFPSGDPNKIKLLFSVRDTGIGISKEKQSLIFSPFLQADTSTSRRYGGSGLGLTISRRLIELMGGALEVESVPGRGSEFYFVITLERTDPPKAQQEAALLPPESMPRVLIADDHDAALNNLVRIATELGWRVDAVASGQAAMQAIEDATEPYDIFLLDWRMPDIDGVAIARQVRARATPGRHPVIVMVTAYERRLLEQHPEQQDLDAVMTKPVTSAALHRLVEQLVDERPNARPATPTFVARRLEGAQLLLVDDSEINCEVAQRILEGEGAMVTVAHDGEQAVNTLKRAPDLFHLVLMDVQMPVVDGYEATRRLRQIPSLASLPVIALTAGAFRPQQEKALEAGMNGFIAKPFNVEELVTAIRHFLQPGSRRVSSLPHERAPAAGPEWAHTDPLLLDAARAQSLWREREPYERYLLKLLRDNPDPAETAAAHLRNNELPAIGALAHKLRGAAGSLALPALAGASGDLESRVEQGHDLTAALLALKDTMAQTTAAIHAFLQTSPSTQDTGQTGAALDDDSALILENALRSDDADKIDHALLICAPRLPPPLQEDLQRAVDDFDFRRAEATLRDWQANHPR

SEQ ID NO: 4661 - protein, 262 aa, Bordetella bronchiseptica RB50
MTYQDILFELAGGVARLTLNRPDKLNSFTARMHGEVADALGRIEREGARVLVLTGAGRGFCAGQDLSERRPTADGAPPDLGETVEKFYGPLVRGLAALPLPVVVGVNGVAAGAGANLALAGDIVIARESASFIQSFCRLGLIPDTGGTFALPRLVGRARAAGLALLGNKLSARQAQDWGLIWQCVADDEFDSALDGLAAHFAQAPTKGLAFTKRALQASLGNDLSTQLDLERDMMRELGRSADYAEGVAAFLDKREPQFKGK

SEQ ID NO: 4662 - protein, 360 aa, Rhodobacter sphaeroides 2.4.1
MDIRTHRIAAIPGDGIGIEVVAAGLEVLEALADRDGGFRFDVESFDWGTDRYRRTGAFMPEDGADRLRGFDAILFGAVGAPDVADHLTLWGLRLAICQPLDQYANVRPTRMLPGIRSPLRHVGESELDWVIVRENSEGEYAGQGGRSHPGLPLEVATDVSIFTRAGVERIMRFAFRLAQSRPRKLLTVVTKSNAQRHGMVLWDQIAGEVAREFPDVRWDKMLVDAMTVRMVQKPASLDTIVATNLHADILSDLAAALAGSIGVAPTANLNPERDTPSMFEPIHGSAFDITGRGIANPVATFWTAAMMLEHLGEAEAAGRLMTAVGRVTADEDLHTPDLGGRATTRQVTDALIAALRGRNA

SEQ ID NO: 4663 - protein, 357 aa, Rhodobacter sphaeroides 2.4.1
MADNHLKIAVIAGDGIGKEVVPEGLRVLEAVAGRHRIDLRFEEFDFASCDYYARHGQMMPEDWQERIGGHDALFFGAVGWPATVPDHVSLWGSLIQFRRQFDQYVNLRPARLMPGVPSPLAGRGPGDIDMWIVRENTEGEYSAIGGRMYPGTEREIVLQETVMSRHGIDRVLRYAFELANRRERRRLTSATKSNGISITMPYWDERVEAMAQDYPDVAWDKYHIDILAAHFVLNPDRFDVVVASNLFGDILSDLGPACTGTIGIAPSGNINPERAFPSLFEPVHGSAPDIAGQGIANPVGQIWAGAMMLDHLGHGEAAAEIMAAIERVLADPRLRTRDLAGAADTVTCGKAIVEALG

SEQ ID NO: 4664 - protein, 347 aa, Staphylococcus epidermidis ATCC 12228
MSYKIVALPGDGIGPEILSGTLELLKLISEKYHFEYHLESHHFGGVSIDYYGTPLTNETLQSCKNADAILLGAIGGPKWTDPNNRPEHGLLKLRKSLNLFANIRPTFVTKGASHLSPLKQDIVEGTDLVIVRELTSGIYFGEPSYVKKTEALDSLKYSSQEIERIVRIAFNLANRRRKKLTSVDKENVLSSSKLWRQIVNDVKKDYPEVEVNHMLVDACSMHLITQPTQFDVIVTENLFGDILSDEASVIPGSLGLSPSASFGQTGTRLYEPIHGSAPDIANEDKANPFGMVLSLALCLRESLNQNDAANELESIVYSFIQSNKTTADLGGQYRTSKIFKLLKEKYL

SEQ ID NO: 4665 - protein, 362 aa, Bordetella bronchiseptica RB50
MSHNPFHMLKVASVARNTRDAVVVTFDLPPELAGDFRFRPGQYLTLRTRLDGEEVRRSYSICSAPGDGVLRVAIKKVDEGVFSNWANHELQPGQSLEVMPPAGNFTVDFDPDNARHYVAFAVGSGITPVFSLVKSALSAEPRSRFTLFFGNRASSSVLFREEIEDLKNLYMERFSLVYIMSRESQDIELFNGRLDGDKVDQLLTAWMRPGDIDYAFVCGPQTMIESVVEHLQARGMPKSHIKFELFGAPKGPRALRTGRDAPAAPGKGQCEVTVVQDGHSRTFFIDKNKDSVLDSALAQGVELPYSCKGGVCSTCRCKVVEGEVDMDANFALEDYEVARGFVLSCQSYPVSDRLVIDFDQET

SEQ ID NO: 4666 - protein, 957 aa, Escherichia coli
  misc_feature (165)..(165): Xaa can be any naturally occurring amino acid
MTQTLSQLENSGAFIERHIGPDAAQQQEMLNAVGAQSLNALTGQIVPKDIQLATPPQVGAPATEYAALAELKAIASRNKRFTSYIGMGYTAVQLPPVILRNMLENPGWYTAYTPYQPEVSQGRLEALLNFQQVTLDLTGLDMASASLLDEATAAAEAMAMAKRVXKLKNANRFFVASDVHPQTLDVVRTRAETFGFEVIVDDAQKVLDHQDVFGVLLQQVGTTGEIHDYTALISELKSRKIVVSVAADIMALVLLTAPGKQGADIVFGSAQRFGVPMGYGGPHAAFFAAKDEYKRSMPGRIIGVSKDAAGNTALRMAMQTREQHIRREKANSNICTSQVLLANIASLYAVYHGPVGLKRIANRIHRLTDILAAGLQQKGLKLRHAHYFDTLCVEVADKAGVLTRAEAAEINLRSDILNAVGITLDETTTRENVMQLFNVLLGDNHGLDIDTLDKDVAHDSRSIQPAMLRDDEILTHPVFNRYHSETEMMRYMHSLERKDLALNQAMIPLGSCTMKLNAAAEMIPITWPEFAELHPFCPPEQAEGYQQMIAQLADWLVKLTGYDAVCMQPNSGAQGEYAGLLAIRHYHESRNEGHRDICLIPASAHGTNPASAHMAGMQVVVVACDKNGNIDLTDLRAKAEQAGDNLSCIMVTYPSTHGVYEETIREVCEVVHQFGGQVYLDGANMNAQVGITSPGFIGADVSHLNLHKTFCIPHGGGGPGMGPIGVKAHLAPFVPGHSVVQIEGMLTRQGAVSAAPFGSASILPISWMYIRMMGAEGLKKASQVAILNANYIASRLQDAFPVLYTGRDGRVAHECILDIRPLKEETGISELDIAKRLIDYGFHAPTMSFPVAGTLMVEPTESESKVELDRFIDAMLAIRAEIDQVKAGVWPLEDNPLVNAPHIQSELVAEWAHPYSREVAVFPAGVADKYWPTVKRLDDVYGDRNLFCSCVPISEYQ

SEQ ID NO: 4667 - protein, 107 aa, Geobacter sulfurreducens PCA
MAKELYVGHMSYEATEDDLRRLFSVAGTVTSVHIITDPETGRSKGCGYVRMLTEEEAKEAIETLDGALLRNRVITVSVARPQKQATRPAPRRGKPGPGGRPGKKRPS

SEQ ID NO: 4668 - protein, 295 aa, Ehrlichia canis str. Jake
MSVLVDRNTKVICQGFTGAHGTFHSEQAIAYGTNMVGGVTPGKGGTSHLNLPVFNTVKQAKLDTGANATVIYVPAPYAADAILEAIEAGIELIICITEGIPILDMVQVKRALLSSNSILIGPNCPGIITPEECKIGIMPGYIHKRGHIGVISRSGTLTYEAVAQTTEVGLGQSTCIGIGGDPIHGMSFTDCIKLFINDPDTHGIIMIGEIGGSEEEEAAEFIKLSGTDKPVVGFIAGKTAPPGKRMGHAGAISSGTSGSAESKIEAMKNAGIVIAETPAVIGKTMLEAMNNKYKN

SEQ ID NO: 4669 - protein, 1268 aa, Vibrio cholerae
MKSLISVPKLSLRSWLMSLWLPLGLLVIGYFVATSMVDQQQQTQAKRISDAVTVRLNLIAAGVQEKVTLYQYGLRGTRGAVMVLSPEHFDYNDMQAYTQARDYKREFPGAHGFGLIIKVEPNQTAAFLDRMAAERPSYNFQIRQLTPHQDSLFVITYIEPEQNNREAVGVDIGSEAMRRKAALDAAFNNDVRLTAPITLVQANERAQQGFLILMPVYKTTTVPQDSRQRLEHLFGWSYAPILINEVLKSVAGLENDVFLQISDITEQTPIEFFSQEVKDTYDAALQHKLNLSVFGRQWQLSLTPTNRFINELQLRSGTSLFFEVMAVSTILAFGVYLLQLMLMRRSQLIRHKQELASIAEQTLLKANAELEQQVALRTAEISRVNILQRSILSSAGYAIIATDEEGIITAFNPAAEKLLGYRAEEVLFQQTPSIFHLPAEVEHHAAKLTTELGSNIAVGFETLVAKARLGQTDNARWTYLTKTGEQVQVKLNVSALKDEQGQLAGFLGIAFDLTKQLKYEVELAQAKEQAESANKAKSEFLANMSHEIRTPMNGVLGLLQLVANSTLDQRQADYIEKAYSAAKSLLTLLNDILDFSKIEAGKLELDPHPFSLTDLLQDIGLVFSSSAEQKGLEVLYDVTADVPEHLLGDSFRIKQVLINLVGNAIKFTDKGEILISIRSQSLPEGEINLSFSIKDTGIGITLEQQNALFSGFQQADSSISRRYGGTGLGLAISKRLVNLMGGEIGVESEFGCGSTFSFNVVVRNAEKRAIQNSQTFTRSNEKLSVLIVDDNDSSRIILQGIAVSLGWQAKIASDAQEASLLVKQAHRDSTRYDVVFVDWRMPGKDGLTFARELRELHSSVVSLIVMITAHGKELLDEQNNDYERYLDGFLIKPVTKNMMLQAVKRVVFGDLDLSLPTSPLPHELPLQGISLLLVEDNLTNQLVASELLQQLGATIKIASSGEEALEMLESTAEHFDMVLMDIQMPGMDGYQTTREIRKLPRHQLLPIIAITAHAMSDDIAACLAAGMQDHIAKPFDLNELTTKILSHHKAEKAPHVKQVNKSNLNFDQAALAFCQQHHIELEAAVQRLGYSLTIYVNVLKQFEQDLRQALQQLEDKTLTRRNARLLFHSLKGAAGTLGFSNLAKLTARLEDELREHSDDGYQVDNNVLDILKLTLNTATDLVKLLQVEQQIATAQAPVSRTEQAAQLMTLKQHLNLANMAALPLYQQLAPSLQAQTPELNKELEEALVNLAFEQAVVVVDKMLSQFKE

SEQ ID NO: 4670 - protein, 192 aa, Xylella fastidiosa Temecula1
MNMLNVLRFPVLALALAFVSSGVLADVGSLLDLDYRPLAGKETVNLQRLYGGKVLLVVNTASKCGFTPQYEGLEALHQKLSPLGFAVLGFPSNDFKGQEPGDEQQIQEFCTLTYGVKFPMFQKVHVKGNEVTPLYQRLTQTTGVAPGWNFHKYLIARDGHVVAQFDSRTRPDDPILLEAIKRELAKSVQVVH

SEQ ID NO: 4671 - protein, 129 aa, Zea mays
MAARSSSQQLVAAAAAAVLAAALLLLAAGAGTASAAVSCGEVTSSVAPCLGYAMGSAASPSAACCSGVRSLNSRASSTADRQATCNCLKSMTGRLGGGVSMANAANIPGKCGVSVGVPISPTVDCTKIN

SEQ ID NO: 4672 - protein, 201 aa, Zea mays
KSDAAVYEWTALSLRLGEPVLFIDRHARQVVTAAGSHGYDKLVLATGSYPFVPPIAGAEGASRLVYRTLDDLDQIRAAADGARRGVVVGGGLLGLEAANALKSLGLEAHVVEFAPRLMPVQLDEAGGGALRARIEALGVGVHLSRATQEIKDGTQYRYRMRFAEGAPLETDLIVFSAGIRPRDGLARQAGLTVAERGGVAV

SEQ ID NO: 4673 - protein, 314 aa, Nostoc sp. PCC 7120
NGFGRIGRNFARCWLGRENTNIELVAVNDTSDPRTNAHLLKYDSMLGKLKNVDITADDNSITVNGKTIKCVSDRNPENLPWKEWEIDLIIEATGVFVSKEGATKHINAGAKKVLITAPGKNEDGTFVMGVNHHDYDHNLHNIISNASCTTNCLAPIAKVLNDKFGIIKGSMTTTHSYTGDQRLLDASHRDLRRARAAAINIVPTSTGAAKAVALVIPELKGKLNGVALRVPTPNVSMVDFVVQVENRTITEEVNQALKDASEGPLKGILDYSELQLVSSDYQGTDASSIVDANLTLVMGNDLVKVMAWYDNECG

SEQ ID NO: 4674 - protein, 176 aa, Emericella nidulans
MVNTGLPAGWEVRHSNSKNLPYYFNPATRESRWEPPADTDMETLKMYMATYHSGAATYHEAPSQEGKIRCSHLLVKHRDSRRPSSWREAEITRTKEEAREILRGHQERIMRGEIRLGDLAMSESDCSSARKKGDLGFFGRGEMQKEFEEAAFALQPGQVSDIVESGSGLHLIERLQ

SEQ ID NO: 4675 - protein, 335 aa, Pseudoalteromonas tunicata D2
MIRVAINGYGRIGRNVLRALYESGRQNEIKIVAINDLAPANVNAHLTQFDSVHGRFGFPVTLAENAMIVADDSIVLTQERDPANLPWQALNVDIVLECTGLFTTRESAGKHLTAGAKRVIVSAPGTDMDATVVHGVNSDVLTPECHIISNASCTTNCLAPIAKILNDAIGIEQGSMTTIHAYTNDQNLSDVYHPDLYRARSATQSMIPTKTGAAKAVGLVLPELAGKLDGMAVRVPTINVSLVDLTFIAKRETTAAEVNAAIKGFAEGAMADILEYNELPLVSIDFNHNPASSIFDATQTKVDGKLVKVMAWYDNEWGFSNRMLDQVTTLAKLMN

SEQ ID NO: 4676 - protein, 526 aa, Oryza sativa
KVSSCSSSPMCPVNGKLQLHDGRTAYHFQPAKFWQNDPNGPLYHNGLYHFFYQYNPHGPLWDTGKLSWGHSVSGDLVNWAFLGTAIDPTDPFDVNGCWSGSATVLLGGRPAFLYTGRDAGGVQVQNVSFAKNPLDPLLREWEKPSCNPIIAFPADVINNNFRDPTTAWLGRDGLWRMVVAAEVAGAGSALVYRSADFLRWERNAAPMHSSAAVPVLECPDFFPVAEHGIDGLDTSANGGGTGVKHVLKLSEFDTHQDFYMVGRNRRVQWLWVNEYDSKADDVAKGWAGVQAFPRKVWLDGDGKQLLQWPVDEIETLRTKRVGLQGTEVKAGGLHEIVGVASSQADVEVVFEIPNLEDEAESFDPDWLDPHKLCKDKGAASAHGGVGPFGLIVMASGDLQEQTAVFFRVFKHHGKYKVFMCTDLTRSSTKADVYKDAYGGFVDVDIQKDKSISLRTLIDHSMIESFGGGGRACITTRVYPEHAATSSSHLYVFNNGSGTVNVSKLEAWEMATATVNSADALDAITRS

SEQ ID NO: 4677 - protein, 112 aa, Rhodospirillum rubrum ATCC 11170
MKKIEAIIKPFKLDEVKEALHEIGLQGITVTEAKGFGRQKGHTELYRGAEYVVDFLPKVKIELVIEDALVERAIEAIQQAAQTGRIGDGKIFVYAIEEAIRIRTGERGGDAI

SEQ ID NO: 4678 - protein, 111 aa, uncultured episymbiont of Alvinella pompejana
  misc_feature (43)..(43): Xaa can be any naturally occurring amino acid
WTMVAGGGASVVYADTIADLAGIEDLANYGEYSGGPTTAETRXYAETILDLMTREKDPQGRDKILIIGGAIANFTDVAKTFRGIIQAFEEYADKMKDTGVRIYVRRGGPNY

SEQ ID NO: 4679 - protein, 238 aa, Ralstonia solanacearum
MPIRLYLIWGATTTGKTAQSVALARATGAPVISLDRVQCCHELAVGSGRPLPSELLGTRREYLCDRSVSSGVIPAADANQLLFDKVVRYSAHERALILEGGSVSLINAMIRDARWSALGEWALRRIVLPGRAVFIAQAIKRVRDMLEPPPGHASILDELEGLWAHPGNHAVLEDVDGYRQIIRYARASQVPIDRITSIDRSTMATLVERIAQEYWEHALWQEQEFLGIPATWRRADDA

SEQ ID NO: 4680 - protein, 102 aa, Arabidopsis thaliana
MAKRISAQLFVSRLSAYTTDQSLRQLFSPFGQIKEARLIRDSETQRPKGFGFITFDSEDDARKALKSLDGKIVDGRLIFVEVAKNAEEVTTGINSKKAEDRG

SEQ ID NO: 4681 - protein, 433 aa, Blastopirellula marina DSM 3645
MDQPAHDIFSHAVARLDKAFLHADIDQEAVQRLKHPKQVLEVTIPVRMDDGSLRIFTGYRVRHDATRGPTKGGIRFHPNVDLAEVKALAFWMTFKCAVANLPFGGGKGGVIVDPKELSRLELERLSRGYIERIADFIGPEVDVPAPDVYTNAMIMGWMMDEYSKIRRQHTPAVITGKPIPLGGSLGRDDATGRGAYHCIKELEAKRGWKPEEQRVAVQGFGNAGQAVARLLHADGYNVVAVSDSRGGIYKESGFDIPSLAHVKNESRHLKAVYCEGSLCESIAADVITNAQLLELEVDILIPAALENQITGENAPRVKADVIVEAANGPLTGEADDILNDKGTLVVPDILANAGGVTVSYFEWTQNRAGYYWPLELVQQRLHETMAREFNTVYNLANHKEIDMRTAAYVVGLNRIGEAIASQGTARYFTAQED

SEQ ID NO: 4682 - protein, 266 aa, Triticum aestivum
  misc_feature (237)..(237): Xaa can be any naturally occurring amino acid
  misc_feature (250)..(250): Xaa can be any naturally occurring amino acid
LHRTSLYKKAGWYRSGIPGISSTHASDDATPVIVHPVEFAGRSVAQKMKELREKLQHEKASGIIITALDEVAWLYNVRGNDVHYSPVVHSYAIVTLHGAFFYVDKRKVTTEVKNYMSESGIDIREYDMVQLDVSLLASGQLKGSAVNGSLHMEKDINVAEHSKIWIDSNSCCLALYSKLRPDQALMLQSPIALPKAVKNPMELTGLRKAHIRDGAAVVQYLAWLDNQMQENYGGSGXYFSEAMDPRKKEXWKINLTEVSVSDKLES

SEQ ID NO: 4683 - protein, 165 aa, Haemophilus ducreyi 35000HP
MRIDTSALCDIYSDQVDVVEPIFSSFGGASSFYGKITTVKCFENNGLIAEVLEEEGEGRVLLIDGGGAVRRALIDAELAKLAVDNGWQGIIVYGAVRQLDVLETLDIGIHALAPIPVGAEDADIGEVDTPVNFGGVTFFPEDYVYADLTGIILSPELLDLNELAE

SEQ ID NO: 4684 - protein, 111 aa, uncultured episymbiont of Alvinella pompejana
WTMVAGGGASVVYADTIADLAGIEDLANYGEYSGGPTTAETRFYAETILDLMTREKDPQGREKILIIGGAIANFTDVAKTFTGIIQAFEEYADKMKDVGVKIYVRRGGPNY

SEQ ID NO: 4685 - protein, 264 aa, Zea mays
MYADALASSQPPPPPFLSMGVMDHEAYAAVPSMVSEYDLGGEGDLFKAPQVIIQEEALLSLDPVAAACSMMNQTIKDAGIQNDALLSEVLYECEKELMEKSAIEETISELMDVKIPMLQAEQLPAMENEKRSIPECSLQKSVSSGCLNSADWMNGAVRPNFLDFQGLDFEAAFGLRRAYSEGDIQNLGANTPRPAANVCVTISDLKTEERKQKLSRYRKKKIKRNFGRKIKYACRKALADSQPRVRGRFAKIEECDLLLLNSST

SEQ ID NO: 4686 - protein, 966 aa, Vicia faba
MANKMEKMASIDAQLRQLAPAKVSEDDKLIEYDALLLDRFLDILQDLHGEDLKDSVQEVYELSAEYERKHDPKKLEELGKLITGLDAGDSIVVAKSFSHMLNLANLAEEVQIAHRRRNKLKKGDFRDESNATTESNIEETLKRLVFNMKKSPQEVFDALKNQTVDLVLTAHPTQSVRRSLLQKHARIRNCLSHLYAKDITPDDKQELDESLQREIQAAFRTDEIKRTPPTPQDEMRAGMSYFHETIWKGVPKFLRRVDTALKNVGINERVPYNAPLIQFSSWMGGDRDGNPRVTPEVTRDVCLLARMMAANLYYSQIEDLMFELSMWRCNDELRDRAEELHRNSKKDEVAKHYIEFWKKVPLNEPYRVVLGDIRDKLYRTRERSRYLLAHGYSDIPEEATFTNVDEFLEPLELCYRSLCACGDRAIADGSLLDFLRQVSTFGLSLVRLDIRQESDRHTDVMDAITKHLEIGSYQEWSEEKRQEWLLSELIGKRPLFGPDLPKTDEIRDVLDTFHVIAELPSDNFGAYIISMATAPSDVLAVELLQRECKIKNPLRVVPLFEKLDDLEAAPAALARLFSIDWYRNRIDGKQEVMIGYSDSGKDAGRFSAAWQLYKAQEELINVAQKFSVKLTMFHGRGGTVGRGGGPTHLAILSQPPETIHGILRVTVQGEVIEQSFGEEHLCFRTLQRFTAATLEHGMRPPSSPKPEWRILMDQLAIIATEEYRSIVFKEPRFVEYFRLATPEMEYGRMNIGSRPAKRRPSGGIETLRAIPWIFAWTQTRFHLPVWLGFGAAFKQVIEKDVKNLHMLQDMYNQWPFFRVTIDLVEMVFAKGDPGIAALNDRLLVSEDLWPFGEQLRNKYEETKELLLQVATHKEVLEGDPYLKQRLRLRDSYITTLNVFQAYTLKRIRDPKSSANGRPPLSKDSPEATKPADELVTLNPTSEYAPGLEDTLILTMKGIAAGMQNTG

SEQ ID NO: 4687 - protein, 455 aa, Nocardioides sp. JS614
MSAPRWPVRPSHWTSHARACDRARPCVPGRGRGWGHLPRRRCPGSGDGVSAGLVMVETEDPVVVLGGGMAGGRAAEFLAMRGRGTRVVLVSDEDHRPYQRPPLSKESTWDDPVREELFFRDEEFYASKGVQLALGTRVEGLLPDSDVLITNQGEKIAFSRLLIATGCRVRRLQVPGSDLRGVHYLRSIPDAKGLWDAVHGGGPVVVVGAGYVGCELAAVMAGLQVDVTVVEAGSEPLGISLGAEVGAWVRSFHERRGVKFVTGRTVVHMDGEDRVGSVRLDDGTRLPASTVVVGIGVVPDVEWLSGSGVEIGDGILVNERCETSRPGVFAAGDAVRWTHPQYGSIRLEHETNAQAQAVVAARNILGGSTEYNHLPYVWSDQYGDTLEYVGYTRGWNEAVVQTDETSFTAAYLTGGAVAAVAAYARPDVIALAKQVLSDGPVARELWRAAAKDLGV

SEQ ID NO: 4688 - protein, 704 aa, Vicia faba
NIGIDERVPYNAPLIQFSSWMGGDRDGNPRVTPEVTRDVCLLARMMAANLYYSQIEDLMFELSMWRCNDELRVRAEELNRSSKKDAVAKHYIEFWKNIPPNEPYRVLLGEVRDRLYQTREASRHLLAHGYSDIPEEHTFTNVDEFLEPLELCYRSLCACGDRAIADGSLLDFLRQVSTFGLSLVRLDIRQESDRHTDVLDAITKHLEIGSYQEWSEEKRQQWLLSELSGKRPLFGTDLPQTEEIKDVLDTFHVIAELPSDNFGAYIISMATAASDVLAVELLQRECHVKQPLRVVPLFEKLADLEAAPAALARLFSIDWYRNRINGKQEVMIGYSDSGKDAGRFSAAWQLYKAQEELIKVAKEYGVKLTMFHGRGGTVGRGGGPTHLAILSQPPDTIHGSLRVTVQGEVIEQSFGEQHLCFRTLQRFTAATLEHGMHPPISPKPEWRALMDQMAVIATEEYRSMVFQEPRFVEYFRLATPELEYGRMNIGSRPAKRKPSGGIETLRAIPWIFAWTQTRFHLPVWLGFGAAFKHVIDKDIRNLQMLQEMYNQWPFFRVTIDLVEMVFAKGDPGIAALYDRLLVSDDLWSFGELLRTKFEETKQLLLQVAAHKDLLEGDPYLKQRLRLRDSYITTLNVCQAYTLKRIRDPNYNVKLRPHISKEFIEISKAADELVTLNPTSEYAPGLEDTLILTMKGIAAGLQNTG

SEQ ID NO: 4689 - protein, 359 aa, Ustilago maydis 521
MSCKTYKIAVIPGDGIGQEVMPCGLQALRAASARFKFDLSITAFDFASCDYYDKHGKMMPDNWIELLTPFDAIYFGAVGDPARHPDHVTLWGSLLQMRRHFDQYVNLRPCRLVKGVPSPLASPGEIDFWIVRENTEGEYSEVGGKIFEGTERETVIQETIMTRVGVDRILEYAFKLAKTTKRKRLTSATKSNGIKITMPYWDDRFKLMSTAYPEVATEQFHIDILTAHFVAKPSHFDVVVGSNLHGDILSDLGPAVTGTIGIAPSGNINPEGKFPSLFEPVHGSAPDIMGRGIANPVGMIWAGQMMLLHLGEKEAAETMIKAIDFVLGQSDQSMLTPDMKGRGTTKKLGDAIAEAIASV

SEQ ID NO: 4690 - protein, 594 aa, Thermococcus kodakarensis KOD1
MPRIAVIDYDKCNPDKCGHFLCERVCPVNRMGGEAIIIDEENYRPIIQEASCTGCGICVHKCPFNAITIVNLPEELEEGCVHRYGINAFVLYRLPVVKEGMVVGVLGPNGTGKTTAVKILSGQLIPNLCGNNDNWDNVIKAFRGNELQNYFEKLKKGEIRPIVKPQYVDLIPKAVKGKVRDLLKKADETGKFDEVVKELELENILDREIQQLSGGELQRVAIAAALLRNAHFYFFDEPSSYLDIRQRLRIAKTIRRLAESGKNVLTVEHDLALLDYMSDIIHVVYGKPGAYGIFSQPKSTRNGINEFLRGYLRDENVRFRPFEITFTKTGERKAQEGEILVQYPRLVKEYENGSFRLEVEGGELYVGEVVGIVGPNGIGKTTFVKMLAGVEKPTEGEVDWSLTVSYKPQYIKTDYEGTVFDLLSKIDASKLMSNFYKTELLNPLGIPDLYDRQVNELSGGELQRVAITACLIRDADIYLIDEPSAHLDVEQRLAVSKAIRSLMAKNEKTALIVEHDVMMVDYLSDRLIVFEGEPGKYGRALPPMGMREGMNRFLANIGITFRRDPDTGRPRANKEGSVKDREQKERGEYYYLSA

SEQ ID NO: 4691 - protein, 683 aa, Candida albicans SC5314
MISRNLRTSSTKTFYGSILRSQIRSISKNNSQQATAQSTSRPQPSPAFNTADTSTQPIINDPTLNKHQSSAISRKKKEQLMDDSFIGLTGGEIFHEMMLRHKVDTVFGYAGGAILPVFDAIYNSDKFKFVLPRHEQGAGHMAEGYARASGKPGVVLVTSGPGATNVITPMADALMDGVPLVVFSGQVPTTAIGTDAFQEADIVGISRSCTKWNVMVKNVAELPRRINEAFEIATTGRPGPVLVDLPKDVTASILRESIPINTTLPSNALSQITKKAVSEFTSEAIKRAANILNKAKKPIIYAGAGILNNEQGPKLLKELADKANIPVTTTLQGLGAFDQRDPKSLDMLGMHGSAAANTAIQNADCIIALGARFDDRVTGNISKFAPEAKLAASEGRGGILHFEISPKNINKVVEATEAIEGDVTANLQSFIPLVDSIENRPEWFNKINEWKKKYPYSYQLETPGSLIKPQTLIKEISDQAQTYNKEVIVTTGVGQHQMWAAQHFTWTQPRTMITSGGLGTMGYGLPAAIGAQVAKPDAIVIDIDGDASFNMTLTELSSAVQAGAPIKVCVLNNEEQGMVTQWQSLFYEHRYSHTHQSNPDFMKLAESMNVKGIRITNQQELKSGVKEFLDATEPVLLEVIVEKKVPVLPMVPAGKALDDFILWDAEVEKQQNDLRKERTGGKY

SEQ ID NO: 4692 - protein, 477 aa, Mesorhizobium loti
MSEARSYELFINGKWRAGGSRVTLPVINPATEKVVASVASATVSDLDEALASAERSRKAWCSRPAKERGEILVAAARVLATQIEPAARDLSAEQGKTIAEATGEYARAVETLEWNGTHAEELSATIPLGPNRMIVPEPLGVVAAFTPWNYPAVLITRKLAPALAAGCPVILKGAEETPSVAVHIVESLRQAGVPDGVVNLVFGVPVHISRHLLSSPIVKVLTFTGSTAVGKQLAMLAANNLQRCILELGGHSPVIVCEDADLAKAIPAISEYKFECAGQSCNAPSRILVARTLYEEFLSRMTEAARKIRIGLPDDPATEMGPMANARRIEAMQRLTKDAVDRGAHIETGGTRLDGAGFYWPPTILTGVPKDARVLHEEPFGPILTVAPFDTLDEAIGEANDTEYGLAAYFFTDAADTQRKLTNSLSAGAVSVNYLKGVSADAPYGGVKQSGYGYEGGEQGVRSFQILKMVNGLGSFG

SEQ ID NO: 4693 - protein, 500 aa, Ralstonia eutropha JMP134
MLRSRHLLSGSFFNGRTTMLKLQDPSLLRQQCYIDGRWTDGERRIDVTNPATGELVAQVPQFGVAETRHAIEAANRALPAWRARLAKERSALLRKWFELILANQDDLARIMTAEQGKPFAEAKGEIAYAASFIEWFAEEGKRVYGETIPAPVSSQRIVVTKEPIGVCAAITPWNFPAAMITRKAGPALAAGCTMVVKPASQTPLTALALAVLAERAGIPAGVLSVVTGSAGAIGGELSSNPLVRKLTFTGSTEVGRVLMAQTASTIKKVSMELGGNAPFIVFDDADLDAAVEGAIISKYRNAGQTCVCANRIYVQDKVYDAFAQKLVAAVAQLKVGNGMEDGVRIGPLIDEKAVAKVEEHIADALGKGARVLEGGHRHGLGHTFFQPTVLADVAPNMLVAREETFGPLAPLFRFKTEDDVVAMANDTEFGLASYFYARDLGRVWRVSERLEYGMVGVNTGLISNEVAPFGGVKQSGVGREGSHYGIEDYLVIKYTCMAGI

SEQ ID NO: 4694 - protein, 458 aa, Marchantia paleacea var. diptera
MPKRSNGSLVVRCAVSVVRFSKENVSCDLASENFTFSRDSFPVVSTVLRVSEAVYRMAAVASLGSALSVSSAALSQNVSVSNNATKESAFLGLRMGEVAKFGGALLSVSTVAANLKSKPGVLSVNAVTAPAETMNKPSSKKTATKSTCIITGASSGLGLATAKALADTGEWHVIMACRDFLKAERAARSVGIPKDSYTVIHCDLASFDSVRAFVDNFRRTERQLDVLVCNAAVYFPTDKEPKFSAEGFELSVGTNHMGHFLLARLLMEDLQKAKDSLKRMIIVGSITGNSNTVAGNVPPKANLGHLRGLAGGLNGVNSSSMIDGGEFDGAKAYKDSKVCNMFTMQEFHRRYHAETGITFSSLYPGCIAETGLFRNHVTLFRTLFPPFQKYITKGYVSEEEAGKRMAQVVSDPKLSKSGVYWSWNKDSGSFENELSEEASNPEKAKRLWELSERLSGLV

SEQ ID NO: 4695 - protein, 385 aa, Populus tremula
MAIDCIKTMPSITTPHHHPKDQDQCKDDGKSFVFDAQVLRHQTNIPQQFIWPDNEKPNINAPELQVPLVDLGDFLSGNPVAAVEASRLVGEACKKHGFFLVVNHGVDKTLIAHAHNYVDTFFKLPLSEKQKAQRKIGESCGYASSFTGRFSSKLPWKETLSFRYQAEENSPKHIEEYFHNRMGEDFAEFGTVYQDYCEAMSTLSLGIMELLGMSLGVSREHFREFFNENDSIMRLNYYPPCQKPDLTLGTGPHCDPTSLTILHQDQVGGLQVFVDNEWRSINPNFDAFVVNIGDTFMALSNGIYKSCLHRAVVNSQTPRKSLAFFLCPKNDKMVTPPHELVDTCNPRIYPDFTWPMLLEFTQEHYRADMKTLEVFTNWLHQRSFS

SEQ ID NO: 4696 - protein, 426 aa, Bacillus subtilis
MAADRNTGHTEEDKLDVLKSTQTVIHKALEKLGYPEEVYELLKEPMRLLTVKIPVRMDDGSVKIFTGYRAHNDSVGPTKGGIRFHPNVTEKEVKAVKALSIWMSLKCGIIDLPYGGGKGGIVCDPRDMSFRELERLSRGYVRAISQIVGPTKDVPAPDVFTNSQIMAWMMDEYSRIDEFNSPGFITGKPLVLGGSHGRESATAKGVTICIKEAAKKRGIDIKGARVVVQGFGNAGSYLAKFMHDAGAKVVGISDAYGGLYDPEGLDIDYLLDRRDSFGTVTKLFNDTITNQELLELDCDILVPAAIENQITEENAHNIRAKIVVEAANGPTTLEGTKILSDRDILLVPDVLASAGGVTVSYFEWVQNNQGFYWSEEEVEEKLEKMMVKSFNNIYEMANNRRIDMRLAAYMVGVRKMAEASRFRGWI

SEQ ID NO: 4697 - protein, 366 aa, Chara fragilis
SDSGKDAGRLSAAWGLFQAQAKIVKMAEKYGIKVTLFHGRGGTIGRGGGPTHLAILSQPPGTVNGSLRVTIQGEIIEHSFGEEQLCFRTLRAFTAATLEVGLHPTASKPELCDLMDEMCTVSTKEFRRVLQDKRFIRYFQAGTPVLEYGRMNIGSRPSKRRCDMGIQSLRAIPWVFAWTQTRVHLPVWLGVGTALKVVIDKDPATLDVLRHMHSEWPFFRVTLDLIEMVFAKGDVRIAAMYDSLLVSDDLRILGDELRTKYQNTRHLLLKGARHSHTLDNNPGLKQRIILREPLTTPLNVQQAITLKKMRLVSPIPSAGSAEDLTGSGVKLSPLVQLNPDRSYAPGLEDTLIITMKGIAAGMQNTG

SEQ ID NO: 4698 - protein, 385 aa, Populus tremula
MAIDCIKTMPSITTPHHHPKDQDQCKDDGKSFVFDAQVLRHQTNIPQQFIWPDNEKPNINAPELQVPLVDLGDFLSGNPVAAVEASRLVGEACKKHGFFLVVNHGVDKTLIAHAHNYVDTFFKLPLSEKQKAQRKIGESCGYASSFTGRFSSKLPWKETLSFRYKAEENSSKHIEEYFHNRMGEDFAEFGTVYQDYCEAISTLSLGIMELLGMSLGVSREHFREFFNENDSIMRLNYYPPCQKPDLTLGTGPHCDPTSLTILHQDQVGGLQVFVDNEWRSINPNFDAFVVNIGDTFMALSNGIYKSCLHRAVVNSQTPRKSLAFFLCPKNDKMITPPHELVDTCNPRIYPDFTWPMLLEFTQKHYRADMKTLEVFTNWLHQRSLS

SEQ ID NO: 4699 - protein, 365 aa, Conocephalum conicum
SDSGKDAGRLAAAWSMFKCQEDLVKIAKQHGIKLTIFHGRGGTIGRGGGPTHLAILSQPPGTVNGSLRVTIQGEIIEHSFGEEQLCFRTLRAFTAATLEVGPHPPRPPSPEWCDLMDEMCTVSTKEFRRVLQDKRFIRYFQAGTPVLEYGRMNIGSRPSKRSCDMGIQSLRAIPWIFAWTQTRVHLPVWLGGWNGSESCHRQGSATLDVLRHMHSEWPFFRVTLDLIEMVFAKGDVRIAAMYDSLLVSEDLRILGDELRTSTDTRHLLLKCTHSHTLDNNPALKQRIILREPLTTPLNVQQAITLKKMRLASPIPSAGSAEDLTGSDVKLSPLVQLNPDRSYAPGLEDTLIITMKGIAAGIENTG

SEQ ID NO: 4700 - protein, 339 aa, Pseudoalteromonas tunicata D2
MSRFSAITDNPHEQRFNQKTGILLTNLGSPDAPTTPAVRRYLAEFLSDPRIVEIPRLVWLMILHGIILRVRPKRSAKLYQGIWTENGSPLTHITKQQQQKLQQVLNANHCEHAEVVMAMRYGNPSIEAGLEQLRNKGITKIIVLPLYPQYSSPTTGSTFDAVATVLKKWRWVPELHFINGYHKQASYITSLANSITEDLAQNGTPERLVFSYHGMPKRFLDHGDPYHCFCQQTTRLVMEKMGLDKELAITTFQSRFGKAEWLKPYTDATLEELPSQGFKNIAIVSPAFSADCLETLEELEVENREIFIDAGGEQYRYIPALNDRDDHIEAMFDLVKPML

SEQ ID NO: 4701 - protein, 483 aa, Pseudomonas aeruginosa PAO1
MQLKDAKLFRQQAYVDGAWVDADNGQTIKVNNPATGEIIGSVPKMGAAETRRAIEAADKALPAWRALTAKERANKLRRWFDLMIENQDDLARLMTIEQGKPLAEAKGEIAYAASFLEWFGEEAKRIYGDTIPGHQPDKRIIVIKQPIGVTAAITPWNFPSAMITRKAGPALAAGCTMVLKPASQTPYSALALAELAERAGIPKGVFSVVTGSAGEVGGELTSNPIVRKLTFTGSTEIGRQLMAECAQDIKKVSLELGGNAPFIVFDDADLDAAVEGALISKYRNNGQTCVCANRLYVQDGVYDAFVDKLKAAVAKLNIGNGLEAGVTTGPLIDAKAVAKVEEHIADAVSKGAKVVSGGKPHALGGTFFEPTILVDVPKNALVSKDETFGPLAPVFRFKDEAEVIAMSNDTEFGLASYFYARDLARVFRVAEQLEYGMVGINTGLISNEVAPFGGIKASGLGREGSKYGIEDYLEIKYLCLGGI

SEQ ID NO: 4702 - protein, 605 aa, Zea mays
  misc_feature (125)..(125): Xaa can be any naturally occurring amino acid
MAERLTRIAIVSEDKCKPKKCRQECKKSCPVVKTGKLCIEVTSASKLAFISEELCIGCGICVKKCPFDAIEIINLPKDLEKDTTHRYGPNTFKLHRLPVPRPGQVLGLVGTNGIGKSTALKVLAXGKLKPNLGRFKNPPDWQEILTYFRGSELQNYFTRILEDNLKAIIKPQYVDHIPKAVQGNVGQVLEQKDERDMKSELCVDLELNQVIDRNVGDLSGGELQRFAIAVVAVQNAEIYMFDEPSSYLDVKQRLKAAQVVRSLLRPNSYVIVVEHDLSVLDYLSDFICCLYGKPGAYGVVTLPFSVREGINIFLAGFVPTENLRFRDESLTFKIAETQENAEEIETYQRYKYPTMSKTQGNFKLTVVEGEFTDSQIVVMLGENGTGKTTFIRMLAGLLKPDTVEGTDIEIPEFNVSYKPQKISPKFQNTVRHLLHQKIRDSYMHPQFVSDVMKPLQIEQLMDQEVVNLSGGELQRVAICLCLGKPADIYLIDEPSAYLDSEQRIVASKVIKRFILHAKKTAFIVEHDFIMATYLADKVIVYEGRPSIDCTANAPQSLVSGMNKFLSHLDITFRRDPTNYRPRINKLESTKDREQKSAGSYYYLDD

SEQ ID NO: 4703 - protein, 371 aa, Isoetes histrix
SDSGKDAGRFSAAWQLYKAQEELVKVAHHYGIKLTMFHGRGGTVGRGGGPTHLAILSQPPDTVHGSLAVTIQGEVIEQSFGEEHLCFRTLQRFTAATLEHGMHPPTPPKEVRRRLMDKMGVICTTEAFRSFVFQNPRFVEYFRTATPEMEYGRMNIGSRPAKRKPSGGIESLRAIPWIFRWTQTRFHLPVWLGFGEAFKTVIDEDPKNFCVLREMYENWPFFRVTIDLVEMVFKKGDPRIAELYDHLLVAEDLQDLGNTLRQKYKETENLLLQVAGHKELLAGNPTLKQKLRLREPYLTTLNVQQAYTLRKMRHLDTSFSSSPRTVDGGTPRANKAAELVSLNPTTEYAPGLEDTLILTMKGIAAGMQNTG

SEQ ID NO: 4704 - protein, 481 aa, Sulfolobus solfataricus P2
MQITREKWSKNFSEWFDWVLREGEFYDYGRYPIKGMGVWMPYGFKLRQNIIGIIRNFLDSTGHEEVLFPLLIPEDLLRRESTHIKGFEEEVFWVTKGGSTDLDVKLALRPTSEVAITTMENLWLKSYKQLPKKYYQIVSVFRYETKATRPMIRLREITTFKEAHTVHETYDDAQKQVEEAIEIYKKIFDTLTIPYVLSERPEWDRFAGALHTYAFDTIMPDGRAMQIGTVHHLGQNFSKALDFKIQKKDGSLDYPHQTSYGISDRAVASVIAIHGDDHGPVLPPSVAPIKVVVIPIPAKNEEETQQVMKYSIEICEMFNKNNITCLTDQDTEKTPGEKFYIWEIKGVPIRLEIGPRELISGTVFIKRRDNFKSYTVRKEEAINKIKELLNEIQEDLRRKAWEDLKSRIEYSNDIEKAKKILGNNSGIVEVPWCGSNECGLKIEELTNARVLGYPIEKREVNDKCVICKMNAKTVLRIAKTY

SEQ ID NO: 4705 - protein, 385 aa, Populus tremula
MAIDCIKTMPSITTPHHHPKDQDQCKDDGKSFVFDAQVLRHQTNIPQQFIWPDNEKPNINAPELQVPLVDLGDFLSGNPVAAVEASRLVGEACKKHGFFLVVNHGVDKTLIAHAHNYVDTFFKLPLSEKQKAQRKIGESCGYASSFTGRFSSKLPWKETLSFRYKAEENSSKHIEEYFHNRMGEDFAEFGTVYQDYCEAMSTLSLGIMELLGMSLGVSREHFREFFNENDSIMRLNYYPPCQKPDLTLGTGPHCDPTSLTILHQDQVGGLQVFVDNEWRSINPNFDAFVVNIGDTFMALSNGIYKSCLHRAVVNSQTPRKSLAFFLCPKNDKMVTPPHELVDTCNPRIYPDFTWPMLLEFTQKHYRADMKTLEVFTNWLHQRSLS

SEQ ID NO: 4706 - protein, 113 aa, Xylella fastidiosa 9a5c
MSDYVLHVSDANFDAVVLLSDQPVLVDFWAKWCSPCKIISTLLDDLAQSYKGRLKIAKVDIDENRALAIKYHVCSIPMLLLFKDGQVQITQIGAVGKGRLTQMIDKVLANTDS

SEQ ID NO: 4707 - protein, 353 aa, Chara fragilis
SDSGKDAGRLSAAWGLFQAQAKIVKMAEKYGIKVTLFHGRGGTIGRGGGPTHLAILSQPPGTVNGSLRVTIQGEIIEHSFGEEQLCFRTLRAFTAATLEVGPHPPRPPSPEWCDLMDEMCTVSTKEFRRVLQDKRFIRYFQAGTPVLEYGRMNIGSRPSKRSCDMGIQSLRAIPWIFAWTQTRVHLPVWLGGWNGSESCHRQGSATLDVLRHMHSEWPFFRGDVRIAAMYDSLLVSEDLRILGDELRTSTDTRHLLLKCTHSHTLDNNPALKQRIILREPLTTPLNVQQAITLKKMRLASPIPSAGSAEDLTGSDVKLSPLVQLNPDRSYAPGLEDTLIITMKGIAAGIENTG

SEQ ID NO: 4708 - protein, 365 aa, Lycopodium annotinum
SDSGKDAGRLSAAWEMFKAQEELIKVAKHHDIKITMFHGRGGTVGRGGGPTHLAILSQPPDTINGSLRVTVQGEVIEQSFGEEHLCFRTLQRFTAATLEHGMHPPISPKPEWRARMAKMAAIATEEYRSIVFKEPRFVEYFRLATPEMEYGRMNIGSRPSKRKPTGGIDSLRAIPWIFACTQTRFHLPVWLGFGAAFKYVVTENSKNSNTLREMYNQWPFFRVTLDLVEMVFTKGDPRIAELYDRLLVSETLHAFGEHLRAKYAETRNFLLKVAGHTEILAGNPTLKQRLRLREPYITVLNVQQAYTLKKMRDESQYCSFPGSVTLNKPAAELVTLNTTSEYPPGLEDTLILTMKGIAAGMQNTG

SEQ ID NO: 4709 - protein, 332 aa, Debaryomyces hansenii CBS767
MVGMGQKDSYVGDEAQSKRGILTLRYPIEHGIVTNWDDMEKIWHHTFYNELRVAPEEHPVLLTEAPMNPKSNREKMTQIMFETFNVPAFYVSIQAVLSLYSSGRTTGIVLDSGDGVTHVVPIYAGFSLPHGILRIDLAGRDLTDYLMKILSERGYTFSTTAEREIVRDIKEKLCYVALDFEQEMQTSSQSSAIEKSYELPDGQVITIGNERFRASEALFRPSDLGLEAAGIDQTTYNSIMKCDVDVRKELYGNIVMSGGTTMFPGIAERMQKEITALAPSSMKVKIIAPPERKYSVWIGGSILASLSTFQQMWISKQEYDESGPSIVHHKCF

SEQ ID NO: 4710 - protein, 447 aa, Arabidopsis thaliana
MGNSEMSASEVAAAKQKNVDDWLPITSSRNAKWWYSAFHNVTAMVGAGVLSLPYAMSNLGWGPGVTIMVMSWIITLYTLWQMVEMHEIVPGKRLDRYHELGQHAFGEKLGLWIVVPQQLIVEVGVDIVYMVTGGASLKKVHQLVCPDCKEIRTTFWIMIFASVHFVISHLPNFNSISIISLAAAVMSLTYSTIAWAASVHKGVHPDVDYSPRASTDVGKVFNFLNALGDVAFAYAGHNVVLEIQATIPSTPEMPSKVPMWRGVIVAYIVVAICYFPVAFLGYYIFGNSVDDNILITLEKPIWLIAMANMFVVIHVIGSYQVFFHILIFAMPVFDMLETVLVKKMNFNPSFKLRFITRSLYVAFTMIVAICVPFFGGLLGFFGGFAFAPTTYYLPCIMWLVLKKPKRFGLSWTANWFCIIVGVLLTILAPIGGLRTIIINAKTYKFFS

SEQ ID NO: 4711 - protein, 464 aa, Glycine max
  misc_feature (200)..(200): Xaa can be any naturally occurring amino acid
  misc_feature (306)..(306): Xaa can be any naturally occurring amino acid
MATLLRKLCESATMKRSGSHSHPHPLPSSEQARPSSPLGAFDPLPADILMQIVRLLGPKHAARLCLVSKSWRSLVSDNALWAHFLQTHHPHSPLFAETALSSGYPLPTLPAQNSPRVSFQHAYALRERVPPSVVIDGGSGYCKFGWSKGASPSGRFATFLEFGNVETPMYTRLRHFFSTIYNRMQVKPSSQPVVVSISIXHWVPILYPYVCNVIVRLNLKVKMQNTDGLTLYAANQTSGIAVNIGFQVTSIVPILNGKVMRKVGVEVVGLGALKLTGFLREQMQQNNISFESLYTVRTLKESHGNXKLCYVAVDYEAELLKDTQASFEAVEGLFTLSKERFQTVEILFQPRLAGVRAMGLHQAIALCVDHCYSAELAGNNDWYKTVVLSGGTACLPGLAERLEKELHSLLPPYMSNGIRVIPPPFGVDTAWFGGKIISSLSTFPGPWCTTKKQFRQKSKLNRIW

SEQ ID NO: 4712 - protein, 364 aa, Coccidioides immitis RS
MAQTESSKISADEIALYDRQIRLWGVKAQEKIRTAKILLVSLKALGNEIAKNLVLAGIGSLTILDNETVREEDLGAQFFISEDNIGQNRAEAAAPRIRQMNPRVQLHVDTEDVKSKPPEFFATFDITIATDLDFDTFATVNAACRVANRPSYMAGLHGFYGFIFADLVSHDFVIEREKSNVPSRTNETRTRKILHITTKVENEKVIEMVTKREIYTPLILANTSPLPEEFTKVPRKRKQVTPLLTCLRALWEFQRQNGGVYPSFSRSDLERFTVLSNERHLELKLDPSILTAEFLRSFLQNIGSEINPVAAFLGGHLAQDAINVLSGREQPLQNFLLFDGERNVSPIYSLHPFFPDASANNNGA

SEQ ID NO: 4713 - protein, 430 aa, Bradyrhizobium sp. BTAi1
MMGVEVTKLPTGLTVVTDTMPHLETAALGVWAGVGGRDEKPDEHGISHLLEHMAFKGTTTRSAREIVEAIEAVGGDLNAGTSTETTAYYARVLKADVPLALDVLSDILANPSFVPEELEREKNVIVQEIGAAQDTPDDVVFEHLNELCFPDQPMGRSLLGTAKTLQGFDRDKLHGYLATHYRGPDMVVAAAGAVDHQQVVEDVTRRFASFNGAPAPKPLPAAFGKGGSRVVHRDLEQAHLTLALEGVPQADPSLFSLQVFTNILGGGMSSRLFQEVRENRGLCYSVYTFHAPYSDTGFFGLYTGTDPADAPEMMEVVVDIIGNAVETLSEAEVARAKAQMKAGLLMALESCSARAEQLARHILAYGRPQTLQEMVDKIEAVSVESTRDAARALLARSKPAVVALGSGRGLDTAVTFAEALTGSKPKAQLH

SEQ ID NO: 4714 - protein, 478 aa, Actinobacillus pleuropneumoniae serovar 1 str. 4074
MQIFNNGKYKSLHAAEQGELAVIRQTVLSDQNFYPTYHLAPQTGLFNDPNGLIFDGEKYHIFAQWFPYDALHGMKHWEHFISRDLQTFEKSDRLIPDEMFESHGCYSGGAIMWQDKIVAFYTGNTRRASDNQRVPHQNIAIFDKSGKLLEKRCIIDQAPAGYTEHVRDPKPFVTAEGKIRFVLGAQRENLTGTCLVYEMDDLDSTPRLIAELTVKDFDNDNVFMWECPDLFRLDGKDVFVWSPQGKLREAHRFQNNYHATYALGKLDGNNLTAEHIEELDYGFDFYAPQSVQNTDRIVFGWVGLPDLTYPTDKYKWHSTLSLPRQMKVQNGKIQQTPIVKLAAKQAVEIDQKMTIDNLDTAYLQISVKNQPLVLNFFSNDKGQTLSLRYENDLLTLDRSATEQTELMEKFGSQRHCEVEKLDKLEIFFDRSIVEIFINGGEKVMTSRFFIANRINLLETSRPLTVQIAQVQPIQIQDK

SEQ ID NO: 4715 - protein, 541 aa, Pichia angusta
MAGDSITGVAGTADVNRVEAPLTVRAYLMCAFGAFGGILFGYDSGYISGVMGMDYFIHEFTGKVKHGDDDSSFVVGSSQKSLITSILSAGTFFGAVCAGDLADMFGRRTIIVTGCSIYSVGVALQVASTTVALLSVGRVIAGVGVGFVSSVVVLYLSEISPKKIRGAIVSGYQFFVTIGLLLASCVDYGTEHRNDSGSYRIPIALQLIWAIILAVGLILLPESPRYYVLKGKFDRAAKVLSRLRGQPIDSDYIQEELAEIVANHEYERSVIPTTSYWQSWAACFTGGLRRPSSNLRKTILGTSMQMMQQWTGVNFIFYFGTTFFQQLGTIHNEFLISMITTIVNVASTPLSFYTIEKFGRRALMIYGAAGMVVCQFIVAIGGTVDGDNQKTVSAMIAFICIYIFFFASTWGPGAWVIIGEIFPLPIRSRGVGLSTASNWLWNCIIAVITPYMVDGDKGNLGAKVFFIWGSLCGCCLLYAIMLIPETKGLTLEQVDKMLEETTPWTSAKWKPHSTFAAEMGLAKDDKGVTHELKEHASVESV

SEQ ID NO: 4716 - protein, 122 aa, Arabidopsis thaliana
ERADQPSERPRASLRLSSVIRVAFPVKATMVVLLNGLKSSVAFQATRRVTTAFPSITGNGGGVNCMQVWPPMGRKKLGTFFNLPALTVSEWVKEVDYLIRTRGIPGVESRLEHGLVSRGPGT

SEQ ID NO: 4717 - protein, 425 aa, Arabidopsis thaliana
MGNALVKKEPPPPVVLVPPLFDYPPLSARTRMLESSYNLLFGKLALRCLFEDYFEEANRFTGKFLLKPTDDPHVDLVASVSGAVDGRVEGDFVGNAEFRWQSDVDDPHTFVDLSVSTSNPVLLMRSSAYYPKYGIGAFAVYPLISKITGKSSEEYRIMGLRYGSTNLSVGATVTPFSANNELPKHAWLVSKMGSLTVGVQYEPLHGSKDLAKYTDPRNWSCAAGYGVGSQSPLTPSFNIGIELARSSQFIASFYQHVVVQRRVQNPFEENQVVGITNYIDFGFELQSRVDDSKTPPNAPDSLLQVAASWQANKNFLLKGKVGAHSSTLSLAFKSWWKPSFAFNISATTNHRTGNVQCGFGLRVDNLREASYQRADPNFVMLTPNKEHLAEGIVWKMGKRPMYQADVDAENFSELPKELRPSQKIL

SEQ ID NO: 4718 - protein, 259 aa, Ralstonia eutropha JMP134
METIRYAVEDGIATLTLDYPARKNALNGVMRREIGDVMHELRQDTSVRALILTGAGTDFCSGGDISSMQGEISAAQGRQRLGNIHPWLETLINLEIPVISAVDGAAFGAGFSLALTADIILATPRARFGLPFLRLGLIPDCGVFYTLPRMVGLQRAKALMFSMRELNAEAAQEQGIVMEIVPADSLQERARAMARAFTEASPVALALTKKALNASLNQDLHSMLAMEADGQGIAFATEYRQEAANRFLSKQPPRYRWPD

SEQ ID NO: 4719 - protein, 566 aa, Bifidobacterium longum NCC2705
MAINPPVDATQTPEWAALQKHYDELQVEGVSLKKWFAEDAERVEKLSFDAGDLHFDLSKNLIKPETLQLFANLAKAVKLDERTKAMYTGVHINNTEDRAVLHTALRRPVEDEGKYIVDGQDTVKDVRETLDKIYAFADDVRSGKWTGVTGRKIETVVNIGIGGSDLGPVMVYEALKPYADAGISARYISNIDPNDLAEKTKGLDPETTLFIIVSKTFTTLETLTNAREARTWLLEELTANGAIAEGDEAQKAEAIKKHFVAVSTNLEKVEEFGIDPNNAFGFWNWVGGRYSVDSAVGTSLAVVFGPARFEEFLHGFHEIDEYFANTPFEKNVVVLLGMLNVWYRNFFKVASHAVLPYDQYLHRFPAYLQQLTMESNGKSVRWDGTPVTSETGEIFWGEPGTNGQHAFYQLIHQGTQLIPADFIAFVNTPNPTKDGDQDVHELFLGNYFAQTKALAFGKTADEVRAEGTPEEIVPARVFSGNRPTTSIFGVALTPFALGELIALYEHITFVEGTVWGLDSYDQWGVELGKQLAKQITPAISQDDDALAAQDASTQSLIKFYRANREF

SEQ ID NO: 4720 - protein, 184 aa, Magnaporthe grisea 70-15
MHEHTFDSTDAGASTTYPMQCSALRKGGHVVIKGRPCKIVDMSTSKTGKHGHAKVHLVAIDIFTNKKLEDLSPSTHNMDVPNVTNETFELIDIEGDGFLQLMDSNGEMREDIKLPEGSDKAEEVAKEIRRLHELKQQDENKEVCRLLIQPSAAHSFDSDTDNMCAQLSSSPRLWVRRFLPRPSN

SEQ ID NO: 4721 - protein, 571 aa, Buchnera aphidicola str. Sg (Schizaphis graminum)
MEILSGAEMVIRSLINQGIQHIFGYPGGAVLDIYDALKTVGGVEHILVRHEQAATHMADGYARSTGKIGVVLVTSGPGATNAITGIATAYMDSIPMVVISGQVASSLIGYDAFQECDMIGISRPIVKHSFLVKRTEDIPIIFKKAFWLASTGRPGPVVIDLPKDILKKTNKYNFIWPKNIHIRSYNPTTKGHQGQIKKALRILLKAKKPIIYAGGGIISSNSSEELRIFAEKINCPVTTSLMGLGAFPGNHIQSISMLGMHGTYEANMAMHYSDVIFAIGVRFDDRTTNNLKKYCPNATILHVDIDPTSISKTVSADIPIVGDAKQVLKEMIELIKKEKQIHSLKEWWSSIGKWKKIKSLEYNKKSNKIKPQKIIQTLFKLTKGTSYITSDVGQHQMFTALYYQFNKPRRWINSGGLGTMGFGLPAALGVKLALPKATVICVTGDGSIQMNIQELSTARQYNLAVLILNLNNSSLGMVKQWQDMIYSGRHSHSYMDSLPDFVKLVESYGHIGLKVKTNEELEEKLILALKKLSEGNLVFLDIQIDDSEHVYPMQIQGGGMNEMWLRKKEVS

SEQ ID NO: 4722 - protein, 342 aa, Aspergillus oryzae
MASETVLITGASGFIATHIVESFLRAGYNVRGTVRSERTANRVRYAFQEYKDKLSFVIVSDVVAAKAFDEAVEGVTGVIHTAAPFQTEVEDKERDLLQPAIEGTINLLDSIKRNGHQVRRVIHTSSFGDILDASKGDRPGHIYTEADWNPMTYAEALSESTPDVVSYCAGKTMAEHAAWDFMATENPSFDLVTICPPYVFGPVKNATTSLVNLNTSSMDVYRLMSPMSKPSHAVPPTLVWAWADVRDVADAHLKAFEVPEAGGQRFLVAQGRYSYQRIADILRDKVAEVRDRVPLGKPRSGMGDVYGIDASKSENVLGLRYRPLEDSIVDAARSYLKLEQAN

SEQ ID NO: 4723 - protein, 483 aa, Oceanobacter sp. RED65
MPSQLLKTQSYVNGQWKDAQSGQEYQVVNPATGELIAKVADCAAADAEVAVELAHEAFLSWRKTTAKERSQIMRKWFDLIMTNQDELAEIMTMECGKPLAESKGEVAYGGSFIEWFGEEAKRVYGDMIPAPAGDRKVLVNKQPVGVCSAITPWNFPLAMITRKCAPAIAAGCTIVIKPAEATPLTALALCELAEQAGLPKGVLNVVTASSGKEVGEVLSTHPLVKKISFTGSTPVGKILLKQSADTVKKLSMELGGNAPFIVFDDADIDAAIKGAMASKYRNTGQTCVCANRFIVQSGIHDEFVKALAKASDELKLGNGLDEGITQGPLINKAAIDKVSGLVDDAKKKGADVVTGGEPFSSKGGYFYKPTVLTGIKDGMDIATEEIFGPVCPVFKFDKEEEAIAIANDTPFGLAAYFYSQNLSQIWRVADELEYGMVGINEGIISTEVAPFGGVKESGMGREGSKYGIDEYIEMKYLCMGGLA

SEQ ID NO: 4724 - protein, 371 aa, Isoetes durieui
SDSGKDAGRFSAAWQLYKAQEELVKVAHEYGIKLTMFHGRGGTVGRGGGPTHLAILSQPPDTVHGSLRVTIQGEVIEQSFGEEHLCFRTLQRFTAATLEHGMHPPTPPKLEHARLMDKMGVIATEAYRSIVFQHPRFVEYFRALTPEMEYGRMNIGSRPSKRRPSGGLNTSCYTWIFAWTQTRFHLLVWLGFGEAFKLTVDRDDPKNVDILREMSAHWPFFRVTIDLVEMVFKKGDPRIAELYDHLLVSPDLQDLGKTLRQKYKETENLLLQVAGHNELLAGNPTLKQRLRLREPYLTTLNVQQAHTLRKMRDRENVFCSSPRTVDGGTPRANKSAAELVTLNPTTEYAPGLEDTLILTMKGIAAGMQNTG

SEQ ID NO: 4725 - protein, 95 aa, Eleusine coracana
AISCGQVSSAIGPCLAYARGAGAAPSASCQSGVRSLNAAARTTADRRAACNCSLKSAASRVSGLNAGKASSIPGRCGVRLPYAISASIDCSRVNN

SEQ ID NO: 4726 - protein, 560 aa, Thiobacillus denitrificans ATCC 25259
MVSSVLVRTGDTRTSGLSTRPVHRLLQAHHSRMADVHMRELFDTDPQRFERFSLQVGDLLLDYSKNRITDETMDLLVRMAEESDVAGWRERMFRGDKINTTENRAVLHVALRNRSNRPVNVDGEDVMPKVNAVIERMGAFAEQVRGGVWRGYSGALITDVVNIGIGGSDLGPQMVVQALKPYRHPRLKLHFISNVDGAHVKETLEALDPETTLFIVSSKTFTTQETMTNAHYARDWFLARAGDVAHVARHFVAVSTNRDAVTAFGIDAANMFEFWDWVGGRYSLWSAIGLSIVLAVGAERFLELLEGAHEMDEHFRHAPLRQNMPVILALLGIWYNNFFGAESHAILPYDHYLRSLPAYLEQADMESNGKSVDRDGRVVDYPTGQIIWGATGINGQHAFYQLLHQGTKMIPADFIVSITPHTELQEHHDILIANFLAQTEALMRGRTREETLEEMGRSPGDPSVQHRVFEGNHPSNAILLKKLTPHTLGMLIALYEHKIFVEGVIWNLNSYDQWGVELGKQLAGRILPELHADAPVAGHDASTNALINHYRRMTQPHPGL

SEQ ID NO: 4727 - protein, 101 aa, Equisetum hyemale
SDSGKDAGRLSAAWQLFKTQEELTGVAKRFGVKLNMFHGRGGTVGRGGGPTHLAIPSSQPPDTITVLRVAVREVIGAVFGEEHLCFRTLQRFTAATLEHGM

SEQ ID NO: 4728 - protein, 193 aa, Equisetum hyemale
LRAIRGVCMTQIRFHLPVWLDSGRPLSAIEKDPANLHMLAEMSPEWPFFRVTLDLVEMVFAKGDPRLALLNDSLLVNKELRYHRRYSSVKHLETKELLLKVTGYTEILEGNPTLRHDYFLRKPYITTLNVQQALALKKMRDRSEKLCQVQRHSVRTSAAELVTRNMASEYAPGVEDTLILTMKGIRAGMQNTG

SEQ ID NO: 4729 - protein, 496 aa, Ralstonia metallidurans CH34
MQDQSDQTRALWVDGVSVFTPARTFDSVNPATGEVNWQVAFATAEHVAAAVASAKRAVNDPAWRKMLPHVRAGILMRIADAMTARADEFARLQMLENGKVWSECRAQALSAASTFRFYASACETLGSEVTPSRGNYLSMTAYEPYGVVAAITPWNSPLTMEAQKVAPALAAGNAVILKPSEVTPSGALLLAQVAFEAGLPKGLLNVVTGDGRETGTALVEHPDVRMVSFTGGTATGRSIAGIAAQRLIPVALELGGKSPHIIFEDANIDAAINGVVDGIFEGSGQSCVAGSRLFVQRSIYDKAVGLLVERARALRVGLPDVAGSQLGPLAGFAHRDRVERFVSIAREEGGQILAGGRRPPEAALQAGAFFEPTVIGGLSNSATAVQQEIFGPVLCVLPFGDEDDLIAQANDSAFGLASGIWTANYQRAWRVARALETGLVWINTYKQLSIATPFGGFKDSGIGREKGVNGVRLYQQSKGIYWSMDEKNFPSDGALA

SEQ ID NO: 4730 - protein, 407 aa, Yersinia pestis KIM
MKRAVITGLGIVSSIGNNQQEVLASLQEGRSGITFAQEFKDAGMRSHVWGDVKLQSEPKDLIDRKVLRFMSDASIYAYLAMQEAIADSGLSDSQVSNFRSGLVVGSGGGSPRNQVAGSDAMRTPRGLKGVGPYMVTKAMASGVSACLATPFKIKGVNYSISSACATSAHCIGHALELIQLGKQDIVFAGGGEELCWEMACEFDAMGALSTKYNDTPAKASRTYDQDRDGFVIAGGGGMVVVEELEHALARGAHIYAEIVGYGATSDGADMVAPSGEGAVRCMQMAMAGVDTPIDYMNVHGTSTPVGDVKELGAIREVFGNNTPAISSTKAMTGHSLGAAGVHEAIFSLLMVEHGFIAPSINIDNLDEQAQGMNIITETTQRELTTVMSNSFGFGGTNATLVMRKYQK

SEQ ID NO: 4731 - protein, 157 aa, Solanum commersonii
MAHYENQYSAGQALQKDEYGNPVRQTDEYGNPIQQTGGTMGEYGTTGTGYGTQAGHTTGVLGGDQRQHGTLGGMLHRSGSSSSSSSSEDDGHGGRRKKKGIKDKVKEKLPGGHRDDLAHSTATTTTTGYGMDGTHEKKGIMEKIKEKLPGHHGPGHH

SEQ ID NO: 4732 - protein, 154 aa, Triticum aestivum
  misc_feature (46)..(46): Xaa can be any naturally occurring amino acid
  misc_feature (104)..(104): Xaa can be any naturally occurring amino acid
MSGVWVFRNGVVKLVENHPASAAGPPGGGAVRRKALLHTPTGEVVXSYASLERKLVALGWERYYAGGGGAAGDCMLRFHKRSSVDLISLPKDFGQFSSVHMYDXVIKNRDAFRVIRRLAGASWLIRPSDEASTARPCKPAAATVASMSVIDFRW

SEQ ID NO: 4733 - protein, 367 aa, Neoregelia ampullacea
  misc_feature (232)..(233): Xaa can be any naturally occurring amino acid
SDSGKDAGRLSAAWQLYKAQEELVQVAKKYGVKLTMFHGRGGTVGRGGGPTHLALLSQPPETINGSLRVTIQGEVIEQSFGEERLCFRTLQRYTAATLEHGMRPPISPKPEWRAILDEMAVVATAEYRSIEFGEPRFVEYFRLATPELEYGRMNIGSRPSKRKPSGGIESLRAIPWIFAWTQTRFLLPVWLGFGAAFNIYCKGQKDLRTLKEMYNEWPFFRVTLDLLEMVFXXGDPGIAALYDKLLVSDDLKPFGEQLRANYEETKQLLSQGCRPHGLLEGRPLLKQRIRLRERYITILNVCQVYSLKRIRDPNFHVHVRPPLSKRYDSNKPAELVKLNPRSEYAPGLEDTLILTMKGIAAGMQNTG

SEQ ID NO: 4734 - protein, 924 aa, Rhodospirillum rubrum ATCC 11170
MNRDRLPTFLSDGASRGVLASGVAFGLIITLLVGFWGWISYRDSLARAASVTEGYTLTYKAFSEQVFGRIAGVVDEVDHRFESSADDQAKLGHYVREQAILFPVLSDVVILDARGRVRLAGKAPPRLTDRVFPMADRLLGGRDEPGMVVTPLFRSDTDGGPWVFAVGRTLVGADGTVAGAVAAVIDQKRFNDSFAVLLENDMATVVLALADGKILARAPEAGFHPGAALLSVAERQGVVVERRSGITRSSLDGVMRIFNERRLSGYPLLVIGTIAKSAALSDWSGWMVLGGLLVATVLIADGWVTIQLMRQLGRRRTAEARLSLQNAVLTSQRETSPDGILVADLSWRLISWNQRFLDIWRVSDDLMRQADGRTLLTQIEPLLEDAPVFRADVVDQMTQAASQFLAVMSHEIRTPMTGILGMGDLLLTSGLNEEQEKYGRTLMRSARTLLGLLDDVLDFSKIEAGQLELEVVDFSPVEVLQDVIGLFLPKASERGLVLSSRLPEGPPPILRGDPTRLRQVLFNLVGNAVKFTARGGVEVRMDVGEAVGDQIPLTLSIIDSGVGMDARQRARLFNPFTQADVSTTRRFGGTGLGLTICKRLVEMMGGTIEIDSTLGEGSTFRVRVTLTRGDASKVVSLEGHGLGHPLDLPGPRPAGRRILLVEDNDTNRLLIATVLERSGHNVDTAADGRQGVDAVSAATEPYDLILMDMQMPEMDGPDATRAIRALSGPAAHTPIVALTADVRAEDRDRYLASGLDDLLTKPVDWTRLREVIERLTGPGQTRPQVRPGGDEVLKRAAWEEEPAFDGSVLASLAEQLGTNRLRPLITSAMANLSRHFDLLEKTMANGSAQDVRRSAHALKGMAGQFGARRAQALSLAIEEEADRPQAARALLPFLRIAIEGARGGLEALVDPTTAPGEKRGREAR

SEQ ID NO: 4735 - protein, 369 aa, Pereskia aculeata
SDSGKDAGRLSAAWQLYKAQEELIKVAKQFGVKLTMFHGRGGTVGRGGGPTHLAILSQPPDTIHGSLRVTVQGEVIEQSFGEEHLCFRTLQRYTAATLEHGMHPPTSPKPEWRALLDEMAVVSTKEYRSIVFQEPRFVDYFRLATPELEYGRMNIGSRPSKRKPSGGIESLRAIPWIFAWTQTRFHLPVWLGFGAAFKNAIEKDIRNLHMLREMYNMWPFFRVTLDLVEMVFAKGDPEIAALYDKLLVSEELQSFGERLRKEYEETSRLLLEVAGARLLEGDPYLTQRLRLRDPYITTLNVSQAYTLKRIRDPNFKVTERPHLSKDIMESNNPAAELVKLNPTSEFPPGLEDTLVLTMKGIRAGMQNTG

SEQ ID NO: 4736 - protein, 354 aa, Ipomoea nil
MVGGNHTPASPAPTVCVTGAAGFVGSWLVMKLLQRGYIVHATVRDPGNAQKVKHLLELPKGEGKLKVWKGVLEEEGSFDEAIAGCEGVFHVAAAVNFASKDPENEVIKPAVKGILSIINSCAKAKTVKKLVFTSSTAAVHIKETQQLEYDESSWSDLDFIYANKMGGWMYFASKTLAEKEAWKAAKEKQIEFISIIPPLVIGPFLIPTFPLSLVTALSPIMGNGLHHNIIKQGKFVHLDDLCEAQIFLYQHPKAGGRFICSSHHATIHDVAKMIRHNWPEYYVPSEFKGIEKELPIVSFSSKKLQEMGFQFKYTLEDMYKGAIETLRKKGLLPYSTKEPADIEQEQHSGKEPKS

SEQ ID NO: 4737 - protein, 370 aa, Coccidioides immitis RS
MVAETKLYDSLGVQPSASQDEIKKAYKKQALKWHPDKNRDSPQASEKFKEVSQAYEVLSDPEKRKVYDQYGLEFLLRGGAEAPPGGPGGMPFEGGMPGGFQGFGGMPGGTRTFHFSTSGGPGGFKFSDPEDIFSGFARSGGFGGEGPDIFSIFNGLGGGMGGGGGGGGAFRAAGGGQPRFRPSAEARRPPTPEVTTVEKQLPVALEDIFKGVHKKMKIKRKTFDERTGKRSVEDKILEFDIKPGLKAGSKIKFKGVGDQEEGGTQDLHFIIQEKEHPWLKRVGDDLVTTVEISLKEALTGWSHTVTTIDGKQLRVSGSGPTQPGYEEVFPHQGMPKPKDPAQRGNFIVQIKVKFPTSLTSAQKAKLKEIL

SEQ ID NO: 4738 - protein, 403 aa, Ipomoea nil
MVDGNHPLLPPKVCVTGAAGFIGSWLVKTLLQRGYHIHATVRDPGNTKKVKHLLELPKADTNLTIWKGVMEEEGSFDEAIAGCEGVFHVATPMDFDSKDPENEVIKPAINGVLNIINSCVKAKTVKRLVFTSSAGTLNVQPQQKPVYDETCWSDLDFIYAKKMTGWMYFASKILAEKEAWKVTKEKKIDFISIIPPLVVGPFITPTFPPSLITALSLITGNQAHYSIIKQGQYVHLDDLCEAHIFLYEHPKAEGRFICSSHHTTIHGLADMITQNWPEYYIPSEFKGIEKDLPVVYFSSKKLQDMGFQFKYSLEDMYRGAIETLRKKGLLPYSTKEAAAIEEEQETVALKVEKPTAIEQKQEAKTVPLKPSAIEQKQETAVPLKLEEEPTAIEQKQEVVPLKA

SEQ ID NO: 4739 - protein, 273 aa, Paeonia suffruticosa
PVPENWGLYEIVNHGISPEFMDTVEKLTKEHYKKCMEQKFKELVASKALETEINDMDWESTFHLRHLPISNMAEIPDLDDEYRKVMKEFASKIETLAEELLDLICENLGLEKGYLKKAFYGSKGPTFGTKVSNYPPCPKPDLIKGLRAHTDAGGLILLFQDDRVSGLQLLKDDQWVDVPPMRHSIVINIGDQLEVITNGKYKSVMHRVIAQTDGNRMSLASFYNPGSDAVIYPAPALLGKEAQVYPKFIFEDYMKLYAGLKFQAKEPRFEDPG

SEQ ID NO: 4740 - protein, 404 aa, Mannheimia succiniciproducens MBEL55E
MFEPVEYGFDDEIGRTLIKVVGVGGGGGNAVNHMVNNMIHNGGTLVGENSMTSDEHGEIIFYAVNTDAQALRKSIVQQTVQIGAATTKGLGAGANPNVGRKAAEDDQEAIRAMLEGADMVFIAAGMGGGTGTGAAPIVAQVAKELGILTVAVVTKPFSFEGKKRMAFAELGIKELSKHVDSLIIIPNEKLLKVLGKTTTLVQAFSAVNDILRNAVTGISDMITSPGLINVDFADVRTVMSEMGRAMMGAGIAQGAASDGRAEKAAQDAVASPLLEDVDLSGARGVLVNITAGMDLGLDEFYAVGDTIRAFASDEATVVVGTTLIPEMSDEIRVTIVATGIGDIDEPAATLAPVAQRPVTGAAPNPNQPGQAPQQPTTQPEQPARPTSFGNNNDLFKPAFLRGDK

SEQ ID NO: 4741 - protein, 482 aa, Geobacillus stearothermophilus
MIYVNGKWSKGEGKKRPVINPANEEIIIEINEASQQQAVEAIQAARHAFQYTDWPFNPAKRIAALRQLADLLEQNAETFASIETLNTGKPIRESRLDVSDSIQCLRYYADFVEQRAIEEIKRTDGTTSKIIEEPIGVCALIVPWNFPLLLGIWKLAPALAAGNTVVFKPSELTPLSFIELTKLIDSIGLPPGVFNLVPGGGSPVGETLVTHPDVEKISFTGGTKTGRWIYEQGARRLKRVSLELGGKSPLLIFDDADLASTIEWALFASFFNQGEVCVAASRILVQRRVYDSFLDQLTQRLASLRIGDPFAEHTEMGPLISSSHLEKVETYIQIGLQEGGVLLQGGKRMKELGYYLTPAVFAHVRQDMRIVQEEIFGPVITVQPFEHDEEAIKLANDTIYGLAAGLFSRDLERAEQIAGKLRAGTIWINSYHTPYVDAPWGGLKQSGIGRELGPQGFAAFTETKHVNISQHGKPLGWYSSHS

SEQ ID NO: 4742 - protein, 104 aa, Staphylococcus aureus
MAIVKVTDADFDSKVESGVQLVDFWATWCGPCKMIAPVLEELAADYEGKADILKLDVDENPSTAAKYEVMSIPTLIVFKDGQPVDKVVGFQPKENLAEVLDKHL

SEQ ID NO: 4743 - protein, 317 aa, Shewanella sp. MR-4
MSQVRHSNLLILGSGPAGYTAAVYAARANLKPVMITGMQQGGQLTTTTEVENWPGDAEDLTGPALMERMQKHAEKFDTEILFDHINEVTLTERPFRLKGDNGEYTCDALIIATGASARYLGLESEEAFKGRGVSACATCDGFFYRNQKVAVIGGGNTAVEEALYLSNIAAEVHLIHRRDTFRSEKILIDRLMDKVANGNIILHLDQTMEEVVGDAMGVTGLKMKSTKDGSITDLAVAGVFVAIGHSPNTGIFEGQLEMNNGYLKVQSGLQGNATQTSIEGVFAAGDVMDQHYRQAITSAGTGCMAALDAERYLDAKK

SEQ ID NO: 4744 - protein, 376 aa, Aspergillus nidulans FGSC A4
MPTEEVAALVIDNGSGMCKAGFAGDDAPRAVFPSIVGRPRHHGIMIGMGQKDSYVGDEAQSKRGILTLRYPIEHGVVTNWDDMEKIWHHTFYNELRVAPEEHPVLLTEAPINPKSNREKMTQIVFETFNAPAFYVSIQAVLSLYASGRTTGIVLDSGDGVTHVVPIYEGFALPHAISRVDMAGRDLTDYLMKILAERGYTFSTTAEREIVRDIKEKLCYVALDFEQEIQTASQSSSLEKSYELPDGQVITIGNERFRAPEALFQPSVLGLESGGIHVTTFNSIMKCDVDVRKDLYGNIVMSGGTTMYPGISDRMQKEITALAPSSMKVKIIAPPERKYSVWIGGSILASLSTFQQMWISKQEYDESGPSIVHRKCF

SEQ ID NO: 4745 - protein, 422 aa, Pseudomonas fluorescens Pf-5
MQGAGRPARERLADFGSAYSMENLQSAVDTLVHGSNTLFILIGAVMVLAMHAGFAFLEVGTVRQKNQVNALSKILSDFAVSTLAYFFIGYWISYGVSFLQPAAVISADHGYGLVKFFFLLTFAAAIPAIISGGIAERARFVPQLCATVLIVAFVYPFFEGLVWNGNFGVQAWLQQRFGAGFHDFAGSVVVHAMGGWLALAAVLLLGPRNGRYRDGKLVAFAPSSIPFLALGSWILIVGWFGFNVMSAQTLQGVSGLVAVNSLMAMVGGTVAALIVGRNDPGFLHNGPLAGLVAICAGSDLMHPVGALITGAIAGALFVWCFIAAQSQWKIDDVLGVWPLHGLCGVWGGIACGIFGQSALGGLGGVSLVSQLIGTGLGVAVALLGGLAVYGVIKAVCGLRLTQEQEYYGADLSLHKIGAVSQD

SEQ ID NO: 4746 - protein, 465 aa, Methanococcus maripaludis S2
MFIDGKWIIREDIDVFDPYTLENIEKITALDREETKNAIEVTEKHKEIMKNLSPSKRYKILMKVAEHLSSKKDFFAKTISIDVGKPIKQSKIEVDRTLTALKLSAFYAKELRGETINSENGLIFTKKEPLGVIGAITPFNFPLNLATHKIGPAIATGNSVVLHPSSKAPIVAIYLTKIIEHVLKQMDIPRGVFNLATGNGEIVGDEISKNDNVNMVSFTGSVEVGESISKNAKMKKVTLELGGNNPMIVLKDSDIKLAAKSAVKSKFLNAGQVCISVGQVLVEEEVVETFTKYVIEETKKLILGNPLDKNTDIGPLISPESALRIENLIKQSVSEGGELLIGGNRQNSLISPAVINIDEENILSKIETFGPILPILTVKDSEEAVNIANNSKYGLQAGLFTNNINNAMKIADELEYGGIMINSSPTFRKDNMPFGGVKKSGLGREGIKYTVEEMSETKTVVIHNI

SEQ ID NO: 4747 - protein, 107 aa, Vicia faba
KGMFSFLKDSAGVVDSPKLQAHAEQVFGMVRDSAIQIRQTGDVFLKDGSLGAIHIQKGVVDPHFVVVKEALLKTIKEASGDKWSEELSIAWEVAYDGLATAIKKAMS

SEQ ID NO: 4748 - protein, 83 aa, Vicia faba
QVFGMVRDSAIQLRTTGDIVLKDGTLGAIHIQKGVVDPHFVVVKEALLKTIKEASGDKWSEELSIAWEVAYDGLATAIKKAMS

SEQ ID NO: 4749 - protein, 450 aa, Enterococcus faecalis V583
MNVVKFGGSSLASAPQLQKVLQIVKEEPRRTFVVVSAPGKRTPQDIKVTDLLIQYYQRYLNNEEIESTISAIIRRYEDLFDELHLDKAVLADIAISIRQLATLPKENNAFLFDYFLASGEDNNAKVVASFFKQNGLDARYISPKELGLLVTPEPGNARILPKALEKISVYRETQQILVIPGFFGYTEAGEICTFSRGGSDITGSIVAAGVQADLYENFTDVDGIYVAHPGIIEQPQTIQELTYREMRELAYAGFAVLHDEALMPAYRANIPVVIKNTNNPHHPGTLITTSRKVKHAPVVGIASDQGFASIYISKYLMNRELGFGRRLLEVLEKLALSYEHMPSGIDDITIVLREDQLTTEIENRLMAQLQEVLAPDELRITHHLSMIMIVGEGMRQRIGVTAESTMALAKEKINLEMINQGSSEVSIMFGIKKEQEEKAIKALYRTFFHD

SEQ ID NO: 4750 - protein, 83 aa, Pyrococcus abyssi GE5
MSGTKKVGSAGRFGPRYGLKIRRRVAAVEAKMRQKHVCPVCGRRAVRRISTGIWQCKKCGAIFAGGAYLPVTPAGKVAKRVVE

SEQ ID NO: 4751 - protein, 655 aa, Bifidobacterium longum NCC2705
MALPTPLQAFSGVPKINTAPDKQTIVDGEKMTGAQALIRSLEDLGVEDVFGIPGGAILPVYHEIKDNTKFRFVLMRHEQAAGHAAEGYALATGKVGVCIVTSGPGATNVVTAIADANMDSVPMVVITGQVGVQAIGTDAFQEADIVGITYPVSKHSFLVTRAQDIPRVLSEAYYIANTGRPGPVVVDLTKTAQTGDMYYSWPQRMILPGYNPTTKAHGRVLSDAAKLFSQSYRPVLYVGGGAARSNAGAQVKALADLTGAPVVTTLPARGIIPDSDPKNLGMLGMHGTIAATGAVQRADLLVAIGARFDDRVTGKLDAFAPTARVIHIDIDPAEIGKNRQPDVPIVGDVATVLDDLIPEIQRTQAIQGKPNLAPWWKAIDGWREEYPMTWDEPTDGSLAPQWVIKKLSEMADPSTIWVTGVGQHQMWASQFIDFENQHAWISSGGLGTMGYGLPAAIGASVGSAREFEGKKPVWLIDGDGSFQMTSEELAAAFLDHAPVKIAILNNSVYGMVRQWQTLFYEHHYSQTNLLDGEAHGADGAAALADGDAPLEVPDFIKLAEAYGCVGIRAFTEEEAIAAIEKANQINDRPVLIDFRVWKDAMVWPMVAAGAPNDEVTYKPGIKPLAGGTPAPGTGPDEHATGVFEHETAAATASEH

SEQ ID NO: 4752 - protein, 238 aa, Glycine max
MSSFSFTFPSFLFHSFLVFFSHHDFPSIKLRSKLSLFQFTRVSLLLLRLELRSSASMATVQLQSLTLVRSSALPSATFSPPIALSGRRNSASLPRYACLRLRPAAETCFPTRAALRTAPRGGGVKCEAGDTAVEVAPITDANWQSLVLESESPVLVEFWAPWCGPCRMIHPIIDELAKEYVGRLKCYKLNTDESPSTATRYGIRSIPTVIIFKNGEKKDTVIGAVPKTTLTSSIEKFL

SEQ ID NO: 4753 - protein, 368 aa, Sphagnum sp. HG-1998
  misc_feature (182)..(182): Xaa can be any naturally occurring amino acid
SDSGKDAGRLSAAWYMFKAQEELVEVAKQYGVKLTMFHGRGGTVGRGGGPTHLAILSQPPDTINGSLRVTIQGEVIEHSFGEEHLCFRTLQRFTAATLEHGMHPPISPKPEWRKVMDSMALVATEEYRSVVFQNPDFVSYFRTATPELEYGRMNIGSRPSKRKPSGGIESLRAIPWIFAWTXTRFHLPVWLGLGGALAHALQSDPSNIVILHRMYNQWPFFHVTLDLVEMVFAKGDPRIAALNDSLLVSPELKPFGVELRRKYEETRSLLLKVAGHKDVLEGDPYLKQRLRLREPYITVLNVQQAYTLKKMRDEECKINCATEWAARKPGKRTTELVALNPMSEYAPGLEDTLILTMKGIAAGMQNTG

SEQ ID NO: 4754 - protein, 79 aa, Glycine max
MSEKGRPLPKFGEWDVNDPASAEGFTVIFNKARDEKKTGGNPESPGKTATDPHSKPAVEPGKTQTKKWFCCMQNPSAES

SEQ ID NO: 4755 - protein, 356 aa, Ipomoea nil
MSGGGRNAPTLPAPKVCVTGAAGYVGSWLVMKLLQRGYVVHATVRDPGNTKKVKRLLELPKAAEGKLRLWKGVLEEEGSFDDAIAGCEGVFHVAATPVDFVSDDPENEIIRPAVKGILSIINSCAKAKTVKRLVFTSSAVTLIVQENPKPVYDESSWSDLDLIYAKKMPGWMYFASKTQAEKEAWKAAKEKQIDFISIIPPLVIGASIVPTVPLSFTIALSPVTGNEAHYFVIKQGQYVHLDDLCEAQIFLFEHPKAEGRFICSSHDATIHDLAKMIRQNWPEYYVPSEFKGIEKDLPVVSLSSKKLLDMGFQFKYTLEDMYREVIETLRNKCVLPYSIKPPPKEQEWENGKTLEA

SEQ ID NO: 4756 - protein, 829 aa, Shewanella sp. MR-7
MNRRDFIKANAVIAAAGAAGLALPASASNLITSSEQTKLEWNKAPCRFCGTGCSVIVATRDGKVVATHGDANSEVNRGLNCIKGYFLSKIMYGSDRLTTPMLRMTDGKYDKHGEFTPISWDSAFDIMAQKWKETLKAKGPTAVGMFGSGQWTVWEGYAAVKLMKAGFGSNNIDPNARHCMASAVVGFMRTFGIDEPMGCYDDMEAADAFVLWGSNMAEMHPILWTRVTDRRLSASHVKVAVLSTFEHRSFDLADLPIVFTPQTDLAILNFIANYIIQNDKVNWDFVKKHVNFRQGTTDIGYGLRPTHPLEQKAKNVKTAGDSTPIDFDTFKAFVAEYTVEKVSKMSGVPEAKLIELAKLYADPNTKVTSFWTMGFNQHTRGVWCNNLIYNIHLLTGKISTPGNSPFSLTGQPSACGTAREVGTFSHRLPADMVVTNPEHRKHAEEIWKIPSGIIPPKPGYHAVEQNRRLKDGDLNCYWVQVNNNMQAGPNINEEGLPGYRNPANFIVVSDAYPTVTTQAADLILPTAMWVEKEGAYGNAERRTQFWHQMVQAPGESHSDLWQLMEFSKRFTTDEVWSKEVLAANPQFKGKTLFEVLYQNGNVDKFPLADTDPKYLNNEAKHFGFYVQKGLFEEYATFGRGHGHDLAPFEAYHEAHGLRWPVVDGKETKWRFREGSDPYVKAGTGFEFYGKPDGRAVIFALPFEPPAESPDDEYDMWLSTGRVLEHWHSGSMTQRVPELYRAFPDAVCFMHPEDAKKRGLRRGDEVRVMSRRGEIKTRVETRGRNKPPVGLVFVPWFDASQLINKVTLDATDPLSKQTDFKKCAVKIVKV

SEQ ID NO: 4757 - protein, 357 aa, Bradyrhizobium japonicum USDA 110
MRTHSIAAIPADGIGPEVISAGVRVLEALARRSGDLAFNVKTFDWGSDYYKKHGVMMPADGLAELKKFDAIYFGAVGAPDVPDHITLWGLRLPICQGFDQYANVRPTKILPGVASPLRNVGVGDLDWVIVRENSEGEYAGMGGRAHRGLPEEVGTEVAVFTRVGVTRIMRYAFQLAESRPRKFLTIVTKSNAQRHGMVMWDEIAAEVAGEFPDVTWDKMLVDAMTVRMTLHPKSLDTIVATNLHADILSDLAGALAGSLGVAPTGNIDPQRRFPSMFEPIHGSAFDITGKGIANPVATFWTGAQMLEHLGEKDAAMRLMTAVERVCAAGVLTPDVGGKATTKEVTDAVIDAIHGSNV

SEQ ID NO: 4758 - protein, 544 aa, Rhodospirillum rubrum ATCC 11170
MTVTVLEVPTTPFAGQKPGTSGLRKKVGVFRQPHYLENFVQAVFDSLDGFQGQTLVVGGDGRFHNREAVQTILKMAAANGFGRVLVGRDGLLSTPAASCVIRAHKAFGGIILSASHNPGGPEGDFGIKYNIGAGGPAPEKITDAIFAATASLSRYRTLENAPEVDLGRIGETDLGGMRVVVIDPVADYAALMETLFDMEAIRRLFRDGFTMCFDAMHAVTGPYAHAILEGRLGAPAGTVINGTPLEDFGGGHPDPNLTYAKDLADLMMGDRAPDFGAASDGDGDRNMILGRGVFVNPSDSLAVLAANAELIPGYRGRMTGVARSMPTSRAVDRVAAKRGWECHETPTGWKFFGTLLDAGRATLCGEESFGTGSDHVREKDGLWAVLAWLNIIAARAQTVRQILADHWGNYGRTFYSRHDHEGLDAAKAEALMADLRAAPLLGQTLGGRKVALHDDFAYTDPIDGSTSQGQGIRIEFEDGARIVVRLSGTGTEGATLRLYLERFEPDPAAHDQDAQVALADLIATIRDLTRLKDRFGSEDPTVIT

SEQ ID NO: 4759 - protein, 467 aa, Streptococcus pyogenes MGAS315
MNGEWKLSENEITIYAPATGEELGSVPAMTQAEVDAVYASAKKALSDWRALSYVERAAYLHKAADILVRDAEKIGAILSKEVAKGHKAAVSEVIRTAEIINYAAEEGLRMEGEVLEGGSFEAASKKKIAIVRREPVGLVLAISPFNYPVNLAGSKIAPALIAGNVVALKPPTQGSISGLLLAEAFAEAGIPAGVFNTITGRGSVIGDYIVEHEAVNFINFTGSTPIGEGIGKLAGMRPIMLELGGKDSAIVLEDADLVLAAKNIVAGAFGYSGQRCTAVKRVLVMDKVADQLAAEIKTLVEKLSVGMPEDDADITPLIDTSAADFVEGLIKDATDKGATALTAFNREGNLISPVLFDHVTTDMRLAWEEPFGPVLPIIRVTTVEEAIKISNESEYGLQASIFTTNFPKAFGIAEQLEVGTVHLNNKTQRGTDNFPFLGAKKSGAGVQGVKYSIEAMTTVKSVVFDIQ

SEQ ID NO: 4760 - protein, 361 aa, Streptococcus suis 89/1591
MSKLHHVKSYLEANKMDLAIFSDPVSIYYLTGYHSDPHERHMMLFVMPDHDSLLFLPALDVERAVATVDFPVAGYMDSENPWQIIKSKLPQKSFSVICAEFDNLNLTRYHGLQSIFSQPFSDITPLINTMKLIKSRDEIEKMLVAGEFADKAMQVGFNNISLNVTETDIIAQIEFEMKKQGISKMSFDTMVLTGDNAANPHGIPSTNKIENNALLLFDLGVEALGYTSDMTRTVAVGKPDQFKKDIYNLTLEAHMAAVNMIKPGVTAGEIDYAARSVIEKAGYGEYFNHRLGHGLGMSVHEFPSIMEGNDLVIEEGMCFSVEPGIYIPGKVGVRIEDCGYVTKNGFEVFTKTPKELLYFEG

SEQ ID NO: 4761 - protein, 242 aa, Oryza sativa (japonica cultivar-group)
MRKAYKDSFKVLEADIQHANTLASEFPREYDGACLQMRLSYSPAAHIFLFLVQWTDCSLAGALGLLRILVYKVYVDGTTTMSTHERKASIKEFYAVIFPSLLQLQRGITDTEDKKQKAVCMERYRRRDEDERNILSEIDAEREEECGICMEMNSKVVLPNCTHNMCLRCYQDWNSRSQSCPFCRDNLKKTDPGDLWIYVEDQDVVDLETVSRENLRRLFMYINKLPLIVPDVIFSIYDSHIK

SEQ ID NO: 4762 - protein, 131 aa, Brassica napus
MSGSNPDRASSPTSSRSVTKTVNGSHQFVIRGYRLAKGMGVGKHIASDNFSVGGYQWEIFFFPDGKNPEDNSAYVSVFIALASEGSEVRALFELSLVDQSGKGNHKVHSHFERTLDTGPYTLKYKGSMWYD

SEQ ID NO: 4763 - protein, 339 aa, Achlya bisexualis
MAPVAIGINGFGRIGRLVCRAAFANPNATVVAINDPFMDLDYMVYLFKYDSTHGGYKGTVVAEDGNLVIDGHVVRVFSERNPNEIPWGEAGADYVCESTGVFTTTEKAGLHLQGGCKKVVISAPPKDSTPMYVMGVNHDKYDGSAHVVSNASCTTNCLAPLAKVIHDNFGIVEGLMTTVHAVTANQLTVDGPSRGGKDWRAGRGAGANVIPASTGAAKAVGKVLPELNGKLTGMAFRVPVPDVSVVDLTVRLEKGASLDTIKAAVKEASEGSMAGILGYTEDEVVSQDFVSDKRSSIFDANACIALNDNFVKLVSWYDNEWGYSNRLVDLVVHMATIDN

SEQ ID NO: 4764 - protein, 300 aa, Brassica oleracea
MEELSRNIRDMKFILYGNSEAEPVAEACAQLTQEFFREDTLRLFITCLPILNLETRKDATQVVANLQRQQVNFKLIASDYLEANVDLMDVLIQGCENLDMALHYGAMFRECIRHQIVAKYVLESEHVKKFFDYIQLANFDIAADAAATFKELLTRHKSTVADFLTNNEEWFFADYNSKLLKSVNYVTRRQAIKLLGDILLDRSNSAVMTKYVSSMDYLMILMNLLIESSKSIQIEAFHVFKLFVANQNKPAEIVNILVTNRSKLLRLFADLRPDKEDERFEADKSQVLREISSLEPLVLA

SEQ ID NO: 4765 - protein, 596 aa, Achlya bisexualis
MQVRRFSSVARKFFVGGNWKCNGSLSQAQSLVDTLNTATIPKNVEVVVAPASIHALSVKSSLRKDIGVSGQDTWSRGNGAFTGEVSAEMLKDAGINYTIIGHSERRQKGETNEEVASKAGYALSKGVSVIACIGETKIEREAQKTMQVVTEQLAAYAKNITDWSNVVIAYEPVWAIGTGLTATPEQAQEVHAGIRSWLKQNVSSAVADATRIIYGGSVTAGNAAELSKKADIDGFLVGGASLKPDFLSIINCQNDKAHQGGPVNIAINGFGRIGRLVLRAAQTNPLLNVVAVNDPFIPTEYMEYMLKHDTVHGHFDGTVRHEGDHIIVNDRKIRVFGEKDPKAIKWGESDVEYVVESTGAFTTKEKASAHLLNGPRKVVISAPSADAPMFVVGVNHDKYDPSMNIVSNASCTTNCLAPLAKVVNDKFGIIEGLMTTVHAVTATQLTVDGPSKKDWRGGRAACFNIIPSSTGAAKAVGKVIPELNGKLTGMSFRVPTANVSVVDLTVRLRNKASYEDIKAAIKYASENELRGILGYTDTAVVSSDFISDPRSSIFDADAGIVLTDDFVKLVSWYDNEWGYSNRVLDLITHMVHTERQ

SEQ ID NO: 4766 - protein, 379 aa, Candida albicans SC5314
MSGLGKLPGLASDAVLKQSIPVPEDFQEVKGIDYSQDNAYNMRAKDLIKSMATMGFQASSLSQACDIIDNMRSWRGKHKDTLEEHEQTGEFDDEGYQKTTIFMGYTSNLISSGLRDTLRYLVQHKMVSAIVASAGGVEEDLIKVLAPTYMGDFTLPGKGLRDQGMNRIGNLLVPNDNYCKFEEWIVPILDKCLEEQEEAMKKLGPKGLIAGSEAIWTPSKLIDRLGKEINDESSVLYWAHKNKIPIFCPALTDGSIGDMLFFHTFKASPQQLRLDIVADIRKINSMSMAASKAGMIILGGGLIKHHICNACLMRNGADYAVYINTGQEFDGSDAGARPDEAISWGKIKAEAKSVKVYADVSLVFPLIVAATFASEKPQN

SEQ ID NO: 4767 - protein, 66 aa, Arabidopsis thaliana
  misc_feature (27)..(27): Xaa can be any naturally occurring amino acid
MAFSMFFYTDVVTSPAQATMDAPFTGXKSSAYLPDTRKANNDITSITSNGCRGSCMKVWPPIGKKK

SEQ ID NO: 4768 - protein, 365 aa, Methanococcus maripaludis S2
MRLVKEALSKNNEELYNTQMAKDDFGNAKILVVGCGGAGNNTIHRLSEIGIEGAETIAINTDKQHLEHINADKKILIGSTLTRGLGAGGYPEIGKKSAELAKNVLEDVIKSADLIFVAAGMGGGTGTGSAPVVAEIAKENGAVVIGVVTYPFKIERARLKKADEGLRRLTECCDTVIVIDNNRLVDFVPNLPMNEAFRVADEIIAQAVKGITETISLKSLINIDYADVKAVMTNGGVAMIGVGEVDYDTKGDRVEKVVKDTLQCPLLDIDYKGATGALIHITGGPDLTLGEANRIGDGITSSMDINANVIWGARLDPSMDGAIRVMAIITGVKSPNIMGGGKSHQKIIPNSANRSKGSLGIDYIV

SEQ ID NO: 4769 - protein, 161 aa, Pseudomonas fluorescens Pf-5
MTDSLLTIPCTTIKGEQKTLADFAGKAVLVVNTASKCGFTPQYKGLEELWQTYKDQGLVVLGFPCNQFGKQEPGNEGAISEFCELNYGVSFPLFKKVEVNGAGAHPLFAQLKKRAPGVLGSQGIKWNFTKFLIGQDGKLVKRFAPATKPQDLSREIEALLK

SEQ ID NO: 4770 - protein, 474 aa, Pyrococcus abyssi GE5
MPKLIKERVPTPERSVEERIRDFNEVNLGYTWELALREAERCLQCPKEYAPCIKGCPVNIDIPGFIRALRENRDDPDKAVREALKIIWDSNSLPAITGRVCPQEDQCEGVCVVGKVGDPVNIGKLERFVADYARQHGIEDELLEEQIRGIKRNGKRVAVIGAGPAGLTCAAELAKMGYEVTIFEALHEPGGVLAYGIPEFRLPKEIVKKEVEKLKRLGVKIETNVLVGKTVTFEELREEFDAIFIGTGAGTPRIYPWPGVNLNGIYSANEFLTRINLMKAYKFPEYDTPIKIGKRVAVIGAGNTAMDAARSALRLGAEVWILYRRTRKEMTAREEEIKHAEEEGVKFMFLVSPKRFIGDENGNLKAIELEKMKLGEPDETGRRRPIPTGETFVMEFDTAIIAIGQTPNKTFLQTVPELKVDEKGRIIVDENLMTSIPGVFAGGDAIRGEATVILAMGDGRKAAKAIHKYLSSSS

SEQ ID NO: 4771 - protein, 163 aa, Methanococcus maripaludis S2
MIIGIISDTHIPERAKKLPKEIFEHFSDVDLIIHCGDVTSESVLNDLEKISELLVVSGNMDYMNYPKEYEITIENFKIGIIHGNQIHPRGDTLKMKYLCLEKNWDILISGHTHIPMIKEISLENKKILLLNPGSPTVPRYPLKTIMKLKIEEREIDAELISIK

SEQ ID NO: 4772 - protein, 110 aa, Brassica napus
  misc_feature (48)..(48): Xaa can be any naturally occurring amino acid
AAKTLVTKGYDPEVIDTRSLNPFDLYTIGNSVKKTHRVLIAAARDLEXMRTGGIGASLTAAINENFHDYLDAPVMCLSSQDVPTPYAGTLEEWTVVQPAQIVTAVEQLCQ

SEQ ID NO: 4773 - protein, 452 aa, Yarrowia lipolytica CLIB122
MVAKSASKGTPKGTPVKSKVATPKSAAKGTPKGTPKGTPKGTPKGTPKSTKSAKAAVDTPTKGDTPSKATPTKRRSSVSTAETSSCPLASSDNTINAAQALLKFTQKQAEEDANNLLADDNEEQFIYLVITSKRFVSSEKAQVPTLVQVPHGLWTKSAEQPSICLLSQNPQNSYKRALKGATTPALSRVVGTQKLRGKFKPYEARRQLFAAHDIFVVDEDITEEMPFCLGKTFYKNGAVKLPLPITVLHKKEEKQTLIKSKAERVVETEDIDVEATQQGLSNIMTSTWYLKSQSNHTNVRVATTLFTPKEIAANVYAVVDQFTADLPNGFDGVRSVYLKTGSSPALPIYLADNLYTQDDVFNENDEEEEEEIGQQSDGRFVMPKGLKIGAGEEDEEKVVVEGHKLSALDAALAEVVDVEDILEHNRRADKALQERKRKRSDQDGGAKKAKTE

SEQ ID NO: 4774 - protein, 144 aa, Photobacterium sp. SKA34
MTTITTRCPHCKSLNRMPSDRINDEATCGSCKNKLFDGMPIEGTEDNFSTLLKSDKPVVVDFWAPWCNPCVGFAPVFTDVSKERDGQIRCVKIDTEAQQALAAQYRIRSIPTIMVFKEGKMVDMLNGAMPKSHFDQWLNEVLTK

SEQ ID NO: 4775 - protein, 509 aa, Zea mays
TQDRQANEARVLTTTIPCCNDAIANPDEGRMVGHYWLRDPALAPNSFLRNKIETALDRILAFSQDVVSGKILSPSGRFTSILSIGIGGSALGPQFVAEALAPDNPPLKIRFIDNTDPAGIDHQIAQLGPELATTLVIVISKSGGTPETRNGLLEVQKAFRDAGLQFSKQGVAITQENSLLDNTARIEGWLARFPMFDWVGGRTSEMSAVGLLPAALQGIDIKEMLVGAALMDEETRNTVVKANPAALLALCWYWASEGIGKKDMVVLPYKDSLLLLSRYLQQLVMESLGKEFDLDGNRVNQGLTVYGNKGSTDQHAYIQQLREGVQNFFVTFIEVLRDRPAGHDWELEPGVTCGDYLFGMLQGTRSALYANDRESISVTVQEVTPRAVGALIALYERAVGIYASLVNINAYHQPGVEAGKKAAGEVLALQKRVLTVLKEAICENPTEPLTLDEIADRCHCPEDIEMIYKIIQHMAANDRALIAEGSCGSPRSVKVYLGECSVDEDMQAA

SEQ ID NO: 4776 - protein, 1166 aa, Ustilago maydis
MPPLPYRRSSSLLPVTHSGTSTVARATTSLATRTPIHLTLEDLKRRTIKFISEEDNTTRIVNVSDCRDAYDVMARVLKKFGKPPSGNSYTPTADQGPTGDELGATETWGIFATSADGQNTKALSDNELLAICHAPQPHDPLRERGLTLRRIPNHLPGEDARKVPVRSGRNKLEAFFGERMPVAQMQPAGPGSGVNADEEDAGSVTISGKKMKRASTVSIMSGLGVGPFSSSSHNTGAGHTHGSTRAEGKLLSKKESKHMSPPPVTSKPSKIRNFFGQRPPSELINTNLADFFPSTDSKALQRTARRSIYGRASASTRSKRNSTWSFVADPDAPPLPNKGSMDGHPTPLERSSISIRERGTTPVIQIGYDSRSEDDHQSNARRTSSGTHSHLHSSLTGPPTLPPVVSRDSLDEWSRDLKAVGSPVTEENAMFQSSRHGHASGSQQHHAAMKHYPSHASGYADRPSISRRASGESARSRRSLASQVRHGLSAARERNADTASLLTVDEITQEVENRRESISLAGAGGGWVVDEDGVPIPIPGSSSPFSSSAAASTRPSSGISSSYVHNGHLEHDDSEGHSDEEANQSSDLEEATRTRKARGVPSKAASIRTVASKRASSVLQAPGDESDRHLGDPMAVARSTTSRASSVSELRRSVHDHGDPSDGESGSDFTDSDLDSDGSETDEDEQANDVYLPSAKPAPIKWHKGALIGAGSFGNVFLGMNAKTGLLMAVKQVELPSGDSHLDQRKKGMLEALEREIKLLKSLEHENIVQYLDSFADDSHLNIFLEYVPGGSIVALLRNYGAFEEPLVRNFVRQILNGLSFLHNRGIMHRDIKGANILVDNKGGIKISDFGISKKVESDLVLATNKSGAGGGGAGGAAHRPSLQGSVFWMAPEVVKQTSYTIKADIWSLGCLVVEMISGTHPWAELNQMQALFQIGMGRKPSLPDEISNECRDFLEKTFELDYNNRPSADELLNHAFMGTEMTFPPSSGADGSGGGDDDAGGSGDAGDGDASTMGMTNDAETGTTRETRETKDGKRPTRSKSTRRLEREKRHKEAAAAAAAATALDTGTPNTPTSHTAAAAAAAAAAAASASASASASPAVASTSPAPGDAETGSPTNGKSAVPPAGSTGGTPESILTVSIATARGNSTSTALSAADAAFSEEADS

SEQ ID NO: 4777 - protein, 132 aa, Brassica napus
DTIMSVGHSRVPVYFRNPSHIIGLILVKNLLAVNARKEVPLRKMIMRKIPRVSETMPLYDILNEFQKGHSHIAVVYKDLDEHKGSPETSENDIERRKNKKTKDELFKDSCKKPKAQVEVSEKEVFKIETGDA

SEQ ID NO: 4778 - protein, 343 aa, Oryza sativa (japonica cultivar-group)
MFNCAAREKAMVINLEFIRAIVTADEILLLDPLTIDVIPFVEQLTHHLPLKNLVCGNGQPGGDDHGEKHDDSHGDQVPRLNEATGAEHELPFEFQVLELALETVCSSFDVNVSGLERRATPVLEELTKNVSTRNLDRVRTLKSDLTRLLAHVQKVRDEIEHLLDDNEDMAHLYLTRKQLQNQQVEALISSAASNSIVPGGTSLSRLNNSFRRSVSIATSMHLDNDVEDLEMLLEAYFMQLDGIRNRILSVREYIDDTEDYVNIQLDNQRNELIQLQLTLTIASFGIAVNTFIAGAFAMNIQSKLYSIDDGSFFWPFVGGTSSGCFMICIVLLWYARWKKLLGP

SEQ ID NO: 4779 - protein, 205 aa, Magnaporthe grisea 70-15
MSSRKKVLLKVIILGDSGVGKTSLMNQYVNKKFSASYKATIGADFLTREVLVDDRQVTMQLWDTAGQERFQSLGVAFYRGADCCVLVFDVNNSKSFDALDSWRDEFLIQASPRDPDNFPFVVLGNKIDVEESKRVISTKRAMTFCQSKGGIPYFETSAKEAINVEQAFEVIARNALAQEESEEFSGDFQDPINIHIDNDRDGCAC

SEQ ID NO: 4780 - protein, 148 aa, Arachis hypogaea
MASKRITKELKDLQKDPPVSCSAGPVGDDMFHWQATIMGPADSPYAGGVFLVNIHFPPDYPFKPPKVSFKTKVFHPNIYNNGSICLDILKEQWSPALTVSKVLLSICSLLTDPNPDDPLMPEIAHMYKSDRAKYENTARSWTQKYAMN

SEQ ID NO: 4781 - protein, 422 aa, Streptomyces sp. PGA64
MSRRVVITGVGVLAPGGIGAKNFWSLLSEGRTATRGITFFDPSSFRSRVAAEADFDPEMHGLTPQEIRRMDRAAQFAVVTAREALADSGLDLAGFDPHRTGVTIGSAVGATTGLDDEYRVVSDGGRLDLVDHTYAPPHLYNYFVPSSFSAEVAWAVGAEGPATVVSTGCTSGLDSVGHATELIREGTADVMITGATDAPISPITMACFDAIKATTPRNDDAAHASRPFDGTRNGFVLGEGSAVFVLEELESAKKRGAHIYAEIAGYASRCNAFHMTGLRPDGREMSEAIDVALGEARMNPDRIDYINAHGSGTKQNDRHETAAFKLSLGDHAYRTPVSSIKSMVGHSLGAIGSIEIAASVLAMKNHVVPPTANLHTPDPECDLDYVPLTAREQRTDTVLTVGSGFGGFQSAMVLARPERNAA

SEQ ID NO: 4782 - protein, 230 aa, Edwardsiella ictaluri
MLINSGDTAFIILCTAMVCLMTPGLALFYGGLVSERNIISVMLQNFICMGVVAVIWIFGGFSLVFGQDVGGVIGNFFDYFGMLHIGVSVNKAWAPNIPFILFFAYQMMFAIITPALISGAIVGRVKFSAYVKFVFLWVIFVYIPVAHWVWGGGFLEQIGVVDFAGGIVVHVTAGFSALAAALFIGKRVDSVIKSEKPVSLPIVACGAGLLWFGWFGFRAANKTVQQSASR

SEQ ID NO: 4783 - protein, 381 aa, Medicago truncatula
MAEANINIKSRNAKCCYSAFHNVTAMVGAAVLGFPYAMSQLGWGLGITILVLSWICTLYTAWQMIEMHESVSGKRFDKYHELSQHAFGERLGLWIVVPQQLMVEVGIDIVYMVIGAKSLKKLHEILCDDCEPIKTTYFIVLFAFVQYVLSHLPSFNSVAGISLVAAAMSLSYSTIAWIASIHRGALPDVQYSSRYSTKAGNIFGIFNALGDIAFGYAGHNVILEIQSTIPSTPEKPSKVSMWRGMIIAYLVVALCYFPVTIFGYRAFGNSVDDNILLSLEKPRWLIIAANIFVVVHVVGSYQVYAVPVFHMLESFLAEKMNFKPSRFLRFAIRNLYVSITMVLAITFPFFGGLLSFFGGFVFAPTTYFVRKVKYLACLDQW

SEQ ID NO: 4784 - protein, 452 aa, Escherichia coli K12
MSHNVTPNTSRVELRKTLTLVPVVMMGLAYMQPMTLFDTFGIVSGLTDGHVPTAYAFALIAILFTALSYGKLVRRYPSAGSAYTYAQKSISPTVGFMVGWSSLLDYLFAPMINILLAKIYFEALVPSIPSWMFVVALVAFMTAFNLRSLKSVANFNTVIVVLQVVLIAVILGMVVYGVFEGEGAGTLASTRPFWSGDAHVIPMITGATILCFSFTGFDGISNLSEETKDAERVIPRAIFLTALIGGMIFIFATYFLQLYFPDISRFKDPDASQPEIMLYVAGKAFQVGALIFSTITVLASGMAAHAGVARLMYVMGRDGVFPKSFFGYVHPKWRTPAMNIILVGAIALLAINFDLVMATALINFGALVAFTFVNLSVISQFWIREKRNKTLKDHFQYLFLPMCGALTVGALWVNLEESSMVLGLIWAAIGLIYLACVTKSFRNPVPQYEDVA

SEQ ID NO: 4785 - protein, 397 aa, Leuconostoc mesenteroides subsp. mesenteroides ATCC 8293
MTSTTEKVKTAVKELKKGKLIILSDDKKREHEGDLVGLASFVTAATVNEALSIARGVLAVPITKSRADELGLDQMTTHNSEKFGTKFTVSVDHIDSTTGVSAYERAATIKNLANLSTTSVDFETPGHIFPLVAEDGGVLTRQGHTEGAVELAKIAGVPPVAYIIEILAQDGKMAREKELKELAKKHDIFQLSMQDLINYREDQKQAGIDEGPTVYLPTQYGDFHLTEFSVNDEEKSDLLIQSSRSFDQIPLVRLHSECLTGEIFGSQRCECGPQLREALKTINKQGGALVYLRQEGRGIGLHEKLKSYVLQENKFDTYDANVHLGHLPDERDYKKAAKILKISGLTKIRLLTNNPDKVQSLIDEGIEVIEQVPLITGINDKNEQYMQTKKEKFNHKL

SEQ ID NO: 4786 - protein, 291 aa, Nocardia farcinica IFM 10152
MSRWDTANIPDQSGRTFIVTGANSGLGAVAARALARAGADVVLACRNLTKAEKVAAEIGARATVRELDLADLASVRAFAAGTERVDVLINNAGVMAVPHRTTADGFEMQIGTNHLGHFALTGLLLDKITDRVVTVSSGAHAVGRIDLADLNWERRRYQRWLAYGQSKLANLLFAYELQRRLGAAGSPILSVAAHPGYAATELQSHTETFLDSVMNVGNRILAQTAEMGALPELFAATMPVEPGAFYGPTGLGGMRGYPGRCGSTKASRDERVAGELWALSERLTGVTYSFD

SEQ ID NO: 4787 - protein, 353 aa, Saccharomyces cerevisiae
MPKRIVYNISSDFQLKSLLGEGAYGVVCSATHKPTGEIVAIKKIEPFDKPLFALRTLREIKILKHFKHENIITIFNIQRPDSFENFNEVYIIQELMQTDLHRVISTQMLSDDHIQYFIYQTLRAVKVLHGSNVIHRDLKPSNLLINSNCDLKVCDFGLARIIDESAADNSEPTGQQSGMVEFVATRWYRAPEVMLTSAKYSRAMDVWSCGCILAELFLRRPIFPGRDYRHQLLLIFGIIGTPHSDNDLRCIESPRAREYIKSLPMYPAAPLEKMFPRVNPKGIDLLQRMLVFDPAKRITAKEALEHPYLQTYHDPNDEPEGEPIPPSFFEFDHYKEALTTKDLKKLIWNEIFS

SEQ ID NO: 4788 - protein, 448 aa, Xylella fastidiosa Temecula1
MPRHLRKRRVFELLIVIALIFLNGFFAMSEMSLMTSRKSRLKQMAHSSKHAAKALTLAQNPESFLSTVQIGITLIGILTGLFGGDAIGTAIGQWLTALTPQLGEYTSIIGKTLSVALITFLTLIFGELVPKRLALTHSEKIASTIAVPMSVLARIAAPGVWVLAKSTQLVLRVFGFGKIPSSAVTEEEIRLLVAESHEAGVIDDYERNMMNRVMRLGDRTADSLMTPRNRIAWLDNSADLEHNLEIMREHQFSRYPVYRSSDQDIVGILEVKSVITRIDSQTQTTLSLFQELCEPVFVSESTHALKLLEIFREEQQSMALVVDEYGEILGLVTISDLMGAVIGRLQNVENTDEDALMVTREDGSFLIDGTLPIEELREVLGAELPDGEENNYHTLAGMCISYFGRIPHVGEYFDWAGWRIEIVDLDGARIDKLLLQRLNKEKNHVPHK

SEQ ID NO: 4789 - protein, 384 aa, Bacillus thuringiensis serovar konkukian str. 97-27
MLEFDTTQDQLANIKVIGVGGGGNNAVNRMIEHGVQGVDFIAVNTDAQALNLSKAETKMQIGGKLTRGLGAGANPEVGKKAAEESKEQIQEALRGADMVFVTAGMGGGTGTGAAPVVAQVAKELGALTVGVVTRPFTFEGRKRATQAASGIAAFKENVDTLIVIPNDRLLEIVDKNTPMLEAFREADNVLRQGVQGISDLIATPGLINLDFADVKTIMSNRGSALMGIGSGNGENRAAEAAKKAISSPLLETSIDGAQGVIMNITGGANLSLYEVQEAADIVASASDPEVNMIFGSVINEGLKDDIVVTVIATGFDDSIATQPPKPIIRPNVNHTQQQQQPVAQPPKQREVKREMKREEPVVHERHSDSDDIDIPAFLRNRRRR

SEQ ID NO: 4790 - protein, 265 aa, Zea mays
MAQTMLLTSGVTAGHFLRNKSPLAQPKVHHLFLSGNSPVALPSRRQSFVPLALFKPKTKAAPKKVEKPKSKVEDGIFGTSGGIGFTKANELFVGRVAMIGFAASLLGEALTGKGILAQLNLETGIPIYEAEPLLLFFILFTLLGAIGALGDRGKFVDDPPTGLEKAVIPPGKNVRSALGLKEQGPLFGFTKANELFVGRLAQLGIAFSLIGEIITGKGALAQLNIETGIPIQDIEPLVLLNVAFFFFAAINPGNGKFITDDGEES

SEQ ID NO: 4791 - protein, 169 aa, Picea mariana
ELHRQFLALGVGVIEDVRVQRDKGFGFVRYRSHEEAALAIQLANGRVICGKSIKCSWGSKPTPPGASSNALPPPSAPFQGVVAPQGLNQGYTAADILAYRQLNMSQAGAGQPLLPLSAQQGMGLGLGHGPMGVVGPNQNVYDNFQAGAGLPAAAAAAAAAMRQQIMYYQ

SEQ ID NO: 4792 - protein, 260 aa, Geobacter sulfurreducens PCA
MNGYHLLLEISEGIAAITINRPSAMNAMTPATLDELAEAVRRVNGAPEVRAAILTGAGTKAFMAGADIAAMRDMTPAQARDLARQAHQIYADIERSPKTFIAAVNGYALGGGCELAMACDIRLASENAKFGQPEINIGIIPGFGGTQRLPRLVGKGRALEMILTGEMIDAREAHRIGLVNRVVTQEELPEEARRLARAIAAKGMVAVGLCKEAVNNGLNMELTKACAYEAELFAHSFSTADQKEGMSAFLEKRPAVFRDC

SEQ ID NO: 4793 - protein, 269 aa, Picea mariana
SGVPPFWAETQQGIFDAVLRGYIDFDSEPWPSISESAKDLIRKMLTSNPAERLTAHGVLCHPWICKDGVAPDQALDPAVLSRLKQFSAMNKLKKMALMVIAESLSEEEIAGLREMFEAMDTDNSGSITFDELTAGLKRYGSNMKESEIRALMDAADVDNSGTIDYAEFIAATFHLNKLEREEHLFAAFSYFDKDASGYITVDELQQACLEHNLTDVRIDEIIREVDQNNDGRIDYNEFVAMMRKGNGAIGRRTMRNSLNFSRKDNLPIG

SEQ ID NO: 4794 - protein, 461 aa, Mycobacterium sp. KMS
MSRTHSRVQHVSPAYTGRLAMAPVPSLRLPDEAMEPQAAYRFIHDELMLDGSSRLNLATFVTTWMDPEAEKLMAETFDKNMIDKDEYPATAAIEQRCVCMVADLFHAEDLRDDDPNSAIGVSTIGSSEAVMLAGLAMKWRWRQRLGGDAWKGRTPNLVMGSNVQVVWEKFCRYFDVEPRYLPMEDGRYVITPEQVLEHVDEDTIGVVAILGTTYTGELEPIGEICAALDKLAADGGVDVPVHVDAASGGFVVPFLHPDLVWDFRLPRVVSINVSGHKYGLTYPGIGFVVWRNAEQLPEELVFRVNYLGGDMPTFTLNFSRPGNQVVGQYYNFLRLGRGGYAQVMQSLSQTARWLGDELRDSEHFELITDGSAIPVVSFRLKGDPGYTEFDISQTLRSYGWQVPAYTMPEGAEDVTVLRVVVREGFSADLARALRDDMVTVLKHLDELKPGGHFDEVQPFAH

SEQ ID NO: 4795 - protein, 430 aa, Oryza sativa
MAPAHSHRRGATEANEQMRRKKEKALREKEAGDDDFDEGRYKRAVEHYARAAALDPGDISFPIKCAKSYFHMDQYEECVRRCDEAVERGRELRAKKSLVALALLLKGTALLNLADCASDCKAAIRALKQSLDEHYHKGTEAILDEAESAMEEMEELEKEAAKHHREKGKELLSKKKYKEAAIQFTKAIKRNPLNPRNFSDRAKCRIELNALAEGLEDADKCIEVDPTFWKGYFCKGEVQFLMHNYEDAMTTYLDGLKYGPQKTTIYDGIKRCLEQIKMAKDRDVRDKDLWEAFKKSSSSQVEKLTMQRDVVTVELKSAKERNANLELQLSEQIGRIERLLSIQNSEPPHFICPISQEVMNDPHFAADGHTYEAEHIRKWLNDGHDTSPMTNERLQHKKLTPNHALRSAIREWHQHRNMRHTSPRRQQLFL

SEQ ID NO: 4796 - protein, 356 aa, Neisseria gonorrhoeae FA 1090
MTKHIAILRGDGIGPEIVAETVRVLDKFIAQGLDADYEYAPLGGEAYDEYGHPYPEFTQNLCRKADAVLLGAVGSPQYDNLDRPLRPERGLLAIRKDLNLFANLRPAVLYPELANASTLKPEIVAGLDILIVRELTGDIYFGEPRGIRVLENGEHEGYNTMKYSESEIRRIAHVAFQSAQKRSKKVCSVGKANVLETTELWREIFEEIGKQYPDVELSHMYVDNAAMQLVRAPKQFDVIATGNIFGDILSDEASMLTGSIGMLPSASLDENGKGLYEPSHGSAPDIAGQNKANPLATILSLAMLLRYSLNDEARAQQVENSVQKVLQQGLRTGDIYEEGTKLVSCSEMGDAVLAAL

SEQ ID NO: 4797 - protein, 292 aa, Helicobacter pylori 26695
MGMPNRGVVLLDGQALADNIEKDLKHKIQIITAQTHKRPKLAVILVGKDPASITYVNMKIKACERVGMDFDLKTLQENITEAKLLSLIKDYNTDQNISGVLVQLPLPRHIDTKMILEAIDPNKDVDGFHPLNIGKLCTQKESFLPATPMGVMRLLEHYHIEIKGKDVAIIGASNIIGKPLSMLMLNAGASVSVCHILTKDISFYTQNADIVCVGVGKPDLIKASMLKKGAVVVDIGINHLNDGRIVGDVDFNNVQKVAGFITPVPKGVGPMTIVSLLENTLIAFEKQQRKGF

SEQ ID NO: 4798 - protein, 162 aa, Paracoccus sp. N81106
MTNFLIVVATVLVMELTAYSVHRWIMHGPLGWGWHKSHHEEHDHALEKNDLYGLVFAVIATVLFTVGWIWAPVLWWIALGMTVYGLIYFVLHDGLVHQRWPFRYIPRKGYARRLYQAHRLHHAVEGRDHCVSFGFIYAPPVDKLKQDLKMSGVLRAEAQERT

SEQ ID NO: 4799 - protein, 384 aa, Buchnera aphidicola
MFEPVELSNNAVIKVVGVGGGGGNAVEHMVRERIEGVEFFAINTDAQALRKVEVGQTIQIGNNITKGLGAGANPEIGVTSAEEDKELLKSALDGSDMVFIAAGMGGGTGTGAAPVVAEIAKELGILTVAVVTKPFNFEGKKRMMVADQGVLELSKHVDSLITIPNDKLLKVLSRGISLLDAFGAANNVLKGAVQGIAELITRPGLMNVDFADVRTVMVEMGYAMMGTGISSGENRAEEAAEIAISSPLLEDIDLSGARGVLVNITAGFDLKLDEFETVGNTIRSFASDNATVVIGTSLDPDMNDTLRVTVVATGIGMEKYSDVNQTKNKSSKEILMDYRYQYLNISPTAIDKKNVKNEIKETDNKKRKEPEYLDIPAFLSKRSD

SEQ ID NO: 4800 - protein, 285 aa, Bacillus cereus G9241
MRGKHIFIITALISLLMLAACGQKNSSATVATATDSTITKSDFEKQLKDRYGKDMLYEMMAQDVITKKYKVSDADVDKEVQKAKNQYGDQFTAVLENNRLKDEADFKNQIKFKLAMNEAIKKSVTEKDVKDHYKPEIKASHILVSDENEAKEIKKKLDAGASFEELAKQESQDLLSKEKGGDLGYFNSGKMTPEFETAAYKLKVGQISDPVQSPNGYHIIKLTGKKDLQPFNEVKDSIRKNLEAERIADPTFSHKLLQKELKKANIKINDSELEDTFTLVHEQGN

SEQ ID NO: 4801 - protein, 239 aa, Xanthobacter autotrophicus Py2
MPAGGTSPGPPAASVSLARPSTCASPRWSAEPDLAMARAPRQGIGGCASLRTDENSSRQDPMSQALFDIPLKRIDGTAATLGDFRGKVLLVVNVASKCGLTPQYAALEKLYEARHGDGLEILGFPANDFGAQEPGTESEIASFCSLTYGVTFPMFEKISVVGATRHPLYDALVAARPETTDEEGRRPSGRSASPSDVSWNFEKFVVGRDGRVIARFSPRVTPDDPRLTKALDAALEAKA

SEQ ID NO: 4802 - protein, 283 aa, Leptosphaeria biglobosa 'canadensis' group
HTFYNELRVAPEEHPVLLTEAPINPKSNREKMTQIVFETFNAPAFYVSIQAVLSLYASGRTTGIVLDSGDGVTHVVPIYEGFALPHAISRVDMAGRDLTDYLMKILAERGYTFSTTAEREIVRDIKEKLCYVALDFEQEIQTASQSSSLEKSYELPDGQVITIGNERFRAPEALFQPSVLGLESGGIHVTTFNSIMKCDVDVRKDLYGNIVMSGGTTMYPGISDRMQKEITALTPSSMKVKIIAPPERKYSVWIGGSILASLSTFQQMWISKQEYDESGPSIV

SEQ ID NO: 4803 - protein, 575 aa, Yarrowia lipolytica CLIB122
MPYLADPSTKYKPFPPINLPNRQWPSKTLQKPPRWLSTDLRDGNQSLPDPMTMAEKKEYFQKIVDIGYKEIEVAFPSASQVDFDFTRFACDTAPEDVWIQVLAPCREDLITRTVESVKGANKAIIHIYLATSKCFRDIVFNHSREEALAKAVACAKHVRALTKDSDDPECKKTTWGFEFSPETFSDTDVDYAIEVCEAVKAAWGPSEENPIIFNLPATVEMATPNIYADQIEYFATNISEREKICISLHPHNDRGCAVAAAELGQMAGADRVEGCLFGNGERTGNVDLVTLGLNLYTQGVHPKIDFSDITSIIDIVERCNKIPVHPRAPYGGQLVVCAFSGSHQDAIKKGFARIEDVKDEVAEGKRQWQIPYLPLDPKDIGRTYEAVIRVNSQSGKGGAAWIILRSLELDLPRGLQVAFSKVVQKEAEVVGQELSAQQLVDLFEREYGVFEEQQGKYQLDDFEVTNKSKEERELTGALTVEGKRVELKGTGNGPISSFLDAIKNAFGYNLEVLNYHEHSIGKGSKTKAATYIELAYEEDGKTSKRWGVGIDEDVSQASIHAILSAMNAISESYKK

SEQ ID NO: 4804 - protein, 230 aa, Oryza sativa (japonica cultivar-group)
MWFFNFNRNGPSGFSGASTAEEVTAGVDARGLAAVVTGASSGIGLETTRVLALRGVRVVMAVRNVAAGHKAREAIRAEIHGAIVHVLEMDLSSMDSVRRFASEFDSLNLPLNILINNAGILSKDCIRSIDGLELHFATNHIGHFLLTNLLLENMKSTSRTTGVEGRIINVSSSGHILTYPEGICFDSVKDLSRFSTYIAYGQSKLANILHSTELARILKVVFLFAKHAYE

SEQ ID NO: 4805 - protein, 283 aa, Leptosphaeria biglobosa 'canadensis' group
HTFYNELRVAPEEHPVLLTEAPINPKSNREKMTQIVFETFNAPAFYVSIQAVLSLYASGRTTGIVLDSGDGVTHVVPIYEGFALPHAISRVDMAGRDLTDYLMKILAERGYTFSTTAERGIVRDIKEKLCYVALDFEQEIQTASQSSSLEKSYELPDGQVITIGNERFRAPEALFQPSVLGLESGGIHVTTFNSIMKCDVDVRKDLYGNIVMSGGTTMYPGISDRMQKEITALAPSSMKVKIIAPPERKYSVWIGGSILASLSTFQQMWISKQEYDESGPSIV

SEQ ID NO: 4806 - protein, 168 aa, Triticum monococcum
MAAASSATSVHDFTVKDSSGKDVDLSVYKGKVLLIVNVASQCGLTNSNYTELSQLYPKYKDQGFEILAFPCNQFGGQEPGTNDEIVQFACTRFKAEYPIFDKVDVNGNNVSPLYKFLKSSKGGLFGDSIKWNFSKFLVDKEGHVVDRYAPTTSPLSIEKDIKKLLGSS

SEQ ID NO: 4807 - protein, 528 aa, Xanthomonas campestris pv. campestris str. ATCC 33913
MTTHGASAQGKFHKRLSLTDLTFIGLGSIFGSGWLFSASHVSSIAGPAGIVSWILGGIAVLLLGLVYCELGAALPRAGGVVRYPEYSHGPLLGSLTGFITLIAFSSLIAIEVEAARQYAAAWFPALSQAGSTHPSLLGWLVQLALLLLFFALNYFSVKTFALANNIVSVFKFLVPILVIVLLMKHFNADNLSVHGFAPSGMAGVEAAISAGGIIFAYLGLTPIVSVASEVRNPQRNIPIALILSVALSTVIYVLLQLAFLGSIPAAQLAQGWSGIDKAFSLPYHDIALALGMAWLAALVICDAMVSPSGTGNIYMNATPRVVYGWARSGGFLPVLTRVDPASGIPRPALWLSLGLSIFWTLPFPSWETLIGVVSAALVLSYAVAPVTVAALRRSAPGLARPFRVRGFAVLGPLSFVVAALIVYWSTWPTLSWLLGLQVLAFAAYVLYRLPSRACRARLLRQVRASLWLIVFFVLVMAVSWAGTFGGHGWIAHPFDTLSVAVIAFGIYHWGARSGLRSDELALEEDDGE

SEQ ID NO: 4808 - protein, 475 aa, Thermoanaerobacter tengcongensis MB4
MANSTSSYLWRKKTLEMVLSETEAEQFKLKKTLTAIDLIALGIGAIIGTGIFVITGVAAAEKAGPAIVLSFILAGLACAFAAISYAELASMFPIAGSTYNYAYIAMGEFLAWIIGWDLILEYVFALPAISLGWSGYFTNLLGSIGINIPAWAANSAWQAPGTGGLINLPAIGILLAIAILNYIGVRETATVNNIGVAFKVFVVLFFIFTAVWYVKPANWSPFLPYGWAGVFHGAAIIFFAYIGFDAVSTAAEETKNPAKDMPIGILGSLGISTLLYIAVSAILTGVVSYTELNDPAPVAKALNLIGLNWARGLVSLGAIVGITTVLLVMFYGSTRIIFAMSRDGLLPPIFSKVHPKYRTPTLAIYLITIATTLVAGFFPIGVIAELVNIGTMLAFVLTSIATIVLRYTQPDLPRKFRAPGMPWTGILAIAFVLSLMVSLPWETWVRLIVWFVIGLFIYFGYGRHNSILAKQQTQH

SEQ ID NO: 4809 - protein, 283 aa, Leptosphaeria biglobosa 'erysimi' group
HTFYNELRVAPEEHPVLLTEAPINPKSNREKMTQIVFETFNAPAFYVSIQAVLSLYASGRTTGIVLDSGDGVTHVVPIYEGFALPHAISRVDMAGRDLTDYLMKILAERGYTFSTTAEREIVRDIKEKLCYVALDFEQEIQTASQSSSLEKSYELPDGQVITIGNERFRAPEALFQPSVLGLESGGIHVTTFNSIMKCDVDVRKDLYGNIVMSGGTTMYPGISDRMQKEITALAPSSMKVKIIAPPERKYSVWIGGSILASLSTFQRMWISKQEYDESGPSIV

SEQ ID NO: 4810 - protein, 616 aa, Rhodospirillum rubrum ATCC 11170
MCGLVAILERRGPADEAAVSKALARLARRGPDGEGRAAFWDGRLLLGHRRLAIFGKGADGAQPMVDPETGSVLVFNGALYNYVELRQALQALGQRFAGESDTEVALLAWRQWGEAAFARFNGMWAMVLLDAPGDRLVVSRDRLGVKPLYLCDTGGRVTFASTIAATLAASGIAPRVDDDAVFDFLVGGLTDHRGGSFFAGIVEVPAGALWSVDRSGGIDRRRFHDWRKEGSGEAAPPSAEALRATLSDAVRLRLRADVPAVALLSGGLDSSIVTRLATAPDMPRGALAGLLTYGYRDATEADETREAGRFAATLDSALPHDILRVAPLPAAPDLDALLAAQEQPFNTPSLVAAFRLYRLIAARGVKVAITGEGADELFAGYTNRYGALLAREHLRLGRLRPLGALLGSAHCPPRLVANRLAWDLPLAIVRPLMAGRVHGRVIARSFWQDSAERFEALAAYHHQPLASRLRDDALRALLPYSLRFADRSGMASGVEVRSPFLDYRVVEAALALPVAAKIDDRGGKRILRQAFRHDLPAEIIGAGKTHGLGMAEQFQVGHLDWAALAEAPPTLAARYLDLGRLKTALAAHPSDPRLWWPLCLLRWLAWVEGGMADAPR

SEQ ID NO: 4811 - protein, 301 aa, delta proteobacterium MLMS-1
MTDTPEQPPSPPPAPRAEEPFLRRLLNLIGIDRSPDSAEEIEQEIQEILDEGEEHGLISPEEGEMISGIMELKDTLAYEIMTPRAEMVLVEAATTLPAMVALIIERGYSRIPVYREDPDQIIGLVHAKDILPYCLQPEGEPPNAESLAKPVEFIPEKRGVLRLLKFFQENKIHLAVVNDEFGGVRGLVTLEDIVEEIVGDINDEHDRITRRWKVVDQRTVLADAKVDIEEVEEFFKIELPEGPYESVGGLILHHLDRVPPPGVTLSIDSLVFEVLAADKRRVITVKIQQKENVHQGQQPST

SEQ ID NO: 4812 - protein, 283 aa, Leptosphaeria biglobosa 'thlaspii' group
HTFYNELRVAPEEHPVLLTEAPINPKSNREKMTQIVFETFNAPAFYVSIQAVLSLYASGRTTGIVLDSGDGVTHVVPIYEGFALPHAISRVDMAGRDLTDYLMKILAERGYTFSTTAEREIVRDIKEKLCYVALDFEQEIQTASQSSSLEKSYELPDGQVITIGNERFRAPGALFQPSVLGLESGGIHVTTFNSIMKCDVDVRKDLYGNIVMSGGTTMYPGISDRMQKEITALAPSSMKVKIIAPPERKYSVWIGGSILASLSTFQQMWISKQEYDESGPSIV

SEQ ID NO: 4813 - protein, 295 aa, Oryza sativa
MAADGAVEAPSATSAWRAAGMRILRGILAVSGHLAGRRAPANNVHLALFSRALQILAQQEPVRLQKLSAPDSGIVEMRLERPEARNAIGREMLQGLRSAIEKVKADATANVVLLASSVPKVFCAGADLKALSIPTIAIVEGAAFGGGLELALSCDLRICGENATFSLPETGLAIIPGAGGTQRLPRIVGKSRAKELIFTGRRFDAVEAVTMGVVNYCVPAGEAYKRALELAQEINQKGPLAIRMAKKAINQGMEVDLSAGLAVEEECYEQVLHTQDRLEGLAAFAEKRKPVYTGK

SEQ ID NO: 4814 - protein, 249 aa, Oryza sativa
MSSSSSSFPTSRSPFPAGAGAGTSGGGGGGGGGSGGGGGGGRWSGVRPWGSSGGTSVSSSGKRIQKELMDLNASDCSAGPKGDNLYHWLSTIIGPQGSPYEGGIFFLDIVFPIDYPFKPPMGITKVMNIEKGFVHWKPNVLGHHLHPMSIYYLHSSLPTQPYMITCFMVTFKTRIYHCNVDSTGNLSMDILREGWSPALTISKVLLAIKAIITNPDPYCPLVPSIGHLYLTDRTKHDEIAAEWTMRFAR

SEQ ID NO: 4815 - protein, 186 aa, Medicago truncatula
MTNILLRTASRGGSLRATLIRRFSTDALVESKPGEIGLVSGIPQEHLRRRILCNGLSLTGNADIVRLDTFTRVPSRDFAVVCVLIYSPARTAGQQGSGNVGRWRINFLSTQKWENPLMGWTSTGDPYSHVGDSALDFDTEEAAKEFAERHGWEYVVKKHHTPLLKVKLYADNFKWKGPPKAAEAEQ

SEQ ID NO: 4816 - protein, 181 aa, Brassica napus
MASSMLSSATVVSSPAQAAMVAPFTGLKSSAAFPVTRKTNTDITSIASNGGRVNCMKVWPPVGKKKFETLSYLPDLTDVELAKEVDYLLRNKWIPCVEFELEHGFVYREHGNTPGYNDGRYWTMWKLPLFGCTDSAQVLKEVQECKTEYPNAFIRIIGFDNNRQVQCISFIAYKPPSFTGA

SEQ ID NO: 4817 - protein, 367 aa, Geobacillus stearothermophilus
MELFKYMETYDYEQVLFCQDKESGLKAIIAIHDTTLGPALGGTRMWMYNSEEEALEDALRLARGMTYKNAAAGLNLGGGKTVIIGDPRKDKNEAMFRAFGRFIQGLNGRYITAEDVGTTVADMDIIYQETDYVTGISPEFGSSGNPSPATAYGVYRGMKAAAKEAFGSDSLEGKVVAVQGVGNVAYHLCRHLHEEGAKLIVTDINKEAVARAVEEFGAKAVDPNDIYGVECDIFAPCALGGIINDQTIPQLKAKVIAGSANNQLKEPRHGDIIHEMGIVYAPDYVINAGGVINVADELYGYNRERAMKKIEQIYDNIEKVFAIAKRDNIPTYVAADRMAEERIETMRKARSQFLQNGHHILSRRRAR

SEQ ID NO: 4818 - protein, 113 aa, Geobacter sulfurreducens PCA
MKEIKAIIRPAKLLEVTEELHAIDGLPGVTVSEIKGFGKSRAKNAQDKIVYEMVELVPRIQLEVVVDDGMVEEVVAVIRKHAHTGTAGDGKIFVSTVDDIIKIRTNERGRDAI

SEQ ID NO: 4819 - protein, 394 aa, Triticum aestivum
  misc_feature (322)..(322): Xaa can be any naturally occurring amino acid
  misc_feature (355)..(355): Xaa can be any naturally occurring amino acid
VTLSNKFVQKSRLVPVRNSRDIVDPRVRVRSSDSSESESESEDEEKSKKAAQATKIAPAAAKRKEESSDSSDSDESDEEPPQKKQKDAAKVAPKSAKKDSSSDDDSSDESSDDEPKKEVTTATKSQKEEPKTPASNKGQATGSKTLWMGNLSFNIEYDQVKQFFAQIGEVVDVRLATHEDGHPKGFGHVEFATAEDAQKALDSLNGGDLMGRPVRLDMAAERGASAPRTRDGGSFGKPSGGPSLSVFVKGFDSSQQEDAIRSSLQEHFSICGEITRVSGPMDYENGCSKGIAYMDITDERSFSKALALSGSDLSGCNLYVGXASPRGSLGGVGGRFGGRDGGRSGGGRFGRAGGXRRPGAGLAGLVGRNGGGRVGRLGFPEKVAKRGGKRFRKK

SEQ ID NO: 4820 - protein, 112 aa, Lactobacillus reuteri
GGVKAEVVINPGTPVAMIEPVLHMVDQVLVMTVNPGFGGQKFLPETVDKIAQLNAIKEEKGYNFDIEVDGGVNDKTVVDCYKAGATVAVAGSYVFNAEDPAERIKALEDATK

SEQ ID NO: 4821 - protein, 311 aa, Sulfolobus tokodaii str. 7
MKREELLVEEIKDLTLEELKGYADFYKILDKVYGFTAESVVRGVKILKDMIKEADLRFLSFTANLVSTGLRGLFADLIKQGYFNVIITTGGTIDHDIARSFGGKYYKGLFEYDDSMLRELEIHRLGNILVPMESYGKVIEDVVRKYMNEIVSIKKEWPVYELLWEFGKRISDENSILKAAYEKKVPIIVPGIIDGSFGTNLFIYSQFTQLKLNLFEDMKLIKDLIFSCKKSGALIIGGGISKHHTIWWNQFKDGLDYAIYITTAQEYDGSLSGAKPREAISWNKIKPTSENVVIYGDATIILPILSASLLG

SEQ ID NO: 4822 - protein, 334 aa, Yersinia pestis biovar Medievalis str. 91001
MEYMTIKVGINGFGRIGRIVFRAAQERSDIEIVAINDLLDADYMAYMLKYDSTHGRFDGTVEVKDGHLVVNGKTIRVTAERDPANLKWNEVNVDVVAEATGLFLTDETARKHIAAGAKKVVLTGPSKDDTPMFVMGVNHKAYAGQEIVSNASCTTNCLAPLAKVINDKFGIVEALMTTVHATTATQKTVDGPSHKDWRGGRGASQNIIPSSTGAAKAVGKVIPELNGKLTGMAFRVPTPNVSVVDLTARLEKPASYKEICAAIKAASEGELKGVLGYTEDDVVSTDFNGEKLTSVFDAKAGIALNDNFVKLVSWYDNETGYSNKVLDLISHISK

SEQ ID NO: 4823 - protein, 569 aa, Glycine max
  misc_feature (228)..(228): Xaa can be any naturally occurring amino acid
MCGILAVLGCVDNSQTKRARIIELSRRLRHRGPDWSGIHCYEDCYLAHQRLAIVDPTSGDQPLYNEDKTVIVTVNGEIYNHKQLRQKLSSHQFRTGSDCEVIAHLYEEHGEEFVNMLDGMFAFILLDTRDKSFIAARDAIGITPLYLGWGHDGSTWFASEMKALSDDCERFISFPPGHIYSSKQGGLRRWYNPPWFSEDIPSTPYDPTLLRETFERAVVKRMMTDVGXPPLLSGGLDSSLVAAVVNRYLAESESARQWGSQLHTFCIGLKGSPDLKAAKEVADYLGTRHHELYFTVQEGIDALEEVIYHIETYDVTTIRASTAMFLMSRKIKALGVKMVLSGEGSDEIFGGYLYFHKAPNKKEFHEETCRKIKALHLYDCLRANKSTAAWGVEARVPFLDKEFINVAMSIDPEWKMIRPDLGRIEKWVLRNAFDDDKNPYLPKHILYRQKEQFSDGVGYSWIDGLKDHANKQVTDATMMAANFIYPENTPTTKEGYLYRTIFEKFFPKNAAKATVPGGPSVACSTAKAVEWDAAWSKNLDPSGRAALGIHDAAYDAVDTKIDEPKNGTL

SEQ ID NO: 4824 - protein, 359 aa, Aspergillus oryzae
MASQKPTYRIASIPGDGIGIEVVDAAIQVVEKLAKTLGTFNIDFTHIPWGTAYYKEHGRYVSEDCLDTLRKFDAGLFGAVGAPDVPDHISLWGLLLALRGPLQLYANVRPVRTFPGTKCPLNTATEGIDWMLVRENSEGEYSGQGGRSHVGQPWEAATEVAMFTRVGIERIMRFAFEVAQSRPRKLLTVVTKSNSMRNGMVLWDQVAAEVAKDFPDVTWDKMLVDAMTVRMVAKPQSIDTIVGTNLHMDILSDLAAALAGSIGVAPSSNLDPTRKNPSIFEPVHGSAFDITGKGVANPVATFWSAAEMLSWLGEKEAAKQLMDCVEKVCAAGILTPDLGGTSNTQGVVDAVKKEIERLV

SEQ ID NO: 4825 - protein, 372 aa, Anabaena variabilis ATCC 29413
MNNVVIHINDTTLRDGEQAAGIAFNVEEKIAIASLLDSIGVHELEVGIPAMGHEEAESITRIAKLGLNAKLLGWNRANLSDIQASIDCGLDRVHVSVPVSDIQIAAKFKGQRQLVLDKLRDAINFACDRGLSVSVGGEDSSRADESFLLEVAQSAQEWGAFRFRFCDTVGILDPTTTYKKVSHLVSHLSIVIEMHTHDDFGMALANTLAGVKAGAISVNTTVNGIGERAGNAPLEEVVMGLKYLYDIPTGIDTKRLVEVSRLVSKATNFPVLPWKAIVGENTFAHESGIHAHGVLQNPITYEPFAPEDVGWERRLVVGKHSGRHLLLSVLEQHGITLGQAEIQSVLDAVRHQSVKTKRSLTVEELLSLVPQR

SEQ ID NO: 4826 - protein, 131 aa, Sulfolobus tokodaii str. 7
MSIQYTTVGDLKVGNYVVIDGEPCRVVEISKAKTGKHGSAKANIVAIGLFTGQKRTLMAPVDQQVEVPIIEKHIGQILADKGDTITIMDMENYETFDIEKPTDADIVDKIRPGAEVEYWEIMGRKKIVRVK

SEQ ID NO: 4827 - protein, 568 aa, Lycopersicon esculentum
MASSALISDTQSWKDLRAHVEEINKTHLRDLLNHTDRCQSMMVEFDGILIDYSRQRATLDTLKKLFNLAEAAHVKEKIIRMFNGEHINSTENRPVLHVALRAPRDAVINSDGKNVVPEVWHVLDKIRDFSERVRSGSWVGATGKALKDVVAVGIGGSFLGPLFVHTALQTEAEASECARGRQLRFLANVDPIDVARNITGLNPETTLVVVVSKTFTTAETMLNARTMREWISSALGPQAVAKHMVAVSTNLKLVEQFGIDPNNAFAFWDWVGGRFSVCSAVGVLPLSLQYGFSIVEKFLKGASSVDQHFLSAPFEKNIPVLLGLLSVWNVSFLGYPARAILPYSQALEKLAPHIQQVSMESNGKGVSIDGVPLPYQTGEIDFGEPGTNGQHSFYQLIHQGRVIPCDFIGVVKSQQPIYLKDEVVNNHDELMSNFFAQPDALAYGKTPEQLQKENIPEHLVSHKTFSGNRPSLSILLPSLSAYNIGQLLAIYEHRVAVQGFVWGINSFDQWGVELGKSLATQVRKQLHASRKKGESVEGFNFSTKMLITRYLEASADVPSDPSTLLPNI

SEQ ID NO: 4828 - protein, 283 aa, Triticum aestivum
MATSAMTLAMAAATDASLFHPTFLAQHKLAPASASLPLIFSRAPLLRSTRPRVPLTPLVASSDAAEAGLDWADAEEAEETVTEEEPAVAASGGDAGYAAEPPEEAKVYVGNLPYDVDSERLAQLFDQAGVVEVAEVIYNRESGQSRGFGFVTMSTIEEADKAIETFNRYDISGRLLNVNRAAQRGSRVERPPRQFASSFRAYVGNLPWQAEDSRLVQLFSEHGEVVNATVVYDRETGRSRGFGFVTMASKEDLDSAISALDGQEMDGRPLRVNVAAERPQRGF

SEQ ID NO: 4829 - protein, 396 aa, Shigella flexneri 2a str. 301
MLDAQTIATVKATIPLLVETGPKLTAHFYDRMFTHNPELKEIFNMSNQRNGDQREALFNAIAAYASNIENLPALLPAVEKIAQKHTSFQIKPEQYNIVGEHLLATLDEMFSPGQEVLDAWGKAYGVLANVFINREAEIYNENASKAGGWEGTRDFRIVAKTPRSALITSFELEPVDGGAVAEYRPGQYLGVWLKPEGFPHQEIRQYSLTRKPDGKGYRIAVKREEGGQVSNWLHNHANVGDVVKLVAPAGDFFMAVADDTPVTLISTGVGQTPMLAMLDTLAKAGHTAQVNWFHAAENGEVHAFADEVKELGQSLPRFTAHTWYRQPSEADRAKGQFDSEGLMDLSKLEGAFSDPTMQFYLCGPVGFMQFTAKQLVDLGVKQENIHYECFGPHKVL

SEQ ID NO: 4830 - protein, 831 aa, Rhodobacter sphaeroides 2.4.1
MTLTRRDLIKAQAAATAAAAAGLPVSALAQPVTGGAEALRIRWSKAPCRFCGTGCGVMVGTRDGQVVATHGDTQAEVNRGLNCVKGYFLSKIMYGEDRLTTPLLRMKDGVYHKEGEFAPVSWDEAFDVMAAQAKRVLKEKGPKAVGMFGSGQWTIWEGYAASKLMRAGFRSNNLDPNARHCMASAATAFMRTFGMDEPMGCYDDFEAADAFVLWGSNMAEMHPILWSRLTDRRLSHEHVRVAVLSTFTHRSMDLADTPIIFRPGTDLAILNYIAHHIISTGRVNRDFVDRHTNFALGATDIGYGLRPEHQLQLAAKGAADAGAMTPTDFETFAALVSEYTLEKAAEISGVEPALLEELAELYADPDRKVMSLWTMGFNQHVRGVWANHMVYNLHLLTGKISEPGNSPFSLTGQPSACGTAREVGTFAHRLPADMVVTNPEHRAHAEEIWKLPAGLLPDWVGAHAVEQDRKLHDGEINFYWVQVNNNMQAAPNIDQETYPGYRNPENFIVVSDAYPTVTGRCADLVLPAAMWVEKEGAYGNAERRTHFWHQLVEAPGEARSDLWQLMEFSKRFTTDEVWPEEILSAAPAYRGKTLFEVLFANGSVDRFPASDVNPDHANHEAALFGFYPQKGLFEEYAAFGRGHGHDLAPFDTYHEVRGLRWPVVEGEETRWRYREGFDPYVKPGEGLRFYGKPDGRAVILGVPYEPPAESPDEEFGFWLVTGRVLEHWHSGSMTLRVPELYKAFPGAVCFMHPEDARSRGLNRGSEVRVISRRGEIRTRLETRGRNRMPRGVVFVPWFDASQLINKVTLDANDPISRQTDFKKCAVKIEAV

SEQ ID NO: 4831 - protein, 112 aa, Shigella flexneri 2a str. 301
MKKIDAIIKPFKLDDVREALAEVGITGMTVTEVKGFGRQKGHTELYRGAEYMVDFLPKVKIEIVVPDDIVDTCVDTIIRTAQTGKIGDGKIFVFDVARVIRIRTGEEDDAAI

SEQ ID NO: 4832 - protein, 287 aa, Ralstonia metallidurans CH34
MQMAGWPRIGQADRGRRKKETGMTEEDGLLVAISDGVATLTLNRPKQKNALNGSMRDGLCDAVQRIRADRSVRAVVLRGAGEDFCSGGDIRAMNVTEADAGRARMDDMHGWIAMLLDLDRPVVAAVDGVAYGAGFSIALLADFIVASPRARFCMPFMKVGLVPDCGALYTLPRVVGMAKARELVFSAREIGAEEARQIGAVFEIVPEDKLHARADELARGLAGASPAAFAMAKRALNQSLGSDVRAMLEMESLGQGIAFTTSYHREAVRRFKEKEPPLFRWPAAPRD

SEQ ID NO: 4833 - protein, 86 aa, Aeropyrum pernix K1
MGRTKVVGPAGRYGPRYGVSVRKRVRDILARRYQPHECPFCGSTGTVRRVSVGVWSCRKCGNTWAGAAYTPRSGLAKYFKRYIVRG

SEQ ID NO: 4834 - protein, 449 aa, Pasteurella multocida subsp. multocida str. Pm70
MSQVATLDAFLERVAQRDGTQPEFLQAVREVFTSIWPFLEANPKYRSQALLERLVEPERVIQFRVAWTDDQGQTQVNRAFRVQYNSAIGPFKGGMRFHPSVNLSILKFLGFEQIFKNALTTLPMGGGKGGSDFDPKGKSDGEVMRFCQALMAELYRHVGADTDVPAGDIGVGGREVGYLAGYMKKLSNQAACVFTGRGLSFGGSLIRPEATGYGLVYFAQAMLAEKGQSFAGKTVSVSGSGNVAQYAIEKALQLGAKVVTCSDSSGYVYDEAGFTTEKLAALMELKNEKRGRVEEYAKQFGLKYVAGKTPWEVKVDIALPCATQNELDLASANTLIANGVQLVAEGANMPTTIEATDAFLDAGVLFGPGKAANAGGVATSGLEMTQSSQRLYWSAEEVDKKLHSIMLDIHANCKKYGTIEGQANINYVVGANVAGFVKVADAMLAQGVY

SEQ ID NO: 4835 - protein, 115 aa, Triticum aestivum
  misc_feature (108)..(108): Xaa can be any naturally occurring amino acid
MARGAATQLVLVSMVAAMLPVACDAAISCGQVTSALSPCISYARGNGANPPAACCSGVRSLAGAARSTADKQAACKCIKSAAGGLNAGKAAGIPLKCGVSVPYAISSXVDCSKIR

SEQ ID NO: 4836 - protein, 123 aa, Zea mays
  misc_feature (15)..(15): Xaa can be any naturally occurring amino acid
  misc_feature (24)..(24): Xaa can be any naturally occurring amino acid
  misc_feature (98)..(98): Xaa can be any naturally occurring amino acid
  misc_feature (118)..(118): Xaa can be any naturally occurring amino acid
LTISSGAGGFEETVXSSHILINHXGSLLKASLKDPYCRIIFSTTRGDSASLLLDLLNQILSGQANFSYLSARHSYCSSARLCWDLCTFFRMHMHKPFXDATYSLKVCELSYILDTYSXVHIIL

SEQ ID NO: 4837 - protein, 500 aa, Medicago truncatula
MHNTDTATMNDQLSNQTSIFGLRLYVILGIIVGVIIVLLLFFISIYLAFKHNNSKKTKTTIPNISKDVPEITLDVPPQPDPSPQPDPPSEQSHPEEETAPLSYKRIQFEIGKNHRISYPEQRGSVEHSGERESRPLDQVNAVIPQVSHLGWGHWYTLRELEDATNEFSPDNVIGEGGYGIVYHGILKDNTNIAIKNLLNNRGQAEREFKVEVEAIGRVRHKNLVRLLGYCAEGAHRMLVYEFVDNGNLEQWLHGDVGPCSPLTWEIRMNIILGTAKGLTYLHEGLEPKVVHRDIKSSNILLSKQWNSKVSDFGLAKLLSPESSYITTRVMGTFGYVAPEYASTGMLNERSDVYSFGILIMEVITGRNPVEYSRPAEEVNLVEWLKKMVSNRNPEGVLDPKLPEKPTSRALKRALLVALRCTDPNAQKRPKMGHVIHMLEAEDSPYKEERRVRRDPGVGSSPTTSIEDRSKEEAAVSIDDGMLENEKCTNETSSNHEVEKQ

SEQ ID NO: 4838 - protein, 386 aa, Thermococcus kodakarensis KOD1
MNWDRVRGLVLEGKPVVLIDNRREFEADLIYPAEIASPEIVNFMLSMKGLLCLTMDMDEALKRGFFPLPSKEGETNFLVPVDYKETFTGITAEERALTARKIAEGLGVGAFRYPGHLHLLGGIGLNRRRGHTESSLELMEILGFKRYALMVEILDEKGDSHNREYALKLAEEHGLPVLTTDDVWKEFVRRKQLMRIYASARLPTRYGDFRIIAFDNELDFKEHVAIVKEPYGEVPLVRVHSKCLTGDTFASLKCDCGSQLANALRMIAQEGGILLYMDQEGRGIGLKEKIKAYELQDKGFDTVEANKALGRGEDERTYEAAFQMLRALGVSKIRLITNNPRKAKALEEFGIEVVETVPAPGEVTEHNKPYLKVKAEKLGHKLPFKV

SEQ ID NO: 4839 - protein, 381 aa, Staphylococcus aureus subsp. aureus NCTC 8325
MLTEQEKDIIKQTVPLLKEKGTEITSIFYPKMFKAHPELLNMFNQTNQKRGMQSSALAQAVMAAAVNIDNLSVIKPVIMPVAYKHCALQVYAEHYPIVGKNLLKAIQDVTGLEENDPVIQAWAKAYGVIADVFIQIEKEIYDQMMWIGFKPFKITNIKQESEDIKSFTVETEEYDFSEFTPGQYITVDVSSDKLPYRAKRHYSIVSGEKNHLTFGVKRDVTTEHEGEVSTILHDEIKEGDMINLAAPVGGFVLENTTEPQLFLGSGIGVTPLVAMYEAASAKGLDTQMVQVAENEQHLPFKDNFNSIASHHDNAKLYTHLKDKQGYIGAEELQVFLANKPEIYICGGTKFLQSMIEALKSLNYDMDRVHYETFIPRLSVAV

SEQ ID NO: 4840 - protein, 482 aa, Escherichia coli CFT073
MKLNDSNLFRQQALINGEWLDANNGEVIDVTNPANGDKLGSVPKMGADETRAAIDAANRALPVWRALTAKERANILRNWFNLMMEHQDDLARLMTLEQGKPLAEAKGEISYAASFIEWFAEEGKRIYGDTIPGHQADKRLIVIKQPIGVTAAITPWNFPAAMITRKAGPALAAGCTMVLKPASQTPFSALALAELAIRAGVPAGVFNVVTGSAGAVGNELTSNPLVRKLSFTGSTEIGRQLMEQCAKDIKKVSLELGGNAPFIVFDDADLDKAVEGALASKFRNAGQTCVCANRLYVQNGVYDRFAEKLQQAVSKLHIGNGLEKGVTIGPLIDEKAVAKVEEHIADALEKGARVVCGGKAHERGGNFFQPTILVDVPANAKVSKEETFGPLAPLFRFKDEADVIAQANDTEFGLAAYFYARDLSRVFRVGEALEYGIIGINTGIISNEVAPFGGIKASGLGREGSKYGIEDYLEIKYMCIGL

SEQ ID NO: 4841 - protein, 67 aa, Triticum aestivum
  misc_feature (55)..(55): Xaa can be any naturally occurring amino acid
DWGPVVIAVVLFVLLSPGLLFQMPARGRVAEFGNMQTSGASILVHAIIYFGLITXFLIAIGVHIYTG

SEQ ID NO: 4842 - protein, 308 aa, Frankia sp. EAN1pec
MQNTIDLTGRLAVVTGASSGLGLGLATRLAAAGAKVLLPVRDEAKGEAALSHIRAEAPGADVSLRELDLASLKSVEALGDTLNAEGRPIHILINNAGLMTPATRHTTADGLELQFGTNHIGHFALTGWLLPLLNAGHARVTTMTSSAARHAKLNWEDLQSDQAYAPIRAYNQSKLANLLFALELDRRSRAGGWGIVSNAAHPGTTLTGLYAAGPNLGREKSSPIEAAMKRLARWGVLVQGVDRGLLPALYAATSPDAEGGHFYGPDGFGQFTGGPAELEIYRPARDEDAATRLWDVSQRLAGVEFAAV

SEQ ID NO: 4843 - protein, 480 aa, Pyrococcus abyssi GE5
MVERKRWSENFSEWFNEVIEEAGILDKRYPVKGMNVWLPYGLKIMKNIEKFIHEEMERTGHQEVLFPALIPETEFKKEAEHIAGFEGEVFWITHAGHEPLDVKLILRPTSETAMYSMFALWIRSHADLPFKVYQIVNVYRYETKHTRPLIRVREISRFFEAHTAHADFEDAERQIKEDLEIFDNLMKRLAIAYIISKRPEWDKFPGAFYSLGAEVVMPDGRTLQIGTMHNYKQNFAKAYNILYEKEDGTHDYVHQTTFGMSERLLAAVIAIHGDDRGMVLPPTIAPIQVVIVPIPKKEKQEIVYEYAREIEEELRTAGIRVHLDMREKRPGWKFYDWELKGVPVRIEVGPRDVENSTVVLARRDKLEKITIKREELVDKVRELFDDIMKYLYERANEWLNSHIKRVETLEEAKKAFEDRRGIVEIPWCGEESCGLKMEEELDAKMLGIPYPEEKAKAPEGSRCPVCGRDAKFIARFARTY

SEQ ID NO: 4844 - protein, 283 aa, Leptosphaeria maculans 'brassicae' group
HTFYNELRVAPEEHPVLLTEAPINPKSNRVKMTQIVFETFNAPAFYVFIQAVLSLYASGRTTGIVLDSGDGVTHVVPIYEGFALPHAISRVDMAGRDLTDYLLKILAGRGYTFSTTAEREIVRDIKEKLCYVALDFEQEIQTASQSSSLEKSYELPDGQVITIGNERFRAPEALFQPSVLGLESGGIHVTTFNSIMKCDVDVRKDLYGNIVMSGGTTMYPGISDRMQKEITALAPSSMKVKIIAPPERKYSVWIGGSILASLSTFQQMWISKQEYDESGPSIV

SEQ ID NO: 4845 - protein, 283 aa, Leptosphaeria maculans 'brassicae' group
HTFYNELRVAPEEHPVLLTEAPINPKSNREKMTQIVFETFNAPAFYVSIQAVLSLYASGRTTGIVLDSGDGVTHVVPIYEGFALPHAISRVDMAGRDLTDYLMKILAERGYTFSTTAEREIVRDIKEKLCYVALDFEQEIQTASQSSSLEKSYELPDRQVITIGNERFRAPEALFQPSVLGLESGGIHVTTFNSIMKCDVDVRKDLYGNIVMSGGTTMYPGISDRMQKEITALAPSSMKVKIIAPPERKYSVWIGGSILASLSTFQQMWISKQEYDESGPSIV

SEQ ID NO: 4846 - protein, 283 aa, Leptosphaeria maculans 'brassicae' group
HTFYNELRVAPEEHPVLLTEAPINPKSNREKMTQIVFETFNAPAFYVSIQAVLSLYASGRTTGIVLDSGDGVTHVVPIYEGFALPHAISRVDMAGRDLTDYLMKILAERGYTFSTTAEREIVRDIKEKLCYVALDFEQEIQTASQSSSLEKSYELPDGQVITIGNERFRAPEALFQPSVLGLESGGIHVTTFNSIMKCDVDVRKDLYGNIVMSGGTTMYPGISDRMQKEVTALAPSSMKVKIIAPPERKYSVWIGGSILASLSTFQQMWISKQEYDESGPSIV

SEQ ID NO: 4847 - protein, 576 aa, Bradyrhizobium sp. BTAi1
MATIADQIVETLEIAGVKRIYGVVGDSLNGLTESLRVRQTIDWVHVRHEEAAAFAASGESQITGKLAVCAGSCGPGNLHLINGLYDAQRSRTPVLAIAAHIPSSEIGGGYFQETHPQNLFRECSVYCELISDPMQMPFVLENAIRAAAGERGVAVIVIPGDVALKAAPKRALPPAVGLVPPKPVVRPAEPELAALAALLNGAERVTLFCGRGCAGAHAELMQLAETLQSPIVHALGGKEHVEYDNPYDVGLTGFIGFSSGYHAMHSCDTLVMLGTDFPYKQFIPNDIRIAQVDIRPGQLGRRARLDVGVVGDVGETIRALLPKLTAKSDRRHLDDNLARYASARKGLDDLAVGTPGRRPIHPQYLTRLISETASDDAVFTFDVGMPTIWAARYIAMNGRRRLVGSLVHGSMANAMSQAIGIQAAQAGRQVISLSGDGGFAMLMGDLITLKQMKLPVKVVIYNNGTLGFVALEMKASGFVEHGTDLENPDFAAMAQAMGIHGRRVEDPGELPGAVADWLAHDGPAVLDVVTARQELSMPPTIGLEQVKGFSVWLIRAVMSGRGDEVIDLAKENLLPR

SEQ ID NO: 4848 - protein, 412 aa, Bacillus cereus G9241
MEKKRVVITGLGAVTPVGTDVETAWENIKKGVSGIGRLTRIDPELFPAKVAAEINDFEVEKYIDKKEARRMDRFTQYAVAAAKMAVADAKLEITEENGPRIGVWIGSGIGGMETYEEQFKIFTEKGPRRVSPFFVPMMIPDMAAGQVSIATGAKGINTCSVTACASGANSIGDAFKAIQRGDADAMITGGAEAPLTSMAFAGFSSAKALTFNEDPATACRPFDKNRSGFVMGEGSGILILEELEHALARGAHIYAEIAGYGATGDAFHITMPAPGGEGGVRAMRQALADAGLQPEDIDYINAHGTSTDANEKYETMAIKETFGEHAYKVAISSTKSMTGHLLGAAGAVEAIFSIKSITDGVIPPTINYETPDPECDLDYVPNKARHQEVNAVLSNSLGFGGHNAVLVFKSYK

SEQ ID NO: 4849 - protein, 283 aa, Leptosphaeria maculans 'brassicae' group
HTFYNELRVAPEEHPVLLTKAPINPKSNREKMTQIVFETFNAPAFYVSIQAVLSLYASGRTTGIVLDSGDGVTHVVPIYEGFALPHAISRVDMAGRDLTDYLMKILAERGYTFSTTAEREIVRDIKEKLCYVALDFEQEIQTASQSSSLEKSYELPDGQVITIGNERFRAPEALFQPSVLGLESGGIHVTTFNSIMKCDVDVRKDLYGNIVMSGGTTMYPGISDRMQKEITALAPSSMKVKIIAPPERKYSVWIGGSILASLSTFQQMWISKQEYDESGPSIV

SEQ ID NO: 4850 - protein, 187 aa, Chlamydomonas reinhardtii
MQRSILSALLPRLPLGVREFATASADYSIAMKKAAEITGAAESAMGPKEGGFTAGVPLDTFTRKARIYAPARTASQSGLARTVDFATTTPAWKIEFEPTAKWQNPLMGWTSSADPLENVGRSALVFYTKEEAMRFCEKLGWEYEVTEPNKRRTQRTKRYMQYGDNFGTKRAGVPDLSTLPSNRAAAK

SEQ ID NO: 4851 - protein, 570 aa, Bradyrhizobium sp. BTAi1
MQADDGTAAEAQRVDLAKSFARFEQTFPELTAQEIARLRGFGEIRNYRDGELLFETGKPGPGMFVILSGHVAITQRDGLGHVTPVIDQGPGQFLAEIAQLSGRVALVDGQAEGDVEVILIPPDKLRALLIAEAELGERIMRALILRRVNLIQGGAGGPVMIGSPQSAAIARLQSFLTRNGFPNHLLDPAVDHDAADLIARYSPTPADLPLVVVSDGSVLRNPSETELARAIGMIGGPRGEKIYDVAVVGCGPAGLATAVYGASEGLSVAVLDSRAFGGQAGASARIENYFGFPTGITGLALTARAFNQAQKFGAEIMIPVSVTALDCERKNGAFVLALEGGDEVRARAVVVASGARYRRPDLARIKEFEGRGVWYWASPIEARLCVGQEVALVGGGNSAGQAAVFLSGHVKKVRMIIRGGGLAASMSRYLIERIEATPNIELLFNTEVVALDGGPDTGLERITLRSRLSGEDAPAEIRNLFLFVGADPATGWLGDCGVTLDRAGFVVTGAQSEQNAGRMVSPLETSVPGVYAVGDVRSGSVKRVGGAIGEGAQVVAALHGFLADPLVPPV

SEQ ID NO: 4852 - protein, 262 aa, Leuconostoc mesenteroides subsp. mesenteroides ATCC 8293
VPFIPAHKAGTDFGGWSGIFAGASQIFLAYIGFDSIAASSAEAKDPKKTMPRGIIGSLIVATILFVTVALVLVGMFHYTEYKDNAAPAAWALLHSGHEFTSNLLSVVALIGMFTAIIGMMLAGSRLLYAFGRDGLLPSFLGKVNDKGLPNNALLVLSVIAILIGSVFSFTELAGLISAGTLIAFIIVSLGIYALRPREGKDIQEPGFKMPFYPVMPALAALGSGFIFYELDNQAKIYAFGWFVVGIIIYAVYGSKHSKLSQK

SEQ ID NO: 4853 - protein, 446 aa, Eubacterium acidaminophilum
MHKYIPNTEADKKSMLESIGVSSIEDLFSDIPAELKLGRELNLGEPMSELELVKHMNELADKNKSDFVCFRGAGAYDHYIPSLINHMLLRQEFFTAYTPYQPEISQGTLQMIFEFQTMLCDLTGMDVANASMYDVGTATVEAAVMAVQNKKKCKNVVVSKAVAPETRLILHTYLKQNDIEVIEVDTADGVTDMDKLTAAVGDETAGVIVQNPNFFGVFEDVEAIAGVAHDKKALLIDVVDPISLGIVKRPGDIGADIVVGDAQCFGSALNFGGPYIGFLTTKSKMARKMPGRIVGQTEDTDGKRGFVLTLQAREQHIRREKATSNICSNQGLCTLTVAIYLSTMGKSGLKEVALQCMNKAQYAYKKLTESGKFKPLYNKPFFKEFALTSDVAAADVNAKLAESNILGGYELECDYPEAKNGLLFCVTEKRTKEEIDCLAQVMEVNC

SEQ ID NO: 4854 - protein, 327 aa, Glycine max
MAEGKGRVCVTGGTGFLGSWIIKRLLEDGYAVNTTIRSDPGRKRDVSFLTNLPGASEKLKIFNADLSDPESFGPAVEGCVGIFHTATPIDFAVNEPEEVVTKRAIDGALGIMKAGLKAKTVKRVVYTSSGSTVSFSSLEEKDVVDESVWSDVDMLRSVKPFSWSYAVSKVLTEKAVLEFGEHNGLEVATVIAPFIVGRFVCPKLPDSIEKALLMVLGKKEEIGVIRYHMVHVDDVARAHIFLLEHPNPKGRYNCSPFIVPIEEIAEIISAKYPEYQIPALEEVKEIKGAKLPHLTSQKLVDAGFEFKYSVEDIFTDAIECCKEKGYL

SEQ ID NO: 4855 - protein, 484 aa, Eubacterium acidaminophilum
MKNYNKLVFEVSKEGKKAYSLPKCDVPELDAASVIPAGYLSSEEPKLPELSEVDVIRHFTNLSQKNFGLDGGFYPLGSCTMKYNPKINEDMCRIPGLVNVHPYQPEETVQGSLEVMYNLAQSLAEISGMDEVTLQPAAGAHGEYAGLLSIKEYHKKRGDLKRTKIIVPDSAHGTNPASAYVAGLEIVEIESNSQGGVDIENLKSVLNDEVAGFMLTNPSTLGLFEVNITEITKLIHEAGGLCYYDGANLNAIMGKTRPGDMGFDVMHFNLHKTFSTPHGGGGPGAGPIGVKAHLAEFLPVPVVAKKDDKFVLDYDRPNSMGKIKNFYGNYGVCLRAYAYVKSMGASGLKEVSEAAVLNANYMMHKLKGEYKLPYDQVCKHEFVLDGLRGSELEVTTLDVAKRLLNYGYHPPTVYFPLIVHQAIMIEPTETEGRETLDEFIDALLKIAEEAKKDPQILKNAPQTTLVKRLDEVKAAKDLILKYQG

SEQ ID NO: 4856 - protein, 609 aa, Kluyveromyces lactis NRRL Y-1140
MLKLLSLMVPLASAAVIHRRDANISAIASEWNSTSNSSSSLSLNRPAVHYSPEEGWMNDPNGLWYDAKEEDWHIYYQYYPDAPHWGLPLTWGHAVSKDLTVWDEQGVAFGPEFETAGAFSGSMVIDYNNTSGFFNSSTDPRQRVVAIWTLDYSGSETQQLSYSHDGGYTFTEYSDNPVLDIDSDAFRDPKVFWYQGEDSESEGNWVMTVAEADRFSVLIYSSPDLKNWTLESNFSREGYLGYNYECPGLVKVPYVKNTTYASAPGSNITSSGPLHPNSTVSFSNSSSIAWNASSVPLNITLSNSTLVDETSQLEEVGYAWVMIVSFNPGSILGGSGTEYFIGDFNGTHFEPLDKQTRFLDLGKDYYALQTFFNTPNEVDVLGIAWASNWQYANQVPTDPWRSSMSLVRNFTITEYNINSNTTALVLNSQPVLDFTSLRKNGTSYTLENLTLNSSSHEVLEFEDPTGVFEFSLEYSVNFTGIHNWVFTDLSLYFQGDKDSDEYLRLGYEANSKQFFLDRGHSNIPFVQENPFFTQRLSVSNPPSSNSSTFDVYGIVDRNIIELYFNNGTVTSTNTFFFSTGNNIGSIIVKSGVDDVYEIESLKVNQFYVD

SEQ ID NO: 4857 - protein, 555 aa, Cryptococcus neoformans var. neoformans B-3501A
MISVPGGPGVLSAPLSPERVEAPVTVKAYLLCVFASFGGIFFGFDSGYMNGVLGMNYFINMMTGLPIPGADADQATKDAFTLPAWEKSLITSILSAGTFFGAIIAGDLADYFGRRITIVSGCCVFIVGCCLQTASTGLGLLVAGRLIAGFGVGFISAIIILYMSEIAPRKVRGAIVSGYQFCITIGLLLSSCVCYATQNRTDSGSYRIPIAIQFAWALILGGGLLLLPESPRWYVKAGKIEQARKALSRVRGQPVDSDYIKDEIAEIVANHEYETELTPNVTYLSSWAACFTGGIRNPGSNLRRTLLGISMQMMQQWTGVNFIFYFGTTFFTDLGTISNPFLISLITTLVNVCSTPVSFWTIERFGRRPLLIYGALGMLICEFIVGIIGVAKPGDTTVVKVQISFICIYVFFFASTWGPGAWVSIGEIFPLPIRARGVGLSTASNWLWNCIIAVITPYLVGTDEANLGSKVFFLWGSTCILCFIYAYLFVWETKGLTLEQVDRMMEECGSPRRSAGWKPHTTFAAEAAQGTHGLDQNEKAKVGPVLSQSEMLEQV

SEQ ID NO: 4858 - protein, 265 aa, Nocardioides sp. JS614
MPHDVVLVERRDGVRRVILNRPEVLNAYDTALCQQLGAALLDFQRCDEDRVLVLSGAGRAFCVGGDVRSEAEAVEGEERQLGHGMVMREGMHSVHRLLHALDKPVIALIHGHAVAGGLSLALLCDFRIAAQSARLGDTSGRVGLLPDEGGAWLFPRAMGHDAALRMTLLGEVYDAAEAHRLGLVTEVVPDDRLQERGAELAAQIAAKAPLAVRMAKRMMRRSREQTFEESLVEAEYAVEIVNRSDDVREGVEAFVAKRTPTFTGH

SEQ ID NO: 4859 - protein, 460 aa, Sulfolobus tokodaii str. 7
MKVGILDSTLREGEQTPGVVFTIDQRVEIAKALSDVGVQMIEAGHPAVSSDIYEGIKRIMKLKREGLITSEIVGHSRAVKKDIEVAAELEVDRIAIFYGVSDIHLKAKHHVTREEALNIIAETISYAKSHGVKVRFTAEDGSRTDLDYLIKVCKTARDAGADRVSIADTVGILYPTKTRELFSTLVREVPGLEFDIHAHNDLGLAVANALAAIEGGATIIHTTVNGLGERVGIVPLQVIAAAIKYHFGIEVVKLNKLQQLASLVEKYSGIPMPPNYPITGDYAFIHKAGIHVAGVLNDPSTYEFMPPETFGRSRDYVIDKYTGKHALKDRFEKLGVKLSDVELDQVLAKIKSNPNVRFYRDVDLLEIAESVTGRVLKPKPPENIEALISVKCESNVYTTAVTRRLSVIPGVKEVMEISGDYDILVKVEAKDPNELNQIIENIRAVKGVSSTLTSLVLKKM

SEQ ID NO: 4860 - protein, 162 aa, Aspergillus oryzae
MSDEQHVFDDIQGTDSGASATFPMQCSALRKNGHVVIKGRPCKIVDMSTSKTGKHGHAKVHLVALDIFTGKKLEDLSPSTHNMDVPFVKRTEYQLIDVTDDGFLSLMDDNGGTKDDVKLPDGELGEKINRMFTEEGKDCNVIILTAMGEECAMDVKEAPKGA

SEQ ID NO: 4861 - protein, 156 aa, Arabidopsis thaliana
MKPRMCLILFIALMRVMSIVSAQSSCTNVLISMAPCLSFITQNTSLPSQQCCNQLAHVVRYSSECLCQVLDGGGSQLGINVNETQALALPKACHVETPPASRCHSGSSVNSHSEHGNGSKTVPREKSSSDGSIKFSFPLLAILFTASYITLIYAKY

SEQ ID NO: 4862 - protein, 228 aa, Staphylococcus epidermidis ATCC 12228
MPKLILCRHGQSEWNAKNLFTGWADVKLSKQGIEEAQSAGKKIYDNQIEIDIAFTSLLTRALETTQYILAGSDQQWIPVYKSWRLNERHYGGLQGLNKDDARKKWGEDQVHQWRRSYDVRPPRESEEQREAYLKNRRYQHIDHRMMPYCESLKDTLERVVPFWTDHISQHLLDDKTVLVSAHGNSIRALIKYLEGLSEEDIVGYEIKTGAPLVYELTDDLVVKDKYYL

SEQ ID NO: 4863 - protein, 581 aa, Pseudomonas fluorescens Pf-5
MANITIAQQLATTLEQAGVKRIWGLTGDSLNGLTDALHSMQTIEWMHVRHEEVAAFAAGAEAATTGQLAVCAGSCGPGNLHLINGLFDCHRNHVPVLAIAAQIPSSEIGLDYFQETHPQELFKECSHFVELVSNPAQMPEVLHRAMRSAILNRGVAVVVIPGDVALQQVPAASKPWPALHAPRTLPAPHDLDKLVELLSQSKAVTLLCGSGCAGAHDQVVALADALGAPVVHALRGKEHVEWDNPFDVGMTGLIGFSSGYHAMLNCDTLVMLGTDFPYRQFYPSDACVIQIDRNPQALGRRVPLDLGIAADVGETLAALLPRLPYKGDRRFLEESLKHYAKARQGLDDLAQPSPAGRPIHPQYLTRLLSELADEDAIFTADVGTPTVWAARYLKMNGQRRLLGSFNHGSMANAMPQAMGAQAAFPQRQVISLSGDGGFSMLMGDFISLAQLKLPVKIVVYDNASLGFVAMEMKSAGYLDTGTDLHNPDFAAMANAMGILGLRVENSEELEGALRTALAHDGPVLVDVVTATQELAMPPAIKLEQAKGFSLYMLKAVMSGRGDEVIELARTNWLKDSWFKIT

SEQ ID NO: 4864 - protein, 2025 aa, Arabidopsis thaliana
MESSLPQVAALDRSTLLKAFDETKTGVKGLIDAGITEIPSIFRAPPATLTSPKPPSSSDFSIPTIDLKGGGTDSITRRSLVEKIGDAAEKWGFFQVINHGIPMDVLEKMIDGIREFHEQDTEVKKGFYSRDPASKMVYSSNFDLFSSPAANWRDTLGCYTAPDPPRPEDLPATCGFLRPHYSLVCLKDFGGHFFREMMIEYSKEVMKLGKLLFELLSEALGLNTNHLKDMDCTNSLLLLGHYYPPCPQPDLTLGLTKHSDNSFLTILLQDHIGGLQVLHDQYWLITNDKFISVEHRVLANVAGPRISVACFFSSYLMANPRVYGPIKEILSEENPPNYRDTTITEYAKFYRSKGFDACLIRVLGTLIICVMPSFMTVKAMHETVTRSIFGYIIGLCVNSRQLNHLMFQVLLFISMDAKKLDTGPRDAINWLPDEILGKILSLLATKQAVSTSVLSKKWRTLFKLVDTLEFDDSVSGMGEQEASYVFPESFKDLVDRTVALQCDYPIRKLSLKCHVGRDDEQRKACVGRWISNVVGRGVSEVVLRINDRGLHFLSPQLLTCKTLVKLTLGTRLFLGKLPSYVSLPSLKFLFIHSVFFDDFGELSNVLLAGCPVVEALYLNQNGESMPYTISSPTLKRLSVHYEYHFESVISFDLPNLEYLDYSDYALYGYPQVNLESLVEAYLNLDKAEHVESPDVTKLIMGIRNVEILSLSPDSVGVIYSCCKYGLLLPVFNNLVSLSFGTKKTRAWKLLADILKQSPKLETLIIEDLNGYPLDVSMPLNQVKELQILEYGESDDERLQSRLESKNKLGSFDFEKFLFPIPPPIKITVSPHPSDSGGDGSNSKSSSDDEFVSLDSSTSGLCSSSGKFFDLIKFLIALSVLRETKTMESTKIAPSFDRASELKAFDETKTGVKGLVDSGISKIPRIFHHSSVELANPKPLPSDLLHLKTIPTIDLGGRDFQDAIKHKNAIEGIKEAAAKWGFFQVINHGVSLELLEKMKDGVRDFHEQPPEVRKDLYSRDFGRKFIYLSNFDLYTAAAANWRDTFYCYMAPDPPEPQDLPEICRDVMMEYSKQVMILGEFLFELLSEALGLNPNHLKDMECLKGLRMLCHYFPPCPEPDLTFGTSKHSDGSFLTVLLPDNIEGLQVCREGYWFDVPHVPGALIINIGDLLQASLRNQYMFASSDFTSLFTMLDLFKKSSSWFKLITNDKFISLKHRVLANRATRARVSVACFFHTHVKPNPRVYGPIKELVSEENPPKYRETTIRDYATYFNGKGLGGTSALLDFKQLVPSLNLRKMFHSCSVIREAKTMETKNIAPSFDRASELKAFDETKTGVKGLVDSGISQIPRIFHHSSVKLANPEPVSSDLLHLKTIPTIDLGGRVFEDELKHKNAIEKIKEAAEKWGFFQVINHGVSLELLEKMKDGVRGFHEQSPEVRKDFYSRDLTRKFQYSSMSPFLILDLMCNLYSYMVNCFRDVTIEYSEQVMNLGEFLFTLLSEALGLNPNHLNDMDCSKGLIMLCHYYPPCPEPDLTLGTSQHADNTFLTVLLPDQIEGLQVLREGYWFNVPHVPGALIINIGDLLQASLHNQYIFLLCFAELITNDKFVSLEHRVLANRATRARVSVAETKTMEMMKIDPLFDRASELKAFDETKTGVKGLVDSGVSQVPRIFHHPTVKLSTPKPLPSDLLHLKTIPTIDLGGRDFQDAIKRNNAIEEIKEAAAKWGFFQVINHGVSLELLEKMKKGVRDFHEQSQEVRKEFYSRDFSRRFLYLSNFDLFSSPAANWRDTFSCTMAPDTPKPQDLPEICRDIMMEYSKQVMNLGKFLFELLSEALGLEPNHLNDMDCSKGLLMLSHYYPPCPEPDLTLGTSQHSDNSFLTVLLPDQIEGLQVRREGHWFDVPHVSGALIINIGDLLQASSLMHFCSVLHCITYLPYCSFLGFVVLMQLITNDKFISLEHRVLANRATRARVSVACFFTTGVRPNPRMYGPIRELVSEENPPKYRETTIKDYATYFNAKGLDGTSALLHFKI

SEQ ID NO: 4865 - protein, 504 aa, Sorghum bicolor
MAAASHHRCTSVASELEGTLLISGSLFPYFFLVALEAGGPLRALLLLAAYPLVALLGAAFSSDDLPLLAMTFLSTAGLGVADVTAVARATLPKFFLADLRGTAFRALARHGDAASGGERYVVTRLPRLVVEPFVREYLGADVRVVGTELRVVAGSRFSGTLVASPGVVGGGDRSLGALVAVLGRDRIVDVGLYCSASGGDRQPAFLQVCQERRVVSAPEKAPATPLPRSEYLRPLVFHDGRLVCRPDPLVCLAIFLWIPLGVLLSVARLLFGFFPHGAGLLLAAATGFRIRGSLGGAAEPAGPGRGTLFACNHQTLMDPVILSTVLRRKVTAVTYSLSSFSELIAPIPTVRLTRDRGRDSRIMQGELTRGDLVVCPEGTTCREPYLLRFSPLFAEIAGEVTPTAVRAGGTMFHGSTVRGHKWLDSVFFLMNPAPWYEIRILTPVATCGSGGGASSLDVANGVQRVIGDALGFECTGLTRRDKYRMIAGHDGVDARSSPPKPPPS

SEQ ID NO: 4866 - protein, 96 aa, Neorickettsia sennetsu str. Miyayama
MSIENKKAIIYRPSKAATQSGYGDQKWVLRFCSEEPKYVEPLMGWVGSRDTITQLVLKFDSREVAEAYAKKNGIDYTVVMPQQAKVKPKSYADNFQ

SEQ ID NO: 4867 - protein, 422 aa, Ehrlichia canis str. Jake
MTTRRIVITGLGLVTSLGSDVKTVWDLLSNGVSGISKINRFDTSDLDCKIAGQVIMKSESEEYVFNAADYIPEKDLKKMDNFIHFGIAAATQAVNDSNLLDCKDLDYDRVGVIVGSGIGGLPFIEKTVICLQERGPRRISPFFIPASLINLVSGHISIKYGFTGLTDAVVTACSTGAQAIGNAARVIQSGEADVIIAGGAEGAVCRIGIAGFSAMKALSTKFNDTPELASRPWDKQRDGFVMGEGAGIVILEDYEHAKKRGAKIYGELLGYGMTSDAYHISAPHPEGKGGMKAMELALSSAQLNPESINYINAHGTSTPLGDSTEIQAIKSIFKESIYKVPISSTKSSIGHLLGAAGSVEAIFSILAMNTSITPPTLNLYESSEDPQLNLVPLNAQEHKINYCLSNSFGFGGVNISLVFGKL

SEQ ID NO: 4868 - protein, 313 aa, Medicago truncatula
MNWVRGHSLGSGSFATVYLAKHPEDSVTFPQLTAVKSSNLHDSYSLQNEKQILDRLGSSPHVIKCFGQDKTVENDEEYYNIFLEYASGGTLSDQLEKHGGKLPDNLVRRYTRSVVEGLKYIHKKGFVHCDLKLPNILVFENGNIKISDFGLAKETGVEQGEKWQPRGTPMIMSPEAVNDSVYESSADIWALGCAVVEMITGEPAAWNESDMLMLTIRIGVGEELPKIPEELSQEGKDFLEKCFIKDPLRRWTADMLFKHPFISDVETVSVVNELVDELPLSSPSPKTYFNMLIVFLLLVRHCLLFQMNGVNKK

SEQ ID NO: 4869 - protein, 158 aa, Schizosaccharomyces pombe
MQSLRAAFRRRTPIFLKPYEFSTNVFGLRCRYYSQVRHNGALTDLEYHRVADDTLDVLNDTFEDLLEEVGKKDYDIQYANGVITLMLGEKGTYVINKQPPAHQIWLSSPVSGPKHYEYSLKSKTWCSTRDEGTLLGILSSEFSKWFSRPIEFKKSEDF

SEQ ID NO: 4870 - protein, 129 aa, Chromobacterium violaceum ATCC 12472
MRMLHTMLRVGNLDRSIAFYQEVLGMKLLRRNDFPEGRFTLAFVGYGDEAEHTVLELTHNWDTESYDLGSGYGHIAIEVDDAYAACDMARAKGGKVTREAGPMKHGTTVIAFIEDPDGYKIEFIQKGSR

SEQ ID NO: 4871 - protein, 622 aa, Mycobacterium sp. KMS
MTAPATPTYPFSAIVGHDRLLLALLLCAVRPEIGGVLIRGEKGTAKSTAVRGLAQILSRVDGGALVELPIGATEDRVVGSLDLQKVLRDGEHAFSPGLLARAHGGVLYVDEVNLLHDHLVDVLLDAAAMGRVHIERDGISHTHESRFVLIGTMNPEEGELRPQLLDRFGLTVDVAASRDVDVRVEVIRARMAFEADPTGFADRHADLDAALARRVAEARALVPSVMLPDNELRRIAALCAAFDVDGMRADLVVARTAVAHAAWRGELTVGEEDIRVAAELALPHRRRRDPFDDPGLDPQRLDEAMEQAGESAETPDGDPDPEPPPDPPGGGVSGESPEPSRPQGNSSSAQTRSSGDPAAVFKTRTLVVPGVGEGAPGRRSRARNRTGTVVAATADAGTGHGLHVFGTLLAAAENQRVPGRPRPGVQDVRRSVREGQEGNLVVFVVDASGSMAARDRMAAVGGATLSLLRDAYQRRDKVAVITFRGREATLLLPPTTSVYIASRRLSRFDTGGKTPLAEGLLAARDVVVREKARDRARRCLVVVLTDGRATGGPDPLGRTREAAARLVAEGAAAVVVDCETSFVRLGLAEELATALRAPAVRLAHLRADDLTRLVTRTDRTAA

SEQ ID NO: 4872 - protein, 358 aa, Gibberella zeae PH-1
MASNSDAPPAAATEAVLVKSEEMPKDAQKVEELDFNKLKSPITAEDLFEGMRHMGFQASSMCEAVRIINDMRAWKDPETGDKTTIFLGYTSNLISSGLRGVLRWLVEHNHVSCIVTTAGGVEEDFIKCLADTYVGSFSTPGADLRRKGLNRIGNLVVPNANYCAFEDWVVPILDKMLEEQEASKGTEEEINWTPSKVIHRLGKEINDERSVYYWAYKNNIPVFCPAITDGSLGDMLYFHTFKSSPQQLKIDLVEDIRRINTIAVRAKRAGMIILGGGIVKHHIANACLMRNGAESAVYINTAQEFDGSDAGARPDEAVSWGKIKIGADNVKVYMEATACFPFIVANTFAKDIGKEDQK

SEQ ID NO: 4873 - protein, 156 aa, Sorghum bicolor
MKKGGAGIMVAVAVALVVLVAAASSSVARADVSCADVDANLRACVGYVTGKEAAPGGECCAGVRRIRGMPSGTAERRQACECVKQAAAGYQPLNADAIRDLPKQCGAPLPFPLTLNFDCTTRKRTHKHLRRSEKKIEKKKKERPKAPEAIRHNLTT

SEQ ID NO: 4874 - protein, 208 aa, Photobacterium sp. SKA34
AAKALSTRNDDPQAASRPWDKDRDGFVLGDGAGVIVLEEYEHAKARGAKIYAELVGFGMSGDAYHMTSPSADGSGGALAMEACIRDAGINADQIGYINAHGTSTPAGDVAETLGIKRAMGNAVDNVMVSSTKSMTGHLLGAAGSVESIITILSLVDQVVPPTINLENPGEGCDLDYVPGEARQANLEYALCNSFGFGGTNGSLLFKKM

SEQ ID NO: 4875 - protein, 488 aa, Geobacillus kaustophilus HTA426
MSITKPETTVLKNYIGGQWVASSGTETLEVPNPATGEVLARVPISTKEDVDQAVQAAKKAFATWKDVPVPKRARIMFSFHHLLNQHHEELAELVVQENGKAYKEAYGEIQRGIECVEFAAGAPTLLMGESLSNIAEEIDSEMFRYPLGVVAGITPFNFPMMVPLWMFPLAIVCGNTFVLKPSERTPILANKLAELFTEAGAPPGVLNVVHGAHEVVNALIDHEDIRAISFVGSQPVAKYVYERTAAQGKRVQALSGAKNHHIVMPDADVETAVQHVISSAFGSAGQRCMACSAVVIVGENETFVRRLKQKADELIIGNGMDPEVLLTPVIRQSHREKVLGYIQKGIEEGAVLLRDGRKEMDDRPEGNFLGPTIFDYVTPDMTIAKEEIFAPVLSLLRANDLDEALSYIRKSRYGNGATIYTKDAKAVRKFREEADAGMLGINVGVPATMAFFPFSGWKDSFYGDLHVNGKDGVNFYTRKKMITSRFDF

SEQ ID NO: 4876 - protein, 476 aa, Xanthomonas campestris pv. campestris str. ATCC 33913
MFKQLWATKHPHASHEAADGLGLQRALGPWGLTALGIGAVIGGGIFVITGQAAADHAGPAIVLSFVLAAICCAFCAMAYAEFAAMVPVSGSAYTYTYATFGELAAWFIGWMLVLEYGVSASAVAVSWTGYFLSLLEHFGIHLPAALVSAPLDGKLQRTGAIANLPAAGIVLLLTWLCYVGIRKSSAMNMAMVILKTGLIILVIAAGWKYVDPANWHPFIPANEAPGKYGMEGVLRGAAMVFFAYIGFEAVSVAAQESHRPQRDLPIGMMLSLVICTVLYIAMAAVMTGLVPFTQLGTDEPVVTAVAAHPQLAWLRVVVEVGALIGLSSVVLVMIIGQPRIFMIIARDGLLPAVFTRIHPKYRTPHINTVITGIGIALLAAVFPLDVLGELTSMGTLIAFAAVCAGVLILRRTHPELPRPFRMPAAWLICSAGVLSCLALLSAMTLHNWMLMGLWTLVGLVVYFGYGYRHSRLREGR

SEQ ID NO: 4877 - protein, 493 aa, Xanthomonas campestris pv. campestris str. ATCC 33913
MYRMLKSLLRVKPIEPAGRVDAGEPVEGSLQGEATLQRTLTAKHLIMLGIGAVIGAGIFVMTGQAAANHAGPAVMLSFVFAGIACTFAGLCYAEFAAMMPVSGSAYSYSYATLGEGIAWFIGWCLVLEYLFAGSSVAVAWSAYLISFITGTLGLPFPTELTNAPLAWINGEFVASGNILNLPAVLIVAAVSGLCYVGITQSAFINAIVVAIKIAVICLFVGFGAAYIDPANWHPFIPENTAPGVFGWSGVFRAASIVFFAYIGFDAVSTSAGETKDPQRNMPIGILGSLAVCTIIYIIVCAVLTGLMPYTQLGTAKPVATALEAHPQLTWLKTAVEIGAIAGLSSVVLVMLMAQPRIFYTMAKDGLMPKLFGKVHPKFHTPYVGTVIVGVVAASLAGLIPLSVLGELVSMGTLLAFATVCAGVMVLRFTKPELERPFRVPLAMIVCPLGTLACLALFFQAFQEHWKVFVGWTVIGLVIYFGYGIHHSRLARKA

SEQ ID NO: 4878 - protein, 363 aa, Neisseria gonorrhoeae FA 1090
MSHISPIPEILADIKAGKMVIITDAEDRENEGDLLMAAQFVTPEAVNFMIKHARGLVCLPMEGAMVEKLGLPMMTQKNGAQYGTNFTVSIEAAHGITTGISAADRALTIQTAVSPTAKPADIVQPGHIFPLRAQKGGVLVRAGHTEAGVDLAQMNGLIPAAVICEIINDDGTMARMPELMKFAEEHKLKIGTIADLIEYRSRTESLLEDMGDAPVQTPWGEFQQHVYVDKLSGETHLALVKGTPSADTETLVRVHEPFSVMDFIQANPRHSWSLPKALERVQQAESGVVILLHHTEDGASLLDRTLPKGANQAYKWDSKSYGIGAQILAGLHVKKLRVLGQPSSFTGLTGFGLEVVGFEEAEK

SEQ ID NO: 4879 - protein, 283 aa, Leptosphaeria maculans 'brassicae' group
HTFYNELRVAPEEHPVLLTEAPINPKSNREKMTQIVFETFNAPAFYVSIQAVLSLYASGRTTGIVLDSGDGVTHVVPIYEGFALPHAISRVDMAGRDLTDYLMKILAERGYTFSTTAEREIVRDIKEKLCYVALDFEQEIQTASQSSSLEKSYELPDGQVITIGNERFRAPEALFQPSVLGLESGGTHVTTFNPIMKCDVDVRKDLYGNIVMSGGTTMYPGISDRMQKEITALAPSSMKVKIIAPPERKYSVWIGGSILASLSTFQQMWISKQEYDESGPSIV

SEQ ID NO: 4880 - protein, 261 aa, Rhodospirillum rubrum ATCC 11170
MTVPPPLLESLTVDGVRTLTLNRPQARNALSKALMAALQDALDQAAEDPAVRVVVIAASGPVFCAGHDLRELRGEPNEAAHAALFAQCSRLMTTIVRLPKPVIARVQGLATAAGCQLVASCDLAVAARRASFATPGVTIGLFCSTPMVALSRAVGRKTAMEMLLTGRPLDAEEALARGLITQVVEEAELAAATDALARILAEKSPLTLAIGKEAFYQQIELPLDEAYAYASAVMTRNMQTKDAAEGIDAFLEKRPPRWTGQ

SEQ ID NO: 4881 - protein, 464 aa, Pseudomonas aeruginosa PAO1
MASERNNGILIGGKRPEYVHSAQGTGLRRILGLPALVFFGLVYMVPLTMFTTYGVVTEITGGRTASAYLITLAAMLFTAFSYSFMVKKYPIAGSAYSYTSLSFGPCVGFLAGWSLLLDYLFLPMINYLLIGLFLNIAFPMVPAWVFVLAAIGLVTVLNVIGISSVAGMSNVIVGAQFVFAVVFVAMAVKHLAGIPSLDLSLPFVGDGSQPGFAPLMAGAAVLCLSFLGFDAVSTLAEETRDPQRDIPRAIVITTVGAGLLFTVLAVFSQLVFPGSVFQDAESAANEVMLAAGGKFLASFFTAAYVAGAAGSALASQASVSRILYSMGRDGILPRRVFGSLSERFKTPVIAILVVSVISLLAVVIDLTTLASMISFGALVAFSAVNLAVIRSYLLLDGRRAPRDLLRYGLVPAIGLGLTLWLWTSLSALTLVIGLTWFAAGLAYLALHTGGFRRKAPTVTFSEQN

SEQ ID NO: 4882 - protein, 320 aa, Photobacterium sp. SKA34
MIKKIGVLTSGGDAPGMNAAVRGVVRAALTEGLEVYGIYDGYQGLYNNCIEKLDRQSVSDVINKGGTFLGSARFPEFREVEVREKAIENLKLYGIDALVVIGGDGSYMGAKKLTEMGYPCIGLPGTIDNDVAGTDYTIGYMTAMNTVIDAIDRLRDTSSSHQRISIVEVMGRHCGDLTLMSAIAGGCEYIITPETGLDKEKLLQHIREGIAKGKKHAIIAITELMTDVNELAKFIEAETGRETRATVLGHIQRGGQPTAFDRVLASRMGAYAVDLLQKGEGGRCVGIQCEQLVHHDIIDAIENMRRPVRNDLYELAEKLF

SEQ ID NO: 4883 - protein, 667 aa, Oryza sativa
MMDGAAPLLPETSPESRQQRDPERGKRRTPVLPAVVASAVVLLGLAALFLVYGFHDGGDGRAAVLAPGTVEVAASSSRGVVEGVSEKSTTPALRLGGGAVRDYAWTNSMLSWQRTAFHFQPPNNWMNGMYTRPLYYKGWYHLFYQWNPDSAVWGNITWGHAVSRDLIHWLHLPLAMVPDHWYDINGVWTGSATQLPDGRIVMLYTGATEESVQVQNLAEPADPNDPLLREWSKAEANPVLVPPPGIGLTDFRDPTTAWRNPADSAWRITIGSKDRDHAGLALVYKTEDFLHYDLLPTLLHVVKGTGMWECVDLYPVSTSPAVEDGLETSTPPGPGVKHVLKASLDDDRNDYYAIGTYDGETDTWTPDNADIDVGIGLRYDYGKFYASKTFYDPVGRRRVLWGWIGETDSERADILKGWASLQVSMIIFILNANENKGEKSIPRTVMLDTKTGSNLLQWPVVEVENLRMRGKSFDGLDVSPGSVVPLDVGKATQLDIEAVFEVDTSAADGVVTEAGAAAYSCGTGGGAVGRGLMGPFGLLVLADDQLSERTAVFFYLVKGVDGNLTTFFCQDELRSSKANDLVKRVYGSLVPVLDGENLSIRILVDHSIVEGFAQGGRTCITSRVYPTKAIYESAKIFLFNNATNVRVTAKSLKIWELNSAYIRPYVD

SEQ ID NO: 4884 - protein, 548 aa, Photorhabdus luminescens subsp. laumondii TTO1
MKNINPSQTSAWKALEQHFAQIKDIHLRELFEQDPDRFAKFSATFDDQILVDFSKNRITTETLKKLQALAKETDVAGAMRSLFSGEKINCTENRAVLHIALRNRSNTPMMVDGEDVMQQVNAVLAKMKDFSERVIHGEWKGYTGKGITDVVNIGIGGSDLGPYMVTEALKPYKNHLNMHFVSNVDGTHIAETLKALNPETTLFLIASKTFTTQETMTNAHSARDWFLKSAGDEGHIAKHFAALSTNGQEVKQFGIDTKNMFEFWDWVGGRYSLWSAIGLSIALSIGFENFEQLLSGAHAMDQHVANTPFEQNIPVLLALIGIWYNNFFGAETEAILPYDQYMHRFAAYFQQGNMESNGKYIDRNGHPVDYQTGPIIWGEPGTNGQHAFYQLIHQGTKLIPCDFIAPAISHNPLSDHHSKLLSNFFAQTEALAFGKSREQVDAEFATSGKTVVEVEHVAPFKVFEGNRPTNSILLREITPFSLGALIAMYEHKIFVQGAILNIFTFDQWGVELGKQLANRILPELKDDNRVVSHDSSTNGLINRFKAWR

SEQ ID NO: 4885 - protein, 166 aa, Striga asiatica
  misc_feature (99)..(99): Xaa can be any naturally occurring amino acid
VCVKSIKLFCSTTKMVNYWKSKVLPKIKKAFENPKKAAAAEACKAFDEAKEQYSKELDEKKTELQPKVVEIYEASSTEIKALVKEPKGSSVKKHSAAVXKFLDELAKIEFPGSKPVCEAATKVGPAYVVGPVSFVLEKVSTFVVVKEEEEEKKVEPPKTEPAAEEA

SEQ ID NO: 4886 - protein, 116 aa, Arabidopsis thaliana
  misc_feature (2)..(2): Xaa can be any naturally occurring amino acid
  misc_feature (15)..(15): Xaa can be any naturally occurring amino acid
  misc_feature (39)..(39): Xaa can be any naturally occurring amino acid
  misc_feature (92)..(92): Xaa can be any naturally occurring amino acid
  misc_feature (97)..(97): Xaa can be any naturally occurring amino acid
  misc_feature (106)..(106): Xaa can be any naturally occurring amino acid
  misc_feature (108)..(108): Xaa can be any naturally occurring amino acid
  misc_feature (114)..(114): Xaa can be any naturally occurring amino acid
MXSSMLSSAAVVTSXAQATMVAPFTGLKSSASFPVTRKXNNDITSITSNGGRVSCMKVWPPIGKKKFETLSYLPDLTDVELAKEVDYLLRNXWIPCXEFELEHGFXYXREHGNXSG

SEQ ID NO: 4887 - protein, 459 aa, Photorhabdus luminescens subsp. laumondii TTO1
MSAVSSQCPEIGGHVVAKFGGTSVANFDAMNNSADIVLANKAVRVVVLSASAGITNLLVALAAGCDADKRADYLKQIHSIQYAIIDRLHESDTIRQEIDRLLENIKTLAKAASLATSAALTDELVSHGELMSTRLFTELLRQRGKDAEWFDIRKVMYTDESFGRAEPNYEQLQSLATEHLLPQLKNSLIVTQGFIGREENGRTTTLGRGGSDYTAALLGEALGLKRVDIWTDVPGIYTTDPRVVPAAQRIDKIAFDEAAEMATFGAKILHPATLFPAIRCGIPVFVGSSKNPQAGGTLVCDTTEAPPQFRAIALRQKQTLLTLHSLKMLHAQGFLAEIFTILSRHNISVDLITTSEVNVALTLDTTGSTSTNGSLLTNALMTELSTLCRVEVEEDLALVAIIGNQLSQTNGLGKKVFSVLEKFNLRMISHGASNHNLCLLVQGKDAEQIVQTLHQRLFE

SEQ ID NO: 4888 - protein, 606 aa, Oryza sativa
LHRGGGRHRRRTHPPRLSSLGIFSSTPETTPKPNQISRRMAAAAVAANGGGDGAQASNAPAPTRLASVYSEVQTSRLKHALPLPSVLRSPFALADGPASSAAGNPGEIAKLFPNLFGQPSVSLVPSPEPASTRPLKVGVVLSGGQAPGGHNVICGIFDYLQEYAKGSVMYGFKGGPAGVMKCKYVELTADYVYPYRNQGGFDMICSGRDKIETPEQFKQAEDTVNKLDLDGLVVIGGDDSNTNACLLAEYFRGKNMKTRVIGCPKTIDGDLKCKEVPTSFGFDTACKIYSEMIGNVMTDARSTGKYYHFVRLMGRAASHITLECALQTHPNVALIGEEVAAKKETLKSVTDYITDIVCKRAELGYNYGVILIPEGLIDFIPEVQKLIAELNEILAHDVVDEAGAWKSKLQPESRQLFGFLPKTIQEQLLLERDPHGNVQVAKIETEKMLIAMVETELEKRKAEGKYPAHFRGQSHFFGYEGRCGLPTIFDSNYCYALGYGSGALLQCGKTGLITSVGNLAAPVEEWTVGGTALTSLMDVERRHGKYKPVIKKAMVELDGAPFKKFASLRDEWSLKNHYISPGPIQFSGPGSNDANHTLMLELGAEA

SEQ ID NO: 4889 - protein, 328 aa, Triticum aestivum
LEGAVALLTLPSCSQPPDTINGSLRVTVQGEVIEQSFGEEHLCFRTLQRFTAATLEHGMRPPISPKPEWRALLDEMAVVATEEYRSIVFQEPRFVEYFRLATPETEYGRMNIGSRPSKRKPSGGIESLRAIPWIFAWTQTRFHLPVWLGFGGAFKHILKKDIRNFHMLQEMYNEWPFFRVTIDLVEMVFAKGNPGIAALYDRLLVSEGLQPLGEKLRANYEETQKLLLQVAGHKDLLEGDPYLKQRLRLRDAYITTMNVCQAYTLKRIRDPDYHVAFRPHLSKEVMDTSKPAAELVTLNPGRVSYAPGLEDTLILTMKGIAAGLQNTG

SEQ ID NO: 4890 - protein, 283 aa, Phoma betae
HTFYNELRVAPEEHPVLLTEAPINPKSNREKMTQIVFETFNAPAFYVSIQAVLSLYASGRTTGIVLDSGDGVTHVVPIYEGFALPHAISRVDMAGRDLTDYLMKILAERGYTFSTTAEREIVHDIKEKLCYVALDFEQEIQTASQSSSLEKSYELPDGQVITIGNERFRAPEALFQPSVLGLESGGIHVTTFNSIMKCDVDVRKDLYGNIVMSGGTTMYPGISDRMQKEITALAPSSMKVKIIAPPERKYSVWIGGSILASLSTFQQMWISKQEYDESGPSIV

SEQ ID NO: 4891 - protein, 310 aa, Staphylococcus felis
GFGRIGRMVLRIALNREDIEVVAINASYPSETIAHLLKYDTTHGRFNQTVEATETGIKVEGKEIKLVSDRKPENLPWRDLGIDIVVEATGKFNHGDKAIAHIRAGAKKVILTGPSKGGDVQTIVKGVNDNTLDVDKYDIFSNASCTTNCLAPVAKLLNDEFCIKNGLMTTVHAVTNDQNNLDNPHKDLRRARAAFESIIPTSTGAAKALALVLPELEGKLHGMALRVPTKNVSLVDLVVDLNQSVTKDQVNQLFRDNNLDGVINIVDEPLVSISDDFTTDAHSAIIDAPSTIVMNDNKVKVSALVSITKC

SEQ ID NO: 4892 - protein, 459 aa, Arabidopsis thaliana
MEGENSSIEKGLLLIRKEESANTTPFLVFTTFIIVSASFSFGVALGHTAGTMASIMEDLDLSITQFSVFGSLLTFGGMIGALFSATIADSFGCKMTLWITEVFCISGWLAIALAKNIIWLDLGRFFVGIGVGLLSYVVPVYIAEITPKTVRGTFTFSNQLLQNCGVATAYYLGNFMSWRIIALIGILPCLIQLVGLFFVPESPRWLAKEGRDEECEVVLQKLRGDEADIVKETQEILISVEASANISMRSLFKKKYTHQLTIGIGLMLLQQLSGSAGLGYYTGSVFDLAGFPSRIGMTVLSIVVVPKAILGLILVERWGRRPLLMASAFGLCLGCISLALAFGLKGVPGVNVNVTPTLAFIGIMTFVMMFAAGLGALPWIIMSEIFPMDMKVVAGSLVSITNWFTGWIVSYCFNFMLLWSPTGTFIIFATISGATVVFAWCLVPETRGLTLEEIQRRAN

SEQ ID NO: 4893 - protein, 146 aa, Zea mays
  misc_feature (68)..(68): Xaa can be any naturally occurring amino acid
  misc_feature (93)..(93): Xaa can be any naturally occurring amino acid
KVQLERGQLLMVAPYLVKRKKQHFHHLEKYNVDLILGCNGFIWVGEHVVVGEKPKTTGGQQGFSTEAXNFTPLETRKHICRLANSVRVLSALXFTLTVELIIETMEASASSNVEINDMLGAEFYVQTAEREAKRRADLLRKKNDAR

SEQ ID NO: 4894 - protein, 444 aa, Geobacter sulfurreducens PCA
MIEELLVIFVLILGNGFFAGSELAIISARKGRIAQLVEAGDSRAQIVERLQNDPHRFLATVQVGVTVVGSLASAVGGAAAVQSVKPLLEAVPVDFIRHAAEPLAIGLAVVFISYLSLIFGELVPKTVGLQYADQMALRVAKPISSLAKVAGVVVSFLTISNKAVLAMMGIKAEGSQAFVTREEVQHIVAEGHEAGVFSATEQEYIRNIFDFTHTCVREVMVPRTRMVALDLARPRMELVREVLDNMYSRYPVYRESIENVVGFIHGKDLLGRTVTDPEFAMESIVRPPFYVPEGKKVNELLKEMQRLRIHMALVVDEYGGISGLVTTEDLLEELVGEIEDEHDIGEPGTVQRLPDGSLLVDALMSIGDLADLLKIKLEEDVPYDTLAGLILDQLGRFPERGETVEWDRFSLICEEVKQTAIVKVRIVENLPPQAGDEQYGTEHE

SEQ ID NO: 4895 - protein, 658 aa, Sorghum bicolor
MACLKLGSRADVFRKQGQEWYCTSGLPSDITVVVGEQSFHLHKFPLLSKSGLLEKRIREKIDKGDDSCTIDLSDIPGGAKAFELAAKFCYGVKFEMTASNVVHLRCAADYLEMTEEISEENLIAQTEYFLTQTVLRSWKDSVKALQTCDNVLEVAERLQIVKRCVDSIATRSCSDPDLFGWPVAQYGGPMQSPGGSLLWNGISTGARPRNSSPDWWYDDVSCLSLPLYKKLISAMEYRGISQEIIVGSLNHYAKRRLPGLNRRKSIGDVSNCLSMTSLTSIPSEDDQKYLLEEIDRLLPFQRGVTSCKLLFGLLRTAIFLKASPSCVSNLERRIGMQLDKASLEDLLIPNVSDSVETLYDVDCAQRILDHFLAMDQETGGASPGIGEDGQMLASPSLMPIMMVAKLIDGYLAEVAPDMNLKLPKFRSLAAAIPDYARPIDDGLYRAIDIYLKAHPHLSESEKEELCRVMDCQKLSLEACTHAAQNERLPLRIIVQVLFFEQLQLRSSIAECLMISEPLDGGGGVGPSRQLGGLPVSGEHHRGAGWPLAARENQTLREGMDSMKQRVAELEKECSAMREDIERLGRSRSASKSRFPFALTAKPVCSTKDKEAAPESSKSKAKAAATGSEDKLAVVKGGAATDGAAQPKHRKHKMNLSAC

SEQ ID NO: 4896 - protein, 507 aa, Roseovarius nubinhibens ISM
MAALDDVQVKEGVDQETVDAVREVGGAYKYGWNTDIEMEYAPKGLTPDIVRLISEKNEEPAWMTEWRLEAYERWLTKEEPDWAMVDYPEIDFQDQYYYARPKSMEVKPKSLDEVDPKLLATYEKLGIPLKEQMILAGVEGAEDAPAEGRKVAVDAVFDSVSVGTTFQAELKKAGVIFCSISEAIREHPELVKKYLGSVVPVSDNFYATLNSAVFSDGSFVYVPPGVRCPMELSTYFRINAENTGQFERTLIIADKGSYVSYLEGCTAPQRDTSQLHAAVVEIIIEEDAEVKYSTVQNWYPGDENGKGGIYNFVTKRADCRGDRAKIMWTQVETGSAVTWKYPSCILRGDDSQGEFYSIAIANNMQQADTGTKMIHLGKRTKSRIVSKGISAGRAQNTYRGLVSMHPKAKESRNYTQCDSLLIGSDCGAHTVPYIEVKNNSSRVEHEATTSKVDDDQMFYCRQRGMDEEEAVALVVNGFCKDVLQALPMEFAMEAQQLVAISLEGSVG

SEQ ID NO: 4897 - protein, 340 aa, Brassica oleracea
MKGLFKSKPRTPSDLVRQTRDLFLYAHGSISLPDSKRDEKMAELSRNIRDMKSILYGNSEAEPVAEACAQLTQEFFREDTLRLLITCLPKLNLETRKDATQVVANLQRQQVNSKLIASDYLEANLDLMDVLIEGFENTDLALHYGAMFRECIRHQIVAKYVLESEHVKKFFDYIQLPNFDIAADAAATFKELLTRHKSTVAEFLTNNEDWFFADYNSKLLESSNYITRRQAIKLLGDILLDRSNSAVMTKYVSSRDNLRILMNLLRESSKSIQIEAFHVFKLFVANQKKPADIVNILVANRSKLLRLLADLKPDKEDERFEADKSQVLREIAALEPQDLA

SEQ ID NO: 4898 - protein, 297 aa, Thiobacillus denitrificans ATCC 25259
MSILVDKDTKVICQGFTGKQGSFHSEQAIAYGTRMVGGVTPGKGGQTHLNLPVFNTVRDAVRETGAQATMIYVPAAFAADSILEAADAGIEVIVCITEGIPVLDMLQVKTALNVKAALKANGAKLIGPNCPGIITSGECKIGIMPGVIHQKGRIGIVSRSGTLTYEAVHQTTQLGLGQSTCVGIGGDPIKGLDFIDCLEMFEADPQTEAVILVGEIGGSSEEEAAEYIHTRMKKPVAAYIAGRTAPKGKRMGHAGAIIAGGAGTADAKIRALEAAGVVVAQSPAGLGEAVQLALGAR

SEQ ID NO: 4899 - protein, 199 aa, Triticum aestivum
MSPATSSAVGTLSGGLLPHDAHRRRPFPTARLLPPRWSRLQVNAARHRRPATPARAQSAPSPGYLPDSEFYKIEAILRPWRVSHVSSGLLEMGIRGVTVSDVRGYGAQGGSTERYEGSEFSEDTFIAKVKMEIVVCKEQVEPVIDKIIEKARTGEIGDGKIFLIPVADVVRVRTGERGVHAERMIGGLSDKLPPVITIS

SEQ ID NO: 4900 - protein, 112 aa, Thiobacillus denitrificans ATCC 25259
MKKIEAIIKPFKLDEVREALSEIGVTGLTVTEVKGFGRQKGHTELYRGAEYVVDFLPKVKLEVVVADNLVERVTEAVVNAARTGKIGDGKIFVTAVEQVVRIRTGESGEAAV

SEQ ID NO: 4901 - protein, 332 aa, Buchnera aphidicola str. Sg (Schizaphis graminum)
MTIKIGINGFGRIGRVLFRLAQERENIEVVAINDLLDPKYIAYMLKYDSTHGNFKKDIEVKNNNLIINGKKIRITSIKDPEKLMWDKLLIDVVIESTGLFLTKDTAYKHILSGAKKVVITGPSKDDIPMFVRGANFDKYKGEKIVSNASCTTNCLAPLSKVIDDHFGIIEGLMTTVHASTATQKIVDSASKKDWRGGRGALQNIIPSSTGAAVAVGKVLPNLNGKLTGIAFRVPTANVSVVDLTVRYKKTATYNEICEVVKNASEQKMKGILGYTEDEVVSTDFNGKELTSIFDAKAGLSLNKNFAKLISWYDNETGYSSKVLDLVELVALK

SEQ ID NO: 4902 - protein, 293 aa, Polaromonas sp. JS666
MFFTKPVILEWRPEIAYRLPLLPLPAAPFLTPVFTSSLSFPPDCHTMYKLVLIRHGESTWNLENRFTGWTDVDLTETGIQQAKDAGKLLKAEGYDFDLAYTSVLKRATRTLWHVLDEMDRTWLPVVNSWRLNERHYGALQGLNKAETAKKYGEDQVLIWRRSYDTPPPPLAANDERCERGDPRYAKLPPEQVPLTECLKDTVARVLPFWNESMAPAIKAGKRVVVAAHGNSIRALVKYLDNISDSDIVGLNIPNGIPLVYELDAQLRPLRHYYLGDSEAAARAVAAVSAQGKA

SEQ ID NO: 4903 - protein, 130 aa, Pyrococcus abyssi GE5
MDEKEFKRLLRVRARLKRKKPRFLRQEWWRYPKFKNDPKWRRPKGIDSKMRLKLKGKPRSPSIGWSSPRLVRGLHPSGYEEVLIHNVKELEKLDPKRQAARIAHTVGKKKRIEILKRAQELGIKVLNPQL

SEQ ID NO: 4904 - protein, 79 aa, Glycine max
MSEKGRPLPKFGEWDVNDPTSAEGFTVIFNKARDEKKTGGNPDSPGKTATDPHSKPAVEPGKTQTKKWFCCMQNPSAES

SEQ ID NO: 4905 - protein, 430 aa, Acidobacteria bacterium Ellin345
MVAALGGLLFGFDTAVISGATHALTEAYSLSPSLLGVTVSSALWGTVAGSLLAGIPADRIGRRDSLRFMAVLYLVSSLGCAFAWNWPALLVFRVIGGLGIGGSSVIGPMYIAEIAPAKWRGRLVGFFQFNVVFGILLAYFSNYLVGLGCFGANEWRWKLGIPAVPAALFLIMLFGIPRSPRWLVKKQRVPEARESLQLIGEEDYEKELHDIIESIDADHAQGDSLFDRKYLFPIFLAVSIGMFNQLAGINAILYYLNDIFAQAGFNKVSSDLQAVAIGGTNLLFTMLAMSIIDYVGRKTLLLIGAVGTALCLGGVAWIFHVHQHQGYLLWLLVVYIAFFAFSQGAVIWVYISEVFPNRVRAGGQSLGSSAHWIMNAIIAGVFPALAAKSGSIPFAFFAAMTAIQFFVVLFVYPETKGITLEAMQKKLGIS

SEQ ID NO: 4906 - protein, 161 aa, Photobacterium sp. SKA34
MEYNTSELCDIYLEHVDVVEPMFSSYGGRSSFGGQITTIKCFEDKGVIRQVLEQSGIGRVLLIDGGGSLRRALIDIDLAHLAQENEWEGLIIYGCVRHVDELDELDLGIQALASIPVGADQRDIGEIDVAVNFGGVTFLPEDHIYADNTGVILSPEPLDID

SEQ ID NO: 4907 - protein, 548 aa, Neisseria gonorrhoeae FA 1090
MKHLHDLPAWSKLWNHFDDSKTLHMREMFEQDPQRAERYWLQVGGLTLDYSKNRINDETMSLLFELAREAGVPERMRQMFHGEKINTTENRAVLHVALRNRTNSPIMVDGEDVMPKVNRVLQRMGEFAHEVRSGSWLGYTNQVITDVVNIGIGGSDLGPLTMCTALKPFGHPRLNMHFVSNVDGSQLRDVLSKVHPETTLFIIASKTFTTQETLTNALTAREWFLNHAGDEEAVAKHFAAVSTNRKAVAEFGIDIANMFEFWDWVGGRYSLWSAIGLPIMLYLGEENFIEMLNGAHLMDQHFINTPLERNLPVILALIGIWYINYYGGGSHVIAPYDQHLHRLPKFIQQLDMESNGKQVTLDGKAVGHETSPIIWGETGINGQHAFFQLLHQGTHITPIDLIASLEKRSNLPGHHEILLANVFAQAEAFMCGKTPDEVRAELKAQGMDEARIEELVPHKTFSGNRPTNLILMDKVNPRNMGSLIAMYEHKTFVQGIIWGINSFDQWGVELGKQLAKTILGELTGETEPQKHDSSTERLINLYLQTNRK

SEQ ID NO: 4908 - protein, 106 aa, Juglans nigra
LTLWKADLADEGSFDAAIDGSTGVFHVATPMDFESKDPENEVIKPTVNGVLSIMKACVQAKTVRRLVFTSSAGALDVSEHQRPVYDESCWSDVEFCRAKKMTGWMY

SEQ ID NO: 4909 - protein, 443 aa, Magnaporthe grisea 70-15
MSATFRSLAPFARTARFAFKKTGNPLVSLQQQSRSPVLNLRRGYAVYERTKPHVNIGTIGHVDHGKTTLSAAITKRQAEKGFANFLDYAAIDKAPEERKRGITISSAHIEYSTENRHYSHVDCPGHADYIKNMITGAANMDGAIIVVAASDGQMPQTREHLLLARQIGIQKIVVFVNKVDALDDPEMLELVEMEMRELLNSYGFAGDDTPVIMGSALCALNDKRPEIGQQKIDELLEAVDTWIPTPERDLDKPFLMSVEDVFTIGGRGTVVSGRVQRGILKRDAEIEIVGKSDEVVKTKVTDIETFKKSCEESRAGDNSGLLLRGVRREDIKRGQVIAAPGSIKAHKQFLVSLYVLTKEEGGRHTGFQENYMPQMYIRTASEACSLHWPEGTEDASSKMVMPGDNVEMTATLHSPIAVEPGLRINIREGGKTVATGLVTRILK

SEQ ID NO: 4910 - protein, 407 aa, Zea mays
MAAPTTSRRGPGGARNMDDENLTFETSPGVEVVSSFDQMGIKDDLLRGIYGYGFEKPSAIQQRAVLPIINGRDVIAQAQSGTGKTSMISLTVCQIVDTAVREVQALILSPTRELASQTERVMLAIGDHLNVQVHACIGGKSIGEDIRRLENGVHVVSGTPGRVCDMIKRRTLRTRAIKLLVLDEADEMLSRGFKDQIYDVYRYLPPELQVVLISATLPHEILEMTSKFMTEPVRILVKRDELTLEGIKQFFVAVEKEEWKFDTLCDLYDTLTITQAVIFCNTKRKVDWLTEKMRSNNFTVSAMHGDMPQQERDAIMGEFRSGATRVLITTDVWARGLDVQQVSLVINYDLPNNRELYIHRIGRSGRFGRKGVAINFVRKDDIRILRDIEQYYSTQIDEMPMNVADLI

SEQ ID NO: 4911 - protein, 444 aa, Borrelia burgdorferi B31
MMKIIIIGGTSAGTSAAAKANRLNKKLDITIYEKTNIVSFGTCGLPYFVGGFFDNPNTMISRTQEEFEKTGISVKTNHEVIKVDAKNNTIVIKNQKTGTIFNNTYDQLMIATGAKPIIPPINNINLENFHTLKNLEDGQKIKKLMDREEIKNIVIIGGGYIGIEMVEAAKNKRKNVRLIQLDKHILIDSFDEEIVTIMEEELTKKGVNLHTNEFVKSLIGEKKAEGVVTNKNTYQADAVILATGIKPDTEFLENQLKTTKNGAIIVNEYGETSIKNIFSAGDCATIYNIVSKKNEYIPLATTANKLGRIVGENLAGNHTAFKGTLGSASIKILSLEAARTGLTEKDAKKLQIKYKTIFVKDKNHTNYYPGQEDLYIKLIYEENTKIILGAQAIGKNGAVIRIHALSIAIYSKLTTKELGMMDFSYSPPFSRTWDILNIAGNAAK

SEQ ID NO: 4912 - protein, 283 aa, Phoma eupyrena
HTFYNELRVAPEEHPVLLTEAPINPKSNREKTTQIVFETFNAPAFYVSIQAVLSLYASGRTTGIVLDSGDGVTHVVPIYEGFALPHAISRVDMAGRDLTDYLMKILAERGYTFSTTAEREIVRDIKEKLCYVALDFEQEIQTASQSSSLEKSYELPDGQVITIGNERFRAPEALFQPSVLGLESGGIHATTFNSIMKCDVDVRKDLYGNIVMSGGTTMYPGISDRMQKEITALAPSSMKVKIIAPPERKYSVWIGGSILASLSTFQQMWISKQEYDESGPSIV

SEQ ID NO: 4913 - protein, 395 aa, Ostreococcus tauri
MAATPSTRGARGRHDAVRTLVTCPICLDPFSDAHCVATCGHTFCHACARATLDASASGGGERMAACPTCGSRFTNEQLVPNAAVNGMVAEMRRMLEEEEEKAAAGSIVADGADDLERLTPLVKKLSEKHRELVLESRAASREVLKEFLLESRARKEASAEALERELRCLSSDINAVRREIQLLGGGDDSEQLQDLLRSRGEVYDKEVITRAMEALGLTRVGDIVVDESKRRRVLRQFNELQSWYSRRRCLEKTDDEGAEPADDACPSDSETIEEFSKLIDTFKRFSNITMATELVTTEGGGTNTGSPISSIEFDSTEENFATAGVSKRIQFYNLERVLAGSRQPAEQIMTHSKLTCLSYNKLIRQHIAASDYEGVVSIWDVEKKRAIIDFEEHEE

SEQ ID NO: 4914 - protein, 448 aa, Borrelia burgdorferi B31
MVYRIKNENLDFKIDSLGECKQNNPLIDFYASEGSSHFVNEKNKIKFSVYRNEDKGDRYEDVLLEKAGPREKIYFVPRHVKAAITTCGGLCPGFNDVIRSIVRTLWKIYGVRNIYGVKFGYQGLLPESNSPFINLNPDVVDDINKFGGTILGSSRGGIKPVEIVDTLERMNINMIFNIGGDGTQKGSLLIAEEIEKRNLKIAVVGIPKTVDNDFMFVQKSFGFETAVEQAVAAVAGAHFEANSAYNGIGLVKVMGRDSGFIAAHTALSSNDVNFCLIPELDFDIEGPNGFLVHLERRLLEKESLEEIPHAVILIAEGAGQKYFDHFPKKKDDSGNLLYEDIGLYIKDKITEYFKAKNIQFTLKYIDPSYIIRSSPANASDSLYCARLGSNAVHAAMAGKTKMLISLWSTKFVHIPIKMAVIDRNKVNPNGSFWRDVLSSTGQPISMKN

SEQ ID NO: 4915 - protein, 112 aa, Pseudomonas stutzeri A15
MKLVTAIIKPFKLDDVRESLSEIGVQGITVTEVKGFGRQKGHTELYRGAEYVVDFLPKVKIDVAIADDQLDRVIEAITKAANTGKIGDGKIFVVNLEQAIRIRTGETDTDAI

SEQ ID NO: 4916 - protein, 112 aa, Yersinia pestis KIM
MKLVTVVIKPFKLEDVREALSSVGIQGLTVTEVKGFGRQKGHAELYRGAEYSVNFLPKVKIDIAIADDQLDEVIDVISKAAYTGKIGDGKIFVAELQRVIRIRTGETDEAAL

SEQ ID NO: 4917 - protein, 702 aa, delta proteobacterium MLMS-1
MRQKSGPSLYLLWIPFLLVAVTSLFSITFLSYQQRNSFYQYTGLQQEQQQLKTSVELTIARMMQGVVTRADGDYIIAAGNARDLMLKLAELEQRMCDDICTTPNCLTNIYRDFYRDLVTVVSLSHENRFREAADAMTSVRHQQQILTKEIDDITAIINIRHAADLKRLNLTFIAAGLLMTVVAVLNAWLIIPTLVIRPMQRVTDQAETANAAKSEFLANMSHEIRTPMNGVLGMTTLLMDTGLNREQRHLAGIIQASGEDLLRVINDILDFSKIEAGQLDLEVIDFDLQELVDNFAAAMAIPARAKNLALICELDPATPRFLRGDPGRIRQILTNLVGNAIKFTEQGEVALHFDATEQNSEHLTLRCRVRDTGIGIPADKRDRLFKSFSQADSSTTRQYGGTGLGLAIAKQLAEKMEGAISVTSVAGQGSEFTVTMVLGQQQQARQAAPSPLPPAADMRDLFGGSEARILLAEDNPTNQLVALGILKKLGLRADAVGNGEEAVEALKNRPYDLVLMDLQMPVLDGMEATRRIRNPDGGALNPAIPIIALTASALASDAEACFAAGMNGFVPKPIEPSVLATELQRWIGKALFDRSAILDRLDGDEELFQAVAASFVQEAANMIAALEEAEKSGDRAALQLHAHTLKGHFATFSCPDGQACAAELEQVAKEEKGEVAELVRLSAAHIRALSQALAEREKISKK

SEQ ID NO: 4918 - protein, 386 aa, Mycobacterium kansasii
  misc_feature (77)..(77): Xaa can be any naturally occurring amino acid
  misc_feature (192)..(192): Xaa can be any naturally occurring amino acid
MAPPHNYLAVIKVVGIGGGGVNAVNRMIEQGLKGVEFIAINTDAQALLMSDADVKLDVGRDSTRGLGAGADPEVGRXAAEDAKDDIEELLRGADMVFVTAGEGGGTGTGGAPVVASIARKLGALTVGVVTRPFSFEGKRRSNQAENGIQALRESCDTLIVIPNDRLLQMGDAAVSLMDAFRSADEVLLNGVXGITDLITTPGLINVDFADVKGVMSGAGTALMGIGSARGDGRALKAAEIAINSPLLEASMEGAQGVLLSVAGGSDLGLFEINEAASLVQDAAHPEANIIFGTVIDDSLGDEVRVTVIAAGFDSAGPSRKPVVSPSAAQTQPIASARAGKVTTSLFEPTDAVSVPAHTNGATVSVGGDGDGGIADDVVDVPPLMRR

SEQ ID NO: 4919 - protein, 417 aa, Pseudomonas stutzeri A15
MDSTALIPVQYGLDTFYFVICGALVMWMAAGFAMLEAGLVRAKNTAEILTKNIVLYALASIMYLLVGYYIMYSSPEGGIFPSLGFLIGDEHAVDLVAAGGEDAPYYSARADFFFQIVFAATCMSVVSGAVAERMKLWAFIAFAVVMTGFIYPIQGFWKWGGGFLDAAGFLDFAGSGVVHMAGAAAALAGVLLLGARKGKYGPNGQINAIPGANMPLATLGAFILWMGWFGFNGGSQLKMSTIEDANAVAQVFVNTNMGAAGGLIAALITARLLFGKSDLTMVLNGALAGLVAITAEPLTPSALQATLIGGVGGVLVVFSILGLDKLKLDDPVGAISVHGVAGMWGLLAVTADQCRRFFRQSSCLGLVSIFLWVFFASLIVWGIIKAVMGLRVSEEEEYEGVDVVECGLEAYPEFTRQ

SEQ ID NO: 4920 - protein, 556 aa, Magnetococcus sp. MC-1
MGKTFDSNRLKELTGHANPLEILNDPYMNKGVAFTEEERDLFHLRGLLPPRVQTMEAQLGRALDNFRCKPNDLEKYIFLTGLQERNETLFYRLVMTNIEEMLPIIYTPTVGKACQTYGHIFRRPQGMFISINDKGRIAELLGNWVHKDVRVIVVTDGSRILGLGDLGAHGMGIPVGKLALYTALAGIPPIHCLPVTLDMGTNNEALRNDPLYVGLPQPRVTGEIYDEMIEEFVLAVQEQFPRAMIQFEDFSNDNAFRLLEKYQDRICTFNDDIQGTAAVALAGILGALRITEADLCTQRYLFMGAGSAGFGIADLILRAMEQKGIPREQGLKQFRFMDSRGLVTRSRTDLRGRKSEFVCDDPPLTDLQQVVERFMPTVLIGVSGQPGVFHQGVVEAMARINPRPIIFALSNPTSKAECSAQQCYQWSDGRAIFASGSPFEPVTIAGQTFVSGQGNNAYCFPGIGLGVIMCEASRVTEEMFLVAAQTLAQMTAQSDLDQGRVYPSMQDIRAISLNIALAVVDLASKRGLAQRDLGEHAKERISAWMCNANYRNYANR

SEQ ID NO: 4921 - protein, 283 aa, Phoma herbarum
HTFYNELRVAPEEHPVLLTEAPINPKSNREKMTQIVFETFNAPAFYVSIQAVLSLYASGRTTGIVLDSGDGVTHVVPIYEGFALPHAISRVDMAGRDLTDYLMKILAERGYTFSTTAEREVVRDIKEKLCYVALDFEQEIQTASQSSSLEKSYELPDGQVITIGNERFRAPEALFQPSVLGLESGGIHVTTFNSIMKCDVDVRKDLYGNIVMSGGTTMYPGISDRMQKETTALAPSSMKVKIIAPPERKYSVWIGGSILASLSTFQQMWISKQEYDESGPSIV

SEQ ID NO: 4922 - protein, 343 aa, Candida glabrata CBS 138
MPAPTQPAPSYSKCYALKEIIYGFWATKVTYTPDKYPDLTGKTAVVTGCNTGVGKEAAKLLYQKNCNVIGVCRTESKGLEAAESIKQEIGNSKGSISVVSGCDFLDFTTVPQAGKRIQEILAGKPLNIIIHNAGLMSSSNAGTSKQGLEAMFQTNVMGPQLLQHYLDPVFLKEDDTSLKRIVWVSSGAHLLGPSQYGIFWENPGFDGVAIEKRPAATTLYGATKAANILQAKAWATRNKEMVDKIGCVSVSCYPGNLRTDLQRDWHPWTRATVGRLFYPAEYGAYTELYSVLSPSLTTSDQGKYICPFDQVHEPREDVKEGLQNGTDLALWDWIESEIKEYIS

SEQ ID NO: 4923 - protein, 429 aa, Streptomyces avermitilis MA-4680
MTTAPILYSTDNIEDFALDPVERAIADIAAGRPVVVVDDEDRENEGDLVIAAEKATPEIVAFMMSECRGLICAPMEGGELDRLQLPQMVDHNTESMRTAFTVSVDASGAHGVTTGISAADRATTLRLLAQGEAGAADFVRPGHIFPLRAKPGGVLVRNGHTEAAVDLARLAGLRPAGAIVEIAGEDGHMLRLPELIPFARKHGLTIISIEDLIAYRQSSEPTVRREAEVHLPTAFGEFTAYGYRSTVDGVEHVALVHGEIGDGEGVLVRVHSECLTGDVFHSLRCDCGPQLEASLERIRSEGRGVVVYLRGHEGRGIGLVSKLRAYELQERGRDTLDANLELGLPADARDYAAGAQILEDLGVRSLRLMTNNPDKTDALLRHGLKVTGREPMPVQAGEHNLRYLTTKRDRMGHDLPWLDTVPVSTCGNQ

SEQ ID NO: 4924 - protein, 283 aa, Phoma herbarum
HTFYNELRVAPEEHPVLLTEAPINPKSNREKMTQIVFETFNAPAFYVSIQAVLSLYASGRTTGIVLDSGDGVTHVVPIYEGFALPHAISRVDMAGRDLTDYLMKILAERGYTFSTTAEREVVRDIKEKLCYVALDFEQEIQTASQSSSLEKSYELPDGQVITIGNERFRAPEALFQPSVLGLESGGIHVTTFNSIMKCDVDVRKDLYGNIVMSGGTTMYPGISDRMQKEITALAPSSMKVKIIAPPERKYSVWIGGSILASLSTFQQMWISKQEYDESGPSIV

SEQ ID NO: 4925 - protein, 117 aa, Glycine max
MAVNKVTLVASVMACMLITCSYAESTLSCDQITIWLTPCIPYGVLGGNVSSLCCQGVYSLNAAYKSAEDRRGACQCIKDRAACIPGIDYTRVNQVGPRCGSKCPFKVYPSTNCSAVP

SEQ ID NO: 4926 - protein, 507 aa, Arabidopsis thaliana
  misc_feature (92)..(92): Xaa can be any naturally occurring amino acid
MVVEEENRSMEEGLLQHQNDRDDRRITACVILSTFVAVCSAFSYGCAAGYTSGAETAIMKELDLSMAQFSAFGSFLNVGGAVGALFSGQLAXVILGRRRTLWAGEFFCLLGWLSIAFAKNVFWLDLGRISLGIGVGLISYVVPVYIAEITPKHVRGAFTASNQLLQNSGVSLIYFFGTVINWRVMAVIGAIPCILQTIGIFFIPESPRWLAKIRLSKEVESSLHRLRGKDTDVSGEAAEIQVMTKMLEEDSKSSFSDMFQKKYRRTLVVGIAPLTAITRQLSAASGITYYSNAIFRKAGFSERLGSMIFGVFVIPKALVGLILVDRWGRRPLLLASAVGMSIGSLLIGVSFTLQQMNVLPELIPIFVFVNILVYFGCFAFGIGGLPWVIMSEIFPINIKVSAGTIVALTSWTSGWFVSYAFNFMFEWSAQGLYFLYYFFINLDKTIYQKKLRVIFIKIHKSNIKLFKNRVRILTFVSNSFRCAKCAGRKISFRFTFSSNSFSFCFLV

SEQ ID NO: 4927 - protein, 398 aa, Kluyveromyces lactis NRRL Y-1140
MSFNRDDDSKLKFKTSKKLKVSATFESMNLKPDLLRGIYFYGFEYPSSIQSRAISQIISGKDVIAQAQSGTGKTATFTIGLLQAIDSKSKELQALVLSPTRELASQSESVISNLGDYLNVTAHACTGGKALQQDIKKVSKNCQVVSGTPGRVLDMIKRQVLNVRNCKILVLDEADELLGETLGFKQQIYDIFTKLPPTIQVVVVSATMSKDILEITKKFMSDPVKILVKRDEISLDVIKQYYVDVEKEEWKFDTLCDLYDSLTITQCVIFCNTRKKVDWLSRKLTQTNFSVSSMHGDMKQEERDQVMNDFRSGKARVLISTDVWARGIDVQQISLVINYDIPDNLENYIHRIGRSGRFGRKGVAINFITKEERPKLKEIESHYRIKIKPTPANLEELS

SEQ ID NO: 4928 - protein, 371 aa, Alkalilimnicola ehrlichei MLHE-1
MAFNSIDEIIEDLREGRMAVILDDEDRENEGDLVMAASMVRPDDINFMARYGRGLICLTLTRERCEQLRLPLMVQDTEQAQSTNFTVSIEAATGVTTGISAADRARTVQAAVAPHAKPEDLVQPGHIFPLMAQPGGVLTRAGHTEAGCDLARLAGFEPSAVIVEILKEDGTMARRDDLMAFAREHNLKIGTVADLIAYRVRNERSVERVGECDLPTEHGIFHLYAYQDNVDNALHFALVKGRPQPDTPTLVRVHVQNTLSDVFASDGPHCGWPLRAAMRQVAEAGEGVVVVLRRRDDSDDILKRMRAYQVQASQADESEEARSSSDLRTYGLGAQILTDVGVRRMRVLSAPKRMHAISGFGMEVVEYVEPE

SEQ ID NO: 4929 - protein, 416 aa, Aspergillus nidulans FGSC A4
MAYDRSYNPEFPCCFGSWWNTVSGPERCWGRDNGGPDHPVITSRYEGIVKKLHFQADDTVPTGRALCDIEVDDAQYPEDHPPTESNAETSPPARTTIDSQPVPRPTTPLPASPAAEIPSNGAKGRYATLATPAVRGLLKQLNVNIEDVKGTGKDGRVLKEDIHRFVAMRDAPSATPSLSQDADTAVNLTHIQTQMFKTMTRSLTIPHFGYADELNINNITALRKKIANDKSDPRKITFLSFVVKAVSLALNDYPILNAKLDTSNADKPQLIMRPRHNIGIAMDTPQGLIVPNIKDVGSRSILDVAQEISRLSALGKEGKLTPADLSGGTITVSNIGNIGGTYVSPVLVPNELAILGIGRARTIPVFDDAGQVTKGEVVNFSWSADHRVVDGATMARMASKVKELIESPERMLLSLR

SEQ ID NO: 4930 - protein, 248 aa, Agrobacterium tumefaciens str. C58
MKPLRLLSTDLDGTVVGDNDATRRFRDFWHALPDDLRPVLVFNSGRLIDDQLALLEEVPLPQPDYIIGGVGTMLHAKKRSELETAYTQSLGTGFDPRKIADVMNRIAGVTMQEERYQHGLKSSWFLHDADAAALGEIEAALLAADIDARIVYSSDRDLDILPKAADKGAALAWLCGQLRIGLDESVVSGDTGNDRAMFELKTIRGVIVGNALPELVSLAHQDNRFFHSTAKEADGVIEGLRHWGLNPR

SEQ ID NO: 4931 - protein, 285 aa, Geobacter sulfurreducens PCA
MATIIDGKAIAEKIRADLAAQVKELQSRGITPGLATVLVGSDPASEVYVRMKGDACNKLGMHSVKITRPAETTEEELLALINELNNDPAIHGILVQLPLPPQINADRVLEAISPAKDVDGFHPYNVGRLVTGKPTFQPCTPYGVMVMLQEAGVDLAGKEVVVVGRSNIVGKPVALMCLQRNATVTICHSKTRDLPGRVRAADVVIAAVGVPEMIKGDWIKEGAVVIDVGVNRVGEKKLVGDVEFAAAAERASAITPVPGGVGPMTITMLLHNTLEAAKMAGSGNR

SEQ ID NO: 4932 - protein, 345 aa, Aspergillus oryzae
MQPSKTILVTGASGFVAAHIIEAFISAGYDVRGTVRSEATAEKVRRTFPRYGEQLSFAIVPDIVKDGAFDEAVKGVDGIMHTACPGATETDSNERDIVQPAISGTINILKSAQKHGLQVKRIVITSSFASMIDMSKGTWPGHTYSEKDWNPMTYEQAVSEGTSSVQAYLAAKKVAERAAWDFVRDENTSFDLVTILPPMIYGPNINATHVSQLNITSADIYRFMSPDSKPSDPIPDNGFWSWVDVRDVAQAHLKAYEVPEAGGERFFICAGNYSYQQIADILREKVPEVKDRVPIGKPGSGFGGVELYTPDAGKSQRILGLRYRGLEESAVDSAYAFLELEKHSN

SEQ ID NO: 4933 - protein, 470 aa, Rhodopirellula baltica SH 1
MPQITSRIGRRLGETRWMLRIWALNRNAIVFGNSSSPGSVIVAELAHHNLDIKRVAILFAGGPAPAANAVISTAAFSFLEEGAQVFGIKHGYSRLAEYTAAGPLQEGTDYIRFTHDSLTHARSSRGIMIGTARTNPGKHVSSPEHLKDPELVAPLRRVYEGLCSLEVDALISIGGDDTLKTANKLKMFQDNLPGDARRFPVVHLPKTIDNDYSGIDFTFGFFTAVETLAEEIRNLNYDAAAGRAYFLCEAMGRSAGWLAYGAAIAGEASMVLSVEDITGALADEEVVNQETGETRKIMAMDRVIDRMVDMMLAREREGRQYGTIVIAEGMAEYLPAKYLEGVTRDDHGHINISLVNLSAVMSRLLAARYNERTGRTRKVNGLQMGYESRCAPPHAYDVMLGSQLGVGAYRALVEEKLNGVMVSVSGQFDLHFVPFEELVDPQTLVTKVRFIEQNSDFHRLARFLETCVDN

SEQ ID NO: 4934 - protein, 357 aa, Zygnema circumcarinatum
MNTLASEETQRPIFPFTAIVGQEEMKLALLLNVIDPKIGGVMIMGDRGTGKSTTVRALVDLLPDIQVVADDPFNSDPYDPELMSEDVRSKIRHKEQLSIINTKISMVDLPLGATEDRVCGSIDIEKALTEGVKAFEPGLLAKANRGILYVDEVNLLDDHLVDVLLDAAASGWNTVEREGISISHPARFILIGSGNPEEGELRPQLLDRFGMHAQVGTVKDAELRVKIVEERSRFDQNPKSFRDAYNLAQDNLRQQIMQARERLPNVKIDYELRVNISKICAELNVDGLRGDIVTNRAAKALAALGNRDNVIPKDILTIIPLCLRHRLRKDPLESIDSGLLVKEKFSQVFGYVAKTAA

SEQ ID NO: 4935 - protein, 530 aa, Mycobacterium leprae
MACSVQMPALGESVTEGTVTRWLKQEGDTVELDEPLVEVSTDKVDTEIPSPAAGVLTKIIAQEDDTVEVGGELAVIGAPSEAAAAAPAPRPEPKAQPEPAASSQPAAPAQQPSGAATATPVLMPELGESVTEGTVTRWLKKIGDSVQADEPLVEVSTDKVDTEIPSPVAGVLVSITTNEDTTVPVGGELARIGVTLDSIATPAPAPRAESVPSRPTPARKEANGAPYVTPLVRKLATENNIDLAKVIGTGVGGRIRKQDVLAAAEQRKQQQAPTSAPSAAAPTPTPVLAHLRGTTQKVSRIRQITAKKTRESLQATAQLTQTHEVDMAKIVGLRAKAKAAFAEREGVNLTFLPFIAKAAIDALKIHPNINASYNEDTKEITYYDAEHLGFAIDTDKGLLSPVIHYAGDLSLAGLARAIVDIAARARSGNLKPEELSGGTFTITNIGSQGALFDTPILVPPQAAMLGIGAIVKRPRVVIDASGNESIGVRAICYLPLTYDHRLIDGADAGRFLTTIKHRLEEGAFEADLGL

SEQ ID NO: 4936 - protein, 230 aa, Buchnera aphidicola str. Sg (Schizaphis graminum)
MKTNKLVLIRHGQSKWNKLNKFTGWHDIELSDNGINEALKAGSLLKKEKFFFDYAHTSMLKRAIHTLRYILDTLDQSWLPVQKSWRLNERHYGALEGLNKDEMISKYGEEQVNLWRRSFEIIPPQIRLNDKRFPGNDIRYSNIDNNELPLGESLELTAKRVIPYWNKFILPQIKKRNRVLIVAHGNSLRALIQFLNKIDNKKILELNIPTATPIILEFNEEYNSIKWYYL

SEQ ID NO: 4937 - protein, 169 aa, Brassica napus
ICEEIGRGNFGTVTRVYAPATGDFLACKTIDKTSLTDALDRACIDTEPKLMALLSYHPNIIQIHDLVETDSTLSIYMELVDPSVSIYDRLVSSGTFSESQTASFAKQILLGLSHCHRYGVVHRDIKPENILVDLRNDTVKICDFGSGVWLGEGETTEGVVGTPYYVAPE

SEQ ID NO: 4938 - protein, 954 aa, Vibrio vulnificus CMCP6
MTELLQSLNTQHEFVGRHNGPNHADQQKMLSTINAESLDALIAQTVPAQIRLEKPMQLAEAQSEADMLASIKKFADLNQVKRTFIGQGYYNTFTPNVILRNVLENPGWYTAYTPYQPEISQGRLESLLNYQQMVMDLTGMDIANASLLDEATAAAEAMTLCQRAGKSKSKVFFVADDVHPQTIEVIKTRAKYFGFDVVIGNVDSLPQTEAFGALLQYPSTTGEVRDLTDVITQAQANKTLVSVATDLLASALVKPAGEMGADVVIGSAQRFGVPMGYGGPHAAFMATREQHKRTMPGRVIGVSIDAKGNQALRMAMQTREQHIRREKATSNICTAQALLANMASFFAVYHGEVGIRTIARRTHHMTAILAAGLTKSGYELAHNAFFDTITINTGDNTQALYAKAQAADINLRLLDGQIGISFDETTTVADIDALFAIFDVKESVNALSTDIAGNEFAAIPEACRRTSRFLTHPVFNTHHSETQMMRYLKQLENKDFSLTHGMIPLGSCTMKLNAAAEMIPVTWPEFGALHPFAPIEQAAGYTALAEDLKAKLCEITGYDAFSLQPNSGASGEYAGLIAIQRYHESRGEGHRNVCLIPSSAHGTNPATAAMVSMKVVVVKCDENGNIDLVDLAAKIEKHQENLSSIMITYPSTHGVYEEQVKEVCEMVHAAGGQVYLDGANMNAQVGLTSPGFIGSDVSHLNLHKTFCIPHGGGGPGMGPIGVKSHLAPFLPGHIENGVEGKEFAVSAADLGSASILPISWAYIAMMGADGLTEATKVAILNANYVMERLRPHYPVLYRGTNGRVAHECIIDIRPLKEETGISEEDIAKRLMDYGFHAPTMSFPVAGTLMVEPTESEDLEELDRFCDAMIAIREEMTKVKNGEWPLENNPLVNAPHTQVDLMEEQWDRPYPREIACFPSAATKRSKYWPTVNRVDNVYGDRNLVCSCPGIENYEE

SEQ ID NO: 4939 - protein, 320 aa, Buchnera aphidicola str. Sg (Schizaphis graminum)
MIKKIGVLTSGGDAPGMNAAIRGVVRTALSEKLEVFGIYDGYLGLYENRMTLLDRYSVSDMINRGGTFLGSARFPGFYKNEIRTIAVNNLNKRNIDALVVIGGDGSYIGAQKLTKMGIPCISIPGTIDNDVAGTDYTIGYFTALETVVEAIDRLRDTSSSHQRISIVEVMGRYCGDLTLAAAIAGGCEFIVLPEIHYKKEELVSEIQAGIEKGKKHAIVAITEYICDVEKLAKYIEKKTNRETRATILGHIQRGGAPVVYDRILASRMGAYAVELLIEGYKGKCVGIQNEKMVFNDITDALKNMKRVFKKDWLITAKKLY

SEQ ID NO: 4940 - protein, 321 aa, Pasteurella multocida subsp. multocida str. Pm70
MIKKIAVLTSGGDAPGMNAAIRGVVRSALAAGLEVYGIYEGYYGLYHNKVKQMTRYSVSDIINRGGTFLGSARFPEFKDPAVRAKCAEILRSHGIDALVVIGGDGSYMGAKLLTEEHGFPCVGIPGTIDNDVAGTDYTIGYQTALQTAVEAIDRLRDTSSSHQRISIVEIMGRHCSDLAISAGIAGGCEYIVASEVEFNREELIQQIERSIIKGKRHAIIAITELICDVNELAREIESRVKHETRATILGHIQRGGTPCAFDRILGSRMGVYAVDLLMQGKGGYCVGIQNEQLVHHDIIDAINNMRREFKADWLALSKRLD

SEQ ID NO: 4941 - protein, 322 aa, Oryza sativa
  misc_feature (213)..(213): Xaa can be any naturally occurring amino acid
  misc_feature (279)..(279): Xaa can be any naturally occurring amino acid
MNMCEKDQNFHWGYDLFRDPFAPIGYYGPPHGYGDGNYCDLHYARDASHLDETHLHSSALTYDLYNPSVGIYHPGNAGEHDHDTVYIEPTSSNSCPDTDDSFPMDEEVGKRFYPMVPVPHVPKINGEIPSVDEATMDHERLTERLRLYELVEHKVKGDGNCQFRALSDQLYQSPDHHEFVRQQIMSQLKSNRDAYDGYVPMAYDDYLEKVSQXNGEWGDHVTLQAAADKYGVKIFVMTSFKDTCYIEIQPKVQKSNKVVLLSFWAEVHYNSIYPQNGEXGPACHWHTMQCMSGLRRQHAPRSQTTRKRRWWPFSHNHHHHHH

SEQ ID NO: 4942 - protein, 403 aa, Zea mays
  misc_feature (12)..(12): Xaa can be any naturally occurring amino acid
MALLEARCVPTXEDTYALLLRAYCGSGQLHRAEGVISEMQRNGIPPTATVYNAYLDGLLKARCSEKAVEVYQRMKKERCRTNTETYTLMINVYGKANQPMSSLRVFREMKSVGCKPNICTYTALVNAFAREGLCEKAEEVFEEMQQAGHEPDVYAYNALMEAYSRAGLPQGASEIFSLMEHMGCEPDRASYNILVDAFGRAGLHQEAEAAFQELKQQGMRPTMKSHMLLLSAHARSGNVARCEEVMAQLHKSGLRPDTFALNAMLNAYGRAGRLDDMERLFAAMERGDGASAGAPDTSTYNVLVNAYGRAGYLDRMEAAFRSLAARGLAADVVTWTSRIGAYARKKEYGQCLRVFEEMVDAGCYPDAGTAKVLLAACSDERQVEQVTAIVRSMHKDAKTLFAL

SEQ ID NO: 4943 - protein, 590 aa, Desulfitobacterium hafniense Y51
MDIQGRVAKLRKLMADNGLAAYIIPSSDSHLSEYVADHFKSRQWISGFTGSAGTVVITLKDAGLWTDGRYYIQAEQQLRNSGIRLFKAADPQVPSYTEWLKENLPEGSTLGLDGHVFSAKQLRDMEKEWAGRITIKFDQDLVGQLWQDRPPIPARDIFIHDVSYAGRSRVEKLNDLRQQMKGKGANVHVLTALDDIAWLLNIRGADVPNNPVTIAHVLVTEDACTLCIAPGKVPAPVKAELERDGIQIKGYDAVAGLLQGLGGDDAVLIDPEFVNAILDHAIHPQAKKVEGTNPTTMLKAIKNEIELDNLKTSNIHDGVAMVRFIKWLKTTLGKEEITELSAEDTLETLRRANKECVGLSFDTIAGYKDHAAMMHYKATPEKAYTLRAEGFLLVDSGGQYFGGTTDITRTIVLGPLTEEEKRDFTLVLKGHIALATVKFLYGATGSNLDVLARQPIWKYGMDYKCGTGHGVGMFLNVHEGPQRLSQTPNTVKLEAGMILTNEPGIYKEGKHGIRTENMMVVRKAEETEFGQFMGFEALTYCPIDLAGVDQSLLTEEEQTWLDDYNQMVYTTLEPYLDAEEKAWLAQECGR

SEQ ID NO: 4944 - protein, 481 aa, Glycine max
MLDSATPHDKITTAASGFVLEDVPHLSAYIPHLQTYPDPLQDNPSYSVVAQYYVNVDDTIAQQIVVHKNSPRGTHFRRAGPAQKVYFDSEEVHACIVTCGGLCPGLNTVIREIVCGLYHMYGVHKVLGIQGGYPGFYSRNTVPLTPKVVNDIHKRGGSILGTSYGGHDTSKIVDSIQDRGINQVYILGGYGTQYEAAMIFEEVRRRGLKVAVVGIPKTIDNDIPVIDKSIGFDTAVEEAQRAINSAHVEAESAENGIGVVKLMGRYSGFIAMYATLASRDVDCCLIPESPFYLEGPGGLLEFIEKRLKEQGHMVIVIAEGAGQELLSGNPSIVNKPDASADKLFPDVGLWLSQKIKDHFEKRQKMAINLKYIDPTYMIRAIPSNASDNVYCTLLAQSAVHGAMAGYTGFTVGPVNGRNCYIPFHLINEGEKRVVITDRMWARLLSSTHQPCFLNPKEITGEREERTENQTTDGQNHSEIAD

SEQ ID NO: 4945 - protein, 531 aa, Acidobacteria bacterium Ellin345
MATTLTSRVEVRVPTKFSNEPLTDFSREDNARKMRSAIEKVRGELGREYDLIIGGKRIKLAKKLQSVNPSNPTEVVGVFQEAGAAEVEPAMQAALKAFETWSRTSWEERANLLFRVANMLQERKFEFSAWMVFEVGKNWVEADADVAETIDFAYFYALEALRLSQAKTPIQLPGEVNTLKYIPLGVGAVIPPWNFPCAIMAGMTMASIVCGNTVVLKPSSDSPAIAAKFMELLEEAGLPDGVVNFCTGGGRSFGGNVVNHPKTRYIAFTGSKEVGLDIHEHAAKTQPGQVWIKRTILEMGGKDSIVVDADADFDAAVEGVAQAAFGFSGQKCSACSRAIVDERIYDRFIGALRERVAKITVGDTTKNPGMGPVINESSMKKILGYVEKAQQEGGRLILGGVRDEEAGPGYFIKPTIIADVAPNATISQEEIFGPVLAVMKCRDFEEGVKIANNTEFGLTGAVYTGTQDKLDYAAQEYFAGNLYLNRKCTGAMVGAHPFGGFNMSGTDSKAGGPDYLLLFTQAKSIAEKVIR

SEQ ID NO: 4946 - protein, 445 aa, Mycobacterium leprae
MRRSKQGAEGKAEKKAARSAGVCRTTLPGGLRVVTEHLPAVRSASVGVWVGVGSRDEGATVAGAAHFLEHLLFKSTSTRTAMDIAQAIDAVGGELNAFTAKEHTCYYAHVLDSDLELAVDLVADVVLNGRCAVDDVELERDVVLEEIAMRDDDPEDALGDMFLAALFGDHPVGRPVIGTMESVSAMTRTQLHSFHVRRYTPERMVVAVAGNVDHDEMVALVREHFGSRLIRGRQSAPPRKSTGRINGGPALTLGKRDAEQTHVLLGVRTPGRSWEHRWALSVLHTALGGGLSSRLFQEIRETRGLAYSVYSALDIFADSGALSVYAACLPGRFADVMQVISEVLASVAGDGITEAECRIAKGSLRGGIILGLEDSNSWMSRLGRSELNYGKYRGIEHTLQQIDEVTVEQVNALAHQLLNKRYGAAVLGPYASKKTLPRQLRIMVN

SEQ ID NO: 4947 - protein, 254 aa, Methanococcus maripaludis S2
MDYLLISSETDPASQNLKKHVENYGYSVFNIEKKSTQTNYSEFPQSEMYIFLSKHASESKKPTLTVHTPGNLTDDNSHGGNPEEISPCNPVFNTLMLQNMNKYNEMEEYKELGFDVSFEVLHHGPTDLKAPSAFVEIGSSEEQWQIDDAAEIITNSLIDTLNSIQNSEYDEKEKIIGIGGGHYSPKFTKLALREEYYVGYLTPKHAKLSENILNQLTSKQEFDFIGIDWKGLYGEDKRKYVEFFDENDISWQRV

SEQ ID NO: 4948 - protein, 623 aa, Oryza sativa
MASISGAAAAAPSSSGASCGLRLRRDHLPRSSHFRLARPSSITDVSRSCSSSSSSPPRSLSSKQSGHADVLAHGAVDKDPIRLWNRYVEWLYQHKQLGLFVDVSRIGFTEEFLRRMEAPMGRAFAAMRELEKGAIANPDEGRMVGHYWLRNPALAPNSFLRDKIETTLERILAFASDVISAKIRPPSSPAGRFTQILSIGIGGSSLGPQFVAEALAPDNPPLMIRFIDNTDPAGIDHQIAQLGPELASTLVIVISKSGGTPETRNGLLEVQKAFRDAGLEFSKQGVAITQENSLLDNTARIEGWLARFPMFDWVGGRTSEMSAVGLLPAALQGIDIKEMLVGAAQMDEETRNTEIKENPAALLALCWYWASDGIGSKDMVVLPYKDSLLLLSRYLQQLVMESLGKEFDLDGNRVNQGLTVYGNKGSTDQHAYIQQLREGVHNFFVTFIEVLRDRPPGHEWELEPSVTCGDYLFGMLHGTRSALYANDRESITVTVQEVNPRAVGALVALYERAVGLYAYLININAYHQPGVEAGKKAAGEVLALQKRILLVLNEASCKDPAEPLTLDQIADRCHCPEEIEMIYKIIQHMAANDRALIAEGNCGSPRSIKVYLGECNVDDDMNS

SEQ ID NO: 4949 - protein, 155 aa, Pyrococcus abyssi GE5
MGRRFDYSFQNFDPERMARASGRDLRISPKLAVEVCRELRGMMLNDALRYLDDVIALRRPVPLKRYNDSQGHKPGKGFGPGRYPVKVAKAIKKVLLNAQNNAKQKGLDPDKLRIIHIAAHRGPVLRGWYPRAFGRPTPFNEQTTHIEVVVEEVRR

SEQ ID NO: 4950 - protein, 1089 aa, delta proteobacterium MLMS-1
MESLFPSPWPSRKADKMPLFNAPYRLTRRVLLWVLPPTILLLLLINTMALTLHQQSLEREIELRLVNLAESHHTLLRETLDALRGQGRFLAASDLVKNGLIDTEDRYRYLPILFRSLQNIAWSETRGRFALLDFQGVDIFSNELAGFPAAEREAAIGGSDFFTGREELMLFNQHGIIFLTPVLIHDFIEGWVEISLPGSEALQLFHSWEDDNPAMALLDRQGEVVFADTLHRRKRESDTSRPPAFSTTLPVKVAGLEGYQLEIIISRGRIDAGINELRRRLLFTIAGALLAVIAAIVLATRLTSRPLEQLGQRFKAIAAAPDLQTRLPGEGPLEVHQLTAAINQTLDQLERNYTDKTRLDQLMAGSPGVIYALDPETLHPHFVSGNTEELYGESNREIMATTDWWRQRVHPGDLAAATAETAAWLAAACPGNNIHRYRMVRRDGTQLWVEDRIKALRDSSGRIREIVGNHIDISARKKDEEKLREAKIAAEAANLAKSAFLANMSHEIRTPMNAIIGLSELTLQGELAAEQRDSLEKIHSSSQLLLGIINDILDYSKIEAGHLQLAPHPFRPARLVERLGHLFRQNAAAKGLELVYHLDPEIPPVLLGDELRLGQIFTNLLANALKFTRKGRVELRIQRLAAVAEAEADAAAAAVGLRCAVSDTGVGIDQEQRKRLFKPFSQADDTTTRKYGGTGLGLVISARLVEQMGGRLQLESEPGRGSTFFFTITLPQAGADAIDQEGKHFPPHPSAGQGVPDLTGKIIMVAEDNQLNREVAQRMLARTGAEILLADHGAQALELINSHDCDLVLMDLQMPVMDGFTAARLIRKQFPRLPIIALSAAAMEEDRQQALAAGMNDHMAKPIDSGRLYRTLSQLFATPPRREQTGPPTAASPSNILPPLEGFALQRGLNRFGGDDELYLQTLHLFALELGEKFADLAQRLAASDESSRWDLHTLKGTAALVGAERLAAVTAELYEGLRLGGIVSAERINELSRVQTAVAEQLAQLPVLLRKSAGLNPEQAAVAIAQLRQQLTDRQIVDRELLHQVADFLASRLGREQVTPLLEQVERFAYREAKVVLEQLDNLIGVEQ

SEQ ID NO: 4951 - protein, 436 aa, Geobacillus kaustophilus HTA426
MRKMDEKTLTLGLDALWVMLSAVLVIGMQAGFALLEAGSTRMKNSGHVAGKQILSFAIASLAFWAFGFAITFGAGNSFIGTEGWFLKEGKGTFDSLSWANVPLELKFLFQLGFAGVSLAIAWGGFAERAKLSVYFLFGTIFTIAIYPVIGHWVWGGGWLGKMGMQDFAGSTVVHLQGAIAALVATILLGPRIGKFNKDKTPNVIPGHNQVYTVIGGLILWIGWFGFNAGSTMAVGDGFFGYVALTTNLAAAAGAIAAIVTAKILVGKADIPAMVNGVLAALVAITAACAFVEPWAAVVIGAVAGSFTFWTSIYFERKGIDDPIYAFSVHGVAGIIGTISTGFFASPRLVEITGIGKAGLFYGGGFDQLIVQTVGVLGAAVYVAAVSFVILYALKKTIGLRVTAEQEISGLDISEHGSYGYPEQLDPAYQPKTLAQQ

SEQ ID NO: 4952 - protein, 876 aa, Photobacterium sp. SKA34
MNEKYSTLKSNVSMLGHLLGNTIKTAHGDELLDKVETIRKLSKSAHSGSEEDRAKLIDELQNLPDDQLLPVARAFSQFLNLTNIAEQYHTISRQCETTLCSPDALDELFNKLTDNDVNQLDSIEAVRELNIDLVLTAHPTEIARRTMIHKLVQINKCLSQLELSELSTSERARIEQRLEQLIAQAWHSDVIRQQRPTPIDEAKWGYAVIENSLWQAVPEFLRLFDEKLQQHLGEALPLDASPVTFSSWMGGDRDGNPFVTSNVTREVLALSRWKAADLYLNDIQELINELSMTQCNETVRELAGEEHEPYRAILKQLRTKLVHTRDNLDAKIHGQKPASDIVIEDIAELWGPLHACYQSLHECGMAIIADGLLLDTLRRVKCFGVHLVRLDIRQESTRHSDVISELTRYLGLGDYDQWSEQDKIAFLVRELSSKRPLLPRDWEPSAEVKEVIETCKTIAEQSREALGSYVISMARTASDVLAVHLLLQEAGCPFRMDVCPLFETLDDLNNGADVIEQLLNIDWYRGFIQNHQMVMIGYSDSAKDAGVMSAGWAQYSAMEKLVDVCEQAGVEITLFHGRGGSIGRGGAPAHAALLSQPPRSLKGGLRVTEQGEMIRFKLGLPEVAINSLSLYASATLEANLLPPPAPKQEWRELMDVLSEVSCEAYRNVVRVDPEFVPYFRAATPELELGKLPLGSRPAKRNPQGGVESLRAIPWIFAWSQNRLLLPAWLGAGEAIQYSINKGHAKLLEDMCREWPFFSTRLGMLEMVYTKTNTGIAKYYDERLTDESLWPLGQKLRDQLGKDIKAVLTVENNDHLMEQDPWGAESIRLRNIYVEPLNMLQAELLYRTRQQEELPSALEEALMVTIAGIATGMRNTG

SEQ ID NO: 4953 - protein, 272 aa, Mycoplasma pulmonis
MMKKLLSNELVQIKRAELKEKFSKLDQKVKFAIVLIGDNASSKIYVKKKIEFAQDIGVEAKLFHFEENVDFNLLKDAFKKIDKEYDGIILQLPVLHFDVNELLLMIDKNKDLDGLNPENEKAFYENRECIIPATARAIWTFLKFHKISVENKKVFVVGQSRLVGKPISQFLKNNNAIVRVFDKSTGLKGTEEADILIVATGVAQLIKAENIKENSILIDVGFSKINNKIYGDLDIESIKEKALKYTPPIGAIGPVTVLSLFENLYEIILKKK

SEQ ID NO: 4954 - protein, 366 aa, Bacillus coagulans
MKMKLAVLPGDGIGPEVMDAAIRVLKTVLDNDGHEAVFENALIGGAAIDEAGTPLPEETLDICRRSDAILLGAVGGPKWDHNPASLRPEKGLLGLRKEMGLFANLRPVKAYATLLNASPLKRERVENVDLVIVRELTGGLYFGRPSERRGPGENEVVDTLAYTREEIERIIEKAFQLAQIRRKKLASVDKANVLESSRMWREIAEETAKKYPDVELSHMLVDSTSMQLIANPGQFDVIVTENMFGDILSDEASVITGSLGMLPSASLRSDRFGMYEPVHGSAPDIAGQGKANPLGTVLSAALMLRYSFGLEKEAAAIEKAVDDVLQDGYCTGDLQVANGKVVSTIELTDRLIEKLNNSAAGPRIFQ

SEQ ID NO: 4955 - protein, 317 aa, Leuconostoc mesenteroides subsp. mesenteroides ATCC 8293
MSEELKEYDVVVIGAGPAGMTAATYASRANLSVLMLDRGIYGGQMNNTAEVENYPGFDSILGPDLAEKMYSSSTQFGAEYGFGSVESIEVEDYRKIIHTDMGTYAAKAIIIATGSEHIHLDVTGEDKYQGRGVSYCAVCDGAFFRDEDVLVIGGGDSAIEEGLYLTNLAKSVTVLHRRDKLRAQQIIQNRAFDNSKMKFEWHTEVVAITGDDDKVTGVDVINNQTNEKRHIDASGVFIYVGLKANTQGFENLNITDPEGWIVTDDKMQTSIPGVFAVGDVRVKDLRQITTAVGDGSLAGQGVYDYISSLPATEKIAE

SEQ ID NO: 4956 - protein, 309 aa, Geobacillus kaustophilus HTA426
MRNIVVGSRRSKLALTQTKWVINELKQLGAPFTFEVKEIVTKGDRVLDVTLSKVGGKGLFVKEIEHELLAGGIDMAVHSMKDMPAVLPEGLVIGAVSRREDARDVLVSKGNRMLSDLPPGSVIGTSSLRRSAQLLAYRPDLTIKWIRGNIDTRLAKLESEEYDAIVLAAAGLARMGWGDDVISDYLPFDVCVPAVGQGALAVECREDDDELRQWLSRLNDEQTERAVRAERAFLQQMEGGCQVPIAGYAEVKEGTVRLTALVASPDGKEMYKEIVTGADPEAVGRQAAAILSEQGAKALIERVKKELGD

SEQ ID NO: 4957 - protein, 826 aa, Shewanella sp. MR-7
MSISRREFLKANAAVAAATAVGVTLPVKMVEAAESDNIKWDKAPCRFCGVGCSVLVGTKAGKVVATKGDPESPVNRGLNCIKGYFLSKIMYGKDRLTTPLLRMKDGKYHKEGEFTPVSWDVALDTMAAKWKHSIATKGPTSVGMFGSGQWTIWEGYAASKLHKAGFLTNNIDPNARHCMASAVGGFMRTFGIDEPMGCYDDLEAADHFVLWGANMAEMHPILWARLSDRRLSHKDSRVHVLSTFENRSFDLADNPMVFRPQSDLVILNFIANYIIQNKAVNTDFVTKHTKFALGVDDIGYGLRPDHPLEKKAKNPGNGKSSPISFEEYAKFVSTYTLEYAAKMSGVEPEKLETLAKAYADPKVKVMSLWTMGINQHVRGVWANNMLYNIHLLTGKIATPGNSPFSLTGQPSACGTAREVGTFAHRLPADMVVANDAHRAITEKVWQVPEGTIPPKPGFHAVLQSRMLKDGKLNCYWTMCTNNMQAGPNINDEIYPGFRNPENFIVVSDPYPTVTAMAADLILPTAMWVEKEGAYGNAERRTHMWHQQVKAPEGAKSDLWQLVEFSKRFKVSEVWPAELIAKQPEYADKTLYEVLFANGVINKFPTTDCKGDLNDESAHFGFYLQKGIFEEYAAFGRGHGHDLADFDRYHETRGLRWPVVEGKETLRRFVEGSDPYVKAGEGYKFYGKPDGKAVIFALPYEPAAEEPNEEYDLWMSTGRVLEHWHTGSMTARVPELYRAYPDAQIFMHPEDAKARGLQRGDEVLVASPRGEVKTRVETKGRNKPPRGVVFMPFFDARQLVNKLILDATDPLSKETDFKKCPVKVMKA

SEQ ID NO: 4958 - protein, 108 aa, Alkalilimnicola ehrlichei MLHE-1
MSGQIVHATDQNFEDEVIKAGEPVLVDYWADWCGPCKMITPILDEVASEYAGKLKVVKLNIDENPETPPKYGIRGIPTLMLFKNGGVEATKVGALSKSQLTAFIDSNL

SEQ ID NO: 4959 - protein, 250 aa, Glycine max
ARVFLTSPAGARTATVMPRRAAVIVSAATAETPKKKGESKGFVEEMRFVAMRLHTRDQAREGEKEVKQPEEKAVTKWDPSVEGYLKFLVDSKLVYDTLEKIVQEAPHPSYAEFRNTGLERSASLAEDLEWFKEQGYTIPEPSSPGLTYAQYLKELSVKDPQAFICHFYNIYFAHSAGGRMIGKKVAEKLLNNKALEFYKWDDDLPRLLQNVRDKLNKVAEPWSREEKDHCLEETEKSFKLSGEILRLILS

SEQ ID NO: 4960 - protein, 589 aa, Populus trichocarpa x Populus deltoides
MESTLKEMRDGASVLDMDPKSTVGGGVEDVYGEDRATEDQLVTPWTISVASGYTLLRDPHHNKGLAFTEKERDAHYLRGLLPPTTISQQLQEKKLMNTIRQYQLPLQKYTAMMELEERNERLFYKLLIDNVEELLPVVYTPTVGEACQKYGSIFKRPQGLYISLKEKGKVLDVLKNWPQKSIQVIVVTDGERILGLGDLGCQGIGIPVGKLSLYTALGGVRPSACLPVTIDVGTNNEQLLKDEFYIGLRQRRATGQEYSELLHEFMTAVKQNYGEKVLIQFEDFANHNAFDLLAKYGTTHLVFNDDIQGTAAVVLAGLISALKLIGGSLADHTFLFLGAGEAGTGIAELIALEMSRRSKTPLEETRKKIWLTDSKGLIVSSRKESLQHFKKPWAHEHEPVKGLLEVVKAIKPLVLIGTSGVGKTFTKEVIEAMASFNEKPLILALSNPTSQSECTAEEAYTWGKGKAIFASGSPFDPVEYEGKVFVPGQSNNAYIFPGLGLVISGAIRVHDDMLLAAAEALAGQIKEEYLAKGLIYPPLSNIRKISVQIAANVAAKAYELGLATRLPRPENLVKHAESCMYSPAYRYYR

SEQ ID NO: 4961 - protein, 417 aa, Oryza sativa
MAEGAKFHGIVGAVGAHDVGGNFCDMGYYQKLGEGSNMSIDSLNSMQTSIYGGSVAMSVDNSSVASSDSRTGMLKHPGLRGPVIVSSYSVGNSIFRPGRVSHALSDDALAQALMDSRFPTETLKDYEEWTIDLGKLHIGMPFAQGAFGKLYRGTYNGGDVAIKLLERPEADPEKAQLLEQQFVQEVMMLATLRHSNIVKFVGACRKPMVWCIVTEYAKGGSVRNFLNRRQNRSVPLKLAVKQALDVARGMAYVHGLGFIHRDLKSDNLLISGDKSIKIADFGVARIEVKTEGMTPETGTYRWMAPEVIQHRPYDQKVDVYSFGIVLWELVTGNLPFANMTAVQAAFAVVNKGVRPAIPHDCLPALAEIMTRCWDANPDARPPFTEVVRMLEQVEMEVVNTVRRARFRCCISQPMTLD

SEQ ID NO: 4962 - protein, 249 aa, Glycine max
ARASPAVAGGVRAAVMPRRTAVIVSAATAETPKKKGESKGFVEEMRFVAMRLHTRDQAREGEKEVKQPEEKAVTKWNPSVEGYLKFLVDSKLVYDTLEKIVHEAPHPFYAEFRNTGLERSASLVEDLDWFKEQGYTIPEPSSPGLTYAQYLKELSVKDPQAFICHFYNIYFAHSAGGRMIGKKVAEKLLNNKALEFYKWDGDLPQLLQNVRDKLNKVAEPWTREEKDHCLEETEKSFKLSGEILRLILS

SEQ ID NO: 4963 - protein, 336 aa, Rhodobacter sphaeroides 2.4.1
MQRKRTLINDATLREGNQASGVRFSVHDSVAIATALDGIGVDMIEIGHPLAGPYEHQRTEAVAKLGLGAKIIAHARAHRTDIEAVSRTGATWVGIFLGVNDITTKARVIGRSTTELIRMVADAVKVAKDCGLNIRYSCEDASRTNTLFLVDVFGAAIDAGADRICYADTLGIAEPAEVARKVTLMKSEFPDAEVEVHLHDDRGLAMANSLAAIDAGVDSISVSVNALGERCGITDLATLLVNLGFRGERALPDISELRALSRLVAMSSNTPFDALRPIVGDNAFKHGSKLHQRATQYEPRAYDWIKEFIYRHDQQAVGQAPGEEPSAPDQTVSEIS

SEQ ID NO: 4964 - protein, 563 aa, Crocosphaera watsonii WH 8501
MDAIQTIIPQFDSIDAALADIKAGRAIIVVDDENRENEGDIICAAQFATTNLINFMAVEARGLICLAMNGKRLDELDLPLMVTKNTDSNQTAFTVSIDASPHLGVSTGISAEDRARTIQVAINPNTQPEDLTRPGHVFPLRAKAGGVLKRAGHTEAAVDLARLAGLYPAGVICEIQNPDGSMARLPELLEYAKKHNLKLITIADLISYRLRHDRFVYRETVCQLPSQFGTFQLYAYRNVLDETEHVAIVKGDPSEFKDHPVMVRVHSECLTGDGLGSLRCDCRMQLQTALQMIEKEGSGVVVYLRQEGRGIGLINKLKAYSLQDMGLDTVEANEKLGFPADLRDYGMGAQILNDLGVKKIKLVTNNPRKIAGLKGYGLEVVERVPLLIEPNTYNSSYLSTKAQKLGHLFLRTFLITIAIDWEETPVTITERYEKLQQVRELSRSMQLLLQEEARPVAIALFEQPSLIFHLGFEQVKMVDDNWHRNQNHPYGQAIISILDNLAAWDNIKRLEFLISSGDDPMSGLQGQLKRYPFSLDTKPSQCTLPWKRQTIYSFSDEQWAITA

SEQ ID NO: 4965 - protein, 500 aa, Rhodopirellula baltica SH 1
MRNQQSTQLLFELSRAGRRAHRLGDLDVPSVNVDELFADEALAETPPPLPELAEGDVVRHFVGLSTLNMSVDTHFYPLGSCTMKYNPKRNERIASLPGFLNVHPLQHESGLQGLLELLYELQGMFAEISGLPGVSMQPAAGAHGELAALLVAAAYFREQGSDRNVVLTADSAHGTNPASAQMAGFKTKTVKSNANGLVDLEDLKAKLDDKTAVFMLTNPNTLGLFDRQIEEINKLVHDAGALIYLDGANMNAILGITRPGDFGADLMHYNPHKTFSGPHGGGGPGAGPICVRDFLAKYLPGPIVTRVENENASGDDDRYTYHLTSPSDDSIGRVRSFFGNTGVLVRAYIYLRTYGGDGLRHVSEDAVLGANYLLSKVKHFLDVPHGDRCMHEFVASATRLKKEKKLSAMDIAKRILDYGFHAPTVYFPLVVDEAVMVEPTETESKQTLDAFVEALFRITEEGEELIHDAPHSTRISRPDDVTAARRPILKWTDAAGESAT

SEQ ID NO: 4966 - protein, 410 aa, Lactobacillus plantarum WCFS1
MTERVVVTGMGAVTPLGNSVDEFLTGLFAGQVGIKPITKFDATPTGITVAGEVKDFQPEERIEKKLAKRLDLFSVYGLYSASEAMAQAGLNEANIDPERLGVIYGSGIGGLTTIEAQVIKMHDKSPKRVSPLFVPNSIINMVVGNIAMQFNAQNTSQAIVTACASATNAIGDAFEYLRQGKADVIITGGSEASVNEIGIAGFASLTALSKATDPTLASLPFDRQRNGFVMGEGGATLVLETLAHAQARGAQILGEVVGYGTTSDAYHMTAPRPDGAGAKRAMQQAVAEAGIQPRDVDYINAHGTATHANDSAEAQAISALFGQDVQVSSTKGMTGHLLGAAGAIEAVATIGALQAGQLPANIGCTDQDPECPVNLVTPATQHQAATYALSNSFGFGGHNAVVAFKKWVNV

SEQ ID NO: 4967 - protein, 481 aa, Rhodopirellula baltica SH 1
MPLIKNSVPKQVDRMSYLFHTDEDRREMLKSIGANSIDEIINDQVPEAVRMKRPLDLPPACNELALTAEMTRLAARNASADSHVCFLGGGAYDHFIPAAVDEIASRGEYYTSYTPYQAEVSQGNLQVMFEYETLVTQLTGLGVSNASLYDGGSAATEAVLMALSMQRGRNKVITTDVVHPQYRDILVAYLKNIDAELVVVPSDENGHSKPMIDAIDDKTACVLIQHPNFVGQLESVSEIAAAAKEAGALTIQVFDPVSLGRLKRPGDMGVDIAIAEGQSLGNPLAYGGPYLGIMACRDELVRRLPGRIAGQTTDRRGKRCWVLTLQTREQHIRREKATSNICSNQTLLALRATVHLSLLGPEGLKETADHCIAKTAYAKEVIAKSDRFEIVGEGPSLKEFVVRDLGADVDGLLAHARDNGLLAGIDMTPMCVGGAEATDASIALPSRYEQCFLVAVTEKRSRVEIDRWAKVLCEAPAMATV

SEQ ID NO: 4968 - protein, 429 aa, Mycobacterium sp. KMS
MDDTTVRRTTLPGGLRVVTERIPSVRSASVGVWVNVGSRDEGPTVAGAAHFLEHLLFKSTPTRTAVDIAQAVDAVGGELNAFTAREHTCYYAHVLDADLELAVDLVADVVLRGRCAVEDVEVERDVVLEEIAMRDDDPEDTLGDVFLSAMFGSHPVGRPVIGSVESIEAMTRNQLHSFHVRRYVPERMVLAVAGNIEHDDVVAMARKYFGPRLIRGQSAVPPRKGTGRVPGRPTLQLINRDAEQTHLSMGVRTPGRHWDHRWALAVLNTALGGGLSSRLFQEIRETRGLAYSVYSTVDTFSDSGALSIYAACQPERFDEVVRVTTAVLENVARDGITESECRIAKGSLRGGLVLGLEDSGSRMHRIGRSELNYGKHRSIDHTLEQIGAVTRDEVNAVARQLLTRSFGAAVLGPHRTKSSLPKPLQTVGR

SEQ ID NO: 4969 - protein, 166 aa, Medicago truncatula
MALVTTAEVCDANPQLILSGELRALQPIFQIYGRRQVFSGPIVTLKVFEDNVLVREFLEEKGNGRVLVVDGGASLRCAILGGNPVVQAQNNGWAGIIVNGCIRDVDEINGCDIGVRALGSHPMKANKKGMGEKHVPITIAGTRIGDGEWLYADTDGILISRTELSV

SEQ ID NO: 4970 - protein, 161 aa, Thinopyrum intermedium
MSDTDEHHFESKADSGASKTYPQQAGAIRKGGFIVIKARPCKVVEVSTSKTGKHGHAKCHFVAIDIFNGKKLEDIVPSSHNCDVPHVTRLDFQLIDITDDGYVSLLTESGSTKDDLKLPTDDALLAQIKAGFADGKDLILSVMSAMGEEQICAVKEVGGGK

SEQ ID NO: 4971 - protein, 316 aa, Francisella tularensis subsp. holarctica
MANHHKLIILGSGPAGYTAAIYAARANLKPVIITGMQPGGQLTTTTDVDNWPGEPDGIIGPELMEKLQKQAERFDTQIVYDTINAVDLQNKPFKLVGEVEQYTCDTLIIATGATAKYLGLESEEKFMGKGVSACATCDGFFYKNKDVAVVGGGNTAVEEALFLSNIAKSVTLIHRRDTLRSEKILIDKLMEKAQHGNINIIWNTTLEEVLGDDMGVNALRIKNIKTNEESQIDVAGVFIAIGHTPNTSIFAGQLEMENGYIKVKSGLAGDATQTNIKGVFAAGDVADHVYKQAVTSAGTGCMAALDAEKYLDNLDQ

SEQ ID NO: 4972 - protein, 319 aa, Buchnera aphidicola str. Sg (Schizaphis graminum)
MELKNHKKIIILGSGPAGYTAAIYSSRANLNPLLITGINKGGQLMNTNEIENWPGDFKKITGPELMNRMHEHSLKFKTEIVYDNIISVEFKKKPFFLLGEYNKYTCDAVIIATGANPRYLGLSSENKFKGKGISTCAVCDGFFYKNKEIAVVGGGNTAIEETLYLSNFVKKIYLIHRRNNFKAEKILIDRLLKIVKTKKVILHLNSTIEDILGNNKGVTHLLIKNKNLKEKKKLKIAVSGLFVAIGYIPNTDIFTDQLKMKDGYIKIKKGTHGNYTQTNIPGVFAAGDVIDHVYRQAITSSASGCMAALDSERYLNSLS

SEQ ID NO: 4973 - protein, 229 aa, Aeropyrum pernix K1
MEAVRLEMLDEAPDPQASAVIVLSKHRAESGRKSLTVHHPGNPTEDNSLGGRPMELAVAYPALAKALLISLAKASRETGLAESYEVTLEATHHGPTTPSKPVVFAELGSTEEDWRNPLGWETLALAVEEAIKTLPQIERECIPAAGFGGTHYVPKHTRLQLESGYCIGHTIPRYAFDRGVTAEVLKNAILKSYPGPARVALVEKKSLKSPQRRMVEEASEEAGAKVEYI

SEQ ID NO: 4974 - protein, 659 aa, Aeropyrum pernix K1
MGAGTMGHGIAELAAIAGFKVYLADINIDILNNALQRIRWSLEKLAEKGRIRESVETVMSRITPIVSVRDGEYSEDLAKALSESDFMIEAIPEKLELKQQLFAFADKHAKETAILASNTSSLPITEIAAATSRPEKVVGMHFFNPPVLMPLVEVVKGEKTSEETVAATVDLAKKMGKQTVVVKKDVPGFIVNRILGRLMESACLLVERGGYTVVQVDATAKYLLGLPMGVFELADYSGIDVFYYVFEAMSRRGFRSAKCSIFEEKFKAGEYGVKAGKGIYSYPAPNKYVKPNIPREEAKVDPLLLMALPINEAAWLLREDVATREDIDKAVKLGLGWPKGVFEYADEFGLDRVVEALERIKRDFGVDHAEPDPLLKKMVEEGRIGRKAGKGFYEYGEVEEKKMETLLVRVEKPIAWIVLNRPDKLNAISPKMIMELSQALDELEERSDVRAVILTGAGRAFSAGADVTAFAQVTPIDILRFSRKFQELTLKIQFYTKPVIVAIKGYALGGGLELAMSGDIRIASEDAMLGQPEINLGFIPGAGGTQRLARLAGPARAKELIMTGDMIPASDAEKMGIVNRVVPPELLEQEASSLALKLAEKPPIALAAAKYAIDFGLESNIWAGLQLEASLFSVLFSTEDVIEGVTAFLEKRKPKFKGR

SEQ ID NO: 4975 - protein, 229 aa, Wolbachia pipientis
LEELQKYVDTLIVIPNQNLFRIANEKTTFADAFQLADNVLHIGIRGVTDLMIMPGLINLDFADIETVMSEMGKAMIGTGEAEGEDRAISAAEAAISNPLLDSVSMKGAQGILINITGGGDMTLFEVDAAANRVREEVDENANIIFGATFDQAMEGRVRVSVLATGIDSCNNSSSVNQNKIPAEEKNFKWPYNQIPILETKEYASTEQTNERVKWGSNVYDIPAYLRRKK

SEQ ID NO: 4976 - protein, 161 aa, Secale sylvestre
MSDTDEHHFESKADSGASKTYPQQAGAIRKGGHIVIKARPCKVVEVSTSKTGRHGHAKCHFVAIDIFNGKKLEDIVPSSHNCDVPHVDRQDYQLIDITDDGYVSLLTESGNTKDDLKLPTDDVLLGQIKTGFADGKDLILSVMSAMGEEQICAVKEIGGGK

SEQ ID NO: 4977 - protein, 124 aa, Synechococcus sp. PCC 7002
MASLYEKLGGAAAVDLAVEKFYGKVLADERVNRFFVNTDMAKQKQHQKDFMTYAFGGTDRFPGRSMRAAHQDLVENAGLTDVHFDAIAENLVLTLQELNVSQDLIDEVVTIVGSVQHRNDVLNR

SEQ ID NO: 4978 - protein, 507 aa, Oryza sativa (japonica cultivar-group)
MGSTGDCGNGKAAAGGGGLVVPEIKFTKLFINGEFVDAASGKTFKTRDPRTGDVLAHIAEADKADVDLAVKAAREAFEHGKWPRMSGYERSRVMNKLADLVEQHADELAALDGADAGKLLTLGKIIDMPAAAQMMRYYAGAADKIHGESLRVAGKYQGYTLREPIGVVGVIIPWNFPTMMFFLKVSPALAAGCTIVVKPAEQTPLSALYYAHLAKLAGVPDGVINVVPGFGPTAGAALSSHMDVDSVAFTGSAEIGRAIMESAARSNLKNVSLELGGKSPMIVFDDADVDMAVSLSSLAVFFNKGEICVAGSRVYVQEGIYDEFVKKAVEAAKNWKVGDPFDAATNMGPQVDKVQFERVLKYIEIGKNEGATLLTGGKPTGDKGYYIEPTIFVDVKEEMTIAQEEIFGPVMSLMKFKTVEEAIEKANCTKYGLAAGIVTKNLNIANMVSRSVRAGTVWVNCYFAFDPDAPFGGYKMSGFGRDQGMVAMDKYLQVKTVITAVPDSPWY

SEQ ID NO: 4979 - protein, 217 aa, Escherichia coli CFT073
MNQTLLSSFGTPFERVENALAALREGRGVMVLDDEDRENEGDMIFPAETMTVEQMALTIRHGSGIVCLCITDDRRKQLDLPMMVENNTSAYGTGFTVTIEAAEGVTTGVSAADRITTVRAAIADGAKPSDLNRPGHVFPLRAQAGGVLTRGGHTEATIDLMTLAGFKPAGVLCELTNDDGTMARAPECIEFANKHNMALVTIEDLVAYRQAHERKAS

SEQ ID NO: 4980 - protein, 362 aa, Arabidopsis thaliana
MAMSAIGFEGYEKRLEVTFFEPGLFLDTQGKGLRALAKSQIDEILQPAECTIVSSLSNDQLDSYVLSESSLFIFPYKIVIKTCGTTKLLLSIEPLLRLAGELSLDVKAVRYTRGSFLCPGGQPFPHRNFSEEVSVLDGHFAKLGLSSVAYLMGNDDETKKWHVYSASSANSNNKNNVYTLEMCMTGLDKDKASVFYKNESSSAGSMTDNSGIRKILPQSQICDFEFEPCGYSMNSIEGDAISTIHVTPEDGFSYASFEAVGYDFTTMDLSHLVSKVLTCFKPKQFSVAVHSTVAQKSYDSGLSVDLDDYGCKESTMESLGEERGTVMYQRFEKLGRYCGSPRSTLKCEWSSNSSCNSEDEKE

SEQ ID NO: 4981 - protein, 532 aa, Borrelia burgdorferi B31
MFMLNYKNLNELENFKILEGIAPEVLKTALTGKRIKEYDITIEGDSVHYNYASKQINETHLKIFQNLSDEANLIEKYKEVLDGEKINISENRKVLHHLTRGQIGKDVIEDNKENMREFFQSELEKIYNFAKQIHSGNIKSSNGKKFKNVVQIGIGGSSLGPKALYSSIKNYAKKHNLALMNGYFISNIDPDESEEVLSSINVDETLFIIVSKSGNTLETKANMQFLINKLKLNGIKEYKKQMVIITLKDSMLAIEEKGYLEYFFMHDSIGGRFSPTSAVGLTLLTLCFTEKVAKEILKGANEADKKSLNKNVKDNASLLAALISIYERNVLNYSSNCIIAYSKAMENFYLHLQQLEMESNGKSVNRFNETINYKTVRIIWGGIGTDVQHSFFQMLHQGTDIVPMDFIGFNETQLKEDVISDNSSSNDKLKANLIAQIIAFSKGKENSNKNKNFQGERPSALIYSKELTPYAIGAILSHYENKVMFEGFLLNINSFDQEGVQLGKIIANQILKNDNFKDEVIESYSKKILKKF

SEQ ID NO: 4982 - protein, 644 aa, Mycoplasma gallisepticum R
MLLFIPLTFTRMAKNTNSTPKNKTASKAKNISQLSLKQRLELAKKQEKTPAKKLVNKKTETVSKTKKTAKPTKVEKPVSEKKLSVATKAKSEKVVVEQPKAKTTVKKVKAAPTKKEVVLKDKKAKAEPKSVAKEEKKNKLSLKSAKKSTKKKVTSKKDENLDLNNEIDFADFDNKDDEIDFSDFKHENYSSAFKETDFSEQDELDDKEFNLSDFFSDSKLDIDQPITAQKRQRGRKPKHAPSNEKNDLVYHEVLEASSKTKNNDQESIRATKTLLAKAKATKSLSNEEIIDVFKNYEFTEAEDLEILEELKDNKIKLEDNVEEKISLFRKNQDLSEIDKNLDDLISKGASTKDKVEDNVKAFLGTLGSSKILNFGEEIQIAKLLGSTDPETREYAINQLVTSNLRLVTSIAKKYLNRGLDFVDLIQEGSIGLMKAISKFNYKLGNKFSTYATWWIRQAITRAIADQARTVRIPVHMVETINKLIKTERMLTQQLGRDPTLEELTEAMGGQVNGFTPKKVADIKKLNQEPVSLDKPIGHDEESQFVDFVKDRDILKPDEYTEKLIVTEHINELFINTLTKKEEQIIRMRYGLHPWHQQMTLEEVGQKFNVTRERIRQIESKALRKLKHPSKNARLRSFLKHDSEN

SEQ ID NO: 4983 - protein, 266 aa, Pseudomonas syringae pv. phaseolicola 1448A
MNSALYSGWISHRRFAPRAHEFTYRIGLLYLDLDEQDSVLGLSPLAGSKRFAPFSFRERDYLPALTGQGMSLIEAVREQVGKALGRVPSGRVCLLTQARSWGLSFNPVSFFYCHEADGTLAGILCEVTNTPWGERYSYVLPATGEGHQYFAVAKAFHVSPFLPRDLEYRMSFSQPAERIGVHMADWQGELKMFDATLNLTRQNLSRQTLHRYLIAYPWMTAKTCLAIYWQAMRLLVKRIPIFSHQAADGEYRAAAAQTKDSRHEKQ

SEQ ID NO: 4984 - protein, 164 aa, Glycine max
MAAYREPMNMNMSDRAPVSPQQPHSPWHSPVPYLFGGLAAMLGLIAFALLILACSYWKLSGYLEGNGETERDLEAGETEQDQKPAKPYEEKILVIMAGQEKPTFLATPSVSSSCSTSRTSSFGDNTSTCTCEENRKSLEMAVKEGSAAGTGTTETAHTSSDQNL

SEQ ID NO: 4985 - protein, 299 aa, Sinorhizobium meliloti
MTTVIDGKNVAASVIETVKSATSALESETGVRAGLAVVIVGDDPASHTYVSAKSRMAKECGFLSVQHTLPEETSQEELAALVAELNADPSIHGILVQLPLPKHLRSEPIIQSILPEKDVDGLHVVNAGKLATGDLEGGLVSCTPAGAMVFVRRTYGDDLSGLNAVVIGRSNLFGKPMSALLLAANATVTTAHSRTKDLAAVCRNADILVAAVGRPEMVKADWVKPGAMVVDVGINRVPAPERGEGRTKLVGDVAFDECAKVAGVITPVPGGVGPMTIAMLMANTIIAACRMAGRKPPKF

SEQ ID NO: 4986 - protein, 309 aa, Bacillus subtilis
SRKKMGLLVMAFGTPYKEEDIERYYTHIRRGRKPEPEMLQDLKDRYEAIGGISPLAQITEQQAHNLEQHLNEIQDEITFKAYIGLKHIEPFIEDAVAEMHKDGITEAVSIVLAPHFSTFSVQSYNKRAKEEAEKLGGLTITSVESWYDEPKFVTYWVDRVKETYASMPEDERENAMLIVSAHSLPEKIKEFGDPYPDQLHESAKLIAEGAGVSEYAVGWQSEGNTPDPWLGPDVQDLTRDLFEQKGYQAFVYVPVGFVADHLEVLYDNDYECKVVTDDIGASYYRPEMPNAKPEFIDALATVVLKKLGR

SEQ ID NO: 4987 - protein, 922 aa, Oryza sativa
MAASTSQHALVSVKSLCTGANFGFEKRTSKVRFVLVGRCCSGTRKLGLVCASNSHSSVMEPAQLPLSPESGNTPKKSSESALILIRHGESLWNEKNLFTGCVDVPLTPKGVDEAIEAGKRICNIPVDVIYTSSLIRAQMTAMLAMMQHRRKKVPIVVHSESEQAHRWSKIYSEETKKQSIPVITAWQLNERMYGELQGLNKQETADRFGKEQVHEWRRSYDIPPPNGESLEMCAERAVAYFKDQIVPQLVAGKHVMIAAHGNSLRSIIMHLDKLTSQEVISLELSTGIPMLYIFKEGKFIRRGSPAGPSEAGVYAYTRALFPPASEEFSSVEHTVYPPICHKEVAKHTIHWMSNHNSPCDIPKPASVDEFVKNGKKKKSFMSSIFRKKGRSGTGSSDKKLLSRRDIVFDRHCATKIESLTLSCLDSPHRQFDTREYRVFVGTWNVAGKPPNSSLNLEDFLQIEGLPDIYVLGFQEIVPLNAGNVLVIEDNEPAAKWLGLIYQALNKPQDQSSGDELSPPETSDSRQGGGSGSRDSIPKSSSGGMLFFQKPSLKMLSKNYRVDSALVKTCTCLTDPSTMQRRAREMREFLYRIEASPPPSLASAAAAADEDGGPDAGGELARSSVNYCLIASKQMVGIFLSVWVRRELVQYIGHLRVDSVGRGIMGRLGNKVLDAVLLCLCSLFGSLDSWRRHGWLSCLQGCIAMSMTLHQTSVCFVCSHLASGEKEGDEVRRNSDVAEIIKSTQFPRICKVPGQRIPDKILDHDRVIWLGDLNYRVALSYDETKTLMGENDWDTLLEKDQLMIERQAGRVFKGWKEGKIYFAPTYKYKQNSDSYAGETAKSKKKRRTPAWCDRILWHGQGIEQLQYIRGESRFSDHRPVCSVFVIEADVDNGSMIRKGYSTLDSRIHFESPIPQRHSFYDDF

SEQ ID NO: 4988 - protein, 184 aa, Sorghum bicolor
HEAEAPPVAKWEPSVEGYLRFLVDSKLVFQTLEDIVERAAVPWYAEFRNTGLERSEALKKDLEWFRQQGHTIPEPSPPGTTYASLLEELSEKDPQAFICHFYNVYFAHTAGGRMIGKKVSEKILNKKELEFYKWEGNLSQLLQNVRNKLNEVASSWSREEKDHCLEETEKSFAYSGGLLRHIFT

SEQ ID NO: 4989 - protein, 432 aa, Magnetococcus sp. MC-1
MTIEFAHTDDLEARIKVIGVGGGGGNAVNNMIQSHLEGVEFIVANTDAQALTKSLAPTRIQIGEDITRGLGAGAKPEVGKNAAMETEARLRQAIEGADMVFITAGMGGGTGTGAAPIIARISKELGILTVAVVTKPFHFEGKRRMRQAEEGLEELRDHVDTVITIPNQKLMAAVGKNTTILDAFRKADDVLQQAVRGITDLITHPGHINVDFADVCTVMEEMGQAMMGAAEASGEGRAMTAINNAISSPLLDDASIHGARGVLVNITGGYNLTLQEVDEAVMVVRDMAHEDANIVFGTTLNENLDDTVRVTVVATGIGQSDKMAFPAQETTFTETVAPQPHAPAARQAPSARQAAPAYHQQAAHSTQHPAYQQQPSQPQTAVDYAAQAKVVDNSYVRQMRQERQERQRRNVDGVHGGHEDFDVPTFLRRQMD

SEQ ID NO: 4990 - protein, 309 aa, Bacillus subtilis
SRKKMGLLVMAYGTPYKEEDIERYYTHIRRGRKPEPEMLQDLKDRYEAIGGISPLAQITEQQAHNLEQHLNEIQDEITFKAYIGLKHIEPFIEDAVAEMHKDGITEAVSIVLAPHFSTFSVQSYNKRAKEEAEKLGGLTITSVESWYDEPKFVTYWVDRVKETYASMPEDERENAMLIVSACSLPEKIKEFGDPYPDQLHESAKLIAEGAGVSEYAVGWQSEGNTPDPWLGPDVQDLTRDLFEQKGYQAFVYVPVGFVADHLEVLYDNDYECKVVTDDIGASYYRPEMPNAKPEFIDALATVVLKKLGR

SEQ ID NO: 4991 - protein, 464 aa, Bacillus halodurans C-125
MDRKETAKLMENVMTELSEKEGFLGIEDDEKRKRIVLSAQEILTTTDKIIKSYIRVSTEHGIMRIPAYRVQHNNISGFYKGGIRFSEFVSEEEVENLAILMTLKNALHRLPFGGAKGGVHVDPRKYSEKELNLISKKYVQRFARDLGPNHDIPAPDLGTNEQVIDWMVGEFKTIHPGQAYLGSFTGKSVENGGARGRREATGKGTFLSYIWLLSQWYDEHVSGNGINRTKQWETISNLKQQADNSDPIRVAVQGFGNVGSVAALEAYQCSEIAHRVVAVSDRYTTLYNEKGLDVRALAAYTIGGKDLPKNSEELAAAGVEASVLPVDAVLTCETDVLILAAIENQIHERNMKQVNARVLVEGANAPISTEADDYFEAAGTVVIPDILANAGGVIVSYLEWKQSRITELYSEDDILDEMGTQMKETLKSVYERYFSSVGHTLRFTCFTLALERLTSLLYKHGKLY

SEQ ID NO: 4992 - protein, 467 aa, Thermoanaerobacter tengcongensis MB4
MRKEEIREIDFSIYNIKDEVEYEFQTGKGLSKEVVLEISEQKGEPSWMREFRLKALEIYEKMPMPTWGVDLSQLDINSIVAYIRPSARKKTSWEEVPEEIRRTFERLGIPEAEKKALAGVGAQYDSEVIYHNMKESLARQGVIFEDMDTALKKYPDIIREYFMTKNVLPTDHKFAALHAAVWSGGTFVYVPEGVKVEVPLQAYFRMNAPGSGQFEHTLIIADRGSEVHFIEGCSAPLYSVSNLHAGCVELFVKEGARIIYSTIENWSKNTYNLNTKRAIVERDGMVEWISGSFGSKKTMLYPASVLVGKGAKAEYTSITFAAKGQHLDTGAKMIHLAPYTSSKILAKSISKDGGISTYRGLLKVGPEAEGVKASVTCEGLMLDDISKSDTIPVIDIENDNVDIGHEAKVGRISEEQIYYLMSRGLNEEDARAMIVRGFVEPIAKALPLEYAVEMNRLIKLELEGAIG

SEQ ID NO: 4993 - protein, 328 aa, Sorghum bicolor
GTRLIAAAASAVAPPPPRRVVAPLRSLSTRRPGILALTVTCCSPSPPPPVVAAEAPAPAPPQEAKPKPKPRRYPKQYPGESVGVAEEMRFVAMRLRNPKRTTIKDKAGTENADAGASEDEDEEEEEEEQEEEDGGGGVKEEHEKEEEGELEAGEWMPSMEGFVRYLVDSKLVFGTIERVVAESTDVAYVYFRKSGLERSASISKDLEWFRKQGIAIPEPSTSGSTYAAYLTELAESNAPAFLSHYYNIYFAHITGGVAIGNKICKKILEGRELEFYKWDTDAELLLKDAREKLNELSKHWTRKDRNLCLKEAAKCFQYLGKMVRLIIL

SEQ ID NO: 4994 - protein, 228 aa, Fusobacterium nucleatum subsp. nucleatum ATCC 25586
MKLVLIRHGESAWNLENRFTGWKDVDLSPKGMEEAKSAGKILKEMNLVFDVAYTSYLKRAIKTLNIVLEEMDELYIPVYKSWRLNERHYGALQGLNKAETAKKYGDEQVHIWRRSFDVAPPSIDKNSEYYPKSDRRYADLADSDIPLGESLKDTIARVLPYWHSDISKSLQEEKNVIVAAHGNSLRALIKYLLNISNEDILNLNLVTGKPMVFEIDKDLKVLSSPELF

SEQ ID NO: 4995 - protein, 306 aa, Trifolium repens
MMNFPIISLERLNGVERKDTMAKIKDACENWGFFELVNHGIPHDLMDTLERLTKEHYRKCMEQRFKELVSSKGLDAVQTEVKDMDWESTFHVRHLPESNISELPDLSDEYRKVMKEFSLRLEKLAEELLDLLCENLGLEKGYLKKAFYGSRGPTFGTKVANYPQCPNPELVKGLRAHTDAGGIILLFQDDKVSGLQLLKDDEWIDVPPMRHSIVVNLGDQLEVITNGKYKSVEHRVIAQTNGTRMSIASFYNPGSDAVIYPAPELLEKETEEKTNVYPKFVFEEYMKIYAALKFQAKEPRFEALKA

SEQ ID NO: 4996 - protein, 371 aa, Geobacillus kaustophilus HTA426
MGNYRIAVLPGDGIGKEVTSGAVEVLKAVGIRFGHEFTFEYGLIGGAAIDEAGTPLPEETLRLCRESDAVLLGAVGGPKWDDNPPHLRPEKGLLAIRKQLDLYANLRPVVCYDSLVSASPLKPDLVQGVDFVIVRELTGGIYFGQPSGRVVENGEEKAVDTLLYKKEEIERIVRMAFILARGRKKKVTSVDKANVLSSSRLWREVAEEVAKQFPDVTLEHMLVDNAAMQLIRAPKQFDVIVTENMFGDILSDEASMLSGSLGMLPSASLSASGPSLYEPVHGSAPDIAGMNKANPIAAILSAAMMLRLSFGLTAEAEAVEHAVRQALDQGLRTADLAPSGGRIVSTNEMVEEIKTAVLDYTAIAQIMTVYA

SEQ ID NO: 4997 - protein, 366 aa, Bacillus coagulans
MKMKLAVLPGDGIGPEVMDAAIRVLKTVLDNDGHEAVFENALIGGAAIDEAGTPLPEETLDICRRSDAILLGAVGGPKWDHNPASLRPEKGLLGLRKEMGLFANLRPVKAYATLLNASPLKRERVENVDLVIVRELTGGLYFGRPSERRGPGENEVVDTLAYTREEIERIIEKAFQLAQIRRKKLASVDKANVLESSRMWREIAEETAKKYPDVELSHMLVDSTAMQLIANPGQFDVIVTENMFGDILSDLASVITGSLGMLPSASLRSDRFGMYEPVHGSAPDIAGQGKANPLGTVLSAALMLRYSFGLEKEAAAIEKAVDDVLQDGYCTGDLQVANGKVVSTIELTDRLIEKLNNSAAGPRIFQ

SEQ ID NO: 4998 - protein, 1767 aa, Shewanella sp. MR-7
MDKSKLRTFRSKILSHIALPLILIMAAVYGINAWFNYLSAESKLYDSLAQASNHSAYRLQLLLEHAQINTQGMADFIGFITNKEDIRNSEKIKRILTNRLERNPDFYGSAVAFKPYTFANKKLFSPYVFRDGDDFHYLDIGAEGYDYTDGSWDWWSKAINQAGGYWSKVYFDEGAGNTLMVTYSVPFGPENAYFGVATVDLALNQLPEQLGVSPSQLVVLDDQGRLIFHSDKEKVLAMTSAEWLDRNTRQNKDFWALLDKGVNGQARFVDDKNVVYLASVASVAKHKWRVIVMVPEQQLLSTLLDDMASVVLNLSLLTLLLILTCYIAAKRLTRPLEMLESGILAFGQGKTQQLAIPNGAVSEIVTLSSTFNQMAELLAEREQAILDSRGNRFARLIDGMSDKSFYCSLDASGQLAQVSEGVTKVLGMSPELLKRKYQRLFTANPLNEKNWEYTDLALKGQNVPSHQVELLDAGGHPRRLDLFMQPLVSDTGELMSVEMLFTDVTEQFSAAAWSNAVLEAAPEAMLIVDQMGLIVFSNTRCQILFGYEASAMLGLQVESLLPEALRSNHARDRLQFLREGRDRPMANAKHVRALKADGGEFVAEIALSILPADNEGRRQVAASIRDMTQKLAVEQKIRDSELRFRGLVTNIPGAVYRTRIGDVWVMEYVSENIADITGYAASQFIENRQRTFESLILEEDRALCHQHIDRALAQQETFEVEYRIRHRDGSVRWVHEKGKASYTDEGFPLWFDGSIDDITESKLALVELESSRQQLTNITESIPCTVYQLRWISPVDRTFTFLSGAAYHMLGLHRDDLLKDFNIIAERIFDEERSEVVRALAGKSEDKLQWVREFRYRHPNGSTRWMEAGASGHICDDGAIIWNGYVMDITERKAMEEELAVSEAHFKALFDGSTIGIVNIDAKGVILDCNDQYCEDMGQSRESLCGMSIFEVLSLQDKETAKAQFKELAEGRVDHYRGERSFIRPNGEPLWMTVNVSALFDSQKRFESAVVSMVDMTELKLLSDELLVAKEEADAASKAKGDFLANMSHEIRTPMNAIIGMSQLCLQTELDKKQKNYVEKIERASKSLLSIINDILDFSKIEAGKLDIESVPFQLDTMLEDLSDMFSEKAAHKQLELLFAVAPNVPRHLFGDSLRLGQVLINLMNNAIKFTERGEVLLSLNLVEQQNDDVVLRFSVRDSGIGLTAEQQAKLFKSFSQADTSTTRKYGGTGLGLAICKQLVELMGGTIGVESQFGHGSTFYFTVKLQISSGQKLTVAQELEGMSILVADDNATARDIMRTTLESMGFRVDTVRSGEEAVTRCSQQEYAVALIDWKMPNLDGIETAKQIKQLAKNAPRILMVSAHATQEFLSQIEALGLAGYISKPISASRLLDGIMNSLGRAGVLPVRRNSESIDPKLLLPLKGKRILLVEDNEMNLEVATEFLEQVGIILSIATNGQIALDKLAQQSFDLVLMDCQMPVMDGYQATQAIRKRPELAELPVIAMTANAMAGDKEMCLKAGMNDHIAKPIEVNLLYQTLLKYLGGGVLPTEDVSLNQLVEIPVKPINLDSKSVVKWPEHPELDIDRGLQLVQNSTRLYQRIFDRFVTSQRNVVELINKALANDKRDDAVRMAHTLKGLAGNLSSSKLVELARQLELHLSEKTEYQTELDQIQVLVASICEAIERVKPQFEEPTQSATEHLSQEALVSALNQLRQSLEDADSDAVTQIDALKPQVSSKLWQQLSPALTMINQYQFDEAVDLIDEVLAELA

SEQ ID NO: 4999 - protein, 278 aa, Lycopersicon esculentum
MASISPLSQSQPLLEKPQFTVLNKSQNQFFSIPFSRFTQSCNLSLKKSRMVVVSATTAAEKSNKRYPGEAKGFVEEMRFVAMKLHTKDQAKEGEKEPVDQPLAKWEPSVEGYLKFLVDSKLVYDTLERIVEKAPFPEYAEFRNTGLERSEVLAKDLEWFRQQGHAIPEPSTPGVTYASYLEELSEKDPQAFICHFYNTYFAHSAGGRMIGKKVAEKVLDKKELEFYKWDGDLSQLLQNVRDKLNKVAENWTREEKNHCLEETEKSFKFSGAILRLIFS

SEQ ID NO: 5000 - protein, 257 aa, Triticum aestivum
  misc_feature (27)..(27): Xaa can be any naturally occurring amino acid
  misc_feature (48)..(48): Xaa can be any naturally occurring amino acid
AAIPQPVEGVLLHPFPCPCILVSPGFXLLYPLFEKHGAASLPVGVKNXGISDKDAINNIPFAWAFTWAGAWSVFLPFLILQVGKDAALRARLRDEVRAALERHAGEVGFASVRGMPLVRSTVYEVLRMNPPVPLQFGRARRDFVLRSHGGEGFSVAAGEMLCGYQPLAMRDPAVFDRPDEFVADRFVGAEGEALLRYVYWSNGPETGEPAAGNKQCAAKEVVVATACMLVAELFRRYDDFECDGTAFTRLHKRPQPS

SEQ ID NO: 5001 - protein, 515 aa, Geobacillus kaustophilus HTA426
MRKIKFFDTTLRDGEQSAGVNLNLQEKLEIARQLERLRVDIIEAGFPASSKGDFEAVKQIAETVRTCSVTGLSRSVRSDIDAAWEALKGGAEPRLHLFIATSPIHMVHKLRMTPEQVIEAAVEAVKYAKRFFPIVQWSAEDACRSELPFLAKIVAEVIKAGASVINIPDTVGYITPKEYGEIFLYLQNNVPNIENVSLSAHCHDDLGMAVVNSLSAIEHGATQVECTINGIGERAGNAALEEIAVALHIRKDYYQVETRLNLQEIKRTSNLVSKLTGVVVPPNKAVVGKNAFAHESGIHQDGVLKEKTTYEIISPELVGVPSNSMVLGKHSGRHALRNRVEELGYTLSDEEINQLFVRFKELADKKKDITDDDLIALIFEEKFDHFKDFYQLSSIQVQYGTNQIPTAVVVLKDGKGNEIQEAATGAGSVEALYNTLERCFQTPVTLLDYRIESVGGGRDALAQVFVKVRAHDIETSGRGTAQDVLEASAKAYINAINRVFMIEAMRGENEKVATP

SEQ ID NO: 5002 - protein, 391 aa, Sinorhizobium meliloti
MAKSKFERNKPHVNIGTIGHVDHGKTSLTAAITKYFGEFKAYDQIDAAPEEKARGITISTAHVEYETPNRHYAHVDCPGHADYVKNMITGAAQMDGAILVVSAADGPMPQTREHILLARQVGVPAIVVFLNKVDQVDDAELLELVELEVRELLSSYEFPGDDIPIVKGSALAALEDSDKKIGEDAIRELMAAVDAYIPTPERPIDQPFLMPIEDVFSISGRGTVVTGRVERGIVKVGEEIEIVGIRPTTKTTCTGVEMFRKLLDQGQAGDNIGALLRGVDRNGVERGQILCKPGSVKPHRKFKAEAYILTKEEGGRHTPFFTNYRPQFYFRTTDVTGIVTLPEGTEMVMPGDNVTVDVELIVPIAMEEKLRFAIREGGRTVGAGIVASIVE

SEQ ID NO: 5003 - protein, 544 aa, Gloeobacter violaceus PCC 7421
MDIKTVATTPFSDQKPGTSGLRKKVPVFQQPHYLENFVQSIFDSLEGYAGQTLVLGGDGRYFNREAIQIILKIAAASGFGRVLVGKDGIFSTPAVSCVIRKTAAFGGIILSASHNPAGPHEDFGIKYNVGNGGPAPEKVTEAIYARTKTIDHYQILDGPDVDLGKLGTFALGPLTVEVIDPLTDYIELMESLFDFGRIRDLLAGGEFRLCVDSMHAVTGPYAHALFEDRLGAPAGTVHGGTPLEDFGGGHPDPNLVYAHELVEILFGEDAPDFGAASDGDGDRNMILGRHFFVTPSDSLAVLAANAKLVPGYQAGLAGVARSMPTSQAADRVAAQLGIDCYETPTGWKFFGNLLDAGKATLCGEESFGTGSGHIREKDGLWAVLFWLNILAVRRQSVEQIVREHWQIYGRNYYSRHDYEAVDSAQAQALIEHLHAQMPHLAGKAFGSYEVAYTDDFSYTDPVDGNVSKNQGIRVGFTDGSRVVFRLSGTGTQGATLRVYLESFEPNIAKHNQDPQQALAGLITIAEELAQIRKFTGRDKPTVIT

SEQ ID NO: 5004 - protein, 368 aa, Lycopersicon esculentum
MATLTCYCSSSSLPIPKPTSKSSLSLLHKTPKPQFFVKFTSFLSISSKYQNWTHRVLQCSNFNAASSFTLSESDLETEPEPETETETEEDEDEDEEEEEEEEGGGGRGGGRDGVISIEKPPVKRKRKRRRYRKQYPGEKKGITEEMRFVAMKFRNSKGKKKSESDDEMKDDGYESVSSDEDDVGGGGSGGGEATWQPSIEGFLKYLVDSKLVFSTIERIVDESSDVSYAYFRRTGLERTECISKDLKWFGQQGHEIPEPSIPGVTYANYLEELAEKTPRLFLSHFYNIYFSHIAGGQVIAKKAFERLLEEKELEFYKWEGDEEKLLRDVRDSFNMLAKHWSRDDKNKSLREVTKAFRFMGQIVRLIIL

SEQ ID NO: 5005 - protein, 402 aa, Sulfitobacter sp. EE-36
MGHVVVIGAGQAGSSCVAKLRNSGFEGKITLIGAETVPPYQRPPLSKAYLLGDMALERLYLRPESFYADHGIDLMLGTTVDSIDPAAQTVRVNGGDMAYDDLVLTTGSFPRRLPAHIGGDLAGVHVVRDLSDVDTMGPRFTKGARVLIVGGGYIGLEAASVAAKLGLQVTLVEMGDRILQRVAAPQTSDFIRALHEAHGVTIREGVGLERLTGDTHVTGAELSDGTTLDVDFVIVGVGIGAATALADAAGIVNDNGIMTDSHGRTSAPHVWAAGDCASFPYRGGRIRLESVPNAIDQAELVAENIMGADKEYVAKPWFWSDQYDVKLQIAGLNMGYDRVITRHADADSVAFWYYRGDELLAVDAMNDPRGFMIGRRLIEAGKSPAPALIEDPNTDLKALLKS

SEQ ID NO: 5006 - protein, 170 aa, Zea mays
MAPTVMMASSATAVAPFQGLKSTASLPVARRSSRSLGNVSNGGRIRCMQVWPAYGNKKFETLSYLPPLSTDDLLKQVDYLLRNGWIPCLEFSKVGFVYRENSTSPCYYDGRYWTMWKLPMFGCNDATQVYKELQEAIKSYPDAFHRVIGFDNIKQTQCVSFIAYKPPGSD

SEQ ID NO: 5007 - protein, 560 aa, Arabidopsis thaliana
MASSTALICDTEAWKDLKGHVEDIKKTHLRDLMSDANRCQSMMMEFDGLLLDYSRQRATVETMDKLLNLAKASQLTEKISRMFNGEHINSTENRSVLHVALRAPKDAVIKADGMNVVPEVWNVLDKIKEFSDKIRSGSWVGATGKPLKDVIAIGIGGSFLGPLFVHTALQTDPEALESAKGRQLRFLANIDPVDVARNISGLNPETTLVVVVSKTSTTAETMLNARTLREWITAALGASAVAKHMVAVSTNLALVEKFGIDPNNAFAFWDWVGGRYSVCSAVGVLPLSLQYGFSMVEKFLKGASSIDQHFQSTPFEKNIPVLLGLLSVWNVSFLGYPARAILPYSQALEKFAPHIQQVSMESNGKGVSIDGLPLPFETGEIDFGEPGTNGQHSFYQLIHQGRVIPCDFIGIVKSQQPVYLKGEVVSNHDELMSNFFAQPDALAYGKTPEQLQKENVSENLIPHKTFSGNRPSLSLLLPELTAYNVGQLLAIYEHRVAVQGFVWGINSFDQWGVELGKVLATQVRKQLHSSRTQGTAPEGFNYSTTTLLKRYLETSSEPQM

SEQ ID NO: 5008 - protein, 316 aa, Pinus taeda
MALPTSQALLKDKQIASPTYAIELPSSKPIIFMNPNAQTRHFPLNKSTFAVRSNKALLSIGKAFKFGPSDIGFEGQSRSYGRGNSLGGLVVKAAATAEKPRKNYPGEAKGFVEEMRFVAMKLHTRDVAKEGKKEPDAQPIGKWEPTIEGYLKFLVDSKVVYDTLEDVVQKATYPAYAEFRNTGLERSEKLAKDLEWFRQQGHIIPEPSSPGLSYSKHLQELSEKDPPAFLCHFYNVYFAHTAGGRMIGRKVAEKILDGRELEFYKWEEDLTTLLNRVREKINLVAEGWSREEKNHCLEETEKSFDYSGKLLRLIIS

SEQ ID NO: 5009 - protein, 229 aa, Wolbachia pipientis
LEELQKYVDTLIVIPNQNLFRIANEKTTFADAFQLADNVLHIGIRGVTDLMIMPGLINLDFADIETVMSEMGKAMIGTGEAEGEDRAISAAEAAISNPLLDNVSMKGAQGILINITGGGDMTLFEVDAAANRVREEVDENANIIFGATFDQAMEGRVRVSVLATGIDSCNNNSSVNQNQIPAEEKNFKWPYNQIPISETKEYASTEQTNERVKWGSNVYDIPAYLRRKK

SEQ ID NO: 5010 - protein, 177 aa, Lemna gibba
MASSMMASTAAVARAGPAQSNMVAPFNGLRSSVAFPATRKANKNLSTLPSNGGKVSCMQVWPPEGLKKFETLSYLPPLSVEDLAKEVDYLLRNDWVPCIEFSKEGFVYRENHASPGYYDGRYWTMWKLPMFGCTDASQVIAEVEEAKKAYPEYFVRIIGFDNKRQVQCISFIAYKPT

SEQ ID NO: 5011 - protein, 362 aa, Debaryomyces maramus
IDNGSGMCKAGFAGDDAPRAVFPSIVGRPRHQGIMVGMGQKDSYVGDEAQSKRGILTLRYPIEHGIVTNWDDMEKIWHHTFYNELRVAPEEHPVLLTEAPMNPKSNREKMTQIMFETFNVPAFYVSIQAVLSLYSSGRTTGIVLDSGDGVTHVVPIYAGFSLPHGILRIDLAGRDLTDHLMKILSERGYTFSTTAEREIVRDIKEKLCYVALDFEQEMQTSSQSSAIEKSYELPDGQVITIGNERFRAPEALFRPADLGLEAAGIDQTTYNSIIKCDVDVRKELYGNIVMSGGTTMFPGIAERMQKEITALAPSSMKIKIIAPPERKYSVWIGGSILASLSTFQQMWISKQEYDESGPSIVH

SEQ ID NO: 5012 - protein, 386 aa, Sodalis glossinidius
MFEPMELTNDAVIKVIGVGGGGGNAVEHMVRERIEGVDFFAVNTDAQALRKTAVGQTIQIGSGITKGLGAGANPEVGRHSAEEDREALRAALEGADMVFIAAGMGGGTGTGAAPVVAEVAKDQGILTVAVVAKPFNFEGKKRMAFAEQGIAELSKHVDSLITIPNDKLLKVLGRGISLLDAFGAANDVLKGAVQGIAELITRPGLMNVDFADVRTVMSEMGYAMMGSGVACGEDRAEEAAEMAISSPLLEDIDLSGARGVLVNITAGFDLRLDEFETVGNTIRAFASDNATVVIGTSLDPDMNDELRVTVVATGIGMDKRPEITLVTNKQSSQRVMDNLYRDHAAGMSSLNQEQKTAAKAVNEQNAQGSKEPDYLDIPAFLRKQAD

SEQ ID NO: 5013 - protein, 177 aa, Lemna gibba
MASSMMASTAAAVARAGPAQSSMVPFNACRSSVPFPATRKANNNLSTLPGNGGRVSCMQVWPPEGLKKFETLSYLPPLSVEDLAKEVDYLLRNDWVPCIEFSKEGFVYRENHASPGYYDGRYWTMWKLPMFGCTDASQVIAEVEEAKKAYPEYFVRIIGFDNKRQVQCISFIAYKPT

SEQ ID NO: 5014 - protein, 177 aa, Lemna gibba
MASSMMASTAAAVARAGPAQTNMVPFNACRSSVPFPATRKANNDLSTLPSNGGRVSCMQVWPPEGLKKFETLSYLPPLSVEDLAKEVDYLLRNDWVPCIEFSKEGFVYRENHASPGYYDGRYWTMWKLPMFGCTDASQVIAEVEEAKKAYPEYFVRIIGFDNKRQVQCISFIAYKPT

SEQ ID NO: 5015 - protein, 338 aa, Zygnema circumcarinatum
MLSCFIYNKKIMYMAEVLLFEALRQGLQEEMDRDPRVMVMGEDVGHYGGSYKVTKGFAERYGDLRLLDTPIAENSFTGMAIGAAMTGLRPVVEGMNMGFLLLAFNQIANNAGMLHYTSGGNFTIPIVIRGPGGVGRQLGAEHSQRLESYFQSVPGLQMVACSTPYNAKGLIKSAIRSDNPIILFEHVLLYNLKEDLAEEEYLVCLEKAEVVRPGNDITILTYSRMRHNVLQATKSLVYKGYDPEIIDIVSLKPFDLGTIGASVCKTHKVLIVEECMRTGGIGATLRAAIMEHFFDYLDAPILCLSSQDVPTPYSSPLEELTVIQPNQIIQVVEQLCEN

SEQ ID NO: 5016 - protein, 384 aa, Wigglesworthia glossinidia
MFEPIELTSDAVIRVVGIGGGGGNAVEHMVRECIEGVDFFAVNTDAQALRKTEVSQTVQIGSSITKGLGAGANPEVGKNSAEEDKDALRIILDGADMVFIASGMGGGTGTGAAPVIAEIAKDLGILTVAVVTKPFNFEGKKRLIFAEQGIDELSKHVDSLIIIPNDKLLKVLGKGISLLDAFSAANDVLKNAVQGIAELITRPGLINVDFADVKTVMSEMGYAMMGSGISKGDNRAEESSEIAISSPLLEDIDLSGARGVLVNITAGFDLRLDEFEAVGNKVRSFSSDNATVVIGTSLDPSMNDELRVTVVATGIGMDKRPDIKLVTNSTSNKNIMDRFGYRYSDKENTMSKNNNEFSKIKNKTKEDLQSDYLEIPAFLRNQAD

SEQ ID NO: 5017 - protein, 229 aa, Wolbachia pipientis
LEELQKYVDTLIVIPNQNLFRIANEKTTFADAFQLADNVLHIGIRGVTDLKIMPGLINLDFAGIETVMSEMGKAMIGTGEAEGEDRAISAAEAAISNPLLDNVSMKGAQGILINITGGGDMTLFEVDAAANRVREEVDENANIIFGATFDQAMEGRVRVSVLATGIDSCNNNSSVNQNKIPAEEKNFKWPYNQIPILETKEYASTEQTNERVKWGSNVYDIPAYLRRKK

SEQ ID NO: 5018 - protein, 264 aa, Mycobacterium avium subsp. paratuberculosis K-10
MRHVSTGNEEAGEPEVLVEQRDRILIITINRPKAKNAVNAAVANGLAAAVDRLDNEPGLSVGVLTGAGGSFCAGMDLKAFARGELPIVEGRGMGFTERPPAKPLIAAVEGYALAGGTELALATDLIVASKDAAFGIPEVKRGLVAGGGGLLRLPQRIPSAIAMELALTGDNLSAERAHALGMVNVLAEPGAALDEAIALAEKIAANGPLAVAATKRIIVESRGWSPETMFAEQNKLLAPVFSSNDAKEGAIAFAEKRPPKWTGT

SEQ ID NO: 5019 - protein, 229 aa, Wolbachia pipientis
LEELQKYVDTLIVIPNQNLFRIANEKTTFADAFQLADNVLHIGIRGVTDLMIMPGLINLDFADIETVMSEMGKAMIGTGEAEGEDRAISAAEAAISNPLLGNVSMKGAQGILINITGGGYMTLFEVDAAANRVREEVDENANIIFGATFDQAMEGRVRVSVLATGIDSCNNNSSVNQNKIPAEEKNFKWPYNQIPILETKEYASTEQTNERVKWGSNVYDIPAYLRRKK

SEQ ID NO: 5020 - protein, 507 aa, Burkholderia xenovorans LB400
MLLGHPVLFKSLCYVDGRWVHSASAASVAVHNPADQQVLGHVPMLDAAQITEAVGAAQRAFSTWRWLPVSQRSALLLRWHELILRHQHDLAAILSLEQGKPLAEARGEIAYGASFVEWFAHEVRRLNGRTIPTHIDGAHLGTMIEPVGVAALITPWNFPCAMITRKAAAALAAGCTVVVKPAHETPFSALALAQLAEEAGFPAGVFNVVLGEPQMAMERLVGDSRVRSVSFTGSTRVGALVMQAAARAGIKKTALELGGNAPFIVTGDADLDQAVRVAVAAKFQTSGQDCCAANRIFVARPLYEAFVAQYSDAVKALKVGAAFEANVDVGPLMHQAAFDSTAQRVADAKARGARITAGGGAHERGGWFFEPTVVADAAPGMRIYDEENFAPISAVSPFDSLDEVVERANDTEYGLAAYVCARDLNTVFQLIRRLDFAMVSVNGAKFTGAPIPFGGIKSSGLGREGGAEGFEPFVETRYFCLGQLGLPVTESLPAHRLAAATGAAATA

SEQ ID NO: 5021 - protein, 229 aa, Wolbachia pipientis
LEELQKYVDTLIVIPNQNLFRIANEKTTFADAFQLADNVLHIGIRGVTDLMIMPGLINLDFADIETVMSEMGKAMIGTGEAEGEDRAISAAEAAISNPLLDNVSMKGAHGILINITGGGDMTLFEVDAAANRVREEVDENANIIFGATFDQAMEGRVRVSVLATGIDSCNNNSSVNQNKIPAEEKNFKWPYNQIPISETKEYASTEQTNERVKWGSNVYDIPAYLRRKK

SEQ ID NO: 5022 - protein, 471 aa, Neorickettsia sennetsu str. Miyayama
MPKLTVAYGDGVGPEIMTSVLEIIFEAGAEIQIDTIEIGQKIYEKGWHSGISDSGWETLKRNKVLLKAPITTPRGGGVRSLNVTLRKKLGLFANIRPCKSHLEWQSPKMDIVIIRENEEDLYSGTEYRQTLDTYNCTKVITESTSERICRYAFEYARKNGRKKVTVMVKDNIMKLTDGIFHKLFKKVALEYPDIESENYIIDIGAARIAKNPEKFDVIVTLNLYGDIISDIAAEISGSVGLGGSINIGEEYAMFEAVHGSAPDIADQDIANPSGLLNAAMYMLSYIGQKEIAQKVYSAWLKTLKSGVHTADIFNPLHSKLKVGTKKFTEHIIHNIDRKSLVAFSCNSLVEGVLLKPRYQSKKEKVLIGVDLFISWDSTNLAALLAALEKIKVDDVIILGSISVKGVLIWPEETAVMPYSDTLCCRFLAEPNKSLATTVICGLISELENSAIEVTKMEKLYSFGDEAGFSNI

SEQ ID NO: 5023 - protein, 581 aa, delta proteobacterium MLMS-1
MNEFGFEEIFAELLDEDRSRQLFLEALAAMVPGSDLLLLGPGQLSLSLGKAIELGVDEAAQLGRQVSGGQVIARPWSEGWLYVLAVPQLEATLCWRLPGQRDLSGEPALLAFLRHGVAYALEEEKRREEAAQDEQYRHQIEVLKKQHGELIEDNYRQYRINQQQQEEYTRNLESEIARQTAELRQANARLEESSRLKSEFLANMSHELRTPMNAITGFAELLAETPLNQEQDEYCRTIRQAAAALLNLINDILDLAKIEAGKLDLEAVPFSLDELLEGVRAMFTLAARKKGIEITIKRGEGLPDTLRGDSHRLRQVLINLLGNAIKFTEQGGVELEVAAGSTAADKVRLFFAVRDSGMGISPHRLEAIFEKFTQADGSTTRRFGGTGLGLAICRQLVELMGGQIEVSSQQGKGSTFSFEIELERESAAKKPPPAPATVPGPVAGDGVSRVLLVEDNPVNQRLASLLLAKQGCQVTVAGDGRQALEKLAVQEFELVFMDIQMPRLDGLEATRRLRELEADPAARAAHAALARRTTPLPVVGLTAHARKEDEEACYAAGMDGFLSKPIVKAKLLAVLQQFAGR

SEQ ID NO: 5024 - protein, 419 aa, Dehalococcoides ethenogenes 195
MYELSVLPSGLRVISHHMPASRSVTICVYIGVGSRYETDCEAGASHFIEHMVFRGSKKYPDSQLISSAIEGVGGILNAATDRESTLYYAKVGSDKFALALDVLSDMLVTPLFNPEDLEKERKVIYEEISMSLDNPSHRVGLLLDEILWPDHPLGRDIAGSRQSVAGLDSQKLLDFMHRHYTPANIVVAVAGDIKHKNAVSAISQAFGGLAGQQKVQTFEPYHSGNPCQVGVDKRDAEQINLMLAMPGMNRLDERRYAFSILNTILGDGMSSRLFARVRDNLGLAYSVQSGLEYLHDTGAFSVFAAVDPANLTACIKAVLSELETAKTTITAEELTKAKEMSKGRIQLAMEDSRYMAKWIGSQELLCQRVNTHEDVIRLIDGVSLKGVMQLAGEYFQKPQMRLALVGPVDKDAVACLLKD

SEQ ID NO: 5025 - protein, 462 aa, Mycoplasma gallisepticum R
MMFDQRDKKPEKSLEEMQEELIKLQKEMQAVLMKDRAANQIRLGYFDDQEFLVEPQAQPEEERIEYFVSKYKKNYKIKVIGIGGAGNNIVEDILRQYPDLVSENLMFYQLNTDSKHLNLLARNRSKAIRYLIDSPYTDGHGAGGDVQKARLAISQYFDKEVDEILNECDICIVIAGLGKGTGSAGSTYIINKAATKKIITLAYVVIPPNTEGSLSYEKATDALYDLLKDANAISQLRMDDINKNLNYLSVVERNQEISNNIGLSIKTIVNLINEQTIYNLDYADLITFFQKKDQLAYEFLVKEIKLSSSQENLVAQKLLSDDWLDANQLIVIYQLSKQLPGKLYDELNAKIKASVNRNAHIVFGSKYVDGDDNIITILGKKTSSLIHANNTLAYDPYNLISRPDQQIKNVITDDYLWNQAKLLEQKLAAINQDQTQNTFKNTNRADGKIETSSILNLLDQDE

SEQ ID NO: 5026 - protein, 176 aa, Vasconcellea cundinamarcensis
PQRMDWRKKGAVTPVKDQNPCGSCWAFSTVATVEGINKIVTGKLISLSEQELLDCDRRSHGCKGGYQTTSLQYVVDNGVHTEKVYPYEKKQGKCRAKDKGPKVKIYRVKRVPSNDEISLIKAIATQPVSVLVESKGRAFQFYKGGVFGGPCGTKLDHAVTAVGYGKDYIIIKNSWG

SEQ ID NO: 5027 - protein, 306 aa, Bacillus halodurans C-125
MIYTVTLNPSIDYIVQVENFQQGVVNRSERDRKQPGGKGINVSRVLKRLGHETKALGFLGGFTGAYVRNALEKEEIGLSFIEVEGDTRINVKIKGKQETELNGTAPLIKKEHVQALLEQLTELEKGDVLVLAGSVPQAMPQTIYRSMTQIAKERGAFVAVDTSGEALHEVLAAKPSFIKPNHHELSELVSKPIASIEDAIPHVQRLIGEGIESILVSFAGDGALFASAEGMFHVNVPSGEVRNSVGAGDSVVAGFLAALQEGKSLEDAVPFAVAAGSATAFSDGFCTREEVERLQQQLQRTIKKEG

SEQ ID NO: 5028 - protein, 368 aa, Debaryomyces hansenii CBS767
KHCTTNKQHSENAYIRCTIFDSKGDIVVHGKDIRRLQFMKTHNLVPRDFRKITRHYHGSNMSSMNNINVDIVPSIVTRGNSILLNLSNIKALIKSDTVVIFDSLSKNSGSGMNKSHSHGSFLKDMNEKLKTKNEQDDLPYEFRALECISIHVMLNLTTEMNVHKTVLQNILSRLEESIERVKLRYLLIQSKKIAQFHQKTKLIRDLLDNILEQNDELNALYLTEISKGKPRLQANHAEAEMLLESYYKTIDEIVQTVENLRSQIKTSEEIINIVLDSNRNELMLLGLKFSTGLLSMGCALYIAALYGMNLENFIEETDGGFELVVGGGSILLLILLMFSVKQLKKVQRITMTGMGRENSRISINDNKR

SEQ ID NO: 5029 - protein, 499 aa, Rhodospirillum rubrum ATCC 11170
MTLVTHFINGAATAPAAGRCQDIVNPASGAVIGRVELAAKATVEAAIAAAEAAFPAWRATPPAKRARVMVRFRQLLEDNADALCALITAEHGKALDDARGELGRGMENVDYACGIADLLKGERSANAGPGIDCWSEFQPLGVVAGITPFNFPAMVPLWMIPLAIACGNTFVLKPSERDPSAAFLLAEIALRAGVPPGVFNVVNGDKEAVDTLLTDPRVQAVGFVGSTPIAEYVYATGTAHGKRVQALGGAKNHALVLADADLDFTVNALMGAAFGSAGERCMAISVVLAVGDQLADALVAKLAAQLAGLKVAPGTEAGCEMGPLVSRAHADKVAGYVAKGVAEGAELVVDGRGLSIPGHEQGFFLGGCLFDRVTPAMTIYREEIFGPVLCVVRVASMEDGMALIDAHEFGNGTCLFTRDGEAARYFADHVKVGMVGINVPLPVPVATHSFGGWKRSLFGDLAAYGPDGVRFYTRRKTVSQRWPSSTVREGAQFAFPSMK

SEQ ID NO: 5030 - protein, 273 aa, Triticum aestivum
MAQSMLMSGVNGVASGRSLLQAARPSSASTPFSRLALSSSSSAAAYYKHMPSLSVRTMALFGKKTKAAPAKKVVAPKPKTEDGIFGTSGGIGFTKENELFVGRVAMIGFAASILGEAITGKGILSQLNLETGIPIYEAEPLLLFFILFTLLGAIGALGDRGRFVDEQPTTGLDKAVIAPGKGFRSALGLSEGGPLFGFTKSNELFVGRLAQLGIAFSIIGEIITGKGALAQLNIETGVPISEIEPLVLFNVVFFFIAAINPGTGKFISGEEDD

SEQ ID NO: 5031 - protein, 447 aa, Ustilago maydis 521
MCDHSEPTPIQHVNGTAPDTHVAIDTSAPNTNGSVANGGVVARDNGNAGSVQPFNSRYSDFLSNVSNFKIIESTLREGEQFANAFFDTETKIKIAKALDKFGVDCIELTSPAASEQSRKDCEAICKLGLKAKVITHIRCHMDDARIAVETGVDGVDVVMGTSKFLREFSHGKDMTYITKTAIEVIQFVKSKGIEIRFSTEDSFRSDLVDLLSIYQAVDKVGVNRVGIADTVGVANPRQVYDLVRTLRGVVGCDIECHFHNDTGCAIANAYTALEAGATHVDTSVLGIGERNGIPSLGGFIARMYTADREYVMSKYNLKALREVENLVAEAVQIQVPFNNYVTGYCAFTHKAGIHAKAILANPSTYEIIRPEDFGMSRYVSIGHRLTGWNAVKSRCEQLELSLTEEQVKQVTAKIKQLADVREQTMEDVDSILRNYARAIENGSSVAA

SEQ ID NO: 5032 - protein, 468 aa, Methanococcus maripaludis S2
MVTVMKFGGTSVGNGDRIRNVAKIVVNKTNEDNDVVVVTSAMTQVTNSLVEISAQALDVRDIAKINNFIEDLRRKHEIAIEQAIENHEIRVEVSKTIESSINELEKVLVGVSYLGELTPKSKDFILSFGERLSAPILSGAIRDMGKHSLYLAGRDAGIITDDNFTCAKVLRLEVSEKIKPLLKDGFIPIVTGFVAGTEEGHITTLGRGGSDYSAALVGLGLTADMVEIWTDVSGVLSADPRMVENVKQIPKMSYIEAMELAYFGAKVLHPRTMEPVMEKKIPLRIKNTFEPENEGTLITDSSETSNGIIKAITTIKDVILINIFGGGMVGVSGTAARIFNVLGKSNANVILITQGSSETNISIVIYDGELEAKKCVRELRDEFGECHLIKDITFDKEVCVVSVVGSGMKGAKGIAGKLFEAVSESGANIKMIAQGSSETNISFVINEDKLEPCLKTLHKTFVEDEINF

SEQ ID NO: 5033 - protein, 492 aa, Methanococcus maripaludis S2
MVNIFDTTLRDGEQTPGVSLSPSEKLELAIKLDELGVNIIEAGSAITSKGEREAMKLVTGQNLNAEISSFVRALPVDIDAALSCDVDSVHLVVPTSDIHMTYKLRKSREENLKDAMHAVEYAKDHGLIVELSAEDATRSDVEFLKELFLKGEELKADRICVCDTVGILTPLKAIDLIKTMKNTIKIPVSIHCHNDFGMATANTLSAISAGADQCHVTINGIGERAGNASLEEVVMSLKSLYDIETGIDTEKLHKISRIVSKYMKIPVPANKALVGDNAFAHEAGIHVDGLMKSTETYEPIHPETVGNRRKIILGKHSGKAALKYKLEIMNIGLSHEEFEETYSKIKAFGDLGKYISDVDLKTIINQVRGVELERKVILDEITVVSGNKVSPLASINLKFANDCNIKDNVREAAYGLGPVDAAINAVKKALTGVADIELEDYSVRAMTGGTDALIEVVVHLRKGNEVVEVKKAHGDVVMASVEAMMDGINLLI

SEQ ID NO: 5034 - protein, 314 aa, Magnetococcus sp. MC-1
MSDPQLVRIGTRGSALAVWQAEWVKSQLQAHHPGIIVELELIKTKGDKILDVPLAKVGGKGLFVKELEEAMLDGRVDLAVHSMKDVPAEFPDGLMLGPILKREDPRDALLSIHYQSLAELPQGALIGSSSLRRQSQIKAKRPDLRLDWLRGNVGTRIQKLVEGQFDAIILAAAGVKRLGLTEHVVQYLEPEEMLPAVGQGAVGIEHRVDDARIATLLAPLYHKETHSCVTAERAFLAKLEGGCQVPIAGYATLHEDTLTLRGLVAEVEGGRVVQAQCQGPRADAYRMGQQLATQLLEAGGGAILQAVYNQDTLS

SEQ ID NO: 5035 - protein, 177 aa, Lemna gibba
MASSMMASTAAVARAGPAQSSMVAPFNGLRSSVAFPATRKANNDLSTLPSNGGRVSCMQVWPPEGLKKFETLSYLPPLSVEDLAKEVDYLLRNDWVPCIEFSKEGFVYRENHASPGYYDGRYWTMWKLPMFGCTDASQVIAEVEEAKKAYPEYFVRIIGFDNKRQVQCISFIAYKPT

SEQ ID NO: 5036 - protein, 1008 aa, Synechococcus sp. WH 5701
MSVESSSDSAVAGAPREFSPFLQRHLGPSAAEQARMLERLGCADLEGFVAEVVPADILIPASAAEQDLPEGVGEAEALAELRRISSLNQVRRSLIGLGYYGTATPALIQRHVLENPSWYTAYTPYQAEIAQGRLEALLNFQTLISELTALPIANASLLDEATAAAEAMSLSAGACRRSEARRFLVDEQVFPQTLEVLRTRAEPLGILIETFDPATASAASSSAAKAASGDQFFGSDVFGVLLQLPGSRGRLLDPSAVIAAAHQVGAMVTVAIDPLAQVLLAPVGALGADIAIGSSQRFGVPLGFGGPHAAFFATTEAHKRQIPGRLVGRSLDAEGRPALRLALQTREQHIRRDKATSNICTAQVLLAVMAGFYAVHHGPEGLSAIARQVLRLRAALALGLTRLGFQLEPGPSFGTLSVLTAEAAPLLERAEVAGFNLRPLMAPGGPLEGVALSLDERSDAAELDQLLALFAAGAACADVPSTAALLAELADDQELLAGLPLREGPWLRQEAFQRYRSESELLRYIQRLASRDLSLVHGMIPLGSCTMKLNAAAELAPVSWSEFADLHPMAPPSQARGYARLIADLESWLAAITGFAGVSLQPNAGSQGEYAGLLVIRAWHRSRGDGHRDICLIPTSAHGTNPASAVMAGLRVVPVACDAKGNIDLEDLEAKAQTHAASLAGVMVTYPSTHGVFEPGIRRLCDVIHRHRGQVYLDGANLNAQVGLAKPGLYGADVCHLNLHKTFCIPHGGGGPGVGPIGVAAHLVPFLPGQVQGIGAVAAARWGSAGILPISWMYIRMMGGAGLRRASAVALLAANVIAERLEPHYPVLFRGPGGRVAHECILDLRPLKRSAGLEVDDLAKRLMDYGFHAPTVSWPVAGTVMVEPTESESLAEIDRFCEALIAIRAEAAAIEAGQVDPLDNPLKRAPHTLAAVTADDWGRPYSRQQAAFPAGEGQYATKFWPAVARIDNAYGDRNLVCTCPSVEELAAVSLGSVPEGVATAPALAGHGR

SEQ ID NO: 5037 - protein, 177 aa, Lemna gibba
MASSMMASTAAVARVGPAQTNMVAPFNGLRSSVAFPATRKANNDLSTLPSNGGRVSCMQVWPPEGLKKFETLSYLPPLSVEDLAKEVDYLLRNDWVPCIEFSKEGFVYRENHASPGYYDGRYWTMWKLPMFGCTDASQVIAEVEEAKKAYPEYFVRIIGFDNKRQVQCISFIAYKPT

SEQ ID NO: 5038 - protein, 468 aa, Gluconobacter oxydans 621H
MQNRNAHGRLSGHALTNFIATISATGGLLFGYDTGIISSALLQLRNQFHLDTLGAEIVTSAIILGALIGCLGAGSISDRIGRRRTVMIAAALFLLGTVVVSSAQSVAVLIIARLILGLAIGAASQIVPIYIAEVSPPERRGRLVVGFQLAVVFGITSSFVTGYLLRDSSWRLMFGIGMLPALILFVGMAFLPNSPRWLALNGQIEEARAVLRRVRLSDEAADRELEEIIENHDVQAPWSELAKPWVRPALTASVGIALLCQFTGINAVMYYAPTIFADAGFGQDSALLTSVAVGVGMVFATVFGGWAVDTWGRRTLLLRMLPGAVVALAVLGTTFAMHLTGGIGAWITVAAVMAYTIFNTGSLSVAIWLVGAEVYPLSCRGKGMSLVAGSHWGADLLISLTTLSLVQMLGAGWTFWLFAGVNAFAFWFVLRYVPETKGQSLEELERRLRNGTFAPVDRAVARSEARAR

SEQ ID NO: 5039 - protein, 121 aa, Triticum aestivum
  misc_feature (43)..(43): Xaa can be any naturally occurring amino acid
  misc_feature (96)..(96): Xaa can be any naturally occurring amino acid
MAATGEETVRASHILIKHEGSRRKASWKDPEGRVISATTRADXAARLGDLRAQILAGRASFADLAAQHSDCSSARRGGDLGTFGRRQIQKPFEDAXYALKVGEISDIIDTESGVHIILRTA

SEQ ID NO: 5040 - protein, 181 aa, Nicotiana sylvestris
MAFLIMSSAAAVATGTNAAQASMIAPFTGLKSATSFPVSRKQNLDITSIASNGGRVQCMQVWPPINKKKYETLSYLPDLSEEQLLREVEYLLKNGWVPCLEFETEHGFVYRENNKSPGYYDGRYWTMWKLPMFGCTDATQVLAEVEEAKKAYPQAWIRIIGFDNVRQVQCISFIAYKPEGY

SEQ ID NO: 5041 - protein, 528 aa, Bacillus cereus E33L
MTTFRELGLSDSLLQSVESMGFEEATPIQAETIPHALQGKDIIGQAQTGTGKTAAFGLPLLDKVDTHKESVQGIVIAPTRELAIQVGEELYKIGKHKRVRILPIYGGQDINRQIRALKKHPHIIVGTPGRILDHINRKTLRLQNVETVVLDEADEMLNMGFIEDIEAILTDVPETHQTLLFSATMPDPIRRIAERFMTEPQHIKVKAKEVTMPNIQQFYLEVQEKKKFDVLTRLLDIQSPELAIVFGRTKRRVDELSEALNLRGYAAEGIHGDLTQAKRMSVLRKFKEGSIEVLVATDVAARGLDISGVTHVYNFDIPQDPESYVHRIGRTGRAGKKGIAMLFVTPRESGQLKNIERTTKRKMDRMDAPTLDEALEGQQRLIAEKLQSTIENENLAYYKRIAEEMLEENDSVTVVAAALKMMTKEPDTTPIALTSEPPVVARGGGSKKRGGNGGGYRDGNRNRSRDGRGGDGRNRDRNRDGRNRDGNRDRNREGSRDGNRGRRGEGQGRPGSSNGRGERKHHSRKPQA

SEQ ID NO: 5042 - protein, 349 aa, Oryza sativa
MDKLDGSARLMIVSDLDQTMIDHNDPKNLSLLRFQALWESEFSQDSLLVFSTGRSPISYRGLRTQKPLITPDITIMSVGTVIAYGEEMIHDVGWAEFLSNKWDRDIVVEETAKFPKLKPQPERSQGPHKVSFFVDKEGAREVMDSLPETLNRRGLDVKIIFSSGEALDVLPQGAGKGQALLYLLKKFNSDGKPPNSTLVCGDSGNDAELFSVPSVHGVMVSNAQEELLQWYEENARGNPMMIHATERCAAGIMQAIGHFNLGPNVSPRDLEFPYPKLDAIKPADVVVKFYVLYEKWRQGEVQKAPFIIQYLKRITVSTFLSYILRITQSSFVHKPLFLKSIIPFVDCYS

SEQ ID NO: 5043 - protein, 332 aa, Ralstonia solanacearum
MTIKIGINGFGRIGRMVFRAAIANFKDIEVVAINDLLEPDYLAYMLKYDSVHGRFDGEVSVDGNTLVVNGKKIRLTAVKDPAELKWGEVGADVVVESTGIFLTKEGAQKHIDAGAKKVIMSAPSKDDTPMFVYGVNHGTYKGEAIISNASCTTNCLAPVAKVLNDKWGIKRGLMTTVHAATATQKTVDGPSNKDWRGGRGILENIIPSSTGAAKAVGVVIPQLNKKLTGMSFRVPTSDVSVVDLTVELEKAASYDEICAEMKAQSQGALKGVLGYTEDKVVATDFRGDARTSIFDAEAGIALDGTFIKVVSWYDNEWGYSNKVLEMARVVAK

SEQ ID NO: 5044 - protein, 217 aa, Eustoma grandiflorum
MAPPVSVSEVQVESYLFPPTITPPASTKSFLLGGAGVRGLEIGGNFVKFTAIGIYLDETAIPWLAGKWKGKTAEELADSVDFFADIITGPFEKFTQVTLILPLTGQQYSGKVSENCTAQWKAAGVYTPADGKAIEKFLQVFEPQSFSPGDSILFMHSPESLTISFGKAGDIPETSNAVIENKKLSEAVIESVIGEKGVSPAAKKSLATRIAHVLNHF

SEQ ID NO: 5045 - protein, 376 aa, Candida dubliniensis
MDGEEVAALVIDNGSGMCKAGFAGDDAPRAVFPSLVGRPRHQGIMVGMGQKDSYVGDEAQSKRGILTLRYPIEHGIVSNWDDMEKIWHHTFYNELRVAPEEHPVLLTEAPMNPKSNREKMTQIMFETFNVPAFYVSIQAVLSLYSSGRTTGIVLDSGDGVTHVVPIYAGFSLPHGILRIDLAGRDLTNHLSKILSERGYSFTTSAEREIVRDIKERLCYVALDFEQEMQTSSQSSAIEKSYELPDGQVITIGNERFRAPEALFRPADLGLEAAGIDQTTFNSIMKCDMDVRKELYGNIVMSGGTTMFPGIAERMQKEITALAPSSMKVKIIAPPERKYSVWIGGSILASLSTFQQMWISKQEYDESGPSIVHHKCF

SEQ ID NO: 5046 - protein, 254 aa, Brassica napus
LAVSARSRLHFVLEYAPHGSLASLLFGSSEEECLDWKKRYRVALGVADGLSYLHNDCPRRIIHRDIKASNILLSQDYEAQISDFGLAKWLPENWPHHIVFPIEGTFGYLAPEYFMHGIVDEKTDVFAFGVLLLEIITGRRAVDTASRQSIVMWAKPLLEKSSVEEIVDPKLGNEFDETEMKRVMQTASMCIHHVAAMRPDMNRLVQLLRGGGDDRLAETQQISRRKSLDGCDLQDHTSSSYLNDLTRHRQLLME

SEQ ID NO: 5047 - protein, 229 aa, Wolbachia pipientis
LEELQKYVDTLIVIPNQNLFRIANEKTTFADAFQLADNVLHIGIRGVTDLMIMPGLINLDFADIETVMSEMGKAMIGTGEAEGEDRAISAAEAAISNPLLDNVSMKGAQGILINITGGGDMTLFEVDAAANRVREEVDENANIIFGATFDQAMEGRVRVSVLATGIDSCNNNSSVNQNKIPAEEKNFKWPYNQIPISETKEYSSTDQTNERVKWGSNVYDIPAYLRRKK

SEQ ID NO: 5048 - protein, 119 aa, Zea mays subsp. parviglumis
MARMQSAVAVAVVAAVLLLAAAATTSEAAITCGQVSSAIAPCLSYARGTGSAPSASCCSGVRNLKSAASTAADRRAACNCLKNAARGVSGLNAGNAASIPSKCGVSIPYTISTSTDCSG

SEQ ID NO: 5049 - protein, 116 aa, Arabidopsis thaliana
MNVLKCLAIISVLGIFFIPRYSESAISCSVVLQDLQPCVSYLTSGSGNPPETCCDGVKSLAAATTTSADKKAACQCIKSVANSVTVKPELAQALASNCGASLPVDASPTVDCTTVG

SEQ ID NO: 5050 - protein, 220 aa, Petunia x hybrida
MSPSVSVTKVQVENYVFPPTVKPPASTKTLFLGGAGHRGLDVEGKFVKFTVIGVYLEESAVQFLAPKWKGKSAEELIHSVDFFRDIVTGPFEKFTRVRFILPLTGKQFSEKVAENCVAHWKATGTYSDAGSRAIEKFLNVVKSETFLPGASILFTQSPLGSLTISFTKDDSISEAGNAVIENKQFSEAVLETIIGEHGVSPAAKCSIAARMSELFKNSLF

SEQ ID NO: 5051 - protein, 229 aa, Wolbachia pipientis
LEELQKYVDTFIVIPNQNLFRIANEKTTFADAFQLADNVLHIGIRGVTDLMIMSGLINLDFADIETVMSEMGKAMIGTGEAEGEDRAISAAEAAISNPLLDNVSMKGAQGILINITGGGDMTLFEVDAAANRVREEVDENANIIFGATFDQAMEGRVRVSVLATGIDSCNNNSSVNQNKIPAEEKNFKWPYNQIPISETKEYASTEQTNERVKWGSNVYDIPAYLRRKK

SEQ ID NO: 5052 - protein, 229 aa, Wolbachia pipientis
LEELQKYVDTLIVIPNQNLFRIANEKTTFADAFQLADNVLHIGIRGVTDLMIMPGLINLDFADIETVMSEMGKAMIGTGEAEGEDRAISAAEAAISNPLLDNVSMKGAQGILINITGGGDMTLFEVDAAANRVREEVDENANIIFGATFDQAMEGRVRVSVLATGIDSCNNNSSVNQNKIPAEEKNFKWPYNQIPILETKEYASTEQTNERVKWGSNVYDIPAYLRRKK

SEQ ID NO: 5053 - protein, 229 aa, Wolbachia pipientis
LEELQKYVDTLIVIPNQNLFRIANEKTTFADALQLADNVLHIGIRGVTDLMIMPGLINLDFADIETVMSEMGKAMIGTGEAEGEDRAISAAEAAISNPLLDNVSMKGAQGILINITGGGDMTLFEVDAAANRVRKEVDENANIIFGATFDQAMEGRVRVSVLATGIDSCINNSSVNQNKIPAEEKNFKWPYNQIPILETKEYASTEQTNERVKWGSNAYDIPAYLRRKK

SEQ ID NO: 5054 - protein, 111 aa, Brassica napus
MAATVMASMSPLASATPGARRAFPVRLLQASTLAPRRRALAVRAQSDDAEPKEEVASSSPSPSATPAPKSKAAATASPGLWDALAFSGPAPERINGRLAMVGFVSALAVEA

SEQ ID NO: 5055 - protein, 140 aa, Zea mays
GSGVMQFLRGSGGGGGGFPVVAWEVLRRHFSKKRSVDVRRINPKVPKEEAVAISGRLLQILSDHGPLTVANTWNHAKDAGIAGLNSKTHMKILLKWMTGRNVVKLTCVHVGNAKKFLYSPSTESSSSSAGASPSSTSASQ

SEQ ID NO: 5056 - protein, 205 aa, Oryza sativa
  misc_feature (176)..(176): Xaa can be any naturally occurring amino acid
KTPYDNVDIVTIRENTEGEYSGIEHTIVPGVVQSIKLITEHASLRVCEYAFLYAKQHKREKVTVVHKANIMRLSDGLFLKSARQVAEKYPDIKFEEMYLDTVCLKMVQDPTQFDCLVMPNLYGDILSDLCAGLIGGLGLTPSGNIGENGAAIFEAVHGTAPDIAGQDKANPTALLXSAVMMLRHLHMFDKADRIEKACFDTVRDG

SEQ ID NO: 5057 - protein, 616 aa, Chromobacterium violaceum ATCC 12472
MCGIAGWVSFERDLSTQRAVAETMTKTMALRGPDDEGLWLDRRAALGHRRLSIIDLEGGRQPMTADEDGRTLACLVYTGEVYNFRELRLELQGLGHAFRTRSDTEVVLRAYLQWGEAMLERLNGMYAFALWDAREQRLLLVRDRMGVKPLYYYPMPDGVLFGSEPKAILAHPEAERRVTAGGLREMLDLVKTPEAAAFAGMHEVRPGQVVTIDRGGLRKRRYWQLEAREHTDDLPTTIRTVRELLDDIVERQIIADVPLCTLLSGGLDSSVVTALAARSMRRQGKGTVRSFSVDFVKHGAAFEADYLRGSPDAPFVRDLAAHAGTEHREILLESRELADPRLRAAVLGAQDLPPAYWGDMLPSLYKLFEAIRAQSTVALSGESADEVFGGYRWFHDAAAVDGDAFPWLAGSSGAFFDGQSLIAPGLLRELDMPGFRRDSYAQALAEVPRLASDSTRERRMREISHMHLTRFVQALLDRKDRMSMAVGLEVRVPFCDHRLVEYVFNAPWSMKNFDGREKSLLRAAGKDVLPESIVRRVKSPYPATQDPAYEQALRQGLARVLDDSRSPALPLLDKAAAWKLLDRPFGKTSTSPERAGLEMALGLDEWLRHHQVSLDL

SEQ ID NO: 5058 - protein, 118 aa, Brassica napus
MAGVMKLACLVLACMIVAGPITANAAMTCGTVNSNVAPCIGYITQGGPLPGACCTGVSKLNSMARTTPDRQQACRCLKTAASALGPNLNAGRAAGIPKACGVSVPFPISTNTNCNIVK

SEQ ID NO: 5059 - protein, 293 aa, Burkholderia vietnamiensis G4
MSILINKDTKVITQGITGKTGQFHTRACREYANGREAFVAGVNPKKAGEDFEGIPIYASVKEAKAETGATVSVIYVPPAGAAAAIWEAVEADLDLAICITEGIPVRDMIEVKDRMRREGRKTLLLGPNCPGTITPDELKIGIMPGHIHRKGRIGVVSRSGTLTYEAVAQLTALGLGQSSAVGIGGDPINGLKHIDVMQMFNDDPDTDAVVMIGEIGGPDEANAAQWIKDNMKKPVVGFIAGVTAPPGKRMGHAGALISGGADTAEAKLEIMEACGITVTRNPSEMGRLLKKAL

SEQ ID NO: 5060 - protein, 491 aa, Ashbya gossypii ATCC 10895
MLRCLSGKLPSRIIKCRGYSTEAMAENFELSTLPNGLKVATSNVVGHFSALGMYAGVGTRHEVKNLRGCTNIIDRLAFKSTENMSAVQMAEALERLGGNYQCTSGREYMMYHASVFNRDVEKMLSLMADTVRRPQISEQEVEEQKSAALYDAKGVRHNHEMLLPEMLHEVAYRGEALGVPMATAEEAIRGVSRYHLRDYRNKFYNPQNFVAAFIGVPHEEAVAMASRQFGDMENKYPPHATQPARYIGGMANSLERNNNPSLPEMYHMQIAFESLPIDHPDIYTLATLQTLLGGGGSFSAGGPGKGMYSRLYTNVLNKYHFVDNCMAFHHSYSDSGLFGISISVYPNAARYMAPIIAEELISLLPGGKYKLTEEEVDRAKNQLKSSLLMNLESRLVELEDLGRQILLRGNKIPVAQMISKISEVTPEDCMRVAELVLTGSVENSLSGTGAPTIITQGSESAFGDSLHVLKHYGLGRYDRITQGTGSFGWSA

SEQ ID NO: 5061 - protein, 961 aa, Setaria italica
MASERHQSIDAQLRLLAPGKVSEDDKLVEYDALLVDRFLDILQDLHGPHLREFVQECYELSAEYENDRDEARLGELGSKLTSLPPGDSIVVASSFSHMLNLANLAEEVQIAHRRRIKLKRGDFADEASAPTESDIEETLKRLVSQLGKSREEVFDALKNQTVDLVFTAHPTQPVRRSLLQKHGRIRNCLRQLYAKDITADDKQELDEALQREIQAAFRTDEIRRTPPTPQDEMRAGMSYFHETIWKGVPKFLRRIDTALKNIGINERLPYNAPLIQFSSWMGGDRDGNPRVTPEVTRDVCLLARMMAANLYFSQIEDLMFELSMWRCSDELRIRADELRRSSKRAAKHYIEFWKQVPPNEPYRVILGDVRDKLYYTRERSRHLLTTGISEIPEEATFTNVEQFLEPLELCYRSLCACGDKPIADGSLLDFLRQVSTFGLALVKLDIRQESDRHTDVLDSITKHLGIGSYAEWSEEKRQDWLLSELSGKRPLFGSDLPLTEETADVLGAFHVLAELPADCFGAYIVSMATAPSDVLAVELLQRECHVKHPLRVVPLFEKLADLKSAPAAVARLFSIDWYMDRINGKQEVMIGYSDSGKDAGRLSAAWQMYKAQEELIKVAKQYGVKLTMFHGRGGTVGRGGGPTHLAILSQPPDTIHGSLRVTVQGEVIEHSFGEEHLCFRTLQRYTAATLEHGMHPPISPKPEWRALMDEMAIVATKEYRSIVFQEPRFVEYFRSATPETEYGRMNIGSRPSKRKPSGGIESLRAIPWISAWTQTRFHLPVWLGFGAAFKHLMQKDIRNIHTLKEMYNEWPFFRVTLDLLEMVFAKGDPGIAAVYDKLLVAEDLQSFGEQLRKNYEETKELLLQVAGHKDVLEGDPYLKQRLRLRESYITTLNVCQAYTLKRIRDPGFQVSPQPALSKEFTDESQPAQLVQLNPESEYAPGLEDTLILTMKGIAAGMQNTG

SEQ ID NO: 5062 - protein, 982 aa, Ralstonia solanacearum
MNAPHPASAALTQTLAARPTLAELEARDAFAERHIGPSPDEQAAMLATLGYASRAALIDAVIPPAIRRQDGMPLGEFTQPLTEEAALAKLRGIAGQNRVVRSLIGQGYYGTHTPGVILRNILENPAWYTAYTPYQPEISQGRLEAMLNFQQMVMDLTAMDIANASMLDEATAAAEAMTLLQRVGKHPSNVFFVADDVLPQTLDVVRTRAEPIGVQVVTGPAADAAKHNAFGVLLQYPGTGGALLGGLSTYQALTDAVHAAGGLVVAAADLLALTLLAAPGEWGADVVIGNTQRFGVPFGFGGPHAGYMAVRDAFKRSMPGRLVGVTVDAQGNPAYRLALQTREQHIRREKATSNICTAQVLLGVMASMYAVYHGPQGLKRIAQRVHRLTATLAAGLRQIGYTLEAGAFFDTLTVATGPRTANLHIAAQAHGFNLRQIDDGRLGVSLDETVTRAEVVALWEIFAHAAHAGAPDFDQVEAGIADAFPASLARQSAYLTHPVFNAHHSEHEMLRYLRSLADKDLALDRTMIPLGSCTMKLNATAEMLPVTWPEFANIHPFAPADQTVGYREMIDQLEQMLCAATGYAAVSLQPNAGSQGEYAGLLIIHAYHASRGESHRDVCLIPSSAHGTNPASAQMAGMKVVVVACDERGNVDLADLEKKAAEHSANLAAIMITYPSTHGVFEEGVKRVCEIVHSHGGQVYVDGANMNAMVGTAAPGHFGGDVSHLNLHKTFCIPHGGGGPGVGPVAVGAHLAPFLPGRAASGEDASQNIGAVSAAPFGSASILPISWMYIAMMGAAGLTAATEAAILSANYVARRLSPYYPVLYTGAHGLVAHECILDIRPLQKESGISNEDIAKRLMDFGFHAPTMSFPVPGTLMIEPTESEPKVELDRFIDAMIAIRGEVDQVISGAFDREDNPLKHAPHTAQVVMADDWSHRYTREQAAYPVASLRTRKYWPPVGRADNVYGDRNLFCACVPMSEYAQD

SEQ ID NO: 5063 - protein, 516 aa, Aspergillus niger
MLNPKVAYMVWMTCLGLMLPSQAQSNDYRPSYHFTPDQYWMNEPNGLIKIGSTWHLFFQHNPTANVWGNICWGHATSTDLMHWAHKPTAIADENGVEAFTGTAYYDPNNTSGLGDSANPPYLAWFTGYTTSSQTQDQRLAFSVDNGATWTKFQGNPIISTSQEAPHDITGGLESRDPKVFFHRQSGNWIMVLAHGGQDKLSFWTSADTINWTWQSDLKSTSINGLSSDITGWEVPDMFELPVEGTEETTWVVMMTPAEGSPAGGNGVLAITGSFDGKSFTADPVDASTMWLDNGRDFDGALSWVNVPASDGRRIIAAVMNSYGSNPPTTTWKGMLSFPRTLSLKKVGTQQHFVQQPITELDTISTSLQTLANQTITPGQTLLSSIRGTALDVRVAFYPDAGSVLSLAVRKGASEQTVINYTQSDATLSVDRTESGDISYDPAAGGVHTAKLEEDGTGLVSIRVLVDTCSVEVFGGQGEAVISDLIFPSDSSDGLALEVTGGNAVLQSVDVRSVSLE

SEQ ID NO: 5064 - protein, 424 aa, Dehalococcoides ethenogenes 195
MSTDTWYLILFFLCIVFSAFFASSETAFISIQRFRLQNMVQSKVKGADKVSQLMERPEKFLSTVLLGNNFVNTAASALGTVLAVSIWGNERGVLIATAGVTIILLVFGETTPKTLATQHSEKIAFAVAPAVEVISKIFAPIVALLGWISSGFTKLFGGPALKSSLVAEDDIRAMITVGHKEGTVEEDKAELLHKVFEFSDRPVREVIVPRPEVESVEKGSTLKDFLDLYAESPMSRFPVYEDNMDNVLGILSIKDVLMALAKGTHNQQDLVDDLMRPAYFAPETKPIGKLFNEMREKNFRMCVVVDEYGGTAGIVSLSRLMEEIVGPVGDELAEAEKDYESINEYTFQVDGSMRIEEANAEMELDLPEGDYETIAGLILDRLGYIPKQGQQIKLQNLKVVITRMKGMKIDEVLITKEKRAASKS

SEQ ID NO: 5065 - protein, 516 aa, Aspergillus niger
MLNPKVAYMVWMTCLGLTLPSQAQSNDYRPSYHFTPDQYWMNEPNGLIKIGSTWHLFFQHNPTANVWGNICWGHATSTDLMHWAYKPTAIADENGVEAFTGTAYYDPNNTSGLGDSANPPYLAWFTGYTTSSQTQDQRLAFSVDNGATWTKFQGNPIISTSQEAPHDITGGLESRDPKVFFHRQSGNWIMVLAHGGQDKLSFWTSADTIHWTWQSDLKSTSINGLSSDITGWEVPDMFELPVEGTGETTWVVMMTPAEGSPAGGNGVLAITGSFDGKTFTADPVDASTMWLDNGRDFDGALSWVNVPASDGRRIIAAVMNSYGSNPPTTTWKGMLSFPRTLSLKKVGTQQHFVQQPITELDTISTSMQTLANQTITPGQTLLSSIRGTALDVRVAFYPDAGSVLSLTVRKGASEQTVINYTQSNATLSVDRTESGDISYDPAAGGVHTAKLEEDGTGLVSIRVLVDTCSVEVFGGQGEAVISDLIFPSDSSDGLALEVTGGNAVLQSVDVRSVSLE

SEQ ID NO: 5066 - protein, 208 aa, Lycopersicon esculentum
NSARAQLAINDNANGLARYAIICQQNGLVPIVEPEILVDGAHDIKKCADVTERVLAACYKALNDHHVLLEGTLLKPNMVTPGSESPKVAPEVIAEYTVRALQRTMPPAVPAVVFLSGGQSEEEATVNLNAMNKLQTKKPWSLSFSFGRALQQSTLKAWGGKEENVQKAQAAFLTRCKANSEATLGKYVGASNLSEGASESLHVKDYKY

SEQ ID NO: 5067 - protein, 157 aa, Sulfolobus solfataricus
MASWKYPQLDVDELKIAKAVIRDVPASIRDLYNVCKAIRGMYLNDAKDFLNRVLEEKEALPFWRYNKGASHKSNISAKWKIKAGRYPKKAIRQVLKVLENAEANATNKGLDVDKLIIRHIAAHKGITLQRYMPRAFGRATAKYRRTSNIEVILEEVE

SEQ ID NO: 5068 - protein, 417 aa, Zea mays
FVIAVDDENGDNEGDLVMAATLVDQKSVAFMIRNGSGIISVGMEEEDLTRLMIPMMSPITEIEDITAAASTVTVDARVGISTGVSAADRAKTILTLASSDSKPSDLRRPGHIFPLKYRNGGVLKRAGHTEASVDLVALAGLRPVSVLSTVMDPRDGSMAGVTVLQQMAMEHDIPIVSIADLIRYRRKREKLVELIAVSRLPTKWGLFRAYCYQSRLDGTEHIAVVKECLIEGDTSSIWHVAKAIHKLEFAFGVIPNVRAKGVASTKAAELLNSMQLEDPVNMDDMGIPEINTVILLDREVDMVTPMCSQLTYEGLLDEKKVDCCIHLSDSTRSTVDKLLESTPLGDIKVLLVPPRYSCTSSTMPPANVATNGPCTTVLPLAPPPALAPLPSLDFYAGHVAAMLDESFGMSSTSTMMD

SEQ ID NO: 5069 - protein, 149 aa, Synechococcus sp. RS9917
MHVRFREVDPFNCWLWLRFADVPSQGERNYVDGIFDSWYVIGRLGGFNAENLQAHEEGDELSWMAYDNDEATSAMPALMHNMSQLEYHQDWARCWVDLGTSDALGLDVLINALRQLDSDVVQLEELLIGGENEDWPVEEHPDSIFPSFN

SEQ ID NO: 5070 - protein, 490 aa, Xanthomonas campestris pv. campestris str. 8004
MPRFPDQLLYIGGRYVPARGGHTFEVVNPATGEVLANVHNADADDLDAAVDSAKAGQRHWAALTVVERSRILLRAVALLRERNDALAELETLNTGKPLSETRSVDIVTGADVLEYYAGVAQALQGVQVPLREGSFFYTRHEPLGVVGAIGAWNYPIQIALWKAAPALAAGNAMIFKPSEVTPLTALKLAEIFTEAGLPDGVFNVLPGDGASVGHALTEHPEIEKISFTGGTATGRKVMASASSSSLKDVTMELGGKSPLIVCADADLDLAADIAMMANFYSSGQVCTNGTRVFVPRALRTAFEARLLARVQRIHIGDPLDERTTFGPMVSAAHMQRVLEHIEQGKAEGARLLCGGERLRDGALAQGCYVAPTIFSDCTDVMTIVREEIFGPVLSLLTYDDEDEAITRANATSYGLAAGVVTPDLSRAHRLIHRLEAGICWINTWGESPAPMPVGGYKQSGVGRENGLATLQAYTRTKSVQVELERYASVF

SEQ ID NO: 5071 - protein, 144 aa, Glycine max
MVAFTEKQDALVSSSFEAFKANIPQYSVVFYTSILEKAPAAKDLFSFLANGVDPTNPKLTGHAEKLFALVRDSAGQLKASGTVVADAALGSVHAQKAVTDPQFVVVKEALLKTIKAAVGDKWSDELSRAWEVAYDELAAAIKKA

SEQ ID NO: 5072 - protein, 508 aa, Zea mays
MSTSKGSAAKGGGGKKKEVKKETKLGMAYRKDDNFGEWYSEVVVNSEMIEYYDISGCYILRPWAMEIWELMKEFFDAEIKKLKLKPYYFPLFVTENVLQKEKDHIEGFAPEVAWVTKSGKSDLEAPIAIRPTSETVMYPYFSKWIRSHRDLPLRCNQWCNVVRWEFSNPTPFIRSREFLWQEGHTAFANKEEADEEVLQILELYRRIYEEFLAVPVSKGRKSEMEKFAGGLYTTSVEAFIPNTGRGIQGATSHCLGQNFAKMFDITFENEKGVREMVWQNSWAYTTRSIGVMVMTHGDDKGLVLPPKVAPIQVIVIPVPYKDADTTAIKGACESTVYTLNQSGIRADQDTRENYSPGWKYSHWEMKGVPLRIEIGPKDLANKQVRIVRRDNGAKVDIPVTNLVEDVKVLLDEIQKNLFKTAQERRDACVQVVNSWDEFTTALNNKRLILAPWCDEEEVEKDVKARTKGELGAAKTLCTPFEQPELPEGTLCFASGKPAKKWSFWGRSY

SEQ ID NO: 5073 - protein, 250 aa, Zea mays
MYKLGRGNRDKVQQFMTITGASEKVALQALKASDWHLEGAFDFFYSQPQVSVVNTRHLEDIFNRYKEPDADMIMVEGISQFCGDLQVDPQDIVMLVISWHMKAATMCEFTRQEFIGGLQSIGVDSIEKFRGKLPSLRAELKDDNKFRDIYNFAFTWAREKGQKSLSLETAIGMWQLLFAERNWPLLDHWCQFLQVRHNKAISRDTWSQLLEFVKTTDPQLSNYDDEGACPSLINEFVENLTENGLVQRKK

SEQ ID NO: 5074 - protein, 770 aa, Oryza sativa
WQSHIILPKEEEAGAGQWQVEEDHDSPAAPGYQHQQGPPVAKALPFSATCVRISRDSYPNLRALRNASAMSLPDDDAAYAKLEEGDYGYLLDDVPHFTDYLSDLPTFPNPLQDHPAYSTVKQYFVNADDTVPEKVVVQKDSPRGVHFRRAGPRQRVYFESEDVKACIVTCGGLCPGLNTVIRELVCGLSHMYNVNDIFGIQNGYKGFYSSNYLPMTPKSVNDIHKRGGTVLGTSRGGHDTKKIVDNIQDRGINQVYIIGGDGTQKGAYEIYKEIRRRGLKVAVAGVPKTIDNDIAVIDKSFGFDSAVEEAQRAIDAAHVEASSAENGIGLVKLMGRYSGFIAMYATLASRDVDCCLIPESPFYLEGEGGLFEYIEKRLKENNHMVIVVAEGAGQDLIAKSIAAADQIDASGNKLLLDVGLWLTHKIKDYCKNKKMEMTIKYIDPTYMIRAIPSNASDNVYCTLLAHSAIHGAMAGYSFTVGMVNGRHAYIPFHRVTSTRNKVKITDRMWARLLSSTNQPSFLSQKDIDAAREADKLASKSPVPVNTKEHGENVKKPANGEGSSDAVVQEPFATTPTSPAALAAGAVSNPALTPAAVSMSFYDVNAGEQPSREDEAPEEVVEAAVANGAPTAVEKHNKLYSPAETPAGSGTRPHPTADAVAETAGAAPDDVDGCTTPPPPPVHDSEGSDTQSADDHGSPQREKPRTTSTAGGVKRDVAPSWSSRLLAFRSFSRDKKAKATVDARPPAHGKARDEGDEHKEKGKERRKRFWK

SEQ ID NO: 5075 - protein, 511 aa, Zymomonas mobilis
MESPSYKNLIKAEDAQKKAGKRLLSSEWYPGFHVTPLTSWMNDPNGLIFFKGEYHLFYQYYPFAPVWGPMHWGHAKSRDLVHWETLPVALAPGDSFDRDGCFSGCAVDNNGVLTLIYTGHIVLSNDSPDAIREVQCMATSIDGIHFQKEGIVLEKAPMPQVAHFRDPRVWKENDHWFMVVGYRTDDKKHQGIGHVALYRSENLKDWIFVKTLLGDNSQLPLGKRAFMWECPDFFSLGNRSVLMFSPQGLKASGYKNRNLFQNGYILGKWQAPQFTPETSFQELDYGHDFYAAQRLKLKDGRQNINCMVDMWKSKPSQRDGWAGCMTLPRKLDLIDNKIVMTPVREMEILRQSEKIESVVTLSDAEHPFTMDSPLQEIELIFDLEKSNAYQAGLALRCNGKGQETLLYIDRSQNRIILDRNRSGQNVKGIRSCPLPNTSKVRLHIFLDRSSIEIFVGDDQTQGLYSISSRIFPDKDSLKGRLFAIEGYAVFDSFKRWTLQDANLAAFSSDAC

SEQ ID NO: 5076 - protein, 425 aa, Mycobacterium tuberculosis H37Rv
MTRLDSVERAVADIAAGKAVIVIDDEDRENEGDLIFAPEKATPEMVAFMVRYTSGYLCVPLDGAISDRLGLFPMYAVNQDKHGTAYTVTVDARNGIGTGISASDRATTIGLLADPTSVSDDFTPPGHVVPLRAKDGGVLRRPGHTETPVDLSRMAGLQPAGAICEIVSQKDEGSMAHTDELRVFADEHGLALITIADLIEWRRKHEKHIERVAEARIPTRHGEFRAIGYTSIYEDVEHVALVRGEIAGPNADGDDVLVRVHSECLTGDVFGSRRCDCGPQLDAALAMVAREGRGVVLYMRGHEGRGIGLMHKLQAYQLQDAGADTVDANLKLGLPADARDYGIGAQILVDLGVRSMRLLTNNPAKRVGLDGYGLHIIGRVPLPVRANAENIRCLMTKRDKLGHDLAGLDDFHESVHLPGEFGGAL

SEQ ID NO: 5077 - protein, 354 aa, Hordeum vulgare
MDGNKGPVVVTGASGFVGSWLVMKLLQAGYTVRATVRDPANVEKTKPLLELPGAKERLSIWKADLSEDGSFNEAIAGCTGVFHVATPMDFDSQDPENEVIKPTVEGMLSIMRACKEAGTVKRIVFTSSAGSVNIEERPRPAYDQDNWSDIKYCRRVKMTGWMYFVSKALAEKAAMEYASENGLDFISIIPTLVVGPFLSAGMPPSLVTALALITGNEAHYSILKQVQLVHLDDLCDAMTFLFEHPEANGRYICSSHDATIHGLARMLQDRFPEYDIPQKFAGVDDNLQPIHFSSKKLLDHGFSFRYTTEDMFDAAIHTCRDKGLIPLGDVPAPAAGGKLGALAAGEGQAIGAET

SEQ ID NO: 5078 - protein, 162 aa, Nocardioides sp. JS614
MSILDAKIARLDGTPSTLGEITGGRPALLVNVASKCGLTPQYAGLEELHERLADRGFTVVGLPCNQFRGQEPGTADEIAEFCSATYGVTFPMTEKIDVNGPDRHEIYRTLVDTPNESGESGDITWNFEKFLVDASGAVLARFSPGVEPGDPRLVAAVESQVG

SEQ ID NO: 5079 - protein, 461 aa, Roseovarius nubinhibens ISM
MFNRAVALMDLPPGLEEKIRVCNATYTVRFGVRLRGQIHTFTGYRSVHSEHMEPVKGGIRYAMGVNQDEVEALAALMTYKCALVEAPFGGSKGGLRIDPREWDEDELERITRRFAYELIKRDLINPSQNVPAPDMGTGEREMAWIADQYKRMNTTDINGRACVTGKPINGGGIQGRTEATGRGVQYALQEFFRHPEDMKAAGLSGTLDGKKVIVQGLGNVGYHAAKFLSEEDGCIITGIIERDGALVSEDGLHVEEVRHWIAKHGGVKGYPDAEYVEDGSKVLENACDILVPAALEGVIHMGNAANIQAPLIIEAANGPVTAGADEILRKKGAVIIPDMYANAGGVTVSYFEWVKNLSHIRFGRMGRRQEEARHQLIVDELEQLSADRGLGWTLTPGFKQQYLRGAGELELVRSGLDDTMRAAYQSMREVWHGRQDVTDLRTAAYLVSIDKVAASYRAAGL

SEQ ID NO: 5080 - protein, 411 aa, Arachis hypogaea
MLEGGAKFPGLIDLNKHTTDNYYDFSQGFYHKLGEGTNMSIDSMQTSNGGGSVAMSIDNSSVGSNDSHTRILNHQGLRRRANDNYSVQNSVNRRGRVTHALSDDALAQALMDSSSPTEGLENFDEWTIDLRKLNMGEAFAQGAFGKLYRGTYNGEDVAIKILERPENELSKAQLMEQQFQQEVMMLATLKHPNIVRFIGACRKPMVWCIVTEYAKGGSVRQSLMKRQNRSVPLKLAVKQALDVARGMAYVPWLGLIHRDLKSDNLLIFGAKSIKIADFGVAGIEVQTEGMTPETGTYRWMAPEMIQHRPYTQKVDVYSFGIVLWELIPGMLPFQNMPAVQAAFAVVTKNVRPIIPNDCLPVLRDIMPRCWDPNPDVRPPICRNCRNAETEIMTTVRKARFRCCMTQPMTAD

SEQ ID NO: 5081 - protein, 407 aa, Geobacter sulfurreducens PCA
MERHFDIVIIGNSAAGMQALRTIRRHSRSVSVAMVDRENCPAYSRVLTPYYVGGKTLRGNLFIVGSDFYDHYGIATLLGHAAVELDAERHRLLLADGTAVGFGQLLIAAGAEARGLEVTAEGVCTLRHLADADRLERLLKGARSVTAVGAGLVSIPLLSHAGPEVERHLVIGSDRVFSRVVDPEASAILEERFLADGLVLHKRDDIVNLSGTDRLELSLATGKRIVTDMLLVGKGVVPNTDLALRAGLEVREGIVTDERCRTSHPQIFAAGDVAEGKDFVTGEPTIQGNWLTAVEQGEIAALNMLGFDCAYEGSLKNNTTEVFGVDVAVVGYCRDDAPRTATARDPFTGRFRKVFLDGRDRVIGATMIGETNDAGLYYQLVRTRALFPGPTFLRGTGTQAAALARLA

SEQ ID NO: 5082 - protein, 423 aa, Neorickettsia sennetsu str. Miyayama
MQNLVQRRLGNNLPVFVDSISGHYSVSIKVWVRAGSECETQENGGLAHFLEHMIFKGTSTRNAAQIAEDFDRLGGYFNACTSRGYTVYYVRLLEEHLDKGMEILSDVINNSIFPEEELEREKLVVLEEISQTEDAPDDIIFDRFFESIYPNQAYGRPILGSRENVKRFTRNDIASFISQHYYSENMMLIASGKVDAERFISLAEKYFGGIKSISRRAANRLPAKYVPVEYREERKLEQTHIILGLPCVSYSDGISQVYSAKVLAILFGGGMSSRLFQEVREKRGLAYSISAFHAPSETSAIMGVYSSTDPKRLKELVAVVLGELAKLRNTLTIEEVESAKQQIKSSILMSLESNESRASHIGRSIHYFGRYIDGAELIEVIDAVEVDDVASITEFMLRGKRLSLALIGAKDVLDERGVLAEAL

SEQ ID NO: 5083 - protein, 427 aa, Treponema denticola ATCC 35405
MLYEVMEDKVNNEVVDAGTPAIIKVIGAGGGGSNAVNRMMSSNMRYVDFIVANTDLQALRHSNAPLKLPIGTKITKGLGSGGDPEIGEQAAIEDREIIANAIKDADMLFITAGMGGGTGTGSAPIIAEIAKEQGILTVAVVTKPFAFEGRKRMSLAEEGIKKLRESVDTVITIPNQHLLNMVDPSTPVVEAFKKADDVLRQAVQGISDLIYQHGEINVDLADVKAVMKAQGNAHMGVGIGEGQNRAVDAATNALNNPLLEEARVEGAKNLLVNICGSEKLTMHELSEIMDIINAGADPDVATFFGATIDPSVENKVVVTLIATGFRSNDKFPIDDAASNRKPVRDNAENLVFTDDSFMTSREWTKVNKTTPPTLSGLGLRNRSETSSEKHYEDIYVAERKPSFSSIVPPMESDLETPAYYRNQNALR

SEQ ID NO: 5084 - protein, 485 aa, Aspergillus fumigatus
MAENMSTSGSSTLPPPPPQASSASGQQYDSSQGNGQANPSHMPPPPRPPVVIPQNTNPIPTAITSPMSGNMMSPTSAGGYVRRAAPEPNKRALYVGGLDPRVTEDILKQIFETTGHVQSVKIIPDKNFNSKGYNYGFVEFDDPGAAERAMQTLNGRRIHQSEIRVNWAYQSNSANKEDTSSHFHIFVGDLSNEVNDEILLQAFSAFGSVSEARVMWDMKTGRSRGYGFVAFRERADAEKALNAMDGEWLGSRAIRCNWANQKGQPSISQQQAMAAMGMTPTTPFGHHHFPTHGVQSYDMVVQQTPQWQTTCYVGNLTPYTTQNDLVPLFHNFGYVLETRLQADRGFAFIKMDTHENAAMAICQLNGYNVNGRPLKCSWGKDRPPTGQFDNFSGQQPNSPFNSNPATYFPQYGGPGAPITPQGTFHILSPSPTPAGRGWEQGGMTGQGYGQAPQNAGFGRGQATPNSGWNQPNNGNFGNGFGGYQA

SEQ ID NO: 5085 - protein, 447 aa, Bacillus cereus G9241
MLHRYLPMTEEDKKEMLQTIGVQTIDELFSDIPESVRFKGDLKIKEAKSEPELLKELSQMASKNANLKEYASFLGAGVYDHYAPVIVDHVISRSEFYTAYTPYQPEISQGELQAIFEFQTMICELTGMDVANSSMYDGGTALAEAAMLAAGHTRKKKILVSSAVHPESRAVLETYAKGQHLEVVEINHKDGVTDLDVLQSEVDDTVACVIVQYPNFFGQVEKLADIEKIVHQQKSLFIVSSNPLSLGALTPPGKFGADIVIGDAQPFGIPTQFGGPHCGYFATTKAFMRKIPGRLVGQTVDSDGKRGFVLTLQAREQHIRRDKATSNICSNQALNALAASVAMTALGKQGVKEMARQNISKAQYAKRQFEAKGFTVTFAGPFFNEFVVDCKRPVKEVNDVLLQKNIIGGYDLGRDYKEHENHMLVAVTELRTKEEIDTLVNEMGAIQ

SEQ ID NO: 5086 - protein, 506 aa, Mycobacterium avium subsp. paratuberculosis K-10
MTTQIPHFIDGQRTAGQSTRTADVFDPSTGAVQAQVPMAGRADIDAAVASAIEAQKGWAATNPQRRARVLMRFIELVNQHNDELAELLSREHGKTLADAKGDIQRGIEVIEFCVGIPHLLKGEYSEGAGPGIDVYSLRQPLGVVAGITPFNFPAMIPLWKAGPALACGNAFVLKPSERDPSVPVRLAELFVEAGLPPGVFQVVHGDKEAVDAILNHPDIQAVGFVGSSDIAQYIYAGAAATGKRSQCFGGAKNHMIVMPDADLDQAVDALIGAGYGSAGERCMAISVAVPVGDKTADRLRARLVERINNLRVGHSLDPKADYGPLVTGAAVARVRDYIDQGVAAGAEIVVDGRERRSDDLTFGDANLEGGFFIGPTLFDHVTPDMSIYTDEIFGPVLCIVRAQNYEEALRLPSEHEYGNGVAVFTRDGDAARDFVSRVQVGMVGVNVPIPVPVAYHTFGGWKRSGFGDLNQHGPASIQFYTKVKTVTSRWPSGIKDGAEFVIPTMD

SEQ ID NO: 5087 - protein, 971 aa, Photobacterium sp. SKA34
MTFTLKGIGTKLLIAFSAMAGLMIIAVMIGVAGFSLVAKTERTVINSAVPALAEARQLSDLSSRIIFNAQVLAKSKAESERMRQGRALTIHIEALNRSLHSLEQFSFDQPLMLKLGEDVKRIVDNLALLGLLVGRQIDLQSQLDKLTTEMTKATHQIDNLSQSQVSNANTIAIANVSRIYDLVADGNKPAVYKALDSLVEVDMDLSERLFELRFLSLQVINMLDDSNRIVDIKSLVALKKRYNDAVGIMSQRVKSVEDPSRSEQLVGLTSQLNRGRLLFGIIEQLIYAKQDVERLDQQNLVLFQQLNNTVDDIIDFANVNTQQAVKRVDHTLTLARNTLIVISAIGLLALVLIMWRFVYARVICRINEYSRALSALTRGDLGVRINVKGDDELAQMGRAILVARETANERYRLAQAESKARQELQEHKASLERLVAKRTGELEKINRRLNEEVYNHYKARDEAEKANRAKSSFLATMSHEIRTPMNGVLGTASLLADTQLTSQQKRYLDVINRSGETLLDILNDILDYSKIEAGHLDIRSSNFSVVRMVTDVSNMLEGRSLAKRIGLECHISPQVEGVWFGDESRIRQVLVNLVGNAIKFTDTGKVSIFVEPHPDMPDELLFSVKDTGIGIDEEAQSLLFSAFQQAAAGRKSIEGTGLGLAISKHIVAAMDGEIGLESVVGEGSCFWFALPLEHGEGSLETDDKRVIMRSAHILLVEDNPVNSMVAEGFLTRLGHTVVTASDGAEAEEIYKNQRFDIALLDINLPDTDDVQLLSRLRRLEDNNHEVWEEPTPMVAFSAHVFREEVELYLNAGFAGFLPKPLVEKQLIDTMSSILKGEKRVIIEKGIGEESVEVQQTENTIPLLKESVLGSDLQILGETQVKQLIYLFGESSSLTLTKLHQAIDDENLSEVAKQAHTLKGAAGTMGLMQLHQICSEFEKNAKEGSINSLDLSSLQRVFDQSVAILETTFISA

SEQ ID NO: 5088 - protein, 432 aa, Helicobacter hepaticus ATCC 51449
MSISNMVSIPSLVPSSLPKHYTKHLDNGLQIVVVPLNNKSGVIETNIFYKVGSRNEVMGKSGIAHMLEHLSFKSTDKLKAGEFDEIVKGFGGVNNASTSFDYTRYFIKSSVENLDKSLELFSELMSNLLLKEDEFEPERNVVAEERLWRTDNSPMGYLYFRFFNTAFVYHPYHWTPIGFMQDIQSWNIDDIRSFYRTYYQPQNAIVLVSGDIEPNVVFQSATQYFGKLKNTSSDIPQVRAKEPKQDGMRRNIVKKDSQVEFLAMGYKIPNYLSEDQVALSAIGEILSAGKSSIFQRELIDKQQIATSAYAYNMDMKDESVFLLIVAAKQGVRAEKIEEEVIKILENIKKGHISQEELDKVKVNTRANFIYSLENSSEVAGLFGSYLVRGDIKPLLSYERDINTLNLDKIQQVANKYFVEDTLSVVILKDKGR

SEQ ID NO: 5089 - protein, 631 aa, Alkalilimnicola ehrlichei MLHE-1
MCGITGIFDLQAQRPIDVPLLEAMNQTQYHRGPDEGGLHHEPGVGLAHRRLSIIDLSSGQQPLFNEDGSVAVTYNGEIYNFPELTRTLQSAGHTFRTHCDTEVIVHAWEEWGEACVERFRGMFAFALWDRNRETLFLARDRLGIKPLYYAALPDGHLLFASELKALMAHPDLPRQLDPCAVEEYFGFGYVPEPRSIFAGVHKLPPGHTLTVRRGQGGVPASRAYWDVPFAPLPAMGEAEAAEELVRRLREAVEIRLVAEVPLGAFLSGGVDSSAVVAMMAGLSPDPVRTCSIGFDDPRYDESEYARMVAERYRTAHRLDQVNPDDFDLLGKLGALYDEPFADSSALPTYRVCEQARRQVVVALSGDGGDENLAGYRRYRHHLGEERLRGLLPLGLRRGLFGSLARVYPKADWAPRVFRAKATFQALARDAVEGYFQGVSILRDDLRRHLFSSGFRSELQGYSAVDVLRRHAAQAPTDHPLSLVQYLDMKTYLPGDILTKVDRASMAHALEVRVPILDHKLVEWMSGLPPEMKLNGSEGKHLLKKAMEPHLPHEVLYRKKRGFAVPVAEWFRGPLRQRVRDQVLGPRIGESGLFDMDFLNRLVDEHTRGARDHSPALWSLLMFDEFLAKARP

SEQ ID NO: 5090 - protein, 477 aa, Brucella suis 1330
MTFHQNLIAGEWVGGDDIANINPSDTNDVVGTYARATAEDTKAAIAAAKAAFPAWSRSGILERHAILRKTADEILARKEELGRLLSREEGKTLVEGIGETIRASQIFDFFAGECLRLAGEVLPSARPGIGVEVTREPVGVVGIITPWNFPIAIPAWKIAPALCYGNTIVFKPAELVPGCSWAIADILHRAGLPKGVLNLVMGKGSVVGQTILDSADVNAVTFTGSTGTGKRVAAASIEHNRRFQLEMGGKNPVVVLDDADLNVAVESVVNSAFFSTGQRCTASSRIIVTEGIHDKFVAAAIEKLKTVVVDNALKPGTHIGPVVDETQLQQDMDYIELGRKEGAKLAFGGERLNRETPGFYLQPALFTEATNQMRISREEIFGPVASVIRVKDYEEALATANDTSFGLSSGICTTSLKYATHFKRNSEAGMVMVNLPTAGVDFHVPFGGRKGSSFGPREQGRYAAEFYTTVKTAYTLA

SEQ ID NO: 5091 - protein, 417 aa, Coxiella burnetii RSA 493
MTVDVEYLGILLVLLIFLSAFFSGSETGMMALNRYRLRHLARKGHVKAQRVVTLLKRPDRLLGVILIGNTFANILASAVATVIAVHYLGDLGVIISTVILTFLILVFAETTPKTLAALYPQRVAFPASLPLQILLRVFYPLVWLVNTIANAFLRIFGVKVSVQGTEVVSAEELRSIVREVIGKGLSGYQQMLLRVLNLGQMTVEDVMVPRNRIHGIDIRDDWHKIVEVLLTSEHDYLPIYRENIDRVIGLLNLRRVMQLLSQQQLTKEKLVKVAEEVYFIPEVTLLNQQLLNFRERNKTVGLVVDEYGDIEGLVTLRDILEEVVGEFATGIDGATSLVQFQKEGSYLIDARISVRDLNRIMQWDLPIKGPKTLSGLIIEDLESIPIVGICIRLSGYPMEIVKVSRNAVRLVKVWSKF

SEQ ID NO: 5092 - protein, 548 aa, Hypocrea jecorina
MPIGNIYVIAGVSVVGGALFGFDISSVSAQLAEQSYLCYFNQDENPPTTVDGTCGGPRSLVQGGITASMAAGSWLGALISGPLSDRLGRKYSIMVGCIIWVIGSTLSCASQNIGMLIVARIINGLSVGIESAQVPVYIAEISPPSKRGRFIGMQQWAITWGILIMYYISYGCSFIGKQNPLEYNTASWRIPWGLQMIPAFFLFFMMMPLPESPRWLARKDRWEDCRAVLTLVHGKGDPNHPFVAYELQDIKDMCEFERRHADVTYLDLFKPNMLNRTFIGLFTQIWSQLTGMNVMMYYIANIFSMAGYSGNANLLASSIQYIINVLMTIPALLWVDKWGRRPTLLVGSVLMALWMYANAGILATYGEVVPGGIDHVAAQSMRVSGAPAKGLIACTYLFVASFAPTWGPVSWTYPPELFPLRLRGKGVALATSGNWAFNTALGLFTPVAFANIKWKSYLIFAIFNTVAFFHVFFVFPETAGKTLEETEAMFEDPNGIKYLGTPAWKTRVATSLTERAEHGDIEAKIGHDTEKPPVHTHEEEKASTPPPQ

SEQ ID NO: 5093 - protein, 366 aa, Bacillus coagulans
MKMKLAVLPGDGIGPEVMDAAIRVLKTVLDNDGHEAVFENALIGGAAIDEAGTPLPEETLDICRRSDAILLGAVGGPKWDHNPASLRPEKGLLGLRKEMGLFANLRPVKAYATLLNASPLKRERVENVDLVIVRELTGGLYFGRPSERRGPGENEVVDTLAYTREEIERIIEKAFQLAQIRRKKLASVDKANVLESSRMWREIAEETAKKYPDVELSHMLVDSTSMQLIANPGQFDVIVTENMFGDILSDEASVITGSLGMLPSASLRSDRFGMYEPVHGSAPDIAGQGKANPLGTVLSAALMLRYSFGLEKEAAAIEKAVDDVLQDGYCTGDLQVANGKVVSTIELTDRLIEKLNNSAARPRIFQ

SEQ ID NO: 5094 - protein, 335 aa, Streptomyces avermitilis MA-4680
MTIRVGINGFGRIGRNYFRALLEQGADIEIVAVNDLGDTATTAHLLKYDTILGRLKAEVTHTADTITVDGKTIKVFSERNPADIPWGELNVDIVIESTGIFTKKADAEKHIAGGAKKVLISAPASDEDITIVLGVNEDKYDPAKHNVISNASCTTNCVAPMAKVLDENFGIVKGLMTTIHAYTNDQRILDFPHKDLRRARAAAENIIPTTTGAAKATALVLPQLKGKMDGISMRVPVPTGSATDLVVEVSREVTKDEVNAAFKKAAEGELQGYLSYTEDPIVSSDIVGDPSSCTFDSAMTMVMEGTSVKILGWYDNEWGYSNRLVDLTVFVGNQL

SEQ ID NO: 5095 - protein, 498 aa, Sinorhizobium meliloti
MYELGHFIDGKRVAGTSGRVSNIFNPATGEVQGTVALASDADLAAAVESAKAAQPKWAATNPQRRARVFMKFVQLLNDNMNELAEMLSREHGKTIDDAKGDIVRGLEVCEFVIGIPHLQKSEFTEGAGPGIDMYSIRQPVGIGAGITPFNFPGMIPMWMFAPAIACGNAFILKPSERDPSVPIRLAELMIEAGLPAGILNVVNGDKGAVDAILTHPDIAAVSFVGSTPIARYVYGTAAMNGKRAQCFGGAKNHMIIMPDADLDQAANALIGAGYGSAGERCMAISVAVPVGEETANRLIDKLVPMVESLRIGPYTDEKADMGPVVTKEAEQRIRSLIDSGIEQGAKLVVDGRDFKLQGYENGHFIGGCLFDDVTPDMDIYKTEIFGPVLSVVRARNYEEALSLPMKHEYGNGVAIYTRDGDAARDFASRINIGMVGVNVPIPVPLAYHSFGGWKSSSFGDLNQHGTDSIKFWTRTKTITSRWPSGIKDGAEFSIPTMR

SEQ ID NO: 5096 - protein, 105 aa, Geobacillus kaustophilus HTA426
MAIVNATDQTFAAETKDGLTLVDFWAPWCGPCRMIAPVLEELDREMGDKVKIVKVNVDENQETASKFGVMSIPTLLVFKNGELVDKAIGYQPKEALVQLVGKHVS

SEQ ID NO: 5097 - protein, 513 aa, Magnetococcus sp. MC-1
MSENRIVIFDTTLRDGEQSPGCSMNVEEKLRIARQLERLKVDVIEAGFPIASPGDFIGVKTVADTIKECQVAGLCRAKDTDIDRAWEALQGAVDPRIHTFIATSPIHMQHKLRMEPDEVIEAAVAAVKRAKSHTSNVEWSAEDAGRTEPDFLCRIVEAVIAAGATTVNIPDTVGYTLPHEYGERIRTLCERVPNIHKAIISVHCHNDLGLAVANSLSAVINGARQVECTINGLGERAGNASLEEVVMALRTRKDILPYSCGVDTTEIMRSSKLVSSVTGFPVQPNKAIVGANAFAHESGIHQDGVLKKADTYEIMTPASVGLSTNRMVLGKHSGRHAFKERLKSLGHDLDNEQLKRAFERFKELADKKHELFDEDLEVLVDEEMYRHFGAYYKLTRLHVASGTRDTPVAVVQVEYNGEESMHSAWGKGSVESVFNALRKLIPEAAEAEVLLYQVRAVTEGIDAQGEVTVRLRLGESIVQGQGADTDIIIASAHAFINALNKAAYQRHKPGKGV

SEQ ID NO: 5098 - protein, 426 aa, Streptomyces glaucescens
MTRHAEKRVVITGIGVRAPGGAGTAAFWDLLTAGRTATRTISLFDAAPYRSRIAGEIDFDPIGEGLSPRQASTYDRATQLAVVCAREALKDSGLDPAAVNPERIGVSIGTAVGCTTGLDREYARVSEGGSRWLVDHTLAVEQLFDYFVPTSICREVAWEAGAEGPVTVVSTGCTSGLDAVGYGTELIRDGRADVVVCGATDAPISPITVACFDAIKATSANNDDPAHASRPFDRNRDGFVLGEGSAVFVLEELSAARRRGAHAYAEVRGFATRSNAFHMTGLKPDGREMAEAITAALDQARRTGDDLHYINAHGSGTRQNDRHETAAFKRSLGQRAYDVPVSSIKSMIGHSLGAIGSLELAACALAIEHGVIPPTANYEEPDPECDLDYVPNVAREQRVDTVLSVGSGFGGFQSAAVLARPKETRS

SEQ ID NO: 5099 - protein, 257 aa, Geobacillus kaustophilus HTA426
MDFFRLAKEEFVAVVTFSRPPANALSSAVLKELSTVLDELETDPDVRVVLLHGEGRFFSAGADIKEFTSIASVEEASGLSRNGQLVMERIERFSKPVIAAIHGAALGGGLELAMSCHIRVVAENAKLGLPELQLGIIPGFAGTQRLVRYVGFGKAAEMMWTSEPITGLEAVEWGLANKAVPEERLLDEAKALAKKIAAKSPLSVRATIELLNAAKEKSFAEAVREEAEWFGRVFVSEDAKEGVQAFLEKRPPVFKGK

SEQ ID NO: 5100 - protein, 466 aa, Sulfitobacter sp. EE-36
MTKDVSTTPDQDGEKTELKRVMGPGLLLLFVVGDVLGTGIYALTGEVAAKVGGIVWLPFLVAFVLATVTACSYLELVTKYPKAAGAALYTQKAFGVHFLTFLVAFAVMSSGITSASTASQAFAENFGKSFGLGDGAFLITAISIGFMVLLGLINLRGVGESVKANVVLTCIELTGLLIIIMIGAAALMGGQGDFGRAFDFSSAGEQGLFWPVIAATTLAFFAMVGFEDSVNMAEEAKNPSRIFPKVLLGGLLITGVIYLLVSITAIALVDAEALGEGATPLLKVVEAGAPWFPLSVFGIITMCAVANSALINMLMASRLLYGMAQEKVLPSILGKVLPKRRTPYTAIVFTTGLAIALITFVGAVPDLGGTTALLLLAVFTLVNIAVLVLRSDTVDHDHFTSPLGLPYIGAISCAFFVGPWTGRDSVQYLIAAVLIGLGVVLWGATVFYMKSKGQDPLASDMDKLSE

SEQ ID NO: 5101 - protein, 344 aa, Rickettsia akari str. Hartford
MNKRRKIAIVLFNLGGPKDLKSVKYFLFNLFYDKAIINLPNPLRYIIAKIISITREKKSQKIYSLIGGKSSLLQETEEQKLALTEKLKQLIKEDFAIFINMRYSAPFAKEVIGQIKIYNPSEIILLPLYPQFSSTTTGSSVKNFLQNLDIDIPIKTICCYPTEEHFIKTHVSLINEKLNDKNFRVLFSAHGLPEKIIKAGDPYSFQIKETVKAIVKELNIKDLDYKITYQSRVGHIEWLKPNTENEIELAGKLKKNIIIVPISFVSEHVETLVELDIEYKLIADKYEIQYTRIPTLGTNKIFINSLTNILLRFINKVDTNLVTSSSSTRICPSEFTKCLCKLTN

SEQ ID NO: 5102 - protein, 329 aa, Burkholderia xenovorans LB400
MAKQFGATSTTDDVLSGKRLDGKRILVTGVSAGLGVETARALASHGATVVGAARDLEKAERAITSARQEAVAGGGSIELIELDLASLASVRACSDKLLAEGKPFDIVIANAGVMATPQGKTADGFETQFGTNHLGHFVLVNRLARLLHDGGRVVMLASSGHRFANVDLDDPGFERTPYDPFVAYGRSKTANILFAVAFDQRHRARGVRAAAVHPGGIQTELGRHMGEEQLATMVETINKQLASEGKPPFQFKTVPQGAATSVWTAAVASAEEIGGRYCENCHVSEVVPDDTVITPVSEGVRRYALDLANAEALWRKSEQMVGETFPASA

SEQ ID NO: 5103 - protein, 415 aa, Gloeobacter violaceus PCC 7421
MEKKRVVVTGVGAVTPLGNTAADFWEGLLAGRSGVAPISLFDPSRHDARIAAEVKNFDPHQYLEKKEVKRTVRFTQMAVAASKQAVADAALAINEFNSEQVGVIIGNGTGGMEWLEQQDGILREQGPNRVSPFMVPLFIANMAAGFTAIQLGAKGPNSCTVTACAAGSNAIGDAFRLIQYGEAQAVICGGTEACITPLVVAGFAASRALSTRNDEPETASRPFDLNRDGFVIGEGAGILVLEELSHALARGARIYAEICGYAMTCDAYHMTSPAPAGEGAARAIRLALKDAGVFPDQVSYINAHGTSTPLNDTNETQAIKTVLGEAAYSVAVSSTKSMTGHLLGGSGGIEAVATALAVYHDIAPPTINLETPDPSCDLDYVPGVARTMPIEVALSNSFGFGGHNVTLVFRKFREA

SEQ ID NO: 5104 - protein, 241 aa, Brassica napus
GDPRVRDIEDVRREVEIMKHMPKHPNIVSLKDAFEDDDAVHIVMELCEGGELFDRIVARGHYTERAAAAVMKTILEVVQVCHKNGVMHRDLKPENFLFANKKETSPLKAIDFGLSVFFRPGEGFNEIVGSPYYMAPEVLRRNYGPEVDIWSAGVILYILLCGVPPFWAETEQGVAQAIIRSVIDFKRDPWPRVSDTAKDLVRKMLEPDPKKRLSAAEVLEHPWIQNAKKAPNVSLRETVKA

SEQ ID NO: 5105 - protein, 606 aa, Delphinium x belladonna
MDSCACIDTQWPADELLVKYQYISDFFIALAYFSIPLELIYFVQKSAFFPYRWVLMQFGAFIVLCGATHLINLWTFSMHSKTVAMVMTIAKISTAVVSCATALMLVHIIPDLLSVKTRELFLKNKAEELDREMGLIRTQEETGRHVRMLTHEIRSTLDKHTILKTTLVELGRTLGLEECALCMPSRTGMNLQLSHTLRHQIPVGSTVSTNLPIVTQVFNSNQAIKIPHTCPLARIGPTAGRYVPPEVVAVRVPLLHLSNFQINDWPELSAKSYAVMVLMLPTDSARKWHDHELDLIEVVADQVAVALSHAAILEESMRARDMLMEQNIALDMARREAEMAIRARNDFLAVMNHEMRTPMKAVIALSSLLLEIELTPEQRVMIETVFKNSNLLAALINDVLELSRLEDGSLELDIRTFNLHGIFREVLNMIKPITAVKKLSLTLMLSPDLPVVAVGDEKRLMQIMLNVVGNAVKFTKEGYVSVIASVAKAESLRDWQAPEIFMVSSDSHFHLCVQVKDSGCGISPQEIPHLFTKFTQLRSGQNRGNDGAGLGLALCKRFLNLMEGHIWVDSDGTDKGCTVTIIVKLGICEGQPEPSNLQVVSRPRLS

SEQ ID NO: 5106 - protein, 300 aa, Oryza sativa (japonica cultivar-group)
MRILRGILAVSGHLAGRRAPANNAHLALFSRALQILAQQEPVRLQKLSAPDSGIVEMRLERPEARNAIGREMLQGLRSAIEKVKADATAKVVLLASSVPKVFCAGADLKERRLMSPCEVREFVNSLRSTFLSFEALSIPTIAIVEGAAFGGGLELALSCDLRICGENATFSLPETGLAIIPGAGGTQRLPRIVGKSRAKELIFTGRRFDAVEAVTMGVVNYCVPAGEAYKRALELAQEINQKGPLAIRMAKKAINQGMEVDLSAGLAVEEECYEQVLHTQDRLEGLAAFAEKRKPVYTGK

SEQ ID NO: 5107 - protein, 596 aa, Delphinium x belladonna
MMGSCDCIDTRWPANDLLVKYQYLSDFFIAVAYFSIPLELIYFVQKSAFFPYRWVLMQFGAFIVLCGATHLISLWTFSMHSKTLAMVMAIAKGATALVSCATALMLVHIIPDLLSVKTRELFLRNKAEALDRDLGLIRTEEETGRHVRMLTHEIRSTLDRHTILKTTLVELGRILDLEECALWMPSRNGMNLQLTHTLHHHIPVGSTVATNLPVVNLVFNSTEAIQIPPTCPLARIKPHTGRYLPPEIVAVRVPLLHLSNFEINDWPELSAKSYAVMVLMLPIDSARKWHDHELDLVEVVADQVAVALSHAAILEESMRARDKLMEQNIALDLARQDAERAIRSRNDFLAVMNHEMRTPMNAGMALSSLLLEIELTPDQRVMIESVLKNSNILETLINDVLELSRLEDGSLELNVKTFNLREAFREVLKLLKPIAAVKKLSLTLKVAPDLPVWAVGDETRIMQIILNVVGNAVKFTKEGHISVAACVAKAESIRGGLTPESHPLSSDSHFYLRIQVKDSGCGISSQDIPHLFTKFAQSRGGQIRNNDGAGIGLALSKRFLHLMGGHVSIESDGTGKGSTVTMVLKLGTSDGPNPQI

SEQ ID NO: 5108 - protein, 397 aa, Glycine max
GSRSTCVRKSFFIKLHTSVPPKDRKLFPDETTTTTNQTQDCYGFCDPACPYNCYNNPDYFFSPPPPSISHSSQVNHISSYLIILVTLFTVIFVVVGFYVIKVKCYATWCGWRFSGSVPSSDTTTEEFLNENQVDHPVWLIATVGLQESIINSITVCKYKKNEGLVEGTECSVCLNEFQEEETLRLLPKCNHAFHVPCIDTWLRSHTNCPLCRAGIVSNSVNSEAPAPVSNSEQENANLGRNQDTLLDNSRINEGGLSSNMVAGESSEAIDESNSKDRVNDETQNNGVLMNIEIQTEMGSVSTTECESHRVVDDHKHDDDTMLHTDNLGKQDQDGDYYYSKTCKTVRRSSIEECLHLSPVSMKRSFSSCNGRTLTSRGYMSLNSKLNSSLLEFSFYER

SEQ ID NO: 5109 - protein, 660 aa, Roseovarius nubinhibens ISM
MAAKDNDDQKPDDQDAEISLDLSQTAIKKMIAEAREKGYITYDQLNQALPPDQVSSEQIEDVMSMLSEMGINIIEAEDVEEEEQRVTALAEVGKRGEVTLGSGKEEKLDRTDDPVRMYLREMGSVELLSREGEIAIAKRIEAGRNTMILGLCESPLTFQAITIWRDELLTEDILLRDVIDLEATFGNQLGDDEDEEAPVVAANVGEAPGKKSETTQELDADGNPISSDDDEDEDDQANMSLAAMEAALKPRVLETLDRIANDYEKLSEMQDSRISATLNEDGSFSAKQEATYQKLRSEIVELVNELHLHNNRIEALIDQLYGINQRIMSIDSAMVKLADQARINRREFIDAYRGRELDPNWLDDMASKSGRGWQMFMERSPEKVAELRADMAQVGQYVGLDISEFRRIVGQVQKGEQEARQAKKEMVEANLRLVISIAKKYTNRGLQFLDLIQEGNIGLMKAVDKFEYRRGYKFSTYATWWIRQAITRSIADQARTIRIPVHMIETINKLVRTGRQMLHEIGREPTPEELAEKLQMPLEKVRKVMKIAKEPISLETPIGDEEDSQLGDFIEDKNAVLPLDSAIQDNLKETTTRVLSSLTPREERVLRMRFGIGMNTDHTLEEVGQQFSVTRERIRQIEAKALRKLKHPSRSRKLRSFLDQ

SEQ ID NO: 5110 - protein, 178 aa, Trifolium repens
MALISSAAVTTINRAPVQANLATPFTGLKSSAGFPVTKKNNDITSITSNGSRVNCMQVWPPVGKKKFETLSYLPPLTDEQLLKEVEYLLRKGWVPCVEFELEKGFVHRQYNSSPGYYDGRYWTMWRLPLFGTTDAAQVLKEVAECKAEYPEAFIRIIGFDNVRQVQCISFIASTPKVY

SEQ ID NO: 5111 - protein, 409 aa, Chromobacterium violaceum ATCC 12472
MLIEVKVPQLPESVSEARLMSWHKKVGEFVKRDENLIDLETDKVVLELPAPQAGVVVEIIEQDGATVTSGQLIAKIDTAAKAGDAAPAAAAAAPVQAAPAAGAAAMPSAAKLAAETGVDLSKVAGSGRDGRVLKEDVQAAAKSAAPSQAGPVLAPASAGAALSATPAAVNVAGILSGRAEQRVPMSRLRQRVAERLVMSQQTNAILTTFNEVNMKPVMDLRAKYKDRFEKEHGIKLGFMGFFVKAVVAALKKYPIVNASVDGNDIVYHGYFDVGVAVGSPRGLVVPVIRNADQLSLAEIEKQIADFGKRAQEGKLTVEELTGGTYTISNGGTFGSMMSTPIINPPQSAILGMHATKERAVVENGQVVVRPMMYLAQSYDHRIIDGREAVLSLVAIKDAIEDPARLLLDL

SEQ ID NO: 5112 - protein, 499 aa, Lactobacillus plantarum WCFS1
MQRLLKRLTLKEDPSIYEDKDSHLARVLTVKDFLALGVGTIVSTSIFTLPGVVAANHAGPAVVFSFIVAAVVAGLVAFAYAEMAAAMPFAGSAYSWINVMFGEFFGWIAGWALLAEYFIALAFVGSGLSANLRGLLSPLGLTLPKALSNTFGTDGGVVDLIAVLVIALVSLLLSRGISKASRVENVLVVLKVLAVLTFIVVGATAIHVQNYVPFIPKYHLNADGSAFGGWQGIYAGVSMIFLAYIGFDSIAANSAEAKNPGKTMPRGILGSLVIAVVLFVAVALVLVGMFKYSSYANNAEPVGWALRQAGHPIVASVIQAIAVLGMFTALIGMTLAGSRLIYSFGRDGMLPKWLGKLHRNQPNNALLVLTIVAIIIGAFCPFAFLAQLISAGTLIAFMFVSLGIYALRRREGVDIAVPAFKMPFYPVLPAIAFLGALFVFMGLDIQAKLYAGVWFIVGLVIYFSYGMRHSYLAEKRLSETDTAAKSASKVADSTVEERD

SEQ ID NO: 5113 - protein, 152 aa, Glycine max
MENSPRANHHRANQLAYLFFPGAPADVSITSTANAIGMARAAATQLVLVALVAAMLLVATDAAISCGQVSSALSPCISYARGNGANPTAACCSGVRSLAGAARSTADKQAACKCIKSAAGGLNAGKAAGIPSKCGVSVPYAISASVDCFKIR

SEQ ID NO: 5114 - protein, 994 aa, Prochlorococcus marinus str. NATL2A
MLKNPSNENISNHSTVCVEDQDPGSLLQQRLELVEDLWKTVLKSECPPDQTERLLRLKQLSDPSKSNQDNSSKAIVQLITKMDLAEAISAARAFSLYFQLVNILEQRIEEDSYLESIEKGKLDTSNYKIDPFAPALASQTAPATFTQLFERLRRLNVPPAQLDGLMREMDIRLVFTAHPTEIVRHTVRHKQRRVATLLQQLQSNSLISESEKEIFRLQLEEEIRLWWRTDELHQFKPTVLDEVDYALHYFQQVLFDAMPQLRRRLTTALASSYPDVEIPNEAFCTFGSWVGSDRDGNPSVTPEITWRTACYQRQLMLDRYIASVQDLRDQLSISMQWSQVSSPLLESLEMDRVRFPEVYEERAARYRLEPYRLKLSYTLERLRLTQLRNKQLADAGWQFSPDGKPLISTNNSFDEVLHYKSVEELKNELELIRNSLVSTDLTCEPLDTLLNQVHIFGFSLASLDIRQESTRHSDALDELTRYLDLPESYGVMSEESRVQWLMKELRTRRPLIPPSFEWSKSTQETISVFHMLHRLQKEFGTRICRSYVISMSHTASDLLEVLLLAKESGLIDPTLGASDLLVVPLFETVEDLQHAPSVMESLLQTDVYRELLPRVGEKKQPLQELMLGYSDSNKDSGFLSSNWEIHKAQIALQDLASRQGIALRIFHGRGGSVGRGGGPAYQAILAQPSGTLQGRIKITEQGEVLASKYSLPELALYNLETVTTAVIQNSLVTNKLDATPSWNELMTRLAARSREHYRALVHDNPDLVQFFQVVTPIEEISKLQISSRPARRKSGAKDLSSLRAIPWVFGWTQSRFLLPSWFGVGTALATELKADPDQMEMLRMLNQRWPFFRMLISKVEMTLSKVDLDVAHHYVVSLGGSDDRDAFARIFDIISSEYSLTKKLILEITGKSKLLSADPALQLSVNLRNRTIVPLGFLQVALLKRLRDQNRQPPISEDVSIDSTQSSRTYSRSELLRGALLTINGIAAGMRNTG

SEQ ID NO: 5115 - protein, 355 aa, Novosphingobium aromaticivorans
MRRYSIASIPGDGIGREVVPAAIEVLTAAAAKCGFVLEFRHFDWSCQTYLETGKMMPDDGLDRLRDHDAVFLGAVGFPGVPDHISLWGLLLPIRREFEQYVNLRPVRLLPGIASPLRDKAPGDIDFWVVRENSEGEYSQIGGRTGTGENEIVVQQAIFSRRGTDRILRYAFDFARRSGRRHVTSATKSNGLYHSMPFWDERFAAIGAEYPDVAADQYHVDILAARFVMSPERFNVVVGSNLFGDILSDLGPGITGTIAVAPSANLNPERRFPSMFEPVHGSAPDIAGQGIANPIGQIWSGAMMLEHLGEAEPAALVMRALETALIAPDIARTPDLGGNGTTAGFAQAVRSTLLGL

SEQ ID NO: 5116 - protein, 590 aa, Methanococcus maripaludis S2
MSRLAILDYDRCQPRRCSMECMKYCPGVRMEEETIVMDENLGKPIISEELCSGCGICTKRCPFGAIRIIGLPEELTDDRIVHSYGQNRFRLYGLITPRDGVTGLLGPNGVGKSTIIKALSGEMVLNLNDLTETPDMKKVLDYFSGTELQNYFEKLKNNGIKPIHKPQYVDVLPKVVKGKVGELLKKVDEKGEFEKIINALEISNILDRTFDQLSGGELQRVAIAAACLREGDIYYFDEPTSWLDVKQRFSAAKVIREVAEGKKVVAVEHDLIVLDYLSDYIHIMYGIPSAYGVVTHPRGTRVGINTYLDGFLKEENIRFRKSPIVFEKRPPQDSTNRPLLLDYTDISKKLGDFSLNVNGGQIYQGEVVGILGPNGIGKTTFVKALAGVISPDSGEVTGDVKVSYKPQYISSDFEGTVEDLLMSITAIHTSYYKSEIIKPLALENILDSSVKDLSGGELQRVSIAACLSQDADLYLIDEPSAFLDVEQRLTTSRVIRRMADEKEAAMFVVDHDILFQDYISDRFIVFSGIAGSSGTGSEPLQKRAGANKFLKEMGITFRRDPDTGRPRVNKEGSQRDVYQKEIGEYYYLDE

SEQ ID NO: 5117 - protein, 257 aa, Bacillus halodurans C-125
MSSDFIQSWTEGAVGVIQLNRPKVANALNRQMVQEIVEQAERYDRDQEIRVILVKGSERAFAAGADIREMEGETPIRFELADPFADWDRFTRIHKPMVAAVSGFALGGGFELALHCDLIVAATNARFGFPEVSLGVLPGAGGTQLLTRAVGRKKALEWIWTGKHISAQEALQIGIINKIVEPELVEEEAFRLARTIVKQAPIAVRLIKEAVHQAEDVTLADGMMLERKNFYLAFATKDQKEGMKAFLEKRPPIFKGE

SEQ ID NO: 5118 - protein, 414 aa, Zea mays
DKLAENITTEQGKTLKDAWGDVFRGLEVVEHACGMGTLQMGEYVSNVSNGIDTFSIREPLGVCAGICPFNFPAMIPLWMFPIAVTCGNTFVLKPSEKDPGAAMMLAELAMEAGLPKGVLNIVHGTNVCLFGSNPALPMQDVVNNICDDEDIKAVSFVGSNTAGMHIYSRASAAGKRVQCNMGAKNHAIILPDADRDATLNALIAAGFGAAGQREDELVKRASGLVVSSGMVNDADLGPVISRQAKDRICKLVQSGVDSGARILLDGRKIVVPRYEDGNFVGPTILADVKSDMECYKEEIFGPVLLLMKAESLEDAIQIINRNKYGNGASIFTTSGVSARKFQTDIEAGQVGINVPIPVPLPFFSFTGSKASFAGDLNFYGKAGVQFFTQIKTITQQWKESPVQRVSLSMPTSQK

SEQ ID NO: 5119 - protein, 287 aa, Helicobacter hepaticus ATCC 51449
MVLNTFGITATSTGVGIEVAHIFGTEWQSFGAIILTIVLIYACEIFPKTLGATHWKSFVPIVTLSIHYLLKITFPFVWIAKLITRFVKPKKGSNPISREEILAASQIGQKGGSITAREQNIIENLLELKNYQAFDILTPRSVVFALHHNITIKEVLALEGIYHHSQIPVYGESVDNIIGIVLAVDILEEGIKKEKEKKIYELMRPVHTISLDISVLNLLNLFMSKKERFFAVQDAYEQLIGIVTLEDVIETLLGEEIIDEFDKTPDMQKLAREKIKGYRLKYLSKLK

SEQ ID NO: 5120 - protein, 490 aa, Bacillus halodurans C-125
MKRDHYRMVINGERVDSDETFETFNPAKGEILATVAKASREHAEKAVQAARHAFDHGKWRKYPVGKRARVLNQIAAIMRERFQELVEIEVLNSGKAISAAQAQINQAIEDFEFYAGAIVGHRGTVNNVPNGFLNYTQKEPVGVCAQIIPWNYPLMMAAWKVAPALAAGCSVVVKPASLTPITAILLNEICHEAGVPEGVVNTVAGAGSVVGDYLVGHEDVNKVAFTGSTPIGKDIMEKASHTLKRVTLELGGKSPNLVFADADMEAAVAGSLFGIYFNTGQSCEARSRLFVHEEIYDEFIEEFITRAKKLQLGDPFDKGTHVGSIISRDQLEIIDSYVRSAEEEGATIALGGKERRVEGFENGHWYEPTVITNVTPDMKAVQEEIFGPVVVVETFQDEREVIKRANDTKFGLGSAIWTKDQGRATRVAHQLEAGIVMVNCPFSAFPGTPFGGYKESGFGRELCVETLDLYMEDKSILSYYGPKPINPFGV

SEQ ID NO: 5121 - protein, 424 aa, Streptomyces coelicolor A3(2)
MKRRVVITGVGVRAPGGNGTRQFWELLTSGRTATRRISFFDPSPYRSQVAAEADFDPVAEGFGPRELDRMDRASQFAVACAREAFAASGLDPDTLDPARVGVSLGSAVAAATSLEREYLLLSDSGRDWEVDAAWLSRHMFDYLVPSVMPAEVAWAVGAEGPVTMVSTGCTSGLDSVGNAVRAIEEGSADVMFAGAADTPITPIVVACFDAIRATTARNDDPEHASRPFDGTRDGFVLAEGAAMFVLEDYDSALARGARIHAEISGYATRCNAYHMTGLKADGREMAETIRVALDESRTDATDIDYINAHGSGTRQNDRHETAAYKRALGEHARRTPVSSIKSMVGHSLGAIGSLEIAACVLALEHGVVPPTANLRTSDPECDLDYVPLEARERKLRSVLTVGSGFGGFQSAMVLRDAETAGAAA

SEQ ID NO: 5122 - protein, 390 aa, Methanococcus maripaludis S2
MKALNDSYDVVVVGAGPAGSMASYNASKNGAKTLLIEKSQEIGTPVRCAEAVPRLEDFGINPDPSFVKSYIRGGYLIAPNGKKIVVKGGKTDGYVVERKVFDKFLAIRSGQAGTQIAVKSRVTKIEKTDDGYNVFVNYLGDEYIVKSKIVIAADGVESNIAEYAGLKSKKNPKEICSCAEYEMTNVKLLNNEMMEFYFGDICPKGYIWLFPKGDTVNVGIGVIDSKKRAIDYLDEFLTHPLVEGRLDNAVPVEFKVGGDPVGGPIKKTVADNIMVVGDAAGHVSPLTGGGIGLSMDCGLMAGDVAAQSIKAENYSEEFLDLYEKKWKEKYYKLLMNDLKYKNILQKLSDDELNAIANSIPENLEEVDVGKLAIKIVAKAPSLLRHFKELL

SEQ ID NO: 5123 - protein, 550 aa, Streptomyces avermitilis MA-4680
MNADSRTRLNQRPEWTALAKHREELAGTHLRDLFAADPGRGAGYTLEVGDLHVDYSKHLVTDETLRLLRELAAATDVFGLRDAMFRGEKINVTEDRAVLHTALRAPRDAVVEVDGENVVPAVHAVLDKMSTFAERVRTGEWTGHTGKPIKNIVNVGIGGSDLGPAMAYEVLRSFTDRSLTVRFVSNVDGADLHEAVRDLDPAETLFVIASKTFTTIETITNATSARDWLLTELKAGQEAVAKHFVALSTNAEKVSEFGIDTANMFEFWDWVGGRYSFDSAIGLSLMIAIGPERFREMLDGFRIVDEHFESAPAEDNVPLLLGLLGIWYGNFHDAQSHAVLPYSHYLSKFTAYLQQLDMESNGKSVQRDGNPVEWETGPVVWGTPGTNGQHAYYQLIHQGTKLIPADFIGFAEPVADLLPGLVAQHDLLMANFFAQTQALAFGKTPDEVRAEGVPEQLVPHKTFKGNHPTTTILAKELTPSVLGQLIALYEHKVFVQGAVWNIDSFDQWGVELGKVLAKRVEPALTEGADVPGLDESTKALVAKYRQLRGR

SEQ ID NO: 5124 - protein, 436 aa, Coxiella burnetii RSA 493
MANRIEQITVPDLGGASEVDVIEVLVKPGDTVAKEDGLITLEGDKASMDVPSPLAGTIKELQVKVGDKVKEGDKILTLEMSAEEEKPAKEEKKESEKSEKLEEEGKKEKEEKSEPKEEKKKATEIKEYEAEEVEGFGTSVHAGPAVRRIAREFGIDLTKIKGTGQKDRILKEDVQKFVKEQLKVAEGKSGIGFPPAPKIDFKKFGAIEEKPLSKIKKATGVNLSRNWMTIPHVTQFGEADITELQAFRQSQKEYAAKQNVRLTPLVFIIKAVVNALKEFPHFNASLDPTGEHLILKKYFHIGVAVDTPEGLVVPVIRDADKKGLFELAKELGEVSEKARKKGLNMNDMQGGCFSISSLGGIGGTAFTPIINAPEVVILGVSKMQWKPICNEAGDCKTRLMLPLSLSYDHRVIDGADGARFIVYLAERLSDIRTLLL

SEQ ID NO: 5125 - protein, 259 aa, Bacillus halodurans C-125
MDSTVLQTIKNHVAIITFNRPDQLNCFNYQMLLDLEQVIQEVKANPAIRTVIFTGAGGKSFSAGADLKERRTLDENQVRRNVNKIRSVFNQIEELPQPTIAAINGYALGGGFELALACDFRLAVPEAKMGLTEVTWAIIPGAGGTQRLPRLIGSQRAKEMILTGRKVAAEEAQRLGIILEVCDSKHLLTEAVRLAEKMSVNGPLAVIQAKYAIHYGCQTDLHTGLAIEAKAYETIIPTEDRLEALQAFKEKRPPQFKGK

SEQ ID NO: 5126 - protein, 475 aa, Streptococcus pyogenes MGAS10394
MAKQYKNLVNGEWKLSENEITIYAPATGEELGSVPAMTQAEVDAVYASAKKALSDWRALSYVERAAYLHKAADILVRDAEKIGAILSKEVAKGHKAAVSEVIRTAEIINYAAEEGLRMEGEVLEGGSFEAASKKKIAIVRREPVGLVLAISPFNYPVNLAGSKIAPALIAGNVVALKPPTQGSISGLLLAEAFAEAGIPAGVFNTITGRGSVIGDYIVEHEAVNFINFTGSTPIGEGIGKLAGMRPIMLELGGKDSAIVLEDADLALAAKIIVAGAFGYSGQRCTAVKRVLVMDKVADQLAAEIKTLVEKLSVGMPEDDADITPLIDTSAADFVEGLIKDATDKGATALTAFNREGNLISPVLFDHVTTDMRLAWEEPFGPVLPIIRVTTVEEAIKISNESEYGLQASIFTTNFPKAFGIAEQLEVGTVHLNNKTQRGTDNFPFLGAKKSGAGVQGVKYSIEAMTTVKSVVFDIQ

SEQ ID NO: 5127 - protein, 505 aa, Geobacillus kaustophilus HTA426
MATVKQKKMEPMPTKRDFYHLIVNGERVESASGETFVVTNPATGEPVARVAKGTREDAERAVQAARQAFDRGKWRHFPVQKRARILYQIAAIMRERFNELVELEILNTGKALSAAQGQVMQAIEDFEFFAGAIIGHRGAVNPMPGAFHNYTEKEPVGVCAQIIPWNYPLMMAAWKIAPAIAAGCSVVVKPASLTPLTCLVLAEICHEAGVPEGVVNVVTGAGAEVGDYLVEHPLVDKVAFTGSTPVGKEIMEKASKTLKRVTLELGGKSPSLVFADADLEAAVAGSLFGIFYNSGQSCEARSRLYVHESIYDAFMEAFVAKTKQLKLGDPFDAGTHVGAIISRGQLEVIDEYVQSAVADGATVAAGGKEAVVAGFENGYWYEPTILTNVNHQMKAVREEIFGPVVVVMKFRDEAEAIELANDSDYGLAAAIWTKDHGRAVRVAKQLRSGIVMVNSPFSAFPGTPFGGYKQSGFGRELSVEALDLYTETKSVLSYYGPRPLNPFGV

SEQ ID NO: 5128 - protein, 258 aa, Geobacillus kaustophilus HTA426
MSEFVSIAARQEGAVGIIELARPDVLNALSRQMVAEIVAAVEAFDRNEKVRVIVLTGRGRAFAAGADIQEMAKDDPIRLEWLNQFADWDRLSIVKTPMIAAVNGLALGGGFELALSCDLIVASSAAEFGFPEVNLGVMPGAGGTQRLTKLIGPKRALEWLWTGARMSAKEAEQLGIVNRVVSPELLMEETMRLAGRLAEQPPLALRLIKEAVQKAVDYPLYEGMQFERKNFYLLFASEDQKEGMAAFLEKRKPRFQGK

SEQ ID NO: 5129 - protein, 378 aa, Solanum tuberosum subsp. andigena
MAIDCMITNAKSPMIDETKQFIFDASHMKRESNIPTQFIWPDHEKPCAVVQELHVPLIDLRGFLSGDSDAAQQASKLVGEACRSHGFFLVVNHGVDANLISNAHRYMDTFFDLPLLEKQKAQRKIGEHCGYASSFTGRFSSKLPWKETLSFRYSAEEESSHIVEDIFKGHWVKILTILGNVYQEYCNSKNTLSLGIMELLGMSLGVEKSHFKEFFEENDSIMRLNYYPPCQKPELTLGTGPHCDPTSLTILHQDCVGGLQVFVDDEWRSISPNFNAFVVNIGDTFMALSNGRYKSCLHRAVVNNKTPRKSLAFFLCPNKDKVVSPPNELVDSNNPRIYPDFTWPTLLEFTQKHYRADMNTLQTFSNWVHDQHNTKTQV

SEQ ID NO: 5130 - protein, 375 aa, Solanum tuberosum subsp. andigena
MAIDCMVMPMIQTSSDEKNPLIFDSSVLKHESNIPRQFIWPDHEKPSGGVPELDVPLIDLGAFLSGDPIAAKRESRLVDEACKNHGFFLVGNHGVDTNLISLAHRYMNMFFELPLSNKQMIQRKRGDHCGYASSFTERFSSKLPWKETLSFSYSALQGSSHMVDQYFLKTMGEDFSHIGKFYQEYCNAMSTLSSGIMELLGESLGVSKNHFKQFFEENESIMRLNYYPTCQKPDLALGTGPHCDPTSLTILHQDSVSGLQVFMDNQWRSISPNLSAFVVNIGDTFMALSNGRYKSCLHRAVVNNKTPRKSLAFFLCPKKDKVVRPPAELVDSNNPRIYPDFTWPTLLEFTQKHYRADTNTLQFFSNWLQQRTTEV

SEQ ID NO: 5131 - protein, 342 aa, Neurospora crassa
MSKQYLTLHTVDQAHPTEIFSLAPTPNALISASGSSHLLIHSTTTSPTFPLTQTLSNAHRLGCHHITTARGGPGNTFVSVGFGGDTKVWHRNPETDQWSLYWTLPTPDNKKEKGDVWAVALSADEGYLAATTSDGRIHVWDVLGKAKIQTYETGASAGGGGGHDSVGTGSFAMAVDLSRDGKFTASGHENGGVYVFNNDAGRMVYSLSGLAKPIRAVAFSPGCKRLAAAGNAGIIAIYDMQHGEHVANLSATGTRPAWITSIDWNDTGEYLLSGSLDGKVRVWDVARGVCVATHSETESALWCVRWLPKSEKVLAPGMGKGEMFVAAGANRSLTFYREATGS

SEQ ID NO: 5132 - protein, 294 aa, Chromobacterium violaceum ATCC 12472
MSVLVNKDTKVLVQGFTGKNGTFHAEQALKVGTKVVGGVTPGKGGSEHLGLPVFNTMKDAVRQTQADASVIYVPAAFAKDSILEAVDSGVKLIVCITEGVPTLDMLYVKKAVDEAGVRLIGPNCPGIITPGECKIGIMPWHIHNPGRIGIVSRSGTLTYEAVAQTTALGLGQSTCIGIGGDPIPGTSHIDALRLFQDDPDTDAIVMIGEIGGTAEEEAAEFAKAYVTKPVVGYIAGVTAPKGKRMGHAGAIISGGKGTAEEKFKAFEKAGIAYTRSPAEIGKTMFDLLKSKGMI

SEQ ID NO: 5133 - protein, 970 aa, Zea mays
MASTKAPGPGEKHHSIDAQLRQLVPGKVSEDDKLIEYDALLVDRFLNILQDLHGPSLREFVQECYEVSADYEGKGDTTKLGELGAKLTGLAPADAILVASSILHMLNLANLAEEVQIAHRRRNSKLKKGGFADEGSATTESDIEETLKRLVSEVGKSPEEVFEALKNQTVDLVFTAHPTQSARRSLLQKNARIRNCLTQLNAKDITDDDKQELDEALQREIQAAFRTDEIRRAQPTPQDEMRYGMSYIHETVWKGVPKFLRRVDTALKNIGINERLPYNVSLIRFSSWMGGDRDGNPRVTPEVTRDVCLLARMMAANLYIDQIEELMFELSMWRCNDELRVRAEELHSSSGSKVTKYYIEFWKQIPPNEPYRVILGHVRDKLYNTRERARHLLASGVSEISAESSFTSIEEFLEPLELCYKSLCDCGDKAIADGSLLDLLRQVFTFGLSLVKLDIRQESERHTDVIDAITTHLGIGSYREWSEDKRQEWLLSELRGKRPLLPPDLPQTEEIADVIGAFHVLAELPPDSFGPYIISMATAPSDVLAVELLQRECGVRPAVPVVPLFERLASLQSAPASVERLFSVDWYMDRIKGKQQVMVGYSDSGKDAGRLSAAWQLYRAQEEMAQVAKRYGVKLTLFHGRGGTVGRGGGPTHLAILSQPPDTINGSIRVTVQGEVIEFCFGEEHLCFQTLQRFTAATLEHGMHPPVSPKPEWRKLMDEMAVVATEEYRSVVVKEARFVEYFRSATPETEYGRMNIGSRPAKRRPGGGITTLRAIPWIFSWTQTRFHLPVWLGVGAAFKFAIDKDVRNFQVLKEMYNEWPFFRVTLDLLEMVFAKGDPGIAGLYDELLVAEELKPFGKQLRDKYVETQQLLLQIAGHKDILEGDPFLKQGLVLRNPYITTLNVFQAYTLKRIRDPNFKVTPQPPLSKEFADENKPAGLVKLNPASEYPPGLEDTLILTMKGIAAGMQNTG

SEQ ID NO: 5134 - protein, 168 aa, Zea mays
MEYGQQGQRGHGRTGHVDQYGNPVGGVEHGTGGMRHGTGTTGGMGQLGEHGGAGMGGGQFQPAREEHKTGGILHRSGSSSSSSSEDDGMGGRRKKGIKEKIKEKLPGGHKDDQHATATTGGAYGQQGHTGSAYGQQGHTGGAYATGTEGTGEKKGIMDKIKEKLPGQH

SEQ ID NO: 5135 - protein, 333 aa, Arabidopsis thaliana
MYENNLLTLSSCTMNLNFAFSPFLVSQRQPFSSHKRNLHTLVAVSANSDNLAGEDNGGISAANKGSGTTARGRRLLKVREEKRKRDYDRLHDYPSWAKYLFLSFSFALQVFVFLPKSRESVNLFLVNDKCRVLESACKDDEELRAVLGDSIGNPELMRKKVEERVRKKGKDFQKQKTGSVLSFKVNFRDFNPVDSFIWFELYGTPSDRDVDLIGSVIQAWYVMGRLGAFNTSNLQLANTSLEYDPLYDAEKGFKVMPSSFHDISDVEFQDNWGRVWVDLGTSDIFALDVLLNCLTVMSSEYLGIQQVVFGGKRMGDWEEGMTNPDFGYKYFKI

SEQ ID NO: 5136 - protein, 585 aa, Cyanidium caldarium
MNYKKNSLIKTGAFALIDMLVKHKVKNIFGYPGGAILPIYDELYHWEKKKLIKHYLVRHEQSAAHAADAYARATNEVGVCLATSGPGATNLVTGIATAQMDSVPIIAITGQVSRAFIGTDAFQEVDIFGITLPIVKHSFVVRDPRDISTIVSEAFYISKHGRPGAVLIDVPKDVGLEEFNYHDYDSIRDHKPITKYRPIYGPSIRQIEKFKKMLLESKQPILYVGGGAVMSRAQHEIEELASFIKIPVTTTLMGKGSFNEYNPLYLGMLGMHGTAYANFAVSECDLLIALGARFDDRVTGKLDEFACNAQVIHVDIDPAEIGKNRIPQLAIISDIKIVLKELLSSMKEGTNNMDKNQTQAWLHRIHKWKKEYPLSIPHDSKLLYPQEVINEISQIAQKAFFATDVGQHQMWAAQFLKVEQGKWLSSSGLGTMGYGLPAAIGAKIANPNDLIICITGDASFQMNLQELGTIAQYELDIKIFIINNQWQGMVRQWQQAFYDQRYAHSNMAKGQPDFVQLANSYGIRGIRVTTSKDLKSKIERIISTPGPLLIDCIVATSENCYPMIAPGKSNSQMLGLTKQLKTITN

SEQ ID NO: 5137 - protein, 625 aa, Oryza sativa
MDGPGLQEFGTRVGEAKADATRAANKRRAPSRAGGGGVEAKRRKDAMGSSVSGSRSGCGGGRRLRHGRGRRARAFRRKLEGENKNSNNRPRASNVVIAYTPNLIRRYGTLLRNISFLLPYDGQGKAYACPSDKINVFLKWSRCNFCLFFEWAEGDQMMICHMFNTLKEIHISFLINPAFLDESMEVKVTNPLLSFSSNFVEDETWALVKEMLMMMFSPVQEDERAASDLYVFTKSRDSVYFRIFKITSIPAGESENSLVLDEVGLNFCLKLLDVHGAFVGSDCDQALDGLQSQTRNELKLSPDIYYCVPNDKLGCCTLHSVALNNQNYLFFLENGLDLSHFEGFCLTLEEFLERNSFLKIKHIVGSRNDEECNFVRVRAKAIIRSMLSHLVNLFSLGKCLRMGTDLLRRRKILLKGSDVKFFQLEVIAYEEDEAINNVLQVVELVKSCFVGEMIPADLQGDLHDLKENPLKRLESVIDSSSLMSAKEKKGLLVNLHTEYKTNISPAISEDDRDSLFKHIPYLDCWMNRTEDNEYLKLVANLDSKKVALKVNKVGTDKRKPSKNGILQFDFMRNSDVHIPEKALKDGITPFRLSWTDYILTSRYPTYLRAIQKSLEPYMKSRKKLK

SEQ ID NO: 5138 - protein, 321 aa, Helicobacter hepaticus ATCC 51449
MGLLIAYFLLAISISFVCSVLEAVLFSVTPPFIESYPKIHPKSGKILQYLKTNIDNAIGAILIVNLFANTVGAAGVGVQAVEIFGESWQGVVAFVMTMSILYISEIVPKTIGATYWKSLILPACYVILTLYWITFPLVYISRVITRLLKNNHTNQMSRDEILAVMELGEKSGSINELEGDILEHLIEQKSLKVKDIMTPKEQIFALDEQMSIKESIKATKEHKYSRIPLYAAIPSNICSVVYRKNILQAMLNGKKKKMLKDFAKDITKIEENVSLLDLLEQFINKKEHLFAVVDKRNNLVGIVSLDDVIMATLSVGTLKKD

SEQ ID NO: 5139 - protein, 474 aa, Arabidopsis thaliana
MVMEEGRSIEEGLLQLKNKNDDSECRITACVILSTFVAVCGSFSFGVATGYTSGAETGVMKDLDLSIAQFSAFGSFATLGAAIGALFCGNLAMVIGRRGTMWVSDFLCITGWLSIAFAKEVMLLNFGRIISGIGFGLTSYVVPVYIAEITPKHVRGTFTFSNQLLQNAGLAMIYFCGNFINWRTLALLGALPCFIQVIGLFFVPESPRWLAKVGSDKELENSLFRLRGRDADISREASEIQVMTKMVENDSKSSFSDLFQRKYRYTLVVGIGLMLIQQFSGSAAVISYASTIFRKAGFSVAIGTTMLGIFVIPKAMIGLILVDKWGRRPLLMTSAFGMSMTCMLLGVAFTLQKMQLLSELTPILSFICVMMYIATYAIGLGGLPWVIMSEIFPINIKVTAGSIVTLVSFSSSSIVTYAFNFLFEWSTQGTFFIFAGIGGAALLFIWLLVPETKGLSLEEIQVSLIHQPDERNQT

SEQ ID NO: 5140 - protein, 947 aa, delta proteobacterium MLMS-1
MELSSEAKSARCGGDEPGAQAPGPLPLAGQIKLVGRILGKVIQDLRGPQVYEQVEELRLLCKRAAVEKRPDLRQRVQQRIADLDCREIVEVLQAYTVFFHLVNKVEQMEISRADRRHNPGPVGHVPRRESIDEAVADLKAQGAGIDRVLGLLGKLDIQPTLTAHPTEARRRSILYKQKRIAALLEELSRRDNGLDEQEALLAELEGEIGLLLATDDIRLVRPTVEDEVESGLYFVRNAIWQTVPQIYQDLRAALQRHYGECPAALPAFLRFRSWIGSDRDGNPYVTAAVSRYTWLYQRRVALRLYLEELRQLRRELSLSGRQQPPAGLLKSIEEDAAELTLSENRRRRYRYEPYRLKISYLMARLKQLEADIDAGRFPGGGDPYGAAELLADLQLLADSLQAQGFSRLVSHGRLGRMLLQVRSFGLHLVALDFRQHSRVHEEGVALLLRLAGVCDDYAALAEEQRLALLEGELANPRPLLPRNRELPPEVDELLASFRLIAEIQQHDPAALGAYIISMTHATSDLLEVLLLAKETGLWERRDGRVVSALDLVPLLETIEDLDQAGELLRQILENPVYRDQLTARSHFQEVMLGYSDSNKDGGYWMANWALHRAQEELGEVSREYGIELRLFHGRGGTVGRGGGRANQAILALPEQVHNGRIRFTEQGEVITFRYAFSDIARRHLEQIVNAMLRTTAAAESAGLAGADAAGGPAAAPAVSEENRFLARIAAAGMEAYRELVHDPDFWAWYTRITPIEQISRLPIASRPVSRSAGEVDLEGLRAIPWVFAWTQTRYIVPGWFGTGAALNAVLAEPGGRQYLRELYRRDPFFQMVVDNARREMARVRPEIAAEYDALAEVPARFHQRITADLEMALQALPEFTGESELLARNPAVQRSIRLRNPYTDVINLLQVELLRRYHDSGGEEREALRDALFLSVNGIAAAMQSTG

SEQ ID NO: 5141 - protein, 445 aa, Brassica napus
MKGVQNIYHHSYTFSFLLVFLVLILFHPALSIYVNTLSSSESLTISSNRTLVSPGGVFELGFFKTLERSRWYLGIWYKKVPWKTYAWVANRDNPLSNSIGTLKISGNNLVLLGQSNNTVWSTNITRGNVRSPVIAELLPNGNFVMRHSNNKDSSGFLWQSFDFPTDTLLPDMKLGYDLKTGRNRFLTSWKSSDDPSSGNFAYKLDLRRGLPEFILINTFLNQSVETQRSGPWNGMEFSGIPEVQGLNYMVYNYTENSEEIAYSFHMTNQSIYSRLTISELTLDRFTWIPPSWGWSLFWTLPMDVCDPLYLCGSYSYCDLITSPNCNCIRGFVPKNPQQWDLRDGTQGCVRTTQMSCSGDGFLRLNNMNLPDTKTATVDRTIDLKKCEERCLSDCNCTSFAIADVRNGGLGCVFWTGELVAIRKYAVGGQDLYVRLNAADLGTCTG

SEQ ID NO: 5142 - protein, 492 aa, Zea mays
MTSLPERGESPVPPLDSLRQDSAVTVLAAAAVASSSAGSDRKEDSGSRQPKASILSGVFSPPFAIFEGQQQGSSSPACDARSTKSSSGSYGLSRILRRFVGSGSMWRLLGCGRVLTSSDVWFLGKCYKVSPEEEESGDSESDSGHAAFLEDFSSRIWITYRKGFDAISDSKLTSDVNWGCMVRSSQMLVAQALIFHHLGRSWRKPPEKPYNPDYIGVLHLFGDSEACAFSIHNLLQAGRNYGLAAGSWLGPYAMCRAWQTLIRTNREQADAVDGKENFPMALYVVSGDEDGERGGAPVVCIDVAAQLCSDFNKGPSTWSPILLLVPLVLGLDKINPRYIPLLKETFMFPQSLGILGGKPGTSTYIAGVQDDRALYLDPHEVQMTVDIALDNLEADTSSYHCSVVRALALEQIDPSLAIGFYCCDKDDFDDFCSRASELAEKANGAPLFTVVQSIEPSKQMYKQDDGLGCSGSSMANDDDLDGSGEAEEWQIL

SEQ ID NO: 5143 - protein, 182 aa, Cryptococcus neoformans var. neoformans JEC21
MVRYASAHIAASNPEKFAKARGEYLRTHFKNMREVAAALSGMNLKKAYTYLADVQDHKQVIPFRRFAGGTGRASQAKQFKTTKGRWPEKSVKFILRLLKNAESNADAKDLDVEELIIKNIVVQQAPKTRRRTYRAHGRINPYQGHPCHIEIILSVPSSEVPRAKDLDTTSSKKAETIAAIEA

SEQ ID NO: 5144 - protein, 149 aa, Glycine max
  misc_feature (79)..(79): Xaa can be any naturally occurring amino acid
  misc_feature (109)..(109): Xaa can be any naturally occurring amino acid
  misc_feature (126)..(126): Xaa can be any naturally occurring amino acid
AKARRTSLSRNGLLVMASVALKPAPFTVEKSSVRGLPSLSRNSSSFRVVASGGKKIKTDKPYGINGGMALREGVDASGXKGKGKGVYHWVDKYGTNVDSYRPIYDTKDXSPTSNIYAYNTTNLAIXTRTLLNLLATKALLIYNTNAVAQ

SEQ ID NO: 5145 - protein, 542 aa, Magnetospirillum magnetotacticum MS-1
MAAAKTIVTTPFSGQKPGTSGLRKKVKVFAQPHYLENFVQAVFDSIGEVTGKTLVVGGDGRYHNRTAIQTILKMAAANGFGKVMVGQGGILSTPAASCVIRKYQTFGGIILSASHNPGGPDEDFGIKYNIPAGGPAPESITEAIYARTEVITSYKITEAADVDLDSLGSRTLDGMEVQVFDPVADYAELMESLFDFGAIRAAFAGGLRMKFDAMHAVTGPYATEILERRLGAPKGTVMNGVPLEDFGHGHPDPNLVHAHDLVEALTGAGAPDFGAASDGDGDRNMILGRDFYVTPSDSLAVLAANATLCPGYAKGLKGIARSMPTSAAPDRVAAKLGIPSFETPTGWKFFGTLLDAGLATFCGEESFGTGSDHVREKDGLWAVLAWLNVLAVRKQSVADIVTAHWREYGRNVYSRHDYEGIDSAAAEGLMEHLRSLSLKGQKLGAYTVAFNDDFSYTDPVDGSVSKKQGIRVVFEDGSRVVFRLSGTGTEGATLRVYIERFEPDASKHHLDPQIALADLIKIARDLAEIEARTGRTEPTVIT

SEQ ID NO: 5146 - protein, 149 aa, Glycine max
RFLAVILIDAEFRNTGLERSASLVEDLDWFKEQGYTIPEPSSPGLTYAQYLKELSVKDPQAFICHFYNIYFAHSAGGRMIGKKVAEKLLNNKALEFYKWDGDLPQLLQNVRDKLNKVAEPWTREEKDHCLEETEKSFKLSGEILRLILS

SEQ ID NO: 5147 - protein, 1031 aa, Oryza sativa (japonica cultivar-group)
MERARRLANRALLRRLLAAATAESPAAPSRGISTLAKGSRPRAPPRPAPHQYTTGRRPVSASALQPSDTFPRRHNSATPAEQAAMASECGFGTVDALIDATVPAAIRAPEMRFSGRFDAGFTESEMIEHMQRLAAMNRAYKSFIGMGYYNTHVPAVILRNLMENPAWYTQYTPYQAEIAQGRLESLLNYQTMVADLTGLPMSNASLLDEATAAAEAMAMCNGILKSKKKTFLIASNCHPQTIDVCQTRAAGFDLNVVVADAKDFDYGSGDVCGVLVQYPGTEGEVLDYAEFVRDAHAHGVKVVMATDLLALTSLRPPGEIGADIAVGSAQRFGVPMGYGGPHAAFLATSQEYKRLMPGRIIGVSVDSSGKPALRMAMQTREQHIRRDKATSNICTAQALLANMAAMYAVYHGPEGLKAIADRVHGLAGTFAQGLKKLGTVTVQELPFFDTVKVKVADANAIAQEACKNEMNLRVVDATTITVAFDETTTLEDVDKLFKVFNGGKPVNFTAESLAPEVSSSIPSSLVRKSPYLTHPIFNMYHTEHELLRYLYKLQSKDLSLCHSMIPLGSCTMKLNATVEMMPVTYPNFANMHPFAPTDQAAGYHEMFDDLGDLLCKITGFDSFSLQPNAGASGEYAGLMVIRAYHRARGDYHRDVCIIPVSAHGTNPASAAMCGMKIVAVGTDSKGNINIEELRKAAEANKDNLAALMVTYPSTHGVYEEGIDEICMIIHENGGQVYMDGANMNAQVGLTSPGFIGADVCHLNLHKTFCIPHGGGGPGMGPIGVKKHLAPFLPSHPVITTGGFPLPEKTDPLGTISAAPWGSALILPISYTYIAMMGSKGLTDASKIAILNANYMTKRLEKHYPVLFRGVNGTVAHEFIIDLRGFKTTAGIEPEDVAKRLMDYGFHAPTMSWPVPGTLMIEPTESESKAELDRFCDALISIREEIAEIESGKADVNNNVLKSAPHPPQLLMSDSWTKPYSREYAAFPAAWLRGAKFWPTTCRVDNVYGDRNLICTLQQGSQVAEEAAAATA

SEQ ID NO: 5148 - protein, 540 aa, Nicotiana tabacum
  misc_feature (64)..(64): Xaa can be any naturally occurring amino acid
  misc_feature (67)..(67): Xaa can be any naturally occurring amino acid
MGGCFSKKYRQEGANGGYRATRRNANQEYQKPPQHQPERPYQPQPQPQPQPQPRPQPQAHTVTXQPXQTQDQMQGPHLNNILGKPFEDIRKQYTLGKELGRGQFGVTYHCTENSTGNPYACKSILKRKLVRKNDREDMKREIQIMQHLSGQPNIVEFKGAYEDRHSVHLVMELCAGGELFDRIIARGYYSEKDAAEIIRQIANVVNICHFMGVMHRDLKPENFLLTSKDENAKLKATDFGLSVFIEEGKVYRDIVGSAYYVAPEVLRRSYGKEADVWSAGVILYILLSGVPPFWAETEKGIFNAILKGEIDFQSDPWPSISNSAKDLIRKMLTQEPRKRMTSAQVLEHPWLRMGEASDKPIDSAVLSRMKQFRAMNKLKKLALKVIAENLSEEEIKGLKAMFANIDTDNSGTITYEELKSGLARLGSKLTETEVKQLMEAADVDGNGTIDYIEFITATMHRHRLERDEHLFKAFQYFDKDHSGFITRDELESAMKEYGMGDEATIKEIIAEVDTDNDGRINYEEFCAMMRSGTQPQPKLF

SEQ ID NO: 5149 - protein, 414 aa, Bacillus halodurans C-125
MVEFRLPDVGEGMHEGEIISWFVQEGDHVKQDEPVVEVQTDKMNAELTAPVSGKIKRVYYKVGEVAEVGSLLFTIDENLSTFKSETHERTKRENSTEQTRPISNISLTSQQKAPVRKGLATPYVRQLAREMNINLEDVVGTGPGGRVLEQDLQNDTNLQKVKTVPSGVANVQESIERTGSSAEKRIPLKGIRKAIAEKMIKSVATIPHVTHVDEIEMDALKELREQLKHYSEQKGIKLTFLPFFIKAIVSALKEFEYFNASIDEETNEIVLKKDYHIGIATDTEKGLIVPVIQNADQKSLLELAGEITQLSTQARKGTLNVQQMTGSTFTISNVGPIGGLHATPIINYPEVAILALHKMEPRNVVREWESVIKLMMNMSLSFDHRLVDGATAVRFTNRMKELIENPNLLLMELR

SEQ ID NO: 5150 - protein, 682 aa, Glycine max
MSGGGCSSIVWFRRDLRIEDNPALTAGVRAGAVVAVFIWAPEEEGQYYPGRVSRWWLKNSLAHLDSSLRNLGTPLITKRSTDTLSSLFEVVKSTGATQLFFNHLYDPLSLVRDHRAKEVLTAQGITVRSFNADLLYEPWDVNDAHGRPFTTFAAFWERCLSMPYDPESPLLPPKRIIPGDASRCPSDTLLFEDELEKASNALLARAWSPGWSNADKALTAFVNGALIEYSKNRRKADSATTSFLSPHLHFGEVSVKKVFHLVRIKQVFWANEGNKAGEESVNLFLKSIGLREYSRYISFNHPYSHERPLLGHLKFFPWVVNEGYFKAWRQGRTGYPLVDAGMRELWATGWLHDRIRVVVSSFFVKVLQLPWRWGMKYFWDTLLDADLESDALGWQYISGSLPDGREIDRIDNPQFEGYKFDPNGEYVRRWLPELARLPTEWIHHPWNAPESVLQAAGIELGSNYPLPIVGIDAAKVRLLEALSQMWQQEAASRAAMENGTEEGLGDSSESAPIAFPQDIQMEERPEPVRNNPPHGTRRYQDQMVPSITSSHVRVEEEETSSDLRNSAADSRAEVPINVTTQQNARETVNQGVLLNTNRNTRVQNNPTTWLRNAAEDSTAESSSSTRRERDGGVVPVWSPPASNFSEQFVDDENGIGTGSSYLQRQHPQSHQLMNWTRLPQTG

SEQ ID NO: 5151 - protein, 602 aa, Kluyveromyces lactis NRRL Y-1140
MSHDPNQQQPHGGSGQGHHQRQLTNHAQGQHIGKYQIIKTLGEGSFGKVKLAYHISTGQKVALKIINKKVLAKSDMQGRIEREISYLRLLRHPHIIKLYDVIKSKDEIIMVIEYAGNELFDYIVQRDKMPEQEARRFFQQIISAVDYCHRHKIVHRDLKPENLLLDEHLNVKIADFGLSNIMTDGNFLKTSCGSPNYAAPEVISGKLYAGPEVDVWSSGVILYVMLCRRLPFDDESIPVLFKNISNGVYTIPNFLSQGAASLIKKMLIVNPVNRITVHEIMQDEWFKVDLPDYLVPAESTHQENSESKTEDGGPSVPLELIDDSLVQTLSNTMGYDVDEIYEALESDEDHPSLNEIRDAYQLIKENRNLINDIKVNKQQSNDLDTFLSQSPPTFEQSLHAPPGSKNRHSHRHSKRTQQRTYQYHYGNGSQDGDSTIAILPSSLPQIHRANMVAQGSQAAAKISPLSVKKSKTRWHFGIRSRSYPLDVMGEIYIALKNLGAEWAKPSEEDLWTIRVRWRYNIDMPDDEMKNKQIPDLMKMVIQLFQIETNNYLVDFKFDGWESSNGVVYSSRNDDEMSTFSAYPFLHLATRLIMELAVNSQGS

SEQ ID NO: 5152 - protein, 397 aa, Desulfovibrio vulgaris subsp. vulgaris str. Hildenborough
MGKEKFERKKPHVNIGTIGHIDHGKTTLTAAITKTAGLLGQGKFIAYDEIDKAPEEKERGITIATAHVEYETATRHYAHVDCPGHADYIKNMITGAAQMDGAIIVVAATDGPMPQTREHILLARQVGVPYIVVFLNKCDMVDDEELLELVELEVRELLTSYGFPGDDVPVVRGSALKALESDDPNSDACKPIRELLAACDSYIPEPQRDIDKPFLMPIEDVFSISGRGTVVTGRVERGVIKVGEEVEIVGIKDTTKSTCTGVEMFRKLLDQGQAGDNIGALLRGVKRDDVERGQVLAAPKSITPHRKFKAEVYVLSKEEGGRHTPFFSGYRPQFYFRTTDITGVITLEEGVEMVMPGDNATFNVELIAPIAMELGLRFAIREGGRTVGAGVVSEIVE

SEQ ID NO: 5153 - protein, 265 aa, Glycine max
  misc_feature (261)..(261): Xaa can be any naturally occurring amino acid
LRIIKPCNHVLSLSFPIRRDDGSWEVIEGYRAQHSQHRTPCKGGIRYSTDVSVDEVKALASLMTYKCAVVDVPFGGAKAGVKINPKNYTDNELEKITRRFTMELAKKGFIGPGIDVPAPDMSTGEREMSWIADTYASTIGHYDINAHACVTGKPISQGGIHGRISATGRGVFHGIENFINEASYMSILGMTPGFGDKTFVVQGFGNVGLHSMRYLHRFGAKCVGVGESDGSIWNPDGIDPKELEDFKLQHGSILGFPKPRXYEGS

SEQ ID NO: 5154 - protein, 418 aa, Magnetococcus sp. MC-1
MKRVDVALIVLKFGGTSVGSIERIRNVARMAMAEQQAGNQVVVAVSAMSGETNRLVGLVEDLTQFYNKREYDVVVSAGEQISIGLLATAIESMGQKAKSYLGWQVRFITDGSHSKARIKEVEAFRIQADLDAGAIVIVAGFQGVDSHNNITTLGRGGSDTSAVALAAALKADRCDIYTDVDGVYTTDPRIVTKARKMDRISYDEMLELASLGAKVLQTRSVELAKKYSVPVRVLSSLEPGSGTMLTKEEDTMESVVVSGLAYDKNEAKITILGVPDKPGVAANLLGRLGDANINIDMIVQNVSPAGDATDMTFTVPKADFPQAMKVMEDAVKDVGARQLQGNSDIAKISAVGVGMRSHSGIAQKMFKALADEGINILMISTSEIKISVVIEEKYTELAVRALHDAFELEKDPSDRINA

SEQ ID NO: 5155 - protein, 534 aa, Magnetococcus sp. MC-1
MSAQAHPPVVLYDTTLRDGSQSEDVLFSAEDKLRIAKRLDALGLDYIEGGWPGANPKDDDFFRQAKQLKLQKSRITAFGSTRRAGSKVEEDQVIKGLLGSGAQVITVFGKSWDLHVSRALGIPLAQNLELIFDTIRYLKRHVDEVFYDAEHFFDGYRRNPEYARQTLQAAYEGGADALVLCDTNGGTMVEDLRRMIGEVTDLGAPLGIHCHNDCELAVANSLAAVEAGVTHIQGTINGIGERCGNANLISIIPNLKFKMQRSLTLDDEDLTQLTAVSRFVNEMANRPTQKNQPYVGVSAFAHKGGIHVSAVLKDASTYEHISPDLVGNQQRVLVSEQAGRSNLIYKLEELGIEGVDAKDPRLTELLLDVKELEHQGYQFDGADASFQLRVWKALGELPNYFELLGFRVIDERRVRKDGQHPMGAEATVKMRVAGESVHLVAEGAGPVDALHKALSKALRRDYPMVTELKLEDFKVRILGNRKGTEATVRVLIEWYDGRCRWGTVGVSDHIIAASYDAMVEAVKYKLFKDKVKPV

SEQ ID NO: 5156 - protein, 112 aa, Magnetococcus sp. MC-1
MKKVEAIIKPFKLDDVKEALAEVGIQGITVSEVRGFGRQKGHTELYRGAEYVVDFLPKLKVEVVLTDDHVERAVEAIENAARTGRIGDGKIFVSPVDTAIRIRTGERDSDAV

SEQ ID NO: 5157 - protein, 510 aa, Streptococcus pyogenes MGAS10394
MALSPDIKEQLAQYLTLLEADLVLQVSLGDNEQSQKVKDFVEEIAAMSERISIENITLDRQPSFKVAKKGHDSGVVFAGLPLGHELTSFILALLQVSGRAPKVDQDVIDRIKAIDRPLHFETYVSLTCHNCPDVVQALNIMSVLNDKISHTMVEGGMFQDEVKAKGIMSVPTVFLDGEEFTSGRATIEQLLEQIAGPLSEEAFADKGLYDVLVIGGGPAGNSAAIYAARKGLKTGLLAETFGGQVMETVGIENMIGTLYTEGPKLMAEVEAHTKSYDVDIIKAQLATSIEKKENIEVTLANGAVLQAKTAILALGAKWRNINVPGEDEFRNKGVTYCPHCDGPLFEGKDVAVIGGGNSGLEAALDLAGLAKHVYVLEFLPELKADKVLQDRAADTANMTIIKNVATKDIVGDDHVTGLNYTERDSGEDKHLDLEGVFVQIGLVPNTAWLKDSGVNLTDRGEIIVDKHGSTNIPGIFAAGDCTDSAYKQIIISMGSGATAAIGAFDYLIRQ

SEQ ID NO: 5158 - protein, 498 aa, Brucella melitensis 16M
MRNIGHFIGGKHVAGKSGRTADIFQPLDGTVQGKVALATKEEVRAAVENAKAAQPAWAATNPQRRVRVLRKFIELVEAEYDSLAELLAREHGKTIADARGDIQRGLEVVEVCLGAAHMLKGEFTDNAGTGIDTYSMRQPLGVVAGITPFNFPAMIPLWKAGPAIACGNAFILKPSERDPGVPMRLAELFQEAGLPAGIFNVVNGDKESVDALLDDPDVQAIGFVGSTPIAQYIYGRGCANGKRVQCFGGAKNHLLIMLDADMDQTVDALIGAGYGSAGERCMAISVAVPVGEDTANRLMEKLIPRVESLKIGPSTDNSADYGPLVTKAALDRVRGYVDLGVEEGAKLVVDGRNFKMQGYENGFYMGGCLFDHVTPDMRIYKEEIFGPVLSIVRAKNYEEALALPSDHEFGNGVAIFTRDGDAARDFASRVQVGMVGINVPIPVPIAYYTFGGWKASGFGDLNQHGPDAFRFYTKTKTVTSRWPSGVKDGAEFVIPTMK

SEQ ID NO: 5159 - protein, 337 aa, Phaeosphaeria avenaria f. sp. triticae
MVVKVGINGFGRIGRIVFRNAIEHNDVEIVAVNDPFIEPHYAAYMLKYDSQHGQFKGDIKVDGNDLTINGKTIRFYTEKDPANIPWSETGAYYVVESTGVFTTTDKAKAHLKGGAKKVVISAPSADAPMFVMGVNNETYTKDIEVLSNASCTTNCLAPLAKVIHDKFTIIEGLMTTVHSYTATQKVVDGPSAKDWRGGRTAAQNIIPSSTGAAKAVGKVIPDLNGKLTGMSMRVPTSNVSVVDLTVRLEKGATYDEIKEAIKAAADGPLNGILGYTEDEIVSTDLNGDTRSSIFDAKAGISLNKNFVKLVSWYDNEWGYSRRVLDLLVYIAKVDGNA

SEQ ID NO: 5160 - protein, 166 aa, Triticum aestivum
  misc_feature (62)..(62): Xaa can be any naturally occurring amino acid
  misc_feature (70)..(70): Xaa can be any naturally occurring amino acid
  misc_feature (73)..(73): Xaa can be any naturally occurring amino acid
  misc_feature (91)..(91): Xaa can be any naturally occurring amino acid
  misc_feature (108)..(108): Xaa can be any naturally occurring amino acid
  misc_feature (115)..(115): Xaa can be any naturally occurring amino acid
  misc_feature (124)..(124): Xaa can be any naturally occurring amino acid
  misc_feature (129)..(129): Xaa can be any naturally occurring amino acid
  misc_feature (132)..(132): Xaa can be any naturally occurring amino acid
MAPTVMASSATSVAPFQGLKSTAGLPVSRRSNGASLGSVSNGGRIRCMQVWPIEGIKKFETXSYLPPLNXGGXLSKQVDYLIAPSWVPCLXFNKVGFIFREHNASPGXYYDGRYXTMLKLPKFXCTDAXKMXNKVEESKKDTLTLCPIGSQGQVQARLKHAARIRG

SEQ ID NO: 5161 - protein, 162 aa, Haemophilus influenzae 86-028NP
MFIDTSELCDLYAEQVDVVEPIFSSFGGVSHFYGKVTTVKCFESNGLIAEVLEENGEGRVLVIDGGGAVRRGLIDAELAQLAVDNGWEGIIVYGAVRQIQQLENLDIGIHALAPIPVSADESSAGESDIPVNFGGVTFFPEDYIYADLTGIILSQEPLDLED

SEQ ID NO: 5162 - protein, 360 aa, Agrobacterium tumefaciens str. C58
MNMVVTYKHIDEMKPWSDKLQLLECISVTPETSDVMTFLFRSEDQNWFRYLPGQFVTLELPVGSEPIYRTYTLSSSPSRPYALSVTVKAQATSIGTRWMFDNLKPGMKVRALGPLGDFSYVKHPGDKYLFISAGSGVTPMMSMVRDMSDRAPQSDITFINCSRTPGDIVFRHELEYLARFMPNLSLGFIVEKCGRTDLWSGLRGMVDKAKIALLAHDFMDRTVFCCGPEPFMAAVRSMLDASGFDMSRYHQESFAPAAPVSVGETVLTGADGEALSMVGFTLSGKELPCQPGQTVLMTARAAGVRIGAACESGICGTCRVLKLSGEVEMNHNGGILDEEIEEGYILACCSRPLTDIKVEA

SEQ ID NO: 5163 - protein, 411 aa, Arabidopsis thaliana
MLEGAKFNVLAVGNHHNNDNNYYAFTQEFYQKLNEGSNMSMESMQTSNAGGSVSMSVDNSSVGSSDALIGHPGLKPMRHYSLSDGQSVFRPGKVTHALNDDALAQALMDSKYPTEGLVNYEEWTIDLRKLHMGPAFAQGAFGKLYRGTYNGEDVAIKLLERSDSNPEKAQALEQQFQQEVSMLAFLKHPNIVRFIGACIKPMVWCIVTEYAKGGSVRQFLTKRQNRAVPLKLAVKQALDVARGMAYVHGRNFIHRDLKSDNLLISADKSIKIADFGVARIEVQTEGMTPETGTYRWMAPEMIQHRAYNQKVDVYSFGIVLWELITGLLPFQNMTAVQAAFAVVNRGVRPTVPNDCLPVLSDIMTRCWDANPEVRPCFVEVVKLLEAAETEIMTTARKARFRCCLSQPMTID

SEQ ID NO: 5164 - protein, 87 aa, Zea mays
MSSGGRRGRISDDEINELISKLQALLPESSRRRNASRSSASKLLKETCAYVKSLHREVDDLSERLSGLMATMDNDSPQAEIIRSLLR

SEQ ID NO: 5165 - protein, 86 aa, Triticum aestivum
  misc_feature (46)..(46): Xaa can be any naturally occurring amino acid
RTNDGVWLAHLLFDYSLPMGAGAHVNGGSAGEVCVMWIAFHHSLVXATMAGFPGGKVIAHLDHNTFKVCLKIAFTSYSHEQKIRIG

SEQ ID NO: 5166 - protein, 566 aa, Klebsiella pneumoniae
MDKQYPVRQWAHGADLVVSQLEAQGVRQVFGIPGAKIDKVFDSLLDSSIRIIPVRHEANAAFMAAAVGRITGKAGVALVTSGPGCSNLITGMATANSEGDPVVALGGAVKRADKAKQVHQSMDTVAMFSPVTKYAIEVTAPDALAEVVSNAFRAAEQGRPGSAFVSLPQDVVDGPVSGKVLPASGAPQMGAAPDDAIDQVAKLIAQAKNPIFLLGLMASQPENSKALRRLLETSHIPVTSTYQAAGAVNQDNFSRFAGRVGLFNNQAGDRLLQLADLVICIGYSPVEYEPAMWNSGNATLVHIDVLPAYEERNYTPDVELVGDIAGTLNKLAQNIDHRLVLSPQAAEILRDRQHQRELLDRRGAQLNQFALHPLRIVRAMQDIVNSDVTLTVDMGSFHIWIARYLYTFRARQVMISNGQQTMGVALPWAIGAWLVNPERKVVSVSGDGGFLQSSMELETAVRLKANVLHLIWVDNGYNMVAIQEEKKYQRLSGVEFGPMDFKAYAESFGAKGFAVESAEALEPTLRAAMDVDGPAVVAIPVDYRDNPLLMGQLHLSQILEHHHHHH

SEQ ID NO: 5167 - protein, 454 aa, Arabidopsis thaliana
MSENSRNLEAGLLLRKNQNDINECRITAVVLFSTFVSVCGSFCFGCAAGYSSVAQTGIINDLGLSVAQYSMFGSIMTFGGMIGAIFSGKVADLMGRKGTMWFAQIFCIFGWVAVALAKDSMWLDIGRLSTGFAVGLLSYVIPVYIAEITPKHVRGAFVFANQLMQSCGLSLFYVIGNFVHWRNLALIGLIPCALQVVTLFFIPESPRLLGKWGHEKECRASLQSLRGDDADISEEANTIKETMILFDEGPKSRVMDLFQRRYAPSVVIGVGLMLLQQLSGSSGLMYYVGSVFDKGGFPSSIGSMILAVIMIPKALLGLILVEKMGRRPLLLMNDLYLQASTGGMCFFSLLLSFSFCFRSYGMLDELTPIFTCIGVVGFISSFAVGMGGLPWIIMSEIFPMNVKVSAGTLVTLANWSFGWIVAFAYNFMLEWNASGINTYYYIIYYRVIKLSKKN

SEQ ID NO: 5168 - protein, 489 aa, Zea mays
  misc_feature (221)..(221): Xaa can be any naturally occurring amino acid
MDLEDQEAQKPLLVTAPGRIGDGSHLAESDAAPSSSSIAVVVASTAVAVAGSFEFGISVGHSSPSQSGIMRDLSLSLAEYSVFGSILTIGAMLGAVVSGTVADRVGRRSAMAISDLLCIFGYLLIIFSQNFWWLDIGRFSIGCGIGLLSYVVPVYISEITPKNLRGGFATVNQFMICCGASLAYVLGTFITWRTLAIIGVAPCLLQLVGLLVTPESPRWAXRFGHPGAFEAALQKLRGKGTDISDEAKGIKDFTEKLQQLPKSKMLDLFQKDYIRAVTVCIQVGVGLMVLQQFGGVNAICFYASEIFVSAGFSSGNTGMLAMVAVQIPMTGLGVLLMDKAGRRPLLMVSAAGTCLGCLLVGLSFLAKEHHWGKDLNLVLALAGILIFGGSFSLGMGGIPWVIMSEIFPINMKGAAGSLVTLVSWLGSWIVSYAFNFLLVWNSYGTFFIFASICGLTVVFVEQLVPETKGRTLEEIQASMNSSLAPPSDI

SEQ ID NO: 5169 - protein, 508 aa, Bifidobacterium longum NCC2705
MQLFRTKSVEQTIAETGEEGRKLKRNLTWWDLSIMGVAVAVGAGIFSVGAQAAAFHAGPAVIISFLIAGIVCGAAVMCYAEFASMIPVAGSAYTFTYTTVGEIMAWIIGWDLILEMLMAGSVISKYWGVYLNDFMRLMGWNANTNLTFGSFHIDIAPIIIVAFFTTLLVFGTKIGARVDGAMTVLKIAIVFFVVIVGFFYVKASNFTPFIPPSQPASTVEGSSAVTGVMTQPLWQFATGMTPSVYGVPGILSGAALVFFAFIGFDVVATASEETKNPHKNVPLGIGVGMLLIIVMYMLVAVVTTGMVSYADLAKQDSPSLATAFELVGADWAAKIISFGIVLGLATVVMVLLLGLTRIVFAMSRDGLLPRGLSKTGKHGTPAALQIVVGAVVALVAAFFDIGVLSDMVNIGTLSAFTLVAISIPIMRKKRPDLPRAFKMPGSPWIPILIAVANFWLMLNLSVLTWIRFVVWLVVGFAIYFGYGYWHARLGKGDLTETLSAETDKAVNG

SEQ ID NO: 5170 - protein, 422 aa, Streptomyces cyaneus
MTRRVAVTGIGVVAPGGIGVPAFWDLLSSGRTATRGITLFDPEGLRSRIAAECDFDPLAHGLDPELVERADRYIQFALVAADEAVTDSGIDFGTENPWRVAVSLGSAVGGTTRLEHDYVLVSERGQRWDVDHRAAEPELHRAFSPSTLAADVAERFGAQGPVQTVSTGCTSGLDAVGYAFHTIEEGRADVCIAGASDSPISPITMACFDAIKATSPNNDDPEHASRPFDAHRDGFVMGEGAAVLVLEELEHARARGAHVYCEIGGYATFGNAYHMTGLTSEGLEMARAIDVALDHARVDPTDIDYVNAHGSGTRQNDRHETAAVKKSLGAHAYDTPMSSIKSMVGHSLGAIGAIEVVACVLALARQVVPPTANYETPDPECDLDYVPRTARPRRLDHVLSVGSGFGGFQSAVLLTGPAGRKR

SEQ ID NO: 5171 - protein, 100 aa, Arabidopsis thaliana
  misc_feature (62)..(62): Xaa can be any naturally occurring amino acid
EKQHEEGKDQSMFSTTDVVTYPAQATMVTPFTGSKRYGYLPVTRKVNNHITCITSNIGRVKXIESWTPIKKNKVETLYNLPDLNDGELAKEECFVTGNKW

SEQ ID NO: 5172 - protein, 493 aa, Nicotiana tabacum
MELFRKSSFHCALPVFILLVCLFIILSNYVVFAFNYDVFTCFQSSKDANITSNYRTGYHFQPPKNCMNDPNAPMYYNGVYHLFYQYNPKGSTMNNIVWAHSVSKDLINWINLEPAIYPSKPFDKYGTWSGSATILPGNKPIILYTGVVDANMTQVQNYAVPANLSDPYLREWNKPDNNPLIVPDISITKTQFRDPTTAWMGKDGHWRIVVGSSRNRGGLAILYRSRNFMKWIKAEHPLHSSAKTGNWECPDFFPVSLQGSNGLDASYNGKYVKYVLKNSLPVAAFEYYTIGTYDAKQDRYIPDNTSVDGWKGLRLDYGIFYASKSFYDPSKDRRIVWGWSYELDGLPNNENNKGWAGIQAIPRKVWLDFSGKQLVQWPIEELKTLRKQNVRLSNKRLDNGEKIEVKGITASQADVEVTFSFSSLDKAEPFDPSWADLYAQDVCAIKGSTVPGGLGPFGLATLASQNLEEYTPVFFRVFKAQENFKVLMCSDAT

SEQ ID NO: 5173 - protein, 359 aa, Pisum sativum
MLGVIRNKTIRPSFSAFRFFSSAKQMTVRDALNSALDVEMSADSKVFLMGEEVGEYQGAYKVTKGLLEKYGPERVLDTPITEAGFTGIGVGAAYYGLKPVVEFMTFNFSMQAIDHIINSAAKSNYMSAGQISVPIVFRGLNGDAAGVGAQHSHCYASWYGSCPGLKVLVPHSAEDARGLLKAAIRDPDPVVFLENELLYGESFPVSAEVLDSSFWLPIGKAKIEREGKDVTITAFSKMVGFALKAAEILEKEGISAEVINLRSIRPLDRPTINASVRKTNRLVTVEEGFPQHGVGAEICTSVIEESFGYLDATVERIGGADVPMPYAGNLERLVVPHVEDIVRAAKRACHRSVPLAAAA

SEQ ID NO: 5174 - protein, 474 aa, Streptomyces avermitilis MA-4680
MTLPIEETAHPELEGLGTYEYGWADSDVAGASAKRGINEDVVRDISAKKNEPEWMTKLRLKGLRLFEKKPMPNWGSDLSGIDFDNIKYFVRSTEKQAESWEDLPEDIKNTYDKLGIPEAEKQRLVAGVAAQYESEVVYHQIREDLEEQGVIFLDTDTALKEHPELFKEYFGTVIPVGDNKFASLNTAVWSGGSFIYVPKGVHVEIPLQAYFRINTENMGQFERTLIIVDEDAYVHYVEGCTAPIYKSDSLHSAVVEIIVKKGARCRYTTIQNWSNNVYNLVTKRAVAYEGATMEWIDGNIGSKVTMKYPAVYLMGEHAKGETLSIAFAGEGQHQDAGSKMVHMAPNTSSNIVSKSVARGGGRTSYRGLVEIGEGAAGSKSNVLCDALLVDTISRSDTYPYVDVREDDVSMGHEATVSKVSDDQLFYLMSRGMTEFEAMAMIVRGFVEPIAKELPMEYALELNRLIELQMEGAVG

SEQ ID NO: 5175 - protein, 331 aa, Porphyra purpurea
MSKVFMFDALRAATDEEMEKDLTVCVIGEDVGHYGGSYKVTKDLHSKYGDLRVLDTPIAENSFTGMAIGAAITGLRPIVEGMNMSFLLLAFNQISNNAGMLRYTSGGNFTLPLVIRGPGGVGRQLGAEHSQRLEAYFQAIPGLKIVACSTPYNAKGLLKSAIRDNNPVVFFEHVLLYNLQEEIPEDEYLIPLDKAEVVRKGKDITILTYSRMRHHVTEALPLLLNDGYDPEVLDLISLKPLDIDSISVSVKKTHRVLIVEECMKTAGIGAELIAQINEHLFDELDAPVVRLSSQDIPTPYNGSLEQATVIQPHQIIDAVKNIVNSSKTITT

SEQ ID NO: 5176 - protein, 92 aa, Triticum aestivum
MSSRRSRSRQSGSSRITDEQISDLVSKLQDLLPEARLRGNDRVPSSRVLQETCTYIRSLHREVDDLSERLSELLATSDMSSAQAAIIRSLLM

SEQ ID NO: 5177 - protein, 331 aa, Methanothermobacter thermautotrophicus str. Delta H
MYRITVIPGDGIGVEVMEAALHVLQALEIEFEFTHAEAGNECFRRCGDTLPEETLKLVRKADATLFGAVTTVPGQKSAIITLRRELDLFANLRPVKSLPGVPCLYPDLDFVIVRENTEDLYVGDEEYTPEGAVAKRIITRTASRRISQFAFQYAQKEGMQKVTAVHKANVLKKTDGIFRDEFYKVASEYPQMEANDYYVDATAMYLITQPQEFQTIVTTNLFGDILSDEAAGLIGGLGLAPSANIGEKNALFEPVHGSAPQIAGKNIANPTAMILTTTLMLKHLNKKQEAQKIEKALQKTLMRGIMTPDLGGTASTMEMAEAIKEEIVKGE

SEQ ID NO: 5178 - protein, 716 aa, Magnetococcus sp. MC-1
MNTYANPLYLILISPHGLIRGENLELGRDADTGGQTKYVVELARALAQRPEVGRVDLLTRRVVDAQLSSDYAEPVERLSDKARIVRIECGGLAYLPKEQLWDSLDNYADNALAYIHEQPHMPHLIHTHYADAGYVGAHLCSMLEIPLIHTGHSLGRSKRKRLLAGGLARQEIEAIYNISRRIDAEERTLAAASSVVVSTHQEIQGQYVLYDYYQPDQMQVIPPGTDLNKFYAPQGDEAQSDIAKQLARFLTHPDKPIILALSRPDPRKNITTLVEAYGQSPQLQEMANLVIIAGNRDDIRDMDAGAQEVLTSLLMTMDLYDLYGKMAMPKHHQADDVPQLYRLAALSKGVFVNPALIEPFGLTLIEAAACGLPLVATEDGGPIDIVSNCKNGLLIDPLDGEAIAQALMDILSDQGQWQRFAQAGQQGVRAHYSWQAHVEKYLAMIQPLVEGSRPLQRMCLSRRPAHYREAAIITDLDQNLLGDDTSLSAFVALMRQYRKQVSFGIATGRNLESALSVMRKHKIPQPDVIMANLGTEVYYAPDLLLDSAWKKHINHLWFRHEIVEILSQVPGLSMQPKGSQSPFKISYYMDPNVAPDLQEINRILHQQEQTVNVIFSRGQFLDILPHRASKGYALRWVSAQLDIPLENMLVAGGSGADEDMMRGNTQAVVVGNRHDEELSTLAEVDKIYFAQQSYAAGIIEAIDHYDFFGTGKGAAS

SEQ ID NO: 5179 - protein, 277 aa, Magnetococcus sp. MC-1
MRRLLLCTDMDRTLIPNGKEPEQPGVRALFGRFVAQPGIALAYVTGRHQALVEEAIQRYQLPQPDFVVADVGATLYHVQQGVWRPNQAWQAQLDAVWQGMHAGQIHQLLEDWPGLRLQEPEKQARHKLSYYCGLEEDAPRLIEAIEQHLGAHHIQANLIWSEDVLQQVGLLDILPASASKRHGVMFLLQQLGYGLHETLFAGDSGNDLDVLLSPIPAVLVANADLSVVAAVEGVGAEQLYRAKGSHLQMNGNYAAGILEGVVHFYPEFKALIQALRE

SEQ ID NO: 5180 - protein, 272 aa, Arabidopsis thaliana
MATMISNLPRDLMEEILSRVPLKSMRAVRLTCKNWHTLSITISESLAKMYISKTTRESREGESTIITLMNYKLCLTSLVVDVDPYIEHKGKLTCFNLEHQVKISQVFYYEDDTITTRLVVWNPYWGQTRQIKTRYSHHAFSGRDSTYMFNYSLGYENKNSCRSHKLLRFIDYHWNYRGLHQFFWYEIYDFDSDLWTTLDVTPHWFIVISQSGVSLKGNTYWCARKRSGGYSDHIICFDFTRERFGPLLPLPFSFIDRHHSCVILSCVSEEKL

SEQ ID NO: 5181 - protein, 447 aa, Streptococcus pyogenes MGAS10394
MASNHMNEQEREQAKFSLSGATLYGINAVIGSGIFLLPRAIYKGLGPASIAVMFGTAILTIMLAVCFAEVSGYFGKNGGAFQYSKRAFGDFIGFNVGFLGWTVTIFAWAAMAAGFARMFIITFPAFEGWHIPLSIGLIILLSLMNIAGLKTSKIVTITATIAKLIPIVAFCACTLFFIKNGLPNFTPFVQLEPGTNLLGAISNTAVYIFYGFIGFETLSIVAGEMRDPEKNVPRALLGSISIVSVLYMLIIGGTIAMLGSQIMMTNAPVQDAFVKMIGPAGAWMVSIGALISITGLNMGESIMVPRYGAAIADEGLLPAAIAKQNQNGAPLVAILVSGAIAIVLLLTGSFENLAKLSVVFRFFQYIPTALAVMKLRKDAPDANVIFRVPFGPIIPILAVIVSLVMIWGDNPMNFVYGAVGVIIASSVYYLMHGRSHQMDQMPPKEQI

SEQ ID NO: 5182 - protein, 125 aa, Glycine max
  misc_feature (28)..(28): Xaa can be any naturally occurring amino acid
  misc_feature (43)..(43): Xaa can be any naturally occurring amino acid
  misc_feature (85)..(85): Xaa can be any naturally occurring amino acid
  misc_feature (110)..(110): Xaa can be any naturally occurring amino acid
MAASVMLSSVTLKPAGFTVEKMSARGLXSLTRTSFKIVASGVXKIKTDKPFGVNGSMDLRDGVDASGRKGKGYGVYKFVDKYGAXVDGYSPIYNEEEWSPGGDVYKGGVXGLAIWAVTLAGILAG

SEQ ID NO: 5183 - protein, 159 aa, Holcus lanatus
ERARHLLTSGSSEIPADSTFSNVEEFLEPLELCYRSLCDSGDKTVADGSLLDFLRQVSTFGLSLVKLDIRQESERHTDALDAITAYLGIGSYRSWPEEKRQEWLLSELKGKRPLFGDDLPMNEEVADVIGTFRVLAELPPDCFGAYVISMATAPSDVLA

SEQ ID NO: 5184 - protein, 488 aa, Bacillus megaterium
MLTINKIEQAQHSLNEAEKKVNHQYRLGYHIMAPANWINDPNGLVQYKGEYHVFYQHHPYDENWGPMHWGHVKSKDLVHWQHLPIALAPGDSFDKDGCFSGSAVDNEGELTLIYTGHNYIDKELDTFFQNQNIAVSKDGITFEKAEANPVIAEPPADSSHHFRDPKVWKHEGFWYMILGNSTKKQEGRVILYRSSNLQKWEYVGVLAKSDGDLGYMWECPDFFELDGKHVLMISPQGIEAKGDSYHNLFQTGYLVGEYNYGTNTFHHGSFTELDYGHDFYAVQTLLDDKGRRIAIGWMDMWEANMPTKEDGWCGALTLPRELTLREDKVLMNPVQELTSLRKTQYNMLTNKALSNSYVVEVNEDLLEIQAVFDLADCQASSVGIKIRGINNEETLMCYNLNEQKLLLDCTHSGKEDGVRKVALQAGETLALRIFVDRSSVEVFANEGQATMTSRIYPKESRLGIELFTEGGNVIVKELTYWNLKDIWG

SEQ ID NO: 5185 - protein, 479 aa, Gluconobacter oxydans 621H
MSSSQNRPAIVWFRDDLRMADHPALHEAAASGWPLICLYILDDVTPALHPLGAAARWWLRGALADLRRNLEKQGGTLLTLSGSAEKLLPQLAKQTDAASVHWHHRLHERERAQDNRIRRTLEEQECEVHAQWGTVLVDPDTVQTKQGGFYKVCGSFWKALQTHAVPEPLEAPSRLSFHAIPASVLSDARLNEDSLCPQAPDWAAGFRKTWEPGEAEGQEHLEDFLKNSVAGYPRGRDRVAEEGTSRLSPYLASGAVSPRQVWAALQKHGAHTDGPRIFLSELGWREFARYTLYHLPKLPFENLSPKFSGMHWRRSAADLKAWQRGQTGVPIVDAGMRQLWQTGWMHNRARMIVGSFLTKHLLIDWKEGDAWFRDTLVDADFANNAMNWQWVAGTGIEATPFFRIFNPTRQAEKFDPNGDYIRQWVPELRRLSGKALFEPWAAKDEELEKAGVRLGKSYPRPIVDLKEGRDRALQAFRSL

SEQ ID NO: 5186 - protein, 507 aa, Medicago sativa
MARGFWFILVVASVLLMLLDCCYGSFVGICYGRNADDLLPPDKVSQLVQDHKIKYVRIYDSNIQVLKSFANTGVELMIGIPNLDLLPFSQFQTNADTWLRNSILPYYPATKITYITVGAEVTESPENISALVVPAMTNVLAALKKAGLHKKIKVSSTHSLGVLSRSFPPSAGAFNSKHAHFLKPLLEFLAENQSPFMIDLYPYYAYRDSPTKVSLDYALFESSSEVIDPNTGLLYTNMFDAQIDAIYFALTALNFRTIKVMVTETGWPSKGSPKETAATPDNAQTYNTNLIRHVINETGTPAKPGEELDVYIFSLFNENRKPGLESERNWGIVYPDLTNVYSLDFTGRGPVDMTADANATSSTSNGTKWCIASSNATQLDLQNAINWACGTSGNVDCTAIQPSQPCFEPDNLVSHASYAFNSYYQQNGASDVACSFGGTGVLVDKDPTYDNCIYMKTGTNQTLASNNTTATSISSPPSSSSKGVYSSISTSALLLIFLLFLLDIGQA

SEQ ID NO: 5187 - protein, 417 aa, Gluconobacter oxydans 621H
MKPSLKAAIEAIRAGGMVVMVDDENRENEGDLVMAAQFATPEAINFMVREARGLVCLPLEAEQVDRLGLPPMVTRNRDPRGTAFTVSIEAATGVTTGISAADRARTIVVAANPDATPDDVVSPGHIFPLRAHPEGVLGRNGHTEGSIDIARLAGLEPAGVICEIMADDGSMMRLPELRKYAAKHNMPVVSIADLQDWCREHGRGPVAGHDLICTPVPAAGEMVAESALPSIFGGHDLRIHAFRAVDGVEHVALVKGDPSKGVPLVRLHSECVTGDALGSLRCDCGAQLREALERISASESGVLVYLRGHEGRGIGLANKIRAYELQDHGMDTVEANEALGLPADAREWDAAADLLRHLGVSSLRLLTNNPDKESNLVRFGFDVKSSERLEIEANPFNRAYLATKRTRMGHFLQEQPA

SEQ ID NO: 5188 - protein, 507 aa, Medicago sativa
MARGFWFILVVASVLLMLLDCCNGSFVGICYGRNADDLPPLDKVSQLVQDHKIKYVRIYDSNIQVLKSFANTGVELMIGIPNLDLLPFSQFQTNADTWLRNSILPYYPATKITYITVGAEVTESPENISALVVPAMTNVLAALKKAGLHKKIKVSSTHSLGVLSRSFPPSAGAFNSKHAHFLKPLLEFLAENQSPFMIDLYPYYAYRDSPTKVSLDYALFESSSEVIDPNTGLLYTNMFDAQIDAIYFALTALNFRTIKVMVTETGWPSKGSPKETAATPDNAQTYNTNLIRHVINETGTPAKPGEELDVYIFSLFNENRKPGLESERNWGIVYPDLTNVYSLDFTGRGPVDMTADANATSSTSNGTKWCIASSNATQLDLQNAINWACGTSGNVDCTAIQPSQPCFEPDNLVSHASYAFNSYYQQNGASDVACSFGGTGVLVDKDPTYDNCIYMKTGTNQTLASNNTTATSISSPPSSSSKEVYSSISTSALLLIFLLFLLDIGQA

SEQ ID NO: 5189 - protein, 230 aa, Glycine max
MQDFLGSLRRSLVFRPGGDDSPFAGIANKLGSAIRKSRIALEPPPPIRWRKGELIGSGGFGHVYMGMNLDSGELIAIKQVLIAPGSVFKENTQANIRELEEEIKLLKNLKHPNIVRYLGTAREEDSLNILLEFVPGGSISSLLGKFGSFPESVIKMYTKQLLLGLEYLHSNGIIHRDIKGANILVDNKGCIKLADFGASKKVVELATINGAKSMKGTPHWMPPEVFYRQE

SEQ ID NO: 5190 - protein, 652 aa, Arabidopsis thaliana
MQDFFGSVRRSLVFRPSSDDDNQENQPPFPGVLADKITSCIRKSKIFIKPSFSPPPPANTVDMAPPISWRKGQLIGRGAFGTVYMGMNLDSGELLAVKQVLIAANFASKEKTQELEEEVKLLKNLSHPNIVVSNCWYCLLLNAYGFNTSLCYLSNSVREDDTLNILLEFVPGGSISSLLEKFGPFPESVVRTYTRQLLLGLEYLHNHAIMHRDIKGANILVDNKGCIKLADFGASKQVAELATMTGAKSMKGTPYWMAPEVILQTGHSFPGDLCPIFLISHKPVAIVLSSADIWSVGCTVIEMVTGKAPWSQQYKEVAAIFFIGTTKSHPPIPDTLSSDAKDFLLKCLQDPDSTCDDVGDMCNFGSLNYSLVDPVKSIQNKNLWQQNDNGGDEDDMCLIDDENFLTFDGEMSSTLEKDCHLKKSCDDISDMSIALKSKFDESPGNGEKESTMSMECDQPSYSEDDDELTESKIKAFLDEKAADLKKLQTPLYEEFYNSLITFSPSCMESNLSNSKREDTARGFLKLPPKSRSPSRGPLGGSPSRATDATSCSKSPGSGGSRELNINNGGDEASQDGVSARVTDWRGLVVDTKQELSQCVALSEIEKKWKEELDQELERKRQEIMRQAGLGSSPRDRGMSRQREKSRFASPGK

SEQ ID NO: 5191 - protein, 474 aa, Arabidopsis thaliana
MEKGLLRKSLSIRERKFPNEDAFLESGLSRKSPREVKKPQNDDGECRVTASVFLSTFVAVSGSFCTGCGVGFSSGAQAGITKDLSLSVAEYSMFGSILTLGGLIGAVFSGKVADVLGRKRNAMWLDCGRLLLGIGVGIFSYVIPVYIAEIAPKHVRGSFVFANQLMQNCGISLFFIIGNFIPWRLLTVVGMILFRDCNLKYIFLNDRCNVIRTGLVPCVFHVFCLFFIPESPRWLAKLGRDKECRSSLQRLRGSDVDISREANTIRDTIDMTENGGETKMSELFQRRYAYPLIIGVGLMFLQQLCGSSGVTYYASSLFNKGGFPSAIGTSVIATIMVPKAMLATVLVDKMGRRTLLMSFGILPELTPIFTCIGVLGHIVSFAMGMGGLPWIIMAEIFPMNVKVSAGTLVTVTNWLFGWIITYTFNFMLEWNASGMFLIFSMVSASSIVFIYFLVPETKGRSLEEIQALLNNSVQ

SEQ ID NO: 5192 - protein, 218 aa, Clostridium tetani E88
MAVHSMKDVPYEVPSMFYIGAIPRREDVRDAFVSRDGTKFMELPSGSKIGTSSRRRSSQIKILRPDVEVVPIRGNVQTRLRKIEEMNLAGTILAVAGLKRLNMEEVITDYFSPEEMVPAIGQGALGIEIKKYEDVIDYIKGIDHEETRICVEGERSFMEALKGDCHSTIGAHAIVENDLMYMTGIFEVNGKIVKKDIEGKKENYKQLGKTLADRIMKA

SEQ ID NO: 5193 - protein, 540 aa, Glycine max
  misc_feature (150)..(150): Xaa can be any naturally occurring amino acid
METRMLRLSIQRVRKLNFLRPQISALGRSHLSTAAEPSSSKSNPPRVPNLIGGSFVDSKASTVIDVINPATQEVVSQVPLSTHEEFKAAVSAAKEAFPSWRNTPITTRQRVMLKLQELIRRDMDKLALNVTTEQGKTLKDAQGDVFRGLXVEHACGMATLQMGEYVSNVSHGIDTYSIREPLGVCAGICPFNFPAMIPLWMFPMAVTCGNTFVLKPSEKDPGASVMLAELALEAGLPEGVLNIVHGTHDIVNAICDDENIKAISFVGSNVAGMHIYSRAAAKGKRVQSNMGAKNHAIVMPDANVDATLNALVASGFGAAGQRCMALSTVVFVGGSKPWEDKLLERAKALKVNAGTEPDTDLGPVISKQAKERIHRLVQSGVESGARLLLDGRNIVVPGYESGNFIGPTILSDINANMECYKEEIFGPVLLFMEADSLEEAINIINSNKYGNGASIFTTSGVAARKFQTEIEAGQVGINVPIPVPLPFFSFTGNKASFAGDLNFYGKAGVNFYTQIKTITQQWKDSTGGSKINLAMPTSQK

SEQ ID NO: 5194 - protein, 181 aa, Triticum aestivum
MAPTVMASSATSVAPFQGLKSTAGLPVSRRSNGASLGSVSNGGRIRCMQVWPIEGIKKFETLSYLPPLSTEALLKQVDYLIRSKWVPCLEVQAKVGFIFREHNAVSRGTYDGPLLAQWWERLPYGWEWPPNAHIGWNQTGGGDGRFHERDVSPLNMRYVSREIYSAHVPIQTLGESNGRVH

SEQ ID NO: 5195 - protein, 931 aa, Ashbya gossypii ATCC 10895
MTSIPHRHTYYGGGATPPAATGPLSGSRGHAAGRSKKKQVTFGPYIIGPTLGEGEFGKVKLGWSKARLDGDSRNVAIKLIRRDTVPKNSEKEIKIYRELNALKLLSHPNIVRLEEVLQNSKYIGIVLQYASGGEFYKYIQKKRRLKEPPACRLFAQLISGVHYIHYKGLAHRDLKLENLLLDEHENLIITDFGFVNEFHKNDLMRTSCGSPCYAAPELVVSSKPYSAQKADVWSCGVILYAMLAGYLPWDDDPENPEGEDIAKLYQYITHTSLKFPEYIKPIPRDLLKRILVSNPEVRLTVADIEQHAWLQPHAQFLMWSPSDWDAKAKAETNNLFRQPSAVHAGVLRPQSSCSISSANSKGDNRGSLIMDSTLNPQPVPPQEFQSHIIMKPTSPSNGLRKMSPVRRHARSNSAASIALQAVVDAERDYFNSPSIHSLHHDSLSQNTTPPSSAGRVPTYAITRSATHHNGISSSLMNRNSVIIEVSPQKGSVPPVMIPGNRESLNGQESGGIAMADMSQRPTIVKDKTSSHMVPQAGRKQRPTSYQPCSTTAFAQSPDLVSGAGALVPIMGKQQRVSTASNPTFVDVGRSGSTRRLPGPNNQLLETPFEADRQIDDNPVVDDATIKSDDMLPSTLEIVAYDNECGTSPGSNGQHRRYSAIVMSEIYEQEEGERISCELSSPNKMGSARPDCSTARISINTPNMGLQNRECIVSSSSPESDASSKQKSGKTDKKDKRFSLLSFYSFYNNSKSSIDSSTDAVQPTGLVLDVVKHPNISRTSSQKKNPAPAGNGTQAIPRRHNTLPREAQRTPVALSYVYASLDVTPNAGTPELADVPSPINLVKMAEQPHGTKQHDPSTPTRSATVHGKSQRLSNNTPKGPIYEDPKPKRKTNKVSLMVSSINPSQAPQPPRQKEPSTARKVLDFFKRRSLRI

SEQ ID NO: 5196 - protein, 584 aa, Arabidopsis thaliana
  misc_feature (485)..(485): Xaa can be any naturally occurring amino acid
MASQLDLIGGDYIAGISINPPTNSRVTSVYSEVQASRIDHTLPLPSVFKTPFKIIDGPPSSSAGHPEEIEKLFPNLFGQPSALLVPNQSNEVSSDQKLKIGVVLSGGQAPGGHNVICGIFGFKNLICDCIFVVGLIDYLQEYARGSSLFGFRGGPAGIMKGKYIELTSEFVYPYRNQGGFDMICSGRDKIETPEQFKQAEETVTKMDLDGLVVIGGDDSNTNACLLAEHFRAKNMKTLVIGCPKTIDGDLKSKEVPTSFGFDTACKVKMIGNVMIDARSTGKYYHFVRLMGRAASHITLECALQTHPNITIIGEEVFEKKLTLKNVTDNIVDVIYKRAENGYNYGVILVPEGLIDFIPEVQQLISELNEVLAEGNVDEEGQWKKNLKKETLEIFEFLPQTIQEQLMLERDPHGNVQVAKIETEKMLIQMVETELEKKKTEGTYEREFMGKSHFFGYEGRCGLPTNFDATYCYALGYGAGSLLQSXGKTGLISSVGNLAAPVEEWTVGGTALTSLMDVERRHGKFKPVIKKAMVELEGAPFKKFASQREEWALKIRYISPGPIQFKGPGSDARNHTLMLELGAQA

SEQ ID NO: 5197 - protein, 240 aa, Saccharomyces cerevisiae
MSTFIFPGDSFPVDPTTPVKLGPGIYCDPNTQEIRPVNTGVLHVSAKGKSGVQTAYIDYSSKRYIPSVNDFVIGVIIGTFSDSYKVSLQNFSSSVSLSYMAFPNASKKNRPTLQVGDLVYARVCTAEKELEAEIECFDSTTGRDAGFGILEDGMIIDVNFNFARQLLFNNDFPLLKVLAAHTKFEVAIGLNGKIWVKCEELSNTLACYRTIMECCQKNDTAAFKDIAKRQFKEILTVKEE

SEQ ID NO: 5198 - protein, 406 aa, Haemophilus influenzae R2846
MRRAVITGFGIISSIGNNKEEVLASLKAGKSGIEVVPEFVEMNMRSHVAGTIKLNPSEHIDRKVFRFMGDAAAYAYLSMREAIEDAGLTEDQVSNDRTGLVIGAGTGSAHNQLVACDAVRGPRGVKAIGPYAVTKTMASSVSACLATPYKIRGVNYSMSSACATSAHCIGHAVELIQLGKQDVVFAGGAEELSWECATEFDAMGAVSTKYNETPEKASRAYDANRDGFVIAGGGAVVVVEELEHALARGAKIYAEIVGYGATSDGYDMVAPSGEGAERCMKQAMATVDTPIDYINVHGTSTPVGDVKELGAIKNVFGDKIPAISSTKSMTGHSLGAAGAHEAIYTLLMLDNDFIAPSINIETLDEAAEGCNIVTETKENAGLQTVMSNSFGFGGTNATLIFKRYNG

SEQ ID NO: 5199 - protein, 463 aa, Mycobacterium avium subsp. paratuberculosis K-10
MPQHPSLPAHAIAPAYTGRLFTAPVPALRMPDESMDPDAAYRFIHDELMLDGSSRLNLATFVTTWMDPEAGRLMAETFDKNMIDKDEYPATAAIEQRCVCMVADLFHAEGLNDADPYSACGVSTIGSSEAVMLGGLAMKWRWRAKTKDWKKRTPNLVMGSNVQVVWEKFCRYFDVEPRYLPMEEGRYVITPEQVVDAVDEDTIGVVAILGTTYTGELEPVADICGALDKLALKPASAGGVDVPVHVDAASGGFVVPFLHPELKWDFRLPRVVSINVSGHKYGLTYPGVGFVVWRSKEYLPDELVFRVNYLGGDMPTFTLNFSRPGNQVVGQYYNFLRLGREGYTKVMQTLSGTARWLGEQLRVSEHCELISDGSAIPVVAFRLAKNRGYTEFDVSHELRTYGWQVPAYTMPDNATDVSVLRIVVREGLSADLARALHDDAVSALTSLDKVKPGGHYDAQHFAH

SEQ ID NO: 5200 - protein, 423 aa, Streptomyces ambofaciens
MSRRRVVITGIEVIAPGGVGRENFWNLLSSGRTATRGITFFDPAPFRSRVAAEADFDPFAHGLSPQEVRRLDRAAQFAVVASRGAVADSGLDVAALDPHRVGVTVGSAVGATMGLDEEYRVVSDGGRLEAVDHTYAVPHLYDYMVPSSFAAEVAWAVGAEGPSTVVSTGCTSGIDSVGYAVELVREGSADVVIAGSSDAPISPITMACFDAIKATTPRHDEPECASRPFDKTRNGFVLGEGCAFFVLEELDSARKRGAHIYAEIAGYSTRSNAYHMTGLRPDGAEMAEAIDLALAEARLNPQAIDYVNAHGSGTKQNDRHETAAFKRSLGEHAFRTPVSSIKSMVGHSLGAIGSIEIAASALAMEYDVVPPTANLHTADPECDLDYVPLVARDQLIDAVLTVGSGFGGFQSAMVLASPERSLV

SEQ ID NO: 5201 - protein, 250 aa, Desulfovibrio vulgaris subsp. vulgaris str. Hildenborough
MARLILLRHGQSAWNLENRFTGWTDVDLSPAGEAEALAAARLIRDEGLDFSVCHTSMLTRAIRTLHLVQQELDRLWTPVRKHWRLNERHYGALQGLDKRETAARHGEDQVFVWRRSYDVPPPVIAPDDPKHPVHDPRYADVPPDVLPCGESLEATVARVLPYWYDAIAPDLMAGRDVLVAAHGNSLRALVMHLDGLDREDVSRLDIPTGLPRLYELDAALRPVSYRYLGDPAEAEERARAVAAQGRLEKN

SEQ ID NO: 5202 - protein, 313 aa, Neisseria lactamica
MTKHIAILRGDGIGPEIVAETVRVLDKLIEQGLDAGYEYAPLGGEAYDEYGHPYPEFTQNLCRKADAVLLGAVGSPQYDNLDRPLRPERGLLAIRKDLNLFANLRPAVLYPELANASTLKPEIVAGLDILIVRELTGDIYFGEPRGIRVLENGEREGYNTMKYSESEIRRIAHVAFQSAQKRSKKVCSVGKANVLETTELWREIFEEIGKEYPDVELSHMYVDNAAMQLVRAPKQFDVIATGNIFGDILSDEASMLTGSLGMLPSASLDENGKGLYEPSHGSAPDIAGQNKANPLATILSLAMLLRYSLNDEA

SEQ ID NO: 5203 - protein, 242 aa, Arabidopsis thaliana
MAKLSFKDSLKALEADIQHANTLALDYPREKDGARVQMRLSYSPTAQFFLFLVQWTDCKLAGFLGLLRVLIYMTYADGKTTMSVYERKASIREFQAVILPSLSQLQRGVTDIDDSKQKEVCKMRYRKKDESEMSEIEIEREEECGICMEMNSKVVLPNCTHSLCIKCYRDWRGRSQSCPFCRDSLKRVDSGDLWMFLDQNDTVNLTAIARENQKRLFMYIEKLPLVVPDQVYASSPYDFHVR

SEQ ID NO: 5204 - protein, 322 aa, Streptomyces clavuligerus
MSDVRNVIIIGSGPAGYTAALYTARASLQPLVFEGAVTAGGALMNTTDVENFPGFRDGIMGPDLMDNMRAQAERFGAELIPDDVVSVDLTGDIKTVTDSAGTVHRAKAVIVTTGSQHRKLGLPREDALSGRGVSWCATCDGFFFKDQDIVVVGGGDTAMEEATFLSRFAKSVTIVHRRDSLRASKAMQDRAFADPKISFAWNSEVATIHGEQKLTGLTLRDTKTGETRELAATGLFIAVGHDPRTELFKGQLDLDDEGYLKVASPSTRTNLTGVFAAGDVVDHTYRQAITAAGTGCSAALDAERYLAALADSEQIAEPAPAV

SEQ ID NO: 5205 - protein, 324 aa, Deinococcus radiodurans R1
MAGAMDMGAYEYDAVIVGAGPAGLNAALVLGGARRRVLLLDGGPPRNVTAQAAHGVFTRDGTPPADLKTVGLEQLAPYDVTVLGTPAREIRPEDDGTFSVRYEQRWVRARRLLFATGVRDVLPRIPGLRERWGRTVHHCPYCDGWPNRAARLAVLGSHQEGHHLALSVRSWSDHISLLTNGPDELTPAQRRDLRELDIERCDRPIRHFSGRDTVRVTFEDGEVREYDAIFLNPAQVQRSRLPELLGCELDEKSRVIVNENGMTSRRGVWAAGDMTGAPQYVMSAAASGMVAAVSLNSTLIHEDVRRGGAAFHPSPDEEKGVGEA

SEQ ID NO: 5206 - protein, 341 aa, Neisseria gonorrhoeae
MGIKVAINGYGRIGRQVLRSIYDYQIQDQLQIVAVNASGSLETNAHLTKFDTVHGRFEADVSHDGGNLIVNGDKIPFFSTRNPTELPWKELGVDLVMECTGAFTSKEKAKIHLESGAKKVLISAPGGDDVDATVVYGVNDSVLTADMTVVSNASCTTNCLSPVAKVLSESVGIVKGAMTTIHALTNDQTVTDVRHKDLRRARSGVENMIPTKTGAAKAVGLVLPELKGRLDGLAIRVPTVNVSLVDLSFQAARDTTVEEINALMKAASEAGALKGVLGYNTLPLVSMDFNHTTEASHFDATLTKVVDGNMVKVFAWYDNEWGFSCQMLNTARRMFGLEVRP

SEQ ID NO: 5207 - protein, 138 aa, Pyrococcus furiosus DSM 3638
MGDKTKVQVSKLKPGRYIIIDDEPCRIVNITVSSPGKHGSAKARIEAVGIFDGKVRSIVKPTSAEVDVPIIDKRTAQVIAVTPDTVQIMDMETYEMFEVPLDTGVEEEIKDKIKEGINVEYWETLGRIKIMRIKGEEE

SEQ ID NO: 5208 - protein, 531 aa, Oryza sativa
  misc_feature (123)..(123): Xaa can be any naturally occurring amino acid
MDRVLLSSQLSSQTVVNTRVQQGSGGINSIGFAVIRKGSLKLRCYAIGGLGGGENLNDPLKESNNGPVLQGFNGSSASFRTVGAKITQETGDFFVSDAEGDPDKPTDGFSSIDEAIGALHEGXDDESGDNEGDLVMAATLADPESIAFMIRNGSGIISVGMKEEDLTRLMIPMMSPIAEIEDISAAASTVTVDARVGISTGVSAADRAKTIFTLASPDSKPTDLRRPGHIFPLKYRNGGVLKRAGHTEASVDLVALAGLRPVSVLSTVINPVDGSMAGMPVLKQMALEHDIPIVSIADLIRYRRKREKLVELIAVSRLPTKWGLFRAYCYQSKLDGTEHIAVAKGDIGDGEDVLVRVHSECLTGDILGSARCDCGNQLDLAMQLIDKAGRGVLVYLRGHEGRGIGLGQKLRAYNLQDDGHDTVQANVELGLAVDSREYGIGAQILRDMGVRTMRLMTNNPAKFVGLKGYGLAVVGRVPVISPITKENQRYLETKRTKMGHVYGSDLPGNVPEEFLNPDDIAGDQDEDDTHN

SEQ ID NO: 5209 - protein, 98 aa, Francisella tularensis subsp. tularensis SCHU S4
MNIQITGRHVEVTDSIKNYVNEKVGKVEHYFDNITSTKVILDVEKDHQVAEAIVTVPGSEFVAKAEDKDLYAAIDMLEDKLARQLKKHKDKMRCNHGE

SEQ ID NO: 5210 - protein, 341 aa, Neisseria gonorrhoeae
MGIKVAINGYGRIGRQVLRAIYDYQIQDQLQIVAVNASGSLETNAHLTKFDTVHGRFEADVSHDGGNLIVNGDKIPFFSTRNPAELPWKELGVDLVMECTGAFTSKEKAKIHLESGAKKVLISAPGGDDVDATVVYGVNDSVLTADMTVVSNASCTTNCLSPVAKVLSESVGIVKGAMTTIHALTNDQTVTDVRHKDLRRARSGVENMIPTKTGAAKAVGLVLPELKGRLDGLAIRVPTVNVSLVDLSFQAARDTTVEEINALMKAASEAGALKGILGYNTLPLVSMDFNHTTEASHFDATLTKVVDGNMVKVFAWYDNEWGFSCQMLNTARRMFGLEVRP

SEQ ID NO: 5211 - protein, 337 aa, Phaeosphaeria nodorum
MVVKVGINGFGRIGRIVFRNAIEHNDVEIVAVNDPFIEPHYAAYMLKYDSQHGQFKGDIKVEGNDLTINGKTIRFYTEKDPANIPWSETGAYYVVESTGVFTTTDKAKAHLKGGAKKVVISAPSADAPMFVMGVNNETYTKDIEVLSNASCTTNCLAPLAKVIHDKFTIIEGLMTTVHSYTATQKVVDGPSAKDWRGGRTAAQNIIPSSTGAAKAVGKVIPDLNGKLTGMSMRVPTSNVSVVDLTVRLEKGATYDEIKEAVKAAADGPLNGILGYTEDEIVSTDLNGDTRSSIFDAKAGISLNKNFVKLVSWYDNEWGYSRRVLDLLVYIAKVDGNA

SEQ ID NO: 5212 - protein, 310 aa, Rickettsia akari str. Hartford
MKITTKVLIIGSGPAGLSAAIYTARAALKPILINGMRPGGQLTITTNVENYPGFVETVQGPWLMEQMSMQAQNVGTEIISDYVEKVDLSKRPFKVFTGSGNEYEAESIIICTGAEAKWLGIASEQDFMGFGVSACATCDGFFFKNQEIVVVGGGNSAVEEALYLTNHASKVTIVHRRDSFRAEQILQDRLFKNPKISVIWDHVVDEIVGRNKPKSVTGVKIQNVHTKEISLLNCSGVFIAIGHVPNTGLFTGQIAMDDDNYIITESGTTKTNVEGVFAAGDVQDKIYRQAVTAAGTGCMAALEAEKFLNK

SEQ ID NO: 5213 - protein, 185 aa, Xanthomonas oryzae pv. oryzae KACC10331
MDEGKHVSTDTSQHASAPYKAVATRGEIAMSSPITLIEAITQALAWELEHDPAVLVLGEDVGVNGGVFRATAGLQQRFGSARVLDTPLDETTIAGLSVGLAAQGMKPVAEAQFDGFVYPMVDHLICHAARLRHRTRGRLHCPMVLRVPWGGGIRAPEHHSEANEAIFTNVPGLRVVLPSSPQRAS

SEQ ID NO: 5214 - protein, 341 aa, Neisseria gonorrhoeae
MGIKVAINGYGRIGRQVLRAIYDYQIQDQLQIVAVNASGSLETNAHLTKFDTIHGRFEADVSHDGGNLIVNGDKIPFFSTRNPAELPWKELGVDLVMECTGSFTSKEKAKIHLESGAKKVLISAPGGDDVDATVVYGVNDSVLTADMTVVSNASCTTNCLSPVAKVLSESVGIVKGAMTTIHALTNDQTVTDVRHKDLRRARSGVENMIPTKTGAAKAVGLVLPELKGRLDGLAIRVPTVNVSLVDLSLQAARDTTVEEINALMKAASEAGALKGVLGYNTLPLVSMDFNHTTEASHFDATLTKVVDGNMVKVFAWYDNEWGFSCQMLNTARRMFGLEVRP

SEQ ID NO: 5215 - protein, 123 aa, Vibrio fischeri ES114
MQFLHTMIRVTDLKQSIEFYTKVLGMKVLDHSENSEYRYTLVFVGYEEGGTSIELTYNWDTDNYDMGNAFGHLALGVQDIYAACDNIKALGGNVTREAGPVKGGTRVLRLLQILMVIKLSLFN

SEQ ID NO: 5216 - protein, 310 aa, Magnetospirillum magnetotacticum MS-1
MDLIFNSGAKGAPGAAQGVPGELIKDTTTATFVADVIEMSQKVPVIVDFWATWCGPCKTLGPALEKVVREARGAVRMVKVDVDKNQDLAAQLRIQSVPTVYAFKGGRPVDAFTGAQPESQLKSFVKKLIAGGNAGPTIDDYIAEARQVLEEGDPQTAAGIFNQILQEAPDNASAMAGLLRCLIAVGQTEQAESMLKRLAPEIARHADIMAVATALELARHAGGVGEAAELRRRLAANADDHQARYDLALAYYAGGETEAAVDELLDLFKRDRAWNEDAARKQLVKIFEVLGFAHPLAKSGRARLSTLLFS

SEQ ID NO: 5217 - protein, 192 aa, Chromobacterium violaceum ATCC 12472
MGWLGRENAMKRWGAMLMLWGQAALAACPALLNHSVPGLMGGQINLCQYADRPLLVVNTASHCGFTPQFTQLESLYKQYGPRGLMVIGFPSNDFFQELDKPSEIGAFCQANYGVTFPMAGKGHVRGADAQPLFKDLIAATDDAPSWNFHKYLILPGASKVISIGTRTKPDAPEVVNAFLPYLQPETQAAAKP

SEQ ID NO: 5218 - protein, 377 aa, Oryza sativa (indica cultivar-group)
MADAEDIQPLVCDNGTGMVKAGFAGDDAPRAVFPSIVGRPRHTGVMVGMGQKDAYVGDEAQSKRGILTLKYPIEHGIVSNWDDMEKIWHHTFYNELRVAPEEHPVLLTEAPLNPKANREKMTQIMFETFNTPAMYVAIQAVLSLYASGRTQGIVLDSGDGVSHTVPIYEGYALPHAILRLDLAGRDLTDYLMKILTERGYSFTTTAEREIVRDMKEKLSYIALDYDQEMETAKTSSSVEKSYELPDGQVITIGAERFRCPEVLFQPSFIGMEAAGIHETTYNSIMKCDVDIRKDLYGNIVLSGGTTMFPGIADRMSKEDHCLAPSSMKIKVVAPPERKYSVWIGGSILASLSTFQQMWIAKAEYDESGPSIVHRKCF

SEQ ID NO: 5219 - protein, 409 aa, Pseudendoclonium akinetum
MAREKFERKKQHVNIGTIGHVDHGKTTLTAAITMCLQSFSKNKGKRYDEIDSAPEEKARGITINTAHVEYETENRHYAHVDCPGHADYVKNMITGAAQMDGAILVVSGADGPMPQTKEHLLLAKQVGVPTLVVFLNKEDQVDDPELLELVELEVRETLDKYEYPGDDIPIIAGSALLALEALIENPNVKPGENEWVDKILKLMQNVDTYIPTPVRETDKTFLMAVEDVFSITGRGTVATGLVERGTLKTGATVEIIGLRDTTTTTVTGLEMFQKTLDETVAGDNVGVLLRGVQKDNIQRGMVLAAPGTIKPHTKFEAQVYILTKEEGGRHTPFFPGYRPQFYVRTTDVTGKIESFTADDGSEALMATSGDRLKMVVELIQPIAVENGMRFAIREGGRTVGAGVVSTILK

SEQ ID NO: 5220 - protein, 73 aa, Vicia sativa
KGKVDVADDVTLEYLGSVHVQKGVIDLHFMVFKKAMLKTIKMAVEDKWSEELDCAWGKAYDELAAAIKKAMGW

SEQ ID NO: 5221 - protein, 289 aa, Glycine max
MATSQSQHRCVFVGNIPYDATEEQLIEICQEVGPVVSFRLVIDRETGKPKGYGFCEYKDEETALSARRNLQGYEINGRQLRVDFAENDKGNDRNREQGRGGPGMTTNVDHQKQVGIPAVLGEAVQHQPIGLHIAITAAAVMTAALGGAQFGIQSNQNSLQSQSALAHDPLTLHLAKMSRSQLTEIISELKGMATQNKELARQLLLSRPQLPKALFQAQIMLGMVTSQVLQMPNLRLVSDQTSQSLMNEGQLGQPSLVQTLSGLPPPGQGKLQPGLTPYAQEGQAQHHTS

SEQ ID NO: 5222 - protein, 334 aa, Azotobacter vinelandii
MALNIKAKEAPEFDVDDDVLLMDADIVLEDVLDDEPDLPVAKSRQANLKQHKYIDYTRALDATQLYLNEIGFSPLLTPAEEVHFARLAQRGDPAGRKRMIESNLRLVVKIARRYVNRGLSLLDLIEEGNLGLIRAVEKFDPERGFRFSTYATWWIRQTIERAIMNQTRTIRLPIHVVKELNVYLRAARELTQKLDHEPSAEEIANLLEKPVAEVKRMLGLNERVTSVDVSLGPDSDKTLLDVLTDDRPSDPCDLLQDDDLSQSIDQWLFDLTEKQREVVVRRFGLRGHESCTLEEVGQEIGLTRERVRQIQVEALKRLREILEKNGLSSDALFQ

SEQ ID NO: 5223 - protein, 463 aa, Mycoplasma genitalium G37
MATIQEIECDFLAKIAQKFTNAEIELINKAFYHAKTWHENQKRLSGEPFFIHPLRTALSLVEWNMDPITICAGLLHDIIEDTDQTEANIAMIFSKEIAELVTKVTKITNESKKQRHLKNKKENLNLKSFVNIAINSQQEINVMVLKLADRLDNIASIEFLPIEKQKVIAKETLELYAKIAGRIGMYPVKTKLADLSFKVLDLKNYDNTLSKINKQKVFYDNEWDNFKQQLKKILAQNQIEYQLESRIKGIYSTYKKLTVHEQNISKIHDLFAIRLITKSELDCYHILGLIHLNFLIDSKYFKDYIASPKQNLYQSIHTTVRLKGLNVEIQIRTQQMDNVSKFGLASHWIYKEQKEGLLAPALQLNYLVTKQKHSHDFLKRIFGTDIIKINVSASHEPNVIKQINVDSNNKLLDIAFENYPKQFAKLTKIEIDGVEINSFDTSVENEMLIEFYFGKNNNLKSKW

SEQ ID NO: 5224 - protein, 68 aa, Ananas comosus
PDDCCNGIRQLVASAGTTADRRAACGCIKSAASGVSGLNVGRAAALPKACGVLIPYKISPSTDCSKIN

SEQ ID NO: 5225 - protein, 400 aa, Lactobacillus plantarum WCFS1
MEIIVQKFGGTSVKDEAARIQALKHVQYAVDQGDKVIVVVSAIGRKGAPYATDSLLGLVGAEHSRLTNRELDMLVSVGETISTAVFTELARKQGLNVTAMTGHDAGIVTNDDFQNAKILRVDPKPITDAFIDADVVVVTGFQGATESGHVTTIGRGGSDTSAAILGAALKAKRVDIFTDVNGMMTADPRLVTHARFIKAISYEELANMAHEGAKVIHPRAVEIAEQAHVPMRIRSTYQEPDELGTLVTDRTTTQIEHYRTVTGIAHQTDLTQFTVPTDTLSSSAIFQLMAQHGLSVDFINITPHQVVFNLVDGDADVAKQLLTDAHVHCQSIANCAKVSVVGAGITGTPGVTARIVSALAAQHIDILQSTDSYTTIWVLVKEADLKAAMNALHDEFLGIE

SEQ ID NO: 5226 - protein, 857 aa, Burkholderia vietnamiensis G4
MKLIVIGHGMVGHKLLECLAAQADAAGTLQVTVLGEEPRPAYDRVHLSEFFAGKSADDLSLVEPGFFERHRQFDLRLNARVASIDRDAHTVTLASGATLAYDKLVLATGSRPFVPPVPGHERDGCFVYRTIEDLEAMQARGAHATRGVVVGGGLLGLECAKALRDMGLDTHVVEFAPRLMAVQVDDGGGRMLRAKIESLGVTVHTGKNTLEIVDGEQHAHRMAFADGSHLDADMIVFSAGIRARDELARACGLEIGPRGGVAIDDACRTSDADIYAIGECAAWNGMVYGLVAPGYDMARVVAKQLGGKMTDAADAAFAGADMSTKLKLMGVDVASIGDAHGATAGSRTYQYADERRQVYKKLVVSDCGKFLHGAVMVGDATEYGTLLQMMLNRIELPAQPEFLILPSSDGAAKPALGVDALPDGAQICSCNNVSKSQICAAVADGATSLGALKSCTGAGTSCGGCVPLVTQIMKAEMKKQGLAVNNHLCEHFAHSRQELFHLIRVERITTFDELLHKHGRGLGCDVCKPAVAGILASCFNEFVLKKEHAGLQDSNDYYLANIQRDGTYSVVPRMAGGEVTPEGLIAVGQVAKKYGLYTKITGGQRVDLFGARVEQLPSIWEELIAAGFESGHAYGKAVRTVKSCVGSTWCRYGVDDSVGLAIDIENRYKGLRAPHKIKFGVSGCTRECAEAQGKDVGIIATEKGWNLYVCGNGGMKPRHAELLASDLDRATLIRYIDRFLMFYVRTADRLQRTSVWRDNLEGGLDYLIDVVVHDRLGIAAELEADMQHVVDTYECEWKKAVTDPETRKRFRHFVNSDAPDTTIAFVETRGQIRPATPDERPGGKPVAIPVVAEPATV

SEQ ID NO: 5227 - protein, 107 aa, Streptomyces clavuligerus
MAGVLKNVTDDTFEADVLKSEKPVLVDFWAEWCGPCRQIAPSLEAITEHGGQIEIVKLNIDQNPATAAKYGVMSIPTLNVYQGGEVVKTIVGAKPKAALLRPGPVPR

SEQ ID NO: 5228 - protein, 552 aa, Synechococcus sp. WH 7805
MTASASAKPTHTLVRLDAPFTDQKPGTSGLRKSSTQFEEPHYLESFIEASLRTLPGVQGGTLVLGGDGRYGNRRAIDVILRMGAAHGLSKVIVTTGGILSTPAASNLIRQRQAIGGIILSASHNPGGPDGDFGVKVNGANGGPTPASFTDAVYECTKTLEEYTIVEAAAIPLDAPGLHSIGAMQVEVIDGVDDFVALMQELFNFDQIRDLIRSDFPLAFDAMHAVTGPYATRLFEGLLGAPAGSVRNGVPLEDFGKGHPDPNLTYAHELAELLLEGDDYRFGAACDGDGDRNMILGQRCFVNPSDSLAVLTANATLAPAYASGLAGVARSMPTSAAVDVVAKELGIDCFETPTGWKFFGNLLDAGKITLCGEESFGTGSNHVREKDGLWAVLFWLQILAERRCSVAEIMAEHWKRFGRHYYSRHDYEAVASEAAHGLYDRLEAMLPNLVGQPFAGRTISEADNFSYTDPVDGSVTTGQGLRILLDDGSRVVVRLSGTGTKGATIRIYLESYVPNSGDLNQDPQVALAEMISAINDLAEIQSRTGMDRPTVIT

SEQ ID NO: 5229 - protein, 604 aa, Triticum aestivum
MADRLTRIAIVSEDKCKPKKCRQECKKSCPVVKTGKLCIEVSPVAKLAFISEELCIGCGICVKKCPFDAIEIINLPKDLEKDTTHRYGPNTFKLHRLPVPRPGQVLGLVGTNGIGKSTALKVLAGKLKPNLGRFKNPPDWQEILTYFRGSELQNYFTRILEDNLKAIIKPQYVDHIPKAVQGNVGQVLEQKDERDMKNELCVDLELNQVIDRNVGDLSGGELQRFAIAVVAVQSAEIYMFDEPSSYLDVKQRLKAARVIRSLLRSNSYVIVVEHDLSVLDYLSDFICCLYGKPGAYGVVTLPFSVREGINIFLAGFVPTENLRFRDESLTFKIAETQESAEEVATYQRYKYPTMSKTQGNFKLSVVEGEFTDSQIVVMLGENGTGKTTFIRMLAGLLKPDTMEGTEVEIPEFNVSYKPQKISPKFQHPVRHLLHSKIRDSYTHPQFVSDVMKPLQIEQLMDQEVINLSGGELQRVALCLCLGKPADIYLIDEPSAYLDSEQRIVASKVIKRFILHAKKTAFIVEHDFIMATYLADKVIVYEGLASIDCTANAPQSLVSGMNKFLSHLDITFRRDPTNYRPRINKLESTKDREQKNAGSYYYLDD

SEQ ID NO: 5230 - protein, 160 aa, Arabidopsis thaliana
MESEGKIVFTEEQEALVVKSWSVMKKNSAELGLKLFIKIFEIAPTTKKMFSFLRDSPIPAEQNPKLKPHAMSVFVMCCESAVQLRKTGKVTVRETTLKRLGASHSKYGVVDEHFEVAKYALLETIKEAVPEMWSPEMKVAWGQAYDHLVAAIKAEMNLSN

SEQ ID NO: 5231 - protein, 202 aa, Glycine max
ICFLSFLPFPSISCRHFVPNLTIGAPVIESLRKHTKAYLDCHLMVTNPLDYVEPLAKAGASGFTFHVETSKDNWKELIQRIKSHGMIPGVALKPGTPVGEVYPLVEAENPVEMVLVMTVEPGFGGQKFMAETMDKVRILRKKYPSLDIEVDGGLGPSTIDVAASAGANCIVAGSSVFGAPEPAQVISLLRSSVEKAQQTSIQ

SEQ ID NO: 5232 - protein, 423 aa, Streptomyces ambofaciens
MKRVVITGIGVVAPGGVGTKSFWDLLTIGRTATRPITLFDASAYRSRIAAEVDFDPAAHGFASADTERLDRITQFALVAAREAIADSGIGESVERAPLRCAVSLGSAIGCTTALATQYAILSDCGNTWDLDHTEAADFLYDYFVPSSLAAALARDCGAQGPVALVSSGCTSGLDAIGHGADLIREGSADMAVVGGAEAPIAPITMASFDRLRLTSSRNDDPATASRPFDRTRDGFVLGEGAAVLVLEEQEHARRRGAQPYAELSGLAAHSSAHHMTGLRPGAQEMAAAIRAALDQARLNPADIDYISAHGAGTRHNDRHETHAFKAGLGHHAHQVPVSSIKSMIGHALGAAGALDLTAGALAIRHGIVPPTANLHQPDPTCDLDYTPLFAREQRTSTVLSVASGFGGFHTAAVLTRPRLQEAA

SEQ ID NO: 5233 - protein, 166 aa, Arabidopsis thaliana
MAFVTTAEVCDANQELIRSGQLRALQPIFQIYGRRQIFSGPVVTVKVFEDNGLIRQFIEEKGNGRVLVVDGGGSQRCAILGGNPVVQAQNNGWAGIVVNGCIRDVDEINGCDIGVRALASHPIKASKKGLGEQRVPVNIAGTRICDGEWLYADTDGILVSQTELAV

SEQ ID NO: 5234 - protein, 237 aa, Leuconostoc mesenteroides subsp. mesenteroides ATCC 8293
MAKLVLIRHGQSEWNALNLFNGWIDTKLSEKGIAQAKEAGDLLAAEGIQFDQAYTSVLTRAIQTLHLALEEAGQLFIPEAKSWRLNERHYGALQGQNKAEAAEKWGDEQVHIWRRSYDVLPPLLDSYDETMTVQGNTYPAFDRRYADVPEGELPLGENLKITLERVLPFWESDISKDLKAGKNVVIAAHGNSLRALVKHLENISDDDILNVEIANGQPLVYDLADDLSVVSKKTLTK

SEQ ID NO: 5235 - protein, 308 aa, Synechococcus sp. WH 5701
MTWTTASIPDQSGRIALITGANSGLGLESARALASHGATVVLACRSRRRGEEARAELLPAAVAGLEVLELDLADLASVRAGARWMQEQYGRLDLLLNNAGVMGPPRQLTRDGFELQFGTNHLGHFALTTALLPLMEGRADARVVTVTSGAQYFGKLAFDDLQSERRYDRWAAYSQSKLANVTFALELQQRLAAAGSTVSSLAAHPGLARTNLQPASVASSGSRFESLAYRLMDPLFQSAAMGALPQLYAATAPEARGGEHYGPDQWGGMRGGPTQVRIAPAALDPQIRQRLWEVSEQLVGQAAPAEAA

SEQ ID NO: 5236 - protein, 270 aa, Arabidopsis thaliana
MTSLKAVRCQTVRIQPRNSFHRLDRYALGYDKNRNHKILRFVDDHLAVGEHVFGYEIYDFSSSSWRVLDVTPDWDIQFYQRGVSLNGNTYFFAQEKITEDGEYEEFEDFLLYFDFSTERFEPRLPLPFHFYVLETVSLSSVRDEQLAVLYQRLDSYEILDIWLTTKIEPSAVSWSMFLKLDMRPLTGFQFMVDGGSFFIDEEKKVAVVFDLTKHKQTVTRRYQTAYIIGQDGYFKPVSLGEAPYLGDPHELYCLPLVCPSYAPSLVQLYN

SEQ ID NO: 5237 - protein, 149 aa, Triticum aestivum
  misc_feature (60)..(60): Xaa can be any naturally occurring amino acid
  misc_feature (77)..(77): Xaa can be any naturally occurring amino acid
  misc_feature (98)..(98): Xaa can be any naturally occurring amino acid
MPVPLAPYPTPPVPFTPPAPNAGAQSQLVCSGCRNLLMYPAGATSVCCAVGSTVTAVPAXPGTEMAQLVCGGCHTLXLMFIRGATSVQCSCCHTVNLXAMGANQVAHVNCGSCPMLLMYQYGAKSLKCAVCSFVTSGGASSGAKQNPSN

SEQ ID NO: 5238 - protein, 478 aa, Rickettsia akari str. Hartford
MKFMNLLKNITGKNYINGEFVEFGKQISIINPSTLKEIATVPNLELSEINSAINNTVQTFASWSQSSFEERIAILRKWYNLVIENIDELSHILTLEQGKVLSESKKEILYGASFIDWYTYVIHNIHGTIKPGSSKAHKIVTQYEPVGPSAAITPWNFPNAMITRKVIPAIAAGCSVILKPSSLTPLSALILTKFASDAGLPAGVFNVITGDSDIIGQSFCEDFRLRKLSFTGSTNVGKILYQNAANTLKRLSLELGGNAPFIITADNKLEKVARDLVVAKTRNSGQSCTSPNRIFIEESIYEKFIEILKAKFTQLKAGDGFDKESDVGPLISSAAIEKIQKLLTDAQSKEAQLICGGKAVDNFIEPTIIIDCLDNMDIFRTEIFGPVVACYKFKDLDEVIERANNTEYGLQGYVYSNNISTAQMIATRLDFGMVSINNPLPGNAKAPFAGRKASGFGVVGSFEGIFEYLNTKYINLQN

SEQ ID NO: 5239 - protein, 80 aa, Brassica napus
  misc_feature (10)..(12): Xaa can be any naturally occurring amino acid
  misc_feature (16)..(16): Xaa can be any naturally occurring amino acid
  misc_feature (18)..(18): Xaa can be any naturally occurring amino acid
  misc_feature (27)..(27): Xaa can be any naturally occurring amino acid
  misc_feature (49)..(49): Xaa can be any naturally occurring amino acid
  misc_feature (51)..(52): Xaa can be any naturally occurring amino acid
  misc_feature (59)..(59): Xaa can be any naturally occurring amino acid
  misc_feature (61)..(61): Xaa can be any naturally occurring amino acid
  misc_feature (64)..(64): Xaa can be any naturally occurring amino acid
MAYSMLSSAXXXTSPXQXTMDAPFTGXLKPSSAFPVTRKVNNDITSIAXSXXGRVSCMXVXPPXGKNKFETLSYLPDLTE

SEQ ID NO: 5240 - protein, 272 aa, Shigella boydii
LMASHPGLVVELVPMVTRGDVILDTPLAKVGGKGLFVKELEVALLENRADIAVHSMKDVPVEFPQGLGLVTICEREDPRDAFVSNNYDSLDALPAGSIVGTSSLRRQCQLAERRPDLIIRSLRGNIGTRLSKLDNGEYDAIILAVAGLKRLGLESRIRAALPPEISLPAVGQGAVGIECRLDDARTRELLAALNHHETALRVTAERAMNTRLEGGCQVPIGSYAELIDGEIWLRALVGAPDGSQIIRGERRGAPQDAEQMGISLAEELLNNG

SEQ ID NO: 5241 - protein, 379 aa, Alkalilimnicola ehrlichei MLHE-1
MFELMDNVNQNAVIKVIGVGGGGGNAVQHMVAADIEGVDFICANTDAQALQNVAARTTLQLGSGITKGLGAGANPGVGREAAVEDRERIMEAIEGADMVFITAGMGGGTGTGGAPVVAEIAREMGILTVAVVTKPFPFEGSKRMRIAEEGIKELGQHVDSLITIPNEKLISVLGNNLTLLDAFKAANDVLLGAVKGIAELITRPGLINVDFADVRTVMSEMGMAVMGTGSASGEGRAREAAERAIACPLLEDVNLAGANGILVNVTAGLDLGIGEFNDVGNAVREFASDEATVVVGTVIDPELENELHVTVVATGLGAFQEQRKPDLKPVRKASGDVDYNQLDRPTVIRKKAANDRPGVEDEGDMEYLDIPAFLRRQAD

SEQ ID NO: 5242 - protein, 425 aa, Methanothermobacter thermautotrophicus str. Delta H
MKGLEFSEFDISGDINRALDDMGFESTTPIQALTLPVTLDGMDVVGEAQTGTGKTAAFAIPVLENLEAERVPQALIICPTRELCLQVSEEIKRIGKYMKVKVLAVYGGQSIGNQIAQLRRGVHVIVATPGRLIDHIERGTVDLGGISTVVLDEADEMLNMGFIDDIERILSHVPERRQTMLFSATVSKPILRIARKYMRNPQVMRVEKKHSPKIDEFYFKTREEDKVELLDWILSSNNIRMGLIFCNTKRRVQRLRRQLNRMGYSADEIHGDLSQSKRERVMERFRRGDFSLLVATDVAARGIHVPDVEAVVNYDLPFENEYYVHRIGRTGRAGSSGKSFTLVVGSEVHRLRRIQSFTGKRIKQSNMPSPEEIRRGYEMDLREILRRNLESKTYSDSEILESLAGEGYSFRDISHALLDVLESSK

SEQ ID NO: 5243 - protein, 396 aa, Escherichia coli K12 [sequence omitted]

SEQ ID NO: 5244 - protein, 633 aa, Lactobacillus plantarum WCFS1
MCGFAGCLTDRTKADNAAYDQTIHEMTKMIVHRGPDDDGYFADDNITMGFRRLSIIDLAGGHQPLSYDNERYWMTFNGEIYNYVELREQLKQEGYEFKTSSDSEVILAMYAKYHADATKYLRGMFAFVIWDKQEKTLFAARDQFGIKPFYYAISGDDFYYASESKAIYKILKDKTFDKNALQDYMTFQFVPEPETLTKEIKMLAPGCSLTKKLGSAPRIDRYYHREFHPVERSEDEYAQKIKDALIDSVKIHMRSDVPVGSFLSGGIDSSIIVAIAKNFNPNLETISVGFEREGYSELDVAQETAEKLGVKNYSMTITPEAFMKAFPHFVWSMDDPLADPAAVPQYFLAKEAVKHVKVCLTGEGADELFGGYTIYHEPESLKPFRYTKPINGALKRIALMMPEGMRGRSFLLRGTTPLENRYVGNAFIFGEQEKQAFFKNYNQNHPFQSITQPLYDESVDYDPISRMQFIDMHTWLNGDLLHNADRTTMAHSLELRTPFVDREVYNLAAEIPADLRISHGTTKYILRKAVEDIVPAHVLHRKKLGFPVPIRFWLKDEMYDWAKQIINDSQTDQYFNKDYFLKLLDDHKAGVRDNSRKLWTVLTFMMWHRLYVESDHLMDSPEANAVAEKVEEF

SEQ ID NO: 5245 - protein, 315 aa, Zea mays
ACLQKTDASRPWAGLPLEVPPLAQALFDVAVVTVVGNGESTKFWTDRWLQGKSVSYWAPSLFQLIPNRAKRHRTMAQGLQNHSWISDIRGALSVQVLVEYLQLWNLFDNLALQQEVPDQHVWRLTNHGDYTSKSAYEAFFTGTIKFGPWRRIWKSWAPLKCKFIVWLAIKNRCWTADRLAKRGLPHPSACPLCDQAEETIQHVLIGCVLAREVWTSTLNSLGLNALAPQPGCRRFVGWWCTATKAVPKEMKKSVNSLIILVAWEIWKHRDACVLEGKRPCVRTVLQIVATECALWSAAGASRLRELLTCRLISGD

SEQ ID NO: 5246 - protein, 124 aa, Oryza sativa
PPPLVGPARAKGLPSISPRGSPFAIFCNGGKKIKTPNPPGIGGGLSVQFYPSARKSPGKGGAPFVYKCGAKVGGYNPIYFPEEWSPPGYPPVGGTPRLFIWAVTPPGVLGGGAPLVLNTRAPPG

SEQ ID NO: 5247 - protein, 267 aa, Triticum aestivum
  misc_feature (183)..(183): Xaa can be any naturally occurring amino acid
  misc_feature (220)..(220): Xaa can be any naturally occurring amino acid
  misc_feature (237)..(237): Xaa can be any naturally occurring amino acid
TSRSGMAGGDEGSLVPREVPGSYGMPFVSAIRDRLDFYYFQGQDKYFESRVERYGSTVVRINVPPGPFMARDPRVVAVLDAKSFPVLFDVDKVEKKNLFTGTYMPSTSLTGGFRVCSYLDPSEPTHAKVKQLLFSLLASRKDAFIPAFRSHFSSLLATVESQLVLGGKANFNTLNDATSFEFXGDAYFGVAPLPVLTLGPPALAKAPKWLIFQVHPLVTXLGFPMILQDPSLPGVSXGDFRHLSGGHKAVYSSPPTVERPRLLDHNC

SEQ ID NO: 5248 - protein, 182 aa, Glycine max
ANGIPSNNLEESGNLGSGHFIASNNKLSAVSRAQISAPPGFSVPNRAPPPGFSSLERMGQAFDSLSGNSLLDPSFLLRNSYQTPSNGNIGDPGDIEFMDPAILAVVKGRIQGAQNSPVLDMRSNYPEQLNYFENEARVQLLMQRSLSPHQNLRFSEIGNSFSQFGDSYGISSRLNQSQVSNL

SEQ ID NO: 5249 - protein, 364 aa, Lycopersicon esculentum
MIFQATIQNSYDKMSDLIAFDDTKAGVKGLVDSGINKVPQVFILPPKYRVKTCETHISFPVIDLKGIDEDPIKYKEIVDKVRDASETWGFFQVVNHGIPTSILEKTLLGTRQFFEQDTEIKKQYYTRDIGEKVIYTSNLDLYSPSVPAASWRDSIFFFMAPNPPSPQEFPTACGEILMDYSKYVTELGFSLLELLSEGLGLDRSYLKDYMDYCHQSCLCHYYPSCPQPELTMGISQHSDTEFITVLLQDDIGGLQVLHQNQWFDVPPIRGALVVNIGDFLQLMSNDKYMSVEHRAIAKKDGSRMSVACFFGENPLQSSKLYEPITELLSEDNPPKYHATTVIDYKNYVLNKGLDGTSALLSYKI

SEQ ID NO: 5250 - protein, 114 aa, Desulfovibrio desulfuricans G20
MNIYVGNLSYQMSEDDLRGAFEEFGAVDKVRIITDHDTGRSKGFGFVEMAEDSEANAAIEALNGREMGGRSITVNEARPRPERSGGGGGGFRRSGGGGGYGNRGGQGGGYGRRY

SEQ ID NO: 5251 - protein, 461 aa, Ashbya gossypii ATCC 10895
MQDSMDDSLREAEGRQDDSEVSSGTTLGSSTPEDSGVTAKLRKKYQMASALLRRELEELSVYDAKTAGVSGRSSGSGSGGLALLGGRFHVAPLRIPARRRLQTLVVAWHTSSFIYMTVLVLFLAANPLMWWFMVPYMVYYVWNRSPANGGVVRRYSPRLRSLALWRYYCEYYPISLHKSEDLAPTFVPDPRGAEPREWKLRLWLWPTRVELLNLTLQWTRARPQVATGPRYIFGYHPHGVGALGAFGAIATEGCNWSKVFAGIPACLCTLVNQFQIPIYRDYLLGLGCTSVARKNVLKVLEQNYSVCIVVGGAQEALLSRVGSTELVLNKRKGFIKLALETGNVNLVPIYAFGETDCFNVLDTGNESYLRKFQLWIKKTYGFTIPFFFARGVFNYDFGFLPFRNPINVVVGKPVYVDKRRTNPTMEEIDHYHDLYVQELRNVFDKNKHKFGYAGKELKIVE

SEQ ID NO: 5252 - protein, 581 aa, Desulfotalea psychrophila LSv54
MMENIKMSDCAEQLFSRFVVANAHRQSDYFSLIKTIIPCAKKHGNDCGSPLRAAYALLEREILENRHSPTKEISFGTSGWRGVLGKDINIYTVSCVTAAIVDMFQQIDVNRQLARLLLVDSFAEAQERGCVLGFDNRFGGEILARAVAGVLLAAGFRVHYAGESTTGVLSAAVLQLGASCSINLTPSHNPLEYGGYKFNGADAGPAASGVTEYITKKSRLIVEDGRDVSLLTEETFLADDRVHLLDSLQLWKDLVSQNRDKHGLDLSEISAKLLQRDDISVAVDSVHGASRLHIDALLGEEAGAKIKQLRNTADVTFGGVAPEPSSANMQGLVTYLQGIETPLKLGAIIDPDGDRIRFTDGDREISMNQFGAIAYHFLHEEKGVHGLLAKTVASSNLANRIAESFSEEIFEPRVGFKEFKPVVGRAVVCFEESDGISIIGHTPEKDAYIGLLLALDIVLTTGENLGTYLGKIEACYGSYYPEVGSVAVSMEGLALAEALEKLSSLLPGQTLEVAGEEREISQVIDIDGRKIIFADASWLMIRPSGTEPKVRFYVESRTRSGASALIKTARQLLIDIGLLSL

SEQ ID NO: 5253 - protein, 272 aa, Shigella boydii
LMTSHPGLVVELVPMVTPGDVILDTPLAKVCGKGLFVKELDVALLENRADIAVHSMKDVPVEFPQGLGLVTICEREDPRDAFVSNTYDSLDALPAGSIVGTSSLRRQCQLAERRPDLIIRSLRGNVGTRLSKLDNGEYDAIILAVAGLKRLGLESRIRAALPPEVSLPAVGQGAVGIECRLNDTRTRALLAALNHNETALRVTAERAMNTRLEGGCQVPIGSYAELVDGEIWLLALVGAPDGSQIIRGERRGSPQDAEQMSVSLAEELLNNG

SEQ ID NO: 5254 - protein, 727 aa, Arabidopsis thaliana
LFSMSQSLDYQNSCQDSFKVNVPTSFVPEEKEMNLTHLESALRKGFEVKLVIDEIPCQECSSSRGICGFNSTTQICCNVTSLSGGVTCVPQHQPSADELRRRCSERFSCGNQRNLYYPFWIPGREYCGHPDFKLDCSGGFAELNIASVNFRILNMSYDSSNKRLARSDYLNDLCPPNPLNDEPLIETVLQFSADTELLTLYYDCQLNSSATSPFPSSYFGELGCDEGRSYYVTRNLSSPLLDRFRGVLNNLREMCKRKVSVPASGPALNTLQTNPNSNNLKMALEHGFELQDNSNCSMCVLSGGSCGYNQNSSLFVCYCKDGPQDNQCDINLDVAIIIGIFVALCTIGGFIAFLVLLCPCCKVRIFRNRKTSDDRRQEKLKALIPLKHYTYAQVKRMTKSFAEVVGRGGFGIVYRGTLCDGRMVAVKVLKESKGNNSEDFINEVSSMSQTSHVNIVSLLGFCSEGSRRAIIYEFLENGSLDKFISEKTSVILDLTALYGIALGVARGLEYLHYGCKTRIVHFDIKPQNVLLDDNLSPKVSDFGLAKLCEKKESVMSLMDTRGTIGYIAPEMISRVYGSVSHKSDVYSYGMLVFEMIGARKKERFGQNSANGSSMYFPEWIYKDLEKADNGDLEHIEIGISSEEEEIAKKMTLVGLWCIQSSPSDRPPMNKVVEMMEGSLDALEVPPRPVLQQIHVGPLLESSWITEESSSISEIENRNLQVCEKILS

SEQ ID NO: 5255 - protein, 107 aa, Vibrio vulnificus CMCP6
MKLNITGKNIEITSAIRNHIESKFKKLEKWQTDIISCQTTFSEEPGKQMKFEAVIKVPKGQLIASAIHEDLYAAINEVEQKLERQLNKLQHKPDARRAEKPEVVEEE

SEQ ID NO: 5256 - protein, 487 aa, Debaryomyces hansenii CBS767
MSFQKYINSDIDVSGHIVDRAHVELLEEFDKQNDYDLKAKERKYDKQFYSMYQYRLSILKQSVDNNALNKWGDGTKKVNGQTVTKRDKILDISSGQLCWVSGTIFSDMKNKLNILQDVENGVDDVLPKVPETYTLSEVKEMPVVMLEDESGRAILNNDDFLKKNILVTGCIVAILGIEIQAGIFEIMDVVYPSVSPQKPLVAPKKENSKIAFVSGLKLCDEANHDIKIELLKQYLTGELGCNTDTQAASYISRLVIAGDSIAPIEETVDDDFFTTNNYGSKNISKFNTDSLKSLDKFITDLLPSVPISIMPGNNDPAEICLPQQPLHKSIFLSNKRYVGGSTLQTLTNPTWMEVQESGLRLLGTSGQNISDILKYLTAETLTDPQVVLTIMESNIKWQNIIPTAPDTLYCYPFDNADPFTLADETPHVYFVGNQKLYHTKTINLQKDHDNHETAQITLISIPDFSQTGQIVLLDLTTLECELVSFNI

SEQ ID NO: 5257 - protein, 1246 aa, Arabidopsis thaliana
MRASVYSLILLFFSCLLHLSKSQPFLGVNYGLTADNLPPPSASAKLLQSTTFQKVRLYGSDPAVIKALANTGIEIVIGASNGDVPGLASDPSFARSWVETNVVPYYPASKIVLIAVGNEITSFGDNSLMSQLLPAMKNVQTALEAASLGGGKIKVSTVHIMSVLAGSDPPSTAVFKPEHADILKGLLEFNSETGSPFAVNPYPFFAYQDDRRPETLAYCLFQANPGRVDPNSNLKYMNMFDAQVDAVYSALNSMGFKDVEIMVAETGWPYKGDPEEAGATVENARAYNKNLIAHLKSGSGTPLMPGRVIDTYLFALYDENLKPGKGSERAFGLFRPDLTMTYDIGLTKTTNYNQTSMAPLSPTRPRLPPAAAPTRQTLPSPPQMILPSPVTPSDKNSGQTDVHNSTPRSASLAHICRSLSISASMFFVSVLCVYVAVSHWVIGKPNTRWNLLKAFGISRCYLSHLFNIQGHHLRGSIAGLHSPSLLFLIDPSKEKPSWRILNVPGKPPKLAWGHSTCVVGGTRVLVLGGHNGEEWILNELHELCLASWQDSDLKSSTAPSSAPESDTRSEKNSNADEGSTSQNDVAAVNKGKGILGHSPNKPNVNLTEKPNKSSSSSQRSKPPMQENKARVTTEKRSVCQQNLPSTRVIPSALTRFFPIGNFLSSSFLLLTIPESSSSPHLRRPSVMASSTALICDTEAWKDLKGHVEDIKKTHLRDLMSDANRCQSMMMEFDGLLLDYSRQRATVETMDKLLNLAKASQLTEKISRMFNGEHINSTENRSVLHVALRAPKDAVIKADGMNVVPEVWNVLDKIKEFSDKIRSGSWVGATGKPLKDVIAIGIGGSFLGPLFVHTALQTDPEALESAKGRQLRFLANIDPVDVARNISGLNPETTLVVVVSKTFTTAETMLNARTLREWITAALGASAVAKHMVAVSTNLALVEKFGIDPNNAFAFWDWVGGRYSVCSAVGVLPLSLQYGFSMVEKFLKGASSIDQHFQSTPFEKNIPVLLGLLSVWNVSFLGYPARAILPYSQALEKFAPHIQQVSMESNGKGVSIDGLPLPFETGEIDFGEPGTNGQHSFYQLIHQGRVIPCDFIGIVKSQQPVYLKGEVVSNHDELMSNFFAQPDALAYGKTPEQLQKENVSENLIPHKTFSGNRPSLSLLLPELTAYNVGQLLAIYEHRVAVQGFVWGINSFDQWGVELGKVLATQVRKQLHSSRTQGTAPEGFNYSTTTLLKRYLETSSEPQM

SEQ ID NO: 5258 - protein, 239 aa, Triticum aestivum
  misc_feature (203)..(203): Xaa can be any naturally occurring amino acid
MLLGDKAVLKQQGGGEEEEMGGDGMSASELVSKEMEGVRAIVLKPSESLDESRFMKIAGADFNDAGLGLDGLLGSLASTGFQASNLADAIDVVNQMLDWSLSHEKPSEDCDEAELDPKYRESVRCKIFLGFTSNLVSSGIRDVIRFLAQHHMVDVIVTTAGGIEEDLIKCLAPTYRGEFSLPGALLRSKGLNRIGNLLVPNDXYCKFENWIMPLFDQMLQEQSAENVWTPSKVIARLGK

SEQ ID NO: 5259 - protein, 1111 aa, Arabidopsis thaliana
MLQQSSTHLLCGVVLLQLFAAQVDAQRSTSPWQTLSGDAPLVIARGGFSGLFPDSSLAAYQFAMVVSVADVVLWCDVQLTKDGHGICFPDLNLANASNSEEVYPNRQKSYPVNGVTTKGWFPIDFSLTELQKVLFSLIRGILSRSGKFDENGYSISTVQNVATQMKPALFWLNVQHDEFYEQHNLSMSSFLLSTSRTVSIDFISSPEVNFFRKIAGGFGNNGPSFVFQFMGKEDFEPTTNRTYGSILSNLSFVKTFASGILVPKSYILPLDDKQYLLPHTSLVQDAHKAGLKLYASGFANDVDIAYNYSWDPVSEYLSFVDNGNFSVDGMLSDFPLTASASVDCFSHIGRNATKQEQKHYHLPMVRASVDFLVISKNGASGEYPGCTKLAYEKAIKDGSDVIDCPVQMSSDGIPFCSSSIDLVNSTTVGQTHLRNRSIIVPEISSVAGIFTFSLTWHEIQSLTPAISNPFRENGMSRNPNERNSGNLISLYEFLNLAKNSTSLSGILISLENVVYLREKKGLDVVKVVLNRLTETGYIVGTLKVMIQSTTRLVLVDFKNQSTYKTVYKIKETIGNITDSAIEDIKKFANAVVINKASVFPNSDSFLTGQTTNVLERLQKFQLPVYVELFQNEFVSQPFDFFADETVEINAYIFGAGINGTITEFPYTAARYKRNRCLGREEVPPYMLPVNPGGVLTLISTSSLPPAQDPNPIFTHDDVTEPPLPPVIAKSPTSTLGTPSTIAKPLISWSVAGVVLFLVLLTLVFCFHRKRETRLRQQKLKALIPLEHYTYAQVKRITKSFAEVVGRGGFGIVYKGTLSDGRVVAVKVLKDTKGNGEDFINEVATMSRTSHLNIVSLLGFCSEGSKRAIIYEFLENGSLDKFILGKTSVNMDWTALYRIALGVAHGLEYLHHSCKTRIVHFDIKPQNVLLDDSFCPKVSDFGLAKLCEKKESILSMLDTRGTIGYIAPEMISRVYGNVSHKSDVYSYGMLVLEIIGARNKEKANQACASNTSSMYFPEWVYRDLESCKSGRHIEDGINSEEDELAKKMTLVGLWCIQPSPVDRPAMNRVVEMMEGSLEALEVPPRPVLQQIPISNLHESSILSEDVSVYTEG

SEQ ID NO: 5260 - protein, 394 aa, Leptospira interrogans serovar Copenhageni str. Fiocruz L1-130
MRIFQLERKRRKYDSNLYRLQGKSNLSFVLIDPIIDSKKFEELFQFLISKEESGTRLDHFLSKKFTYHSRTTWQKEITEGRILISSKTVKPGVSLKEGDLISYHPIQKEEPPVRNDYKILYEDEFFVAVDKPGDLPIHPAGIYRKGNLLTFLKESGKFKDLFTVHRLDRETSGVILFAKNSEIASILSKSFSLGNIQKYYITKVHGNFPKRKSAYGILKPDLSSKIRKKRTFVPLKFNFLKRNKKYLFENSLIEKQEEISLTYFQKIEYDKGRESKFKFSKIEFQFKNVNNEKIKSVFLDQEKDCYSFLLCKPITGRMHQIRATLFSLGFPLFGDKLYGKDEKVFLEFIEGKNPDLTTRLGMKRQALHSYAVCLNHPVTNQKMKITAPIPEDFL

SEQ ID NO: 5261 - protein, 458 aa, Lactobacillus johnsonii NCC 533
MDFTFDSDDNKNAVIKVIGVGGAGGNAVNRMIDEGVQGVSFIAANTDVQALNSNKAENKIQLGPKLTRGLGAGSHPEVGQKAAEESQQTIEDSLKGADMIFITAGMGGGTGTGAAPVIAKIARETGALTVGVVTRPFTFEGPKRSKNAAEGIAQLKQYVDTLVIIANNRLLEMVDKKTPMMDAFKEADNVLRQGVQGISDLITSTDYVNLDFADVKTVMENQGAALMGIGRASGENRTVEATKLAISSPLLEVSIDGAKQVLLNITGGPDLTLFEAQDASDIVSKAAGDGVNIIFGTSINANLGDEVVVTVIATGIDSKAEEEASKQPMRRPSRPARQEVVTPEPTKSEQPEVSKAASVDDTEVKVANTISHEAPTQSIPEVKAEKKESQDTLLDPTSVWKQDRKENNRPQPVENKEKDDDEFDSFSSDDSTSISQIETSVDDESDNDIPFFKHRRQD

SEQ ID NO: 5262 - protein, 295 aa, Rickettsia akari str. Hartford
MNNIIDGKALANEILEDLKLEIQELKSQTNASPKLAIVLVGDNPASIIYVKNKIKNAHKIGIDTLLVNLSTTIHTNDLITKINELNHDNEISGMIVQLPLPNSIDKNKILSAVSPYKDVDGFHPLNVGYLHSGIIDVSEFSQSFIPCTALGCLAVIKKYEPNLSGKHVVVIGRSNIVGKPLSALLLKEDCSVTICHSKTHNLGSIALKADIVVAAIGSPLKLTAEYFNPESIVIDVGINRISGNKIIGDVDFEHVKSKVKYITPVPGGIGPMTIAFLLKNTVKAFKDSYSTVCHL

SEQ ID NO: 5263 - protein, 407 aa, Agrobacterium tumefaciens str. C58
MRRVVVTGLGIVSSIGGDAAEVTASLRQAKSGISFSPDFAEHGFKCQVWGKPSLDPTDLVDRRAMRFLSQGGAWNHVAMKQAIADSGLEESDISGNERTGIIMGSGGPSTRTIVEAADITLKNNSPKRIGPFAVPKAMSSTASATLATWFKIHGVNYSISSACSTSAHCIGNAAEMIQWGKQDVMFAGGHEDLDWSMSNLFDAMGAMSSKYNETPGVASRAYDVNRDGFVIAGGAGVLVLEELEHAKARGAKIYAEIVGYGATSDGYDMVAPSGEGAIRCMRQALATVKGDIDYINTHGTSTPVGDSKEIGAIREVFGDKIPHIQSTKSLTGHSLGAAGVQESIYGLLMMQERFIGESAHISELDPEFAGVPIVRSRIDDAKIDTILSNSFGFGGTNATLVFQRHNG

SEQ ID NO: 5264 - protein, 646 aa, Gluconobacter oxydans 621H
MTDHNDLPVPGRRRALTSLLAAGTVAGTVGSSLRLTGNASAADEPPKDALTPHGHQPSNAHIEPADQPGANNKPVIRTQSDYFYRPSIHFSPPTGFMNDPNGLIFDGQTYHLYYQYDPTAPYAGRVHWGHATSTDLYTWQDQPIAIDQTAAGEAYTGCVVLDRNNVSGLFPPRKPEAAAAPPATPTATQTAVQALAPELRKTTSDTPYAPDKMPALGPNESAPFGSVYAPSSSAETHAAPPALPPMPGGLVAIYTRATPQSQTQYIAWSPDGGQHYIDYDHNPILNIGVNSFRDPKVFWHEASGKWIMVVVSARAHKVLFYGSIDLLHWMHLSSFGPAGLFGVDYECPNLIELDIEGDEKGRRWVLFVSVNPGGPLGGSVTQYFVGDFDGERFTPDNTVIGLTDFAKDSYAMQVYDSMPDNKAVYFAWFGNWQYCEEVPNRSWRGLMTLPRRMFLRRDEMNWLRLVQRPYGLEAFRGEKIPFKVERIAAQSGVQVALPTGTAIELLLTVTVDERSNPQPDGEQGRAGRFVIVFSNGQGESLSIGFDAFSSQLWLDRGDLHGFSQPFFTERFSTPLIANSRRFSLRLVLDACALELFANDGLSVATALVFPANPLTTLGLQATNTGATIEELALYPLRKTMDRPTAL

SEQ ID NO: 5265 - protein, 1430 aa, Cryptococcus neoformans var. neoformans JEC21
MVPPARAHTHNTTNTKQAQLSSAYHELANELGTDNISVVGNYTLGRVIGQGTYGSVHLATHRLTGTRAAVKKVPKSFTPHLTRELHHHRRLHHPHIVHLHEIIATESHIWLVTELCSGGELFDYLVERGRILEGEARRLFGELTLAVGWLHMHGVVHRDLKLENVLLDGELRIKLGDLGFAREWQKGRLMDTYCGTTGYASPEMLACQKYLGVETDIWSLGIILYTLLCGGLPFDDDDERVMKELIQKGEYEEPDWLSQEARDLIRGMLQHDPSKRLSIREILTHPWFKMTIVDKVYPNGDVPSIPPSPNPTSPTAAGDDFFAESALRQQQQQQSRLTPHVAGRSPLSTHLPTTPRQNSGSSEAENGDSRTERKASNMQRLNSAEFSTTEKELEQLHLCTSRPAATATGSGAISPRSISSPSMRGKTLRTLPEGQVDVDETPAGLPPPLSLIDEHPHLPVALHSRTPSRTKRRSVSSTLSLERRLSHHSSHNSYITFPPEDYLSKLDPSLLPNPDSSSSSTTTPPARSFTTPSETRLLRQLDDLGLDVGQLKHSVETDACDASAGLWWLLRQKQEERGETDEVVRRREKEVVRREEKVAEYAKEERRKAREAERERERIPTSPMGILGTRPGKRDSIEKSSEGLRFKEEQPPSIPTTPSYTSVIDLGPPVLPVDVDVDVERTAVGRDAPREAAGEEMKSWKRVESPQSVAISSQSSLDPAPTLPPPAAAGGGGAAGAKTQKEDGRDQAGLDPVAVATPMSNANSSTGASTVAKPEPNVNASANANTSANPRLKAKSPSMNMLQRATSVLGGVGKKGDDKDKDKNGMNEKREESTNDSLHPKRGGSSSPNKLKKPMPAGMKGLTSTLSRSESESEGLLAGGGGGGGGGDSPAVSASGSKTVTPGSSPRRKGLTPQGTPRGGLRDAGAKDSSGERASGNGNGNAGGGNEKGKGGKKDSLWTTFRHLFYEDRRRRKRESVTPSASSPLLLPPSDIKLPAGAVVLSRGANSRTSQFKRSNVGYAPSTGSRRTSLDGNRPVYSRRSSSVHTTSRRSSVGSLHFQDHQAMISDLSRRASQRSHGSQTPTSDREYLDYPSAAAPISRPGSSHSIRGGVGGGSRRSSFSVRSPSLHPETFSASAGGPTSTRFKSSVPPPASPLLGYRRRPAGGNDSSRVRHIKVIPESQIMRSSSVASSIRSNASSRASSMDRDRDRDRESEYESGRDDVSLRSGKRQKRRSGSQRSLAQQIHRTRSPLALSLENTYGSNSVANVGLGIGGASRIPKKPLRDVFQKKGKRKDGGDDDWVSEDEDGFACGLGQGRGIAKSFSNANANGTVWMNVNAKTNPARSAAAFPTSKMVAQPTAQGGTSRRRERGRRSSLEEERGRPQEGKGKAKGETAAQGLMGIESLSGRSRRNLPDRSTAPGIIEEEEEDEE

SEQ ID NO: 5266 - protein, 322 aa, Clostridium tetani E88
MVRNVVVMLSVKGEINMLGSVEEKILNVIDNVKEIFSGAHNIRKDGEKLERSTSKNIHIKNKEDKNGIDIIVSPGTKGESVHIPVILTQEGLNDEVYNTFEIGEGSEVEVVAGCGIHNPGHSKTQHDGVHEFFVRKGAKLKYSEKHYAEGEGKGKKVFNSKTILHVEEGGKVEMEIIQIKGVDDTKRETEIYLQKEANLVITERMMTEGKQNAESDIQIELKEEDSTAQVISRSVAKDDSKQKFKFNVVGENKCRAHVQCDSIIMGNSKVESIPAILAKHNEAELIHEAAIGKIANDQLIKLMSLGLNEKEAEDTILKGFLK

SEQ ID NO: 5267 - protein, 381 aa, Clostridium perfringens str. 13
MVIVIDDEGRENEGDLVMAGELVTGEKINFMATYGKGLICAPVSESIAENLGLNPMVSHNTDNHETAFTVSIDYKDTTTGISAFERAHTIKELINEESKAEYFRRPGHVFPLIAKNGGVLKRDGHTEAAIDLAKLAGLKEVGVICEIMKDDGTMARTDELLEFAKIHNMKIITIEDLIAYRTERDNFVYRVVETNMPTKYGDFKAIGFIDKLTGEHHVALVKGEIKSEEPVLLRVHSECLTGDVFGSRRCDCGEQFHSAMEKINEEGKGILLYMRQEGRGIGLINKLKAYKLQDEGLDTVEANIALGFPEDLRDYGVGAQILKDLGVREIRLMTNNPKKITGLEGYGLKIVERVPIEIKCNEENEFYLKTKKEKMHHLIMQ

SEQ ID NO: 5268 - protein, 397 aa, Rhodopseudomonas palustris CGA009
MSEIKSEIVRPDQSCGFQSAPIVLNDTTLRDGEQAPGVAFSTAEKVAIARALARAGVPEIEAGTPAMGVDEIAAIRAIVEAGLPLTTIAWCRMRTEDVDAALKAGVAMVNVSVPVSDVQIAAKLGGKRSNAIETVKRVVGYARDRGLDVAVGGEDSSRADPEFLAEVIATAKASGARRFRIADTLSVLDPFSSHALLATLRASTDLELEFHGHDDLGLATANTLAALRAGASHASVTVIGLGERAGNAPLEEVAVALKQLYGRDTGIVLSELGNVADLVATAAARTIPLNKAIVGEHVFTHESGIHVDGLLKDQRTYQSLDPNLFGRSNRIVIGKHSGLSAITSSLAKLDLPATADEAQGILAKVRRYAVTHKGPVGNETLIAIWREVRERTLTNCA

SEQ ID NO: 5269 - protein, 314 aa, Zea mays
MVVISIFSFPSDDCTPVSFTGPGQLAVGASPSFSQSCNSISCHLLPSFLSCMYASLCLVSCLFIHHRPAGGFPFIIDLPASLNFFCCVCWPGAEVATRIYSEEEIEMTSVWKTKVLPGLNKIFDKDGKKAAAAGFLKSFNKEEIDKEIEDKKTELEPKVVEAYEASPPEVKALFKDKKPVKVSKKNSAAVTKFLDELAKIDFPGAKVVSEAVAKSGTSPLLPAITFILDKVAPFIPKEEPKAEPAAEATSREVAVEEKKEEAEPAAATEAAPAPAETPSEAAVVEEKKEEEKKEEEDKPAAEEAAPPAAAAEEK

SEQ ID NO: 5270 - protein, 158 aa, Prochlorococcus marinus str. NATL2A
MSVNISKVEVFSFKNQKITFDHYKGNVLLIVNVASKCGFTKQYKALQYLQDKYESKGFKVLGFPCNDFGNQEPGQLEEIKEFCSTTYGVNFQLFQKVHAKGKTTEPFTTLNQVSPSGDVEWNFEKFLINTEGDAVARFKSSIEPDSPEVTQAIEKLLD

SEQ ID NO: 5271 - protein, 568 aa, Solanum tuberosum
  misc_feature (471)..(471): Xaa can be any naturally occurring amino acid
MASSALISDTESWKDLRAHVEEINKTHLRDLMNNTNRCQSMMVEFDGILIDYSRQRATFDTLNKLFSLAEAARVKEKIIRMFNGEHINSTENRSVLHVALRAPRDAVINSDGKNVVPEVWHVLDKIRDFSERVRSGAWVGATGKTLKDVVAVGIGGSFLGPLFVHTALQTEAEASECARGRQLRFLANVDPIDVARNITGLNPETTLVVVVSKTFTTAETMLNARTMREWISSALGPQAVAKHMVAVSTNLKLVEQFGIDPNNAFAFWDWVGGRYSVCSAVGVLPLSLQYGFSIVEKFLKGASSVDQHFLSAPFEKNIPVLLGLLSVWNVSFLGYPARAILPYSQALEKLAPHIQQVSMESNGKGVSIDGVPLPYQTGEIDFGEPGTNGQHSFYQLIHQGRVIPCDFIGVVKSQQPIYLKDEVVNNHDELMSNFFAQPDALAYGKTPEQLQKENIPEHLVSHKTFSGNRPXLSILLPSLNAYNIGQLLAIYEHRVAVQGFVWCINSFDQWGVELGKSLATQVRKQLHASRKKGESVEGFNFSTKTLITRYLEASADVPSDPSTLLPNI

SEQ ID NO: 5272 - protein, 122 aa, Triticum aestivum
  misc_feature (26)..(26): Xaa can be any naturally occurring amino acid
  misc_feature (47)..(48): Xaa can be any naturally occurring amino acid
  misc_feature (51)..(51): Xaa can be any naturally occurring amino acid
  misc_feature (55)..(55): Xaa can be any naturally occurring amino acid
  misc_feature (72)..(72): Xaa can be any naturally occurring amino acid
  misc_feature (75)..(75): Xaa can be any naturally occurring amino acid
  misc_feature (80)..(80): Xaa can be any naturally occurring amino acid
  misc_feature (86)..(86): Xaa can be any naturally occurring amino acid
  misc_feature (96)..(96): Xaa can be any naturally occurring amino acid
  misc_feature (102)..(102): Xaa can be any naturally occurring amino acid
  misc_feature (105)..(106): Xaa can be any naturally occurring amino acid
MARLNSKAVVSAVVLAAVVLMMAAKXKATALSCGQVDSKLAPCVSTXXGKXPSIXKECCSGVQGAETAWPAXSPXDRMIXCRCLKXLATSNQSINXGKVSGXPGXXGVSVPFPSAQQLEQCH

SEQ ID NO: 5273 - protein, 422 aa, Streptomyces griseus
MERRAVITGIGVCAPGGTGVDSFWELMCDGRTATRGITLFDPSPYRSRVAAEIDFDPRAHGLTPQEIRRMDRAAQFGVVTAREAFADSGLDGAALDPFRTGVSLGTAIGAAGGLDAEYRVVSDDGRLELVDHRYATPHLYDLFVPSSFATEVAWAVGAEGPATVVSTGCTAGIDAVGHAVEAIRDGSADVMVTGAVDAPITPLTMAAFDAIRATTSLNDEADTASRPFDASRKGFVLGEGAAVFVLEEAEHARRRGAYVYAEIAGYASRGNAFHMTGLRSDGAELAAAIRAALDEARLDASAVDYVNAHGSGTRQNDRHETVALKSALGQHAHRVPVSAIKSMVGHSLGAIGSIEIAACALAMRHHVIPPTANLHTPDPECDLDYVPLTARAQRTDAVLTIGSGFGGFQSAMVLARPDRSAA

SEQ ID NO: 5274 - protein, 617 aa, Lycopersicon esculentum
  misc_feature (84)..(84): Xaa can be any naturally occurring amino acid
  misc_feature (189)..(189): Xaa can be any naturally occurring amino acid
MASSSLSSIYSPSSSFKSEVKSIHKITSSQLGSIYLPNKSRFHVHAVAREVSASLSAGNNDVVHKLKKENVGLEKNPNALWKRXVEWLYQHKELGLYLDISRVGFSDGFLEEMEPRLQKAFKDMVDLEKGAIANPDEGRMVGHYWLRSPHLAPNSFLRLQIENTLEAVCEFANDVVSGKVKTPSGGRFXQILSVGIGGSALGPQFVAEALAPDNPPLKIRFIDNTDPAGIDHQIAQLGPELASTLVIVISKSGGTPETRNGLLEVQKAFREAGLIFAKQGVAITQENSLLDNTARIEGWLARFPMFDWVGGRTSEMSAVGLLPAALQGIDIREMLAGAALMDEANRTTVVRDNPAALLALCWYWATDGVGSKDMVVLPYKDSLLLFSRYLQQLVMESLGKEFDLDGNRVNQGISVYGNKGSTDQHAYIQQLREGVHNFFATFIEVLRDRPPGHDWELEPGVTCGDYLFGMLQGTRSALYSNDRESITVTVQEVTPRSVGALVALYERAVGIYASLVNINAYHQPGVEAGKKAAGEVLALQKRVLQVLNEASCKQPVEPLTLDEIAERCHCEDDIEMIYKIIAHMAANDRALIAEGNCGTPHSIKVYLGECNVDDLYA

SEQ ID NO: 5275 - protein, 347 aa, Anabaena variabilis ATCC 29413
MNREELLQETVQPIDIKAFDVVGLVEAMSKTAFQGRNLGRAAKIYDAMLQDKECTIILCLAGSLFSAGLKGIVHDLITHNMVDAIVSTGANIVDQDFFEALGYRHYVGDPFADDEVLRQQRIDRIYDTYIDEDQLRVCDMTIAEIAENLEKRPYSSREFIEQMAVYLERRGNYGQSVVQAAYQHQVPIFVPAFSDCSAGFGLVHHQWNSPESHVTIDSVRDFRELTQCKLASNYTGLVMIGGGVPKNFAQDTVVAAELLGFETSMHKYTIQVTVADERDGALSGSTLKEAHSWGKVDKATEQMVFSEATVALPLIAGYAYHKGNWRDRQPHRLAQLFTKPQPKVATV

SEQ ID NO: 5276 - protein, 476 aa, Methanosarcina barkeri str. fusaro
MKMQINGKAVEACSGEFFDIINPATGELIDRVPKGTEDDAAIAVESASSAFNGWASTSPQQRARILYTAAGIVRQRKDELAVLLTREQGKPLAEAKNEIEGFAHVLEYYCGLASSFHGDFVPVPQNGYAFTVKKPLGVCTAIIPWNMPALIMAWKIGPAMISGNTLVLKPASNTPLTNLALASILSEAGLPPGVLNIVTGPGEVVGESLVKSPKVKKISFTGEVRTGKRIAELAAGGMKRVTLELGGSDPMLVCDDANLEAAVAGALRGRFYNCGQACTAVKRLFVFESVAERFIKKLEAGIRNLRVGNGLHENIDLGPLNNRRQWEYIKELVADAEEKDEGRIVAGGRVPEGSACSKGYFFEPTLIVDVDRKSRLLNEEVFGPVLPVVRVKDLDEAIEEANNTCYGLGASIWTKNLDRARIGCEQLNAGIIWLNQHLKVAPEVPFGGTRESGIGNENGPDALSEYLDLKTVMLKI

SEQ ID NO: 5277 - protein, 166 aa, Glycine max
  misc_feature (162)..(162): Xaa can be any naturally occurring amino acid
MNALAATNRNFKLASRLLGLDSKLEKSLLIPFREIKVECTIPKDDGTLQSYVGFRVQHDNARGPMKGGIRYHPEVDPDEVNALAQLMTWKTAVANIPYGGAKGGIGCDPAELSISELERLTRVFTQKIHDLIGTHTDVPAPDMGTGPQTMAWILDEYSKFHXYSPA

SEQ ID NO: 5278 - protein, 174 aa, Hordeum vulgare subsp. vulgare
MAPTVMASSATSVAPFQGLKSTAGLPVSRRSNASSASVSNGGRIRCMQVWPIEGIKKFETLSYLPPLSTEALLKQVDYLIRSKWVPCLEFSKVGFIFREHNASPGYYDGRYWTMWKLPMFGCTDATQVLNEVEEVKKEYPDAYVRIIGFDNMRQVQCVSFIAFKPPGCQESGKA

SEQ ID NO: 5279 - protein, 499 aa, Colwellia psychrerythraea 34H
MCGFVVSVTKNLVDFNEKVGPDTLLRGLDSYNSDVFYSNGSCLYFEFSHLYITEPEVNQPLQSNSQVLVLNGEIYNYQELAARLNIDPTKFNDVSTFFKHIECYGLLDTLMRSNGMYSGFLFNKITGQCEIFTDHVGKKPLLVWNSRIGWHVGTGIDFNYVDEKTTEIKVVPPGISAFDIKTGNTFKEYSHLPIKGNESNLIDTLEDAISLRVPKNRPFAVALSGGLDSSIIAYILEARLSENAHYYVVGERYPDSVLALLEHLNICLSRVHLIKPPPADELLKLITKTCHITKSYNPSIISNGLATLLLCKAVHQDGIRVMLSGEGADEFFCGYQGMYNGRNDPTEMRANLIKDLHFTELRRLDLISASFSVEARCPFLDQRVTQIAMMLDVKNLCDIPMNIGKTLLRDTFKHLLPHSIINAPKESFDITSGLQKLVIDELQKEFKSERVALRTIFEKTLANYPIVNHHYFSHYPAFDKMIDRRDLKYRKIEFSINTQ

SEQ ID NO: 5280 - protein, 475 aa, Pyrococcus furiosus DSM 3638
MKSKSHLEEILKAGSLEEILGTAVPYPKEIEIKGKISRDTIEELSKVKNEPSWMLRHRLKALELFEKLPMPKWVVGIEELDLDNLVLYTKPEIQNEVRDWDDLPENIRKTFERLNIPEIEKRFLSGLTAVFDSESIYSKLKAEFEKKGIIMVPMEEAVRKYPDLVKRYFGKVFPPGDHKFAALHHALWSGGVFVYVPKGVKIPFPIEAFFVIGSALEGQFEHTLIIADEGSYLHFIEGCSAPMYKGFSFHDGMVEIYAHKDATVKFTTIQNWSRNVINFNNKRAIIEDNAYVEWIEGSIGSRITYTYPSSVLKGPGAKTTQYVVSLSNGPYLKDTGAKTWHLAPNTSSKIVSKSISANGGINIYRGLVRIMKGAINSTATVSCDSLILDKESKAYTYPHNQNDEPTASIIHEATTGKLSEDKLFYLKARGIKEEEAKSLIVLGFISEVLEDLPFEYVEVLKKVIELEFSEIGGVG

SEQ ID NO: 5281 - protein, 549 aa, Haemophilus influenzae
MKNINPTHTHAWKSLEAHKAELSNITIQDLFKQEKNRFDDYSLTFNNQILIDFSKNNINQTTLSHLRQLAQECALDSAKEAMFTGEKINRTENRAVLHTALRNRTNTPVLVDGKDVMPEVNAVLAKMKDFCQRIISGEWKGYTGKAITDVVNIGIGGSDLGPYMVTEALRPYKNHLNMHFVSNVDGTHIAETLKKVNPETTLFLVASKTFTTQETMTNAQSARDWLLKAAKDESAVAKHFAALSTNAKDVEKFGIDTNNMFEFWDWVGGRYSLWSAIGLSIALSIGFENFEALLNGAHEMDKHFLSTPIEQNIPTTLALVGLWNTNFLGAQTEAILPYDQYLHRFAAYFQQGNMESNGKYVDRDGNVIKNYQTGPIIWGEPGTNGQHAFYQLIHQGTTLIPCDFIAPAQRHNPLADHHNKLLSNFFAQTEALAFGKTKEEVEAEFVKAGKSLDDVKNIVPFKVFTGNKPTNSILVQKITPFTLGALIAMYEHKIFVQGVIFNIFSFDQWGVELGKQLANRILPELTDSEKVASHDSSTNGLINQFKAWR

SEQ ID NO: 5282 - protein, 540 aa, Francisella tularensis subsp. tularensis SCHU S4
MLFCDDSKKYLKEQNINLKNEFDKDDKRVEKFSLKHQNIYFDYSKNLINDYILKSLLESAEKSSLKDKIKQMFNGAKINSTEHRAVLHTALRDLSSTPLIVDGQDIRQEVTKEKQRVKELVEKVVSGRWRGFSGKKITDIVNIGIGGSDLGPKMVVRALQPYHCTDLKVHFVSNVDADSLLQALHVVDPETTLFIIASKSFSTEETLLNSISAREWLLDHYEDEKAVANHFVAISSKLDKVKEFGIDLEHCYKMWDWVGGRYSLWSSIGMSIAFAIGYDNFEKLLAGAYSVDKHFKETEFSKNIPVIMALLASYYSCTYNSQSQALLPYDERLCYFVDYLQQADMESNGKSVNIAGETVNYQTGVVLWGGVGTNGQHAFHQLLHQGNIFIPVDFIAIATSHHNYDNHQQALLANCFAQSQALMFGQSYDMVYNELLKSGLNETQAKELAAHKVIPGNRPSTTILLDELSPYSLGALIALYEHKIFVQGVLWDINSYDQWGVELGKKLGKNILKAMNDDSSDEYQNLDDSTRQLIAKVKNK

SEQ ID NO: 5283 - protein, 212 aa, Zea mays
MTSVWKTKVLPGLNKIFDKDGKKAAAAGFLKSFNKEEIDKEIEDKKTELEPKVVEAYEASPPEVKALFKDKKPVKVSKKNSAAVTKFLDELAKIDFPGAKVVSEAVAKSGTSPLLPAITFILDKVAPFIPKEEPKAEPVAEATSREVAVEEKKEEAEPAAATEAAPAPAETPSEAAVVEEKKEEEKKEEEDKPAAEEAAPPAAAAAAAAEEK

SEQ ID NO: 5284 - protein, 449 aa, Xanthomonas oryzae pv. oryzae KACC10331
MALARTDRGCAMSARQPAPDATGLVRVVSRWQIVGLSINDVIGSGIYLLPAATAALLGPMSLWAVMLAGLAVALLVLCYAQAASYFDTPGGSYLYTREAFGPFVGFQIGWMIWLTRISSAAALSNGLADAVARFWPTAATDNWARLMVVVGSLGLLTAINVIGVKSAAHTGIALVIGKLVPLLLFVAIGLFYVDWSWAFAGTTPDLRDLGNLGEAALLLLFAYAGFENIPAAAGEYRNPRRDVPFALITMIVTVTLIYAAVQVVAQGTLPNLAASPTPLADAASRFGSEALALILTVGATISILGTTSNTVMLGPRFLFALARDGYGPAFLARVHPRFHTPAAAVLIQGVLSLALALSGSFTQLALLSMVTRLFAYIGTAAAVIVLARRYRQRTDTLRLPGGPAIPIAALLLSLGLLASASWQNLAAAGLALVVGWLIYLLPRKQVENR

SEQ ID NO: 5285 - protein, 597 aa, Mesorhizobium loti MAFF303099
MAALRQWLAANGLDGFIVPRADEHQGEYVADRSARLKWLTGFSGSAGVAIVLRDRAFIFVDGRYTLQVRSEVDLDIFSVESLVDNPPAVWLKDNIGKGARLGFDPWLHTIGEVKALQTSADKTGAVLVPLEKNPIDIIWKDQPAAPVTPVELHPIGFAGELAKDKLARLATAIGKDGATHAVLTDPSSIAWTFNIRGGDVPHTPLALGFAILAADGSHQLFMDSRKFSRQVAAYLTQLADPHEPGEFEAAIAALAKGGAKIALDPVLAADRLRMLVEDNGGTVVAAPDPARIPRATKNQAEINGSRAAHRRDGAAVAKLLCWLERQKPGSLDEIAVVTRLEESRRQTGEETQMPLRDVSFDTISGAGPNGAIMHYRVSRATSRKLQAGELFLLDSGAQYQDGTTDITRTVPIGQPTEEMRERFTLVLKGMIGISTLRFPAGTRGSEIDAIARMALWKHGCDFAHGTGHGVGSYLAVHEGPQRIARTGTEKLLEGMMLSNEPGYYKEGAYGIRIENLILVTPAEQIEGGDIAMHGFETLTLAPIDIRLVRSDLLTREELHWLDTYHARVLAEIGPMLDGETLAWLEKATAPLPHDAKI

SEQ ID NO: 5286 - protein, 479 aa, Prochlorococcus marinus str. MIT 9313
MALHRSNPRSNDLEEHAIGETVDALVSPLPRTTFPQEYRPALTTFNLLKEELLLDGNSKQNLATFCQTYESQQVAELMALAVDKNLIDKDEYPQTAEIERRCVSMMADLWHAPGEAVGCSTIGSSEAAMLGGLAAKWRWREHRKAAGQSIDRPNMVCGSVQICWTKFARYWDVELREVEMTSGELCMSPERMLEQVDENTIVVVPTLGVTYHGLYEDVQAVSQALDELQQRKGLDIPIHVDAASGGFLAPFCAPDLAPWDFRLPRVKSINSSGHKFGLAPLGVGWVLWRESRDLPEGLVFHVSYLGGDMPTFQINFSRPAGQVISQYYDFVRLGRDGYQAIHGASYANAQYVAQELKKLGPFELINDGNPAGGIPTVVWTLRADQELGFNLYDLSDRLRLRGWQVPAYPFTGELAHQAFQRILVKRDFSREMADLLLTDIRNAITHFESHPVKISLNANEAASTNHLGRSMVECRDAHG

SEQ ID NO: 5287 - protein, 405 aa, Oryza sativa (japonica cultivar-group)
MISLHSAPFTLLVKLPGRRRSGLTPPRCAVRGAGNVSSAAVREMAVAEGRRQHEYSIDARLRQLAPEKVSADDRLVDYETLLVARFLDILEDLHGGDFRQVVEDCLRLSGEYQSEGDPARLGELGGLLTSLDVGDAIMVASSFSHMLNLANLAEEIQMVYRKKAEASRRGDFVDEASAPTESDIDETFQRLVRGLGKSPREVFDALRSQTIDLVLTAHPTQSVRRSLLQKHASIRSCLTQLCGEGISDNEEQEIDEALQREILAAFKTDEIRRTPPTPQDEMRAGMSYFHDTIWNGVPKFLRRVDTALKNIGIDERLPYNAPLIQFSSWMGGDRDGNPRVTPEVTRDVCLLARMMAANMYFSKMADLMFELSMWRCNDELRARANELHRKSSRKYAKYYIGMMLD

SEQ ID NO: 5288 - protein, 320 aa, Pelargonium x hortorum
MEKFPVINLEKLNGEGRAETMDKIKDACENWGFFEVLNHGIPYELLDTVEKMTKEHYKKCMEQRFKEMVTSKGLDGVEAEVEDMDWESTFFLKHLPESNISQVPDLQDNYRKVMKEFALKLENLAEELLDLLCENLGLEKGYLKKAFYGSKGPTFGTKVSNYPPCPKPDLIKGLRAHTDAGGLILLFQDDKVSGLQLLKDGNWVDVPPMHHSIVINLGDQLEVITNGKYKSVEHRVIAQSDGTRMSIASFYNPGSDAVIYPAPALLAKETEEKQVYPKFVFEDYMKLYSGLKFKAKEPRFEVMKAREDNINVTLDPIATS

SEQ ID NO: 5289 - protein, 376 aa, Cladophora rupestris
LDTYRSIFKYKYRTMQTSMVGNMRVAQPTGRRTATVANAKKLKVAINGFGRIGRNFLRCQFLRENSNLEVVVVNDSGGVKQAAHLLKYDSILGTFERTVEKIDDSTMAVDGKNIRIVSNRDPTKLPWADMGVDLVIEGTGVFVSEEGAGKHLQAGAKKVIITAPGKGDIPTFVMGVNSDDYKHEYPIISNASCTTNCLAPFVKVIVEKFGVVKGTMTTTHSYTGDQRLLDASHRDLRRARAAALNIVPTTTGAAKAVALVLPQLKGKLNGIALRVPTPNVSVVDLVVQVEKKTLAEEVNQAFRDAAAGPLKGVLGVADIPLVSMDFKKSDVSTTIDSALTMVMGDDMVKVVAWYDNEWGYSQRVLDLAELCAEKWE

SEQ ID NO: 5290 - protein, 324 aa, Streptomyces lividans
DPATLMAGLLHDTVEDTEYGLEDLRRDFGDVVTLLVDGVTKLDKVKFGEAAQAETVRKMVVAMAKDPRVLVIKLADRLHNMRTMRYLKREKQEKKARETLEIYAPLAHRLGMNTIKWELEDLAFAILYPKMYDEIVRLVAERAPKRDEYLAVVTDEVQQDLRAARIKATVTGRPKHYYSVYQKMIVRGRDFAEIYDLVGIRVLVDTVRDCYAALGTVHARWNPVPGRFKDYIAMPKFNMYQSLHTTVIGPGGKPVELQIRTFDMHRRAEYGIAAHWKYKQEAVAGASKVRTDAPKSSGKSKDDHLNDMAWLRQLLDWQKETEDP

SEQ ID NO: 5291 - protein, 776 aa, Oryza sativa (japonica cultivar-group)
MFVLRYMYQANTITIKRPPLTASLCTPAATVSVSDLHKHQEPARFTSFLNAAIEDAALVSDIAARPEALRRLLSPPGEGAAAAAVGFPPVRMPTPTEAFSPTQERRRRPFAGTCRLLARAGPRRTRRHLHDDYTKPCFYRSQFVAQTPAAQEIGSDLFIALVEFWKKISPGEPYRIILGDVRDKLYNTCERARQILSKGISSIPEDQTYTNVEQFLEPLELCYRSLCDCGDKLIADGRLLDLMRQVSTFGLSLVKLDIRQESERHTDAMDAITTHLGIGSYREWPEERRQEWLVSELRGRRPLFGPDLPQSEEVADVLGAFRVIAELPADSFGAYIISMATAPSDVLAVELLQRECGVKKPLRVVPLFEKLADLQQARATMELLFSVDWYKERIDGKQEIMIGYSDSGKDAGRLSAAWQLYKAQEEIVGVAERHGVKLTIFHGRGGTVGRGGGPSHLAILSQPPNTVNGSLRVTVQGEVIEKSFGEENLCFRTLQRFTAATLEHGMNPPVSPKPEWRRLLDDMATVATDEYRSIVFQEPRFVEYFRAATPETEYGRMNIGSRPSKRKPGGGIESLRAIPWIFAWTQTRFHLPVWLGFGAAFRHAMQQSDAGGGLATLREMYDEWPFFRVTIDLLEMVFAKGDPGIAALYDELLVPDDLRPFGEQLRANYVETQRLLLQVAGHKDLLESDPYLRQRLMLRDSYITALNVCQAYTLKRIRDGGFRPETRPPLSKELLGSSAVAEKLVKLNPNSEYDPGLEDTLILTMKGIAAGMQNTG

SEQ ID NO: 5292 - protein, 186 aa, Triticum aestivum
  misc_feature (57)..(57): Xaa can be any naturally occurring amino acid
  misc_feature (84)..(84): Xaa can be any naturally occurring amino acid
  misc_feature (98)..(98): Xaa can be any naturally occurring amino acid
  misc_feature (117)..(117): Xaa can be any naturally occurring amino acid
  misc_feature (132)..(132): Xaa can be any naturally occurring amino acid
MAARARAVAATSRNSSILLAAAVALALLVSSASAQSGCTTALVGLYPCMNYIKRQRXTRPTKSCCSAARLSPCSPSPQCLCTRXSGGDSSSLGGVTIXKTRALRVAPTPCNVQTPPXASKCNGAGSGSAPWXPVAKTPTSPAVQAPAGLGSKTTPSAYLQGNGGSSLHGPAGLGPPRPAAAVYAVS

SEQ ID NO: 5293 - protein, 113 aa, Glycine max
MATILENIQKARFLPTRPLRDDLPTFQGGKEEESHLMGLRKRLSSFSGKIQPISSASAEWAFRRTRSAPSLAAEFAGGPLKRWWDWGLGWLLSKKLGFAGDLEMNEEEAAALG

SEQ ID NO: 5294 - protein, 300 aa, Prochlorococcus marinus str. MIT 9313
MSWKVADIPDQKGRVALVTGANSGLGLETAKALLNKGARVIMACRSLPTGEDVRQVILERNDSTKLDLIELDLADLASVRRAAEQVESQYSRVDLLINNAGVMATPKTLSKQGLELQFAVNHLGHMALTLKLLPLLAKQHGARVVTVTSGAQYMGRIAWDDLQGIKQYDRWAAYSQSKLANVMFALELDKRMRQTASGIASLLAHPGLARTNLQPKSVAANKSWQEGLAYRLMDPMFQSAAMGSLPQLHAATAPTAQGGEQYGPRFNFRGYPKLCSVAPLALREEDRQRLWSISEKLLEI

SEQ ID NO: 5295 - protein, 440 aa, Oryza sativa
MAWPGGHTKGEKGLKGNNASSYDNLNFARILQQIVQENPGNLVAQRCAKAEMSFPQLSESVQSIFLSETKVFNALEFEKKAKVKSHFSANNSAEAGNLGETRHGAMDYMGSEAEVKNSQSRKVTAGPDDGDKQSDKPSVPVLPLRDCGRRGGASATHIIIVSTSGLLTRANVGILGGEMAVVASRCTGLLLPDLGASLAGFRRRRSTPASSLSFRPRRARRRLGSLSCIAPPDSAEPQTDEPAAKDDSTEDKAEASSASQDAGNPTFPNKDLSRRIALASTIGAVGLFAYQRLDFGGVSLKDLAANATPYEEALSNGKPTVVEFYADWCEVCRELAPDVYKVEQQYKDRVNFVMLNVDNTKWEQELDEFGVEGIPHFAFLDKEGNEEGNVVGRLPKQYFLDNVVALASGEPTVPHARVVGQFSSAESRKVHQVADPRSHG

SEQ ID NO: 5296 - protein, 119 aa, Glycine max
  misc_feature (31)..(31): Xaa can be any naturally occurring amino acid
  misc_feature (46)..(46): Xaa can be any naturally occurring amino acid
  misc_feature (77)..(77): Xaa can be any naturally occurring amino acid
  misc_feature (110)..(110): Xaa can be any naturally occurring amino acid
ASFKVACVVAMMYMVVAMSVTPITQARITCXQVANNISPYLSYLRXNEKPVNTYYNKIKSLSRAGKTTSNHQTAYNXLKNLTNNIKQNLNTGNAASLPGKYSINIRYKIXTCTNYATIK

SEQ ID NO: 5297 - protein, 339 aa, Pycnoporus coccineus
MPGQVPVGINGFGRIGRIVLRNALLHGDINVVAVNDPFIDLEYMVYMFKYDSVHGRFKGSVEAKDGKLWVEGKPISVFQEKDPANIPWGSVGAQYIVESTGVFTTTEKASAHLKGGAKKVVISAPSADAPMFVCGVNLDAYDPKYTVISNASCTTNCLAPLAKIINDKFGIVEGLMTTVHATTATQRTVDGPSHKDWRGGRAVGNNIIPSSTGAAKAVGKVIPSLNGKLTGLAFRVPTIDVSVVDLVVRLEKPAKYEDIKNAVKEAANGNMQGIMAYTEDKVVSTDFTGSDASSIFDAEAGIALNDHFVKLISWYDNEWGYSKRVCDLLAYAAKRDGAI

SEQ ID NO: 5298 - protein, 325 aa, Robiginitalea biformata HTCC2501
MSESIERIKTLILGSGPAGYTAAIYAARADLKPVVYTGMEPGGQLTTTTEVENFPGYPDGVDGPTMMVQLQQQAERFGTDVRIGIATAVEFSDEPGGIHRVTIDDDKVVEAETVIISTGASAKYLNIPSEQRLRGGGVSACAVCDGFFYKGQDVAIVGGGDTAAEEASYLAKICNKVTMLVRKDHFRASKAMQNRVMSLENIDIRFNTEVDEVLGDQVVEGLRMVNNQTGEKEEVAITGLFIAIGHKPNTDIFKGQLDMDATGYIVTHGKSTRTNKPGVFASGDVQDKEYRQAVTAAGTGCMAALDAERYLSEVEAGEGEEVEQQ

SEQ ID NO: 5299 - protein, 410 aa, Aspergillus nidulans FGSC A4
MSLSPEQIQLIKATVPVLQEHGTTITKVFYDNMLTAHPELKTVFNVSNKVHGHQPQALAGALFAYASYIDNLGVLSPAVERICHKHASLAIQPDGYQIVGKFLLEAMGQVLGDALTPPLLEAWAAAYWQLANIMIGKEAELYKSADGWTDFRDFRVARKEPESDVITSFYLEPVDGKPLPSFLPGQYVSIQVQVPQLNHAQCRQYSLSDQPKPTYYRISVRKDLGLDASDPSAPAHPGYVSNILHDNINVGDIVKLTHPYGDFHLTDAAASSPLVLISAGVGLTPMTSMVNTLRTAESNTRPVHFIHGAHTSASRAFQAHLQSLPNLKTTYFLTAPTESDKQGENYTYKGRVDLSKIADEDLFLGDKQTEYYICGPTAFMLDTQKALVARGVDQSRVHMELFGTGGVPAA

SEQ ID NO: 5300 - protein, 122 aa, Methanobacterium ivanovii
MKEIIAIIRPNKINRTKEVLDALGFSSMTANAVFGRGRQKAIVGEVTFAIQNKDLREEEGSMRYIPKRMISLVVPDEDASLVVESIMKVNKTGQIGDGKIFVCPIEDAVRVRTKESGEDAIL

SEQ ID NO: 5301 - protein, 230 aa, Saccharomyces cerevisiae
MRQVLQKDKRDVQLSKALSYLLRHTAVKEKLTIDSNGYTPLKELLSHNRLKTHKCTVDDIHRIVKENDKQRFHIKTLGADEEWICATQGHSIKSIQPSDEVLVPITEASQLPQELIHGTNLQSVIKIIESGAISPMSRNHVHLSPGMLHAKGVISGMRSSSNVYIFIDCHSPLFFQTLKMFRSLNNVYLSSSIPVELIQKVVVKGNLKDEEKLDTLRRILHERNIPLEKI

SEQ ID NO: 5302 - protein, 154 aa, Lupinus luteus
MGVLTDVQVALVKSSFEEFNANIPKNTHRFFTLVLEIAPGAKDLFSFLKGSSEVPQNNPDLQAHAGKVFKLTYEAAIQLQVNGAVASDATLKSLGSVHVSKGVVDAHFPVVKEAILKTIKEVVGDKWSEELNTAWTIAYDELAIIIKKEMKDAA

SEQ ID NO: 5303 - protein, 151 aa, Hypocrea lixii
MSTAARRRLMRDFKRMQTDPPAGVSASPIPDNVMTWNAVIIGPADTPFEDGTFRLVMQFEEQYPNKPPQVKFISQMFHPNVYANGELCLDILQNRWSPTYDVAAVLTSIQSLLNDPNTGSPANVEASNLYKDNRREYIKRVRETVERSWED

SEQ ID NO: 5304 - protein, 538 aa, Methanococcus maripaludis S2
MESFKNLGLSDEILEALEKKGFTNPTPIQEQAIPILIEGKRDIVGQAQTGTGKTAAFGIPILETIDEHSRNTQALILAPTRELAIQVAEEIDSIKGSKRLNVFPVYGGQSIDRQIRELRRGVQIVVGTPGRILDHISRRTIKLENVSYVVLDEADEMLNMGFIDDVEEILKSVSTDKRMLLFSATLPDSIMKLAKNYMREYDIIKVKRQQLTTTLTDQSFYEIHSRDKFELLSRIIDTEKEFYGLIFCKTKADVDEVANRLNEKGYAAEGLHGDMTQAQREKTLDKFKGKKINVLVATDVAARGIDINDLTHVVNFDIPQNPESYVHRIGRTGRAGKQGYAITFVEPSEFRKFKYIQKIAKTEIKREEVPDVKDIISAKKIKIISGIKEVLESGKYADCEKMASDLLEDADPQEVLSAVLKYALKDELSESNYKKIGRGSQRSERSGRNDSRGRRSFAPGENVRLFVALGKLDKMNPKKLVDHISRKSDVKGRDIDDVKVFEKFSFVTVSSSDAEIILDSFKNERRGRRSIIEVASGN

SEQ ID NO: 5305 - protein, 479 aa, Pyrococcus furiosus DSM 3638
MVERKKWSENFSEWFNEVIEEAGILDKRYPVKGMNVWLPYGLKIMKNIEKFIHEEMERTDHQEVLFPALIPETEFQKEAEHIAGFEGEVFWVTHAGHEPLDVRLVLRPTSETAMYSMFALWIRSHADLPFKVYQIVNVYRYETKHTRPLIRVREISRFFEAHTAHADFEDAERQIKEDLEIFDNLMKKLAIAYVISKRPEWDKFPGAYYSLGAEVVMPDGRTLQIGTMHNYKQNFAKAYNILYEKEDGTHDYVHQTTFGMSERLLAAVIAIHGDDRGMVLPPTIAPIQVVIVPIPKKGSEEEVYSYAREIEEELKLAGIRVHLDLRDKRPGWKFYDWELKGVPVRIEVGPRDAAEKTVVLARRDKLEKITVSREELVDKVRELFDDIMQYLYERAKEWLESHIKRVDTIEEAKELFNDRRGIVEIPWCGEEECGLKMEEELEAKMLGIPYPEESARVEGKKCPVCGREAKFIARFARTY

SEQ ID NO: 5306 - protein, 340 aa, Burkholderia sp. 383
MSTESALQATIQALVQDGKGLLAADESGPTIAKRFKTIAVESTEENRRAWRTLLLSTPGLGEFVSGVILYEETLGQCADDGTPLPELAARQQIVPGIKVDAGKIPLALAPGDEITQGLDGLAARLDGYQRQGARFAKWRAVYNVSATLPGHAAIQANAEALARYAAICQEAGVVPIVEPEVLMDGDHSIGRCAQVTDAVLHAVFDALHRHRVVLAHMLLKPSMVVAGSTHTAQPAPAEVAEATVRLLRSAVPAEVPGIFFLSGGQTPEEATAHLDAMNRVAGRPWLLSFSYGRALQEPPLAAWQGQAANVRAAQDALLLRARLNGAACRGQYDAAMERTP

SEQ ID NO: 5307 - protein, 900 aa, Neisseria meningitidis serogroup A
MQLHILNNPKDAALAADAEFLKQSLFNLLHEEASPLVVETVKLLSTSDDSAALIEKVLPQLDEQQTHDLTLACGLFAQILNIAEDVHHERRRQIHEEAGRGGAEGSLTETVRRLKAGKADGKSVQRQLDNTSVTAVLTAHPTEVQRQTVLNFNRRIRALLPQRERCTNADALARLRREIDTILLGLWQTSETRRHKLSVNDEINNGVSIFPMSFFEALPKLYRKMEHDFQTAYPDVRVPDILKIGGWIGGDRDGNPFVSAETLRFAFRRHADAVFRFYRGELDKLYRELPLSIRRVKVNGDVMALSDKSPDEETARAEEPYRRAIAYIMARAMGKARALGLGMGCKFGFLEPYASAQEFLDDLKKLQHSLIDNGSRLLAEGRLADLIRSVSVFGFHMMPLDLRQHAGKHADVVAELFQHAGLEDYNSLNEEQKQAALLRELSHQRPLYSPFITYSDHTRHELAIFNEARKIKDEFGEDAVTQSIISNCEQPSDLLALALLLKETGLLAVENGKPKSRINIVPLFETIEALENACPVMETMFRLDWYGALLESRGNIQEIMLGYSDSNKDGGYVTSSWCLYQAELGLVELFKKYDVRMRLFHGRGGSVGRGGGPSYQAILAQPAGSVAGQIRITEQGEVITAKYADPGNAQRNLETLVAATLEASILPDKKDPDAKLMQDLSDVSFKYYRELITHPDFIDYFLQTSPIQEIATLNLGSRPASRKTLARIQDLRAIPWVFSWMQNRLMLPAWYGFGSAVETLCEGNPDTLAALREHAQSNPFFQAMLSNMEQVMAKTDITLAENYAGLSESPDKAKVIFGMIKEEYRRSRKALLDLLQTEELLRDNRSLARSLALRIPYLNALNGLQVAMLKRLRKEPDNPHALLMVHLTINGVAQGLRNTG

SEQ ID NO: 5308 - protein, 69 aa, Zea mays
MADWGPVIVATVLFVVLTPGLLCTLPGRGRVAEFGSMHTSGLAILVHAVLYFALITIFLIAIGIHVYAG

SEQ ID NO: 5309 - protein, 541 aa, Trichodesmium erythraeum IMS101
MITSQDRVIIFDTTLRDGEQSPGATLNIDEKLTIARQLSLLGVDVIEAGFPYASIGDFEAVQKIAEIVGVEGGPTICGLARTTRADIEAAGKALKPAAKARIHTFIATSDIHLAYKLKKTRAEVLEIASEMVAYAKTFVDDVEFSPEDAGRSDPEFLYQVLEKAIAAGATTVNIPDTVGYTTPAEFGGLIRGIKENVPNIDQAIISVHGHNDLGLAVANFLEAVKNGARQLECTINGIGERAGNAALEELVMAFHVRRQYFNPFFGRPPESETPLTNINTRHIYKTSRLVSSLTGMFVQPNKAIVGANAFAHESGIHQDGVLKNKLTYEIMDAQSIGLTDNQIVLGKLSGRHAFQSRLQELGFKLSDEEINKAFIKFKDLADKKKEITDWDLESIVNAEIQQPPELFRLELVQVSCGDRSRPTATVIIRTPNGEELTDAAIGTGPVDAVYKAINRVVNVENDLVEFSVQSVTAGIDAIGEVTIRVRHEGRVYSGHAANTDIIVASAEAYLSALNRLYAVLQRGVEKINLPKDQPTEVVAGS

SEQ ID NO: 5310 - protein, 90 aa, Plantago major
HRRSGSSSSSSSEDDGMGGRRKKGLKDKIKDKLPGHHGDQTQQTTGAGYGTGTGAGYGTGTGAGYGGEGHEKKGMVDKIKDKIPGMGGNR

SEQ ID NO: 5311 - protein, 357 aa, Zea mays
  misc_feature (125)..(125): Xaa can be any naturally occurring amino acid
NSCLVAWDSVTRPLKYGGLGIPNLQHMCWALQAKWLWLQKTDRDRPWLGLSIPFQQHVKDLFAASLISHVGNGSNTLFWTDKWLNGCSIRDLASEVVSKVAKRALTSMTVVQALENRQWIAHINXPLSLIGIQQFLFLWDTLGDVQLSQEEDRHVWRHETSGVFSSKSCYKVLLLGSTVFEPWKRLWKTWAPPKCKFFLWLAIRNKCWTADRLQLRGLPHPDVCPMCDQAQETIQHLLTACIFARQFWHTILAAIGLGHLTPTADEGNFSEWWGQVCLRVTKTRKKGLNSLIILGAWCLWLQRNRAVFHGESPSLPRILRCFSDECVCWVLAGAKEVGSMGLVAALGEVGSSFSTSM

SEQ ID NO: 5312 - protein, 559 aa, Mesorhizobium loti MAFF303099
MTINLQKPDITELKPRITVFGVGGGGGNAVNNMITAGLRGVEFVVANTDAQALTMSKADRLIQLGAHVTEGLGAGSQPEVGRAAAEECIDEIIDHLSNTHMCFVTAGMGGGTGTGAAPVVARAAREKGILTVGVVTKPFHFEGQRRMKTADLGIEELQKCVDTLIVIPNQNLFRLANDKTTFADAFAMADQVLYSGVACITDLMVKEGLINLDFADVRSVMREMGKAMMGTGEASGEGRAMAAAEAAIANPLLDETSMKGAKGLLISITGGRDLTLFEVDEAATRIREEVDQDANIILGATFDEELEGVIRVSVVATGIDKSAAEIAAAPISIRTAPPKPAVRPAVAAVESRPAPVQQPVYEPRAADPVAEAIQLAEANAAAMAQARPAPVAHADDFRPQSKIFQAPPQQPMPQPVVQQMQPAPQPREMLREVQQPVAMAPQRMPRVEDFPPVVKAEVDAKSRPVDHENNSGPMGLLKRLTNGLTRREEEPARLQPAQPREPKLRQAAPEVRRLASQDAQLYAPRRGQLDDQGRLTPQTRATQDDDQLEIPAFLRRQAN

SEQ ID NO: 5313 - protein, 401 aa, Coccidioides immitis RS
MQPRLREIFLCREKPLLQHEHTLAAEFLIYPSNCKNVFHESCAKRAGITTVQSDIFKPTKYGGKYTVTLIPGDGIGAEVAESVKTIFKADNVPIEWEQVDVSGVDAGTKHSEELFKESIASLRRNKIGLKGILHTPVERSGHQSFNVALRQELDIYASIVLIKNIPGYKTRHDNVDLCIIRENTEGEYSGLEHQSVSGVVESLKIITRAKSERIAKFAFSFALANNRKKVTCIHKANIMKLADGLFRSTFKKVAESYPTLEINDMIVDNASMQAVSRPQQFDVMVMPNLYGGILSNIGAALVGGPGIVPGCNMGRDVAVFEPGCRHVGLDIKGKDQANPTALILSGSMLLRHLGLDEHANRISKAVYDVIGEGVVRTRDMGGQAATHEFTRAVLDKMEAAL

SEQ ID NO: 5314 - protein, 585 aa, Prochlorococcus marinus subsp. marinus str. CCMP1375
MTLLVQKFGGTSVGNVERIQAVAKRIALCKEEGNQLVIVVSAMGNSTDELTKLALSISGNPPSREMDMLLSTGEQVTIALLSIALNKIGIPATSMTGAQVGIITESAHGRARILEIKTERIKELLNAGQIVVVAGFQGTSLSSGKTAEITTLGRGGSDTSAVALASALEADACEIYTDVPGVLTTDPRLVHDAKLMKTVSCDEMLELASLGAAVLHPRAVEIARTYGVNLIVRSSWKNEPGTTLTSQAKQSIVRGGLELSRPVNGIELIEHQAVIGLSHVPDQPGIAADLFETLSKGGVNVDLIIQSTHEGNSNDITFTVSEQNLPTAKLLCEKLIKKLGGELTTQKQMSKLSIRGAGIMGRPGIAAKFFETLSKSGINLRLIATSEVKVSCVINSEFGTKGLKVTSKAFDLKNNQIQINPTIDCINEPEVRGVALDPNQVQVSVVNVPDVPGSAGTLCRSFADSGIILDTIVQSERKGDANGKIISFTLNKSDRENADSALTPLLRKWPNAYMKDGAAIARISAVGAGMPASIGTAGRMFRALANKKINIKMIATSEIRTTCIIAEKDGNHALEAVHTFFKLNA

SEQ ID NO: 5315 - protein, 532 aa, Sorghum bicolor
MSIKSETNERSSTIQSAGHRICSIVKLCYQHLMLAVSYALYLFLAPIILATLVLHLSRHTSADDDLIVSARSTLTANLPFTVVVVAAAATAVYLMRRPRAVYLLDLACYKPGAEHAVTRETFMRLVVGYGTFSDDSLAFQRKILERSGLGQGTYLPKALTSSPPNPCMAEARREAEAVMFGAVDQLLAKTGVRAGDIGIVVVNSGLFSPTPSLSAMIVHHYKLRRDVSSYNLAGMGCSASLISVDLAKQLLQVQRNTYALVVSLEIMAASAYVGNTRSMLVPNCIFRMGGAAVLLTNHGTERRRAKYQLLHTVRTHQGADDRAYRCVYQEEDESGHVGVALSKDLMSVAAEALKTNITTLGPRVLPMSEKMKMMLVGGKAAVVQVLGVQQQGQGGSRSRPYIPDLTTAFEHFCIHAGGRAVLDTVERSLDLSAWHMEPSRMTLYRWGNTSSSSLWYELAYTEAKGRVRRGHRVCQIAFGSGFKCNSAVWRALRTIDPAKESAAAGNPWVEEIHRFPVEVPQVERVDVAAMAS

SEQ ID NO: 5316 - protein, 234 aa, Haemophilus influenzae 86-028NP
MHSFSQRRTFMKPYLIAPSILSADLARLGDDVQNVLNAGADVIHFDVMDNHYVPNLTFGPAVCQALRDYGITAPIDVHLMVKPIDRIIPDFAKAGANYITFHPESSEHIDRSLQLIRDCGCKSGLVFNPATPLSYLDYVLDKVDVVLLMSVNPGFGGQSFIPATLKKLQQARKIIDESGYDIRLEVDGGVKVDNIAEIAAAGADMFVAGSAIFGKPDYKQVIDQIRTQLASVSA

SEQ ID NO: 5317 - protein, 252 aa, Zea mays
MAATAPNGNPTVSSLAATVPVQTVLFDIDGTLCDSDPLHHVAFQEMLLEIGYNNGVPIDEEFFIKNIAGRSDVEAAQNLFPDWELEKGLKFLEDKEAKYRSLAKERLVPVKGLAKVVQWVKDHGYKRAAVTNAPRINAELMISLLGLSDFFQAVIVGGECEQPKPAPYPYLRALKELQVSAEHSFVFEDSPAGIRAGVAAGMPVVGVATRNPEKSLVEAGAALLVKDYEDPKLWAALEEMDGEEAKLKKASE

SEQ ID NO: 5318 - protein, 177 aa, Triticum aestivum
  misc_feature (91)..(91): Xaa can be any naturally occurring amino acid
  misc_feature (104)..(104): Xaa can be any naturally occurring amino acid
  misc_feature (128)..(128): Xaa can be any naturally occurring amino acid
  misc_feature (164)..(164): Xaa can be any naturally occurring amino acid
MPIMMAMSSFAGAGAAVLPRCSASRFGAQSLPALARRALVVRAQTGGPSAPPPNKPKASTSIWDALAFSGPAPERINGRLAMVGFVTALLXVEAGRGDGLLSQXGSGTGQAWFAYSVAVLSVASLVPXCSSGESAEGRAGAIMDANAELWNGRFAMLGLVALAXATEIITGAPFINV

SEQ ID NO: 5319 - protein, 184 aa, Arabidopsis thaliana
  misc_feature (38)..(38): Xaa can be any naturally occurring amino acid
  misc_feature (82)..(82): Xaa can be any naturally occurring amino acid
  misc_feature (95)..(95): Xaa can be any naturally occurring amino acid
  misc_feature (154)..(154): Xaa can be any naturally occurring amino acid
MASSMLSSTAVATSPVQDTMVRLHCTGLKSSASFPVTXRKANNYFTSITRNGGKDICMKVCTPVGKNKCETLSYLPDLTDVXELAKEVDYLLRNXRIPCVEFELEHGFVYREHCNTPVYYDGRYWTMCKLPLVGCTDSAQVLKEAEECKKEYPXVFIMIIGFDNARIVQCIRFIVQKPPRFPKA

SEQ ID NO: 5320 - protein, 267 aa, Oryza sativa (japonica cultivar-group)
MTTQAKEKCPLCTEEMDLTDKQLKPCKCGYEIMEMDQKEECGGRCPACRSIYNKDRIMGTSISNQMHELCADKSNFQKEQAKSQKQKPVKVQSGVTEESIDPYSVRVIQRRLVYIVGMPSEFASDKVLRQHNFLGQYGKIESIIIDNIGANQQIPDSGRVYVTFSREEEAFRCIEAVNGFILDGRPLKATFGVTRYCHVWLSNKVCRKPICSYVHQKAPPEDICTKDDVAVYCARCILLMHFLIGMWNLIYFMVICHLSKLFFFIGR

SEQ ID NO: 5321 - protein, 396 aa, Methanococcoides burtonii DSM 6242
MTPDESYDIIIVGAGPAGSTAAAYAAKAGASVLLIEKKKDIGLPLQCGGFLPHLDTLQELVPNAQLPYLLEDIPADCIHTTSSVQRFIAPNGYSKEFEVDADAIDRRRFDKYLAKEAGRCGADVMIGTNVLEVNGTSVDVDGVFGTHSISGKVLIGADGPNSTVGRAKGLVRDHDPMGTGTAFEYEVSCVDIDREAVEMYFGKDYVPGGYAWIISQGGDTANIGVGIREVLFRNGLSARDYLERFMYEHPIASRKLDGASIISVVSGLVPVGGAPKVTATKDTLVAGDAAGHIIATNGGGISTAMVGGKIAGQTAAEFLEGKCALQDYEERWRREMGLEIKTAVYVRKLMDNLMRSDSMMSAAIKMIDPEHMKAMQCGQLPDVVRKGLIKMNFGIK

SEQ ID NO: 5322 - protein, 428 aa, Streptomyces collinus
MTAGHRRAVITGVGAVAPGGIGRDAYWDLLTAGRTATRRISLFDPAGFRSQVAAECDFDPLAAGLTPQEARRMDRAGQFAVVAAREAVADSGVELPGTDPERVGISIGSAVGCTMGLEEEYAVLSDGGRDWLVDHSYGVPHLYGYMVPSTLAVEVARQAGAEGPVALISTGCTSGLDAIGHGVQLIEEGSADIVLAGATDAPLSPITSACFDAIKATTANNDDPEHASRPFDGQRDGFVLGEGSAVMVIEELESARRRGATVYAEILGFAGRSNAFHMTGLKPDGREMAEAVRVALHRARLDPGAIDYINAHGSGTKQNDRHETAAFKRSLGQRAHEVPVSSIKSMIGHSLGAIGSLEIAACALALRHQVVPPTANLSTPDPECDLDYVPVTAREHRMDRVLSVGSGFGGFQTAMVLGRPHLAHGEAA

SEQ ID NO: 5323 - protein, 274 aa, Glycine max
MCTALKTNYQLSEEIGRGRFGTIFRCFHPLSNEPYACKLIDKSLLHDSTDRDCLQNEPKFMTLLSPHPNILQIFHVFEDDQYLSIVMDLCQPHTLFDRMVDGPIQESQAAALMKNLLEAVAHCHRLGVAHRDIKPDNILFDSADNLKLADFGSAEWFGDGRSMSGVVGTPYYVAPEVLLGREYDEKVDVWSCGVILYIMLAGIPPFYGDSAAEIFEAVVRANLRFPSRIFRTVSPAAKDLLRKMICRDSSRRFSAEQALRHPWILSAGDTAELT

SEQ ID NO: 5324 - protein, 151 aa, Lupinus luteus
LTESQAALVKSSWEEFNANIPKHTHRFFILVLEIAPAAKDLFSFLKGTSEVPQNNPELQAHAGKVFKLVYEAAIQLQVTGVVVTDATLKNLGSVHVSKGVADAHFPVVKEAILKTIKEVVGAKWSEELNSAWTIAYDELAIVIKKEMNDAA

SEQ ID NO: 5325 - protein, 169 aa, Triticum aestivum
  misc_feature (116)..(116): Xaa can be any naturally occurring amino acid
RGRGRGQTPKKRGDERGGGATLGSTAWEAFRRHFSRKRAVDIRRINPKVPKEEAVGVSGRLLQILADHGPLTVGSTWNHAKDAAIDGLNSKTHMKILLKWMWGRRIIKLSCTQAGXTKKFLYSPFTAEDTEAAEEAAEEHAKRKGWKGKHQSTRPRTAGHSGLTLVWLL

SEQ ID NO: 5326 - protein, 363 aa, Triticum aestivum
MSTTTKGTAGYDRRRELQAFDDTNAGVKGLVDAGITTIPLIFRHPPDSLASSSTATIPVIDLSGRRSEVVSKVRAATETVGFFQVVNHGVPADLLAEMLASVRRFHESPAEAKTPHYTRDLAKKVRFNSNFDLFQSPAANWRDTLFCQALPDPPEPEELPAAVRGVLLEYGDAVRQLAVRVLELVSEAMGLAPDRLEKMGCADGLSVVSNYYPPCPQPHLTLGTSRHSDPAFLTGLLQDDMAGLQVLVDDDGEKRAVWADVPPVPGALVINVGDLLQLVSNGRLKSAEHRVVANRSRDRARISVAAFFNADLRQTTAVYGPIEEQVTSSAPPLYRSITVEEFLSHYDGKGLDGRPALDHFLLP

SEQ ID NO: 5327 - protein, 113 aa, Cyanidium caldarium
MFSKLEAIIRPFKLEEVKVRLMTFGVPGITVTNVMGCGKQIGGIERSKGVEYDSELIEKVKIEIVVMNEHIDELIEIIINAVWTGEIGDGKIFVSPVSSVIRIRTQDKDLDAI

SEQ ID NO: 5328 - protein, 394 aa, Methanococcoides burtonii DSM 6242
MQSIVQEALKHTEKEKEYRQSVTEDDKFEGFGMPRITIVGCGGAGNNTINRLYNIGIEGAETIAINTDKQHLDHIRADKKILVGKTLTRGLGAGGYPEVGAKAAELARGTLEEIFKESDLVFITAGMGGGTGTGVAPVVAEIAKEQGAIVVGMVSSPFRVERARTVKAEEGLDTFRSAADTVIVLDNNRLLDYVPNLPIEQAFSVMDQLIAETVKGITETITQPSLINLDYADIRAIMGCGGVAVMLVGDSKNQDKSTDVVRTALNHPLLDVDYRGATGSLVHITGGPDLSLKEAEEIAASLTYELSPDANVIWGARIRDDFEGKVRVMAIMTGVQSSQVLGPQFQSGMVENVAKNTSSHSKPSFTRAERGRRTIVEPMGSQASFGGSIIDIIQ

SEQ ID NO: 5329 - protein, 189 aa, Arabidopsis thaliana
  misc_feature (107)..(107): Xaa can be any naturally occurring amino acid
MASSMLSSATMVASPAQATMVAPFNGLKSSAAFPATRKANNDITSITSNGGRVNCMQVWPPIGKKKFETLSYLPDLTDSELAKEVDYLIRNKWIPCVEFELEHGFVXTRGARVTLTRDTYDWTGTWTNVGSFPLCSGLHPTSGQSVEGKLEEVQRRGTPMPLFRIIGFDNTRQVQCISFIAYKPPSFTG

SEQ ID NO: 5330 - protein, 334 aa, Penicillium chrysogenum
MVHSKVVIIGSGAGAHTAAIYLSRAELQPVLYEGMLANGTAAGGQLTTTTDVENFPGFPSGIGGAELMDNMRAQSERFGTEIITETISKLDLSSRPFKMWTEWNDDEGSEPVRTADAVIIATGANARRLNLPGEETYWQNGISACAVCDGAVPIFRNKPLYVIGGGDSAAEEAMFLAKYGSSVTVLVRKDKLRASNIMADRLLAHPKCKVRFNTVATEVIGENKPNGLMTHLRVKDVLSNAEEVVEANGLFYAVGHDPASGLVKGQVELDDEGYIITKPGTSFTNVEGVFACGDVQDKRYRQAITSAGSGCVAALEAEKFIAETETHQEAKPVL

SEQ ID NO: 5331 - protein, 305 aa, Desulfovibrio desulfuricans G20
MKESRQVDIVILGGGPAGMTAAIYAARASLNVALLEESVTGGLVNSTYTVENFPSYPAIHGMELMQKMRDHVDSLGVTVEEVCEIESVSLAGQVKTVETDEAVFQARAVILATGRKPVPLDVPTGCEQVHHCAICDGAAYKGRRVLVVGGGNSAFDESLYMLGIGVEHITLVEKMDRFFAAQSTQDTLLETGRVDARTQTVVHDLIVENDSLKAAVLEHTGSGVRETVPVDGVFVFLGQSPNNDLFRDVVTLSAGGYVVVDEHMATSVSGVFSAGDINEKHYRQITTAMADGTVAALAAERYIRS

SEQ ID NO: 5332 - protein, 613 aa, Candida albicans SC5314
MPSDETISKSNGNIHIATNNINGVGPTTTTDQLDISDQSSTLLHNKINFVRELTPRPDNYSSINSCNHIESVLGTKAKNTVFETYRQAVLISQPIINNNNNNNNNNNNNNNNNTNNNNYKSIYKLKKDGSIIPIEKLINSKNLVLKCHQCHLNNFGNSMICLQCPHVGCCFNDYNHSYSHYKSTKHMFSIDSSCGLLYCFKCNDFINHPELEKIRLQIVLGEHDEEKKKKKKKTTTTTTVDDDDDDDDDFIKQNYVDPGQIAIKGLKGFVNLGATCFMSSILQTLIHNPLIKYQFFNNDLHYFNCEKFHNQFINQGNIDENNACITCSIDNIFQSFYTSTTNEGFGMTNLLTTAWYKQKSLAGFEEQDAHEFWQFLLNEFHMDYQRIINNLNSNSNSNSNSNQDNNEKNTHSSNDDSVVNSCGCIMHSTFSFELQSCIKCDSCDSITETVDPMIDLSLEVNFTNLYQSLQSFTRDEKLDDYNCKNCNNSNNNMSTTTTSAIKKLRLKTLPQILSIQLKRFRHDILGSFQATKIQSHINFPLFLNVTEYSVIKDTDYIYQLFAVVCHQGSINTGHYTVFIKNNSNWYKFDDSVVTMVSQDVVINSEAYLLYYIV

SEQ ID NO: 5333 - protein, 320 aa, Wolbachia endosymbiont of Spalangia cameroni
  misc_feature (2)..(2): Xaa can be any naturally occurring amino acid
  misc_feature (43)..(43): Xaa can be any naturally occurring amino acid
  misc_feature (312)..(312): Xaa can be any naturally occurring amino acid
  misc_feature (316)..(318): Xaa can be any naturally occurring amino acid
IXLGINLTKGLGAGALPDVGKGAAEESIDEIMEHIKDSHMLFXTAGMGGGTGTGAAPVIAKAAREARAAVKDRAPKEKKILTVGVVTKPFGFEGVRRMRIAELGLEELQKYVDTLIVIPNQNLFRIANEKTTFSDAFKLADNVLHIGIRGVTDLMVMPGLINLDFADIETVMSEMGKAMIGTGEAEGEDRAISAAEAAISNPLLDNVSMKGAQGILINITGGGDMTLFEVDAAANRVREEVDENANIIFGATFDQAMEGRVRVSVLATGIDGRNNKSETSPISQSEDSEKEKFKWPYSQSESTQDKTLETKXAEQXXXGV

SEQ ID NO: 5334 - protein, 248 aa, Wolbachia endosymbiont of Spalangia cameroni
KILTVGVVTKPFGFEGVRRMRIAELGLEELQKYVDTLIVIPNQNLFRIANEKTTFSDAFKLADNVLHIGIRGVTDLMVMPGLINLDFADIETVMSEMGKAMIGTGEAEGEDRAISAAEAAISNPLLDNVSMKGAQGILINITGGGDMTLFEVDAAANRVREEVDENANIIFGATFDQAMEGRVRVSVLATGIDGRNNKSETSPISQSEDSEKEKFKWPYSQSESTQDKTLETKPAEQVSEGAKWGSNI

SEQ ID NO: 5335 - protein, 314 aa, Wolbachia endosymbiont of Spalangia cameroni
QALEKSLCDKKIQLGINLTKGLGAGALPDVGKGAAEESIDEIMEHIKDSHMLFITAGMGGGTGTGAAPVIAKAAREARAAVKDRAPKEKKILTVGVVTKPFGFEGVRRMRIAELGLEELQKYVDTLIVIPNQNLFRIANEKTTFSDAFKLADNVLHIGIRGVTDLMVMPGLINLDFADIETVMSEMGKAMIGTGEAEGEDRAISAAEAAISNPLLDNVSMKGAQGILINITGGGDMTLFEVDAAANRVREEVDENANIIFGATFDQAMEGRVRVSVLATGIDGRNNKSETSPISQSEDSEKEKFKWPYSQSEST

SEQ ID NO: 5336 - protein, 117 aa, Oryza sativa
MARAGHNKYVARVMVVALLLAARAPVTCGQVVSTWAPCIMYADGEGVAPTGGCCDGVRTLNSAAATTADRQTTCACLKQQTKAMGRLRPDHVAGIPSKCGVNIPYAISPSTDCSRVH

SEQ ID NO: 5337 - protein, 338 aa, Wolbachia endosymbiont of Spalangia cameroni
  misc_feature (119)..(119): Xaa can be any naturally occurring amino acid
PQALEKSLCDKKIQLGINLTKGLGAGALPDVGKGAAEESIDEIMEHIKDSHMLFITAGMGGGTGTGAAPVIAKAAREARAAVKDRAPKEKKILTVGVVTKPFGFEGVRRMRIAELGLEXLQKYVDTLIVIPNQNLFRIANEKTTFSDAFKLADNVLHIGIRGVTDLMVMPGLINLDFADIETVMSEMGKAMIGTGEAEGEDRAISAAEAAISNPLLDNVSMKGAQGILINITGGGDMTLFEVDAAANRVREEVDENANIIFGATFDQAMEGRVRVSVLATGIDGRNNKSETSPISQSEDSEKEKFKWPYSQSESTQDKTLETKSAEQVSEGAKWGSNI

SEQ ID NO: 5338 - protein, 478 aa, Nitrosomonas europaea ATCC 19718
MSAVLQHLVNQPYKHGFVTDIEADIAPKGLNEDIIRLISSKKNEPEWLLAFRLEAYRKWLDMVEPAWQNVKYPKIDFQDISYYSAPKPKKKLASMDEVDPELLRTFEKLGVPMHERAALAGVAVDVIFDSVSVATTYKEKLAEVGIIFCSISEAVQKYPELIRQYLGTVVPPGDNYYAALNSAVFTDGSFCFIPKGVKCPMDLSTYFRINTEESGQFERTLIIAEEGASVSYLEGCTAPRFDTNQLHAAVVELVALDDADIKYSTVQNWYAGDENGVGGIYNFVTKRGLAKGRNSRISWTQVETGSAITWKYPSCILRGENSVGEFYSVAVTNHHQQADTGTKMIHIGANTRSTIVSKGISAGQSNSSYRGLVRIAPTARNARNYSQCDSMLIGSQCGAHTFPYIQVQNDSAQVEHEASTSKIGEDQLFYFAQRGIGAEEAVSMIINGFCKEVFQQLPLEFAVEATKLLSFKLEGSVG

SEQ ID NO: 5339 - protein, 313 aa, Wolbachia endosymbiont of Spalangia cameroni
  misc_feature (281)..(282): Xaa can be any naturally occurring amino acid
  misc_feature (285)..(285): Xaa can be any naturally occurring amino acid
  misc_feature (306)..(306): Xaa can be any naturally occurring amino acid
  misc_feature (308)..(308): Xaa can be any naturally occurring amino acid
  misc_feature (311)..(312): Xaa can be any naturally occurring amino acid
DIKIQLGINLTKGLGAGALPDVGKGAAEESIDEIMEHIKDSHMLFITAGMGGGTGTGAAPVIAKAAREARAAVKDRAPKEKKILTVGVVTKPFGFEGVRRMRIAELGLEELQKYVDTLIVIPNQNLFRIANEKTTFSDAFKLADNVLHIGIRGVTDLMVMPGLINLDFADIETVMSEMGKAMIGTGEAEGEDRAISAAEAAISNPLLDNVSMKGAQGILINITGGGDMTLFEVDAAANRVREEVDENANIIFGATFDQAMEGRVRVSVLATGIDGRNNKSXXSPXSQSEDSEKEKFKWPYSQSESXQXKTXXT

SEQ ID NO: 5340 - protein, 382 aa, Burkholderia sp. 383
MMRDAANFEPTDSRVTRPAFWNGLPERWTSDVEETLVCCHVRQETHDVKSFFFRSPQGRSFSFEPGQFLTLELDIDGETINRCYTISSSPARPHTVSITVKRVPGGKVSNWLHDNLQPGAPVRVLGPAGEFTCARHPARKYLFLSAGSGVTPLMSMSRAHHDLAEDRDILFVHSARTPDDIIFARELDLIASNHTNFRTSFVVERVGARTNWPGVTGFLTLPLLKLIAPDFMEREIFTCGPAPYMKAVRDLLDEAGFERKQYHEESFSFETLAQTASDELLADLAPPAEGADTDTKQYTVSFAKSNREISCGSEQHVLDAARQSGVRLPASCTQGMCGTCKVKLVSGQVEMKHNGGIRQREIDQGMVLLCCSKPLSDLVIDK

SEQ ID NO: 5341 - protein, 334 aa, Magnaporthe grisea 70-15
MSANLEAQAAAEATLQGFLWRQREAPKPLPAGTSAKGQTSIITGSNTGLGLEASRQLLRLGLSHLVMGVRSKERGEAAAEQLRAEFPDAKISVWIVDMASYDSIRAFAAKCGAELERIDSVILNAAVQTPQFSLVEATGHELTMQTNYLSTAFLSLLLVPVLKAKKKEGAAPPVLSIVGSDTSYMTTLLSMNPALPACDKPENYSQFQAYARAKLLLVFFVAKLAEHVDPADVIINYPNPGLTKGTEIGRSATTLSKVTFAAMQYLLARELDVGASVYLDAVFNYGAKGHGSFISDWTIKPYPPVWYTEEGKQLRTSLWEETLNELKPAGAPLP

SEQ ID NO: 5342 - protein, 148 aa, Haemophilus influenzae
MIKKIAVLTSGGDAPGMNAAIRGVVRSALAEGLEVFGIYDGYQGLYNNKIKQLNRYSVSDVINRGGTFLGSARFPEFKDPNIRAKCAEILRSHGIDALVVIGGDGSYMGAKLLTEEHSFPCVGLPGTIDNDVAGTDYTIGYQTALQTA

SEQ ID NO: 5343 - protein, 74 aa, Haemophilus influenzae
MTDRVIIFDTTLRDGEQALKASLTVKEKLQIALALERLGVDVMEVGFPVSSQGDFESVQTIARHIKNARVAALS

SEQ ID NO: 5344 - protein, 309 aa, Streptococcus pyogenes MGAS315
MILTVTLNPAIDVSYPLDELKCDTVNRVVDVTKTPGGKGLNVCRVLNEFGETVKATGCIGGESGDFIINHLPDSILSRFYKISGYTRTCIAILHEGNQTEILEKGPMLSVDEIDGFTHHFKYLLNDVDVVTLSGSLPAGMPDDYYQKLIGIANLNGKKTVLDCSGNALEAVLKGDSKPTVIKPNLEELSQLLGKEMTKDFKALKAVLQDELFEGIEWIIVSLGADGVFAKHKDTFYNVDIPKIKIVSAVGSGDSTVAGIASGLANDEDDRALLTKANVLGMLNAQEKTTGHVNMANYDKLYQSIKVKEV

SEQ ID NO: 5345 - protein, 486 aa, Ricinus communis
MVENTAAKNHPHQVFDVSINMQTQVVGSKWLDDDGRTKRTGTVWTASAHIITAVIGSGVLSLAWAIAQLGWIAGPAVMFLFSLVTYYTSTLLSACYRSGDPVNGKRNYTYMDAVRTNLGGAKVKLCGFVQYLNLFGVAIGYTIASSISMMAIKRSNCFHKSGGKNPCHINANPYMIAFGIAEIIFSQIPDFDQLWWLSILAAVMSFTYSTIGLGLGIAQVVENGKAMGSVTGISIGANVTPTQKIWRSFQALGDIAFAYSYSIILIEIQDTVRSPPSESKTMKKATLISVAVTTLFYMLCGCFGYAAFGDMSPGNLLTGFGFYNPYWLLDIANVAIVVHLVGAYQVYCQPLFAFVEKAAAQRYPDSGFITKDIKIPVPGFRPFNLNLFRSVWRTLFVVFTTVISMLLPFFNDIVGLLGALGFWPLTVYFPVEMYIAQKKIPKWSTRWLCLQILSAACLVITIAAAAGSIAGVVGDLKSVKPFQTSY

SEQ ID NO: 5346 - protein, 175 aa, Triticum aestivum
MAPTVMASSATSVAPFQGLKSTAGLPVSRRSSSAGLGSVSNGGRIRCMQVWPIEGIKKFETLSYLPPLSTEALLKQVDYLIRSKWVPCLEFSKVGFVFREHNSSPGYYDGRYWTMWKLPMFGCTDATQVLNEVEEVKKEYPDAYVRVIGFDNLRQVQCVSFIAFRPPGCEESGKA

SEQ ID NO: 5347 - protein, 162 aa, Bradyrhizobium sp. BTAi1
MASPTASIYDFTAASLTGEEVPLKRFAGQVLLIVNTASACGFTPQYRGLEALHRAYADRGFAVLGFPCNQFGAQEPGTAEEIGAFCSTKYDVTFPLFAKIDVNGAEAHPLYKFLKGEKTGLLGSAIKWNFTKFLVDRQGNVVSRHAPTTTPEALKKEIEALL

SEQ ID NO: 5348 - protein, 304 aa, Triticum aestivum
  misc_feature (104)..(104): Xaa can be any naturally occurring amino acid
VTLSNKFVQKSRLPPVRNSRDIVDPRVRAVYRGDLSDAPRVAVKMLKDFKTDGEDFINELASISRTSHVNVVTLLGFCLQGSKRALIYDYMPNGSLERYAFKEXRSEGGNTLGWEKLFEIAVGIARGLEYLHRGCNTRIVHFDIKPHNILLDQNFCPKISDFGLAKLCLNKESVISIGGARGTIGYIAPEVYSKQFGAVSSKSDVYSYGMMVLEMVGARDKNISPNTESSSQYFPQWIYEHLDEYCISASEINGEITEVVRKMIVVGLWCIQLSSADRPTMTRVVEMLEGSTTGLELPPKVLLS

SEQ ID NO: 5349 - protein, 411 aa, Glycine max
MLHASNILCNGHPEKLVSSSSYGLLHDERNGHIIQRLVGEAVNSGHDIARDKGESSIISNILSMDFDTWDDSLTSPHNLAKLLGDNTDNQPGPLNKSSSWKGHSNNQSRFSFARQEESKIQMFDPHASYGVSHQRPNRTVFLNCAERDLYMDKLGIANGFSTSNFEEAENMVSGHSIASSNKFSAISRAQVSAPPGFSIPSRLPPPGFSSHERVEQAFDSISGNSLLDHSSLLRNSYQTPSAGNLGSAGDIEFMDPAILAVGKGRLQGALNSPALDIRSNFMPQLNYFENDARLQLLMQRSLAPQQNLRFSEIGNTFSQLGDSYAVSSRLDQSQVSNLGPFQQLSLQQSTNAVLSNGQWDGWNEVQSGNGLGVAELLRNERLGFNKFYSGYDDSKFRMPNSGDLYNRTFGM

SEQ ID NO: 5350 - protein, 167 aa, Synechococcus elongatus PCC 7942
MKIRNVSMAPQVTDIAVTTIDGAAKSLSDYAGQVLLIVNVASYCGYTSQYSGLEALYRQYRDRGLQVLAFPCNDFGAQEPGSNEEIKTFCSTRFDVSFELFDKVHAKGADQHPLYAALTQTDPAGDVAWNFEKFLVGKDGTVLARFKSGVAPNDASLIQAIEAALAA

SEQ ID NO: 5351 - protein, 853 aa, Ralstonia eutropha JMP134
MKLIIVGHGMVGHKFLECLAEAGAQNLDVTVLCEEPRPAYDRVHLSEFFAGKSAEDLSLVPAGFFEQHNNILLRLNARAVSIDRAARTVTVSTGETLAYDKLILATGSYPFVPPVPGKERKDCFVYRTIEDLEAMRECGARSKRGVVIGGGLLGLECAKALRDMDLETHVVEFAPRLMAVQVDEGGGRMLRQKIEGLGVTAHTGKNTVEIIDGADGTHRMVFADGTHLDTDMIVFSAGIRPRDELARAAGLAVGERGGITVDNNCRTSDPDVYAIGECALWQGKIYGLVAPGYDMARVAARHLRGEAAEFAGADMSTKLKLMGVDVASIGDPHGTVPGARLYQFSDDSKQVYKKLVVSDCGKYLLGGVLIGDASEYGTLLQMMLNKIELPESPEFLILPDSSGKAKPALGADALPDTAQICSCNNVSKGEICAAVCDGATSIGAMKSCTKAGTACGGCVPLVTQIMKAEMKKQGMAVNNHLCEHFPYSRQELYHLVRVGKFKTFDALLEAHGKGLGCDICKPTVGSILASCWNEFVLKEEHAALQDSNDYYLANIQKDGTYSVVPRMPGGEVTPEGLIAVGQVAKKYGLYTKITGGQRVDLFGARAEELPYIWEELIAAGFESGHAYGKALRTVKSCVGSTWCRYGVDDSVGLAIELENRYKGLRAPHKIKFGVSGCTRECAEAQGKDVGVIATEKGWNLYVCGNGGMKPRHAELLAGDLDRDTLIRYIDRFLMFYVRTADRLQRTSVWRDNLEGGLDYLKDVVLDDKLGIAADLEAEMQHVVDTYEDEWKKAVTDPETRKRFRHFVNSERRDDNLVFIEERGQIRPATPEERNLQRSRLSHIPVVAVPAKAA

SEQ ID NO: 5352 - protein, 355 aa, Angraecum eburneum
SDSGKDAGRLSAAWQLYKTQEELVEVAKEYGVKLTMFHGRGGTVGRGGGPTHLAILSQPPDTILGSLRVTVQGEVIEQSFGEENLCFRTLQRFTAATLEHGMQLPISPKPEWRALMDEMAIVATKEYRSIVFQEPRFVEYFRLATPELEYGRMNIGSRPSKRKPSGGIESLRAIPWIFAWTQTRFHLPVWLGFGAAFKQSSKRTKIIFKYYKRCTIEWPFFRVTIDLIEMVFTKGSTGIAALYNKLLVSADLWPFGEQLRANYETQRLLLEVAGHKVLLEGDPYLKQRLRLRYPYITTLNVCQAYTLKRIRDPNYAKPHLSNSNKPAAELVKLNPTSEYAPGLETLILTMKGIAA

SEQ ID NO: 5353 - protein, 282 aa, Campylobacter jejuni RM1221
MTLLDGKALSAKIKEELKEKNQFLKSKGIESCLAVILVGDDPASQTYVKSKAKACEECGIKSLVYHLNENTTQNELLALINTLNHDDSVHGILVQLPLPDHICKDLILESIISSKDVDGFHPINVGYLNLGLESGFLPCTPLGVMKLLKAYEIDLEGKDAVIIGASNIVGRPMATMLLNAGATVSVCHIKTKDLSLYTRQADLIIVAAGCVNLLRSDMVKEGVIVIDVGINRLESGKIVGDVDFEEVSKKSSYITPVPGGVGPMTIAMLLENTVKSAKNRLN

SEQ ID NO: 5354 - protein, 533 aa, Ustilago maydis 521
MSIANASSSTASHDLDAADADPCPSACTSVSALCNMSTLPSPRPFGYRPTYVPAMVASGVSAVTVTTNSHRPPSKSHSISSVDSLASVSSNAPSTPTHDADDVRFEMAVIPKLVRASADAYLDRVGKPLPPSPAPQIVATSATTKTNAQAARSVAAAAAAAAAAAAVPPSHSALRNENHKNAISFRVGSKYKVCEIIGEGAYGVVCSAIHRATGQKVAIKKIQPFEHQMFALRTLRELKLLRFFQECDVSENIISILDIIKPSTYEAFTEVYLVQELMETDLHRVIRTQELSDDHCQYFTYQTLRALKPMHCADVIHRDLKPSNVLLNANCDLKVCDFGLARSVLTADQDTGFMTEYVATRWYRAPEIMLTFKQYTKAIDVWAVGCILAEMLTGRPLFPGRDYHQQLSLILDVLGTPTLEEFQNINSRRSRDYIRSMPFRKRREFRTLFPKASPEAIDFLQKTLTFDPRNRLTVEECLQHPYLSAYHDPDDEPGAPRLDPDFFYFDMQKESITKEDLRKELWYQVQEFQPLLR

SEQ ID NO: 5355 - protein, 356 aa, Angraecum eburneum
SDSGKDAGRLSAAWQLYKTQEELVEVAKEYGVKLTMFHGRGGTVGRGGGPTHLAILSQASDTILGSLRVTVQGEVIEQSFGEENLCFRTLQRFTAATLEHGMQLPISPKPEWRALMDEMAIVATKEYRSIVFQEPRFVEYFRLATPELECGRMNIGSRPSKRKPSGGIESLRAIPWIFAWTQTRFHLPVWLGFGAAFKHVIEKTKNNLQILQEMYNEWPFFRVTIDLIEMVFTKGSTGIAALYNKLLVSEELQPFGEQLIANYENKRLLLEVAGHKVLLEGDPYLKQRLRLRYPYITTLNVCQAYTLKRIRDPNYAKPHLSNSNKPAAELVKLNPTSEYAPGLEDTLILTMKGIAA

SEQ ID NO: 5356 - protein, 413 aa, Ralstonia eutropha JMP134
MTPSAPSQSRPRLIVVGNGMAGMRTVEELLKLAPDLYDITVFGAEPHGNYNRILLSPVLAGEKTVDDIMLNTREWYAQNGIELLAGDPVVAIDRPRRTVRAQSGREVRYDRLLLATGSKPFILPVPGHQLDGVIAFRDIQDVEIMLDAARNHRHAVVIGGGLLGLEAANGLLRQGMDVTVVHLCDSLMERQLDKPAATLLKGALERKGLRFMLGAQTAEILGDTRVTGVRFKDGNEIPADLVVMTAGVRPNIELAAGAGLRCERAIVVDDTLQTYDPRIYAVGECVQHRQATFGLVAPIWDQARVCAAHLAGAGHRRYIQQATATKLKVTGVDLYSAGDFIGGEGSEDLVLRDARRGVYKRLVLQDGRLIGAVLYGDVQDGPWYFDLIQQCAPVAALRQRLLFGKAQCEALAA

SEQ ID NO: 5357 - protein, 517 aa, Bifidobacterium longum NCC2705
MTTTTASPVSKQTASAAQETSATGAAATAIETIETGVAGVAGAATNAAANAIEDLEAAESHGFSTRFPLNSAFIFTFGALGGMLFGFDTGIISGASPLIESDFGLSVSQTGFITSSVLIGSCAGALSIGALSDRFGRKKLLIVSALLFLLGSGLCASSTGFAMMVCARIILGLAVGAASALTPAYLAELAPKERRGSLSTLFQLMVTFGILLAYASNLGFLNHNLFGIRDWRWMLGSALVPAALLLLGGLLLPESPRYLVNKGDTRNAFKVLTLIRKDVDQTQVQIELDEIKAVAAQDTKGGVRELFRIARPALVAAIGIMLFQQLVGINSVIYFLPQVFIKGFGFPEGDAIWVSVGIGVVNFVSTIVATLIMDRFPRKGMLIFGSIVMTVSLAVLAVMNFVGDVAVLAVPTMILIAFYILGFAVSWGPIAWVLIGEIFPLSVRGIGSSFGSAANWLGNFIVSQFFLVLLDAFGNNVGGPFAIFGVFSALSIPFVLRLVPETKGKSLEEIEKEMTKR

SEQ ID NO: 5358 - protein, 993 aa, Debaryomyces hansenii CBS767
MPIPRNDIEGISFISLITNKNEEFEESANFYNKLGFRLTKNFSKITNNSESKPKLQIGISNDSLKELWLESFPLQNTDENGFIRPWQELLVYDGDGCEKLNSATTLKIRLSTLDDLSNTAKELNFFTTDLPKVKDILTKDLNTEFESPSDTVIKVVDPMGNTLNFSNFENPLSEKSFDSPEDYLKYKTEKLLSSLDRLEHKSVEDQPTEKTKKKKKKIAIMTSGGDAPGMNSAVRAVVRAGIYYGCDVFAIYEGYEGLVQGGDLMRKMEWADVRSYLSLGGTAIGTARCAKFRERPGRLQGAHNMVENGIDALIVCGGDGSLTGADLFRSEWPSLVEELVSNGTFTTKEVEPYRHLTMVGLVGSIDNDMASTDSTIGAYSALERITEMVDYIDATASSHSRAFIVEVMGRHCGWLGLMSGLATGADFIFIPERPPKAGQWQNELKDVCSRHRQKGKRNTTVIIAEGAIDDDLNPITPDEVQKVLVALGLDTRITTLGHVQRGGTAVAYDRLLATLQGVDAVKAVLELTPDDPSPMIGSLENKIVRKPLIEAVKLTKSVATAIENKDFDKAMSLRDSSFEDAYHHFLSSSIYDDGLKILPEAERLNIGVVHVGASSSGLNAATRAAALYCMSKGHKLFAIQNGFSGLINEGEIKELSWLDVEGWHNKGGSEIGTNRSLPSEDFGNVAYYFQKFKLQGLIIIGGFESFSALNELDEKKQEYPIFNIPMVVIPATVSNNVPGTEYSLGGDTCMNQLLKYCDAVKQSASSSRRRVFVVEVQGGYSGFVASYCGLITGSLATYTPESKIDLKTIQEDIDLLYEVFEDDRGEYNNGKMIIRNEQASSVYTTDLIADIIKESAGGRFETRTAVPGHVQQGFTPTSMDRVNACRFAVKSCQYIEDWNTKLGGLILDMDATKTNRRSRSNVKNSIEHILEEKNGSAVVLGIQGAQIKFNSVEALFAKDANIPLRKGRVVHWTEMIEVADMLSGRLLLREKKQ

SEQ ID NO: 5359 - protein, 645 aa, Glycine max
MSSAEKPSSKGQAWFCTTGLPSDIVVEVDDMTFHLHKFPLMSKSRKLHLLITQQEAASNSTVPQQQQQQQETEDEDEIVEEQCHVTFTGFPGGSEAFEMAAKFCYGVKIDLTPSNVAALRCAGEFLEMTEDYSEDNLVSKTEGFLSQHVLKNLKDSVKTLKSCDSLMPMAENLGITQRCVDSVVSRASSADPALFGWPVSDATSVSKQVLWNGLDGDGRRKVGAGAGESWFEDLALLRLPLFKRLILAMRSAELSPEIIETCLMYYAKKYIPGVSRSNRKPLPSSSSSSSVATEAEQKEILETLVSNLPLEKSSKAATATRFLFGLLRTTNILNASEACRDALEKKIGLQLEEATLDDLLVPSYSYLNETLYDVDCVERILSHFLEEERNVAAIDGRAPRSPALMLVGKLIDGYLSEIASDANLKPEKFYNFAISLPDEARLFDDGLYRAVDVYLKAHPWVLEEEREKICGLLDCQKLTLEACTHAAQNERLPLRAVVQVLFFEQLQLRQAIAGTLMAAEAAAEPGRQSAALEREAEDGRGEGLGLEHVQERNGTWRVAVRENQVLRLDMDSMRTRVHQLERECSSMKRVISKFDKFAASGGGWRASLGRKFGCKFKTQVCDSHESTAVDTRKGRHHQQHHPHHD

SEQ ID NO: 5360 - protein, 866 aa, Haemophilus influenzae R2846
MLGRFLGETINDAQGEDILELIENIRKLSRNSRAGDDKARQALLDTLGSISNENIIPVARAFSQFLNLTNIAEQYQTISREHSLAQSSSQSLSELFKRLKEQNASVEEVHKTVEKLLIELVLTAHPTETTRRSLIHKHIEINKCLSKLEHHDLTEKERNIIERLLLRLIAEAWHTNEIRTVRPTPFDEAKWGFAMLENSLWQAVPEFLRQLNETAREFLGYDLPVGLKPVRISSWMGGDRDGNPFVTAQITKKVLYFARWKAADLFLQDISKLADELSMMKCSDEFRDKYGEHLEPYRFVVKNLRNQLTATLAYFDDHLSNRTPRVSESEIILEDNQLWEPLYDCYQSLIQCGMRIIANGSLLNILHRISCFGVTLSQMDIRQESTRHTDAIAEITRYIGLGDYSQWMEDDKQAFLIRELSSRRPLIPQNWTPSPETKEILDTCKVIAQQKQGVIACYVISMARSASDVLAVHLLLKESGVPYHIPVVPLFETLEDLDAAEKVMTQLFNVGWYRGVINNRQMVMIGYSDSAKDAGMMAASWAQYRAQEALVNLTEKLGIELTLFHGRGGTIGRGGAPAHAALLSQPPRSLKNGLRVTEQGEMIRFKLGLPAVAVETFDLYASAILEANLLPPPEPKPEWRTIMDELSTISCDIYRGVVRGDKDFVPYFRSATPEQELSKLPLGSRPAKRNPNGGVESLRAIPWIFAWMQNRLMLPAWLGAGAAIRQVIEQGKGDIIHKMCENWPFFSTRIGMLEMVFSKSDTWLSQQYDQRLVKKELWYLGENLRKQLEDDIQTVLSLSHQSELMSDLPWIADSIALRNIYTDPLNLLQVELLHRFRKNPEQVNPDVEQALMITITGIAAGMRNTG

SEQ ID NO: 5361 - protein, 291 aa, Saccharomyces cerevisiae
MSSIYKALAGKSKDNKSEKKQGNVKQFMNKQRTLLISSRGVNYRHRHLIQDLSGLLPHSRKEPKLDTKKDLQQLNEIAELYNCNNVLFFEARKHQDLYLWLSKPPNGPTIKFYIQNLHTMDELNFTGNCLKGSRPVLSFDQRFESSPHYQLIKELLVHNFCVPPNARKSKPFIDHVMSFSIVDDKIWVRTYEISHSTKNKEEYEDGEEDISLVEIGPRFVMTVILILEGSFGGPKIYENKQYVSPNVVRAQIKQQAAEEAKSRAEAAVERKIKRRENVLAADPLSNDALFK

SEQ ID NO: 5362 - protein, 546 aa, Candida albicans SC5314
MSQSPTNVPRSYNSVLDLKLASPTNSASGATGGWIVQKFGGTSVGKFPENIVDNIVKVYSQTNRVAVVCSARSSQTKSEGTTSRLLRSADLAENDKDYQPLLNAIEEDHVTNAERIQSEEIKQELIKDTKQEIEHVRELLHACQIIGEISPRSLDSIMAVGEKLSCLFMTALMKDHGLNAVYINLQDVIPLSYDFQKGFDDSFYQFLSQEIGKRVLQCDKEGEREGEEDVIPVLTGYFGVVPGGLLNGVGRGYTDLCAALAAVALQADELQIWKEVDGIFTADPRKVPNARLLDSVTPEEAAELTYYGSEVIHPFTMEQVIRAKIPIRIKNVENPTGKGTIIYPDNIGRRGEATPPHPPAAFEQLAMSSLLQRKRSATAITAKQDIVVINIHSNKKTLSHGFLAHVFTTLDKYKLVVDLISTSEVHVSMALSIQSDQESQLKHALVDLRKMGTVDVTKKMTIVSLVGKQMVNFIGIAGNMFKVLADEKINIEMISQGANEINISAVINEKDTIRALKSIHAKLLEGGSAIGDSSAVDTRLEALKLS

SEQ ID NO: 5363 - protein, 174 aa, Streptococcus pyogenes MGAS10394
MIPLTKLLITPRRCHMPNLYDFTVKAQNGNDLSLAAYKEKVVLIVNTATKCGLTPQYQALQALYDTYHDKGFEVLDFPCNQFLNQAPGDAEEINHFCSLTYHTTFPRFAKIKVNGKDADPLFTWLKEEKSGPLGKRIEWNFTKFLIDQNGQVIKRYSSKTDPKLIEEDLKALLG

SEQ ID NO: 5364 - protein, 937 aa, Streptococcus pyogenes MGAS10394
MVKSGMIEETSKEGDGHLPLKKLESSNNQAIIAEEVALLKEMLENITRRMIGDDAFTVIESIMVLSEKQDYIELEKVVANISNQEMEVISRYFSILPLLINISEDVDLAYEINYQNNTDTDYLGKLALTIKDLAGKDNGKDILEQVNVVPVLTAHPTQVQRKTILELTTHIHKLLRKYRDAKAGVISLEKWRQELYRYIEMIMQTDIIREKKLQVKNEIKNVMQYYDGSLIQAVTKLTTEYKNLAQKHGLELDNPKPITMGMWIGGDRDGNPFVTAETLCLSATVQSEVILNYYIDKLAALYRTFSLSSTLVQPNSEVERLASLSQDQSIYRGNEPYRRAFHYIQSRLKQTQIQLTNQPAARMSSSVGLSTSAWSSPASLENPILAYDSPVDFKADLKAIEQSLLDNGNSALIEGDLREVMQAVDIFGFFLASIDMRQDSSVQEACVAELLKGANIVDDYSSLSETEKCDVLVQQLMEEPRTLSSAAVAKSDLLEKELAIYTTARELKDKLGEEVIKQHIISHTESVSDMFELAIMLKEVGLVDQQRARVQIVPLFETIEDLDNARDIMAAYLSHDIVKSWIATNRNYQEIMLGYSDSNKDGGYLASGWTLYKAQNELTAIGEEHGVKITFFHGRGGTVGRGGGPSYDAITSQPFGSIKDRIRLTEQGEIIENKYGNKDVAYYHLEMLISASINRMVTQMITDPNEIDSFREIMDSIVADSNIIYRKLVFDNPHFYDYFFEASPIKEVSSLNIGSRPAARKTITEITGLRAIPWVFSWSQNRIMFPGWYGVGSAFKRYIDRAQGNLERLQHMYQTWPFFHSLLSNVDMVLSKSNMNIAFQYAQLAESQDVRDVFYEILDEWQLTKNVILAIQDHDDLLEDNPSLKHSLKSRLPYFNVLNYIQIELIKRWRNNQLDENDEKLIHTTINGIATGLRNSG

SEQ ID NO: 5365 - protein, 322 aa, Candida albicans SC5314
MLNPVIFIKDPIKYDYSQFIISLLPKFINCNRIDLVILCQITESNQLNEILCFYYQLIRNHKNNGDTDGDTDSLPMFDYRFEINILFNLSTKKLNQLCLNNWNHGYIAEGDNDNSTNLSSLPLSITQISNIEIPTIQSRANSSSAYNDEDDKITTSRQYQQFKTTAVGGTFDHLHDGHKILLSMAIFLTSNKLIIGITGSNLLINKKFKSQLQTFNQRQNLVIQFINLLLLSETSVIFFEIYEINDVCGPTGYINDIDNLIISQETKSGGEFVNKFRKDHGFKLLDITIIKVIGGNIEENSWKGKLSSTDIREQEYNRLLNQ

SEQ ID NO: 5366 - protein, 149 aa, Brassica napus
MSESCNSRHFSWLMKSCLPNPSDAKSLVPIHHHANPPATVTPISSLPDDLLLECLSRVPSSSIPSLTAVCRRWSRLLLSPYFLHLRRRLGLLRHSLFAISAVDSGLFAAVLQPQSEIPSWRVSLAVCNDGGQGSLSHARAAAIGPRVYV

SEQ ID NO: 5367 - protein, 211 aa, Schizosaccharomyces pombe
MTTEAAPNLLVLTRHGESEWNKLNLFTGWKDPALSETGIKEAKLGGERLKSRGYKFDIAFTSALQRAQKTCQIILEEVGEPNLETIKSEKLNERYYGDLQGLNKDDARKKWGAEQVQIWRRSYDIAPPNGESLKDTAERVLPYYKSTIVPHILKGEKVLIAAHGNSLRALIMDLEGLTGDQIVKRELATGVPIVYHLDKDGKYVSKELIDN

SEQ ID NO: 5368 - protein, 590 aa, Aerococcus viridans
DNKINIGLAVMKILESWGADTIYGIPSGTLSSLMDAMGEEENNVKFLQVKHEEVGAMAAVMQSKFGGNLGVTVGSGGPGASHLINGLYDAAMDNIPVVAILGSRPQRELNMDAFQELNQNPMYDHIAVYNRRVAYAEQLPKLVDEAARMAIAKRGVAVLEVPGDFAKVEIDNDQWYSSANSLRKYAPIAPAAQDIDAAVELLNNSKRPVIYAGIGTMGHGPAVQELARKIKAPVITTGKNFETFEWDFEALTGSTYRVGWKPANETILEADTVLFAGSNFPFSEVEGTFRNVDNFIQIDIDPAMLGKRHHADVAILGDAALAIDEILNKVDAVEESAWWTANLKNIANWREYINMLETKEEGDLQFYQVYNAINNHADEDAIYSIDVGNSTQTSIRHLHMTPKNMWRTSPLFATMGIAIPGGLGAKNTYPDRQVWNIIGDGAFSMTYPDVVTNVRYNMPVINVVFSNTEYAFIKNKYEDTNKNLFGVDFTDVDYAKIAEAQGAKGFTVSRIEDMDRVMAEAVAANKAGHTVVIDCKITQDRPIPVETLKLDSKLYSEDEIKAYKERYEAANLVPFREYLEAEGLESKYIK

SEQ ID NO: 5369 - protein, 319 aa, Metasequoia glyptostroboides
MAAAAALKTPISLGRSEWFGQTLRPTSSSSLSLQTHSLSTSPALNVRASAYSDELVKTAKTVASPGRGILAMDESNATCGKRLASIGLENTEANRQAYRQLLVSAPGLRQYISGAILFEETLYQSTTDGKKIVDVLVSQNIVPGIKVDKGLVPLAGSNDESWCQGLDGLASRCAAYYQQGARFAKWRTVVSIPNGPSALAVKEAAWGLARYAAISQDNGLVPIVEPEILLDGDHGIDRTFEVAKKVWAEVFFYLAENNVMFEGILLKPSMVTPGAEHKERASPTTVSEYTIKLLRSRVPPAVPGIMFPLWRAIRGGRRR

SEQ ID NO: 5370 - protein, 589 aa, Aerococcus viridans
NKINIGLAVMKILESWGADTIYGIPSGTLSSLMDAMGEEENNVKFLQVKHEEVGAMAAVMQSKFGGNLGVTVGSGGPGASHLINGLYDAAMDNIPVVAILGSRPQRELNMDAFQELNQNPMYDHIAVYNRRVAYAEQLPKLVDEAARMAIAKRGVAVLEVPGDFAKVEIDNDQWYSSANSLRKYAPIAPAAQDIDAAVELLNNSKRPVIYAGIGTMGHGPAVQELARKIKAPVITTGKNFETFEWDFEALTGSTYRVGWKPANETILEADTVLFAGSNFPFSEVEGTFRNVDNFIQIDIDPAMLGKRHHADVAILGDAALAIDEILNKVDAVEESAWWTANLKNIANWREYINMLETKEEGDLQFYQVYNAINNHADEDAIYSIDVGNSTQTSIRHLHMTPKNMWRTSPLFATMGIAIPGGLGAKNTYPDRQVWNIIGDGAFSMTYPDVVTNVRYNMPVINVVFSNTEYAFIKNKYEDTNKNLFGVDFTDVDYAKIAEAQGAKGFTVSRIEDMDRVMAEAVAANKAGHTVVIDCKITQDRPIPVETLKLDSKLYSEDEIKAYKERYEAANLVPFREYLEAEGLESKYIK

SEQ ID NO: 5371 - protein, 158 aa, Oryza sativa
MQFLRGGGGGSGGGGAGGMAWEVLKRHFSRKRAVDVRRINPKVPKEEAVAISGRLLQIFTDHGPLTVGNTWNHAKDAGISGLNSKTHMKILLKWMTGRRIVKLNCVGTGNSKKFLYSPYSADADKSEEAAAEELSKAAASQGGKATKGQQKKRATALH

SEQ ID NO: 5372 - protein, 611 aa, Pisum sativum
MGKSSKKSATKVDAAPVVVSPVKSGKKGKRQAEEEIKKVSAKKQKVEEVIAKQKKEAVVQKVKDESSSEEDSSESEDEKPVVKPAAPVKKTPAKNGNAKKAKPDSSSSDSESDEDESSDEDDVSAKKPAKVAVAAKPKQAPKKEESSDESDDESDEDSSEDEKPAPKAVPAKNGSAPAKKAASSSDEESDEDSSSDEEAPKAKVVPAAVKPAAAKKKAESSDSDSSEDSDDEEDTKPTVTAVSKSAAVAKKTEDDDEDSSDEEDSSSDEDNKTSKPSNGNKKPVTVSKKEDKMNVDKDSSDSDEESDSDEESESEDEPSKTPQKKTKDVEMIDADKSSKKAPATPATPSENGGSKTLFVGNLSFSVQRSDIESFFQECGEVVDVRLASDEDGRFKGFGHVEFATAEAAQSALELNGQELLQRGVRLDLARERGAFTPNSTGNQNSGRGQSQTVFVRGFDKSLGEDEIRAKLEQHFASCGQASRVSIPKDYDTGYSKGFAYMDFKDSDSFNKAIELHGSELDGYPLSIDEAKPRESTGFGGRGTPRGGGSRGRGGRFGDRNSGGRFGDRSGGGRSGGRDGGRGGRRGGGRFGFNKPSLAPEGTGKKTTFADD

SEQ ID NO: 5373 - protein, 131 aa, Actinobacillus actinomycetemcomitans
SFCERVISGEWKGYTGKAITDVINIGIGGSDLGPYMVTEALRPYKNHLTMHFVSNVDGTHIAETLQKVNPETTLVLVASKTFTTQETMTNANSARDWFLATAKEEKHVAKHFAALSTNAKEVEKFGIDTDN

SEQ ID NO: 5374 - protein, 289 aa, Zea mays
  misc_feature (134)..(134): Xaa can be any naturally occurring amino acid
  misc_feature (219)..(219): Xaa can be any naturally occurring amino acid
FAVYVVTTIGNGANTLFWTDRWLHGCSLEELAPEVVRKVPRRTRKLRMVAQALQNQAWVTDIHGVLGLIGLTEFLQLWDTLAEVTLSQYDDLHAWKFDATGQPSTRSAYRAFFVGCIPFEPWKRLWKPWALGKXKISIWLATRNRCWTADRLEKRGLPHPEQCPLCDQENETVQHILTSCVFARQFWFSILQPLDWSNLVPSSRTKSFAEWWRRGANLXKKVHKQHKKGLNSLIILGAWILWKHRNGCVFDGSAPSIQTVVQEVKNEVVLWQVAGAKGLLVLDLGRLLV

SEQ ID NO: 5375 - protein, 505 aa, Candida maltosa
MAIFTPELWLICFAVTVYIFDYIYTKYLMYKLGAKPITHVIDDGFFGFRLPFLITLANNQGRLIEFSVKRFLSSPHQTFMNRAFGIPIILTRDPVNIKAMLAVQFDEFSLGLRYNQFEPLLGNGIFTSDGEPWKHSRIMLRPQFIKSQVSHVNRLEPHFNLLQKNITAQTDNYFDIQTLFFRFTLDTATEFLFGQSVHSLNDGENSLQFLEAFTKSQAILATRANLHELYFLADGIKFRQYNKMVQDFSQRCVDKVLNMSNSEIDKLDRYFFLYEMVKITRNPQVLRDQCLNILLAGRDTTASLLSFAFFELALNEPIWIKLRTEVLHVFQTSLELITFDLLKTKCPYLQAILHETLRLYPSVPRNARFSKKNTTLPHGGGVDGMSPILIKKGQPVAYFICATHVDEKFYTKDALIFRPERWCEEPLIKKNLAWSYLPFNGGPRICLGQQFALTEASYVLTRLAQCYTKISLQPNSFEYPPKKQVHLTMSLLDGVHVKISNLSIS

SEQ ID NO: 5376 - protein, 131 aa, Actinobacillus actinomycetemcomitans
SFCERVISGEWKGYTGKAITDVINIGIGGSDLGPYMVTEALRPYKNHLTMHFVSNVDGTHIAETLKKVNPETTLVLVASKTFTTQETMTNANSARDWFLATAKDEKHVAKHFAALSTNAKEVEKFGIDTDN

SEQ ID NO: 5377 - protein, 521 aa, Candida maltosa
MIDEILPKLVQYWYIVLPTLLIIKHVVSYINTQRLMRKFRAKPVTNVLNDGFFGIPNGIKAIKEKNKGRAQEYNDEKFAAGPKPKVGTYLFKLFTKDVLVTKDPENIKAILATQFEDFSLGKRLDFFKPLLGYGIFTLDGEGWKHSRAMLRPQFAREQVGHVKLIEPHFQSLKKHIIKNKGQFFDIQELFFRFTVDSATEFLFGESVESLKDESIGYDQQDFDFDGRKNFAEAFNKAQEYLGTRAILQLFYWLVNGADFKKSVAEVHKFTDYYVQKALDATPEELEKHSGYIFLYELVQQTRDPKVLRDQSLNILLAGRDTTAGLLSFALFELARNPEVWSRLREEIGDKFGLDEDATIEGISFESLKQCEYLKAVVNECLRMYPSVPRNFRIATKHTTLPRGGGPDGKDPIFIKKGAVVSYGINSTHLDPMYYGPDARLFNPDRWSKPETKKLGWAFLPFNGGPRICLGQQFALTEASYVLVRMIQNFKELELTPNTVYPPRRLTNLTMSLYDGAYIKVN

SEQ ID NO: 5378 - protein, 510 aa, Candida maltosa
MIDALYILIVALVIYKTAQFVHRKSLEKKHHCQPVKQIPLVSILSGLGFDMFFKDTAEMTKNGGLHKKLQQMLESLQTTTFRSRMLTGSQIVTMEPENERTMCSSAHMKDWTIGYRPFALKPLLGDGIFSSEGESWKHSRIMLRPIFAKEHIKQITAMEPYMLLLIEIIKSSSANEGPVDLQPLFHAFTIDYASDFLFGESCDVLKENLGGKSTSGMDAQVKRDFASVFNDVQNYLTKRMMLGPLAFLVSSKDFHDGIKKQHEFVSYFVQKAISMSDEELNDESKNYVFLYQLAKQTKDAKVLQDELLSILLAGRNTTASLLSFLFFELSHHENVWTTLKEVVDQSFPDVESITFETIQNCDYLRWCLFESLRVNPSVPFNSRTANKDTILPRGGGEDCSHPILVKKGDQVLFPLYASNRQEKYFGRKPEEFIPERWRDLPKTGGPAFMPFSTGPRMCLGQQFALIEASYVTIRLVQTFSKLKSHSLEYAPKRLVAATIRLIDGCFVSFE

SEQ ID NO: 5379 - protein, 146 aa, Triticum aestivum
TRPPGFWASPALARTFRGRRACYFNTGVMVLDLPRWRAAGYTAQIEGWMELQRRVRIYELGSLPPFLLVFAGRIAAVDHRWNQHGLGGDNYQGLCRGLHAGPVSLLHWSGKGKPWDRLDAGRPCPLDAVWAKYDLLRPDTGIDAVL

SEQ ID NO: 5380 - protein, 519 aa, Candida maltosa
MIFTAFILDYWYFTLLFLIAAYFIGKHVYTNYLMRKHHAEPILDVVDDGAFGFKFGFQSLKAKKIGNQIDLLFLKFNEAKHPSIGTFVTRSFGMQFIATKDPENIKAMLATQFNEYTLGQRLNFLAPLLGKGIFTLDGNGWKHSRAMLRPQFSRDQIGHVKMLEPHFQLLKKHIIKNKGTFFDIQELFFRFTVDSATEFLFGESVSSLKDESIGYDQEEIDFAGRKDFAEAFNKSQVYLSTRTLLQLLYWLVNSADFKRCNKIVHKFSDYYIKKALTATPEELEKHSSYIFLYELAKQTRDPIVLRDQSLNILLAGRDTTAGLLSFAVFELGRNPEVWSKLRQEIGHKFGLDSYSRVEDISFELLKLCEYLKAVLNETLRLYPSVPRNARFAAKNTTLPHGGGPDGMSPILVRKGQTVMYSVYALQRDEKYYGKDANEFRPERWFEPEVRKLGWAFLPFNGGPRICLGQQFALTEASYVLARLIQSFETLELSPEAAYPPAKLSHLTMCLFDGTPVRFE

SEQ ID NO: 5381 - protein, 519 aa, Candida maltosa
MVFTAFILEYWYFTLLSLAAGHFIGKHVYTNYLMRKHHAEPILDVVDDGAFGFKFGFQALKAKKIGKQIDLLFKKFNEAKHPSIGTFVTRSFGMQFIATKDPENIKAMLATQFNDFTLGQRLSYFAPLLGKGIFTLDGEGWKHSRAMLRPQFSRDQVGHVKMLEPHFQLLKKHIIKNKGSFFDIQELFFRFTVDSATEFLFGESVSSLKDESIGYDQEEIDFAGRKDFAEAFNKSQVYLSTRSLLQLLYWLVNSSDFKRCNKIVHKFSDYYIKKALTATPEELEKHSSYIFLYELAKQTRDPIVLRDQSLNILLAGRDTTAGLLSFAVFELGRNPEVWSKLREEIGDKFGLDPDSRIEDISFELLKLCEYLKAVINETLRLYPSVPRNGRFAAANTTLPHGGGPDGMSPILVRKGQTVMYSVYALQRDEKYYGKDANEFRPERWFEPEVRKLGWAFLPFNGGPRICLGQQFALTEASYVLVRLIQSFETLELSPDAPYPPAKLTHLTMCLFDGAPVRIE

SEQ ID NO: 5382 - protein, 241 aa, Methanococcoides burtonii DSM 6242
MGLESFIGSVFGRSNQGEVTGPVIVELNTNLFLINTFAFEAEVEHSNLPVVVDCFTKTCPPCKKMGQVFEKVASEYESKVKFIKIDLKASPAIGKRFNILGVPTLLFFKDGNLQNNVVGFTNEDKFREHLDNLLEQLSGNSPSEVINMTDNESTKEDMHAWTAKYADKAGYMLNPDEESLHLVLEGLARNRNKHGKNYCPCRIVTGDEQEDKKIICPCIYHKDEINDGGSCHCDLFFKKKD

SEQ ID NO: 5383 - protein, 441 aa, Pseudomonas fluorescens Pf-5
MARLQRTLSLGAVVLFGIAYMTPIIVLGTFGILAQTTAGMVPAAYLAALVAMFFTAMSYGRMAAAFPVAGSAYSYVRKAISPKLGFIAGWAVLLDYLFLPMAIWLIGAAYLHSAFPGVPQWVWVLAFIGVTSAINIVGLKLANGINGLLMLVQFLVLIAFVGLCIHYLGGEAGRPLFTLAPFFNGQMHLPLIMSGAAIACYSFLGFDAVSTLTEETRDPRRTIPRAIMLITLVGGLIFVAVSYFVQVAHPSFEFADVDSAAYEIARNIGGDLFVSIFLIGLIVGQFASGLSAQASGSRLLFAMGRDGVLPKRFFGSLHGRFGTPVNSILLCAVVALLALKLDVTTSTSFINFGAFLAFSLVNLSVIFHYWVGGRQRGLRELILFLIFPLIGLAADLWLMSSLDHLAIYLGASWLVIGLVYLGFLTRGFSRQPPEMDFQEAA

SEQ ID NO: 5384 - protein, 175 aa, Zea mays
MANTRKERTMKQTVAALLAKTLESAGVKRIWGVTGDSLNGLNDSLNRMGTIEWMPTRHEEVAAFAAGAEAQISGELAVCAGSCGPGNLHLINGLFDCHRNHVPVLAIAAHIPSSEIGSGYFQETHPQELFRECSHYCELVSNPEQLPQVLGIAMRKAILNRGVSVIVLPGDVALQ

SEQ ID NO: 5385 - protein, 249 aa, Arabidopsis thaliana
MKFNVANPTTGCQKKLEIDDDQKLRAFFDKRLSQEVSGDALGEEFKGYVFKIMGGCDKQGFPMKQGVLTPGRVRLLLHRGTPCFRGHGRRTGERRRKSVRGCIVSPDLSVLNLVIVKKGVSDLPGLTDTEKPRMRGPKRASKIRKLFNLGKEDDVRKYVNTYRRTFTNKKGKKVSKAPKIQRLVTPLTLQRKRARIADKKKRIAKANSNAADYQKLLASRLKEQRDRRSESLAKKRSRLSSAPAKPVAA

SEQ ID NO: 5386 - protein, 1034 aa, Saccharomyces cerevisiae
MLRTRVTALLCRATVRSSTNYVSLARTRSFHSQSILLKTAATDITSTQYSRIFNPDLKNIDRPLDTFARRHLGPSPSDVKKMLKTMGYSDLNAFIEELVPPNILKRRPLKLEAPSKGFCEQEMLQHLEKIANKNHYKVKNFIGKGYYGTILPPVIQRNLLESPEWYTSYTPYQPEISQGRLEALLNFQTVVSDLTGLPVANASLLDEGTAAGEAMLLSFNISRKKKLKYVIDKKLHQQTKSVLHTRAKPFNIEIIEVDCSDIKKAVDVLKNPDVSGCLVQYPATDGSILPPDSMKQLSDALHSHKSLLSVASDLMALTLLKPPAHYGADIVLGSSQRFGVPMGYGGPHAAFFAVIDKLNRKIPGRIVGISKDRLGKTALRLALQTREQHIKRDKATSNICTAQALLANVASSYCVYHGPKGLQNISRRIFSLTSILANAIENDSCPHELINKTWFDTLTIKLGNGISSEQLLDKALKEFNINLFAVDTTTISLALDETTTKADVENLLKVFDIENSSQFLSEDYSNSFPREFQRTDEILRNEVFHMHHSETAMLRYLHRLQSRDLSLANSMIPLGSCTMKLNSTVEMMPITWPQFSNIHPFQPSNQVQGYKELITSLEKDLCSITGFDGISLQPNSGAQGEYTGLRVIRSYLESKGENHRNVCLIPVSAHGTNPASAAMAGLKVVPVNCLQDGSLDLVDLKNKAEQHSKELAAVMITYPSTYGLFEPGIQHAIDIVHSFGGQVYLDGANMNAQVGLTSPGDLGADVCHLNLHKTFSIPHGGGGPAGAPICVKSHLIPHLPKHDVVDMITGIGGSKSIDSVSSAPYGNALVLPISYAYIKMMGNEGLPFSSVIAMLNSNYMMTRLKDHYKILFVNEMSTLKHCAHEFIVDLREYKAKGVEAIDVAKRLQDYGFHAPTLAFPVPGTLMIEPTESENLEELDRFCDAMISIKEEINALVAGQPKGQILKNAPHSLEDLITSSNWDTRGYTREEAAYPLPFLRYNKFWPTVARLDDTYGDMNLICTCPSVEEIANETE

SEQ ID NO: 5387 - protein, 225 aa, Arabidopsis thaliana
MVSPKIAPSMLSSDFANLAAEANRMIDLGANWLHMDIMDGHFVPNLTIGAPVIESLRKHTNAYLDCHLMVTNPMDYVAQMAKAGASGFTFHVEVAQDNWQQLVEKIKSTGMRPGVALKPGTPVEQVYPLVEGTTPVEMVLVMTVEPGFGGQKFMPDMMDKVRALRQKYPTLDIQVDGGLGPSTIDTAAAAGANCIVAGSSVFGAPEPGDVISLLRTSVEKAQPTT

SEQ ID NO: 5388 - protein, 248 aa, Zea mays
  misc_feature (99)..(99): Xaa can be any naturally occurring amino acid
  misc_feature (103)..(103): Xaa can be any naturally occurring amino acid
  misc_feature (190)..(190): Xaa can be any naturally occurring amino acid
MKQKMPEHTSSLSGAKKVEEILKGHENWCKAEFRMEPEVFRPIANLLRTENFLRDTREVKIEEQLGMFMFMLSHNASTGRLKKEFQHSGETIHRKINEXKNKXVFDIIPVLTHRFVKLPNANQTHVKIASNPWFMPFFQNCIGAIDGTHNPITIIEDRATPFRNRKGTLSQNVMCACDFDLNFTFISCGXEGSASDAGVLRSALRLGFHVPMGKFYLIDSRYANSPSFIAPYRGVRYPISEFKRHGSP

SEQ ID NO: 5389 - protein, 505 aa, Methanosarcina barkeri str. fusaro
MATLRGHEKVFSIAVTPNGKYAVSGSHDGTLKVWDLEKWREIRSLRAHSKSITAFAITSDGKLVVLGSLDGNLEVWNLETGEEKAAFKEHSEPITEIVITPDGKRAVSGSSDNTLKVWDLEKMEELTTLISHSNSVSKIAITPSGKYAISGSSDNTLKVWDLKKLDEETISTGHSKSVNKIVITPDGKLAVSSSYDGTLKVWDLKTKEEKVTLKGHSGPVTDFVITPDGKRIISGSSDKTLRVWDLKKGNMTLKGHKREVTSVAITSDGKYAISGSFDRTIKVWDLENGKIKVTLEGHKNYISTISIIPNKNCIVSSSHDETLKVWDLDRGIDTITLIGHSGSVSSVAITPDGKSIVSASGDGTHKIWSLENREEIATLEGHKSAPSTIVITPDGKYAVSASYDRTIKILDLKKQIVKTSLRGHTDSATLVAVTSNSRYVVSASRDNTLRVWDLESSSEVSCFTGDVPFTAFDILKDENIIVVGDSLGKVYFFHLHIPCKNNFYF

SEQ ID NO: 5390 - protein, 407 aa, Azoarcus sp. EbN1
MALIVQKYGGTSVGNPERIKNVARKVAKFQAQGHKVVVVVSAMSGETNRLIALTKEVATHPDARELDVVVSTGEQVTIGLLCMALHDIGVKAKSYTGGQVRILTDSAHTKARILNIDEAPIKKDLDEGNIVVVAGFQGVDEHGNITTLGRGGSDTTGVALAAALKADECQIYTDVDGVYTTDPRVVPEARKLDTITFEEMLELASLGSKVLQIRSVEFAGKYKVKLRVLSSFQEEGEGTLITVEEDQNMEQPVISGIAFTRDEAKLTVLGVPDKPGIAYQILGPVADANIDVDMIIQNIGHDGTTDFSFTIPRGELDKTAKVLEGVKAHIGARAIEADKAMAKVSVVGVGMRSHPGVASKMFRTLAEEGINIQMISTSEIKISVVIEDKYLELAVRVLHKAFGLESA

SEQ ID NO: 5391 - protein, 195 aa, Arabidopsis thaliana
MTAMLAMTQHRRKKVPIILHNESVKAKTWSHVFSEETRKQSIPVIAAWQLNERMYGELQGLNKKETAERYGTQQVHEWRRSYEIPPPKGESLEMCAERAVAYFEDNIKPELASGNNVMIAAHGNSLRSIIMYLDDLTSQEVTTLDLSTGVPLLYIFKEGKFMKRGSPVGSTEAGVYAYTKRLAQYREKLDAAATI

SEQ ID NO: 5392 - protein, 328 aa, Synechococcus sp. WH 5701
MPAQFNQGWTYSDRVSQAQAQVPVLISVFLAERYRHSAAPLWRQRLQEGEILLNGRRLDGDGPLHAGDRLQWQRPPWREEAVPARWRVIHDDGDLYVIDKPSGLPVLPAGGFLEHTLLRLLERSCAAQALPRPVHRLGRHTSGLLVCARRPQSRAWLSARLRESTAQLLNQPGSEARSAATRAGACRKVYRALTVPAPLQLAPGESLAITTPIGRRPHAGLGQIWAADGPDDPGALPAWSEMRLLERRPQGHLVEVSIHTGRPHQIRIHLASAGVPLLGDPLYRPGGEPRPGALPGDGGYLLHAHRLRLPLPAGGWLDLEAPVPPELS

SEQ ID NO: 5393 - protein, 333 aa, Nitrosospira multiformis
MTIKVGINGFGRIGRMVFRAAVQNFPDIEVVAINDLLEPDYLAYMLQHDSVHGRFKGDVSIEDSTLIVNGKRIRLTAIKDPAVLKWGEVGAEVVVESTGLFLTKESCQKHIAAGAKKVIMSAPSKDDTPMFVYGVNNDSYDGQAIISNASCTTNCLAPVAKVLNDTFGVKRGLMTTVHAATATQKTVDGPSNKDWRGGRGILENIIPSSTGAAKAVGKVIPELNTKLTGMAFRVPTSDVSVVDLTVELEKEASYEEICNAMKKASEGSMKGVLAYTDQKVVSTDFRGESATSIFDAEAGMALDGNFVKVVSWYDNEWGYSSKILEMVRVVAGK

SEQ ID NO: 5394 - protein, 333 aa, Nitrosospira sp. HBN8222A
MTIKVGINGFGRIGRMVFRAAVQNFPDIEVVAINDLLEPDYLAYMLQHDSVHGRFKGDVSIEDSTLIVNGKKIRLTAIKDPAELKWGEVGAEVVVESTGLFLTKESCQKHIAAGAKKVIMSAPSKDDTPMFVYGVNNDTYDGQAIISNASCTTNCLAPVAKVLNDTFGVKRGLMTTVHAATATQKTVDGPSNKDWRGGRGILENIIPSSTGAAKAVGKVIPELNTKLTGMAFRVPTSDVSVVDLTVELEKEASYDEICDAMKKASEGSMKGVLAYTDQKVVSTDFRGESATSIFDAEAGKALDGNFVKVVSWYDNEWGYSSKILEMVRVVAGK

SEQ ID NO: 5395 - protein, 111 aa, uncultured episymbiont of Alvinella pompejana
WTMVAGGGASVVYADTIADMAGIDDLANYGEYSGGPTTGETKFYAETLLDLMTREKDPKGRGKVMIIGGAIANFTDVAKTFTGIIQAFENYADKMKEVDLKIYVRRGGPNY

SEQ ID NO: 5396 - protein, 333 aa, Nitrosospira sp. PM2
MTIKVGINGFGRIGRMVFRAAVQNFPDIEVVAINDLLEPDYLAYMLQHDSVHGRFKGDVSIEDSTPIVNGKKVRLTAIKDPAELKWGEVGAEVVVESTGLFLTKESCQKHIAAGAKKVIMSAPSKDDTPMFVYGVNNDSYDGQAIISNASCTTNCLAPVAKVLNDTFGVKRGLMTTVHAATATQKTVDGPSNKDWRGGRGILENIIPSSTGAAKAVGKVIPELNTKLTGMAFRVPTSDVSVVDLTVELEKEASYEEICNAMKKASEGAMKGVLAYTDQKVVSTDFRGESATSIFDAEAGMALDGNFVKVVSWYDNEWGYSSKILEMVRVVAGK

SEQ ID NO: 5397 - protein, 111 aa, uncultured episymbiont of Alvinella pompejana
WTMVAGGGASVVYADTIADFAGIADLANYGEYSGGPTTGETKFYAETILDLMTREKDPQGREKILIIGGAIANFTDVAKTFTGIIQAFEECADKMKDVGVKIYVRRGGPNY

SEQ ID NO: 5398 - protein, 364 aa, Nitrosomonas europaea ATCC 19718
MTRMLPEPAYRHGSVGKIGVLMINLGTPDAPTAKALRAYLKQFLSEPRIVEFPRWLWWFILNGIILNVRPAKSAKKYEQIWTSEGSPLRVHTARQTALVAALLEQQADSSLVVEYAMIIGNPSIAEKLQQMKVQGCDRILVLPLFPQYAASSTGCVLDGVFSELRKMRNIPDIRTVRHYHDDPGYIAALAQNVRDYWEKHGQPDKLIISFHGVPRKTLEMGDPYHCECQKTGRLLAEALELADDRYQICFQSRFGFAQWLGPYTAEILAELGKQKTGRVDVVCPGFVSDCLETLEEIALEGKAIFTEAGGGEFHYIPSLNEHPLWIEAIGNIIQTHLTGWADRRLSEEAAERSRKRALALGARE

SEQ ID NO: 5399 - protein, 358 aa, Mesorhizobium sp. BNC1
MGNSRRYRIAVIPGDGIGKEVVPEGLAVLEAVAAKYGIEIIFNHFDFASCDYYLRHGRMLPEDWKQQIGSHDAIFFGAVGWPQIVPDHVALWGSLVQFRREFDQYINLRPVRLMEGVPCPLQGRKPGDIDFYVVRENTEGEYSSIGGRIFAGTEREVVMQETVLTRTGTDRVLRFAFQLAAQRKKKHLTSATKSNGISITMPYWDERVEQMARNFPDVIWDKYHIDILCAHLVLHPDWFDVVVASNLFGDILSDLGPACTGTIGIAPSGNINPERTFPSLFEPVHGSAPDIAGLGIANPIGQIWSVSMMLDHLGEPEAAASIVKAMETVLREPKLRTRDLGGTADTRTCGKAVAAAIS

SEQ ID NO: 5400 - protein, 149 aa, Triticum aestivum
GHEALADVQATCGTLGLSTATVKLIAPDGEEKIGCSVGTGPVDAAYKAVDQIIQIPTVLREYGMTSVTEGIDAIATTRVVVTGDVTNNSKHALTGQSFNRSFSGSGAAMDIVVSSVRAYLSALNKMCSFAGAAKASSEVPESASVQRTE

SEQ ID NO: 5401 - protein, 635 aa, Arabidopsis thaliana
  misc_feature (306)..(306): Xaa can be any naturally occurring amino acid
  misc_feature (322)..(322): Xaa can be any naturally occurring amino acid
  misc_feature (348)..(348): Xaa can be any naturally occurring amino acid
MGFLVDTQKEGGGHSWGYVRSLVRRKQVDSANGQSHGHQLARALTVPHLVAIGVGATIGAGVYILVGTVAREHSGPSLALSFLIAGIAAGLSAVLFCSIFSAVARHLVQWAVYLITLGAVMALCSALMGALLPQPRILMAMARDGLLPSIFSDINKRTQVPVKATVATGLCAAALAFFMDVSQLAGMVSVGTLMAFTMVAISVLILRYVPPDEQPLRSSLQERIDSVSFICGETTSSGHVGTSDSSHQPLIINNDALVYVPLIKNQEAVGCLVVSDETRRIVAGWSIMFTCVGAFLLSYSASSLCXEGFIDIRCVVLVDDIXWAVYLISLGSVMALCSALMGALLPQXRILMAMARDGLLPSIFSDINKRTQVPVKATVATGLCAATLAFFMDVSQLAGMVSVGTLLAFTMVAISVLILRYVPPDEQPLPSSLQERIDSVSFICGETTSSGHVGTSDSSHQPLIVNNDALVDVPLIKNQEALGCLVLSEETRRIVAGWSIMFTCVGAFLLSYAASSLSFPGLIRYPLCGVGGCLLLAGLIALSSIDQDDARHTFGHSGGYMCPFVPLLPIICILINMYLLVNLGSATWARVSVWLLIGVIVYVFYGRKNSSLANAVYVTTAHAEEIYREHEGSLA

SEQ ID NO: 5402 - protein, 131 aa, Haemophilus paraphrophilus
TFCARVISGEWKGYTGKAITDVINIGIGGSDLGPYMVTEALRPYKNHLTMHFVSNVDGTHIAETLKKVNPETTLVLVASKTFTTQETMTNALSARDWFLAAAKDSAHVAKHFAALSTNAKAVAEFGIDTDN

SEQ ID NO: 5403 - protein, 381 aa, Medicago truncatula
MRYIRTGSFKRLFSFTKRGLGEPVLSPKGEENEKSLKILPYEEETCQKPTWKCFSYEELFDATNGFNSENMVGKGGYAEVYKGTLKNGEEIAVKRLTRASKDERKEKEFLTEIGTIGHVRHSNVLSLLGCCIDNGLYFVFELSTTGSVSSILHDEQLAPLDWKTRHKIVVGTARGLHYLHKGCKRRIIHRDIKASNILLTKDFEPQISDFGLAKWLPSQWTHHSIAPIEGTFGHLAPEYYLHGVVDEKTDVFAFGVFLLEVISGRKPVDVSHQSLHSWAKPILNKGDIEELVDARLEGEYDVTQLKRLAFAASLCIRASSTWRPSMTEVLEIMEEGEMDKEKWKMPEEEEEQEEEFWGFEDLEYEYDSSFSMSLIDSIESN

SEQ ID NO: 5404 - protein, 166 aa, Triticum aestivum
MAARAVTMLVVAAVLAGGASAQSTSGCTQTLIGMSPCLNYITGNETAPSKSCCSQLATVVSSKPECLCVALNADPAALGLGAVNKTRALGLPDQCGVKTPPLSNCASAPTTSPSSGAPAGQTPTSSGAGSKSTPTADVGSGSASLRSSAGIVAGFIVRAVYAVSGM

SEQ ID NO: 5405 - protein, 536 aa, Zea mays
  misc_feature (202)..(202): Xaa can be any naturally occurring amino acid
MEAGTWAAAAVAAVALYVAWFWRMSRGLSGPRVWPLLGSLPGLVQHAEDMHEWIAANLRRAGGTYQTCIFAVPGVARRGGLVTVTCDPRNLEHVLKARFDNYPKGPFWHAVFRDLLGDGIFNSDGDTWVAQRKTAALEFTTRTLRTAMSRWVSRSIHARLLPILADARVVDLQDLLLRLTFDNICGLAFGKDPETLARGLPXNAFASAFDRATEATLNRFIFPECVWRCKKWLGLGMETTLARSVRHVDRYLSAVIKARKLELSAATRKDLLSATPHDDLLSRFMRKGTYSDESLQHVALNFILAGRDTSSVALSWFFWLVSTHPAVERNIVRELCAVLAGSRGVEDPALWLAAPLDFEELDRLVYLKAALSETLRLYPSVPEDSKHVVADDVLPDGTFVPAGSSVTYSIYSAGRMKTVWGEDCLQFRPERWLSDDGTRFQPHDSYRFVAFNAGPRICLGKDLAYLQMKNIAGSVLLRHRLTVAPGHRVEQKMSLTLFMKHGLRMEVRPRDLSVVIDELRGAGEYDAAARATAASA

SEQ ID NO: 5406 - protein, 545 aa, Arabidopsis thaliana
MDALSQAISSGISVPYKNNSSSLVPSHGLTSLILRKSRSPVNPSSRSRVSVRASEIQHSKTSASSIDLSDPDWKLKYEKDFEQRFSIPHITDVLPDAEAIRSTFCLKMRSDHYFSLRSPTEDFVGGYPSDEEWHGYINNNDRVLLKVISYSSPTSAGAECLDHDCSWVEQWIHRAGPREKIYFRPEEVKAAIITCGGLCPGLNDVIRHIVITLEIYGVKNIVGIPFGYRGFSDKDLTEMPLSRKVVQNIHLSGGSLLGVSRGGPSVSEIVDSMEERGINMLFVLGGNGTHAGANAIHNECRKRKIKVAVVGVPKTIDNDILHMDKTFGFDTAVEEAQRAINSAYIEAHSAYHGIGVVKLMGRNSGFIAMQASLASGQVDICLIPEVPFNLHGPNGVLKHLKYLIETKGSAVICVAEGAGQNFLEKTNAKDASGNAVLGDFGVYIQQETKKYFKEISTPIDVKYIDPTYMIRAVRANASDGILCTVLGQNAVHGAFAGYSGITVGIINTHYAYLPITEVIAYPKSVDPNSRMWHRCLTSTGQPDFI

SEQ ID NO: 5407 - protein, 313 aa, Arabidopsis thaliana
  misc_feature (75)..(75): Xaa can be any naturally occurring amino acid
MPFAPSLLSSSSSVSQFLPRFPNATRFNVTPRSRAATVVAASVTDLAGVDSTTIAVLGGGSVAALAAMVSLTDPXERRRKLQEEEVGGGDKEVVREYFNSTGFERWRKIYGETDEVNRVQKDIRLGHAKTVENTMLMLTEDRSLAGVTVCDAGCGTGLLSIPLAKEGAIVSASDISAAMVAEAEMKAKAQLPSENLPKFEVNDLESLTGKYDTVVCLDVLIHYPQNKADGMIAHLASLAEKRVILSFAPKTFYYDILKRIGELFPGPSKATRAYLHSEADVERALGKVGWKISKRGLTTTQFYFSRLIEAVPM

SEQ ID NO: 5408 - protein, 448 aa, Arabidopsis thaliana
  misc_feature (201)..(201): Xaa can be any naturally occurring amino acid
  misc_feature (211)..(211): Xaa can be any naturally occurring amino acid
  misc_feature (241)..(241): Xaa can be any naturally occurring amino acid
MSEFDKHVQNHIKDEKPFNSIKPSEIDSTLSLSDSLLLKIIEKLPESQSNDVSLVCERWLNLQGQRLRSLKLLDFDFLLSDRLTTRFPNLTHVDLVNACMNPRVNSGILFCHKSISFHLSSDSSNWEFLEENLLHSDVIYKGLRILSRESFDLLNLKVINASELGLLSLAGDCSDLQELELHKFNDNGLHGISACENLKGXLRFVGSVDGXLYSSSVSDIGLTFLAQGCRSLVKLELSGFXGSFYGIKAIGKCCEVLEELSICDHRMDDGWNSGLSYLESLKILRISSCRKIDASPGPEKLLRSCPAMESLQLKRCCLNDKEGIKALFKVCDGATEVNIQDCWGLSDDCFSLAKALRRVRSLSLEGCSVLTSGGLESVISHWEELESMRVVSCKSIKDSEISPELSSLFSLLKELTWRPDTRSHLSSSLEGAGIGIRGSKFFKKSLLH

SEQ ID NO: 5409 - protein, 154 aa, Zea mays
  misc_feature (144)..(144): Xaa can be any naturally occurring amino acid
MNALAATTRNFRRASKLLGLDSKLEQSLLIPFREIKVECTIPKDDGSLATFVGFRVQHDNARGPMKGGIRYHNEVDPDEVNALAQLMTWKTAVAAVPYGGAKGGIGCSPGELSRSELERLTRVFTQKIHDLIGTHTDVPAPDTXTNAQTMAWML

SEQ ID NO: 5410 - protein, 128 aa, Zea mays
MAASMISSSALAVAPQGLPPLGRRASSFAVVCSKKKIKTDKPYGIGGGLTVDVDANGRKGKGKGVYQFVDKYGANVDGYSPIYNEDDWSPTGDVYVGGTTGLLIWAVTLAGILGGGALLVYNTSALSG

SEQ ID NO: 5411 - protein, 368 aa, Brassica juncea
MSLSAIGFEGLRERLEVSFFEPSLFLDTHGKGLRALSKSQIDEILAPAECTIVSSLSNDELDSYVLSESSLFIFPYKIIIKTCGTTKLLLSIEPLLRLAGGVSLEVKSVRYTRGSFLCPGGQPFPQRNLSEEVSVLDGHFAKMGLSSVAYLMGDDDETKKWHVYSASAPAKNSNGDNNVYTLEMCMSGLDKDKASVFFKNESSSAGSMTDNSGIRKILPQSQICDFEFEPCGYSMNSVEGDASSTIHVTPEDGFSYASFEAVGYDFTTMDLSQLVSRVLTCFEPKQFSVAVHSSVAQKSYDHSGLSVDLEDYGCRETTVGVSRRRERNSDVSEVREAGNVLWFSEIDLKCEWSSNSSCTSEDEKEEGI

SEQ ID NO: 5412 - protein, 131 aa, Haemophilus paraphrophilus
TFCARVISGEWKGYTGKAITDVINIGIGGSDLGPYMVTEALRPYKNHLTMHFVSNVDGTHIAETLKKVNPETTLILVASKTFTTQETMTNALSARDWFLAAAKDPAHVAKHFAALSTNAKAVAEFGIDTDN

SEQ ID NO: 5413 - protein, 428 aa, Oryza sativa (japonica cultivar-group)
MIEGSRFQNMLGGAGIGGGIGCRGRQENEMNGFHNMPYYHKVGESSHMSVDNADNLNMMNFVGGSVAMSVDNSSVGSNESRTVMLKHPGLRDMPAPSYSVHNSVIHPNRAMAPTLNEDALARVLMDPSHPTEILSNYEEWTIDLGKLDMGAPFAQGAFGKLYRGTYNGEDVAIKLLEKPENDPERAQLMEQQFVQEVMMLSTLRHPNIVRFIGACRKSIVWCIITEYAKGGSVRQFLARRQNKSVPLGLAVKQALDVARGMAYVHALRFIHRDLKSDNLLISADKSIKIADFGVARIEVQTEGMTPETGTYRWMAPEMIQHRPYDHKVDVYGFGIVLWELITGMLPFTNMTAVQAAFAVVNRGSRPAIPQDCVDSLSKIMTCCWDANPEVRPSFAEIVVMLENAEIEVMRNVRRARFRCCIAGPMTTD

SEQ ID NO: 5414 - protein, 473 aa, Pseudomonas fluorescens Pf-5
MPVGNQLPHGETAQGGPLKRELGERHIRLMALGACIGVGLFLGSAKAIEMAGPAIMLSYIIGGLAILVIMRALGEMAVHNPVAGSFSRYAQDYLGPLAGFLTGWNYWFLWLVTCVAEITAVAVYMGIWFPDVPRWIWALAALVSMGSINLIAVKAFGEFEFWFALIKIVTIIAMVVGGIGIIAFGFGNDGVALGISNLWSHGGFMPNGVTGVLMSLQMVMFAYLGVEMIGLTAGEARNPQKTIPNAIGSVFWRILLFYVGALFVILSIYPWNEIGTQGSPFVMTFERLGIKTAAGIINFVVITAALSSCNGGIFSTGRMLYSLAQNGQAPAGFAKTSNNGVPRRALLLSIFALLLGVLLNYLVPEKVFVWVTSIATFGAIWTWVMILLAQLKFRKGLSPAERAGLKYRMWLYPISSYLALAFLVLVVGLMAYFPDTRVALYVGPAFLVLLTVLFYLFKLQPTNVQQGSARSAS

SEQ ID NO: 5415 - protein, 229 aa, Arabidopsis lyrata subsp. petraea
MLKSLQNAFESIHQDSSARVVMIRSLVPGVFCAGADLKERRTMSPSEVHTYVNSLRYMFSFMEALSIPTIAAIEGAALGGGLEMALACDLRICGENAVFGLPETGLAIIPGAGGTQRLSRLVGRSVSKELIFTGRKIDAIEAATKGLVNICVTAGEAHEKAIEMAQQINEKGPLAIKMAKKAIDEGIETNMASGLEVEEMCYQKLLNTQDRLEGLAAFAEKRKPLYTGK

SEQ ID NO: 5416 - protein, 1102 aa, Desulfotalea psychrophila LSv54
MKEFRNGWNRASVWLTIILGLLLSGIMAYINYQQVSENTIAQFQREADRQAAAIRRDIEVDLSILTPAVAFFDASHLVERYEFRLWFQSVKVVDNSLDVLGWIPRVANSQRAKFVDEARAVGLSGFRFSELQNGKLVRAGVREKYFPVFYIEPTGVNGAAFGFDLSSEPKRRTMLMQARDSGKVTASQVIHLVQHKKKRFSFLVVAPVYQGLASTIAERRETLRGFVVAAFAVDTIGERALAQIDPGQFHIMMHIHDGAELIYPAGGKCPGEQYFKEGIRTSGLHVIREIAVAGRQWRVCLSPSEAGQIQGFPPSAMAVFIVGIVLTVLLALQFRNNALRTSEIEWQVAEKTAQLRKSELRAEAIIDKAVIPIITIDETGIVQSFNRSAEKMFGYGPEEIIGRNVRMLMPEPHRSSHNKYVDHYLKTGRMKAIGVGNKLTGVRKDGVEFPMHLSVSEVRLEKRIFVGMVVDLSEINRAEEALRKHRDNLARLVEERTYELKIAKEAAETANIAKSAFLANMSHEIRTPMNSVLGFIQITLESRLLCAELRRHLETAYSSAKGLLIIINDILDVSKLESGEFALEATCLDMPRIVQEALKTVESQAEEKGIGLDFHFDADLPHCYLGDPTRLGQVIINLVGNAIKFTKTGKITIGVRASDQGDASLHFSVADRGIGMTAEQAANIFNPFTQADISTARCYGGTGLGLTISKQLVELMGGRIWVESELGRGVTFHFTAQLPVISPCRATGVDHALTGEASSPESPRRFQILLAEDVPGNATLAQLRLEQQGHRVRHVWNGSQAVEMYKGGTFDLILMDVMMPEMDGIEATRKIRALERESKGHITIIALTASIMKEDRQRYMRAGMDAVVGKPIILEGLFATMERVVPKGIGSLNEETFPGDQARQDIDLTPLADVVDIDRGLASWRDPLVFAKSLASFADRHSADAEKIQQLLDENSKEARMISHTLKGLAGNLSLPEVARLATEINAALKAGSHEPAATLLPSLQAALKNAAVVIRKLKMPVARIATPEFDSKAVSSLLQELLIMLDQDDPVVAEPGLSKLGEYLTQDDMINIRRAIDAFDFARAKSQTRILAERLGIQLEG

SEQ ID NO: 5417 - protein, 506 aa, Pyrococcus furiosus DSM 3638
MSKFIHHKIFDEIYEIGEDGVPEFKTYIAGKWIYGEKFKDIKSPINGEVIARVSILSREQIEEAISTTYEIGREKIRDYPGEKRISSFLKAAEMMKEAFDDFVRILILDAGKPKSNAMGEVKATIERLEKTTFEFGRLIGDYIPGDWSEETLESEAIVKREPYGLILAISPFNYPLFISATKVIPALLSGNAVLLKPASADPLAPILFTRVLELSGLPKESFSLLTVPGGFMDDIVRDKRIRAITFTGSTEVGEHIIRTGGIKAYHLELGGKDPAIVLNDANIEESVEKIVKGIVTYSGQRCDAIRLILVEEDIYEQFRESLVAQLSKIEPKNPLEDENAIMGPLIDEDSANYIEEIYKDAIEKGARPLLEFRRRGNYVWPIVLEVNNEILPTLRAFNEDVFGPLALLIKVKDEDEAIEIANSSRFGLDAAVFTTCEKRARKVARKLEVGSVFINEYPRHGIGYYPFGGMKDSGIGREGIGYSLEMLTTTKTIVHNFRGQGVWEYI

SEQ ID NO: 5418 - protein, 385 aa, Populus tremula
MAIDCIKTMPSITTPHHHPKDQDQCKDDGKSFVFDAQVLRHQTNIPQQFIWPDNEKPNINAPELQVPLVDLGDFLSGNPVAAVEASRLVGEACKKHGFFLVVNHGVDKTLIAHAHNYVDTFFKLPLSEKQKAQRKIGESCGYASSFTGRFPSKLPWKETLSFRYQAEENSPKHIEEYFHNRMGEDFAEFGTVYQDYCEAMSTLSLGIMELLGMSLGVSREHFREFFNENDSIMRLNYHPPCQKPDLTLGTGPHCDPTSLTILHQDQVGGLQVFVDNEWRSINPNFDAFVVNIGDTFTALSNGIYKSCLHRAVVNSQTPRKSLAFFLCPKNDKMVTPPHELVDTCNPRIYPDFTWPMLLEFTQKHYRADMKTLEVFTNWLHQRSFS

SEQ ID NO: 5419 - protein, 362 aa, Arxula adeninivorans
MSKNIIILSGDHVGPEVTAEAIKVLEAITQARPNVKFNFDHKLIGGAAIDATGSPLPDETLEASKKADAVLLGAVGGPKWGTGAVRPEQGLLKIRKELNLYANLRPCNFMSEKLLDLSPLRSEIVKGTNFTVVRELVGGIYFGTRKEDEGNGEAWDTEKYTVEEVKRITRMAAFLALQSNPPLPVWSLDKANVLASSRLWRKTVTETIEKEFPQLTLNHQLIDSAAMILIQNPSKMNGVIVTSNMFGDIISDEASVIPGSLGLLPSASLSSLPDKNTAFGLYEPCHGSAPDLPPNKVNPIATILSAAMMLRLSLNLKEEADAVEKAVSKVIDNGIVTADLKGASSTTEVGDAVAAEVQKLLK

SEQ ID NO: 5420 - protein, 385 aa, Populus tremula
MAIDCIKTMPSITTPHHHPKDQDQCKDDGKSFVFDAQVLRHQTNIPQQFIWPDNEKPNINAPELQVPLVDLGDFLSGNPVAAVEASRLVGEACKKHGFFLVVNHGVDKTLIAHAHNYVDTFFKLPLSEKQKAQRKIGESCGYASSFTGRFSSKLPWKETLSFRYKAEENSPKHIEEYFHNRMGEDFAEFGTVYQDYCEAMSTLSLGIMELLGMSLGVSREHFREFFNENDSIMRLNYYPPCQKPDLTLGTGPHCDPTSLTILHQDQVGGLQVFVDNEWRSINPNFDAFVVNIGDTFMALSNGIYKSCLHRAVVNSQTPRKSLAFFLCPKNDKMVTPPHELVDTCNPRIYPDFTWPMLLEFTQKHYRADMKTLEVSTNWLHQRSLS

SEQ ID NO: 5421 - protein, 333 aa, Nitrosospira sp. PJA1
MTIKVGINGFGRIGRMVFRAAVQNFPDIEVVTINDLLEPDYLAYMLQHDSVHGRFKGDVSIEDSTLIVNGKKIRLTAIKDPAELKWGEVGAEVVVESTGLFLTKESCQKHIAAGAKKVIMSAPSKDDTPMFVYGVNNDTYDGQAIISNASCTTNCLAPVAKVLNDTFGVKRGLMTTVHAATATQKTVDGPSNKDWRAGRGILENIIPSSTGAAKAVGKVIPELNTKLTGMAFRVPTSDVSVVDLTVELEKEASYEEICDAMKKASEGSMKGVLAYTDQKVVSTDFRGESATSIFDAEAGMALDGNFVKVVSWYDNEWGYSSKILEMVRVVASK

SEQ ID NO: 5422 - protein, 422 aa, uncultured proteobacterium QS1
MEKLVNSGSRRVAVTGYGAICSLGHGVDAIWDGIMNYRIGYRKHCFDDPNIHARYFGFIDDFGRESMRPFSKNISKMLPLFAKYSLVATHEAIQMAFGDVSLDECVSPFDRGVILGTGWGGLDTANSNNNEYREHGISTSFATVMSMCNAATASITMNWNFRGIQNSPVAACATGTIAIGEAYEAIKSGRAKVMIAGGSESLKEQFNVWSVDVIQALSKEQEDPRRACCPFSKGRCGFVLSEGAAVLCLEDYDFALARGANILGEVTGYANYSDAYDMTAPAEDMQARVRVIREVCSQAALKPEQIDYVNLHGTSTPLNDVNETNSIKMALGDAAYGIPMSSTKSYTGHLIGAAGSLEAVFCLKAMAEGIVPATLHLDAADPACDLNYVPHEHLRGQTLNNVLNLSFGFGGANAGIMIRKVN

SEQ ID NO: 5423 - protein, 111 aa, uncultured episymbiont of Alvinella pompejana
WTMVAGGGASVVYADTIADLAGIEDLANYGEYSGGPTTAETRFYAETILDLMTREKDPQGRDKILIIGGAIANFTDVAKTFTGIIQAFEEYADKMKDTGVSIYVRRGGPNY

SEQ ID NO: 5424 - protein, 333 aa, Nitrosospira sp. TCH711
MTIKVGINGFGRIGRMVFRAAVQNFPDIEVVAINDLLEPDYLAYMLQHDSVHGRFRGDVSIEDSTLIVNGKKIRLTAIKDPAELKWGEVGAEVVVESTGLFLTKESCQKHIAAGAKKVIMSAPSKDDTPMFVYGVNNDTYDGQAIISNASCTTNCLAPVAKVLNDTFGVKRGLMTTVHAATATQKTVDGPSNKDWRGGRGILENIIPSSTGAAKAVGKVIPELNTKLTGMAFRVPTSDVSVVDLTVELEKEASYEEICDAMKKASEGSMKGVLAYTDQKVVSTDFRGESATSIFDAEAGMALDGNFVKVVSWYDNEWGYSSKILEMVRVVASK

SEQ ID NO: 5425 - protein, 111 aa, uncultured episymbiont of Alvinella pompejana
WTMVAGGGASVVYADTIADFAGIADLANYGEYSGGPTTGETKFYAETILDLMTREKDPQGREKILIIGGAIANFTDVAKTFTGIIQAFENYQDKLKEVGTKIYVRRGGPNY

SEQ ID NO: 5426 - protein, 249 aa, Glycine max
KIVSIADLIRYRRKRDKLVDRRTRGLIERAGAALIPTMWGPFTAYCYRSLLDGIEHIAMVKGDIGDGHDVLVRVHSECLTGDIFGSARCDCGNQLALAMQQIEAAGRGVLVYLRGHEGRGIGLGHKLRAYNLQDDGRDTVEANEELGLPVDSREYGIGAQILRDLGVRSMKLMTNNPAKYVGLKGYGLTISGRIPLVSLITKENKRYLETKRVKMGHVYGSEFNSKLNYQDSGNGKANSDDDSNAAAGL

SEQ ID NO: 5427 - protein, 333 aa, Nitrosospira sp. TCH716
MTIKVGINGFGRIGRMVFRAAVQNFPDIEVVAINDLLEPDYLAYMLQHDSVHGRFKGDVSIEDSTLIVNGKKIRLTAIKDPAELKWGEVGAEVVVESTGLFLTKESCQKHIAAGAKKVIMSAPSKDDTPMFVYGVNNDTYDGQTIISNASCTTNCLAPVAKVLNDTFGVKRGLMTTVHAATATQKTVDGPSNKDWRGGRGILENIIPSSTGAAKAVGKVIPELNTKLTGMAFRVPTSDVSVVDLTVELEKEASYEEICDAMKKASEGSMNGVLAYTDQKVVSTDFRGESATSIFDAEAGMALDGNFVKVVSWYDNEWGYSSKILEMVRVVASK

SEQ ID NO: 5428 - protein, 109 aa, uncultured episymbiont of Alvinella pompejana
WTMVAGGGASVVYADTIADLAGVEDLANYGEYSGGPTTGETKFYAETIFDLMTRYEDPRGKVLIIGGAIANFTDVAKTFTGIIQALENYADKLKAHNTKIYVRRGGPNY

SEQ ID NO: 5429 - protein, 501 aa, Burkholderia sp. 383
METNEHFPLLDATRAFLAKPKKMLIGAEWSDAASGRQLDVVNPADGTVLARVPEADAHDVQQAVAAARRAFDAGPWRTAKTTDRERLLLTLADLIEANARELAEIESLDNGKPVMVAQGLDVAMAAQCFRYMAGWATKIEGSVIDAGMPYMPDSEIFTYTRKEPVGVVGAIIPWNFPLLMAAWKLAPALATGCTVVLKPAEDTPLSALRLGELIREAGFPDGVVNIVTGYGHTAGAALSSDPRIDKIAFTGSTQTGKTIGHAALDNMTRMSLELGGKSPVIVLPDVDPDKAALGVANAIFFNQGQVCTAGSRAYIHAKVFDDVIERVAKIAASLKIGPGMDPSTQIGPLVSAKQRQRVCGYIDSGFGEGARAAAGGRAVDGPGFFVEPTVLVDTTQAMRVVREEIFGPVLVAMPFDDVDTAVQLANDTPYGLGASIWSNDLSAIHKLIPRIAAGTVWVNCHSLLDNAMPFGGMKQSGFGRELGRAVIDQYTESKSVMMNYA

SEQ ID NO: 5430 - protein, 477 aa, Escherichia coli
MTQSRLHAAQNALAKLHERRGNTFYPHFHLAPPAGWMNDPNGLIWFNDRYHAFYQHHPMSEHWGPMHWGHATSDDMIHWQHEPIALAPGDENDKDGCFSGSAVDDNGVLSLIYTGHVWLDGAGNDDAIREVQCLATSRDGIHFEKQGVILTPPEGIMHFRDPKVWREADTWWMVVGAKDPGNTGQILLYRGSSLREWTFDRVLAHADAGESYMWECPDFFSLGDQHYLMFSPQGMNAEGYSYRNRFQSGVIPGMWSPGRLFAQSGHFTELDNGHDFYAPQSFVAKDGRRIVIGWMDMWESPMPSKREGWAGCMTLARELSESNGKLLQRPVHEAESLRQQHQSISPRTISNKYVLQENAQAVEIQLQWALKNSDAEHYGLQLGAGMRLYIDNQSERLVLWRYYPHENLDGYRSIPLPQGDMLALRIFIDTSSVEVFINDGEAVMSSRIYPQPEERELSLYASHGVAVLQHGALWQLG

SEQ ID NO: 5431 - protein, 146 aa, Hordeum vulgare subsp. spontaneum
MEFQGQHDNPANRVDEYGNPFPLAGGMGGAHAAPGTGGQFQARREEHKTRGILHRSGSSSSSSSSEDDGMGGRRKKGMKEKIKEKLPGGHKDNQQHMATGTGTGGAYGPGTGTGGAYGQQGHAGMAGTGEKKGIMDKIKEKLPGQH

SEQ ID NO: 5432 - protein, 182 aa, Photorhabdus luminescens
MSTAKHHKLIILGSGPAGYTAAVYAARANLNPVLITGVEKGGQLTTTTEVENWPGDPEGLTGPGLMERMHQHAEKFQTKIIFDHIQKVDLQNRPFRLYGDEQEYTCDALIIATGASARYLGLPSEDAFKGRGISACATCDGFFYRNQKVAVVGGGNTAVEEALYLANIAAEVHLIHRRDTFR

SEQ ID NO: 5433 - protein, 554 aa, Chromobacterium violaceum ATCC 12472
MSNLIELKVPDIGGHSNVDIIEVFIAPGQTVSVDDSLITLETDKATMEVPAEAAGVIKEVKAVVGGKISEGDVIAILEVGAAASAPAPAAAAPAPAAAPAAAPAPAAAAPAAAPAAPAASGRSEIRVPDIGGHNGVDVIEVTVKVGDEIAVDDSLITLETDKATMEVPATAAGKVVEVKIKVGDKVSEGDLIVVVEGAVAAASAPAAAAPAPAAAPAAPAPVAAAPAAAPAVAPVAAAVSAAIDEIAFSKAHAGPSVRRLARELGVDLGKVKGNGRKGRITEDDVKAFVKGVMQNPAALAPAAAPAGSGAGLDLLPWPKVDFAKFGPIETKPLSRIQKISGANLSRNWVMIPHVTFNDECDITELEDFRKTVGKEWEKSGLKISPLAFIIKAAAEALKAFPTFNSSLDGDNLVLKQYYHIGFAADTPNGLVVPVIKDADKKGLRQIAQELTDLSKLAREGKLKPTDMQGATFTISSLGGIGGTSFTPIVNAPEVAILGVCKSQIKPVWNGKEFAPRLMCPLSLSFDHRVIDGAAAARFTVHLGKLLSDVRRLIL

SEQ ID NO: 5434 - protein, 301 aa, Rickettsia akari str. Hartford
MINSIRIGTRNSPLALIQTNLVIQQIKQFFPDINCAIVPIITSGDLIQNKPLYDIGGKALFLKEIEQALLDKKIDLAVHSLKDVPGRIPEELVISAVLEREDPRDVFVCLNYKSIKELPQHSVIGSSAVRRKAFIQKIRPDLKVTIFRGNVDSRIKKLMTGEVDATILAYAGLKRLGAFNPEYCHLIEYSHMLPCVGQGVIAVEIRQNDNSMLEICNQINHLPTCELIKPERAFLEYLDANCRTPIGTYSQYLDADNIQTDFMLGNPDCSKITFHTEITNIKTSKEGGIKAAKMMLNQLKK

SEQ ID NO: 5435 - protein, 428 aa, Pseudomonas aeruginosa UCBPP-PA14
MGTHVIKMPDIGEGIAEVELVEWHVQVGDSVNEDQVLAEVMTDKATVEIPSPVAGRILALGGQPGQVMAVGGELIRLEVEGAGNLAESPAAATPAAPVAAAPEEPKETPVAAPKAAAEAPRALRDSEAPRQRRQPGERPLASPAVRQRARDLGIELQFVQGSGPAGRVLHEDLDAYLTQDGSVTRSGGAAQGYAERHDEQAVPVIGLRRKIAQKMQDAKRRIPHFSYVEEVDVTDLEALRAHLNQKWGGQRGKLTLLPFLVRAMVVALRDFPQLNARYDDEAEVVTRYGAVHVGIATQSDNGLMVPVLRHAESRDLWGNASEVARLAEAARSGKAQRQELSGSTITLSSLGALGGIVSTPVINHPEVAIVGVNRIVERPMVVGGNIVVRKMMNLSSSFDHRVVDGMDAAAFIQAVRGLLEHPATLFLE

SEQ ID NO: 5436 - protein, 292 aa, Oryza sativa (japonica cultivar-group)
MAVARLVVITPAVLLGRTARVSPSAVPRLRPIVAGRRAVAAPTRAVLGDGAGVGGEEDAVVAVVEEDAVARRAARKRSERRTYLVAAVMSSLGFTSMAAAAVYYRFAWQMEAGGGDVPATEMVGTFALSVGAAVGMEFWARWAHRALWHASLWHMHESHHRPRDGPFELNDVFAIANAAPAISLLAYGLLNRGLLPGLCFGAGLGITLFGMAYMFVHDGLVHRRFPVGPIENVPYFRRVAAAHQIHHTDKFEGVPYGLFLGPKELEEVGGTEELDKEIKKRIKRKEAMDAIR

SEQ ID NO: 5437 - protein, 744 aa, Vibrio sp. S14
MVAVRGAHLKENTTFELVSWVESLRQDAKVSSRIEGTYQRCIELAAEQENGPLLLWRGRELVEILVTLSMDADTLIAALLYPLVEGGCYSTDALKEEYSGTILHLVQGVEQMCAISQLKSTAEETAQAAQVDNIRRMLLSMVDDFRCVVIKLAERICNLREVKDQPDEVRRAAAQECANIYAPLANRLGIGQLKWEIEDYAFRYQHPDTYKQIAKQLSERRIDREDYITHFVDDLSDAMKASNIRAEVQGRPKHIYSIWRKMQKKSLEFDELFDVRAVRIVAEELQDCYAALGVVHTKYRHLPKEFDDYVANPKPNGYQSIHTVVLGPEGKTIEIQIRTKQMHEESELGVAAHWKYKEGTASGGAQSAYDEKINWLRKLLAWQEEMSDSGEMLDELRSQVFDDRVYAFTPKGDVVDLPSNATPLDFAYHIHSEVGHRCIGAKVEGRIVPFTYHLQMGDQVEIITQKEPNPSRDWLNPNLGFVTSSRARAKVHAWFRKQDRDKNIIAGKEILEAELVKIHATLKDAQYYAAKRFNVKSPEELYAGIGSGDLRINQVINHINALVNKPTAEEEDQQLLEKLSEASNKQATSHKKPQRDAVVVEGVDNLMTHLARCCQPIPGDDIQGFVTQGRGISVHRMDCEQLEELRHHAPERIIDTVWGGGFVGNYTITVRVTASERNGLLKELTNTLMNEKVKVAGMKSRVDYKKQMSIMDFELELTDLEVLGRVLKRIEQVKDVAEAKRLYG

SEQ ID NO: 5438 - protein, 158 aa, Vibrio fischeri ES114
MDLLPDICDQFEDKVQLVDIDFKNFGGKACFYGEIVTVRCYKDNSLVREVLQQNGKGKVLFIDGNGSRQKALLGDQVATLAVENQWEGVIVYGVVRDVGAIQTMPLGLKALGTSPFKTEKRGAGEQQVSLTINGKMISPGDYIYADLNGLLMSKELLI

SEQ ID NO: 5439 - protein, 131 aa, Haemophilus segnis
SFCERVISGEWKGYTGKAITDVINIGIGGSDLGPYMVTEALRPYKNHLTMHFVSNVDGTHIAETLKKVNPETTLILVASKTFTTQETMTNALSARDWFLAAAKDPAHVAKHFAALSTNAKAVTEFGIDTNN

SEQ ID NO: 5440 - protein, 105 aa, Actinobacillus pleuropneumoniae serovar 1 str. 4074
MTLQVTDATFEQEVLKSDVPVLLDFWAPWCGPCRMVAPILDELSEEFAGRAKIAKVNVDENQQIPAQFGIRSIPTLILFKNGEVVATQVGALPKSQLSAFVEQAL

SEQ ID NO: 5441 - protein, 93 aa, Halobacterium sp. NRC-1
MFYAVGHTPNTRFLDETAVERDESGYIFTQADDVGRPTARTSVDGVFAAGDVADPRYRQAITSAGTGSMAALDAEEFLETLRESDELTATATA

SEQ ID NO: 5442 - protein, 642 aa, Arabidopsis thaliana
MDYLSSMGSQTARFCLILLFLFYYLPCALSQDDLWGCGTPFRCGNITAGFPFLGGIRGEVCGHHSLKLNCNKHSNTTSLIFSGHNYTVLYIDNNNNSVTLGLSRQDFSGPFCSASFSSTLLSSGLFQNLPSYKSLTVFYACDPRRHFLGNFTCPVKGLGSIIQNSTYGILCDGSFSVPVPTSFVSEEEVLDLTHLESVLRKGFEVKLNIDEIPCPLECFSSRANCLFLAGSCCKYHDRTTTCGGDTGDLLRESMILLFAMFFISPLIVAEIIPNTRSILITIGQVVGFHVFIIVVMIIAFLFWRRKKVNDLRKQNLEALVTSRRYSYRQIKKITKSFTEVVGRGGFGTVYKGNLRDGRKVAVKILKDSNGNCEDFINEVASISQTSHVNIVSLLGFCFEKSKRAIVYEFLENGSLDQSSNLDVSTLYGIALGVARGIEYLHFGCKKRIVHFDIKPQNVLLDENLKPKVADFGLAKLCEKQESILSLLDTRGTIGYIAPELFSRVYGNVSHKSDVYSYGMLVLEMTGARNKERVQNADSNNSSAYFPDWIFKDLENGDYVKLLADGLTREEEDIAKKMILVGLWCIQFRPSDRPSMNKVVGMMEGNLDSLDPPPKPLLHMPMQNNNAESSQPSEEDSSIYSEV

SEQ ID NO: 5443 - protein, 227 aa, Mannheimia succiniciproducens MBEL55E
MELVFIRHGLSEWNALNLFTGWRDVNLSEKGVEEAKEAGRKLKAAGFEFDIAFTSVLTRAIKTCNLVLEESNQLWVPQIKTWRLNERHYGGLQGLNKAEAAAEHGDEQVRIWRRSYDVLPPVLDPKDPNSAHNDRRYAHLPADVVPDCENLKVTLERVLPFWEDQIAPAIKAGKRVLVAAHGNSLRALAKHIEGISDADIMDLEIPTGQPLVYTLDDNLKVVSKRYL

SEQ ID NO: 5444 - protein, 131 aa, Haemophilus segnis
SFCERVISGEWKGYTDKAITDVINIGIGGSDLGPYMVTEALRPYKNHLTMHFVSNVDGTHIAETLKKVNPETTLILVASKTFTTQETMTNALSARDWFLAAAKDPAHVAKHFAALSTNAKAVAEFGIDTNN

SEQ ID NO: 5445 - protein, 131 aa, Haemophilus segnis
SFCERVISGEWKGYTGKAITDVINIGIGGSDLGPYMVTEALRPYKNHLTMHFVSNVDGTHIAETLKKVNPETTLILVASKTFTTQETMTNALSARDWFLAAAKDPAHVAKHFAALSTNAKAVADFGIDTNN

SEQ ID NO: 5446 - protein, 131 aa, Haemophilus segnis
LFCERVISGEWKGYTGKAITDVINIGIGGSDLGPYMVTEALRPYKNHLTMHFVSNVDGTHIAETLKKVNPETTLILVASKTFTTQETMTNALSARDWFLAAAKDPAHVAKHFAALSTNAKAVAEFGIDTNN

SEQ ID NO: 5447 - protein, 455 aa, Debaryomyces hansenii CBS767
MVLPHEPEFQQAYNELVSALEDSTLFTEKPEYKKVIPVVSVPERIIQFRVAWENDNGDVEVNNGYRVQFNSALGPFKGGLRFHPSVNLSILKFLGFEQIFKNALTGLSMGGGKGGCDFNPKGRTDSEIRRFCVAFMRQLARYIGSDTDVPAGDIGVGSREVGYMFGAYKQMQNNWSGILTGKGLSWGGSLIRPEATGYGVVYFVEKMIEKATGGKESFKGKRVAISGSGNVAQYAALKVIELGSTVVSLSDSKGCIISQTGITPDQIKAIAAAKIHFKTLEEITKESASLFSGSNEVQYIAGVRPWTHCGQVDVALPSATQNEVSGEEAKALVEAGCKFIAEGSNMGSTKEAIDVFEANRSKAVWYAPGKAANCGGVAVSGLEMAQNSQRVTWAAEEVDEKLKNIMYTCFDNCYANAAKYSAEKDAENLPSLLKGANITGFIKVADAMFDQGEVF

SEQ ID NO: 5448 - protein, 510 aa, Lycopersicon esculentum
MALTLSFSLPLPSLHQKIPSKYSTFRPIIVSLSDKSTIEITQPIKLSTRTIPGDYGLPGIGPWKDRLDYFYNQGKNDFFESRIAKYKSTIFRTNMPPGPFITSNPKVIVLLDGKSFPVLFDASKVEKKDLFTGTFVPSTELTGGYRILSYLDPSEPNHEKLKKLMFFLLSSRRDHVIPEFHETYTELFETLDKEMEEKGTVGFNSGSDQAAFNFLARSLFGVNPVETKLGTDGPALIGKWILLQLHPVITLGLPKFLDDVLLHTFRLPPILVKKDYQRLYDFFYTNSANLFIEAEKLGISKDEACHNLLFATCFNSFGGMKIFFPNMLKSIAKAGVEIHTRLANEIRSEVKSAGGKITMSAMEKMPLMKSVVYEALRVDPPVASQYGRAKQDLKIESHDAVFEVKKGEILFGYQPFATKDPKIFDRPGEFVADRFVGEEGEKLLKHVLWSNGPETESPTVGNKQCAGKDFVVMVSRLFVTEFFLRYGTLNVDVGTSALGSSITITSLKKA

SEQ ID NO: 5449 - protein, 496 aa, Pisum sativum
MAATGVLAEIIDGDVYKYYADGEWKKSTSGKSVAIINPTTRKPQYKVQACSQEEVNKVMDSAKSAQKSWAKTPLWKRAELLHKAAAILKEHKAAIAECLVKEIAKPAKDAVTEVVRSGDLVSYCAEEGVRILGEGKFLVSDSFPGNERTKYCLTSKIPLGVILAIPPFNYPVNLAVSKIAPALIAGNSIVLKPPTQGAVAALHMVHCFHLAGFPKGLISCVTGKGSEIGDFLTMHPGVNCISFTGGDTGIAISKKSGMIPLQMELGGKDACIVLEDADLDLVAANIIKGGFSYSGQRCTAVKVVLVMESVADALVEKVKVKVAKLSVGPPEDDSDITPVVSESSANFIEGLVNDAKEKGATFCQEYKREGNLIWPLLLDNVRPDMRIAWEEPFGPVLPVIRINSVEEGIHHCNASNFGLQGCVFTKDINKAIMISDAMESGTVQINSAPARGPDHFPFQGIKDSGIGSQGITNSINMMTKVKTTVINLPSPSYTMG

SEQ ID NO: 5450 - protein, 131 aa, Pasteurella pneumotropica
DFCQCVISGEWKGYTGKAITDVVNIGIGGSDLGPYMVTEALRPYKNHLTMHFVSNVDGTHIAETLKKVNPETTLFLVASKTFTTQETMTNAESARDWLLASAKDKSAVAKHFAALSTNGKAVAEFGIDTNN

SEQ ID NO: 5451 - protein, 476 aa, Lycopersicon esculentum
MNSAPLSTPAPVTLPVRSIPGSYGLPLVGPIADRLDYFWFQKPENFFTKRMEKHKSTVFRTNVPPCFPFFGSVNPNVVAVLDVKSFSHLFDMEIVEKANVLVGDFMPSVVYTGDMRVCAYLDTSEPKHAQIKNFSQDILKRGSKTWVPTLLKELDTMFTTFEADLSKSNTASLLPALQKFLFNFFSLTILGADSSVSPEIANSGYIFLDSWLAIQLAPTVSIGVLQPLEEILVHSFAYPFFLVKGNYEKLVQFVKNEAKEVLSRAQTEFQLTEQEAIHNLLFILGFNAFGGFSIFLPTLLGNLGDEKNADMQEKLRKEVRDKVGVNPENLSFESVKEMELVQSFVYETLRLSPPVPSQYARARKDFKLSSHDSVYEIKKGELLCGYQPLVMKDPKVFDEPEKFVLERFTKEKGKELLNYLFWSNGPQTGRPTESNKQCAAKDMVTLTASLIVAYIFQKYDSVSFSSGSLTSVKKAS

SEQ ID NO: 5452 - protein, 585 aa, Lactobacillus plantarum
TNILAGAAVIKVLEAWGVDHLYGIPGGSINSIMDALSAERDRIHYIQVRHEEVGAMAAAADAKLTGKIGVCFGSAGPGGTHLMNGLYDAREDHVPVLALIGQFGTTGMNMDTFQEMNENPIYADVADYNVTAVNAATLPHVIDEAIRRAYAHQGVAVVQIPVDLPWQQIPAEDWYASANSYQTPLLPEPDVQAVTRLTQTLLAAERPLIYYGIGARKAGKELEQLSKTLKIPLMSTYPAKGIVADRYPAYLGSANRVAQKPANEALAQADVVLFVGNNYPFAEVSKAFKNTRYFLQIDIDPAKLGKRHKTDIAVLADAQKTLAAILAQVSERESTPWWQANLANVKNWRAYLASLEDKQEGPLQAYQVLRAVNKIAEPDAIYSIDVGDINLNANRHLKLTPSNRHITSNLFATMGVGIPGAIAAKLNYPERQVFNLAGDGGASMTMQDLATQVQYHLPVINVVFTNCQYGFIKDEQEDTNQNDFIGVEFNDIDFSKIADGVHMQAFRVNKIEQLPDVFEQAKAIAQHEPVLIDAVITGDRPLPAEKLRLDSAMSSAADIEAFKQRYEAQDLQPLSTYLKQFGLDD

SEQ ID NO: 5453 - protein, 591 aa, Bacillus subtilis
MTDTLSKRGPDDSNVWGEHHVLFGHKRLAVVDIEGGRQPMACTYKGDTYTIIYNGELYNTEDLRKELRARGHQFERTSDTEVLLHSYIEWQEDCVDHLNGIFAFAVWDEKRNLLFAARDRLGVKPFFYTKEGSSFLFGSEIKAILAHPDIKARVDRTGLSEIFGLGPSRTPGTGIFKGIKEIRPAHALTFSKDGLNIWRYWNVESEKHTDSFDDTVANVRSLFQDAVTRQLVSDVPVCTFLSGGLDSSAITAIAAGHFEKEGKAPLHTYSIDYEENDKYFQASAFQPNDDGPWIEKMTEAFGTTHHKCVISQKDLVDHLEEAVLVKDLPGMADVDSSLLWFCREIKKDFVVSLSGECADEIFGGYPWFHTADVESGFPWMRSTEERIKLLSDSWQKKLNLKEYVNAKYEETLAETPLLDGETGVDKARRQLFYLNMLWFMTNLLDRKDRMSMGASLEVRVPFADHRLVEYVWNIPWEMKMHDNREKGILRKALEGILPDDILYRKKSPYPKTHHPEYTKGVSEWLKTIRSQKDSVLHTLLDRKQLDQLLETEGSSFKVPWFGQLMKGPQLIAHLAQIHTWFEAYRIDIDER

SEQ ID NO: 5454 - protein, 585 aa, Lactobacillus plantarum
TNILAGAAVIKVLEAWGVDHLYGIPGGSINSIMDALSAERDRIHYIQVRHEEVGAMAAAADAKLTGKIGVCFGSAGPGGTHLMNGLYDAREDHVPVLALIGQFGTTGMNMDTFQEMNENPIYADVADYNVTAVNAATLPHVIDEAIRRAYAHQGVAVVQIPVDLPWQQISAEDWYASANNYQTPLLPEPDVQAVTRLTQTLLAAERPLIYYGIGARKAGKELEQLSKTLKIPLMSTYPAKGIVADRYPAYLGSANRVAQKPANEALAQADVVLFVGNNYPFAEVSKAFKNTRYFLQIDIDPAKLGKRHKTDIAVLADAQKTLAAILAQVSERESTPWWQANLANVKNWRAYLASLEDKQEGPLQAYQVLRAVNKIAEPDAIYSIDVGDINLNANRHLKLTPSNRHITSNLFATMGVGIPGAIAAKLNYPERQVFNLAGDGGASMTMQDLVTQVQYHLPVINVVFTNCQYGFIKDEQEDTNQNDFIGVEFNDIDFSKIADGVHMQAFRVNKIEQLPDVFEQAKAIAQHEPVLIDAVITGDRPLPAEKLRLDSAMSSAADIEAFKQRYEAQDLQPLSTYLKQFGLDD

SEQ ID NO: 5455 - protein, 40 aa, Cylicomorpha parviflora
  misc_feature (33)..(33): Xaa can be any naturally occurring amino acid
VPKFLRRIDIALKNIGIDERVPYNAPLIQFSSXMGGDRDG

SEQ ID NO: 5456 - protein, 959 aa, Saccharomyces cerevisiae
MTVTTPFVNGTSYCTVTAYSVQSYKAAIDFYTKFLSLENRSSPDENSTLLSNDSISLKILLRPDEKINKNVEAHLKELNSITKTQDWRSHATQSLVFNTSDILAVKDTLNAMNAPLQGYPTELFPMQLYTLDPLGNVVGVTSTKNAVSTKPTPPPAPEASAESGLSSKVHSYTDLAYRMKTTDTYPSLPKPLNRPQKAIAVMTSGGDAPGMNSNVRAIVRSAIFKGCRAFVVMEGYEGLVRGGPEYIKEFHWEDVRGWSAEGGTNIGTARCMEFKKREGRLLGAQHLIEAGVDALIVCGGDGSLTGADLFRSEWPSLIEELLKTNRISNEQYERMKHLNICGTVGSIDNDMSTTDATIGAYSALDRICKAIDYVEATANSHSRAFVVEVMGRNCGWLALLAGIATSADYIFIPEKPATSSEWQDQMCDIVSKHRSRGKRTTIVVVAEGAIAADLTPISPSDVHKVLVDRLGLDTRITTLGHVQRGGTAVAYDRILATLQGLEAVNAVLESTPDTPSPLIAVNENKIVRKPLMESVKLTKAVAEAIQAKDFKRAMSLRDTEFIEHLNNFMAINSADHNEPKLPKDKRLKIAIVNVGAPAGGINSAVYSMATYCMSQGHRPYAIYNGWSGLARHESVRSLNWKDMLGWQSRGGSEIGTNRVTPEEADLGMIAYYFQKYEFDGLIIVGGFEAFESLHQLERARESYPAFRIPMVLIPATLSNNVPGTEYSLGSDTALNALMEYCDVVKQSASSTRGRAFVVDCQGGNSGYLATYASLAVGAQVSYVPEEGISLEQLSEDIEYLAQSFEKAEGRGRFGKLILKSTNASKALSATKLAEVITAEADGRFDAKPAYPGHVQQGGLPSPIDRTRATRMAIKAVGFIKDNQAAIAEARAAEENFNADDKTISDTAAVVGVKGSHVVYNSIRQLYDYETEVSMRMPKVIHWQATRLIADHLVGRKRVD

SEQ ID NO: 5457 - protein, 556 aa, Robiginitalea biformata HTCC2501
MCGIVCAFDLKQPAEDLRPQMLEMSRVLRHRGPDWNGIHMSDTAILAHERLAIVDPASGKQPLYSPDGNLVLAANGEIYNHQSLRKRFEGTYDFRTESDCEVILALYQEQGPAFLDELNGIFGFALYDSQADRYFIARDHMGIIPLYIGWDRHGTFYVASELKALEGTCTRIELFPPGHYMLSDQEGFQRWYSRDWMEYDAVEDNPTDIAALRKALEDAVHRQLMSDVPYGVLLSGGLDSSVTSAIAKKYAQKRVESGDQADAWWPQLHSFSVGLEGSPDLAAARKVADHIGTVHHEIKFTIQEGLDAVRDVIYHLETYDITTVRASTPMYLMARVIKSMGIKMVLSGEGADELFGGYLYFHKAPGPRDFHEETVRKLDKLHMYDCLRANKSLAAWGIEGRVPFLDKEFMDVAMRLNPRDKMITPERMEKWVVRKAFEDYLPESVAWRQKEQFSDGVGYSWIDTLKEVVAEAVSDEQLANAHFRFPIQTPTSKEEYYYRSIFESHFPSDAAAESVPQEPSVACSTRIALEWDEAFRNMNDPSGRAVARVHADAYEK

SEQ ID NO: 5458 - protein, 385 aa, Populus tremula
MAIDCIKTMPSITTPHHHPKDQDQCKDDGKSFVFDAQVLRHQTNIPQQFIWPDNEKPNINAPELQVPLVDLGDFLSGNPVAAVEASRLVGEACKKHGFFLVVNHGVDKTPIAHAHNYVDTFFKLPLSEKQKAQRKIGESCGYASSFTGRFSSKLPWKETLSFRYKAEENSPKHIEEYFHNRMGEDFAEFGTVYQDYCEAMSTLSLGIMELLGMSLGVSREHFREFFNENDSIMRLNYYPPCQKPDLTLGTGPHCDPTSLTILHQDQVGGLQVFVDNEWRSINPNFDAFVVNIGDTFMALSNGIYKSCLHRAVVNSQTPRKSLAFFLCPKNDKMVTPPHELVDTCNPRIYPDFTWPMLLEFTQKHYRADMKTLEVFTNWLHQRSFS

SEQ ID NO: 5459 - protein, 362 aa, Triticum aestivum
MALRRLLQGIVLPRTTGRHVGASFSTEAGETIRATLFPGDGIGPEIAESVKQVFNVAGVPIEWEEHYVGTEVDPRTESFLTWESLESVRRNKVGLKGPMATPIGKGHRSLNLTLRKELGLYANVRPCNSLPGYKTRYDDVNLVTIRENTEGEYSGLEHQVVRGVVESLKIITRQASLRVAEYAFHYAKANGRERVSAIHKANIMRKTDGLFLKCCREVAEKYPEITYEEVIIDNCCMTLVKNPGTFDVLVMPNLYGDIISDLCAGLIGGLGLTPSCNIGEGGICLAEAVHGSAPDISGKNLANPTALMLSAVMMLRHLQFNDQADRIHNAILQTIAEGKYRTADLGGKSSTSDYTKAVCDHI

SEQ ID NO: 5460 - protein, 385 aa, Populus tremula
MAIDCIKTMPSITTPHHHPKDQDQCKDDGKSFVFDAQVLRHQTNIPQQFIWPDNEKPNINAPELQVPLVDLGDFLSGNPVAAVEASRLVGEACKKHGFFLVVNHGVDKTLIAHAHNYVDTFFKLPLSEKQKAQRKIGESCGYASSFTGRFSSKLPWKETLSFRYKAEENSPKHIEEYFHNRMGEDFAEFGTVYQDYCEAMSTSSLGIMELLGMSLGVSREHFREFFNENDSIMRLNYYPPCQKPDLTLGTGPHCDPTSLTILHQDQVGGLQVFVDNEWRSINPNFDAFVVNIGDTFMALSNGIYKSCLHRAVVNSQTPRKSLAFFLCPENDKMVTPPHELVDTCNPRIYPDFTWPMLLEFTQKHYRADMKTLEVFTNWLHQRSFS

SEQ ID NO: 5461 - protein, 385 aa, Populus tremula
MAIDCIKTMPSITTPHHHPKDQDQCKDDGKSFVFDAQVLRHQTNIPQQFIWPDNEKPNINAPELQVPLVDLGDFLSGNPVAAVEASRLVGEACKKHGFFLVVNHGVDKTLIAHAHNYVDTFFKLPLSEKQKAQRKIGESCGYASSFTGRFSSKLPWKETLSFRYKAEENSSKHIEEYFHNRMGEDFAEFGTVYQDYCEAMSTLSLGIMELLGMSLGVSREHFREFFNENDSIMRLNYYPPCQKPDLTLGTGPHCDPTSLTILHQDQVGGLQVFVDNEWRSINPNFDAFVVNIGDTFMALSNGIYKSCLHRAVVNSQTPRKSLAFFLCPKDDKMVTPPHELVDTCNPRIYPDFTWPMLLEFTQKHYRADMKTLEVFTNWLHQRSLS

SEQ ID NO: 5462 - protein, 136 aa, Brassica napus
MSPQPPQQIGLPWPELNDGLTYKDVVSSSDSELTTVSDFYYTKYKSSAPLLGWIQRIQNGQIQVDGEVVKDPNTLLRSGSKLVYHRLPWKEPDTPHLLDILYQDDDLIALNKPSGLQVLPGGLFQQRTVLTQLQWC

SEQ ID NO: 5463 - protein, 313 aa, Burkholderia pseudomallei K96243
MPEIVTLTPNPAIDVATCVERVTDTRKLRCGPARRDPGGGGINVARVLTRLGADCSAVYLAGGGTGLALRGLLADEGVRAHGIDIAGETRENFSVLETSTGREFRFVLPGPALAAHEWPRCVEALGRLADASRYLVMSGSLPPGMPDDCYARLARRASARGVRTVVDTSGPALAAALDAGVYLVKPSLGELRALTGLPLEDDGARLAAARAIVAGGRAQIVALTLGDAGALVVSRDDAVRLPGVKVAVRSAIGAGDSFVAGLVAALNRGANVADAARHALAAASASLLSTGTALGTKEDIARIYRELPGTIDA

SEQ ID NO: 5464 - protein, 1037 aa, Flaveria pringlei
MERARRLANKAILGRLVSQTKHNPSISSPALCSPSRYVSSLSPYVCSGTNVRSDRNLNGFGSQVRTISVEALKPSDTFPRRHNSATPEEQTKMAEFVGFPNLDSLIDATVPKSIRLDSMKYSKFDEGLTESQMIAHMQDLASKNKIFKSFIGMGYYNTSVPTVILRNIMENPGWYTQYTPYQAEIAQGRLESLLNFQTMVTDLTGLPMSNASLLDEGTAAAEAMAMCNNIQKGKKKTFIIASNCHPQTIDICKTRADGFDLKVVTSDLKDFDYSSGDVCGVLVQYPGTEGELLDYSEFIKNAHANGVKVVMASDLLALTILKPPGELGADIVVGSAQRFGVPMGYGGPHAAFLATSQEYKRMMPGRIIGVSVDSSGKPALRMAMQTREQHIRRDKATSNICTAQALLANMAAMFGVYHGPEGLKTIAKRVHGLAGTFAAGLKKLGTVQVQDLPFFDTVKVTCVDSKAIAEEAYKHKMNLRIVDKNTITVAFDETTTIEDVDTLFKVFALGKPVTFTAASIAPEVQDAIPSGLVRETPYLTHPIFNMYHTEHELLRYISKLQSKDLSLCHSMIPLGSCTMKLNATTEMMPVTWPAFADIHPFAPTEQAQGYQEMFKNLGDLLCTITGFDSFSLQPNAGAAGEYAGLMVIRAYHMARGDHHRNVCIIPVSAHGTNPASAAMCGMKIITVGTDSKGNINIEELRKAAEANKENLSALMVTYPSTHGVYEEGIDEICKIIHDNGGQVYMDGANMNAQVGLTSPGWIGADVCHLNLHKTFCIPHGGGGPGMGPIGVKKHLAPYLPSHPVVATGGIPAPEQSQPLGTIAAAPWGSALILPISYTYIAMMGSQGITNASKIAILNANYMAKRLENHYPILFRGVNGTVAHEFIVDLRPLKTTAGIEPEDVAKRLIDYGFHGPTMSWPVPGTLMIEPTESESKAELDRFCDALISIRQEIAEIEKGNVDLNNNVIKGAPHPPQLLMADKWTKPYSREYAAYPAPWLRAAKFWPTTCRVDNVYGDRNLICTLQPPQEYEEKAEATA

SEQ ID NO: 5465 - protein, 385 aa, Populus tremula
MAIDCIKSMPSITTPHHHPKDQDQCKDDGKSFVFDAQVLRHQTNIPQQFIWPDHEKPNINAPELQVPLVDLGDFLSGNPVAAVEASRLVGEACKKHGFFLVVNHGVDKTLIAHAHNYVDTFFKFPLSEKQKAQRKIGESCGYASSFTGRFSSKLPWKETLSFRYKAEENSSKHIEEYFHNRMGEDFAEFGTVYQDYCEAMSTLSLGIMELLGMSLGVSREHFREFFNENDSIMRLNYYPPCQKPDLTLGTGPHCDPTSLTILHQDQVGGLQVFVDNEWRSINPNFDAFVVNIGDTFMALSNGIYKSCLHRAVVNSQTPRKSLAFFLCPKNDKMVTPPHELVDTCNPRIYPDFTWPMLLEFTQKHYRADMKTLEVFTNWLHQRSLS

SEQ ID NO: 5466 - protein, 192 aa, Zea mays
  misc_feature (124)..(124): Xaa can be any naturally occurring amino acid
  misc_feature (165)..(165): Xaa can be any naturally occurring amino acid
MRIISMASTIRPSLLGCVSASPRFPVVSRNLSRSTLSFSHVTQSKLLTLRRSVSCLGVAESGNASTAATEEDLLKWVKDDNRRMLHVVYRVGDLDRTIKFYTECLGMKLLRKRDIPEEKYTNAXFLGYGPEDSHFVIELTYNYGVDKYDIGAGFGHFWYCWSTMXAKTVELYKAKGGKVTRKPGGCQGGQTV

SEQ ID NO: 5467 - protein, 439 aa, Debaryomyces hansenii CBS767
MSAPEGFKKVSEDAHKSNQEINSNPYGPNPADFLSNVSNFQLIESTLREGEQFANAFFSTEKKIEIAKALDEFGVDYIELTSPVASEQSRKDCEAICKLGLKAKILTHIRCHMDDARVAVETGVDGVDVVIGTSQFLRQFSHGKDMNYIAESAVEVIEFVKSKGIEIRFSSEDSFRSDLVDLLNIYKTVDKIGVNRVGIADTVGCANPRQVYELVRTLRSVVHCDIECHFHNDTGCAIANAYTALEGGARLIDVSVLGIGERNGITPLGGLMARMVAADRDYVLSKYKLHKLRDLENLVAEAVQVNIPFNNPITGFCAFTHKAGIHAKAILANPSTYEILSPADFGLTRYIHFANRLTGWNAIKSRVDQLNLQLSDEQCKEVTNKIKKLGDVRQLTIDDVDSIIKDFHADVATPHVRPTEPVPHVIEGLEESDVKRSKN

SEQ ID NO: 5468 - protein, 321 aa, Ureaplasma parvum serovar 3 str. ATCC 700970
MNQVNFLNLDKNILIITSGGDAPGMNASLISLIHRLMNNNFNVFIGIEGLLGLYNNLIEPIKDKRVFDVYFNEQGTVIKTSRFIKLDINDKKTQIIKDNLLSHNIQKIIILGGQGSMQAGLVLTKMGFEVFGILHTIDNDFSETQMCIGALSAASFNQKLLKCLNYTAKAHCAFNLVELMGRECSWLVNNSVGKLKPILMLTNQDNKYTVDEVIDLIKDKINSIKEYDPLIIVQELIYDQKWYELLVKTFEQKLHKSLRITILNYLQRGAPVSDFDLQLAKDSANVLVDFIVNQNDIKNTNNMYVVINKFDNKLEVIKFNK

SEQ ID NO: 5469 - protein, 237 aa, Gossypium barbadense
LTDDHCQYFLYQLMRGLKYIHSANALHRDLKPSNLLLNANCDLKICDFGLARTTSETDFMTEYVVTRWYRAPESLLNCSEYTAAIDIWSVGCILMEIIRREPLFSGKDYVQQLGLITQLLGSPEDSDLGFLRSDNARKYVKQLPHFPKQPFAGKFPDVSPLAIDLAEKMLVFDPSKRITVEEALNHPYLSSLHEINEEPTCPSPFVFDFEQMALNEEDIKELIWRESLNFNQDKMPE

SEQ ID NO: 5470 - protein, 492 aa, Sulfolobus solfataricus P2
MGKVLGEVKKDYGKLKLYINGEFIDSKTDTIGKAYNPAKDEIIAEVPFSAKDEVEEAIQSAQEAFEKWREVPITTRIQYLFALKNRLEEYSETIARIIVQNHGKTIQEARGDMRRTIENVEAAISAAYTLYKGEHLDQVSQEVDETVVREPLGVFGIITPFNFPTMVPFWFLPYAIVLGNTVVVKPSEITPVPMDFIIRIFDEIKLPRGVVNVVHGAKDVVDEFLTNKLVQGVTFVGSTRVGKYIYENAGKNGKKAIVQAGAKNFVVVMPDADLNKAIPSIVSAFFGNAGQRCLAAANLVAVGNIYDEVKRKFIEASKQLKIGYGLDESVDMGPVVTKDAKKRIIGYIEKGIEEGAKLLLDGRDVKVPEYPNGYFLGPTVFDEVTPEMVIAKEEIFGPVASIIHVKNLDEAINIINRSNYGNASSIFTTSGYYARKFRREVNTGNIGINIGVAAPMAFFPFGGRKESFFGILHGQIDSVDFFTDKKVVITRW

SEQ ID NO: 5471 - protein, 459 aa, Propionibacterium acnes KPA171202
MPCQGVYAWCGNPVSGGDGCHPSWQDMPLRADMPYEAWPSAKSSLEPSKRQGRQVTLVGVCIVSTMNPILGADMTTYQYLIVGGGMAADSAARGIRDIDKKGSIAILSADVDAPYPRPALSKKLWTDPEFTWDQADLATVADTGAELRLGTEVLSIDRDGKTVLTASGQVFGYQKLLLVTGLTPSRIDDDGDAVLYFRSARDYQQLRALAQPGHQFVVVGGGYIGAELAAGLVQQGCEVALVTPDPTLGGSQFPAQIASEYQKLFADAGVHLVTGKRVCSVRKHEAAEVTLDDGTILQADDVIAGLGASPVTKLAEEAGLTVNDGVIVDEQLRTNDPAIWAAGDIANYPDPVLGRTRVEHVDNAIAMGKAAGRIMAGSKDSYTHTPMMYSQIFGVRWEAVGTLDSSLATTSVEAGDGQVVYYLSDGKPVGVLLWNLPGRTDKAVTVLADPPEDLSTAIS

SEQ ID NO: 5472 - protein, 120 aa, Gossypium barbadense
MASSMSLKLACVAVLCMVVGAPLAHGAVTCGQVTSSLAPCIGYLTGNGAGGVPPGCCGGIKSLNSAAQTTPDRQAACKCIKSAAAGISGINYGIASGLPGKCGVNIPYKISPSTDCNSVK

SEQ ID NO: 5473 - protein, 328 aa, Burkholderia sp. 383
MHAWSARHVPAQGGKVAVVTGANSGLGWQLAETLAAKGATVVMGCRDAARAAQAADAIRRLHPDARVEVDPLDLADLASIARFAADVAERHGRVDILCNNAGVMFLPLRHTHDGFEMQFGTNHLGHFALTGHLLPALRAARRARVVTMSSGLNRGGRIRVDDLRAEHRYNRYLAYCDSKLANLVFAIELQRRFERAAFAGISVAAHPGYAATNLQFAGPAMDSSPARAALMRAANRYLAQPADQGALPAIHAATSPDLAGGAYIGPSGLFESRGLPAPASVPRAARDVASAALLWEASEAATGVRFLSSGAPAGRSPGRPFDTAAEVR

SEQ ID NO: 5474 - protein, 205 aa, Halobacterium sp. NRC-1
MTEDSHDLVIAGSGIAGLSAAVYAARADLEPLVLEGDEPGGQLTLTTDVENYLGFPDGVGGMDLVQRGKEQAEQFGAQFEHGRIEAADLDGQPLELSLSTGDTLYTRSLIVATGASARWVGAENEDELMGAGLSTCATCDGAFHRGDDVLVVGGGDSAMEEALFLAKFADSVTVVHRREELRASEIMADRARDHDDVQFRWNTEL

SEQ ID NO: 5475 - protein, 111 aa, uncultured episymbiont of Alvinella pompejana
WTMVAGGGASVVYADTIADFAGIADLANYGEYSGGPTTGETKFYAETILDLMTREKDPQDREKILIIGGAIANFTDVAKTFTGIIQAFEEYADKMKDVGVKIYVRIGGPNY

SEQ ID NO: 5476 - protein, 339 aa, Haemophilus influenzae 86-028NP
MAIKIGINGFGRIGRIVFRAAQHRDDIEVVGINDLIDVEYMAYMLKYDSTHGRFDGTVEVKDGNLVVNGKTIRVTAERDPANLNWGAIGVDIAVEATGLFLTDETARKHITAGAKKVVLTGPSKDATPMFVRGVNFNAYAGQDIVSNASCTTNCLAPLARVVHETFGIKDGLMTTVHATTATQKTVDGPSAKDWRGGRGASQNIIPSSTGAAKAVGKVLPALNGKLTGMAFRVPTPNVSVVDLTVNLEKPASYDAIKQAIKDAAEGKTFNGELKGVLGYTEDAVVSTDFNGCALTSVFDAEAGIALTDSFVKLVSWYDNETGYSNKVLDLVAHIYNYKG

SEQ ID NO: 5477 - protein, 339 aa, Bacillus pseudofirmus
DQVLKKDGTPYKVFTPYYKAWAKERKRTPAVIKRDVLLGSVHKGTAPDREAETLFNNLIKKCSYDWSAIGEEHAIKRLQMFTKKRLSGYKANRDFPSITGTSRLSPYIKTGAVSSRSIYYHILNAEADSYSAETFLKELAWRDFYRMVHFYEPDCKDREIMEGYRELNWSHDQDDLTSWKRGETGFPIVDAGMRQLLNEGWMHNRLRMITASFLTKDLLIDWRLGERYFERMLIDYDPSSNIGGWQWAASVGTDAVPYFRIFNPVTQSKRFDENGTYIRTYIPELNHVPDHYIHEPWKMSEEEQVKYKCRLDEDYPLPIVDHSKQRKKALSFFKGDDEE

SEQ ID NO: 5478 - protein, 131 aa, Streptococcus thermophilus CNRZ1066
MTKFLHTCVRVKDLEASLQFYQEALGFKEVRRNDFPEYKFTLVYMQLEDDPDYELELTYNYDHEVYDLGNGYGHIAVGVDDLEATHQAHKEAGYNVTDLSGLPGKPKMYYFITDPDGYKIEVIRLAQFLEK

SEQ ID NO: 5479 - protein, 111 aa, uncultured episymbiont of Alvinella pompejana
WTMVARGGASVVYADTIADFAGIADLANYGEYSGGPTTGETKFYAETILDLMTREKDPQDREKILIIGGAIANFTDVAKTFTGIIQAFEEYADKMKDVGVKIYVRRGGPNY

SEQ ID NO: 5480 - protein, 424 aa, Bacillus subtilis subsp. subtilis str. 168
MSAKQVSKDEEKEALNLFLSTQTIIKEALRKLGYPGDMYELMKEPQRMLTVRIPVKMDNGSVKVFTGYRSQHNDAVGPTKGGVRFHPEVNEEEVKALSIWMTLKCGIANLPYGGGKGGIICDPRTMSFGELERLSRGYVRAISQIVGPTKDIPAPDVYTNSQIMAWMMDEYSRLREFDSPGFITGKPLVLGGSQGRETATAQGVTICIEEAVKKKGIKLQNARIIIQGFGNAGSFLAKFMHDAGAKVIGISDANGGLYNPDGLDIPYLLDKRDSFGMVTNLFTDVITNEELLEKDCDILVPAAISNQITAKNAHNIQASIVVERANGPTTIDATKILNERGVLLVPDILASAGGVTVSYFEWVQNNQGYYWSEEEVAEKLRSVMVSSFETIYQTAATHKVDMRLAAYMTGIRKSAEASRFRGWV

SEQ ID NO: 5481 - protein, 254 aa, Salmonella enterica subsp. enterica serovar Paratyphi A str.
MNSQFAGLTREACVALLASYPLSVGILAGQWIALHRYLQQLEALNQPLLHLDLMDGQFCPQFTVGPWAVEQLPQTFIKDVHLMVADQWTAAQACVKAGAHCITLQAEGDIHLHHTLSWLGQQTVPVIGGEMPVIRGISLCPATPLDVIIPILSDVEVIQLLAVNPGYGSKMRSSDLHERVAQLLCLLGDKREGKIIVIDGSLTQDQLPSLIAQGIDRVVSGSALFRDDRLAENTRSWRAMFKVAGDTTFLPSTA

SEQ ID NO: 5482 - protein, 240 aa, Oryza sativa (japonica cultivar-group)
MAAATMALSSSFAAAAAGGAPWRGVVGAGRAAVGFPPRRRAVALVVRAQTEPDVEPTKEETTTSSTPTPTPSPAAAAPKAKPAASTGLWDVLAFSGPAPEPINGRLAMVGFVSALAVEASRSGELLEEASSGGGLAWFAATAAVRPSRPPRRRFRVPRRRCLCPTPRARGRLLVVAAAAASVSASRAAARNRLHLSPRRGVPARRGRGRHRRLVPRRRSRRVRVTRCRLRRRIPRLRRQR

SEQ ID NO: 5483 - protein, 109 aa, Triticum aestivum
  misc_feature (81)..(81): Xaa can be any naturally occurring amino acid
MAPTVMASSATSVAPFQGLKSTAGLPVSRRSNGASLGSVSNGGRIRCMQVWPIEGIKKFETLSYLPPLSTEALLKQVDYLXIRSKWVPCLRFKQVGSSSREHNASPGVL

SEQ ID NO: 5484 - protein, 131 aa, Pasteurella aerogenes
AFCERVISGEWKGYTGKAITDVINIGIGGSDLGPYMVTEALRPYKNHLTMHFVSNVDGTHIAETLKKVNPETTLILVASKTFTTQETMTNAHSAREWFLASAKDEAHVAKHFAALSTNAKEVEKFGIDTAN

SEQ ID NO: 5485 - protein, 138 aa, Triticum aestivum
EVEKKGFGKRSKDPLGTSVVVDGSFVSSLSSDNSVEESSFRQLQDAVSQLDVKTKLCIRDGLYRLARSAQNRPVFPNAINRHEESRDAKDTQNMETSGKFVDHRSIETQTNPIDRSIALLLFHQPSDQVAGAVDNPRH

SEQ ID NO: 5486 - protein, 224 aa, Mannheimia succiniciproducens MBEL55E
MKSYLIAPSILSADLARLGEDVENVLKAGADVIHFDVMDNHYVPNLTFGPAVCKALRDYGITAPIDVHLMVKPVDRLIPDFAKAGADYITFHPEASEHIDRSLQLIRNSGCKAGLVFNPATSLSYLDYVMDKIDVILLMSVNPGFGGQSFIPATMQKLQEARRRIDESGFDIRLEVDGGVKINNIAEIAAAGADMFVAGSAIFDQPDYRKVINEMRQELAKVQK

SEQ ID NO: 5487 - protein, 374 aa, Glycine max
MTLFIVLLIYKWRKRHLSIYENIENYLEQNNLMPIGYSYKEIKKMARGFKEKLGGGGYGIVFKGKLHSGPSVAIKMLHKAKGSGQDFISEIATIGRIHHQNVVQLIGYCVEGSKRALVYEFMPNGSLDKFIFTKDGSIHLTYDEIFNIAIGVARGIAYLHHGCEMQILHFDIKPHNILLDETFTPKVSDFGLAKLYPIDNSIVTMTAARGIIGYMAPKLFYKNIGGISHKADVYSFGMLLMEMASKRKNLNPHADHSSQLYFPFWIYNQLGKETDIEMEGVTEEENKIAKKMIIVSLWCIQLKPSDRPSMNKVVEMLEGDIESLEIPPKPSLYPHETMENDQSIYSSQTMSMDFISSSSYSKEIVTNPLVEDAI

SEQ ID NO: 5488 - protein, 964 aa, Brassica juncea
MPHGKLEKMASMDVHLRQLVPGKVSEDDKLVEYDALLLDRFLDILQELHGEDLRETVQELYEHSAEYEGKHEPKKLEELGNVLTSLDPGDSIVIAKAFSHMLNLANLAEEVQIAYRRRIKKLKKGDFVDESSATTESDLEETFKKLVGDLNKSPEEIFDALKNQTVDLVLTAHPPQSVRRSLLQKHGRIRDCLAQLYAKDITPDDKQELDEALQREIQAAFRTDEIKRTPPTPQDEMRAGMSYFHETIWKGVPKFLRRVDTALKNIGIEERVPYNAPLIQFSSWMGGDRDGNPRVTPEVTRDVCLLARMMAATMYFNQIEDLMFELSMWRCNDELRVRADELHVNRRKDAAKHYIEFWKSIPTTEPYRVVLGDVRDKLYHTRERARQLLSNGTSDVPEEATFNNLEDFLEPLELCYRSLCSCGDRPIADGSLLDFLRQVSTFGLSLVRLDIRQESDRHTDVLDAITTHLDIGSYREWSEERRQEWLLSELSGKRPLFGSDLPKTEEIADVLDTFHVIAELPSDSFGAYIISMATAPSDVLAVELLQRECHVKRPLRVVPLFEKLADLEAAPAAVARLFSVDWYKNRINGKQEVMIGYSDSGKDAGRLSAAWQLYKAQEELVKVAKEYGVKLTMFHGRGGTVGRGGGPTHLAILSQPPDTINGSLRVTVQGEVIEQSFGEEHLCFRTLQRFTAATLEHGMRPPVSPKPEWRALLDEMADVATEEYRSVVFQEPRFVEYFRLATPELEYGRMNIGSRPSKRKPSGGIESLRAIPWIFAWTQTRFHLPVWLGFGGAIRHVVEKDVKNLHMLQDMYKNWPFFRVTIDLIEMVFAKGDPGIAALYDKLLVSEELWPFGDKLRANFEETKKLVLQTAGHKDLLEGDPYLKQRLRLRNSYITTLNVCQAYTLKRIRDPSYHVTLRPHISKEIAESSKELIELNPTSEYAPGLEDTLILTMKGVAAGLQNTG

SEQ ID NO: 5489 - protein, 175 aa, Triticum aestivum
MAPTVMASSATSVAPFQGLKSTGGLPVSRRSNGASLGSVSNGGRIRCMQVWPIEGIKKFETLSYLPPLSTEALLKQVDYLIRSKWVPCLEFSKVGFIFREHNTSPGYYDGRYWTMWKLPMFGCTDATQVINEVEEVKKEYPDAYVRIIGFDNMRQVQCVSFIDFKPPGCEESGKA

SEQ ID NO: 5490 - protein, 368 aa, Archaeoglobus fulgidus
MFMKSIVEEALARAEREKKERIEGRGFEDVEDEILQVLHELKTVIKVIGVGGGGCNTITRMYEEGIEGAELIALNTDVQHLYYTKANRRILIGKRRTRGLGAGSLPQVGEEAARESEDEIKKLVEGSDMVFVTCGLGGGTGTGAAPVVAEAAQEAGALTIAVVTFPFSAEGAVRRANAEAGLERLREVADTVIVIPNDRLLEVVPNYPMQLAFKVADEILMRAVKGITELITKPALINLDFADVRTVMEKGGVAMIGLGEASGEDKAAESVRKALKSPLLDVDVSGAKAALVNVTGGPDMTIEEAESVIEEIYSKVDPDARIIWGAMIDPELENTMRTLIIVTGVKSPQILGRKGYPVTRKYGIDFVR

SEQ ID NO: 5491 - protein, 472 aa, Geobacter sulfurreducens PCA
MHRITFGTSGWRGILCEDFTFENVKVVSQAIADHVKAIGEQDKGIIVAYDTRFMGERFAKETVRVLAGAGVKAYFCRRDTPTPVISFEILRRGTAGAVNFTASHNPPEYNGIKFSPSWGGPALPETTGDIERRANEMMGEVCYREMALDEAVKAGLLEEIDPREEYLKALESKVDFDAIGRVGSVAVNALYGTGRGYLEEPLITRGLDVKAINMHRDPYFGGFPPEPSEKYIQDFIRLVKDDPAIRLGIATDGDADRFGIVDGDGTFIEPNYIIALLFDYLVRVRKMTGAVARSVATSHLVDAVAKKHGIEVIETPVGFKYIGELISQDRIIIGGEESAGLSIKGHVPEKDGILACFLVAEMVAREGLSVKALLARLYEEVGTFVTKRENITLSPAVEEGYAEKQRQAPDSFAGLKVTQKVTVDGSKFILEDDSWLLFRKSGTEPVVRLYAEASSEEKLAAVMAAGKQFILG

SEQ ID NO: 5492 - protein, 424 aa, Ustilago maydis 521
MSAHPSNPHRTPYNVLNQTFLIDNAYAITKDLGQGAYGCVAAATHKGTGESVAIKKITNVFTKKILTKRALREIKLLRHFRGHKNITCLYDMDIIDPVGFNEVYLYEELMEADLHAIIRSGQPLSDAHFQSFIYQTLCGLKYIHSASVLHRDLKPGNLLICDFGLARGFETDPELAKQVGAGFMTEYVATRWYRAPEIMLSFQNYTTAIDIWSLLGGRPIFKGRDYVDQLNQILHYLGTPSEETLRRVGSPRAQDYIRSLPYQPRIPFDRLYPQANPQALNLLERMLEFDPAKRISCEEALQHPYLSVWHDPADEPVCPRKFDFGFESVDEVQGMKTLILEEVRSFRTEVRRQARLMQQPKRQESLPIPSREDIQRSSPTEEGNPAYSVLGASAGIIQGATNSEHASGVLNDACSKDVGLGSLG

SEQ ID NO: 5493 - protein, 1612 aa, Debaryomyces hansenii CBS767
MYDDPESIANMGMPPSTQNRIASDGVIYSNQHMSGYMMHPNRNNEFIPHKDNLDNCIDERKLSLPYPSNDNFGTLLQDETSTPNKQNIQVTTNNSSSPIQSDHKDLKSFSFSEQNDSIQEFQVSPIKEDPPRLSRRAFDGFPRDEVSNENSRSARPYSPAPNSSGSDNSNAIGLIIGGYDYSKSSLELASKDNNNNFHNDRKSNTLIQRDDDPTGQFCLTNNPLQSNEVDINVKVHNRNSSESSTVSNTSTTSTITPSTISKGKRFVRYAMNTQSKSSMTNTSTKWHILNVLKWLDYYGFNSSWQETFRRNEISGNRFLELCNYEVDSMIWKQFSKYLVLDNENNSIERFIELLKGHLSTSEPVDDYNANKEYQMQSHSRKGSNESHLSPVLPNSTAENRKSVPIFHKRKSVSISAAYGSSSLNNNIASSGNQRPVSYVDIGSQKPSKDLQSHHKFFRKSKSSYSDIPQTYTGINNISIAPSNNQNISGHRKSNSRTSLSLNDDFIVDSNKIKYTGAPLLKTSSLQNFPTPNNEAIPATTYGRKSGLFSTLKKYSSDKAVGIVKQVQNTSSSSATKTSGINKSNSKNVVSPVSPVEFRELLLPKAKQNITQSNAEQESTNTTTMDDINTRSIAMSSDETLPSPLMNSSAKVINFNNNTYIDLIKKADLLDNLDEKYLPTLHDSFVDKKMILASKDNKHFTPINLTREEIRNIELIRNRVIQELELIDVGIITFHLTEFNSTEGIALKDDVLLDVIRTDILVKLFVNQELTSDTTTTFSTTSSDSKSFELIGENNDERSYPSTPQYLLQNARDPKVDYWNFKDTNNDKLSSISEINSTRAGRKSPSNPQFSMKLHLPENKKFSQDSKPPSLLINTTQIDNSLPSLSPNSSKLSDSHNSFKILRKEGREIDFDKRRKSPYESKAPKLIPNIYSSSVSNPSKSPISATTIATLKDENVESNHNKLSPSISSGSMDRDKSGSIVAKRIAPPPPLDRKLSVIGSHSLKKASILPSISTLSKTLSYSSRSPSGSERSMGSRKAFNKRKGSTSSKNSFVTDDSFAFRENDVSFDDVPTVQRDNNASSDDEDFFVKPIKNQKSNVNDDDNESDEDFFMKPIRSPDSEAPKETLKRRTLTDPISIKMNVRPPVEEVYRNLEKYFPNTNLDKPIIDDSPVSPVNKHQPSIEASNAIPMRKPTISRTFSNANMSPVHPKLDSGDEILYAENQEPTLSRRRMKTIRVVANEARKKRLERQNSPQAGRSLESSYCNTPNSGNFNSLNRTNTKLWGQKVVEVTSTEIEKGFVSKLKNGKHGEFEEFAWIKGELIGRGSFGAVYLALNVTTGEMLAVKQVIVPNDFQNGSPKVSEGIDALHKEVETMKDLDHLNIVQYLGFEQKKNIYSLFLEYVAGGSIASCMKSFGRFEEPLIKFIIKQVLLGLEYLHSNGILHRDLKADNLLLEIDGTCKISDFGISKKSKDIYVNNAEMSMQGTVFWMAPEVIDSIVADKKQGYSAKVDIWSLGCVVLEMFAGKRPWSNEAVVSAIYKIGKTKLAPPIPDDITHLISDEARSFIGRCFTIDPEERPTARDLLGDPFISNESKFSFETTRLAQMIKDNYKKYNI

SEQ ID NO: 5494 - protein, 757 aa, Burkholderia thailandensis E264
MREFDYLLVGGGIASVTAARTLRGENAPASIAILCGEPVLPYQRPPLSQEFLMGAAQPASIALHDAAFYASQRIDVVLGARAEHLDLAKRIVRASNGGAFRYRKLLIATGASAKVPALPGIGLDGVHVLHTVAQAQALKDATAHARRATVLGGGFLGVEIAATLRALGLQVTLIERAPDVMPTLRAPALASRFEALCKARGIDVLTSREVRRVLGAQRVEAVETSDGGTHPCDLFVAAVGVTPNCGWLDGSGLALGDGIEVDAFLQTADPDVFAAGDVAHFDDPIFGVRRRIEHWDNAVRQGRIVARNMLGYRLPYRDVSIFYGSVFGLSYNLLGYPVGATETIERGSFDDASYTLLYLADDVLRAAFTIDRPAVEIAAMNDAVRLHVNVAEQKSKLSDPNFALDKLPVQTILILQGGGALGAFECGAIKALEQHGVRPDVISAVSIGAFNGAIVASHPKGASKALEAFWRELSISLPLPHGSQWHQAWLSSYVLSCGVPNFLKPQWSQLGFGADQLRAKWTSFFDASSIEKLIARYVDFDSLGMSPTRLLIGAVDVETGEPRIFDSYVDRLSPAHVLASGSLPPGMPWTVVDGRPYWDGGVVSNSPLDLVIARCGQIGGRVFIVDLFSGSKTLPTNIVEVMLRREEIAYMDRVRNDLRLEEYASDFRDLVDGILAHVDAPTANEIRQQPLYIRLMGNRAALDIARITLNRDGRLSFIEDYDFSSDAIAQLQTQGYDAALAALANDRALRRRGRRAA

SEQ ID NO: 5495 - protein, 292 aa, Bifidobacterium longum NCC2705
MMSTKIDGKQIAAEIKTNLAERVNKLKAQGIQPGLGTLLVGEDPGSMKYVAGKHADCQEVGITSVKKELPADASFDDIAAAVRELNEDPACTGFIVQLPLPKGINENAIIDMIDPAKDADGMHPYNLGELVLHVRGDISTPLPCTPRGVLELLDAYDIDLNGKEVCVLGRGITIGRTIGLMLTRNAVNATVTLCHTGTRDVADHMRRADVIVAAMGSAGFVTPDKIKDGAVLVDVGVSRVYDEEAGRYRIKGDVDKACYDKASAYTPNPGGVGPMTRAMLLANVVEMAERHA

SEQ ID NO: 5496 - protein, 635 aa, Lycopersicon esculentum
MATQCYDPENSASRYTLLPDQPDSGHRKSLKIISGIFLSVFLLLSVAFFPILNNQSPDLQIDSRSPAPPSRGVSQGVSDKTFRDVAGASHVSYAWSNAMLSWQRTAYHFQPQKNWMNDPNGPLYHKGWYHLFYQYNPDSAIWGNITWGHAVSKDLIHWLYLPFAMVPDQWYDINGVWTGSATILPDGQIMMLYTGDTDDYVQVQNLAYPANLSDPLLLDWVKFKGNPVLVPPPGIGVKDFRDPTTAWTGPQNGQWLLTIGSKIGKTGVALVYETSNFTSFKLLDGVLHAVPGTGMWECVDFYPVSTKKTNGLDTSYNGPGVKHVLKASLDDNKQDHYAIGTYDLGKNKWTPDNPELDCGIGLRLDYGKYYASKTFYDPKKERRVLWGWIGETDSESADLQKGWASVQSIPRTVLYDKKTGTHLLQWPVEEIESLRVGDPTVKQVDLQPGSIELLRVDSAAELDIEASFEVDKVALQGIIEADHVGFSCSTSGGAASRGILGPFGIVIADQTLSELTPVYFYISKGADGRAETHFCADQTRSSEAPGVGKQVYGSSVPVLDGEKHSMRLLVDHSIVESFAQGGRTVITSRIYPTKAVNGAARLFVFNNATGASVTASVKIWSLESANIQSFPLQDL

SEQ ID NO: 5497 - protein, 370 aa, Pyrococcus abyssi GE5
MNYDALIIGGGPVGNYLASLLAGKMSVAVVERKGAFGGKACTGIIGAENYESLGLPDKAILNAFKGAFFISKTKVFEIHRQVPQAYLVDRKVLERELAKRAIKRGADYYLATNFVGFKDGKAILQHLDSRFEIKAKYYVGADGVNSKVAQEIGAKTRGEVLRGWELEVLGNFRREWVEVWVNKDINPEFFFWVAPINEEEARIGTFGDVESLAKFLKVRRINPSNVLEIKSGAVVLGWRSPWVKDNVALVGDAALHIKPTTAGGIVFGSYCARALAKAILNGNLAEYEKNCSWVKEQVKFGLRIRKVFKSLTQKEIEEIFEVLGSEDARKLIIEKADFDDHVKTAKALLRNPRLLARLIRIAPIILRTLL

SEQ ID NO: 5498 - protein, 51 aa, Moringa oleifera
GMSYFHETIWKGVPKFLRRIDTALKNIGINERLPYNAPLIQFSSWMGGDRD

SEQ ID NO: 5499 - protein, 385 aa, Populus tremula
MTIDCIKTMPSITAPHHHPKDQDQCKDDGKSFVFDAQVLRHQTNIPQQFIWPDNEKPNINAPELQVPLVDLGDFLSGNPVAAVEASRLVGEACKKHGFFLVVNHGVDKTLIAHAHNYVDTFFKLPLSEKQKAQRKIGESCGYASSFTGRFSSKLPWKETLSFRYKAEENSPKHIEEYFHNRMGEDFAEFGTVYQDYCEAMSTLSLGIMELLGMSLGVSREHFREFFNENDSIMRLNYYPPCQKPDLTLGTGPHCDPTSLTILHQDQVGGLQVFVDNEWRSINPNFDAFVVNIGDTFMALSNGIYKSCLHRAVVNSQTPRKSLAFFLCPKNDKMVTPPHELVDTCNPRIYPDFTWPMLLEFTQKHYRADMKTLEVFTNWLHQRSLS

SEQ ID NO: 5500 - protein, 462 aa, Ralstonia metallidurans CH34
MAQAPHIASRKLRDIVTSRTLDSFLAGVSRRDPNQPEFFQAVKEVMMTLWPFVERNPRYGDQALLERLVEPERVIQFRVAWTDDRGQVQVNRAFRVQHSSAIGPYKGGMRFHPTVNLSVLKFLGFEQTFKNALTTLPMGGGKGGSDFDPKGKTDAEVMRFCQALITELYRHLGPDTDVPAGDIGVGAREVGFMAGMMKKLSNQSACVFTGKGLAFGGSLMRPEATGYGTVYFAQEMLHRRGREFDGLRVLLSGSGNVAQYAAEKAIELGAKVLTVSDSGGVLHFPEGMNREQLDALMTFKNDTRGRLSDFAEQHGLRFEAGKTPWHVPADVALPCATQNELNGQDAERLLSNGVFCVAEGANMPSTLDAVDRFVAARILYAPGKASNAGGVATSGLEMSQNAMRMAWHHAEIDEKLHAIMKDIHGNCIHYGQKEDGYINYVEGANIAGFVKVADAMLAQGVI

SEQ ID NO: 5501 - protein, 258 aa, Rubrobacter xylanophilus DSM 9941
MDYVRLERDESGIAVLTIDRQEKLNALNPQVTEEIGQTLLDLEREFPRAIIVTGAGDRSFVAGADIEAMSTMPPLEAKRFAEMGHAAMALLDRTPVPTIAAVNGYALGGGCEIALACDLRVAAENAVFGFPEVSLGILPGMGGTQRLPRLVGPAVAKELIFTGRRISAGEAHRIGLVNRVVPRGEALEAAREMAAEIAANAPLAVRHAKAAANRAFDVDLISGLEYEADQFSLLFSTEDAREGMGAFVQKRKAEFRGR

SEQ ID NO: 5502 - protein, 111 aa, uncultured episymbiont of Alvinella pompejana
WTMVAGGGASVVYADTIADFAGIADLANYGEYSGGPTTGETKFYAETILDLMTREKDPQDREKILIIGGAIANFTDVAKTFTGIIQAFEEYADKMKDVGVKIYVRRGGPNY

SEQ ID NO: 5503 - protein, 853 aa, Pseudomonas sp. G-179
MSSPHTWFSNRQLQKRRCRMTAELTRRDVLKAQAAAIAASTAGIAMPAAAQSVPGGVAALEIKWSKAPCRFCGTGCGVMVGVKENHVVATHGDMEAEVNRGLNCVKGYFLSKIMYGKDRLTTPLLRKRNGVFDKEGEFEPVTWEEAFDIMAEKAKKTLKEKGPTALGMFGSGQWTIFEGYAATKLMRAGFRSNNLDPNARHCMASAAYGFMRTFGMDEPMGCYDDFEHADAFVLWGSNMAEMHPILWTRLADRRLGHEHVKVSVLSTFTHRSMDLADIPLVFKPGTDLAILNYIANHIIQTGRVNQEFIDKNTKFMQATTDIGYGLRAEHPLEVKATGAAKAAEMTPIDFEAFKKHVSEYTLEKVAELAGVDKGFLEQLAELYADPKVKVMSLWTMGFNQHVRGVWANQMVYNIHLLTGKISEPGNSPFSLTGQPSACGTAREVGTFAHRLPADMTVTNPEHRKHAEELWNIPHGIIPEKPGYHAVQQDRMLHDGKLNFYWVQVNNNMQAAANNSNEAYIGYRNPDNFIVVSDAYPTVTAMTADLILPAAMWVEKEGAYGNAERRTHVWHQLVNAPGEARSDLWQLVEFSKRFTTDEVWPQDILDQNPEYKGKTLYDVLFQNGNVDKFPVSEISSDYENREAKAFGFYLQKGLFEEYASFGRGHGHDLGPYDLYHQVRGLRWPVVNNQETKWRYREGYDPYVKEGEGVKFYGQNDGRAVILAAPYEPPAESPDDEFGFWLVTGRVLEHWHSGSMTMRVPELYKAFPGARCFMNGDDARRLGINQGGQVKIQSRRGEIISRVDIRGRNRMPHGVIFVPWFDASQLINKVTLDATDPISKQTDFKKCAVKILPVA

SEQ ID NO: 5504 - protein, 135 aa, Sulfolobus acidocaldarius
MGIQMSIQYTTVGDLKVGSYVMIDGEPCRVVEITKAKTGKHGSAKANVVAIGLFTGQKRSLMAPVDQQVEVPIIEKHVGQILADKGDNLTIMDLESYETFDLEKPTENEIVSKIRPGAEIEYWSVMGRRKIVRVK

SEQ ID NO: 5505 - protein, 484 aa, Burkholderia sp. 383
MNAIAASTDVREIRREALRIDGERIHRDAVIEVRNPYDGSLVGTVPKATLDDVRRAFAVARAYRPTLTRHDRSAILRRAADIVRARTAEIAGLITAESGLCVKDSTYEAGRVADVLTFGAGEVLKDDGQIFSCDLTPHGKKRRVYTQRDPLLGVISAITPFNHPMNQVAHKIVPSVATNNRMVVKPSEKVPLSCYLFADILYEAGLPPQMLQVLTGDPKEIADELITNPAIDLITFTGGVSIGKSIASRMGYRRAVLELGGNDPIIVMEDADLDEASTLAVSGSYKNSGQRCTAIKRMLVHESVADRFTELVVEKTRAWSYGNPADPSVDMGTVIDEAAAKFCEQQVNDAIARGARLLVGNVRNGALYSPTVIDRVTPDMPLVKYETFGPVSPIMRFSDIDEAIRMSNSTDYALSSSVCTNRFDSITRFITELEVGSVNVREVPGYRLELTPFGGVKDSGLGYKEGVQEAMKSFTNTKTYSLPW

SEQ ID NO: 5506 - protein, 117 aa, Gossypium barbadense
IPSLIRLTCCGVGGLLLLSGLIVLTCIDQDDARHNFGHTGGFICPFVPLLPIVCILINVYLLINLGAATWARVSVWLLIGVVVYVFYGRSHSSLLDAVYVPAAHADEIYRSSGDSLA

SEQ ID NO: 5507 - protein, 111 aa, uncultured episymbiont of Alvinella pompejana
WTMVAGGGASVVYADTIADFAGIADLANYGEYSGGPTTGETKFYAETILDLMTREKDPQGREKILIIGGAIANFTDVAKTFTGIIQAFEEYADKMKDVGVKIYVRRGGPNY

SEQ ID NO: 5508 - protein, 95 aa, Shewanella violacea
MHINLTGHHIEITTSLRHYVEEKFTKLERHFDQINNVHVILNVQKMQQKAEAKLHLAGGEVFAMSENADMYAAIDSLIDKLDRQVIKHKEKLTKH

SEQ ID NO: 5509 - protein, 312 aa, Ananas comosus
MAEYGRVYKDNDEKMRRFQIFKNNVNHIETFNNRNGNSYTLGINKFTDMTNNEFVAQYTGGISRPLNIEKEPVVSFDDVNISAVGQSIDWRDYGAVTEVKDQNPCGSCWAFSAIATVEGIYKIVTGYLVSLSEQEVLDCAVSNGCDGGFVDNAYDFIISNNGVASEADYPYQAYQGDCAANSWPNSAYITGYSYVRSNDESSMKYAVWNQPIAAAIDASGDNFQYYNGGVFSGPCGTSLNHAITIIGYGQDSSGTQYWIVKNSWGSSWGERGYIRMARGVSSSGLCGIAMDPLYPTLQSGANVAVIKMVSKT

SEQ ID NO: 5510 - protein, 266 aa, Solanum tuberosum
EFQICEEIGRGRFGTVYRCFSPATGESFACKSIDKNLLIDSTDRECLDKEPKILQLLSGNPNILHLYKVYEDDDFLHMVTDFCPNSDLYERVSSGSLSESAAAAILTQLVSAISYCHHMGVAHRDIKPDNVLFDSENRLKLADFGSAEWFAGCEGRMMSGVVGTPYYVAPEVLMGKEYNEKVDVWSARVILYIMLSGVPPFYGETPTETFQAVLRGNLRFPTRNFRSVSSEAKDLLRKIICKDVSRRFSAEQVLRHPWVINGGETR

SEQ ID NO: 5511 - protein, 110 aa, uncultured episymbiont of Alvinella pompejana
WTMVAGGGASVVYADTIADFAGIADLANYGEYSGGPTTGETKFYAETILDLMTREKDPQGRKKILIIGGAIANFTDVAKTFTGIIQAFEEYADKMKDVGVKIYVRRGGPN

SEQ ID NO: 5512 - protein, 93 aa, Arabidopsis thaliana
  misc_feature (12)..(12): Xaa can be any naturally occurring amino acid
  misc_feature (26)..(26): Xaa can be any naturally occurring amino acid
  misc_feature (71)..(71): Xaa can be any naturally occurring amino acid
  misc_feature (82)..(82): Xaa can be any naturally occurring amino acid
MAVSFLTKKVVXKGGAKFIRARGDRXITVKESWRRPKGIDSPVRKKFKGVTLIPNVGYGSDKKTPPFLPNXLKKLFVTTTFXLQLLINHNKTY

SEQ ID NO: 5513 - protein, 111 aa, uncultured episymbiont of Alvinella pompejana
WTMVAGGGASVVYANTIADLAGIEDLANYGEYSGGPTTAETRFYAETILDLMTREKDPQGRDKILIIGGAIANFTDVAKTFTGIIQAFEEYADKMKDTGVRIYVRRGGPNY

SEQ ID NO: 5514 - protein, 220 aa, Zea mays
  misc_feature (106)..(106): Xaa can be any naturally occurring amino acid
  misc_feature (138)..(138): Xaa can be any naturally occurring amino acid
MEALYLLASLAATLVTSAFHSLLLLLRLLLRYPRRAAPTDDGPAAAARLYEGRVRHARRRPAAHTFEYPARYALVDLDRLPLPGHLSADDARRVASTSGPVTGARXELRTCIAEVTNTPWAERVMFTFQPGSDLIAKXLHVSPFMDMLSNWSIRADAPGDRLYVVISVQHPTLGDYFTAVLDAKLVGQTSNSLRLATFFWLMPHKVAGWIYWEVRVLCVM

SEQ ID NO: 5515 - protein, 964 aa, Brassica juncea
MPHGKLEKMASMDVHLRQLVPGKVSEDDKLVEYDALLLDRFLDILQELHGEDLRETVQELYEHSAEYEGKHEPKKLEELGNVLTSLDPGDSIVIAKAFSHMLNLANLAEEVQIAYRRRIKKLKKGDFVDESSATTESDLEETFKKLVGDLNKSPEEIFDALKNQTVDLVLTAHPTQSVRRSLLQKHGRIRDCLAQLYAKDITPDDKQELDEALQREIQAAFRTDEIKRTPPTPQDEMRAGMSYFHETIWKGVPKFLRRVDTALKNIGIEERVPYNAPLIQFSSWMGGDRDGNPRVTPEVTRDVCLLARMMAATMYFNQIEDLMFELSMWRCNDELRVRADELHVNRRKDAAKHYIEFWKSIPPTEPYRVVLGDVRDKLYHTRERARQLLSNGTSDVPEEATFNNLEEFLEPLELCYRSLCSCGDRPIADGSLLDFLRQVSTFGLSLVRLDIRQESDRHTDVLDAITTHLEIGSYREWSEERRQEWLLSELSGKRPLFGSDLPKTEEIADVLDTFHVIAELPSDSFGAYIISMATAPSDVLAVELLQRECHVKRPLRVVPLFEKLADLEAAPAAVARLFSVDWYKNRINGKQEVMIGYSDSGKDAGRLSAAWQLYKAQEELVKVAKEYGVKLTMFHGRGGTVGRRGGPTHLAILSQPPDTINGSLRVTVQGEVIEQSFGEEHLCFRTLQRFTAATLEHGMRPPVSPKPEWRELLDEMAVVATEEYRSVVFQEPRFVEYFRLATPELEYGRMNIGSRPSKRKPSGGIESLRAIPWIFAWTQTRFHLPVWLGFGAAIRHVVEKDVKNLHMLQDMYQHWPFFRITIDLIEMVFAKGDPGIAALYDKLLVSEELWPFGEKLRANFEETKKLVLQTAGHKDLLEGDPYLKQRLRLRNSYITTLNVCQAYTLKRIRDPSYNVTLRPHISKEIAESSKELIELNPTSEYAPGLEDTLILTMKGVAAGLQNTG

SEQ ID NO: 5516 - protein, 229 aa, Glycine max
IRLEATPASITNVTVEFLQFPAVVTPPASTKSYFLGGAGVRGLNIEEEFVKFTGIGVYLEDKAVSSLGAKWKGKSAAELLDSLDFYRDIIKGPFEKLIRGSKLRTLDGREYVRKVSENCVAHMESVGTYSEAEEKAIEEFRNAFKDQNFPPGSTVFYKQSPTGTLGLSFSKDETIPEHEHAVIDNKPLSEAVLETMIGEIPVSPALKESLATRFHQFFKELEANPNNEN

SEQ ID NO: 5517 - protein, 2094 aa, Arabidopsis thaliana
MFAVENGLQGDPRLKAISDAIRVIPHFPKTGIMFQDITTLLLDPVAFKHVVDIFVDRYKHMNISLVAGVEARGFIFGPPIALAIGAKFVPLRKPGKLPGRVISEEYELEYGRDCLEMSVEAVKSEERALIIDDLVATGGTLSASINLLERAGAEVVECACVVGLPKFKGQCKLKGKPLYVLVEPNQAMSAVYCGTKRSYFDDNSSPPSSKRFRCFSPSNSPIWSSPPSSSLDQLHSAFPHIELTAFVDLKLRICLRYLSSSSSSPPVLVKALEDNGSDFNAAMKSLYSFASSEEKKAEELAAGGAATQETDAVCGGNPPTSGDDWVELLVREVLQSSGTDDAKVRAARVLEALEKMLSARAREEAGNKFQEEKVAVQQQVETLVKDNTVLKRAVAIQHERQKALEDANHQLGLLKQLVPQYQEKLRNLEVNNYALRMQLQQVEHGNSMPARFNPDPKTLLESSSSSLNNARCQASPRPLGSLRSSFDSILSLMAALASPSLIPSSLCFAAAADGPRSLSSNFSAFSDGGSNFRYHKSFLSLSSSSSSSTPYRNRRGRSLVVFATSGDYYATLGVSKSANNKEIKAAYRRLARQYHPDVNKEPGATEKFKEISAAYEVLSDEQKRALYDQYGEAGVKSTVGGASGPYTLSLTFTSSYISNQSNPFDLFETFFGASMGGFPGMDQADFGRTRRSRVTKGEDLRYDITLELSEAIFGSEKEFDLTHLETCEACAGTGAKAGSKMRICSTCGGRGQVMRTEQTPFGMFSQVSICPNCGGDGEVISENCRKCSGEGRVRIKKSIKVKIPPGVSAGSILRVAGEGDSGPRGGPPGDLYVYLDVEDVRGIERDGINLLSTLSISYLDAILGAVVKVKTVEGDTELQIPPGTQPGDVLVLAKKGVPKLNRPSIRGDHLFTVKVSVPNQISAGERELLEELASLKDTSSNRSRTRAKPQQPSTLSTAPSGSENKKDEVKEENEEPEQENYLWNNIKEFAGSPEFSSPIRQLSPPGSYGHGLFFPAKDMDTNSLMLIDNNGSFEIDDQSHVHVDASHTLEPVTLPTKRRRKKSDVWNHFTVETVSPGSAKACCNHCRKSFAYINGQKLAGTSHLKRHIQLGICPMNRDDSSTLAQIVTPTTTTDPPKKRHRSSASYTPLDQDRCYNQMAKMIIMHDYPLHMVEHSGFTGFVQALCPQFTMASFNTIHADCVNMYLSEKHKLSNFITDIPGRVNLTVDLWTSNQSLGYAFVTGHFIDRDWKLTHRLLNVAVVPSPDSDFALNQPIAACLSDWNLERRLSSITVGQSVVNKTSIENLRCCLSARNQNVLNGQLLLGNCYARLLSSMAQDLLGAEDFKTPIKKVRDSVKYVKTKDSCQERFDELKKQLQTPSTKDLLIDNQTKWDTSYDMLLAACEHKEVFSCLGNCDLDYKILTSPEEWRKIEILCSSLKILFDAANVLTGSTRLTANDLFHEMTKLQLDLGNSATSEDQDVSNLANTLKDKFDEYWRECFLLMAVAVVMDPRFKMKLIEFSFSKAYGEDADKWIRSVDDAVHELYHDYAEQSHSLLDAYVVHGNDGFSETDMSQVHFHHEYHNSNGLSHDQIFEQPEDGNPLNEKPLEGLSGEGQPTGTESVGGNTTQGVEQEGHLGDAGTQENNIVEGQLEESKPMDGLTQKPLLTEENLQSNGEPTTAQESRLTDETMEETHANQSAEEMAHETQLVEEFPCESQPSENVPLQSQSGEGNVPETLPMEEIVEDTQPVEEVMQEETSQVSRPVEEIPLENQQVDDKDITHDVQPVEEMLEDTQPVEGVDHEAQELEVHDDIQSVEEVGHEIQPEGELLEDTQPVEEGAQEAQLVEENHDDVQLVEEAGHETHAVEGILEDTQPVEEVAQEARPVEQIPENSQNPQEYSREGESVQEEQQSEQHPQSHAMPHEEEAQHDSQSHAMPQEEATFTISQEGHHVDVLLQEGHHLEASSQEFPLITIGDGFSDFELYISEVGSHQQMKSELDQYLEESLIPRSQDFEVLGWWSLNRTKYPTLSKMAADVLSVPFCTVSPDSVFDTEVKKMDNYRSSLRHVTLEALFCAKDWFKHSSSNSTSENNLKMES

SEQ ID NO: 5518 - protein, 422 aa, Aegilops speltoides
MDKLKGSARLMIVSDLDHTMVDHHDEENLSLLRFGALWESVYCQDSLLVFSTGRSPTLYKELRKEKPMLTPDITILSVGSEITYGEAMVPDHGWEEYLNNKWDRNIVLEETAKFSELKLQVETEQRPHKVSFLVDKKNAQGVIKSLSETFEKRGVDAKIIYSGGQDLDILAQGAGKGQALAYLLKKLGSCGKTPNNTLACGDSGNDAELFSIPGVHGVMVSNAQEELLQWHAENAKDNSKIIHATERCAAGIIQAIGHFKLGPNVSPRDVEFPYIKEDPFKPTAAIVKFYVLYEKWRRADVPKADSVIQYFKNITDANGVIIHPSGVELSIHSSIDELASCYGDKQGKKYRSWVDRLVILQTASDSWLVRFDLWEAEGAAWVCCFTTLALTVKPESPGGFVVTHIHKTWRKEYPGVEQSSKL

SEQ ID NO: 5519 - protein, 69 aa, Arabidopsis thaliana
  misc_feature (29)..(29): Xaa can be any naturally occurring amino acid
  misc_feature (33)..(33): Xaa can be any naturally occurring amino acid
  misc_feature (36)..(36): Xaa can be any naturally occurring amino acid
  misc_feature (47)..(51): Xaa can be any naturally occurring amino acid
  misc_feature (54)..(54): Xaa can be any naturally occurring amino acid
  misc_feature (57)..(57): Xaa can be any naturally occurring amino acid
  misc_feature (66)..(66): Xaa can be any naturally occurring amino acid
MASSMLSSATMVASPAQATMVAPFNGLKXSAAXPAXRKANNDITCIXXXXXRVXCMXGWPAIGKKXGRL

SEQ ID NO: 5520 - protein, 491 aa, Robiginitalea biformata HTCC2501
MGKNLTTRSEDYSKWYNELVVKADLAENSGVRGCMVIKPYGYAIWEKMQAALDKMFKDTGHQNAYFPIFIPKSYLSKEASHVEGFAKECAVVTHYRLKNAEDGSGIVVDPEARLEEELIVRPTSETIIWDTYRRWIQSYRDLPLLINQWANVVRWEMRTRLFLRTAEFLWQEGHTAHATEAEAIAEAETILDVYATFAEEHMAVPVIKGTKTAGERFAGAVETYCIEALMQDGKALQAGTSHFLGQNFAKAFDVKFDNTEGQQEYVWATSWGVSTRLMGALIMTHSDDNGLVLPPKLAPIQVVIVPIYRGQEQLEAISAVVNPLAARLRDRGISVKYDDRDTHKPGFKFNEYELKGVPVRLGVGPRDLANGTFEVARRDTLEKQVVPAEGIEEYIGNLLGEMQDAIYQRAKDFRDAGITEVDTYEEFREVIATTGGFVSAHWDGTDETEERIKEETKATIRCIPLDPKPDPGNCIRTGKPSPYRVLFAKAY

SEQ ID NO: 5521 - protein, 150 aa, Brassica napus
  misc_feature (27)..(27): Xaa can be any naturally occurring amino acid
ALDGSPFELIQRGPTPEPFCQVMLRLXLDGAIKFYEKALGMRLLRRIEKPESKYTIAMMGYNESVVLELAYKYGVAEYKKANAYAQIAIGTDDVYKTGEVVKIVNKELGGNITREPGPLPGIGTKIVSFLDPDGWKTVMVANKAFMKELA

SEQ ID NO: 5522 - protein, 575 aa, Lactococcus lactis subsp. lactis
MKKIKLEKPTSGSQLVLQTLKELGVEIIFGYPGGAMLPLYDAIHNFEGIQHILARHEQGATHEAEGYAKSSGKVGVVVVTSGPGATNAVTGIADAYLDSVPLLVFTGQVGPLSIGKDAFQEADTVGITAPITKYNYQIRETADIPRIVTEAYYLARTGRPGPVEIDLPKDVSTLEVTEINDPSLNLPHYHESEKATDEQLQELLTELSVSKKPVIIAGGGINYSGSVDIFRAFVEKYQIPVVSTLLGLGTLPISHELQLGMAGMHGSYAANMALVEADYIINLGSRFDDRVVSNPAKVAKNAVVAHIDIDAAELGKIVKTDIPILSDLKAALSRLLQLNKVRTDFNDWIKTVTKNKEKAPFTYEPQNHDIRPQETIKLIGEYTQGDAIIVTDVGQHQMWVAQYYPYKNARQLITSGGMGTMGFGIPAAIGAKLAQPNKNVIVFVGDGGFQMTNQELALLNGYGIAIKVVLINNHSLGMVRQWQESFYEERRSQSVFDVEPNFQLLAEAYGIKHVKLDNPKTLADDLKIITEDEPMLIEVLISKSEHVLPMIPAGLHSDEMIGLHFTDENEEVDNA

SEQ ID NO: 5523 - protein, 1274 aa, Anabaena variabilis ATCC 29413
MFNCTTSLTQSELKSAIIRDPLIIKPETTVMDAIAQMSAVRAICDTDKLDEVHLEARSSCVLIVEAGRLLGIFTERDVVRLCSQRRCLENLAIREVMIHPVVSLHESEFTDLFFAVNLLQQYRIRHIPILDEEERVVGLLTNESLRQTSRSVDLLRLRLVSEVMTCEVICAAPDSSMLAIAQLLTENRVSSVMIVQLCECPANPQKIPVGIVTERDIVQFQALGLNLETCQVQTVMSTPIFAVRPDYSLRFVQQIMEQRLIRRLAVTGEQGELLGIVTQSSLLQALNPLEVYKLAQMLEERVVRLETEKVQLLENRTVELEQQVADRTASLKAKAGREQILSDISRQIRSSLSLQTILDTTVEQVRQLLGCDRVNIWHFEAEWESIVMAESTTSSRSLLGKRIQEICFQQRCAELYRYGRIRIVPDIYTTEMTDCHRELLIRLQTRAKILVPLLCGDELWGLLNVTESQHAREWQTEEIELLQGLSVHLAIAIQQATTHQKLQEQLIALQEGSDRLQESEQRYIALNQNLEAKVEERTAELQAREAQLQKISERLALSLKSAAIGCWDWDIGENTIFWDERMYELYGVTKTTDSRLVYDTWANGLHPDDRTNTEILVQQAVLGQAEYDTEFRVIHPDGSIHFIKAYGVVVRDAEGNPQKMIGVHFDISDRKKAEEIIRQQAEREKLLREITQRIRQSLDLQTIFDIACQDIRQVIQADRVGIFKFYPESNFNDGEFVAESVVDEFPSVIAIRVHDQCFGENYSSLYALGRSYVVDDIYNSDMTTCHTDILAQFHVRANVIMPLLCGAELWGLLCIHQCATTRHWEQSEIDFTQQLATQLAIAIQQASLVEQLQQELAERQQAELKLTQSNQQLAISNQELARATRLKDEFLANMSHELRTPLNAILGMTEGLQEGVFGMINDKQFKALETIERSSSHLLDLINDILDVAKIEAGQIKLDCTAISVAALCQSSLVFIKQQALQKRIQVEIKIPLNLPDLFVDERRIRQVLINLLNNAVKFTPETGRISLEVTQVSPDISTVQNFLQIAVIDTGIGIMQENINKLFQPFIQIDSALNRQYEGTGLGLALVKKIVELHGGRVGLTSELGVGSCFTIELPCTPSTPSSPELIRDLLTTPNSELDFANAEEAASLAPVILLAEDNEANIKTFSSYLSAKGYGILLATNGEQALELATIHQPDLILMDIQMPGIDGLEAIRQIRLDPELVNIPIVALTALAMTGDRDRCLQAGANDYLTKPVKLKQLATTIQQLLMETKK

SEQ ID NO: 5524 - protein, 385 aa, Populus tremula
MAIDCIKTMPSITTPHHHPKDQDQCKDDGKSFVFDAQVLRHQTNIPQQFIWPDNEKPNINAPELQVPLVDLGDFLSGNPVAAVEASRLVGEACKKHGFFLVVNHGVDKTLIAHAHNYVDTFFKLPLSEKQKAQRKIGESCGHASSFTGRFSSKLPWKETLSFRYKAEENSSKHIEEYFHNRMGEDFAEFGTVYQDYCEAMSTLSLGIMELLGMSLGVSREHFREFFNENDSIMRLNYYPPCQKPDLTLGTGPHCDPTSLTILHQDQVGGLQVFVDNEWRSINPNFDAFVVNIGDTFMALSNGIYKSCLHRAVVNSQTPRKSLAFFLCPKNDKMVTPPHELVDTCNPRIYPDFTWPMLLEFTQKHYRADMKTLEVFTNWLHQRSLS

SEQ ID NO: 5525 - protein, 326 aa, Oryza sativa (japonica cultivar-group)
MARAAVSTAPLSRVHSPPPLIPRHPHSHSRVGLLHPQRKALTTAAALPPAADLPPLSLPAAAAAAAALAAAVSLSDPERRRRAQAEAAGGGDKEAVRAYFNSTGFERWRKIYGSATDGVNRVQLDIREGHARTVAATLSMLRDSPVPLAGATVCDAGCGTGSLAIPLASQGASVLASDISAAMVSEAQRQAEAAAMAASDTFRMPRFEVRDLESLEGKYDIVVCLDVLIHYPREEAKQMIRHLASLAEKRVLISFAPRTLYFDFLKRVGELFPGPSKATRAYLHSERDIEDALRDAGWRVANRGFISTQFYFAKLFEAVPIAAASQ

SEQ ID NO: 5526 - protein, 392 aa, Archaeoglobus fulgidus
MKSIVSKAQQYLEQERNSRFSEEIKDFETPKIVVVGCGGSGNNTVHRLSNMNVSSAMTIAINTDKQQLLRTKADKRVLIGRSITRGLGAGGYPEIGRKAAELARNVLEDLLCDSDMVFVCAGMGGGTGTGSAPVVADVAKKQGAIVIGFAQMPFRVERARIQKALDGLEEMKEVCDTVVVLDNNKLLDYYPNLPIDAAFSVMDQLIAETIKGISDTITIPSLVNIDFADVKAIMGHGGVAVMLVGEAKAQDKANAVVRDCLSHPLLDVDYRGATGSLVHISGGHDLTLKEAEEIIRNLTFEIDDYANVIWGARIDKEFEGFVRVVSIMTGIKDRDFVGSLSYENVLQKQKLRDIRVESRNNGEKLRKQQSFSEPVKFRREKQKVSIPIIDRL

SEQ ID NO: 5527 - protein, 220 aa, Desulfotalea psychrophila LSv54
MAEKSSLKGAIIQRDKQSYAIVPRIPAGVISPEQLRKLADVVEKHNIPIVKVTSGQRLALVGMKEEQIDEIYSDLGFEPGKATELCLHYVQACPGTTLCKFGVQDALGFGQHIEELLAGRDFPAKLKVGVSGCPFTCAEGSVRDIGITGKKSGWSLFFGGHSGRQARISDLIAEDLNDEALLALMEKCVQYYLDNSKKRERTARFIERIGIEEFKKQVLA

SEQ ID NO: 5528 - protein, 893 aa, Oryza sativa
MVIPGPFFRRSTALQVFSVLCVLRFVVPDPDIEWPLIHGIPACPPFTCGHLSKVASPFHRRGYECGVASYELTCTDDKATIQIDNGTYFVTGIDYSDSTFWVVDANISDSRNNCPLPRWKRIPYYYDDVSSDDEESSPYNIQVELDPASRWWSFFVNCSKEINNNVMYSPVACMGTSSSFVYVLTGRLSCYIENLEPSCGYLAMTPLDGMGRVAPAVDSLSYEDVVKFMRKGFRVQFPFRHHRNRSFKDCLMESIPKSTGIGKLSDWFSLSVTENFMDCATAKIPSPYNILLGIILYALMFWTMLALEKFLRMQQMLGPTRYAYTDIIAITGHFREKLGQGGYGSVYKGVLLPGDLHVAIKILNGYSNCNGEEFISEVATIGRIHHVNVVRLVGFCSEEMRRALVYEYMPRGSLDKHIFSSERRFSWDKLNEIALGIARGINYLHQGCDMQILHFDIKPHNILLDDNFVPKVADFGLAKLYPRDKSFVSDRALRGTVGYMAPEMVSRSFGIISGKSDVYSFGMLLLEMVGGRRNADPNADSSASKAYYPSWVYDKLIADQQVDEISNFANMHELERKLCLVGLWCIQMKSHDRPTMSEAIEMLEGGVDALQVPLRPFFCDGDGMPPPQVMDSYFHSSDLSAISEEDDGIAELASQLDEIASLAPCRTEAVRKGTCRTAPVRKGTCRTAPVRKGTCRTAPVRQHAPVRQYPVELPQFDSTLSNCPSSTVPCRTAPVRQGLRTEEPRAVAAVVIGSLPSSSPWARLRGAVVRRLSGGSGARRRSGEHGCGRRNEGERGNGAAEGASAAAGRAVEREQAADRVAERERAAEQRRASAAASEFGREGEAAGDQETISSSASSPSPAGGASPSIVGHPRGYGGGGGRARPSQLRPPPA

SEQ ID NO: 5529 - protein, 321 aa, Auxenochlorella protothecoides
MWRSWLREAHQSFERLPYESKQDRVVEDISKAIMSIKEAIFGEDEQSSSKEHAQGIASEACRVGLVSDLVTYLTVLDFETRKDVVQIFCAIIRITLEDGGRPGRDYVLAHPDVLSTLFYGYEDPEIALNCGQMFRECIRHEDIAKFVLECNLFEELFEKLNVQSFEVASDAFATFKDLLTRHKQLVAAFLQENYEDFFSQLDKLLTSDNYVTRRQSLKLLGELLLDRVNVKIMMQYVSDVNNLILMMNLLKDSSRSIQFEAFHVFKVFVANPNKTKPVADILVNNKNKLLTYLEDFHNDRDDEQFKEEKAVIIKEISMMHA

SEQ ID NO: 5530 - protein, 484 aa, Burkholderia thailandensis E264
MTPPPLRDHPAYRRETLRWCGQRAARARTLDVFDPYSGRRVGTVPLATVDDVRRAFDYAGAYRPTLSRYERSQILERAAARLVACAEEASTLISLESGLSKQDSRYEIGRVADVFKFASIEALRDDAQSYSCDLTPHGTSRRVFSQRQPLDGVIVAITPFNHPMNQVAHKIAPAIATNNRVIVKPSEKVPLSALYLADVLYEAGLPEPMLQVLTGDPREIADELLTHPSAALITFTGGVAIGKSIAAKAGYRRIVLELGGNDPLIVLDDADLERAATLAAQGSYKNSGQRCTAVKRILVQKRVAPRFTELLVEHTRAWTYGDPFDPTNRMGTVIDEAAAALFEARVDEAVARGARLLTGNARRGALYAPTVLDRVDASMTLVREETFGPVSPIIAFDTIDDAIRISNGTAFGLSSGVCTDRADAIVRFVNELNVGTVNVWEVPGYRLELTPFGGIKDSGLGYKEGVQEAMKSFTNLKTFSLPWA

SEQ ID NO: 5531 - protein, 385 aa, Populus tremula
MAIDCIKTMPSITTPHHHPKDQDQCKDDGKSFVFDAQVLRHQTNIPQQFIWPDNEKPNINAPELQVPLVDLGDFLSGNPVAAVEASRLVGEACKKHGFFLVVNHGVDKTLIAHAHNYVDTFFKLPLSEKQKAQRKIGESCGYASSFTGRFSSKLPWKETLSFRYQAEENSPKHIEEYFHNRMGEDFAEFGTVYQDYCEAMSTLSLGIMELLGMSLGVSREHFREFFNENDSIMRLNYYPPCQKPDLTLGTGPHCDPTSLTILHQDQVGGLQVFVDNEWRSINPNFDAFVVNIGDTFMALSNGIYKSCLHRAVVNSQTPRKSLAFFLCPKNDKMVTPPHELVDTCNPRIYPDFTWPMLLEFTQKHYRADMKTLEVFTNWLHQRSLS

SEQ ID NO: 5532 - protein, 631 aa, Bradyrhizobium japonicum USDA 110
MPDAPRMRPHCGAIPIILKWSTMFEAHFQTFEEPEAGVALTARLAALREELARRKLTGFVIPRADQQQNEYVAPSEERLAWLTGFTGSAGLAVVLTREAALFVDGRYTIQAAKQVDAKAWAVESLIDPPPESWVSAHLKAGDRLGFDPWLHTFAAAERLAAACTRAGAELVAVDSNPVDAVWHDRPQPPLAPVAVHGVQHAGIGEAEKLAQIKSEITKLGADALVLSDSHAVAWTFNIRGADVAHTPLPLSYALVPKDGRPTIFIDHRKLSNLTRDHLEQSADVREPDAMAPTLMALAKSGAAIALDNATAADALSRLIAGAGGKPVRGSDPIALLKAVKNATEIKGTQTAHRRDAVALARFLAFIDREAPSGKLTEIDAVEALETFRRDTGALKDVSFPTISGTGPNGAIVHYRVTRKSNRRIAPGDLLLIDSGAQYEDGTTDVTRTMAVGEPTGEMRDRFTRVLRGHIAIARAIFPDGTNGAQLDTLARQYLWAAGVDFEHGTGHGVGSYLSVHEGPARISKLGTTPLKRGMILSNEPGYYKTDGFGIRIENLELVVAADIKGAEKPMNAFETLTLAPIDRRLIDVAMLTKDELDWLNAYHARVRAEVGPALDEATKAWLDQATAELKA

SEQ ID NO: 5533 - protein, 339 aa, Aspergillus oryzae
MSKILVTGANGFIAAHCISLLLSTNHHVRGTVRSEQKATATQAALTAAGVDITNLELVVISDPTDVTQFAPAVAGCKGILHLASAFSYDATPEEFEEKLLIPALKGTVTVCEAASQYPEVKKVVIMSSFAAVYDASLGPQPGRVYTEKDWCPLTYEEGKNASLVPIAYRASKVIAEKAAWDYVRDHEVSYQLVTLCPGMVFGKMIHPIESLSQLNASNQIVWDVLKGNGIPPTKAPVWIDVEDLARTSLQALTVDLPSHQRFLVTEGSYDTQEIADIVRKELPESQDRIAEGEPGKRIKDTHYSCDSGKVQLMLDVRFKPLKESLVALARQLYALEQAS

SEQ ID NO: 5534 - protein, 412 aa, Colwellia psychrerythraea 34H
MRRVVVTGIGMLSPLANTAEETWQNLLLGKSGIGNIDHFDTTDYPTKFAGLVKDFDAQNYMERKEAKKMDLFIQYGIAAGVQAFKDSGLEVTEQNAPRIGVAIGSGIGGLGLIEQNHNKLIKAEGNPRKLSPFFVPSTIINMIAGHLSIMFGLQGPNIAITTACTSGVHNIGHAARMIAYGDADAVVAGGAEKASTTLGMGGFGAARALSRRNDDPEAASRPWDKDRDGFVLGDGAGVIVVEEYEHAKARGAKIYAELVGFGMSGDAYHMTSPPENGDGAARAMQNAINDAKVDISRIGYINAHGTSTQAGDMAETNAVKTVFGAGAKNVMMGSTKSMTGHLLGAAGAIEAIFSIQALVNKQVPPTINLDNPDEGCDLDYIAGAARDVELEYVLCNSFGFGGTNGSLIFKKI

SEQ ID NO: 5535 - protein, 111 aa, uncultured episymbiont of Alvinella pompejana
WTMVAGGGASVVYADTIADFTGIADLANYGEYSGGPTTGETKFYAETILDLMTREKDPQGREKILIIGGAIANFTDVAKTFTGIIQAFEEYADKMKDVGVKIYVRRGGPNY

SEQ ID NO: 5536 - protein, 111 aa, uncultured episymbiont of Alvinella pompejana
WTMGAGGGASVVYADTIADFAGIADLANYGEYSGGPTTGETKFYAETILDLMTREKDPQGRKKILIIGGAIANFTDVAKTFTGIIQAFEEYADKMKDVGVKIYVRRGGPNY

SEQ ID NO: 5537 - protein, 528 aa, Glycine max
MDAATALMILSAIAAYLIWFTLVTRSLKGPRVWPLLGSLPGLIQHANRMHDWIADNLRACGGTYQTCICALPFLARKQCLVTVTCDPKNLEHILKLRFDNYPKGPTWQSAFHDLLGEGIFNSDGDTWLFQRKTAALEFTTRTLRQAMARWVNRAIKHRFCPILATAQKENQSVDLQDLLLRLTFDNICGLAFGQDPQTLAAGLPDNAFALSFDRATEATLQRFILPEILWKLKRWLRLGMEVSLSRSLKHIDQYLSHIIKNRKLELLNGNGSHHHDDLLSRFMRKKESYSEEFLQHVALNFILAGRDTSSVALSWFFWLCVKNPRVEENILNELCTVLLSTRGDNISTWLNEPLVFDEVDRLVYLKAALSETLRLYPSVPEDSKHVVKDDVLPNGTFVPAGSAVTYSIYSVGRMKFIWGEDCLEFKPERWLSPEGDKIQVQDSYKFVSFNAGPRLCLGKDLAYLQMKSIAAAVLLRHRLAVAPGHRVEQKMSLTLFMKYGLKVNVYPRDLKPVLEKLTTIKSVTVGQK

SEQ ID NO: 5538 - protein, 177 aa, Debaryomyces hansenii CBS767
MSDTETGLPINWAIRVSRTHNKEYYLNQATKESSWEPPFGTDNDKLQKYIAKYKANGNKPVIPEDGKVRASHILVKSNQSRRPKSWKYPDGITRTRDEAILLLKLYQDKILGGEISLQDLASTESDCSSHAQGGDLGFFGKGQMQPSFEEAAFGLNVGEISDIIESDSGIHLIQRTA

SEQ ID NO: 5539 - protein, 111 aa, uncultured episymbiont of Alvinella pompejana
WTMVAGGGASVVYADTIADFAGIADLANYGEYSGGPTTGETKFYAETILDLMTREKDPQDREKILIIGGAIANFTDVAKTFTGIIQAFEEYADKMKDVGVKTYVRRGGPNY

SEQ ID NO: 5540 - protein, 894 aa, Coccidioides immitis RS
MMLGTQNPYTAVLPSIPSAISSTYMTLPGKGQAGSMLNREGVFSSPTESEFSEGCDGFDSVRLWDEKKVADWLHSIRCGQYEAIFKANHFNGDNLLDCDQKILQEMGIKKVGDRVRISVAVKQLRTKSVSSRKKKNRDSFVALDSSRFTPPSAESPRPSTARQQPSNSRQWPRHENGKGSPRAASPLTEHDRGLRPYRYAGASPVESARREQGGSYFSRPSDPSQSSRAAAHMRQAPSIDGLTMGALPPNSPVIRVIYTGGQTKVLNVKHCKTAEEVMLAVLRKLLLPESHFRNYCFYVLDGLDPDPANCRRISDSELLQICDGSGRSERGRLILRKLHAGEPEAEELQRAAQLAMDENQVAHMNALSTTNVRNQIKLQKLTGESWHNIRQPRSPLTATDRHRDDYPKIATAKAGDRQQSTKLRSFFGARPPSEMIIHELTSYFPSHQKEDIEKTMRLSVRRSQRLSRAASRLSVVSNISLASSLKDAPPIPSIADTWLTGAGQQPTRGSRPLSVSRFNLPQASFRDSIASSNLQPLQEESPVEPNRKSYVSFDSASEIAGGESRQGFLDESICLNAPDTGGSLNERLSIIVAEDGEEDDDGLADFLAGNNFSNKNWMKGSLIGEGSFGSVFLALHAITGELMAVKQVELPSATKGTEFDNKKTTMVNALKHEISLLQGLQHPNIVQYLGTSTDDQYLNIFLEYVPGGSIATMLKQYNTFQEPLIRNFVRQILTGLSYLHSRDIIHRDIKGANVLVDNKGQIKISDFGISKRVEASNMLSAGGSARHLHRPSLQGSVYWMAPEVVRQTAHTKKADIWSLGCLVVEMFIGAHPFPDCSQLQAIFAIGNNKARPPPPENASKEATAFLDMTFEIDHEKRPSADDLLNDPFLETMIG

SEQ ID NO: 5541 - protein, 135 aa, Yarrowia lipolytica CLIB122
MSSGGKSGGKAASSSKTSKSRSAKADLTFPVGRVHRLLRKGNYAQRIGAGAPIYLAAVLEYLAVEILELSGNAARDNKKSRIVPRHLQLAIRNDEELNKLLGHVTIAQGGVLPNIHQNLLPRKSAKGAKGASQEL

SEQ ID NO: 5542 - protein, 601 aa, Bradyrhizobium japonicum USDA 110
MTISINVPDIHELKPRITVFGVGGAGGNAVNNMITAGLQGVDFVVANTDAQALTMSKAQRIVQMGTAVTQGLGAGSQPNVGAAAAEEVIDELRDHLSGANMVFVTAGMGGGTGTGAAPVIAKTARDMGILTVGVVTKPFHFEGGRRMRTAEAGINELHKVVDTLLIIPNQNLFRVANEKTTFADAFAMADQVLYSGVACITDLMVKEGLINLDFADVRAVMREMGKAMMGTGEASGDKRALTAAEAAIANPLIDDSSMKGAKGLLISITGGKDLTLFEVDEAATRIREEVDQDANIIVGATFDEALDGLIRVSVVATGIEQAAIARNSQATSAPVANAAPQVQQAPAAPAAAAESRLADLTARLRADNQRLAERAQKLDAQAPVSGFAPAAAAPVAPRPNVERAALAAIAAAVADVPQAPAPMQTYGDVTVRPIAQKPTLFPEPEQAPVAMQEPMTPETFIPPQAERAPMRAPRMPRLEELPMPAQAEIRQARGEVEEETPQKTRLSLLQRLANVGLGRRDEESEPPVAARTAGPAIPPLPERRPQKSVAQQIAATEPVSEYARRPAPQGLDVHGRSAPVAPAPQGDDHLDIPAFLRRQAT

SEQ ID NO: 5543 - protein, 546 aa, Actinobacillus pleuropneumoniae serovar 1 str. 4074
MQNINPTQTAAWSALEQHKADNLNIPQLFAEDANRFDKYHLNFEQQILVDFSKNAINQKTLELLRQLANECGLASATEAMFSGQKINRTENRAVLHTALRNRSNTPVLVDGKDVMPEVNAVLAKMKDFCERIISGSWKGYTGKAITDVINIGIGGSDLGPYMVTEALRPYKNHLNMHFVSNVDGTHIAEVLKKVNPETTLVLVASKTFTTQETMTNALTAREWLLAAEKDESAVAKHFAALSTNAKEVAKFGIDTANMFEFWDWVGGRYSLWSAIGLSIALSLGFENFEALLSGAHAMDNHFRTAPIEKNIPTTLALIGIWNSNFLGAETEALLPYDQYLHRFAAYFQQGNMESNGKFVGRDGSPVTHQTGPIVWGEPGTNGQHAFYQLIHQGTKLIPCDFIAPAQTHNPVGDHHAKLLSNFFAQTEALAFGKSKETVEAEFVAAGKNLADVAEIVPFKVFTGNKPTNSILVQKITPFTLGALIAMYEHKIFVQGVIFNIYSFDQWGVELGKQLANRILPELQNAEKISSHDSSTNGLINQFKAWR

SEQ ID NO: 5544 - protein, 111 aa, uncultured episymbiont of Alvinella pompejana
WTMVAGGGASVVYADTIADFAGIADLANYGEYSGGPTTGETKFYAETILDLMTREKDPQGREKILIIGGAIANFTDVAKTFTGIIQAFEEYADKMKDVGVKIHARRGGPNY

SEQ ID NO: 5545 - protein, 111 aa, uncultured episymbiont of Alvinella pompejana
WTMVAGGGASVVYADTIADFAGIADLANYGEYSGGPTTAETRFYAETILDLTTREKDPLGREKILIIGGAIANFTDVAKTFTGIIQAFEEYADKMKDVGVKIYVRRGGPNY

SEQ ID NO: 5546 - protein, 422 aa, Secale cereale
MDKVKGSARLMIVSDLDHTMVDHHDEENLSLLRFGALWESVYCQDSLLVFSTGRSPTLYKELRKEKPMLTPDITIMSVGSEITYGEAMVPDDGWVEYLNNKWDKNIVLEETAKFSELKLQAETEQRPHKVSFLVDKKNAQGVIKSLSEKFEKRGVDAKIIYSGGQDLDILAQGAGKGQALAYLLKKLGSCGKTPNNTLVCGDSGNDAELFSIPGVHGVMVSNAQEELLQWHAENAKDNPKIIHATERCAAGIIQAVGHFKLGPNVSPRDVEFPYIKEDSFKPTAAIVKFYVLYEKWRRADVPKADSVIEYFKNITDANGVIIHPSGVELPIHSSIGELASCYGDKQGKKYRSWVDRLVILQTASDSWLVRFDLWEAEGAAWACCFTTLALNVKPETPGVFVVTHIHKTWHKEYPGAEQSSKL

SEQ ID NO: 5547 - protein, 167 aa, Triticum aestivum
YATAATDKSIYDYTVKDIDGKDVPLKKFKNKVLLIVNVASQCGLTTANYTELSHIYEKYKTQGFEILAFPCNQFGAQEPGSNTQIKQFACTRFKAEFPIFDKVDVNGPNTAPIYKFLKSSAGGFLGDLVKWNFEKFLVDKNGKVIERYPPTTSPFQIEKDIQKLLAA

SEQ ID NO: 5548 - protein, 437 aa, Zea mays [sequence omitted]

SEQ ID NO: 5549 - protein, 470 aa, Sulfolobus solfataricus P2
MMSLEVIEVRSPSNLKVIGTVKRMSKDEVRGEIEEAYKGFEIISRMPLYKRTAILRKISEILEREQERLARLLAMEAGKPISDSRVEVLRASRLFRQAAEEVGIVLEGKNYRVDAYEYPPGNENRIVLSTREPIGVVTAILPFNFPINSFAHKVAPALAVGNSVVVKPSINTPLAAVEMKKILVEAGLPDSAVRVVTGYSSEIGDEIITHPLVGLITLTGSTQTGLKIASKAISLGKRIIMELGGSDPIIILEDANIERASSIAVRARFEYAGQNCNAGKRIIVRQEVYDKFVKAFNEKAKALKVGEPLDETTDVGPVINKESVENLNSVLEDAKVKGGRVEILNRGPESGSFFPLTMVTNPSLDMLVLKSEVFGPIVPIVSVKSDEEAIRIANSTEYGLQSAIFTNDVNRALKLSRELKFGAVIINDSTRLRWDSLPFGGFKKTGIGREGVRETMLEMTENKLIAITLL

SEQ ID NO: 5550 - protein, 422 aa, Hordeum vulgare subsp. vulgare
MDKVKGSARLMIVSDLDHTMVDHHDEENLSLLRFGALWESVYCQDSLLVFSTGRSPTLYKELRKEKPMLTPDITIMSVGSEITYGEAMVPDDGWEEYLNNKWDKNIVLEETAKFSELKLQPDTEQRPHKVSFLVDKKNAQGVIKSLSDKFEKRGVDAKIIYSGGQDLDILAQGAGKGQALAYLLKKLGSCGKTPNNTLVCGDSGNDAELFSIPGVHGVMVSNAQEELLQWHAENAKDNPKIIHATERCAAGIIQAIGHFKLGPNVTPRDDAFPYVKEDPFKPTAAIVKFYVLYEKWRRADVPKADSVIDYFKNITDANGVIIHPSGVELSIHSSIDELASCYGDKQGKKYRSWVDRLVILQTASDSWLVRFDLWEAEGDAWVCCFTTLALSVKPENPGGFVVTHIHKTWRKEYPGVEQSSKL

SEQ ID NO: 5551 - protein, 252 aa, Helianthus annuus
QYGRETRHTGDYENPIHSTGGQYEQEVLQTDEYGNPVRRTGQTDEYGNPVRRTDEYGNPVHSTTGGTMGDYGSTGLGQGTGTGGTGTGGYGTTGHHGLGTGIGHTTGGTGTDYTSGGRSTGQTGYQGLGTESEFGGKTGTFQNQPSATPVGGVGLSSGTGAGVGGTGTGTGILHRSGSSSSSSSEDDGQGGRRKKKGVMQKIKEKLPGGHRQEEQYQSQTTTTTTGGGAGYGETHEKKGMMEKIKEKLPGHH

SEQ ID NO: 5552 - protein, 470 aa, Vibrio fischeri ES114
MIQFGTGGWRAFIGEEFTKDNVRLVAQALSNIMINEQVQNKGFVIGYDRRFLSDKAGKWFAEVVAANGIKVSFIDKFVPTPIVMFQTKEMGCIYSACITASHNPADYNGVKVFIEGGRDADEIITQKIEQQIAHLTQQDVNALEFEEAVTAGKIEIINPMNAFVDSIIDFIDIESIKKANLRVLIDPMFGVAKNALQTVLINGRCDVDVINDGENPAFGGLMPSPSAATLYRLKHLVAHEGYDIGIGTDGDADRLGIIDEKGNFIHPNEVLILLYYYLLEYKGWKGSVVRNIATTHLLDKVAADHGEKCFEVPVGFKHISSQMEADDSLIGGESSGGLTIRGHIKGKDGVFASSLLVEMISVTGKKLSEMLDEIYAKYGYAYTAEGDCTFKPAEKETLYNKIYVEKQLPEFEYEIEKVSYEDGAKVYFKNGGWVIARFSGTEPLLRIFAEMEDKPTAEKVLNEMKAFLSL

SEQ ID NO: 5553 - protein, 411 aa, Streptococcus suis 89/1591
MTKLNRVVVTGYGLTSPIGNTPEEFWDSLKAGKIGIGKITKFDTSEYSVHNAAELKDFPFDKYFVKKDTNRYDNYSLYALYAAKEAIANAQLDTETVDSDRFGVILSTGIGGILEIEEQVARMNEKGPKRIRPMALPKALPNMAAGNIAMQVGANGVCKCIITACASSNDALGEAFREIKFGFQDVMLAGGAEAAITPFAIGGFQALTAMSTTEDPERASIPFDKDRNGFVMGEGSAVLVLESLEHAEARGATILAEIVGYGNTCDAYHMTSPHPEGLGAIKAMKLAISEAGLEPADIDYINAHGTSTPANEKGESQAIVSVFGKNTPVSSTKSFTGHLLGAAGAVEAAAVIEAMRHSYAPKTAGTTELSEDIEADVIYGQGRDMEIRHAISNTFGFGGHNSVIAFKRWEA

SEQ ID NO: 5554 - protein, 480 aa, Bacillus subtilis subsp. subtilis str. 168
MTAHDQELRRRAYEEVEKKEPIANSDPHRQHFHIMPPVGLLNDPNGVIYWKGSYHVFFQWQPFQTGHGAKFWGHYTTQDVVNWKREEIALAPSDWFDKNGCYSGSAVTKDDRLYLFYTGNVRDQDGNRETYQCLAVSDDGLSFEKKGVVARLPEAILTAHFSRSEVWEHEGTWYMVIGAQTENLKGQAVLFASDNLTEWRFLGPITGAGFNGLDDFGYMWECPDLFSLQGSDVLIVSPQGLEADGFRYQNVYQSGYFVGRLDYNKPELKHGEFTELDQGFDFYAPQTLEDDQGRRILFAWMAVPDQDEGSHPTIDCHWIHCMTLPRQLTLSGQKLIQQPLPELKAMRRNEKKIHINMHGSSGALPVEKPERTEILLEDIHTESGFSISIRGTATFSFHKDEGIVTLERKSFDGKRTEARHCRIKDLHTVHMFLDASSVEIFINNGEEVFSARYFPFPGNHEVTASATGKSEMNVGIWTLM

SEQ ID NO: 5555 - protein, 425 aa, Lycopersicon esculentum
MDRLTSAARLMIVSDLDHTMVDHHDSENLSLLRFNALWEANYRDNSLLVFSTGRSPTLYKELRKEKPMLTPDITIMSVGTEITYGNAMVPDDGWETFLNNKWDRKIVTEETSKFPELSLQSETEQRPHKVSFYVQKEKAQDIMKTLSKRLKERGLDVKIIYSGGMDLDILPQGAGKGQALAYLLKKLKSEGKLPSNTLACGDSGNDAELFSIPDVYGVMVANAQEELLQWHAANAKNNPKVIHASERCAAGIIQAIGHFNLGPSTSPRDVTDLSDCKMDNFVPAYEVVKFYLFFEKWRRGEIEHSEHYLSNLKAVCRPSGTFVHPSGVEKSLQECVTTFGTCHADKHGKQYRVWVDQVLPSQVGSDSWLVSFKKWELSGENRRCCITTVLLSSKNKTVADGLTWTHVHQTWLHDDASSDSASWFF

SEQ ID NO: 5556 - protein, 252 aa, Helianthus annuus
QYGRETRHTGDYENPIHSTGGQYEQEVLQTDEYGNPVRRTGQTDEYGNPVRRTDEYGNPVHSTTGGTMGDYGSTGLGQGTGTGGTGTGGYGTTGHHGLGTGISHTTGGTGTDYTSGGRSTGQTGYQGLGTESEFGGKTGTFQNQPSATPVGGVGLSSGTGAGVGGTGTGTGILHRSGSSSSSSSEDDGQGGRRKKKGVMQKIKEKLPGGHRQEEQYQSQTTTTTTGGGAGYGETHEKKGMMEKIKEKLPGHH

SEQ ID NO: 5557 - protein, 84 aa, Glycine max
MEYQRQRSHQSQGRSRWVPASYFSVESLLLLSCLTASLLILPLLLPPLPPPPFLLLLLPIAILLVLIISAFMPSNVRDITHTYM

SEQ ID NO: 5558 - protein, 205 aa, Lycopersicon esculentum
MDRLTSAARLMIVSDLDYTMIDHHDPENLSLLRFNALWEANYRENSLLVFSTGRSPTLYKELRKEKPMLTPDITIMSVGTEITYGNSMLPDDGWEAFLNDKWDRKIVTEETKKFTELTLQSETEQRPHKVSFYVPKDKAQDIMKTLSKRLEERGVRCDNSKMMACLSCQCCSEQNFDKWRDGFRYFAARCWQRTSTRVFAEEIKE

SEQ ID NO: 5559 - protein, 252 aa, Helianthus annuus
QYGRETRHTGDYESPIHSTGGQYEQEVLQTDEYGNPVRRTGQTDEYGNPVRRTDEYGNPVHSTTGGTMGDYGSTGLGQGTGTGGIGTGGYGTTGHHGLGTGVGHTTGGTGTDYTSGGRSTGQTGYQGLGTESEFGGKTGTFQNQPSATPVGGVGLSSGTGAGVGGTGTGTGILHRSGSSSSSSSEDDGQGGRRKKKGVMQKIKEKLPGGHRQEEQYQSQTTTTTTSGGAGYGETHEKKGMMEKIKEKLPGHH

SEQ ID NO: 5560 - protein, 173 aa, Stellaria longipes
MPSLKEKIHRSGSSSSSLSDDGGSRRRREGLGSPKKKGITEKIKEKFPGRYKNEYEAATPGLVVREITSTRSRTSTLQTRDSEKIKDKLPGSHNNEDVLLQETSTRSRTSILLQESRITPEEKKGVVGNVKDKLSGNRQARTSSSSSSTRTPLFMFHRAVQQAAREERTLRKN

SEQ ID NO: 5561 - protein, 228 aa, Vibrio fischeri ES114
MELSTTVSELRYALDTFFFLMSGALVMWMAAGFAMLEAGLVRSKNTTEILTKNICLYAIACTTYLVVGYNIMYVDNGSGGFLPSIGTLIGTQAEGADHSLESDFFFQVVFVATAMSVVSGAVAERMKLWSFLIFSAILTAFIYPMEGYWTWGGGFLSEAGFSDFAGSGIVHMAGASAALAGVLLLGARKVSTVRKVKYIQFQVQTCLWLHWVLLFYGLVGLVLMVVLS

SEQ ID NO: 5562 - protein, 381 aa, Gibberella zeae PH-1
MLAIRALRTPASRQALRTAAPRAAIFYNRCYSTSGDRVAKYNGTKDAKGNFLVSLIEGDGIGPEIAQSVKDIFAAAKTPIAWEPVDVTPIIKDGKTAIPDAAIDNIKKNKIALKGPLATPIGKGHVSLNLTLRRTFNLFANLRPCRSVAGYETPYDNVNTVLIRENTEGEYSGIEHVVVDGVVQSIKLITREASERVLRFAFQHAESIGRKKVRVVHKATIMKLSDGLFLKVAQEVAKDFPGIEFDAELLDNSCLKMVTDPTPYNDKVLVMPNLYGDILSDMCAGLIGGLGLTPSGNIGDECSIFEAVHGSAPDIAGKNLANPTALLLSSIMMLRHMGLNEHATRIEKAIFDTLAEGKALTGDLGGKAKTNEYAAAIISRL

SEQ ID NO: 5563 - protein, 412 aa, Pseudoalteromonas tunicata D2
MAKRRVVVTGLGMLTPLGNDVTSTWQGLLNGKSGIDLITHFDTSDFGTKFAGTLKNFDASLYMAPKDTKKMDLFIQYGIAAGVQAFKDSGLEVTEQNATRIGVAVGSGIGGLTLIEENHIKLLNSGPRKLSPFYVPSTIINMISGHLSIMHGLRGPNISIVTACTTGLHNIGHAARMIAYGDADAMVAGGAEKASTPIGMGGFCAARALSTRNDNPQAASRPWDRDRDGFVLADGAGVIVLEEYEHAKARGAKIYAELVGFGMSGDAYHMTSPPEDGSGAALAMVNALNDAHVNAEQVGYINAHGTSTNAGDKAETAAVKSVFGHNAHNVMVSSSKSMMGHLLGAAGSVESIISILSLQDQKVTPTINLDNPDEGCDLDYVPHTARDAKLEYALCNSFGFGGTNGSLLFKKI

SEQ ID NO: 5564 - protein, 252 aa, Helianthus annuus
QYGRETRHTSDYESPIHSTGGQYEQEVLQTDEYGNPVRRTGQTDEYGNPVRRTDEYGNPVHSTTGGTMGDYGSTGLGQGTGTGGIGTGGYGTTGHHGLGTGAGHTTGGTGTDYTSGGRSTGQTGYQGLGTESEFGGKTGTFQNQPSATPVGGVGLSSGTGAGVGGTGTGTGILHRSGSSSSSSSEDDGQGGRRKKKGVMQKIKEKLPGGHRQEEQYQSQTTTTTTGGGAGYGETHEKKGMMEKIKEKLPGHH

SEQ ID NO: 5565 - protein, 103 aa, Lactobacillus acidophilus NCFM
MVEAINDQNFEEETNSGVALIDFWATWCGPCKMQSPVIEQLAEERQDVKFYKMDVDQNQDTAKNLGIMAIPTLIIKKDGNIVDRITGYTPKEKLNQILDQYAN

SEQ ID NO: 5566 - protein, 341 aa, Xylella fastidiosa Temecula1
MFQDAWFFLWCLRCISSAPKLDCRVCPSSGEPLTLYRSDVSPLIHHHQLIEESLVMSDKSHVFDVTDADFETAVLKRSLETPVLVDFWAPWCAPCRSLIPILEKLVAEYRGGFELAKINVDQEQQVAAALQVRSVPMVYLVKDGQLVDGFPGAKPETQVREFLTKHGILPARSAAFREDTPAIPLDPEAEVERLRQALVAEPENNDLKLDLALALLKTNGADEAAGLIDALPAKLATDDRMLRAKAWLRFIEVLNGAPSLDVLQGACAADASDFDQRHLLGVHLLLDGQCEAALEHFLEMLRQNRDFKDGLPRKALIDAFYLIEDKELVGRYRRKMSALLF

SEQ ID NO: 5567 - protein, 442 aa, Mycobacterium smegmatis
MVDGQDVVADVHDVLDRMGDFTDRLRSGEWTGATGERITTVVNIGIGGSDLGPVMVYDALRHYADAGISARFVSNVDPADLVAKLDGLEPAKTLFIVASKTFSTLETLTNATAARRWLTDALGDAAVAKHSSRCPPTRSWSTKFGINTDNMFGFWDWVGGRYSVDSAIGLSVMAVIGKERFAEFLAGFHIVDEHFRTAPLHQNAPALLGLIGLWYSNFFGAQSRAVLPYSNDLSRFAAYLQQLTMESNGKSVRADGTPVSTDTGEIFWGEPGTNGQHAFYQLLHQGTRLVPADFIGFSQPTDDLPTADGTGSMHDLLMSNFFAQTQVLAFGKTADAIASEGTPADVVPHKVMPGNRPTTSILATKLTPSVVGQLIALYEHQVFTEGVIWGIDSFDQWGVELGKTQAKALLPVLTGDKSPAAQSDTSTDALVRRYRTERGRPA

SEQ ID NO: 5568 - protein, 559 aa, Pseudomonas fluorescens Pf-5
MTMLKDPSSKYRAFPTINLPDRTWPSKTITSAPIWCSSDLRDGNQSLIEPMDAVKKLRFWKTLVAVGVKEIEASFPAASQTDFDFVRTLIEGGHIPDDTTIQVLTQAREDLIARTFESLRGAKKAIVHLYNATSPSFRRIVFNQDKAGVKEIAVNAAKLFVKYAAQQPETQWQFEYSPETFSATELEFAKEVCDAVVEVWNATPSNKVILNLPATVEVATPNIYADQIEWFCRNINRRDSVLISLHTHNDRGTGVAATELGLMAGADRVEGCLFGNGERTGNVDLVTVALNLYTQGVNPELDFSDIDGVRKVVEECNQIAVHPRHPYVGDLVHTAFSGSHQDAIRKGFAQQKADGLWEVPYLPIDPADIGRSYEAVIRVNSQSGKGGIAYLLEQEYGISLPRRMQIEFSQVVQRETDRLGLEMTAQQIHALLHSEYLQANTPYALVSHRLQEENGHSAVEVEVSSKGQGETNLSWRGKGNGALEALVAGLPVPVEIMDYNEHAIGAGTNAKAAAYIELRVNGERAVHGVGIDENITTASFKALFSALNRSLSEQQAKAA

SEQ ID NO: 5569 - protein, 135 aa, Nanoarchaeum equitans Kin4-M
MIFKLIIKPKGMGHYLKIRRKLKRKKPEFLRTNWYRKKAFRNDPKWRWGHGRDNKFRLKMKGKPRPPEPGYRSPRKVRGLLPNGLKPVIIHNVEELTKIKEGEIAVIHHAVGKRKRQQILEKAKELSIPIANPVL

SEQ ID NO: 5570 - protein, 507 aa, Ralstonia eutropha JMP134
MSALPQTANAVPSVPLLINGEWVESSATEFRDVVNPATQEVLARVPLATASEVAAAVDSAHRAFATWRHTPIGARLRIMLRYQALIREHSKRIAAILTAEQGKTLADAEGDIFRGLEVVEHACSIGTLQQGGFAENVAATVDTYTLQQPIGVCAGITPFNFPAMIPLWMFPMAIVCGNTFVLKPSEQDPLSTMELVKLAVEAGVPPGVLNVVHGAKDVVDALCTHPDIKAVSFVGSTAVGTHVYNLAGAHGKRVQSMMGAKNHAVVLPDAHKEQTLNALVGAGFGAAGQRCMATSVVVLVGAAREWVPELVAKAKTLKVGAGAEAGTDVGPVVSVAAKERILGLIASGEKEGAKLVLDGRNVEVPGYAQGNFIGPTVFTDVTTDMSVYTNEIFGPVLVVLGVETLDEAIALVNRNPFGNGTGVFTQSGAAARKFQSEIDVGQVGINIPIPVPVPYFSFTGSRGSKLGDLGPYGKQVVQFYTQTKTVTARWFDDATVNDGVNTTISLK

SEQ ID NO: 5571 - protein, 780 aa, Candida albicans SC5314
MSKNKLSSLGNHGTTTTSSLSSSSSISNNTSIARIIFVFSNILKLVQSIPIGHITHGNVGGDYSTETKRPVLTPEEFYMNLFTSIFLVLAGGVFAGLTLGLMGQDEVYLKVIAHSGDSTERKHAKKVLQLIGRGKHWVLVTLLLSNVITNETLPIVLDRCLGGGWPAVVTSTVSIVIFGEIIPQSICVRYGLQVGSLFAPFVLVLMYIMYPVAYPCAMLLDHILGEDHGTVYKKSGLKTLVTLHKTMGVERLNQDEVTIISAVLDLKEKPVSSIMTPMDRVYTMSADALLDEKTVEEIFNAGFSRIPIHLPNEPTNFIGMLLVRVLISYDPEDALPVASFPLATLPETGLDTSCLNILNYFQEGKSHMIVVSENPGEPTGAVGVLTLEDVIEELIGEEIVDESDVYIDINKNIKRKHPGPLAKRNLTSYLHTLYQRNSSSNPNSKRNSIDSSVYRNANANANGNGGRVSPPLDISERLRQGSESSQISYTTNNNNTKNRKQQDQNEVAGAAAATATAATNWKPKNPASNPLETKKKFVTIKRPDQDKIESMKKITSPKLVPTQVGTIYSTEKGALEEAHRRSLDEREHGPKFLLPMEREGDVSEINQQNYHGENGSHHHIDIPMNGNGNGNGNDNHNQANDSNGSHTGNIDIPIPEYQESRSYKTGGIVESVVNVQGVSKVIIENVTDADDDEDEIALAIENLSSNDNNNKKHKLKKSKKSKKKSKKSPSSTLKSVTTSLNDDDVNDVNDDQTVEQTQSLLHSGNGSRNSSIGSNTSNNK

SEQ ID NO: 5572 - protein, 844 aa, Burkholderia vietnamiensis G4
MARRQRRADLHEPEQPVDRLRRAAVGARHLRQLLLGRDRRRRPRRRSDDERSVLPARRHAARGGVRRRRARGRGHREGQAAPAARLADERHLLFRREGRPGQSRGKRHRRRARLGRPAVTRRIQRGAVRIRVRGRRAAGADAAGRSDVPVDHRLRAAQVRARQRGRERVLRDDGPLSRATRRARLGDRAHGRPRDEREARSGHRPSERGLSAGRVRPLVRRAVRARDPADHRPVRRASRRARLVRDGLPRAGCRPDRRDVAHRRPRRHRARARQRGSRCALRAAGRPDRRSRGGRAPRHGRRHARARARPVRPDRAAALAWRRVRAGSAADLQPPDRAARPGAPSAQLRRFRFRAEPDRVMIVHPRQDHPAFRAEALRWCGTRASRARVFDIDDPYTGTRVGTAPLASVDDVRAAFDYAIAYRPALTRYERSQILERAAALLRARCEEASDLITLESGVSKQDSRYEIGRVADVLKFASAEALRDDAQSFSCDLTPHGKARRVFSQRQPLDGVIVAITPFNHPMNQVAHKIAPAIATNNRVIVKPSEKVPLSAFYLADLLYEAGLPEPMLQVLTGDPREIADELVTHPHAALITFTGGVSIGKAIAARAGYRRIVLELGGNDPLIVLDDADLERAASLAVVGSYRNSGQRCTAVKRILVQRSIAPAFTELLVEKTRAWKYGDPFDVANEMGTVIDAAAARLFEARVEEAVAHGARLLTGNVRRGALYAPTVLDNVDPSMTIVREETFGPVSPVIAFDTIDDAIRISNGTAFGLSSGVCTDSTAAVVRFVNELKVGTVNVWEVPGYRIELSPFGGIKDSGLGYKEGVQEAMKSFTNLKTFSLPWE

SEQ ID NO: 5573 - protein, 256 aa, Ralstonia eutropha JMP134
MIEFSLDGHIARLTLSRPPANAFTAEGLQQLQDLIAKIDANPEVRAVVITGAGDRFFSAGADLNGFAEGDRAHARVMAQRFGSAFEALQNARPLVIAAINGYAMGGGLECALACDVRIAEEQAQMALPEAAVGLLPCGCGTQTLPWLVGEGWAKRMILTNERVDAATALRIGLVEEVVPRGKALDTALAMAERACAVSPRAAAYSKQLVHLSRQGVPRQAAFALERERFVDLFDGEDQREGVNAFLQKRAPQWRNA

SEQ ID NO: 5574 - protein, 474 aa, Oryza sativa
  misc_feature (319)..(319): Xaa can be any naturally occurring amino acid
MTSLPGRGVSPSSSDPLCEGNAAPSSSSSSGQDLKQLKNSILSCVFSSPFSIFEAHQDSSANRSLKPHSGSYAWSRFLRRIACTGSMWRFLGASKALTSSDVWFLGKCYKLSSEELSNSSDCESGNAAFLEDFSSRIWITYRKGFDAISDSKYTSDVNWGCMVRSSQMLVAQALIFHHLGRSWRKPSQKPGSPEYIGILHMFGDSEACAFSIHNLLQAGKSYGLAAGSWVGPYAMCRAWQTLVCTNREHHEAVDGNGNFPMALYVVSGDEDGERGGAPVVCIDVSAQLCCDFNKNQSTWSPILLLGPLVLGLDKLYPRXSPSLKETFTFPQSLGILGGKLGTSTYVAGVQDDRVLYLDPHEVQLAVDIAADNLEADTSSYHCSTVRDLALDLIDPSLAIGFYCRDKDDFDDFCSRASELVDKANGAPLFTVVQSVQPSKQMYNEESSSGDGMDSINVEGLDGSGETGEEEWQIL

SEQ ID NO: 5575 - protein, 902 aa, Burkholderia thailandensis E264
MRARGTVQRRAQGARGGAARARARRERLHALTNGFTNQQRASIMKIVVIGHGMVGHKLLECIAAGAQGALVAPQVAVICEEPRPAYDRVHLSEFFAGKSADDLSLVEPGFFERHPNFRLLLNTKAVAIDRGARTVALSTGETLAYDKLVLATGSTPFVPSVPGRERAGCFVYRTIEDLEAMQACGARAKSGVVVGGGLLGLECAKALRDMGLAAHVVEFAPRLMAVQVDEGGGRMLREKIEALGVQVHTGKNTLEIVDGETGAHRMAFADGTHLDTDMIVFSAGIRPRDEVARACGLEIGPRGGVAIDSHCRTSDADIYAIGECAAWNGQTFGLVAPGYDMARVVAQRLAGGDGAFTGADLSTKLKLMGVDVASIGDAHGKTPGCRTYQFADERRGVYKKLVVSGCGKELLGAVMVGDAADYGTLLQMMLNRIELPAAPEFLILPPADGAAKPALGVDALPDAAQICSCNNVTKAQLCEAVAGGATSIGALKGCTGAGTSCGGCVPLVTQVMKAEMKKQGLAVNNHLCEHFPYSRQELYHLVRVERIKTFGALLGKHGRGLGCDVCKPAVAGILASCWNEFVLKKEHAALQDSNDYYLANIQRDGTYSVVPRMPGGEVTPEGLIAVGQVARKYGLYTKITGGQRVDLFGARVEQLPLIWEALIAAGFESGHAYGKSVRTVKSCVGSTWCRYGVGDSVGLAIELENRYKGLRAPHKLKFGVSGCTRECAEAQGKDIGVIATEKGWNLYVCGNGGMKPRHAELLAADLDRATLIRYVDRFLMFYIRTADRLQRTSVWRDNLEGGLDYLIDVVVHDRLGLAAELEVEMQHVVDTYECEWKRAVTDSATRRRFRHFVNSDAPDSTIAFVEARGQIRPATPDERDAAGPHGVRAVREDEAQTETETA

SEQ ID NO: 5576 - protein, 385 aa, Populus tremula
MAIDCIKTMPSITTPHHHPKDQDQCKDDGKSFVFDAQVLRHQTNIPQQFIWPDNEKPNINAPELQVPLVDLGDFLSGNPVAAVEASRLVGEACKKHGFFLVVNHGVDKTLIAHAHNYVDTFFKLPLSEKQKAQRKIGESCGYASSFTGRFSSKLPWKETLSFRYKAEENSPKHIEEYFHNRMGEDFAEFGTVYQDYCEAMSTLSLGIMELLGMSLGVSREHFREFFNEDDSIMRLNYYPPCQKPDLTLGTGPHCDPTSLTILHQDQVGGLQVFVDNEWRSINPNFDAFVVNIGDTFMALSNGIYKSCLHRAVVNSQTPRKSLAFFLCPKNDKMVTPPHELVDTCNPRIYPDFTWPMLLEFTQKHYRADMKTLEVFTNWLHQRSLS

SEQ ID NO: 5577 - protein, 482 aa, Ehrlichia canis str. Jake
MSIPITVAYGDGIGPEIMEAVLLILSEAESGLVIETIEVGHNLYKKEWSSGIAPSSWDSIFRTKVLLKSPTMTPQGQGHKSLNVTLRKKLGLYANIRPCISYHPVIKTKYPNLNIVIIRENEEDTYTGIEHRLTSDTYQCSKVITRSGSERICNYAFHYATVHNRKKVTCLIKDNIMKMTDGIFHKSFSKIAENYPSITSDHYIVDIGMAKVAANPENFDVIVTTNLYGDIVSDIVAELSGSIGLAGSANIGDNYAMFEAVHGSAPDIAGKNIANPSGLLNAAIQMLIYLKKFDKAELIYNALLKTLEDGMHTADIYQSQVSKGKVSTMGFAKAIIDNFGQSPTQFPKSIFQNSAGESGISYTYKPSYATKVLVGVDLSISCDSADLNLKQLISNIQGVTHDKLELVLIHSKGLEIWPDESSNANLSYMDQICCRFYMKGQSDKIVNEHVNQLLFDMSKKKIDVVKMEKLYLYDNQPGFFTM

SEQ ID NO: 5578 - protein, 385 aa, Populus tremula
MAIDCIKTMPSITTPHHHPKDQDQCKDDGKSFVFDAQVLRHQTNIPQQFIWPDNEKPNINAPELQVPLVDLGDFLSGNPVAAVEASRLVGEACKKHGFFLVVNHGVDKTLIAHAHNYVDTFFKLPLSEKQKAQRKIGESCGYASSFTGRFSSKLPWKETLSFRYKAEENSPKHIEEYFHNRMGEDFAEFGTVYQDYCEAMSTLSLGIMELLGMSLGVSREHFREFFNENDSIMRLNYYPPCQKPDLTLGTGPHCDPTSLTILHQDQVGGLQVFVDNEWRSINPNFDAFVVNIGDTFMALSNGIYKSCLHRAVVNSQTPRKSLAFFLCPKNDKMVTPPHELVDTCNPRIYPDFTWPMLLEFTQKHYRADMKTLEVFTNWLHQRSLS

SEQ ID NO: 5579 - protein, 363 aa, Vanilla planifolia
SDSGKDAGRLSAAWQLYKGQEDLIKVAKKYGVKLTMFHGRGGTVGRGGGPTHLAILSQPPDTIHGSLRVTVQGEVIEQSFGEEHLCFRTLQRFTAATLEHGMHPPISPKPEWRTLLDEMAVVATEEYRSIVFQEPRFVEYGRLATPELEYGRMNIGSRPSKRKPSGGIESLRAIPWIFAWTQTRFHLPVWLGFGTAFKHVSPKDIKNLRILQEMYNEWPFFRVTIDLVEMVFAKGNPGIASLYGKLLVSSELWSFGERLRANYQETKDLLLQVAGHKVFLKESLSEAEVGLRDSYITTLNVCQAYTLKRIRDPNFHVKVRPHISKEISDASKPAAELVKLNPTSEYAPGLEDTLILTMKGIAA

SEQ ID NO: 5580 - protein, 395 aa, Thermococcus kodakarensis KOD1
MTWKYDVVVVGSGIAGPIVARNVAKAGFSVLLIDKKWAIGTPKQCAEAISIKVFDKYDIPYDKRFINREIYGAKLYSPSGYELEMRYKEVSGVILERKVFDKMLAYYAAKAGADVLARTEALDVIRKDGKIVGIKAKHEDEPVEIYADIIVAADGVESTIARKAGINTYAPPHEFDSGYEYEMLIEGFDPDLIHLWFGNEVAPRGYVWVFPKDEDRANVGIGINSDNPKTAKYYLDKWLEENNIPAKKLLEINVGLIPVGGFVKELAKDNVVVVGDAARQVNPMHGGGMAEAMEAGTIASKWIVKALEEENLSLLQNYTKEWWETDGKRLEKVLKVRRVTEKLTDEDLDLFIQILSGADAEKIASGDYAEVIKALLKHPKVLMSKRRLSLLKELL

SEQ ID NO: 5581 - protein, 616 aa, Oryza sativa (indica cultivar-group)
MHRFLVTALLFSLLNYEAVMATESDEADFFRNCPPSRCSSDGPDIKFPFRLESSSSSCGAPGMQLSCSGQDTLLLHHVLGLSKVTGIDYIYGVINIVPLAESWSQCALQKIISANYSTSVYKQYGFQYASLVSCSEEFIWDSTDSIFGPISCLSNASQSLYLVAPYAFVSILPLYCKVVSTEIMIPNTSNQGRKDYNASASTEFNESAKRITTFSEITFTWQLLISLMFASDCERQQRLCGFSSQRRTAFCKPHGSKSPAKVIIVAVSVPTIVVLTLVASALYLSLKTKNDDEIQLKVEMFLKTYGTSKPTRYTFSEVKRITRRFKHKLGTGGFGSVYKGELSKGVPVAVKMLENSKGEGEEFINEVATIGRIHHVNVVRLLGFCSEGTRHALIYEFMPNNSLEKYIFSRDYISSQEVLVPDKMLKIALGIAQGIEYLHQGCSQRILHFDIKPHNILLDHSFSPKISDFGLAKLCARDQSIVTLTAARGTMGYIAPELYSRNFGAVSYKSDVFSFGMLVLEMLSGKRNSDPSINSQNEVFVPEWIYETIVSAQESEFAKDMTQEEKEKLRKLAIVALWCVQWNPANRPSMRKVVNMLTGSLQNLKNPPRPFVSSLS

SEQ ID NO: 5582 - protein, 385 aa, Populus tremula
MAIDCIKTMPSITTPHHHPKDQDQCKDDGKSFVFDAQVLRHQTNIPQQFIWPDNEKPNINAPELQVPLVDLGDFLSGNPVAAVEASRLVGEACKKHGFFLVVNHGVDKTLIAHAHNYVDTFFKLPLSEKQKAQRKIGESCGYASSFTGRFSSKLPWKETLSFRYQAEENSPKHIEEYFHNRMGEDFAEFGTVYQDYCEAMSTLSLGIMELLGMSLGVSREHFREFFNENDSIMRLNYYPPCQKPDLTLGTGPHCDPTSLTILHQDQVGGLQVFVDNEWRSINPNFDAFVVNIGDTFMALSNGIYKSCLHRAVVNSQTPRKSLAFFLCPKNDKMVTPPHELVDTCNPRIYPDFTWPMLLEFTQKHYRADMKTLEVFTNWLHQRSFS

SEQ ID NO: 5583 - protein, 675 aa, Glycine max
MEELSAGPLVPAVVKPEASKGAAVAADTSAAASGGTFPASTSEPDKDFLCPICMQIIKDAFLTACGHSFCYMCIITHLRNKSDCPCCGHYLTNTNLFPNFLLDKLLKKTSARQISKTASPVEHFRQALQKGCDVSIKELDTLLSLLAEKKRKMEQEEAERNMQILLDFLHCLRKQKVDELKEVQTDLQFIKEDINAVEKHRMDLYRARDRYSVKLRMLDDSGGRKSWHSSMDKNNSGLISSPLNLRGGLSSGSHTKKNDGKSQISSHGHGVQRRDAITGSDSQYINQSGLSLVRKKRVHTQFNDLQECYLQKRRHAADRPHSQQVRDISLISREGYTAGLEDFQSVLTTFTRYSRLRVIAELRHGDIFHSANIVSSIEFDCDDDLFATAGVSRRIKVFDFSAVVNEPTDAHCPVVEMSTRSKLSCLSWNKYAKNQIASSDYEGIVTVWDVTTRKSLMEYEEHEKRAWSVDFSRTDPSMLVSGSDDCKVKIWCTNQEASVLNIDMKANICCVKYNPGSGNYIAVGSADHHIHYYDLRNISRPVHVFSGHRKAVSYVKFLSNDELASASTDSTLRLWDVKENLPVRTFKGHANEKNFVGLTVSSEYIACGSETNEVFVYHKEISRPLTCHRFGSPDMDDAEDEAGSYFISAVCWKSDRPTILTANSQGTIKVLVLAA

SEQ ID NO: 5584 - protein, 385 aa, Populus tremula
MAIDCIKTMPSITTPHHHPKDQDQCKDDGKSFVFDAQVLRHQTNIPQQFIWPDHEKPNINAPELQVPLVDLGDFLSGNPVAAVEASRLVGEACKKHGFFLVVNHGVDKTLIAHAHNYVDTFFKLPLSEKQKAQRKIGESCGYASSFTGRFSSKLPWKETLSFRYQAEENSPKHIEEYFHNRMGEDFAEFGTVYQDYCEAMSTLSLGIMELLGMSLGVSREHFREFFNENDSIMRLNYYPPCQKPDLTLGTGPHCDPTSLTILHQDQVGGLQVFVDNEWRSINPNFDAFVVNIGDTFMALSNGIYKSCLHRAVVNSQTPRKSLAFFLCPKNDKMVTPPHELVDTCNPRIYPDFTWPMLLEFTQKHYRADMKTLEVFTNWLHQRSLS

SEQ ID NO: 5585 - protein, 233 aa, Spinacia oleracea
  misc_feature (1)..(1): Xaa can be any naturally occurring amino acid
XVAQTSEWEQEGSTNAVLEGESDPEGAVSWGSETQVSDEGGVEGGQGFSEPPEEAKLFVGNLPYDVDSEKLAGIFDAAGVVEIAEVIYNRETDRSRGFGFVTMSTVEEAEKAVELLNGYDMDGRQLTVNKAAPRGSPERAPRGDFEPSCRVYVGNLPWDVDTSRLEQLFSEHGKVVSARVVSDRETGRSRGFGFVTMSSESEVNDAIAALDGQTLDGRAVRVNVAEERPRRAF

SEQ ID NO: 5586 - protein, 110 aa, uncultured episymbiont of Alvinella pompejana
WTMVAGGGASVVYADTIADFAGIADLANYGEYSGGPTTGETKFYAETILDLMTREKDPQGREKILIIGGAIANFTDVAKTFTGIIQAFEEYADKMKDVGVKIYVRRGGPT

SEQ ID NO: 5587 - protein, 373 aa, Bradyrhizobium sp. BTAi1
MALILTMSKQAAKPRPSPVTGIMTAAISFDNARSPDNALPLPAASTARVGVLLVNLGTPDTADAAGVRVYLKEFLSDRRVIEDQGLLWKIILNGIILNVRPRKKAKDYQSIWNTEKNESPLKTITRAQSEKLSAALADRSHVIVDWAMRYGNPSIKAGVDGLMAKGCDRILVVPLYPQYSAATSATVCDEAFRVLTELRAQPTLRVTPPYYNDDFYIEALAVSIEEHLKTLSYKPELIVASFHGMPKEYVDKGDPYREQCVATTELLRKRLGMDDTKLLLTFQSRFGFSEWLQPYTDKTIEKLAKDGVKRIAVVMPGFAADCLETLEEISGENCEIFKHNGGEEFSAVPCLNDSAPGMEVLRQLVLRELQGWL

SEQ ID NO: 5588 - protein, 425 aa, Zea mays
MQNPRLKQQQQQQQQQQQAMMQQALMQQHHSLYHPSLMAPPPPPPQMEPLPSGNLPPGFDPTTCRSVYAGNIHTQVTEVLLQEIFASTGPVESCKLIRKDKSSYGFVHYFDRRSAGLAIMSLNGRHLFGQPIKVNWAYATGQREDTSSHFNIFVGDLSPDVTDAALFESFSAFNTCSDARVMWDQKTGRSRGFGFVSFRNQQDAQNAINEMNGKWLSSRQIRCNWATKGATFGDDKHSSDGKSVVELTNGSEDGREISITNEEAPENNPQYTTVYVGNLAPEVTQLDLHRLFHTLGAGVIEEVRVQRDKGFGFVRYNTHDEAALAIQMGNSQPFLFNRQIKCSWGNKPTPIGTASNPLPPPAPVAVPGLSPMDLLAYERQLALAKMHPQAQHSLRHANAAGASAAMYDGGFQNVAAAHQQLMYYQ

SEQ ID NO: 5589 - protein, 111 aa, uncultured episymbiont of Alvinella pompejana
WTMVAGGGASVVYADTIADFAGIDDLANYGEYSGGPTTGETKFYAETILDLMTREKDAQGREKILIIGGAIANFTDVAKTFTGIIQAFENYADKMKDVGVKIYVRRGGPNY

SEQ ID NO: 5590 - protein, 111 aa, uncultured episymbiont of Alvinella pompejana
WTMVAGGGASVVYADTIADFAGIADLANYGEYSGGPTTGETKFYAETILDLMTREKDPQAREKILIIGGAIANFTDVAKTFTGIIQAFEEYADKMKDVGVKIYVRRGGPNY

SEQ ID NO: 5591 - protein, 539 aa, Streptococcus pyogenes MGAS315
MKFTEFNLSQDIQSAVVTAGFEKASPIQEMTIPLALEGKDVIGQAQTGTGKTAAFGLPTLNKIRTNENIIQALVIAPTRELAVQSQEELFRFGREKGVKVRSVYGGSSIEKQIKALKSGAHIVVGTPGRLLDLIKRKALILDHVETLILDEADEMLNMGFLEDIEAIISRVPADRQTLLFSATMPAPIKQIGVKFMKDPEHVQIKNKELTNVNVDQYYVRVKEQEKFDTMTRLMDVNQPELSIVFGRTKRRVDEITRGLKLRGFRAEGIHGDLDQNKRLRVIRDFKNDQIDILVATDVAARGLDISGVTHVYNYDITQDPESYVHRIGRTGRAGKSGESITFVSPNEMGYLSMIENLTKKQMKPLRPATAEEAFQAKKKVALKKIERDFADETIRSNFDKFKGDAVQLAAEFTPEELALYILSLTVQDPDSLPEVEIAREKPLPFKYVGGGHGNKNGKGGRGRDNRNRGDRRGGYRGDRNRDERDSDRRRQKRDKRDGHDGSGNRDFKRKSKRNSKDFFNKEKKSSAKNTGFVIRHKGE

SEQ ID NO: 5592 - protein, 399 aa, Bacillus cereus G9241
MAVEVVMPKLGMAMKEGIITSWNIKAGDHVSKGELIASINSEKIETEIEAPADGTVLDIAVSEDEGVPPGTVICYIGKSNEKVEVYESTNVVEEKTSNPEPKKVPHPDPYVIDLTKQRVKISPVAKKIAKTENLDIKSLLGTGPGGRITKVDVLKALEERVAVPEVLEQEESKVIPVTGMRKAIANRMHASLQNSAQLTLTMKVDVTDLVALHKEIADVVQKRYDNKLTITDFVSRAVVLALGEQKEMNSAYINDTIHQFEHVHLGMAVALEKGLVVPAIRFANNLSLVELSKQIKNVAQKAREGSLSSDDMQGTTFTISNLGSFGIEYFTPVLNTPETGILGVGAIEHVPVYKGKKIKKGSMLPLSLTFDHRVLDGAPAAAFLRTIKRYLEEPVTILL

SEQ ID NO: 5593 - protein, 111 aa, uncultured episymbiont of Alvinella pompejana
WTMVAGGGASVVYADTIADFAGIDDLANYGEYSGGPTTGETRFYAETILDLMTREKDPQGRDKILIIGGAIANFTDVAKTFTGIIQAFEEYADKMKDVGVKTCVRRGGPNY

SEQ ID NO: 5594 - protein, 340 aa, Glycine max
  misc_feature (94)..(94): Xaa can be any naturally occurring amino acid
MQRTAAATEEPRRSSGDASAAEGEKVFKGSEVFGDTSPNYLKTILALALWLGTIHFNAALVLFAIFFLSLHKAFLLFGLLFVLMVIPVDEKSKXGRKLSRYICKHVCAYFPITLHVEDMKAFHPSRAYVFGYEPHSVLPIGVVALADNTCFMPLPKIKVLASSAIFYTPFLRHIWTWLGLTPVTKKRFTSLLDAGYSCILIPGGVQEAFLMEHGSEIAFLKARRGFVRIAMEKGKPLVPVFCFGQSNVYKWWKPGGKLVLNFARAVKFSPIYFWGIFGSPIPFKHPMHVVVGRPIELEKNHEPTPEEVARIHSQFVEALQDLFERHKARAGYPNLELRIV

SEQ ID NO: 5595 - protein, 344 aa, Bacillus cereus G9241
MTRTVSMSTAINEAMKISMRRDENVILIGEDVAGGAQVDHLQDDEAWGGVLGVTKGLVQEFGRNRILDTPISEAGYMGAAMAAAATGLRPIAELMFNDFIGSCLDQVLNQGAKFRYMFGGKAKVPVTVRTMHGAGFSAAAQHSQSLYALFTSIPGIKVVVPSTPYDAKGLLLAAIEDDDPVIFFEDKTLYNMKGEVPEGYYTIPLGKADIKREGSDVTIVAIGKQVHTALAAAKQLSKKGLEVEVIDPRSLSPLDEDTILASIEKTNRLIVIDEANPRCSIATDIAAIVADKGFDLLDAPIKRITAPHTPVPFSPPLEKLYLPTPEKVIETVSEMIGDQSLLHV

SEQ ID NO: 5596 - protein, 261 aa, Lycopersicon esculentum
MALDILPQGAGKGQALVYLLKKLKSEGKLPNNTLVCGDSGNDAELFSIPDVYGVMVSNAQEELLQWHAANAKDNPKVIHATERCAAGIIQAIGRFNLGPSTSPRDVTDMSDSKMENFVPAYEFVKFYLFFEKWRRGEIENSDLYLSNLKAVCRPSGTFVHPSGVEKSLEECVNTLKKCHGDKKGKQYRIWVDQVLPTRVGSDSWLVSFKKWELCGEERQCCITTVLLSSKNVTVQTGSIDTRASDLLQGVKSASDSPTWFF

SEQ ID NO: 5597 - protein, 112 aa, Vibrio fischeri ES114
MKIINAIIKPFKLDDVREALADAGVDGMTVSEVKGFGRQKGHTELYRGAEYQVDFLPKVKLEIAVQAEGVDRIVEAISKAAHTGKIGDGKIFVYDLQQAVRIRTGETNTEAL

SEQ ID NO: 5598 - protein, 111 aa, uncultured episymbiont of Alvinella pompejana
WTMVAGGGASVVYADAIADFAGIDDLANYGEYSGGPTTGETRFYAETILDLMTREKDPQGRDKILIIGGAIANFTDVAKTFTGIIQAFEEYADKMKDVGVKIYVRRGGPNY

SEQ ID NO: 5599 - protein, 324 aa, Actinobacillus pleuropneumoniae serovar 1 str. 4074
MAKQIKKIAVLTSGGDAPGMNAAIRGVVRAALNEGLEVYGVQDGYYGLYTDRVIPLDRRSVSETINRGGTFLGSARFPQFKDPDVRKKSVETLKKYDIDALVVIGGDGSYMGAKLITEEFGYPCIGIPGTIDNDIVGTDYTIGYQTALETAVEAIDRLRDTSTSHQRISIVEIMGRHCGDLTISAALASGCEYIIVPEKGLDKESLMRNIEDGFNKGKRHAIIAITELMTDVQALAKEIEDRFGHETRATVLGHIQRGGAPCPFDRILASRMGVYAVDLLLQGHGGRCIGIKNENLVHHDIIDAINNMRRPFKEELFEAARKLF

SEQ ID NO: 5600 - protein, 154 aa, Triticum aestivum
MATTAAAYGCSAAPALPFPGSPFARRSPPSRVHLASSNPKLGKPVPSSLRASYRRRRPYVCACSGEVGPDASAASPAEASFDIKLPRRSLLVQFTCTKCDARTERLINRVAYERGTVFLQCAGCQVYHKFVDNLGLIVEYDLREENGVNTCAED

SEQ ID NO: 5601 - protein, 528 aa, Streptococcus thermophilus CNRZ1066
MKFTDLNLSEDIQSAVVAAGFEQPSPIQELTIPLALEGKDVIGQAQTGTGKTAAFGLPTLDKIRTEENTIQALVIAPTRELAVQSQEELFRFGRDKGVKVRSVYGGSSIEKQIKALRSGAHIVVGTPGRLLDLIKRKALKLNNIETLILDEADEMLNMGFLEDIEAIISRVPEERQTLLFSATMPDAIKRIGVQFMKDPEHVKIKAKELTNVNVDQYFIRVKEQEKFDTMTRLMDVDQPELSIVFGRTKRRVDELTRGLKLRGFRAEGIHGDLDQNKRLRIIRDFKNGQIDILVATDVAARGLDISGVTHVYNYDIPQDPESYVHRIGRTGRAGQSGQSITFVSPNEMGYLGIIENLTKKRMKGLKPPTAQEAFQSKKKVALKKIERDFADEAIHANFDKFKDDAVKLAQEFTPEELALYILSLTVQDPETMPEVEIAREKPLPFKPSGGGFGGKGGKGGRGNRGRDNNRRGGYRGDRNRDDRDGGRRDFKRKSKNNSRDFENRGNKRPHRASSEKKNGFVIRNKGDK

SEQ ID NO: 5602 - protein, 555 aa, Brucella melitensis biovar Suis
MPIAGTKYAPFPAPQLDDRTWPSKRIEKAPIWCSVDLRDGNQALIDPMGHDRKERMFRLLIDMGFPEIEIGFPSASQTDFDFCRWAIEQGDVPDDVDLQVLVQCRPELITRTFEALEGAKTPIIHFYNSTSELQRRVVFAKDVGGIKQIATDAAKMIMDMAAKAGGGYRFQYSPESFTGTELDVALEICNAVIEIVKPTPDNKLIVNLPSTVEMNTPNVYADQIEWMCRNLDNRESLIISLHPHNDRGTGIAATELGLMAGADRVEGTLFGNGERTGNVDVVTLALNMYTQGIDPGLDCTDINRMKEVYEYSNQLKIAERHPYVGELVYTAFSGSHQDAINKGMKARRSANSPVWEVPYLPIDPQDVGRSYEAIIRINSQSGKGGIAYILQADYGLNLPRNLQVEFREIIQHITDEEGKELPSKRIYEEFQKLYVTQPDARIKFVDHHTYPDPEQKGRRILTAEITDNGVTKTIEGKGTGPIDGFVDALSKYLGVKMSVVDYSEHSLQQGSDASAISYVEMVYPGGKLFGVGINDNIVSASLEAVVSAANRVIAK

SEQ ID NO: 5603 - protein, 496 aa, Arabidopsis thaliana
MERQKSMEKGLLRKSLSIRERKFPNEDAFLESGLSRKSPREVKKPQNDDGECRVTASVFLSTFVAVSGSFCTGCGVGFSSGAQAGITKDLSLSVAEYSMFGSILTLGGLIGAVFSGKVADVLGRKRTMLFCEFFCITGWLCVALAQNAMWLDCGRLLLGIGVGIFSYVIPVYIAEIAPKHVRGSFVFANQLMQNCGISLFFIIGNFIPWRLLTVVGLVPCVFHVFCLFFIPESPRWLAKLGRDKECRSSLQRLRGSDVDISREANTIRDTIDMTENGGETKMSELFQRRYAYPLIIGVGLMFLQQLCGSSGVTYYASSLFNKGGFPSAIGTSVIATIMVPKAMLATVLVDKMGRRTLLMASCSAMGLSALLLSVSYGFQSFGILPELTPIFTCIGVLGHIVSFAMGMGGLPWIIMAEIFPMNVKVSAGTLVTVTNWLFGWIITYTFNFMLEWNASGMFLIFSMVSASSIVFIYFLVPETKGRSLEEIQALLNNSVQ

SEQ ID NO: 5604 - protein, 181 aa, Arabidopsis thaliana
MASSMFSSTAVVTSPAQATMVAPFTGLKSSASFPVTRKANNDITSITSNGGRVSCMKVWPPIGKKKFETLSYLPDLSDVELAKEVDYLLRNKWIPCVEFELEHGFVYREHGNTPGYYDGRYWTMWKLPLFGCTDSAQVLKEVEECKKEYPGAFIRIIGFDNTRQVQCISFIAYKPPSFTEA

SEQ ID NO: 5605 - protein, 368 aa, Lactobacillus acidophilus NCFM
MNLDKLQQWLQDSNNDIAYISNPITISYFTGYSMEPHERIFALIAFKDAEPFIFCPALNVEEAKASEWNGDVVGYLDSEDPWQIIADNIRKRTSDIHNWAIEKDDLSVSHYQLLRGEFPNASLTNDVSPFIERLRLFKTPEEIKKLQGAGAEADFAFQIGFDAIRTGVTERSIAGQIDYQLKIQKGVMHESFETIVQAGKNAANPHLGPTMNKIQPNELVLFDLGTMHDGYASDASRTVAYGTPSDKQREIYEVDREAQQAAIEAAKPGITAEELDSVARDIITKAGYGEYFIHRLGHGIGKNVHEFPSIVQGNDLVIQEGMCFSIEPGIYIPGFAGVRIEDCGVVTKDGFKPFTHTDKELKILPLKD

SEQ ID NO: 5606 - protein, 121 aa, Glycine max
MAFASKIITCLLVLKVYMAAPTESHITCGIVTSTLAQCMGYLTNFFPVPSDYCCAEVKALNQMAQTTPDRRQVCKCLKAVAKENKGFINIELVGTLPTICGVSVPYPFNFSTNCDTISTAV

SEQ ID NO: 5607 - protein, 175 aa, Triticum aestivum
MAPTVMASSATSVAPFQGLKSTAGLPISRRSSSAGLSSVSNGGRIRCMQVWPIEGIKKFETLSYLPPLSTEALLKQVDYLIRSKWVPCLEFSKVGFVFREHNSSPGYYDGRYWTMWKLPMFGCTDATQVLNEVEEVKKEYPDAYVRVIGFDNLRQVQCVSFIAFRPPGCEESGKA

SEQ ID NO: 5608 - protein, 318 aa, Pseudoalteromonas tunicata D2
MSTAKHCKLLILGSGPAGYTAAVYAARANLNPVLITGMQQGGQLTTTTEVENWPGDAHGLTGPALMDRMKEHAERFETEILFDHIHTVDVKNRPFTLTGDNGVYTCDALIIATGASATYLGLESEENFKGRGVSACATCDGFFYRNQKVAVVGGGNTAVEEALYLSNIASEVHVIHRRDSFRSEKILAERLKDKAANGNVVLHLNRTLDEVLGDQMGVTGIRIKATDSDATEELDLAGVFIAIGHKPNTDMFVDQLEMKDGYLVVQSGLHGNATQTSVEGVFAAGDVCDHIYRQAITSAGTGCMAALDAERYLDNLKA

SEQ ID NO: 5609 - protein, 385 aa, Populus tremula
MAIDCIKTMPSITTPHHHPKDQDQCKDDGKSFVFDAQVLRHQTNIPQQFIWPDHEKPNINAPELQVPLVDLGDFLSGNPVAAVEASRLVGEACKKHGFFLVVNHGVDKTLIAHAHNYVDTFFKLPLSEKQKAQRKIGEPCGYASSFTGRFSSKLPWKETLSFRYKAEENSPKHIEEYFHNRMGEDFAEFGTVYQDYCEAMSTLSLGIMELLGMSLGVSREHFREFFNENDSIMRLNYYPPCQKPDLTLGTGPHCDPTSLTILHQDQVGGLQVFVDNEWRSINPNFDAFVVNIGDTFMALSNGIYKSCLHRAVVNSQTPRKSLAFFLCPKNDKMVTPPHELVDTCNPRIYPDFTWPMLLEFTQKHYRADMKTLEVFTNWLHQRSFS

SEQ ID NO: 5610 - protein, 385 aa, Populus tremula
MAIDCIKTMPSITTPHHHPKDQDQCKDDGKSFVFDAQVLRHQTNIPQQFIWPDHEKPNINAPELQVPLVDLGDFLSGNPVAAVEASRLVGEACKKHGFFLVVNHGVDKTLIAHAHNYVDTFFKLPLSEKQKAQRKIGESCGYASSFTGRFSSKLPWKETLSFRYKAEENSPKHIEEYFHNRMGEDFAEFGTVYQDYCEAMSTLSLGIMELLGMSLGVSREHFREFFNENDSIMRLNYYPPCQKPDLTLGTGPHCDPTSLTILHQDQVGGLQVFVDNEWRSINPNFDAFVVNIGDTFMALSNGIYKSCLHRAVVNSQTPRKSLAFFLCPKNDKMVTPPHELVDTCNPRIYPDFTWPMLLEFTQKHYRADMKTLEVFTNWLHQRSFS

SEQ ID NO: 5611 - protein, 303 aa, Oryza sativa (japonica cultivar-group)
MAGMSLQHPWAFAFGLLGNIISFMTYLAPLPTFYRIYKSKSTQGFQSVPYVVALFSAMLWIYYALLKSDECLLITINSAGCVIETIYIAVYLVYAPKKAKMFTAKLLLLVNVGVFGLILLLTLLLSAGDRRIVVLGWVCVGFSVSVFVAPLSIIRLVVRTKSVEFMPFSLSFSLTISAVVWFLYGLLIKDKYVALPNVLGFSFGVIQMGLYAMYRNSTPKAVLTKEVEAATATGDDDHSAAGVKEHVVNIAKLSAAVDVVKTREVHPVDVESPPAEAPPEEDDKAAAATAAAVAGAGEKKVAA

SEQ ID NO: 5612 - protein, 632 aa, Desulfotalea psychrophila LSv54
MTTVSTDVTGSTDTASSIDAAVPSAPVAPAAPVAPAAPVAPVAPVAPVAPVAPAVSFTDFNLKSDLVANLVKLGFSQPTPIQEKAIPLLLAGSDLIGQAQTGTGKTAAFGLPLLNNIDFSKKCVQALVLAPTRELAQQVGDALATYSGDDGRNVLVVYGGSSYQAQVGGLRRGARVVVGTPGRLLDLIRQGSLKLDQLKTLVLDEADEMLSMGFIDDIETILSQTPKDRQTMLFSATLSSRVMSIANRYLHSPESISISPKQMIGSSIEQRYYLINNSDKIAAITRVFEVETVESALIFARTRATVSELANELISRGFAAEGLSGDLSQEARTRVLSRFKKGQIKVLVATDVAARGLDIDDISHVFNYDLPEDPEVYVHRIGRTGRAGRSGTAISLVTLRDRWMHRRIEQYTGKKLIKGELPTVEQIEEHRNTQFLERLDVWIRRGRCRGEREIVEALVEQGMDPLDVAAAALKIVRKDETKRPIDPIKPVIEDAGGRNRKRGDRNDRGANGRGDRGGRSDSRGGRPQGRRDDRFAKGGDRGPKKKGDDVRQVSDKDMVPLTLDAGKKDGVAVNHIVASLSHFAGISSRELGKIRINETHSSIDVPKGLVDKMLSHNGSYRISKKAVNLTHQ

SEQ ID NO: 5613 - protein, 385 aa, Populus tremula
MAIDCIKTMPSITTPHHHPKDQDQCKDDGKSFVFDAQVLRHQTNIPQQFIWPDNEKPNINAPELQVPLVDLGDFLSGNPVAAVEASRLVGEACKKHGFFLVVNHGVDKTLIAHAHNYVDTFFKLPLSEKQKAQRKIGESCGYASSFTGRFSSKLPWKETLSFRYKAEENSPKHIEEYFHNRMGEDFAEFGTVYQDYCEAMSTLSLGIMELLGMSLGVSREHFREFFNENDSIMRLNYYPPCQKPDLTLGTGPHCDPTSLTILHQDQVGGLQVFVDNEWRSINPNFDAFVVNIGDTFMALSNGIYKSCLHRAVVNSQTPRKSLAFFLCPKNDKMVTPPHELVDTCNPRIYPDFTWPMLLEFTQKHYRADMKTLEVFTNWLHQRSFS

SEQ ID NO: 5614 - protein, 110 aa, uncultured episymbiont of Alvinella pompejana
LMVAGGGASVVYADTIADFAGIDDLANYGEYSGGPTTGETRFYAETILDLMTREKDPQGRDKILIIGGAIANFTDVAKTFTGIIQAFEEYADKMKDVGVKIYVRRGGPNY

SEQ ID NO: 5615 - protein, 107 aa, uncultured episymbiont of Alvinella pompejana
MVAGGGASVVYADTIADFAGVKDLANYGEYSGGPTTAETQFYAETIFDLMTRHKDPRGKILIIGGAIANFTDVAKTFTGIINAFEKYADKLKEHGTKIYVRRGGPNY

SEQ ID NO: 5616 - protein, 551 aa, Yarrowia lipolytica CLIB122
MKLATAFTILTAVLAAPLAAPAEAFLFLLAGFAAKISASMTNETSDRPLVHFTPNKGWMNDPNGLWYDEKDAKWHLYFQYNPNDTVWGTPLFWGHATSDDLTNWEDQPIAIAPKRNDSGAFSGSMVVDYNNTSGFFNDTIDPRQRCVAIWTYNTPESEEQYISYSLDGGYTFTEYQKNPVLAANSTQFRDPKVFWYEPSQKWIMTAAKSQDYKIEIYSSDDLKSWKLESAFANEGFLGYQYECPGLIEVPTEQDPSKSYWVMFISINPGAPAGGSFNQYFVGSFNGTHFEAFDNQSRVVDFGKDYYALQTFFNTDPTYGSALGIAWASNWEYSAFVPTNPWRSSMSLVRKFSLNTEYQANPETELINLKAEPILNISNAGPWSRFATNTTLTKANSYNVDLSNSTGTLEFELVYAVNTTQTISKSVFADLSLWFKGLEDPEEYLRMGFEVSASSFFLDRGNSKVKFVKENPYFTNRMSVNNQPFKSENDLSYYKVYGLLDQNILELYFNDGDVVSTNTYFMTTGNALGSVNMTTGVDNLFYIDKFQVREVK

SEQ ID NO: 5617 - protein, 336 aa, Schizosaccharomyces pombe
MAIPKVGINGFGRIGRIVLRNALVAKTIQVVAINDPFIDLEYMAYMFKYDSTHGRFDGSVEIKDGKLVIDGNAIDVHNERDPADIKWSTSGADYVIESTGVFTTQETASAHLKGGAKRVIISAPSKDAPMYVVGVNEEKFNPSEKVISNASCTTNCLAPLAKVINDTFGIEEGLMTTVHATTATQKTVDGPSKKDWRGGRGASANIIPSSTGAAKAVGKVIPALNGKLTGMAFRVPTPDVSVVDLTVKLAKPTNYEDIKAAIKAASEGPMKGVLGYTEDAVVSTDFCGDNHSSIFDASAGIQLSPQFVKLVSWYDNEWGYSRRVVDLVAYTAAKDN

SEQ ID NO: 5618 - protein, 111 aa, uncultured episymbiont of Alvinella pompejana
  misc_feature (13)..(13): Xaa can be any naturally occurring amino acid
WTMVAGGGASVVXADTIADFAGIDDLANYGEYSGGPTTGETKFYAETILDLMTGEKDPQGRDKILIIGGAIANFTDVAKTFTGIIQAFEKYADKMKDVGVKIYVRRGGPNY

SEQ ID NO: 5619 - protein, 264 aa, Ralstonia metallidurans CH34
MSNFLSYEQDGHVVTLTMSEPERRNPLTGNTAVPEFLAAIERIESDTSVRAVIITGSGTAFSSGGNIHEMKRQASGTASAMDVRRDYRHGIQRLPLALFNLEVPVIAAVNGPALGAGLDLTCMCDIRIASRAAQFAESFVKLGIIPGDGGAWLLPRIIGMSRAAELTFTGKAIDAQTALEWNLVSQVVEPEALLPTAREIAAAIAANPPHAVRLAKRLLREGMHTSLGTLLELSAVYQAVSHQAADHKEAVEAFLDKRKPVFKG

SEQ ID NO: 5620 - protein, 111 aa, uncultured episymbiont of Alvinella pompejana
WTMVAGGGASVVYADTIADFAGIDDLANYGEYSGGPTTGETRFYAETILDLMTREKDPQGRDKILIIGGAIANFTDVAKTFTGIIQAFEEYADKMKDVGVKIYVRRGGPNY

SEQ ID NO: 5621 - protein, 293 aa, Oryza sativa (japonica cultivar-group)
MAVEYHCCGAAFFEHVVIIVVLVLFAGLMSGLTLGLMSLSLVDLEVLAKSGTDQDRKHAAKILPVVKNQHLLLCTLLICNAAAMEALPIFLDSLVTAWGAILISVTLILLFGEILPQSICSRYGLAIGASVAPLVRVLVWVCFPVAYPISKLLDHLLGKGHTALFRRAELKTLVTLHGNEAGKGGELTHDETTIIAGALELTEKKAKDAMTPLCQTFAIDINAKLDRDLMQKVLDKGHSRVPVYYEKKTNIIGLILVMLSSFSKQSYDSCKLYLVFCLDETFFLVFSYLASTC

SEQ ID NO: 5622 - protein, 785 aa, Xanthomonas campestris pv. campestris str. ATCC 33913
MTDQTRLPNTSSLTHPRPDPAVILATDLDGTFLAGSAEHRHQLYRLVDQHPEIRLIFITGRGLEAVMPLLTDPTIPRPDYVVCDVGATVVDGHTLQPLQPLQSMIDAHWPGEQVVAQAMRAFPQLQRQDMPQERRCSYFCDPHTLAPLRAQIEQTARALGCDVLYSADRYLDILPPDTDKGRTLGALARQLELPRERILVAGDTLNDLSMYLAGFRGVCVGDSEAALTQATAQLDATYHASAPGCGGILEAIAHFGLLADDDPHVPAVQAPRKGGAELVMVYHRLPYDEVVEHGELVRRAPRSPNGIIPSLLSFFEGGQRGSWVAWSVDDPKRGPFQTHTEVDAQRYPTLTAARVPLSKSEVDIFYKRFSKEAFWPMLHVFWERARFREDDWQVFLAVNRKFAQATSAEAAHGATVWIHDYNLWMVPAYLRELRPDLKIAFFHHTYFPSADVFNVVPWRREIIGSLMCCDYVGFHIPRQVENFVDVVRGVMPVERLAQESCAPRFLTYGCAVGLDTMTTCLRVADRDVALGAHPVGTDLRRIRAALSKPDVRNDIFKLRREIGARKLVLSVERLDYTKGTLAKLEAFERLLDSQRQLLGKVTLLMVCVPAAREMTIYRTLQTQIEQAVGRINGRFSRLDWTPVRFFAQALPFEQVVAHYAAAQVMWITPLRDGLNLVAKEFVAVQGIEGGSGVLVLSEFAGAAAELKGAVLTNPHDPADLAAGLLQALAMPDDEAAGRLRQLYDSVEYYNIDHWGRDFLDAVARSRGAHARVPLAAASTVAEPVA

SEQ ID NO: 5623 - protein, 478 aa, Geobacillus kaustophilus
MPIAVQKQKLYINGEWREGKSYTELKSPYSRETIAEIPVATEQEVDEAIAAAYAARQTMAAMPAHERAAILERVGEQLKARQEEAARLIALEAAKPIITAKGEVARTIQTYKFAAEEAKRIHGETLPLDAAPGGEHRIALTVREPIGVIGAITPFNFPMNLVAHKLGPAIASGNTVVLKPASQTPLSAYFIAELFEKAGLPKGALNVVTGSGRTVGDKIVTDPRISMITFTGSPEVGIAIRNKAGLKRVTLELGSNSAVIVDEQVDLDRIIPRCVFGAFTFQGQVCISLQRIYVHENRYDEFVEKFVAAAKQLKTGDPLDPTTDVSALITPNDVDRALSWIEEAKQGGANVVLGGERDGNILLPTVIVDAEPTMKVSCQEVFAPIVLINRVRSIDEAIELVNDSRYGLQAGIYTDNVHTAWKAAKQLHVGGVLINDIPTFRVDHMPYGGVKESGFGREGVRYAIEEMTELKLIIFNES

SEQ ID NO: 5624 - protein, 294 aa, Lactobacillus acidophilus NCFM
MHGLNTIVFDSLSEVGGQPQMLYPFKQINDIPAYNSISGTDLIQKLKHDIKNETEIITNHKVVDVTKQSDGFIIDNIIYARSIIIATGAGAFKPKELPLKISDEIKEKIHYFVKDPSQFKNQTIGVFGGGDSALDLALEVAKYANVKLIHRRDQFRGLESNVKKLKSLKNVEILTPYLPKKIELINNQLDISLKKMGVEQLRNVQLDQIVVAYGFRANNRFAKKWGINLEQSNIPVDPTMKTNIDGIYAAGDVVTYPGRVPLIALGFGEAQIAITSIMRNLFPEKSLTIHSTSI

SEQ ID NO: 5625 - protein, 496 aa, Medicago truncatula
MSGSGIFAEIIDGDVFNYYADGKWNKSSSGKFVPIINPTTRKIHFKVQACTQEEVNKAIESAKIAQKLWAKTPLWKRAELLHKAAAILKEHKAPIAECLVKEIAKPAKDAVTEVVRSGDLVSYCAEEGVRILGEGKFLVSDSFPGNERTKYCLTSKIPLGVVLAIPPFNYPVNLAVSKIGPAIIAGNSIVLKPPTQGAVAALHMVHCFHLAGFPKGLISCVTGKGSEIGDFLTMHPGVNCISFTGGDTGIAISKKSAMVPLQMELGGKDACIVLEDADLDLVAANIVKGGFSYSGQRCTAVKVALVMESVAETLVKKIKDKVAKLTVGPPEDDCDITPVITESSANFIEGLVMDAKKKGATFCQEYRREGNLIWPLLLDNVRSDMRISWEEPFGPVLPVIRINSVEEGIRHCNASNFGLQGCVFTKDINKAMLISDAMETGTVQINSAPARGPDHFPFQGLKDSGIGSQGITNSINMMTKIKTTVINLPTPSYTMG

SEQ ID NO: 5626 - protein, 982 aa, Lycopersicon esculentum
MKHIFKKLHHSNRSNDAQSTSSISSSSSPASSLSSASCTTDHRNSNSVSQSPLSPSTISTASTTTTPAAPVGAGGGGGGGNLSTINRQQDYYTSEEEYQVQLALALSVSSSQSQDPFPSDVNSSNGHGVGRTAVDLARDREDAAADLLSRQYWDYGVMDYEEKVVDGFYDVYNLFTDPASRGKMPSLSELETNPGTSNFEGVIINQRIDPSLEELMQIAHCITLDCPASEISLLVLRLSELVTGHLGGPVKDANIILAKWMEISTELRTSLHTSVLPIGSLKIGLSRHRALLFKVLADHVGIPCRLVKGSHYTGVEDDAVNIVKLPNDSEFLVDLMGAPGTLIPADVLSAKDASFNSPKLNKIPSLPSNSHSGVSYPRRNLLSGQNSVLGDDFSGRSKPEKIESVHSISDAGGSSTAGSSGINKRPSSNQVDWTSPLAIGTSLYKGGRGPNAAGDGLRLNVNVVPYDQNNPEDPKNLFADLNPFQIKGSGNTLLQKNPARNKVSELQQPINTLIPGRPPAPMMWKNRYAPNEVPRKNESDSEGLFPKKNGGSSGYNISSIASTSSNIPQKSSTDTSRLHGNSRPAYRGNDEVASTRNNSSILSAELEFRRLSVQNSQNNNRETSQWEGHSLQSDDLNRTQAYGDDIIVESDHTRNLQAQSIGTNIKLKEPENPTSSGNLGPSQVDPVFDDVGDCEIPWEDLVIGERIGLGSYGEVYHADWNGTEVAVKKFLDQDFSGAALAEFKREVRIMRRLRHPNVVRFMGAITRPPHLSIITEFLPRGSLYRIIHRPHFQIDERQKIKMALDVAKGMDCLHTSNPTIVHRDLKSPNLLVDTDWNVKVCDFGLSRLKHNTFLSSKSTAGTPEWMAPEVLRNEPSNEKCDIYSFGVILWELATLRLPWSGMNPMQVVGAVGFQNKRLEIPKELDPIVARIIWECWQTDPNLRPSFAQLTVALTPLQRLVIPAYVDQLNSRLPQEISVNSTP

SEQ ID NO: 5627 - protein, 382 aa, Arabidopsis thaliana
MDIASSSLSQAHKVVLTRQPSSRVNTCSLGSVSAIGFSLPQISSPALGKCRRKQSSSGFVKACVAVEQKTRTAIIRIGTRGSPLALAQAYETREKLKKKHPELVEDGAIHIEIIKTTGDKILSQPLADIGGKGLFTKEIDEALINGHIDIAVHSMKDVPTYLPEKTILPCNLPREDVRDAFICLTAATLAELPAGSVVGTASLRRKSQILHKYPALHVEENFRGNVQTRLSKLQGGKVQATLLALAGLKRLSMTENVASILSLDEMLPAVAQGAIGIACRTDDDKMATYLASLNHEETRLAISCERAFLETLDGSCRTPIAGYASKDEEGNCIFRGLVASPDGTKVLETSRKGPYVYEDMVKMGKDAGQELLSRAGPGFFGN

SEQ ID NO: 5628 - protein, 830 aa, Yersinia pestis biovar Medievalis str. 91001
MKLSRRDFMKANAAVAAAAAAGMTIPTVAKAVGETTNAIKWDKAPCRFCGTGCGVLVGTQNGRIVASQGDPDSPVNRGLNCIKGYFLPKIMYGKDRLTQPLLRMKDGQYDKEGDFTPISWEKAFDIMELKFKNALKEKGPTAVGMFGSGQWTVWEGYAALKLLKGGFRSNNLDPNARHCMASSVVGFMRTFGMDEPMGCYDDIEEADAFVLWGSNMAEMHPVLWSRMTSRRLTNAHVRIAVLSTYEHRSFELADNPIVFTPQTDLVIMNYIANYIIQNNAVDKDFLAQHVNFRRGATDIGYGLRPTHPLEKAAKNPGSDASEPMSFEDFKTFVAEYTLEKTAKMSGVPEDQLESLAQLYADPKVKLVSYWTMGFNQHTRGVWANNMCYNLHLLTGKISTPGSGPFSLTGQPSACGTAREVGTFSHRLPADMVVTNEKHRQIAETTWQLPAGTIPEKVGLHAVAQDRALKDGTLNAYWVMCNNNMQAGPNINEERMPGWRDPRNFIVVSDPYPTISALSADLILPTSMWVEKEGAYGNAERRTQFWRQQVPSPGEAKSDLWQIVEFAKRFNVEEVWPAELVNQKPEYRGKNLYEVLFANDVVSKYPLSEIPDDQLNDEARDFGFYIQKGLFEEYASFGRGHAHDLAPFDVYHQVRGLRWPVVDGKETLWRYREGFDPFVPKGEEVRFYGKPDGKAVIFALPYEPAAESPDQEYDLWLSTGRVLEHWHTGSMTRRVPELHRAFPEAVLFIHPLDAKARGLHRGDKVKVISRRGEVISLVETRGRNRPPRGLVYMPFFDAAQLVNNLTLDATDPLSKETDFKKCAVKLERVVA

SEQ ID NO: 5629 - protein, 286 aa, Halimeda hummii
KNMITGAAQMDGAILVVSGADGPMPQTKEHILLAQQVGVPAIVVFLNKVDQVNDQELLELVELEIRETLDRYDFPGDDISVISGSALAAVEALTLNPMTQRGENDWVDKIYKLMDVIDDEIPLPPRNTEKDFLMAIENVVSITGRGTVATGRVERGQIKVGQTVEIVGLKETKETTVIGLEMFQKTLEESVAGDNVGVLLRGVQKNEIERGMVLAKPGSIKPHTRFKAQVYILKKDEGGRHTSFVAGYRPQFYVRTTDVTGKIDSFQGDDDSKIRMVMPGDRVKII

SEQ ID NO: 5630 - protein, 491 aa, Ralstonia eutropha JMP134
MSLTLANAALLRSQNFINQQWRDAGLGRRLAVANPATGEVFAHVPDSDDDDAGRAADAAAEAFPAWSARPARERAQLIKRWHALILANQEDLARIISTEQGKPLKEARGEVLYGASYVEWFAEEATRICGDIVAEAVPGRKLLVLKEPVGVVAAITPWNFPLAMIARKIAPALAAGCTVVAKPAEDTPLTALALVWLAEQAGLPAGVLNIVTASRESTPNVVDAWLADSRVRKITFTGSTPVGKHLARESAGTLKKLSLELGGNAPFIVFEDADLDAAVDGLMASKFRNGGQTCVCPNRVYVHESVHDDFVERLARRVGALHVAPATDENAQIGPMINARAVDKIARHVEDAVAKGARVVTGGRRVRTADGPHYYAPTVLIDATPAMELACEETFGPVAPVFRFRDESEVIRDANDTPFGLAAYFYSNDVRRIWRVAQALETGMVGINEGAIAAEAAPFGGVKESGYGREGSRHGLDDYMHTKYLCQGQLG

SEQ ID NO: 5631 - protein, 385 aa, Populus tremula
MAIDCIKTMPSITTPHHHPKDQDQCKDDGKSFVFDAQVLRHQTNIPQQFIWPDNEKPNINAPELQVPLVDLGDFLSGNPVAAVEASRLVGEACKKHGFFLVVNHGVDKTLIAHAHNYVDTFFKLPLSEKQKAQRKIGESCGYASSFTGRFSSKLPWKETLSFRYKAEENSPKHIEEYFHNRMGEDFAEFGTVYQDYCEAMSTLSLGIMELLGMSLGVSREHFREFFNENDSIMRLNYYPPCQKPDLPLGTGPHCDPTSLTILHQDQVGGLQVFVDNEWRSINPNFDAFVVNIGDTFMALSNGIYKSCLHRAVVNSQTPRKSLAFFLCPKNDKMVTPPHELVDTCDPRIYPDFTWPMLLEFTQKHYRADMKTLEVFTNWLHQRSFS

SEQ ID NO: 5632 - protein, 385 aa, Populus tremula
MAIDCIKTMPSITTPHHHPKDQDQCKDDGKSFVFDAQVLRHQTNIPQQFIWPDNEKPNINAPELQVPLVDLGDFLSGNPVAAVEASRLVGEACKKHGFFLVVNHGVDKTLIAHAHNYVDTFFKLPLSEKQKAQRKIGESCGYASSFTGRFSSKLPWKETLSFRYKAEENSSKHIEEYFHNRMGEDFAEFGTVYQDYCEAMSTLSLGIMELLGMSLGVSREHFREFFNENDSIMRLNYYPPCQKPDLTLGTGPHCDPTSLTILHQDQVGGLQVFVDNEWRSINPNFDAFVVNIGDTFMALSNGIYKSCLHRAVVNSQTPRKSLAFFLCPKNDKMVTPPHELVDTCNPRIYPDFTWPMLLEFTQKHYRADMKTLEVFTNWLHQRSFS

SEQ ID NO: 5633 - protein, 201 aa, Arabidopsis thaliana
  misc_feature (29)..(29): Xaa can be any naturally occurring amino acid
  misc_feature (32)..(32): Xaa can be any naturally occurring amino acid
  misc_feature (40)..(40): Xaa can be any naturally occurring amino acid
  misc_feature (67)..(67): Xaa can be any naturally occurring amino acid
  misc_feature (84)..(84): Xaa can be any naturally occurring amino acid
  misc_feature (86)..(86): Xaa can be any naturally occurring amino acid
KQQDILTFLNTHNQQKGTAFFKTTTAKPXTGXKSSAAFPXTRKTNKDITSIASNGGRASCMKAWPPXGKKKFETLSYLPDLRDXQXAKEVDYLLRNKWIPCVEFELEHGFVYREHGNTPRYYDGPVTGQLWKAFPHLFRNATQLPLQSCLKENLKNAKKEYPGPFSLRIIEFRPTPSKSQCIQFPFPSKPPKLSPKLNFFF

SEQ ID NO: 5634 - protein, 124 aa, Enterococcus faecalis V583
MKMAHTCVRVKDLEASLDFYQKAFNFEESRRRDFPENKFTLVYLTLPGDDYELELTYNYDHEAYDLGNGYGHIAISTDDLEGLHEKHQAAGFTVTDLKGLPGTAPSYYFVVDPDGYKIEVIRER

SEQ ID NO: 5635 - protein, 629 aa, Yarrowia lipolytica CLIB122
MLRLRTMRPTQTSVRAALGPTAAARNMSSSSPSSFEYSSYVKGTREIGHRKAPTTRLSVEGPIYVGFDGIRLLNLPHLNKGSGFPLNERREFRLSGLLPSAEATLEEQVDRAYQQFKKCGTPLAKNGFCTSLKFQNEVLYYALLLKHVKEVFPIIYTPTQGEAIEQYSRLFRRPEGCFLDITSPYDVEERLGAFGDHDDIDYIVVTDSEGILGIGDQGVGGIGISIAKLALMTLCAGVNPSRVIPVVLDTGTNNQELLHDPLYLGRRMPRVRGKQYDDFIDNFVQSARRLYPKAVIHFEDFGLANAHKILDKYRPEIPCFNDDIQGTGAVTLASITAALKVLGKNITDTRILVYGAGSAGMGIAEQVYDNLVAQGLDDKTARQNIFLMDRPGLLTTALTDEQMSDVQKPFAKDKANYEGVDTKTLEHVVAAVKPHILIGCSTQPGAFNEKVVKEMLKHTPRPIILPLSNPTRLHEAVPADLYKWTDGKALVATGSPFDPVNGKETSENNNCFVFPGIGLGAILSRSKLITNTMIAAAIECLAEQAPILKNHDEGVLPDVALIQIISARVATAVVLQAKAEGLATVEEELKPGTKEHVQIPDNFDECLAWVETQMWRPVYRPLIHVRDYD

SEQ ID NO: 5636 - protein, 385 aa, Populus tremula
MAIDCIKTMPSITTPHHHPKDQDQCKDDGKSFVFDAQVLRHQTNIPQQFIWPDNEKPNINAPELQVPLVDLGDFLSGNPVAAVEASRLVGEACKKHGFFLVVNHGVDKTLIAHAHNYVDTFFKLPLSEKQKAQRKIGESCGYASSFTGRFSSKLPWKETLSFRYKAEENSSKHIEEYFHNRMGEDFAEFGTVYQDYCEAMSTLSLGIMELLGMSLGVSREHFREFFNENDSIMRLNYYPPCQKPDLTLGTGPHCDPTSLTILHQDQVGGLQVFVDNEWRSINPNFDAFVVNIGDTFMALSNGVYKSCLHRAVVNSQTPRKSLAFFLCPKNDKMVTPPHELVDTCNPRIYPDFTWPMLLEFTQKHYRADMKTLEVFTNWLHQRSFS

SEQ ID NO: 5637 - protein, 339 aa, Wolbachia pipientis
SLCDKKIQLGINLTKGLGAGALPDIGKGAAEESIDEIMEHIRDSHMLFITAGMGGGTGTGAAPVIAKAAREARAVVKDKGAKEKKILTVGVVTKPFGFEGVRRMRTAELGLEELQKYVDTLIVIPNQNLFRIANEKTTFADAFQLADNVLHIGIRGVTDLMIMPGLINLDFADIETVMSEMGKAMIGTGEAEGEDRAISAAEAAISNPLLDNVSMKGAQGILINITGGGDMTLFEVDAAANRVREEVDENANIIFGATFDQAMEGRVRVSVLATGIDSCNDNASVNKNKIPAEEKNFKWPYNQIPTLETKEYASTEQTNERVKWGSNVYDIPAYLRRKK

SEQ ID NO: 5638 - protein, 142 aa, Burkholderia thailandensis E264
MHIVCSHCFAINRLDADRLGEHPLCGTCGSPLLTGEPANLDERHFATFVGRNDLPVVVDFWANWCGPCHAMTPQFAAAAKLLTGSVMFAKVETDHAQRISAQYQIRSIPTVILFLNGVESSRRTGAMSSQQITQWVRSVQPR

SEQ ID NO: 5639 - protein, 111 aa, uncultured episymbiont of Alvinella pompejana
WTMVAGGGASVVYADTIADFAGIDDLTNYGEYSGGPTTGETKFYAETIFDLMTSEKDPQGRGKVLIIGGAIANFTDVAKTFTGIIQAFENYQDKLKEVDTKIYVRRGGPNY

SEQ ID NO: 5640 - protein, 332 aa, Wolbachia endosymbiont of Drosophila melanogaster
MATLSVREALCTAIREEMQNDSDVLIMGEEVAEYDGAYKVTKGLLKEFGENRIVDTPITEHGFAGLAVGAAFAGLKPIVEFMTFNFSMQAIDQIVNSAAKTNYMSGGQLGCPIVFRGPNGAAARVAAQHSQCFAAWYSHIPGLKVIAPYFASDCRGLLKAAIRDPNPVIFLENEIAYGHEHEVSDSELSNKDYLLEIGKAAVIREGKDVTITAFSLKLMDALNAADLLSSKGIEAEVIDLRTLRPLDTQTVINSIQKTNRLVSVEEGWPFAGIGAELSAVVMEQGFDYLDAPVVRVTGKDIPLPYAANLEKKALPQVEDIVEAVHQVCFRKK

SEQ ID NO: 5641 - protein, 101 aa, uncultured episymbiont of Alvinella pompejana
VVYADTIADMAGIDDLANYGEYSGGPTTGETKFYAETLLDLMTREKDPQGRGKVMIIGGAIANFTDVAKTFTGIIQAFENYADKMKEVDLKIYVRRGGPNY

SEQ ID NO: 5642 - protein, 161 aa, Brassica napus
MGEIVFTEKQEALVKESWEILKQDIPRYSLHFFSQILEIAPAAKDMFSFLRDTDEVPHNNPKLKAHAVKVFKMTCETAIQLREKGKVAVPDTTLQYLGSVHLKSGVLDPHFEVVKEALVRTLKEGLGEKYNEEVEGAWSQAYDHLALAIKAEMKQENSQKP

SEQ ID NO: 5643 - protein, 331 aa, Oryza sativa
MAKKRKRSSDAAAAVEKPDEFAPQRPERTLFGFKEKPADDEEAEAEAASEGEEDAAAAAAAAPFRNKEKVLVTCSRRINYRYRHLMQNVVSLLPHAKKDSKVESKQSKGNALNELLELRNCSSCLFFECRKQKDLYLWMVKSPGGPSVKFLVNAVHTMEELKLTGNHLKGSRPLITFSTNFDEQPHWQLVKEMLTQIFATPKDHRKAKPFHDHVFVFSIVDDHVWFRNYQISVPHNEIDKVDKGGLDKMTLVEVGPRFCLNPIKIFGGSFGGPTLYENPFYVSPNQIRALEKRKKAGKYAKKVKAKVRRKMHEMENTLEPDEFAELWKGED

SEQ ID NO: 5644 - protein, 274 aa, Saccharomyces cerevisiae
LADGAHIGNYQIVKTLGEGSFGKVKLAYHTTTGQKVALKIINKKVLAKSDMQGRIEREISYLRLLRHPHIIKLYDVIKSKDEIIMVIEYAGNELFDYIVQRDKMSEQEARRFFQQIISAVEYCHRHKIVHRDLKPENLLLDEHLNVKIADFGLSNIMTDGNFLKTSCGSPNYAAPEVISGKLYAGPEVDVWSCGVILYVMLCRRLPFDDESIPVLFKNISNGVYTLPKFLSPGAAGLIKRMLIVNPLNRISIHEIMQDDWFKVDLPEYLLPPDL

SEQ ID NO: 5645 - protein, 112 aa, uncultured episymbiont of Alvinella pompejana
WTMVAGGGASVVYADTIADLAGGVEDLANYGEYSGGPTTDETRFYTETVLDLMTREKDPQGRDKILIIGGAIANFTDVAKTFKGIIQAFEKYADKMKDVGVRIYVRRGGPNY

SEQ ID NO: 5646 - protein, 922 aa, Methylobacterium extorquens
MTKTLHARPSAATDTTFAPPVITGTATEDALEILFHALLDVARRHDPELEDVLHGRADISSFTPEMLARALQVQGIWFQLVSIAEQNAAMRRRRHVERDQGREALNGSFAKVLAEASARGIGPQQIHALLKDLRIRPTITAHPTEGKRVTVLEKLRRIYLVLRELELPRWTERERNGLMNELRDQIELIWMTGELHLEKATVEREVAWGLHFFDETLFEMLPEMLLSLEESLAQYYPDETFEVPPFFQFGSWIGGDRDGNPYVTASVTRETLQRNALASLRRYRDGITHLGRVLSITERSLPVPETFRSELAHMLAESGDARAIANRNPGEAYRQFLSCVLRKLEATIARNKGARSVGPDYPSADGLINDLRTLEKGLADAKCGALATDIVRPVRRMVEIFRFSTVRLDLRENSTRTTKTLHALWKLRNGDREPPALDSPAWKDWLLTELARPRTPETSFEDFADRLPDDARETLATFALVGEMRDTLDREAFGAFILSMTRSTVEVLGAYLLAKEAGIFLDTTGTEICPLPIVPLFETIDDLRAAPAIMKELLGIPVVRRSTRWQGGVQEVMIGYSDSNKDGGFIASNWELYKAQVRLTTLGNHLGVPIAFFHGRGGSVSRGGVPTHRGIAAQPPGSIQGRFRITEQGEVVSFKYANRGTAAYQMELLAASVFEHALLSEGNGNGSRAEFDDALEALSGASRAAYVNLLQAEGLVDYFQAASPLDEISLLNIGSRPARRFGAKSLSDLRAIPWVFAWSQNRHVITGWYGVGSGLKSFIDVRGEAGEALLRRLFRDCRVFRLVLDEVEKTLLMVDLEIARDYAGLVEDAGIRARIFGMIEAEYALTREMVLRVSGDSELAQRFPQFSERLRGRLPTINQVSREQVELLRRYRSETDEDKREAVKSALLLSINCIAVGFGATG

SEQ ID NO: 5647 - protein, 1014 aa, Oryza sativa (japonica cultivar-group)
MISLHSAPFTLLVKLPGRRRSGLTPPRCAVRGAGNVSSAAVREMAVAEGRRQHEYSIDARLRQLAPEKVSADDRLVDYETLLVARFLDILEDLHGGDFRQVVEDCLRLSGEYQSEGDPARLGELGGLLTSLDVGDAIMVASSFSHMLNLANLAEEIQMVYRKKAEASRRGDFVDEASAPTESDIDETFQRLVRGLGKSPREVFDALRSQTIDLVLTAHPTQSVRRSLLQKHASIRSCLTQLCGEGISDNEEQEIDEALQREILAAFKTDEIRRTPPTPQDEMRAGMSYFHDTIWNGVPKFLRRVDTALKNIGIDERLPYNAPLIQFSSWMGGDRDGNPRVTPEVTRDVCLLARMMAANMYFSKMADLMFELSMWRCNDELRARANELHRKSSRKYAKYYIEFWKKISPGEPYRIILGDVRDKLYNTCERARQILSKGISSIPEDQTYTNVEQFLEPLELCYRSLCDCGDKLIADGRLLDLMRQVSTFGLSLVKLDIRQESERHTDAMDAITTHLGIGSYREWPEERRQEWLVSELRGRRPLFGPDLPQSEEVADVLGAFRVIAELPADSFGAYIISMATAPSDVLAVELLQRECGVKKPLRVVPLFEKLADLQQARATMELLFSVDWYKERIDGKQEIMIGYSDSGKDAGRLSAAWQLYKAQEEIVGVAERHGVKLTIFHGRGGTVGRGGGPSHLAILSQPPNTVNGSLRVTVQGEVIEKSFGEENLCFRTLQRFTAATLEHGMNPPVSPKPEWRRLLDDMATVATDEYRSIVFQEPRFVEYFRAATPETEYGRMNIGSRPSKRKPGGGIESLRAIPWIFAWTQTRFHLPVWLGFGAAFRHAMQQSDAGGGLATLREMYDEWPFFRVTIDLLEMVFAKGDPGIAALYDELLVPDDLRPFGEQLRANYVETQRLLLQVAGHKDLLESDPYLRQRLMLRDSYITALNVCQAYTLKRIRDGGFRPETRPPLSKELLGSSAVAEKLVKLNPNSEYDPGLEDTLILTMKGIAAGMQNTG

SEQ ID NO: 5648 - protein, 639 aa, Solibacter usitatus Ellin6076
MCGIAGFTRLNKYASRGVAQRITEALSHRGPDQQGVFEGSEATLCAVRLKIIDLAGGDQPILSDDGDTAIAFNGEIYNHREVRGELEALGHRFRSNCDTETVLRAFLQWDTAAFQRLRGMFAIALWTESRKRLLLVRDRMGIKPLYYYRSGDDLYFGSELKAILEHPDVPRTLDLSALDTYLSVNYVPGPQTLIRGIRKVPPGHLLEWRHGKAWCEAWWKRPDSGTRRISLGAAKEQLDVLMKDSVREHLVSDVPLGVWASGGLDSSAILHYAAAQTAGRLKTFSVSFEGRSFDESRYFREIAQVYGTDHHEFDLNPDVELQSAIEDFAYYSDEPSADAGALPVWFLSRMSRRHVTVALSGEGADELFGGYLTYQADRLARPFRMVPAGLRRLMRGALDRYMPVSDDKISLEYKLKRWIDGSLLNADEAHFFWNGTFSPEQLRQIRPGTNGNGLQRMVEGLNGPREVVQRYLDVDQSFYLPDDILYKTDRMSMAHSLEVRPPFLDHRIVEFAASLPQRLKIRGAKQKHVLRELMRGKLPESVLTRKKSGFDIPTHDWFRGTLRGMLMDTLTPDAIAATGVFDANAIDGLIRDHMERRINVGYHLWGLLTLFLWMKRWKVEALPPEEEMRQVPARVLATR

SEQ ID NO: 5649 - protein, 111 aa, uncultured episymbiont of Alvinella pompejana
WTMVAGGGASVVYADTIADMAGIDDLANYGEYSGGPTTGETKFYAETIFDLMTREKDAQGRGKVLIIGGAIANFTDVAKTFTGIIQAFEEYADKMKDTGVRIYVRRGGPNY

SEQ ID NO: 5650 - protein, 578 aa, Bradyrhizobium japonicum USDA 110
MAINNVADLFVATLEQAGVKRIYGIVGDSLNAFTEALRRRGTIEWIHVRHEEVAAFAAAGEAEMTGSLAVCAGSCGPGNLHLINGLFDAHRSRVPVLAIAAQIPSAEIGGGYFQETHPQNLFRECSHYCELVSDASQLPFVIENAIRAAVGLRGVAVIAMPGDVAFRDPPRRALSTARGLALSAPKVVPEANELKALADLLNGAERITLFCGRGCAGAHAPLMQLAEALKSPIVHALGGKEHVEYENPYDVGMTGFIGFSSGYAAMHACDALVMLGTDFPYKQFFPTGCQIAQIDIRPENLGRRCKIDLGLIGDVKLTIEALLPLLKTKTQRKHLDDAVAHYKKAREGLDSLARGTPGSKPIHPQYLAKVVSDHASEDAVFTADVGTPTVWAARYLEMNGRRRLIGSFVHGSMANAMPQAIGAQASQPGRQVISLSGDGGFTMLMGDLITLTQMKLPVKVVVFNNGVLGFVALEMKAAGFVDTNVDLQNPDFAAMARAMGIFAKRVEDPGELPGAVKEMLAHNGPALLDVVTAKQELSMPPTITTEQIKGFSLWVLRAVMNGRGDEVLDLAKTNLLPR

SEQ ID NO: 5651 - protein, 481 aa, Mannheimia succiniciproducens MBEL55E
MSGEKTSRYVLGVTLVATLGGLLFGYDTAVISGTVSSLDTVFIQPKGLPEISANSLLGFCVASALIGCIIGGACGGYLSSKYGRKKALLIAALLFLISAFGSAYPEFGLKTINETNNIPYYLSNFLIQFVIYRIIGGIGVGIASMVSPMYIAEITPARIRGKMVSFNQFAIIAGQLIVYFVNYFIALNGDNTWLNMLGWRYMFLSEMVPAALFLILLFFVPESPRWLVLQNKFSQAEITLLKLLGERSGKTELQNIVSSLEHRVVKGAPLFSFGLGVIVIGIALSVFQQFVGINVALYYAPEIFKSLGASTNNALLQTIIMGTINLSCTTIAIFTVDKYGRKPLQIIGALGMAMGMFVLGMAFYANLSGTIALTGMLFYVAAFAISWGPVCWVLLAEIFPNAIRSQALAIAVAAQWIANYIVSWTFPMMDKSSYLVERFNHGFAYWVYGLMAILAALFMWKFVPETKGKTLEELELLWNKK

SEQ ID NO: 5652 - protein, 222 aa, Arabidopsis thaliana
MRVSQSLVPFAIIALVLSFVNAYDPSPLQDFCVAIDDLKGVFVNGRFCKDPKRVDAKDFFFSGLNVPGNTNNQVGSNVTTVNVDQIPGLNTMGISLVRIDYAPHGQNPPHTHPRGSEILVLVEGTLYVGFVSSNQDNNRLFAKVLHPGDVFVFPIGMIHFQVNVGKIPAVAFAGLSSQNAGVITIANTVFGSNPPIYPELLARAFQLDASVVKELQAKFGSI

SEQ ID NO: 5653 - protein, 153 aa, Triticum aestivum
MATTATGYGCSAALSFPGRGSSFAGRSPPSRACLTSSNPKLRTPAPSLRVSYLRRGLYVCACSGDVDPDASAASPAEASFDIKLPRRSLLVQFTCNKCDARTKRLINRVGYERGTVFLQCAGCQVYHKFVDNLGLIVEYDLREENGVNTCTED

SEQ ID NO: 5654 - protein, 628 aa, Vibrio fischeri ES114
MTIEINVPDIGADEVEVTEILVKVGDRVEEEQSLITVEGDKASMEVPASQAGIVKEIKIAEGDSVTTGSLIMIFEAEGAAEAPAAPAVEAAPVAAPAAASVAELKEVHVPDIGGDEVEVTEIMVAVGDTVEEEQSLLTVEGDKASMEVPAPFAGTVKEIKIASGDSVSTGSLVMIFEVAGSAPAAPEVEAAAPVAAAPAASAEKEVNVPDIGGDEVEVTEIMVAVGDTVEEEQSLITVEGDKASMEVPAPFAGTVKEIKIAAGDKVSTGSLIMTFVVEGTAPAAPQAAAAPAAQAAPAAAPVATASAPASTGEFEANNDYAHASPVVRRLAREFGVNLAKVKGTGRKNRILKEDVQGFVKDALKRLESGAAASGKGGDGSALGLLPWPKVDFSKFGETEVQKLSKIKKISGANLHRNWVMIPHVTQWDNADITELEAFRKEQNAIEAKNDTGMKITPLVFIMKAVAKALEAFPAFNSSLSEDGESIILKKYVNVGIAVDTPNGLVVPVFKDVNKKGIYELSEELMAVSKKARAGKLTASDMQGGCFTISSLGGIGGTAFTPIVNAPEVGILGVSKSEIKPVWNGKEFAPRLQLPLSLSYDHRVIDGAEGARFITFLNSALSDIRRLVL

SEQ ID NO: 5655 - protein, 216 aa, Escherichia coli K12
MRCKGFLFDLDGTLVDSLPAVERAWSNWARRHGLAPEEVLAFIHGKQAITSLRHFMAGKSEADIAAEFTRLEHIEATETEGITALPGAIALLSHLNKAGIPWAIVTSGSMPVARARHKIAGLPAPEVFVTAERVKRGKPEPDAYLLGAQLLGLAPQECVVVEDAPAGVLSGLAAGCHVIAVNAPADTPRLNEVDLVLHSLEQITVTKQPNGDVIIQ

SEQ ID NO: 5656 - protein, 302 aa, Corynebacterium glutamicum
MTLKIGTRGSKLATTQAGTIRDQLKYFGRDAELHIVTTPGDVNMSPVERIGVGVFTQALRDVLHAGECDVAVHSMKDLPTAADPRFHLVVPTRADSREALIARDGLTLAELPEGAKVGTSAPRRISQLKAIRPDLEILPLRGNIDTRMGKVTSGELDAVMLAYAGLTRVGMQDRATEVFDADIIMPAPAQGALAIECRADDTETVRALNMLMHADTFVSAVAERTVLNRLEAGCTAPVAAHATLDGYSGDTMTLTAGVYALDGSDQLVFSAEGDGARPEELGELVAQQLIDAGAANLLGDRS

SEQ ID NO: 5657 - protein, 215 aa, Phaseolus vulgaris
RLSYGYSSFKGKRSSMEDFFDTTISEVDGQMVAFFGVFDGHGGSRTAEYLKNNLFKNLSSHPDFIKDTKTAIVEAFKQTDIDYLNEEKGHQRDAGSTASTAMLLGDRIVVANVGDSRVVASRSGSAIPLSIDHKPDRSDERQRIEKAGGFIIWAGTWRVGGVLAVSRAFGDKLLKPYVVADPEIQEEEIDGVDFIIIASDGLWNVISNKEAVSLV

SEQ ID NO: 5658 - protein, 177 aa, Triticum aestivum
  misc_feature (97)..(97): Xaa can be any naturally occurring amino acid
  misc_feature (129)..(129): Xaa can be any naturally occurring amino acid
  misc_feature (131)..(131): Xaa can be any naturally occurring amino acid
  misc_feature (147)..(147): Xaa can be any naturally occurring amino acid
MAAPLRRVFPSLGRALLSPTPARMLSAEASDALVEIKPGEIGMVSGIPEEHLRRKVLIYSPARTASQQGSGKVGRWKINFVSTQKWENPLMGWTSTXGDPYANVGEAGLTFDSAESAKAFAEKHGWEYXVXKRHTPLLKPKTYAENXKWKGPRRRRKQLNCGLLSGDLKDLFSLPLG

SEQ ID NO: 5659 - protein, 483 aa, Xylella fastidiosa Temecula1
MLKKHLFIVKPIEPTNHTGTGKGGTQLKRSLTAGQLVMLGIGAVIGAGIFVLSGHAAAEYAGPAVVLSYILAGIACALAGLCYAEFAAMLPVSGSAYSYAYATLGEFTAWFIGWNLILEYMFSASTVAVGWSGYLNSFLSSFGYGLPASLSSAPLDVVDGRLIYSGGLINLPAVAIVAAISGLCYVGITQSAFVNSITVAIKVSVIVLFIAFAARYVNPDNWVPFVPDNVAPGKYGIEGVIRGAAVVFFSYIGFDAVSTTAGEAKNPQRDMPIGILGSLAICTVIYIAFSGVLTGLMHYSQLDTPKPVATALETYPTLSWLKHVVEIGAIAGLSSTMLMMLMAQPRIFYAMSQDGLLPKLLSKVHPKFQTPHVGTLIVGACACALAGLFPISLLGDLVSMGTLLAFATVCIGIVVLRRTRPDLPRPFRVPVYWVIAPTGAAACLYLFWQPFTEHWPLMVGWTVLGLVMYGLYGYQHSKLRHGG

SEQ ID NO: 5660 - protein, 117 aa, Triticum aestivum
MARVALLAVFTVLAALAVAEMASGAVTCSDVTSAIAPCMSYATGQASSPSAGCCSGVRTLNGKASTSADRQAACRCLKNLAGSFSGISMGNAANIPGKCGVSVSFPINNNVNCNNLH

SEQ ID NO: 5661 - protein, 284 aa, Geobacillus kaustophilus
MTAQIISGTEMARTIRTALADEAAQLKADGVEPGLAVILVGDDPASHSYVKGKQKACAEVGIRSFLYTFPAAIDEETLLAKIRELNVDPAVHGILVQLPLPDHICEWSVIETIAPEKDVDGFHPINVGKMMIGQRAFLPCTPHGILVMVQSAGIDIAGKHVVVVGRSNIVGKPVGQLFLREHATVTYTHSKTPDLAAITRQADILIVAVGKARLIGPEHIKPGAVVIDVGVNRLENGKLCGDVDFDAVKEVAGYITPVPGGVGPMTITMLLHNTIEAARQLAAK

SEQ ID NO: 5662 - protein, 477 aa, Xylella fastidiosa Temecula1
MFKQLWATKLSQPSQDSAEGLSMQRVLGVWGLTALGIGAVIGGGIFVITGQAAANHAGPAIMLSFALAAICCTFCALAYAEFAAMVPVSGSAYTYTYATFGELAAWFIGWMLVLEYGVSAAAVAVSWSGYFLSLLQHLGIHLPAALVNAPLDGTLHATGAIANLPAATIVLLLTWLCYFGIRKSSKINIAMVALKSGLILLIIGVGWKYVNPDYWQPFIPTNQGPGKYGWNGVLHGASMVFFAYIGFEAVSVAAQESHRPQRDLPISMMSALAICTVLYIMMAAVMTGLVPYTQLGTDEPVVTAVAAHPQLGWLRVVVEIGALVGLSSVVLVMLIGQPRIFMIMAGDGLLPPIFSTIHSKHRTPHINTVITGLGIALLAAVFPLDVLGELTSMGTLIAFTAVCAGVLILRCTRPDLPRPFRMPAAWLFCSAGVLSCITLLSAMTRHNWMLMSVWTVLGFSLYFSYGYRHSKLHQEST

SEQ ID NO: 5663 - protein, 110 aa, Phaseolus vulgaris
MKSFDTLDNWHEEFLKQANPPDPRTFPFILLGNKIDIDGGNSRVVSEKKAKDWCASKGNIPYFETSAKEDFNVDAAFLCIAKAALANEHEQDIYFQGIPEAAVPENEQRS

SEQ ID NO: 5664 - protein, 1092 aa, Staphylococcus epidermidis
MINKKNNLLTKKKPIANKSNKYAIRKFTVGTASIVIGATLLFGLGHNEAKAEENSVQDVKDSNTDDELSDSNDQSSDEEKNDVINNNQSINTDDNNQIIKKEETNNYDGIEKRSEDRTESTTNVDENEATFLQKTPQDNTHLTEEEVKESSSVESSNSSIDTAQQPSHTTINREESVQTSDNVEDSHVSDFANSKIKESNTESGKEENTIEQPNKVKEDSTTSQPSGYTNIDEKISNQDELLNLPINEYENKARPLSTTSAQPSIKRVTVNQLAAEQGSNVNHLIKVTDQSITEGYDDSEGVIKAHDAENLIYDVTFEVDDKVKSGDTMTVDIDKNTVPSDLTDSFTIPKIKDNSGEIIATGTYDNKNKQITYTFTDYVDKYENIKAHLKLTSYIDKSKVPNNNTKLDVEYKTALSSVNKTITVEYQRPNENRTANLQSMFTNIDTKNHTVEQTIYINPLRYSAKETNVNISGNGDEGSTIIDDSTIIKVYKVGDNQNLPDSNRIYDYSEYEDVTNDDYAQLGNNNDVNINFGNIDSPYIIKVISKYDPNKDDYTTIQQTVTMQTTINEYTGEFRTASYDNTIAFSTSSGQGQGDLPPEKTYKIGDYVWEDVDKDGIQNTNDNEKPLSNVLVTLTYPDGTSKSVRTDEDGKYQFDGLKNGLTYKITFETPEGYTPTLKHSGTNPALDSEGNSVWVTINGQDDMTIDSGFYQTPKYSLGNYVWYDTNKDGIQGDDEKGISGVKVTLKDENGNIISTTTTDENGKYQFDNLNSGNYIVHFDKPSGMTQTTTDSGDDDEQDADGEEVHVTITDHDDFSIDNGYYDDESDSDSDSDSDSDSDSDSDSDSDSDSDSDSDSDSDSDSDSDSDSDSDSDSDSDSDSDSDSDSDSDSDSDSDSDSDSDSDSDSDSDSDSDSDSDSDSDSDSDSDSDSDSDSDSDSDSDSDSDSDSDSDSDSDSDSDSDSDSDSDSDSDSDSDSDSDSDSDSDSDSDSDSDSDSDSDSDSDSDSDSDSDSVSDSDSDSDSDSGSDSDSDSDSDSDNDSDLGNSSDKSTKDKLPDTGANEDYGSKGTLLGTLFAGLGALLLGKRRKNRKNKN

SEQ ID NO: 5665 - protein, 223 aa, Arabidopsis thaliana
MAMKSLSFLAALSLLALTLPLTIASDPSQLQDFCVSANSSANGVFVNGKFCKDPKLVTADDFFFPGLQTARPITSPVGSTVTAVNVNNLLGLNTLGISLVRIDYAVDGQNPPHTHPRATEILVVELGTLLVGFVTSNPDNRLFTKVLNEGDVFVFPEGLIHFQANIGKAPAVAFAALSSQNPGVITIAPTVFGANPAINPNILAKAFQVDPRVVMDLQTKFKK

SEQ ID NO: 5666 - protein, 246 aa, Aspergillus nidulans FGSC A4
MPRSKRARIVHESKTAKKSHKEQTRRLYANIRECVEKYDHLFVFSVDNMRNTYLKDVRTEFADSRLFFGKTKVMAVALGHNPETEAAENLHLLTPYLTGAVGLLFTSRDPASVTDYFDAFRPLDFARAGTEATRSFSIPAGLVYSRAGEIPTSEDEPVSHTIEPELRKLGVPTRLVKGKVMLELTDGQEGYPVCKKGEILDSRQTTLLKMFGVQTSEFRVGLKAHWARATGKVEILEKNENEMEVE

SEQ ID NO: 5667 - protein, 221 aa, Arabidopsis thaliana
MKSLSFLAVLSLLALTLPLAIASDPSQLQDFCVSANTSANGVFVNGKFCKDPKLVTADDFFFSGLQTARPITSPVGSTVTAVNVNNLLGLNTLGISLVRIDYAVNGQNPPHTHPRATEILVVEQGTLLVGFVTSNPDNRLFSKVLNEGDVFVFPEGLIHFQANIGKAPAVAFAALSSQNPGVITIANTVFGANPAINPTILAKAFQLNPRVVMDLQTKFKK

SEQ ID NO: 5668 - protein, 110 aa, Zea mays
  misc_feature (24)..(24): Xaa can be any naturally occurring amino acid
  misc_feature (49)..(49): Xaa can be any naturally occurring amino acid
MTRTQSAVTVAVVAAALLLVAAAXTTSHAAITCEQVSSAIAPCLSYARXRGSAPSASCCSSVRNIKSDNSNAADKRAACNCLKNDARCDSVLNTGNAASIPSKCGVKHPL

SEQ ID NO: 5669 - protein, 319 aa, Geobacter sulfurreducens PCA
MKKIGILTSGGDCSGMNAAIRAAVRTAIRMNIEVVGFRKGYLGLMKGDAIPLDTKAVSGILHRGGTFLQSARSPEFKTPEGQRTALNNLKALGVEGMVVMGGDGSLTGALALNRLGLPVVGIPASIDNDIPFTDMALGVDTALNNIIYAVDCIKDTASSHARAFVIEVMGRHSGYLASISAIATGAEYALVPEREYDLAEICQQLRARYEEGRDNAIIILAEGAGHGHEIANSIKDAIGFETRVTVLGHYQRGGAPTVFDRLLASRLGKKSVELLVTGTWGVMVGLSCNAILATPLEDVIKGEKRPQDEVLRLAEVLGV

SEQ ID NO: 5670 - protein, 81 aa, Arabidopsis thaliana
MASSMLSSATMVASPAQATMVAPFNGLKSSAAFAATRKANNDITSITSNGGRVNCMQVIYISSFTFLLVHMIFICFFIESR

SEQ ID NO: 5671 - protein, 385 aa, Populus tremula
MAIDCIKTMPSITTPHHHPKDQDQCKDDGKSFVFDAQVLRHQTNIPQQFIWPDNEKPNINAPELQVPLVDLGDFLSGNPVAAVEASRLVGEACKKHGFFLVVNHGVDKTLIAHAHNYVDTFFKLPLSEKQKAQRKIGESCGYASSFTGRFSSKLPWKETLSFRYKAEENSPKHIEEYFRNRMGEDFAEFGTVYQDYCEAMSTLSLGIMELLGMSLGVSREHFREFFNENDSIMRLNYYPPCQKPDLTLGTGPHCDPTSLTILHQDQVGGLQVFVDNEWRSINPNFDAFVVNIGDTFMALSNGIYKSCLHRAVVNSQTPRKSLAFFLCPKNDKMVTPPHELVDTCNPRIYPDFTWPMLLEFTQKHYRADMKTLEVFTNWLHQRSFS

SEQ ID NO: 5672 - protein, 573 aa, Aspergillus oryzae
MCGIFACYNHPDVQKFKPTALRMAKAVRHRGPDWSGNYIADKTILAHERLCIVGVDSGAQPLVNDDGSLALAVNGEIYNHRIIRKNLKNQYDFKTHSDCEVVIPLYMEHGLDAPKHLDGMFSWVLYDRKQDRVVAARDPIGVTSFYIGWSSETPGAIYFASELKSLHPVCDKIEAFPPGHIFDSKTGSMTRYFEPKWWDPTNVPTTPVDLKVLRHTLEKSVRKRLMAEVPYGVLLSGGLDSSLVASIAQRETLRMQEAAKVAIQNQTGSSDLVGIDDSNELSTVTTFQQLHSFSIGLPGAPDTEAALEVAKYLGTKHHAFTFTVEDGINALSDVIYHLETYDVTTIRASTPMYLLSRKIKAMGVKMVLSGEGSDEIFGGYLYFHAAPNKEEFHNETVRRVKALHLADCLRANKSTSAWGLEARVPFLDKNFLETAMGVDPQDKMITKERIEKYILRKAFDTTDEPDVEPYLPEKILWRQKEQFSDGVGYSWIDGLKDHAELHVTDEMMKNPKPEWGNDIPDTKEAYWYRMMFDEHFPPSCASTVERWVPTWSKQTDPSGRAIATHNAKYDHVE

SEQ ID NO: 5673 - protein, 618 aa, Ustilago maydis
DLIRCVKEGGVRSIGEMKSSTKCGTGCGGCMPLSTSILNKALKEAGVEVSNHLCGHFAYSRQDLYQIIKFKKLKDFTTVMSTVGKKADSLGCEVCRPAIGSILSSLYNDWIMAPQLRQTQDTNDRYLANMQRDGTYSVVPRLAAGEITPAGLKVIGEVAEEYGLYTKITGGQRIDMFGAKKQDLPAIWTKLVDAGFESGHAYGKALRTVKSCVGSTWCRYGVGDSVGLAHELETRYKGIRAPHKFKGGISGCVRECAEAQGKDFGLIATTKGWNVYVGGNGGAKPRHAELIAEDVTRRQAIKILDRFILFYIRSADKLERTARWIEKFPGGLKGLKEVIVDDKLGICEDLEKEMEVLVGTYHCEWTKVVRDPTRHKAFRQFVNTDETQPVSEMMSERDQQRPADWPVETGPLHFSILDVAKEAVWEWRSVCKYTDLDPQKDSPSSATIKYGDTQIAVWNIPGRGVRAAQNMCPPRRAFVLADGLVGEDDKGREYVSCPLHKRNYILSANADEEGGKCNDGDYSIMTFEAKMDEEKDLVYLKLPPTEALDAVLSTSKWMLRRATEESDAMAGGQSHSVEITGPLDMDTLEKGPSSPNKPGSPPAKKTKASCGEQSSLDW

SEQ ID NO: 5674 - protein, 275 aa, Solibacter usitatus Ellin6076
GDSARSLPTPQIMAWIMDTYSMNKGYPVHGVVTGKPLSIGGSLGRNEATARGVFYTTMSSCEHLGIQLAGSRVVVQGFGNAGAIAADLFHGAGAKVLAVSDTSGCIFNKNGLHIPAVVAYKARTGRLEGFPEATRITPAELLALECEILVPAALENAITEENAHTIHAKIISEAANGPVTPEADRILGSKGIFLIPDILCNAGGVTVSYFEWVQDENHLFWDEQDVNAKLEKIMKRSFADVLKIHLDKKVDMRLAANMLGVSRVAEACKVRGLYP

SEQ ID NO: 5675 - protein, 821 aa, Azospirillum brasilense
MSTHTNPPTPRERLVVVGNGMAGIRTLEELLAKAPDRYDITVFGAEPHPNYNRIMLSPVLAGEKTFEQIVLNGRDWYEANGIRLLTGDRVEVIDRANCTVTAISGLTVPYDKLLIATGSTPVIIPVPGSTLTGVVGFRDLADVDTMLEAAARGGRAVVIGGGLLGLEAANGLKVKGMDVTVLHLMDTLMERQLDRSAGALLRHELERRGITVLTGADTAEIVGSEKVSAVRLKNGQELPADLVVMAVGIRPNTTLGKAAGLACGRGIQVDDAMTTSDPAILSVGECVEHRGQTYGLVAPLFEMAKVAAARLAGSAEAAYTGSVTSTKLKVTGVDVFSAGDFTGGKDCEDIVFRDAARGVYKRVVVKENRILGAVLYGDTKDGGWYFQMLKDGTEVAPVRDTLIFGQSFGGEGAANPKAAVAALPDSAEICGCNGVCKGTIVTAITEKGLSSLDEVRAHTKASASCGSCTGQVEQLLALTLGDGYAGEAKAKPMCKCTDRTHDEVRRAITALDLKTIPDVMQRLEWRTPDGCHHCRPALNYYLLCEWPGEYKDDSRSRYINERVHANIQKDGTYSVVPRMWGGLTSAKELRAIADVVDKFAIPTVKVTGGQRIDLFGVKKEDLPAVWADLNAAGMVSGHAYAKGLRTVKTCVGSEWCRFGTQDSTGLGVKLERMTWGTWTPHKVKLAVSGCPRNCAEATIKDLGVVCVDSGYELHVGGNGGMHVRACDLLVKVETEAEVLEYTGAYMQLYREEARYLERTAPWVERVGLDHIRRRLVDDAEGRAALNARFLFSQSFSQDDPWAERANGSVDRHEFAPLAQVG

SEQ ID NO: 5676 - protein, 377 aa, Eucommia ulmoides
MAESDDIQPLVCDNGTGMVKAGFAGDDAPRAVFPSIVGRPRHTGVMVGMGQKDAYVGDEAQSKRGILTLKYPIEHGIVSNWDDMEKIWHHTFYNELRVAPEEHPVLLTEAPLNPKANREKMTQIMFETFNAPAMYVAIQAVLSLYASGRTTGIVLDSGDGVSHTVPIYEGYALPHAILRLDLAGRDLTDALMKILTERGYSFTTTAEREIVRDMKEKLAYITLDYEQELETSKTSSTVEKSYELPDGQVITIGAERFRCPEVLFQPSMIGMEAAGIHETTYNSIMKCDVDIRKDLYGNIVLSGGSTMFPGIAERMTKEITALAPSSMKIKVVAPPERKYSVWIGGSILASLSTFQQMWISKGEYDESGPSIVHRKCF

SEQ ID NO: 5677 - protein, 489 aa, Burkholderia pseudomallei K96243
MSVYGLQRLYIAGAHADATSGKTFDTFDPATGELLARVQQASADDVDRAVASAREGQREWAAMTAMQRSRILRRAVELLRERNDALAELEMRDTGKPIAETRAVDIVTGADVIEYYAGLATAIEGLQVPLRPESFVYTRREPLGVCAGIGAWNYPIQIACWKSAPALAAGNAMIFKPSEVTPLSALKLAEIYTEAGVPAGVFNVVQGDGSVGALLSAHPGIAKVSFTGGVETGKKVMSLAGASSLKEVTMELGGKSPLIVFDDADLDRAADIAVTANFFSAGQVCTNGTRVFVQQAVKDAFVERVLARVARIRVGKPSDPDTNFGPLASAAQLDKVLGYIDSGKAEGAKLLAGGARLVNDHFASGQYVAPTVFGDCRDDMRIVREEIFGPVMSILPFETEDEAIARANATDYGLAAGVVTENLSRAHRAIHRLEAGICWINTWGESPAEMPVGGYKQSGVGRENGITTLEHYTRIKSVQVELGRYQPVF

SEQ ID NO: 5678 - protein, 220 aa, Pinus caribaea
MATCCRAFVGILLVSLVVMNSVHADPEALQDFCVADTKSTIFMNGRPCLNPMEASPEHFITSALRKPGNLSANPLGFSVIVTTPANMPGLNTLGLSMGRIDMAPGSAIPPHIHPRGSETIFVVRGALNVGFVDTSNRLFSHKLVAGDVFIFPKGTVHYLQNTGKITAFTVSAFNSQNPGTVIVSMATFASTPAIPYEVLSKAFAISVQEVSQIRKSFGGN

SEQ ID NO: 5679 - protein, 215 aa, Zea mays
MHKLGRGSRDKVQQFMAITGASEKVALQALKASDWHLEGSFDYFYSQPQISVTNSRHLEDLYSRYKERDADMIMVEGTSQLCNDLLVDPQDVVMLVISWHMKAATMCEFTRQEFIDGLQSIGVDSIEKLREKLPSLRAEIKDDNKFREIYNFAFAWAREKGQKSLPLETAIGMWRLLFAERHWPLIDHWCQFLQVRHNKAISRDTWSQLLEFVRQ

SEQ ID NO: 5680 - protein, 155 aa, Triticum aestivum
  misc_feature (68)..(68): Xaa can be any naturally occurring amino acid
MQFLRGVSGGGGGGAWEVLRRHFSRKRAVDIRRINPKVPKEEAVAISGRLLQILADHGPLTVGNTWSXRPKDAAIDGLNSKTHMKILLKWMWGRRIIKLSCTQAGNTKKFLYSPFTADDAEAAEEPSPAEEQPKKKGWKGKHPKYQTKKQPAAAA

SEQ ID NO: 5681 - protein, 109 aa, uncultured episymbiont of Alvinella pompejana
  misc_feature (56)..(56): Xaa can be any naturally occurring amino acid
  misc_feature (62)..(62): Xaa can be any naturally occurring amino acid
WTMVAGGGASVVYADTIADLAGVKDLANYGEYSGGPTTAETQFYAETIFDLMTRHXDPRGKXLIIGGAIANFTDVAKTFTGIINAFEKYADKLKEHKTKIYVRRGGPNY

SEQ ID NO: 5682 - protein, 420 aa, Ehrlichia canis str. Jake
MSLNICLPDQSLLRPRITVFGVGGAGGNAVNNMIQSNLHGVNFVVANTDAQALELSLSEKKIQLGIGLTKGLGAGSLPEVGRGAAEESINEIIEEISDSNMLFITAGMGGGTGTGAAPVIAKVAKENKILTIGVVTKPFHFEGAHRMRTAELGLEELQRYVDTLIVIPNQNLFRIANDKTTFADAFKLADTVLHTGVRGITDLMVMPGLINLDFADIRAIMSEMGKAMMGTGEAEGENRAILAAEAAISNPLLDNISMKGAKGILINITGGLDMTLFEVDAAANRIREEVDSHANIIFGSTFNKESEGKIRVSVLATGIDNEEVVIQNKSTLKNKETQDNKLSEISNKSFNPSDNEIAYYKPSDPGQDMINSINHIRKQDNIENQVSNNKIYESAYKAQFNKNEFWDEESLNIPTFLRKK

SEQ ID NO: 5683 - protein, 112 aa, Nautilia sp. Am-H
WTMVAGGGASVVYADTIADMAGGVEDLANYGEYSGGPTTDETRFYTETVLDLMTREKDPKGRDKILIIGGAIANFTDVAETFTGIIQAFEKYADKMKDVGTRIYVRRGGPNY

SEQ ID NO: 5684 - protein, 530 aa, Xanthomonas axonopodis pv. citri str. 306
MLDANLKTQLTAYLERVTRPIQINASIDDSAGSREMLDLLEELVLLSDKISLDIHRDDNQRKPSFALTTPGQDISLRFAGLPMGHEFTSLVLALLQVGGHPSKAAAELIEQVQHLDGDYQFETYFSLSCQNCPDVVQALNLAAVLNPRIKHVAIDGAWFQEEVEARQIMSVPTVYLNGELFDQGRMTLEQIVAKLDTNAAKRDAAKIAAKEAFDVLVVGGGPAGSAAAVYAARKGIRTGVAAERFGGQVLDTMSIENFISVPETEGPKMAAALEQHVRQYDVDIMNLQRAEQLIPAGADGLIEIKLANGASLKSKTVILSTGARWRQMNVPGEDQYKNKGVAYCPHCDGPLFKGKRVAVIGGGNSGVEAAIDLAGIVAHVTLVEFDDKLRADEVLQRKLRSLHNVRIITSAQTTEVLGDGQKVTGLVYKDRTGGDIQHIELEGVFVQIGLLPNTEFLRGTVALSPRGEVIVDDRGQTDVPGVFAAGDATTVPYKQIVIAMGEGSKAALSAFDHLIRTSAPATADSVAQAA

SEQ ID NO: 5685 - protein, 410 aa, Zea mays
MGSWEENVRQFLLEEEEDDDELFFVILPAIIPYLSEEKRPIHTSSLTGAKKVKEILEGHESWCKSEFRMEKEIFKATSNFLRRENLLRDTRGVSVEKQLGMFMYMISHNASNQMLQKAFQHSGETIHRKISEVFEIVPILTQRFVKLPSSVQTHARIATDSRFMPFFQNCLGAIDGTHVSITIAEDRAPPYRNRKGTLSHNVMVVCDFDLNFTFVSCGWEGSASDAGVLRSAISKRFSVPEGKFYLVDGGYANTPSYIAPYRGVRYHLSQFRRSRSSQSGYANYKELFNHRHAILRNHIERAIGVLKKRFPILKVDTFHPIENQIKIAAAAITFHNIIRGQNGDEGWLDNQLDYISPSHYIGVTWYLQSAEWKQHMKLTRKRKMDDLLGYVSLSCACCISCYREDRGPGE

SEQ ID NO: 5686 - protein, 608 aa, Brucella suis 1330
MAFQTFDVTTNPANGAPRVEKLRKKMAELGLDGFLVPRADEHQGEYVPPHAQRLGWLTGFTGSAGAALVLKNSAYIFVDGRYELQVRAQTDGKVFSYESLVSNPPASWLAENGKGLTIGFDPWLHTIYEAEALRNALEKQGGQLIPVETNLVDAVWDDQPEAPAAEVTIQPARFSGHEAKDKISEMKAAVAASGASATVLTDPSSVAWVFNIRGKDVSNTPLPLSFAIIPAQGEPELFIDERKLAIEPRAYLTQLAKLSAPADLEGHLGARAARGEAILLDPVLAAEKLRLIVTSAGGSVIEGKDPARIPRAIKNKAELDGSRAAHERDGVAMVNFLSWIDAQKPGTIDEISAAKKLEESRANAGRDFQMPLEDISFDTISGAGPNGAIIHYRVNTDTNRTLQDGELYLVDSGAQYRDGTTDITRTVPIGRIDPETVKAFTLVLKGVIAITTARFPKGTRGQDIDILARIALWKHGFDYAHGTGHGVGSYLSVHEGPQSISRKGAQELLPGMILSNEPGYYKPGAFGIRIENLIIVTEPEVLPGGDIPMMGFETLTFCPIDRRLVDKALLTQEELDWLNTYHAKVRAKLSGHLGDAERKWLEAATAPF

SEQ ID NO: 5687 - protein, 178 aa, Arabidopsis thaliana
  misc_feature (85)..(85): Xaa can be any naturally occurring amino acid
  misc_feature (101)..(101): Xaa can be any naturally occurring amino acid
  misc_feature (110)..(110): Xaa can be any naturally occurring amino acid
  misc_feature (131)..(131): Xaa can be any naturally occurring amino acid
  misc_feature (137)..(137): Xaa can be any naturally occurring amino acid
  misc_feature (140)..(140): Xaa can be any naturally occurring amino acid
  misc_feature (144)..(144): Xaa can be any naturally occurring amino acid
  misc_feature (146)..(146): Xaa can be any naturally occurring amino acid
  misc_feature (161)..(161): Xaa can be any naturally occurring amino acid
  misc_feature (173)..(173): Xaa can be any naturally occurring amino acid
MASSMLSSAAVVTSPAQATMVAPFTGLKSSAAFPVTRKTNKDITSIASNGGRVSCMKVWPPIGKKKFETLSYLPDLSDVELAKEXVDYLLRNKWIPCVEFXELEHGFVYXREHGNNSGYYDGPVLGQMWEXPLVGCXDFXQVVXKXVEKCQKGDPGPFIKXIRIHNTRQVQCXNLLLQ

SEQ ID NO: 5688 - protein, 111 aa, Candidatus Arcobacter sulfidicus
WTMVAGGGASVVYADTIADMAGIEDLANYGEYSGGPTTGETKFYAETLFDLMTREPDPQGRGKVLIIGGAIANFTDVAKTFTGIIQAFENYQDKLKAVDTKIYVRRGGPHY

SEQ ID NO: 5689 - protein, 967 aa, Zea mays
MAALGAKMERLSSIDAQLRMLVPGKVSEDDKLIEYDALLLDRFLDILQDLHGDDLKEMVQECYEVAAEYETKHDLQKLDELGKMITSLDPGDSIVIAKSFSHMLNLANLAEEVQIAYRRRIKLKKGDFADENSAITESDIEETLKRLVVDLKKSPAEVFDALKSQTVDLVLTAHPTQSVRRSLLQKHSRIRNCLVQLYSKDITPDDKQELDEALQREIQAAFRTDEIRRTQPTPQDEMRAGMSYFHETIWKGVPKFLRRVDTALKNIGINERVPYNAPLIQFSSWMGGDRDGNPRVTPEVTRDVCLLARMMASNLYCSQIEDLMFELSMWRCSDELRMRADVLHLSTKKDAKHYIEFWKKVPPNEPYRVILSDVRDKLYNTRERSRELLSSGHSDIPEEATLTNVEQLLEPLELCYRSLCACGDSVIADGTLLDFLRQVSTFGLSLVRLDIRQESDRHTDVLDAITTYLGIGSYREWTEERRQEWLLSELNGKRPLFGSDLPKTEEISDVLDTFHVIAELPSDNFGAYIISMATAPSDVLAVELLQRECHVKTPLRVVPLFEKLADLEAAPAALARLFSIDWYRQRINGKQEVMIGYSDSGKDAGRLSAAWQLYKAQEELIKVAKDFGVKLTMFHGRGGTVGRGGGPTHLAILSQPPDTIHGSLRVTVQGEVIEQSFGEEHLCFRTLQRFTAATLEHGMHPPNAPKPEWRALLDEMAVVATEEYRSIVFKEPRFVEYFRLATPETEYGRMNIGSRPSKRKPSGGIDSLRAIPWIFAWTQTRFHLPVWLGFGAAFKNVLQKDIRNLHMLQEMYNEWPFFRVTIDLVEMVFAKGNPGIAALYDKLLVSEELHPLGEKLRANYEETQKLLLQVAGHRDLLEGDLYLKQRLRLRDAYITTLNVCQAYTLKRIRDPDYHVALRPHLSKEIMDSTKAAAELVKLNPGSEYAPGLEDTLILTMKGIAAGLQNTG

SEQ ID NO: 5690 - protein, 226 aa, Triticum aestivum
MVVSPKIAPSMLSSDFANLAAEAKRMVDLGADWLHMDIMDGHFVPNLTIGAPVIESLRKHTSAYLDCHLMVTNPMDYVEQMGKAGASGFTFHVEVAKENWQELVSKIKSAGMRPGVALKPGTPVEEVYPLVEGETPVEMVLVMTVEPGFGGQKFMPNMMDKVRALRQKYPTLDIEVDGGLGPSTIEAAAAAGANCIVAGSSVFGAPESGKVISLLRTSVEKAQPTT

SEQ ID NO: 5691 - protein, 110 aa, Persephonella marina
WTMVAGGGASVVYADTVADLGYVKELANYGEYSGNPSRAETREYVKTVFDLMTRSKHPKGHRILIIGGAIANFTDVAKTFDGIIDAMKEYADKLREIGVRIYVRRGGPNY

SEQ ID NO: 5692 - protein, 121 aa, Brassica napus
  misc_feature (10)..(10): Xaa can be any naturally occurring amino acid
PLQYARARDXFKISSHDRVYEVKKGELLCGYQPLVMRDANIFEDPEEFKPDRFVGQTGSKLLNYLFWSNGPQTGTPSVSNKQCAAKDMVTITAALIIANLFLRYDKITGDAGSIKTVVKAT

SEQ ID NO: 5693 - protein, 330 aa, Yarrowia lipolytica CLIB122
MTVRDALNTALREEMDRNDNVFIMGEEVGQYNGAYKVTKGLLDKFGEKRVVDTPITEMGFAGVCVGAALAGLTPVCEFMTWNFAMQAIDQIINSGAKTYYMSGGTQQCNVTFRGPNGAAAGVAAQHSQDFTGWYGQIPGLKVVSPYSSEDAKGLLKAAIRDPNVTVFLENEIMYGESFPMSEEAMSPDFVLPLGKAKIEREGKDITLVGHSRNVETALKAADLLKKHHNVDAEVINLRTVKPLDTETIFNSIKKTNRLVSVEAGFPAFGMGSELCGVVNDSWAWDYLDAPIQRVTGAEVPTPYAIELENFAFPTPEIVVKAAKDALYIEE

SEQ ID NO: 5694 - protein, 471 aa, Streptococcus suis 89/1591
MSEERIEPTPIDLGEYKFGFHDENVELVASTGKGLNEEVIREMSRIKGEPEWMLEFRLKSYETFKKMPMQTWGADLSELDFDDIVYYQKPSDKPARSWDDVPDKIKETFERIGIPEAERAYLAGASAQYESEVVYHNMKEEYDKHGIIFTDTDTALKEHPELFKKYFGKLVPPSDNKLAALNSAVWSGGTFIYVPKGVKLDIPLQTYFRINNEGTGQFERTLIIVDEGASVHYVEGCTAPTYSTASLHAAIVEIIAHEGAYMRYTTIQNWSDNVYNLVTKRARAEKNATVEWIDGNLGAKTTMKYPAVYLEGEGARGTMLSIAFANKGQVQDTGAKMIHNAPRTSSSIVSKSIARGGGEVNYRGQVTFAKNSAKSISHIECDTIIMDDISKSDTIPFNEIHNSQVALEHEAKVSKISEEQLYYLMSRGLSESEATEMIVMGFVEPFTKELPMEYAVELNRLIAYEMEGSVG

SEQ ID NO: 5695 - protein, 878 aa, Pseudomonas syringae pv. phaseolicola 1448A
MADIDARLREDVHLLGELLGNTIREQRGAEFLDKIERIRKGAKAGRRGSAEGAEQLSASVDGLGDDELLPVARAFNQFLNLANIAEQYQLMHRRDDTQPLPFESRVLPELLDRLKTEGHTPDALARQLSKLEIELVLTAHPTEVARRTLIQKYDAIAAQLAALDHRDLNSTERAQITSRLQRLIAEAWHTEEIRRIRPTPVDEAKWGFAVIEHSLWHAIPNYLRKADHALHAATGLNLPLEAAPIRFASWMGGDRDGNPNVTAIVTREVLLLARWMAADLYLRDVDNLAAELSMQQASDALRARVGDSAEPYRAELKRLRERLRATRNWANASLSETLPAPEAVLRDNRELLDPLLLCFQSLHECGMGVIADGPLLDCLRRAVTFGLFLVRLDVRQDSSRHCAAMTEITDYLGLGRYEEWDEQTRIDFLLRELNNRRPLLPGYFKPAADTAEVLATCRVVAAAPTASLGSYVISMAGSASDVLAVQLLLKEAGLQRPMRVVPLFETLADLDNAGPVIEKLLGLPGYRSRLHGPQEVMIGYSDSAKDAGTTAAAWAQYRAQEKLVEICREQQVELLLFHGRGGTVGRGGGPAHAAILSQPPGSVAGRFRTTEQGEMIRFKFGLPDIAEQNLNLYLAAVLEATLLPPPPPQPSWRTMMDQMAADGVGAYRAVVRENPEFVEYFRQATPEQELGRLPLGSRPAKRREGGVESLRAIPWIFAWTQTRLMLPAWLGWEAALSKALERGEGTVLAQMREQWPFFRTRIDMLEMVLAKADSDIARLYDERLVSAELQHLGAHLRDLLSQACNVVLGLTGQKQLLAHSPETLEFISLRNTYLDPLHLLQAELLSRSRSREASLDSPLELALLVSVAGIAAGLRNTG

SEQ ID NO: 5696 - protein, 614 aa, Mannheimia succiniciproducens MBEL55E
MKNVKFFAQRYIDWVTKLGRLKFSLLGFILIAILALCTHIFLSLMITGQIHWESLLYSVVFGVISAPFVIYFFALLVERLELSRQNLTNLVGELQQEIRERTTAEQRLAQAIRDKTTLMATISHELRTPLNGIVGLSRILLDSKLTEEQYNYLKTINVSAVSLGHIFNDIIDLEKLDGSRIELYKKETDFHALITDVYNVAQLMAEQKHLKFILQVDKDLPNWLLLDYTRLSQVLWNLISNAVKFTDKGTVTLKISRLSENRYAFAISDTGPGIPENELNKIFTMYYQVKANFNKHKAAGSGIGLAISKSIARLMNGDLVVESEIGKGSTFILTIQADEVSKPVSDGTADLDLSLSILLVEDIELNIIVAKSLLEKLGHQVDTAMTGQEALTKFERNNYDLVLLDIQLPDMTGFDIAKILRTKYEDGVYDYLPPLIALTANVMQNKSDYQKQGMDDVLRKPLSLDSLNQCLSEYFGDEIGVSSAQNSVMTKAAELPDDFDYPLLDDLVEMLGASFVLKNLALFKQTMPEYIDELLTIYQNYQKDKEKKKDVAACMHKIKGAAASVGLKHIQLLAEKGQHDEADIWRENIKRWIDEIEQSWFEDVTKLEHWLAKK

SEQ ID NO: 5697 - protein, 420 aa, Streptococcus suis 89/1591
MTKEKIQEFSALQAEPTWLTDLRLKAFDKIAELDLPVIERVKFHRWNLGDGSLATNDEIGAVPDFTAIGDNPMLVQVGSQTILEQLPVDLVEKGVVFTDFASAMDLIPDVIEKYLGVAVAYDEHKLAAYNTAYFNATAVLYVPDNVEIDQPVEALFYQDSTSPVAFNKRVLIIAGKNAKLNYLERFESLGDGAATTSANIVVEVIALAGSQIKFAAIDRLGKHLDTYLNRRGYLGNDATIDWAIGLLNEGNVVADLDSELKGNGSHANLKVVGLSSGRQVQGVDTRVTNYGHNSVGHILQHGVILESGTLTFNGIGHIVRGAKGADAQQESRVLMLSDKARSDANPILLIDENEVTAGHAASIGQVDPEDMYYLMSRGLDQATAERLVVRGFLGAVITEIPVKEVRDQLIAVIEEKLTKR

SEQ ID NO: 5698 - protein, 359 aa, Glycine max
MGGFMICIIICCFRYKLLIQPIKLCSTTKSDQDIEAFLKNKGAVAQKRYKFSEVKKMTNSFKVKLGQGGFGAVYKGQLPTGCPVAVKLLNSSKGNGEEFTNEVASISRTSHVNIVTLLGFCLKGRKKALIYEFMANGSLDKFIYNRGPETIASLRWQNLYQISIGIARGLEYLHRGCNTRILHFDIKPHNILLDENFCPKISDFGLAKLCPRKESIISMSDTRGTLGYVAPEMWNRHFGGVSHKSDVYSYGMMLLEMVGGRKNIDAEASRTSEIYFPHLAYKRLELDNDLRPDEVMTTEENEIAKRMTIVGLWCIQTFPNDRPIMSRVIEMLEGSMNSLEMPPKPMLSSPTRSATESSS

SEQ ID NO: 5699 - protein, 651 aa, Arabidopsis thaliana
MQDLFGSVRRSLVFRSTTDDENQENHPPPFPSLLADKITSCIRKSMVFAKSQSPPNNSTVQIKPPIRWRKGQLIGRGAFGTVYMGMNLDSGELLAVKQALITSNCASKEKTQAHIQELEEEVKLLKNLSHPNIVRYLGTVREDETLNILLEFVPGGSISSLLEKFGAFPESVVRTYTNQLLLGLEYLHNHAIMHRDIKGANILVDNQGCIKLADFGASKQVAELATISGAKSMKGTPYWMAPEVILQTGHSFSADIWSVGCTVIEMVTGKAPWSQQYKEIAAIFHIGTTKSHPPIPDNISSDANDFLLKCLQQEPNLRPTASELLKHPFVTGKQKESASKDLTSFMDNSCSPLPSELTNITSYQTSTSDDVGDICNLGSLTCTLAFPEKSIQNNSLCLKSNNGYDDDDDNDMCLIDDENFLTYNGETGPSLDNNTDAKKSCDTMSEISDILKCKFDENSGNGETETKVSMEVDHPSYSEDENELTESKIKAFLDDKAAELKKLQTPLYEEFYNGMITCSPICMESNINNNKREEAPRGFLKLPPKSRSPSQGHIGRSPSRATDAACCSKSPESGNSSGAPKNSNASAGAEQESNSQSVALSEIERKWKEELDQELERKRREITRQAGMGSSPRDRSLSRHREKSRFASPGK

SEQ ID NO: 5700 - protein, 81 aa, Triticum aestivum
  misc_feature (10)..(10): Xaa can be any naturally occurring amino acid
  misc_feature (63)..(63): Xaa can be any naturally occurring amino acid
  misc_feature (76)..(76): Xaa can be any naturally occurring amino acid
MSEESGRPLXPKFGEWDVNDPASADGFTVIFNKARDEKKAGNGQDTESPCKDARTERVEAYAXKANSKKWFCCVTXSPTQS

SEQ ID NO: 5701 - protein, 192 aa, Zea mays
  misc_feature (146)..(146): Xaa can be any naturally occurring amino acid
MASLLDSVTVTRVFSLPITSSISPASKVPSISARRISPVPEFRGLKASWRSSVTQSASLGTNLGSRFARGGRIVCEAQDTTAAAVEVPNISDSEWQTQVLESDVPVLVEFWAPWCGPCRMIHPIVDQLARDFAGKFKFYKINTDEXPNTANPYGIRSVPTVIIFKDGEKKDSIIGAVPKETLEKTIERFVVE

SEQ ID NO: 5702 - protein, 151 aa, Brassica napus
  misc_feature (139)..(139): Xaa can be any naturally occurring amino acid
EALPESARSCDDGLYRAIDSYLKAHPTLSEHERKRLCRVMDCQKLSMDACMHAAQNERLPLRVVVQVLFSEQVKISNALANTSLKESTTLGEAMGTTYQPMIPNRKTLIEATPQSFQEGWAAAKKDINTLKFELETVKXKYVELQNEMEVM

SEQ ID NO: 5703 - protein, 630 aa, Fusarium oxysporum
MSLLRLCMHASPLRALRYSFIPNRVQLARSTTILHPARFTTMPPKRTKRESSSPPAKKAKTSKTNGSSTSDALRQPHHKAGEAEENGIAIRKFYPPEMSNARARAYNNNELPRPIEVLISALENTAQERKSIDVKKAVVHWFKMDLRLSDNRALALASDKAKEAGVPLIAMYIISPQDYEAHLRSPVRVDFMLRTLEVIKHDLAKLDIPLYVETVEKRKRVPDRILELMDQWGAGHLYANMEYEVDELRREASMIRDFAENGKAFEVVHDTCVVPPGELHTGAGKQYAVYTPWYRSWVAHIHENLDLLELYEPPEKNPSSARKVFAKLFDVEIPDAPKSKRLDGEEKERLRSLWPCGEHEAKKRLDKFCEEMIGNYQKKRNIPAEAGTSSISVHLASGTISARTCVRTARDRNKTKKLNGGNEGIQTWISEVAWRDFYKHVLVHWPYVCMNKPFKPEYSNISWSYDNEHFAAWCEGRTGFPIVDAAMRQLNHLGYMHNRCRMIVACFLAKDLLLDWRKGERYFMEHLVDGDFASNNGGWGFSASVGVDPQPYFRIFNPLLQSEKFDPDGDYIRKWVPELKDLDRKAIHDPYNRGAGSKAKKNGYPAPIVTHKDCRDRALAAYKEGLASGE

SEQ ID NO: 5704 - protein, 489 aa, Arabidopsis thaliana
  misc_feature (53)..(53): Xaa can be any naturally occurring amino acid
MLLRTMAATSPRPPPSTSLTSQQPPSPPSQLPLRTMPGSYGWPLVGPLSDRLXFQGPDKFFRTRAEKYKSTVFRTNIPPTFPFFGNVNPNIVAVLDVKSFSHLFDMDLVDKRDVLIGDFRPSLGFYGGVRVGVYLDTTEPKHAKIKGFAMETLKRSSKVWLQELRSNLNIFWGTIESEISKNGAASYIFPLQRCIFSFLCASLAGVDASVSPDIAENGWKTINTWLALQVIPTAKLGVVPQPLEEILLHTWPYPSLLIAGNYKKLYNFIDENAGDCLRLGQEEFGLTRDEAIQNLLFVLGFNAYGGFSVFLPSLIGRITGDNSGLQERIRTEVRRVCGSGSDLNFKTVNEMELVKSVVYETLRFSPPVPLQFARARKDFQISSHDAVFEVKKGELLCGYQPLVMRDANVFDEPEEFKPDRYVGETGSELLNYLYWSNGPQTGTPSASNKQCAAKDIVTLTASLLVADLFLRYDTITGDSGSIKAVVKAK

SEQ ID NO: 5705 - protein, 415 aa, Nitrosomonas europaea ATCC 19718
MAFLVQKYGGTSVGSTERIKQVAHRVAEFRAQGHELVVVVSAMSGETNRLISLAKEIQPNPDPRELDVILSTGEQVTIGLLAMALRELGIKAKSYTGPQVSITTDSAHTKARILKIDEDPIRADLAAGYVIIVAGFQGVDETGDITTLGRGGSDTTAVALAAALKADECQIYTDVNGIYTTDPRVVPEARKLDTITFEEMLEMASLGSKVLQIRSVEFAGKYKVKLRVLSSFEEGEGTLITFEEDNKMEQPIISGIAFNRDESKITVVGVPDHPGIAYQILGPVADANIDVDMIIQNVGHDDTTDFSFTVHRNEYARTMDVLKQQVLPHIGAREVIGGDKIAKVSVIGVGMRSYAGIASKMFRVLAEEGINIRMIATSEIKISVVVDEKYMELAVRVLHKAFDLDQVNNTSTKTC

SEQ ID NO: 5706 - protein, 62 aa, Phaseolus vulgaris
TRFKAEFPVFDKVNVNGDKGDPLCKYVKSSKGELFGNNIKWRFSKFLVDKEGKVVDRYAPTT

SEQ ID NO: 5707 - protein, 321 aa, Geobacter sulfurreducens PCA
MKTVRNLIITILCLLGSVPSAPGAETAVAPSGRAAAAVVNGAVIFRDELDHFVEFALSRRRGAGRKVTDEQKKRVERQELDKLIAMELLAQAGEKLNPADLSKKIQARREAIGSSVSRGGSVVAPSEDRLNDTARRDVLVDAYLASRGIDAIKVPETDLRAYYEKNKSGFKKPETIAVRHILVKVEKEASPETQAEARKKIEGIRDRIGAGADFAVLASESSDCASAAKGGDLGEIQRGFMPREFDQVAFSLKPGETSGIVKTHHGFHIIRVMERHPETVRTFEEMRDFIEQYLAKDYQRKKVEEIVEELKRAATIDIRIQ

SEQ ID NO: 5708 - protein, 112 aa, Fragaria x ananassa
EITGHPAGITQLQRVGIGLVLSAVSMAVAGIVEVKRRNYALAHSPLAPGGISLFWLSFQYAIFGIADMFTLVGLLEFFYREAPAGMKSLSTSFTWLSLSFGYFLSSTLLRTH

SEQ ID NO: 5709 - protein, 267 aa, Triticum aestivum
  misc_feature (232)..(232): Xaa can be any naturally occurring amino acid
NKFVQKSRLVPVRNSRDIVDPRVRDDMKLRNLYDKRISQEVVGDLLGEEFEGYIFKIMGGCDKQGFPMKQGVLTPGRVRLLLHRGTSCFRGHGRRVGERRRKSVRGCIVSQDLSVINLVIVKKGKNDLPGLTDTEKPRMRGPKRASKIKKLFNLGKDDDVRQYVNTYRRSFTNKKGKTVSKAPKIQRLVTPLTLQRKRARIADKKKRIAKKKSEAAEYQKLLAQRLKEQRDXRNESMAQRESKPFCCYQGSWLLCLRWLSISGKNYP

SEQ ID NO: 5710 - protein, 828 aa, Xylella fastidiosa Temecula1
MSTVETPVYVPRTVVHKFGGTSVADADCYRHVTRLLLAREETVQVTIVSAMKGVTDTLIALAEQAANHSPDWQVLWQQTRTRHCDAAQALLGEHAATLQDWLNTRFNELHEMLVALSVIGMLPSEVLDRLQGLGEVYSAQLLGHYLQSQGEDCVVLDARQVLVVSPGEFGAEVDWATSAQHLAHWRMQHPQRRVVVTGFVASDRTGRAITLGRNGSDYSGAIFAALFEADELHIWTDVDGVMSADPRVVPDAVQLDALSYDEACELAYFGAKVVHPQTMSPVMKRGVPIIIRNTFQPGHPGTRITADSVVSGSVKGLTLSPGLAVLNLEGTGLIGVPGTAERVFAALRNARLSVVMISQGSSEHSICCLVHQTEAERARDALLYAFAHELAIGHVQRVQLTNNISVLAAVGDGMAGHLGVAARLFESLRRAHVNILAIAQGSSERNISVAIDSQQATKALRAAHAAFWLSPQTFSIGVIGPGHVGEALLDQLCAAQQQLLSKANLDLRLRAIVSRRRMLLDERGLGSDWRHAFAAAPEAVDLDAFTAHLQAAHLPHAVIIDCSGSAEVADRYADWLAAGIHVVTPNKQAGSGPLHRYHAIRAAADASGARFRYEATVGAGLPVITTLRDLMDTGDSVTSIEGIFSGTLAWLFNKYDGSVPFSQLIAQARAMGYTEPDPRDDLSGVDVARKLVILARDAGRDISLEDVAVESLVPETLCQLSVADFMERLNEIDATFAERLAAAKQRGCVLRYVAQLSPGHVPSVSLIELPSDHAFVNLRLTDNVVQFTTRRYSENPLIVQGPGAGPEVTAAGVFADLLRVAAGEGARL

SEQ ID NO: 5711 - protein, 246 aa, Triticum aestivum
  misc_feature (207)..(207): Xaa can be any naturally occurring amino acid
MVKPVQDEENQRLLLDDHKEKHFTSGEVVRDIIIGVSDGLTVPFALAAGLSGANASSSLVLTAGLAEVAAGAISMGLGGYLAAKSDADHYYRELQREQDEIDTVPDTEAAEIADILSEYGLGPEEYGPVVTSLRNNPKAWLEFMMKFELGLEKPDPRRALTSAATIALAYVVGGMVPLSPYMFVASVDSAMMTSVVVTLAALLFFGXYVKGRFTGNRPFLSAIQTAIIGALASSAAYGMAKAVQAI

SEQ ID NO: 5712 - protein, 335 aa, Pseudomonas sp.
MKLAHSLTVTAVSPQGSDAILLTLGVDGGQRQRFSFQSGQYLTLAVPVQGDEHWRCYSITSAPEDGQAISLLVRRVAGGRVSNWLCDHARGGQRLQVLPPAGRFTLARHGQPVLLYAGGSGIAPIFALAREALLQGAPQVRLFYACRDRATAMLLAELQALQAGSGQRLEIRHWYDAEQGLPTQALLEAQTQGLEAADAYLCGPEAFMHSVLAALAAAGIEPSRVYREDFGAALEGAVETGAEGPDAELTVQLKGQTHTVSVRGGQFLLGAMLDAGLAVPHACRVGECASCMCRLVDGEVLRLDSSVLDEDDAAEGWLLACRTRAASAQVRLRFS

SEQ ID NO: 5713 - protein, 95 aa, Shigella flexneri 2a str. 301
MQLNITGNNVEITEALREFVTAKFAKLEQYFDRINQVYVVLKVEKVTHTSDATLHVNGGEIHASAEGQDMYAAIDGLIDKLARQLTKHKDKLKQH

SEQ ID NO: 5714 - protein, 676 aa, Treponema denticola ATCC 35405
MHLFNKSILNFKLGKYLTESNIAYIIFSPDYVPLFWSPEAERLLPDYLIKNTKIRLQDYLKTVLLEEDYIRLSAFIKSNPKTAAFEAKFDKPSSLSDKTALKFSFTQQDDNNFFVTIDDITKQKLKERFLIIARQDAEKANSMRSLFLANVSHEIRTPIQTIIGMMELINETNLDEEQSEYTRQVNFSAEVLLTLVNDVLDFSKLESGNMTMERTVFNLTDSVEQTVDLISMEAHKKGLEIVVDISDKIPDFIYGDPARLQQVLLNFVKNAVKFTETGYVSVSVKLVFENNSDDPYAAKHFFILFEVADTGIGVNNEQKSKIFNSFYQGNAAINRKYGGTGLGLAISKNIITMMKGQIGIKDNIPRGSVFWFKIPLVPSKKKAPHESILLDKSTRFLIVDDNMQTRTILKRMLLKFGFEDIALVSSGEQAIGVMKTAAEHKNPFNVVFIDMVMPKMDGWRLGAEIHNDDSLSASKLFLMIPEGSLGRDAKMKLLEWFDGYLYKPLKSRIVFHLLNELYRKLAIALEKDDIPELEPVEAGGQGQQNGNVHNFNEDNFFGCKVLVVDDHPVNQKLLKIILEKAHCIVSTANDGEEAIDTASSEHFDIIFMDIQMPGINGYEATQILRGKGYSRPIIACTAGSQDNERNLCKSMGLNDIIKKPFNKKQLFEMVKKHYKK

SEQ ID NO: 5715 - protein, 241 aa, Picea mariana
NHKGKSIAEVCRESLRDFNPMVHVSVEKGSVKDISANFLDNFDAVVLGRASVIVKKQVNEMCRKRPQRIAFYSVDCRGSCGEIFVDLQNHTYTQKKQEDAIASQIFFPSLEESVLVRWSSLPRKTTKLYFALRIIEEFEQAEGRQPGHVSSADLESVLILQKKLCEEQGLSESRIPDILLERILDAGTRQLPPVCAIIGGILGQEVIKAMSCKGDPIKNFFFFDVMDGKGIIEDISNQDKN

SEQ ID NO: 5716 - protein, 145 aa, Arabidopsis thaliana
  misc_feature (12)..(12): Xaa can be any naturally occurring amino acid
  misc_feature (47)..(47): Xaa can be any naturally occurring amino acid
  misc_feature (53)..(53): Xaa can be any naturally occurring amino acid
MASSMLSYAAEXTSPAQATMDAPFTGLKPSDALPDTHKANIASVASXGNGGRXICRKARPPSGKKKKETLSYLPDLTDVELAKEVDYHLHNKRMTCAENEMEHGFVYREHGNSPGYYDGRYWTLWKLPLIGCTDSAEVLKEDEEC

SEQ ID NO: 5717 - protein, 1341 aa, Gibberella zeae PH-1
MTESSPRAVRFQGSEDDGRPDKVRGHRLETPIESNGDPHATERHDELGNLIGYGATGHTGSLTSLAPGTVINGVSKAQRGPNTGDDGTAYTPNGSWPQRPLGPARTPSNTYNPATSRKPAHPPATPSFTESIRSSSKTRPRNESRFRAQERAYVQKLRQDYSGGYFTSYSNLNGNDSDSEGETPSSEGPYDDRFDQETIMFYGNDTLQPTDEDLKDPENRERLEWHGMLEAVLTGDVVRQEKKRLIGSADQQAGKSAHKTELWLGIRSKVCGRHIPVQRRMLEESRSTLDRTLDEIINFQIKGESEAGKPPYEQVKDMVAKIQMCENLYPSWAALATEHKAADSATFKESHDAIISWYNTNEMINTELNILKKWVGNEELDFTRTKQRSPAVNGINNDETSFLDRLMKEDGLQSLYNDDNGNLEKGMLAPISTVISKAKDTLIRNSEAFRKRHLPPYLEELLTLISFPSRLIEEITRLRLAYARRVKESAQQNPLMQDQMISQFQLLLKFAIRIKIECTSIANPEPGWDLPPCIDESFDQVVLEALKYYFKMLNWKLSGNKNTFKEAELLFQEWDFANEIGSHLQRGHIEVAEQFSSLTFKALHRLSQTFEKELQAKPKETATEMSKRYKACLDSVRVRQRMLQRFTRMLNDNYEHASDYSISFPPETMQKFYDQLVASGHFQVDTRLLEQDNIYVIASPELRERLEDIQAMMAITSKDQFPDELGEQYLLILRPEDPLNWFGETIEVPLRDLNIDLKRGHIRLCASSPQTLHNARRAFIENVDMHVDLVQEARSNIQKVNSRLTEIRRVAYKLSNNFMDSVEIIRKQARGKDCQELIQTCFVFATEFGQRSLLYMDSNRRQMNNLKLTKLALDWVSFICDDCVASDRKTFRWAVLALELAMGMTRGRHILALGEGEYAKLRSKVAGCMSLLISHFDVMGARSNLAAQAEKERIEALVGQFRKLDKNRMMNDEEASRCVTEQRMSELERVDEYRCEKIAERQGVGRVLEGNNEVDRSLAYLSSSATNVTMRWQQGQFVGGGTFGNVYAAMNLDTGHLMAVKEIRLQDPKLIPQVAEQIREEMGVLEVLDHPNVVSYYGIEVHRDRVYIFMEFCSGGSLANLLEHGRIEDEQVIMVYALQLLEGLVYLHESGIAHRDIKPENILLDHNGIIKYVDFGAAKWIARQGRTLAGDVQPSLPNRSMTGTPMYMSPEVIKGENPGKPGAVDIWSLGCVILEMATGRRPWAQLDNEWAIMYNIAQGNPPQLPPSDQLSPQGLDFLKRCFTRDPRNRSSAVELLQHDWITSIRSQVVEPATPSDTSSSAQSTPTVGSISSKLGGSDGFY

SEQ ID NO: 5718 - protein, 528 aa, Leptospira interrogans serovar Copenhageni str. Fiocruz L1-130
MSVRLIDCLKNKTQKTGSRIFCEKDMAMDLKDYVRIFDTTLRDGEQCPGAAMTENEKLEIASQLATMKVDIIEAGFPVSSPVQFQAVERIARETEGPMIAALARAMKADIEAASKALQPAKKRRIHTFIASSPIHMKYKLGKEPKEVLKMAVEAVTLCRQFVDDVEFSPEDATRSEPEFLRELCEAVIAAGATTINIPDTVGYTTPAEYGGLFKFLLSNVRGAEKIIFSAHCHNDLGLATANSLAAVQNGARQIECTINGIGERAGNTAMEEVVMAMRTRKDTFGIQTQIKTEEIARASYLVKTITGMLVQPNKAIVGANAFAHESGIHQDGVIKHRETYEIMKPETVGLSSNRMVLGRHSGRAGFKDRIVKLGFSPQVEELEAAYQRFLEIADRKKEIYDEDIRALFSEEARKSTGDRFQLEGFTVSTGTKSTPTAGVRILIDGHVREESATGDGPVDAIYKAIQKTTGMDPEVSRLVISPVTEGQDAMAEASVTLEYKGDRVVGKGSSTDIIEACSRAYISALNRL

SEQ ID NO: 5719 - protein, 410 aa, Bacillus cereus G9241
MKIIVQKFGGTSVRDENGRKHALHHIKKSLDAGYKVVTVVSAMGRKGEPYATDTLLSLVNQEESHISNREQDLLLSCGELISAIVFSNMLNENGIKAAALNGAQAGFITNDDFTNAKIIEMNCDRIHEELEDVDVIVVTGFQGQTKKGDTTTLGRGGSDTSASALGVALHAEYIDIFTDVEGVMTADPRIVKDARHLQTVTYNEICNMAYQGAKVVHPRAVEIAMHAKVPLRVRSTYSDSEGTLIAAYDGATKGQDVEERPVTGIAHVSNVTQIKVLAKETAYDIQQHVFKEMANEGISVDLINISPTGVAYTVNDNVSARAVEVLKQLGYEPIVTEHCAKVSIVGAGMAGIPGVTAKIVTALAEKGIQILQSADSHTTIWVLVKETDLVEAVNALHSAFELSKEKQLEQ

SEQ ID NO: 5720 - protein, 603 aa, Oryza sativa (japonica cultivar-group)
MAVEEAAESCGSHAAASAAGRRGGGGGGGGGATSSSSSASAGAAAAAAARKQQQQQRHKLEVYTEVLRRLHDSGVPEARREGFDDELWNHFNRLPARYAMDVNVERAEDVLTHKRLLEQAKDPAQRPAFAVRAVQVSPILDGNQTDADSNTAGEEVASRLLNRQQSIHPPPAFGSSTNLEALALEASKSQGQDHDSTSDNVNYRPMHEITFSTIDKPKLLSELTSLLGELGLNIQEAHAFSTNDGYSLDVFVVVGWHDEETEDLIESVRKEIGKIDETQGWSTTHSWSSPVENMQIGENSAADHVEIPRDGASEWEIDVKLLKFGNKVASGSYGDLYRGTYCSQDVAIKVLKPERINADMQREFAQEVYIMRKVRHKNVVQFIGACTKPPNLCIVTEYMSGGSVYDYLHKHKGVFKLPALLGVVMDVSKGMSYLHQNNIIHRDLKTANLLMDENGTVKVADFGVARVKAQSGVMTAETGTYRWMAPEVIEHKPYDHKADVFSFGILMWELLTGKIPYEYLTPLQAAVGVVQKGLRPTIPKNAHAKLSELLQKCWQQEPAERPDFSEILETLQRIAEEVGDEHDGKHKEKILGGLFSALRGRGH

SEQ ID NO: 5721 - protein, 566 aa, Brucella suis 1330
MTINLQKPDITELKPRITVFGVGGGGGNAVNNMINAGLRGVDFVVANTDAQALTMSKSDRIIQLGAAVTEGLGAGSQPEVGRAAAEECIDEIVDHLNGTHMCFVTAGMGGGTGTGAAPVVARAARERGILTVGVVTKPFHFEGARRMKTADLGIEELQKNVDTLIVIPNQNLFRIANDKTTFADAFAMADQVLYSGVACITDLMVKEGLINLDFADVRSVMREMGKAMMGTGEASGEGRAMAAAEAAIANPLLDETSMRGAKGLLISITGGRDMTLFEVDEAATRIREEVDPEANIILGATFDEGLEGVIRVSVVATGIDKQQGDAAPAPLEFRQPVKPTAAQAKPMAPHGALRPPVAEQPRQADPVAQVIQAAEAEMPVSPAAPAASAEPEFRPQSRIFQAPAPEAFERAPVARAPMQPAQAMHAPQPQQYQQPQMHEQPVREPRPAPRMPAVSDFPPVAQAEINARRAPQQPVQEEPRGPMGLLKRLTHGLSRREEEQPAARLEPAQHREPGMRPAEPRRPMQQDSSIYAPRRGQLDDQGRPQPRTASEEDQLEIPAFLRRQSN

SEQ ID NO: 5722 - protein, 283 aa, Alternaria alternata
HTFYNELRVAPEEHPVLLTEAPINPKSNREKMTQIVFETFNAPAFYVSIQAVLSLYASGRTTGIVLDSGDGVTHVVPIYEGFALPHAISRVDMAGRDLTDYLMKILAERGYTFSTTAEREIVRDIKEKLCYVALDFEQEIQTASQSPSLEKSYELPDGQVITIGNERFRAPEALFQPSVLGLESGGIHVTTFNSIMKCDVDVRKDLYGNIVMSGGTTMYPGISDRMQKEITALAPSSMKVKIIAPPERKYSVWIGGSILASLSTFQQMWISKQEYDESGPSIA

SEQ ID NO: 5723 - protein, 617 aa, Magnaporthe grisea 70-15
MNQAAPTTAIDIAQIEEGIKMANLDTLRGYSNTTPAPVQQAIKTEYTPMSQAAGYQVIREPMWNKGLMFTPEERVSKNLTGLLPHTMETEDIACARAMKMIRSRSTNVDRYLYLSSLKSSNTDLFYRLLMDNVRELMPLVYTPTIGDVCLQYSSLFTRPEALYISIKQRKSIKTMLANWPYPNPEICVITDGSRILGLGDLGINGVGISIGKLALYTAAAGIHPSKQLPIVIDCGTNNEENLRDPLYLGLRSKRPSVQEQQDFCDEVMHSIKEVYPNMVVQFEDFETEKAFNYLDRYRFDPKLNCMFNDDIQGTGAVVLAGYINAVKLSNVPVEEQRLVFMGAGSAGAGVARQLVDYYRNAHGMSEQEAKDKFYLVDTKGLITSDRFDGAKLPSHKRYFARDDNNGHQFQTLEDVIEFARPSALVGLTATFGVFTESIVRGLKASVDAAGHRNRRPILFPLSNPLTKAECTFSQAIDWTDGTVIFASGSPFAPHTVKNGDSATTYYPNQGNNVYVFPGIGLGAILAKASRVTDEMVYTSAEALANCLNADEIATGLIYPRIDRVQDASLVVAREVMKCCRRQGFSKLDDELWKSWEEWGDNALMAWIKTKLYKPLKE

SEQ ID NO: 5724 - protein, 591 aa, Rhodobacter capsulatus
MPVASLSLFRFDGTSSLPWVISQMILSRRPLNDEPRVKFYKLCGSGTGEGFTPKPNWRVWAIMAAFDTEADARDVTANHPVWKRWRAHAAETLVLHLQPLSARGTWGGVNPFLPEQVAEPSPDEPVVALTRAAIKPHKANAFWSRVPKISEKVGEDQNLMFKIGIGEIPLFHQVTFSIWPDVAKMNAFARGDTPHGKAIRAAREEGWFTEELYARFRLLGDRGKLDGQGPARQQSLGKGNCMTTAVARLQPSASGAKTRPVFPFSAIVGQEDMKLALLLTAVDPGIGGVLVFGDRGTGKSTAVRALAALLPEIEAVEGCPVSSPNVEMIPDWATVLSTNVIRKPTPVVDLPLGVSEDRVVGALDIERAISKGEKAFEPGLLARANRGYLYIDECNLLEDHIVDLLLDVAQSGENVVERDGLSIRHPARFVLVGSGNPEEGDLRPQLLDRFGLSVEVLSPRDVETRVEVIRRRDTYDADPKAFLEEWRPKDMDIRNQILEARERLPKVEAPNTALYDCAALCIALGSDGLRGELTLLRSARALAALEGATAVGRDHLKRVATMALSHRLRRDPLDEAGSTARVARTVEETLP

SEQ ID NO: 5725 - protein, 283 aa, Cochliobolus heterostrophus
HTFYNELRVAPEEHPVLLTEAPINPKSNREKMTQIVFETFNAPAFYVSIQAVLSLYASGRTTGIVLDSGDGVTHVVPIYEGFALPHAISRVDMAGRDLTDYLMKILAERGYTFSTTAEREIVRDIKEKLCYVALDFEQEIQTASQSSSLEKSYELPDGQVITIGNERFRAPEALFQPSVLGLESGGIHVTTFNSIMECDVDVRKDLYGNIVMSGGTTMYPGISDRMQKEITALAPSSMKVKIIAPPERKYSVWIGGSILASLSTFQQMWISKQEYDESGPSIV

SEQ ID NO: 5726 - protein, 123 aa, Zea mays
MAAVLNSRKTPQAVVAVLVAAALLASSASAAITCGQVGSSLAPCIPYATGRASALPASCCSGVKSLNSAARTSADRQAACRCLKSLANSVKSVNMGTVATIPGKCGVSVGFPISMSTDCNKIS

SEQ ID NO: 5727 - protein, 250 aa, Triticum aestivum
MKLNIANPTTGCQKKVEIDDDQKLRNLYDKRISQEVVGDLLGEEFKGYIFKIMGGCDKQGFPMKQGVLTSGRVRLLLHRGTPCFRGFGRRNGERRRKSVRGCIVSQDLSVINLVIVKKGENDLPGLTDTEKPRMRGPKRASKIKKLFNLGKDDDVRSYVNTYRRTFLNKKGKKVSKAPKIQRLVTPLTLQRKRARIADKKKRIAKKKSEAAEYQKLLAQRLKEQRDRRSESMAKRRSKLSAATKAPAASA

SEQ ID NO: 5728 - protein, 283 aa, Cochliobolus heterostrophus
HTFYNELRVAPEEHPVLLTEAPINPKSNREKMTQIVFETFNAPAFYVSIQAVLSLYASGRTTGIVLDSGDGVTHVVPIYEGFAPPHAISRVDMAGRDLTDYLMKILAERGYTFSTTAEREIVRDIKEKLCYVALDFEQEIQTASQSSSLEKSYELPDGQVITIGNERFRAPEALFQPSVLGLESGGIHVTTFNSIMKCDVDVRKDLYGNIVMSGGTTMYPGISDRMQKEITALAPSSMKVKIIAPPERKYSVWIGGSILASLSTFQQMWISKQEYDESGPSIV

SEQ ID NO: 5729 - protein, 355 aa, Coccidioides immitis RS
MALTESKKKLALAIIDFLSTSAKDGTLSAEDAESMEIAQSCIADAFKVDPSNKAATQDALGGQSLLSIYTVYEKLKGKGTAAKPSKDAGSESKPAASKPTPGAPTEESDRLKSEGNAAMARKDYIGAISFYTKALEIAPANPIYLSNRAAAFSASGNHARAVEDAEVAVAADPKYVKAWSRLGLAKFALGDAKGAAEAYEKGIEAEGNGGSEGMKKGLETARKRIEEMEKKDNEPPAEDVDDAAGSTRGAGGMPDLSSLASMLGGGGAGGGAGGGMPDLSSIMNNPMFASMAQNIMSNPDMLNNLMSNPRLRQMAENFGGGQGGLPDMSSLMNDPNIAEMARNLMGGGRGAGRGQ

SEQ ID NO: 5730 - protein, 353 aa, Mannheimia succiniciproducens MBEL55E
MIILFNLNIIGENLMAIKIGINGFGRIGRIVFRAAQTRDDIEVVGINDLIDVEYMAYMLKYDSTHGRFDGSVEVKDGNLVVNGKTIRVTAERDPANLNWGAIGVDIAVEATGLFLTDETARKHITAGAKKVVMTGPSKDATPMFVRGVNFSAYAGQDIVSNASCTTNCLAPLARVVHETFGIKDGLMTTVHATTATQKTVDGPSAKDWRGGRGASQNIIPSSTGAAKAVGKVLPALNGKLTGMAFRVPTPNVSVVDLTVNLEKPASYETIKQAIKDAAEGKTFNGELKGVLGYTEDAVVSTDFNGCALTSVFDADAGIALTDSFVKLVSWYDNETGYSNKVLDLVAHIYNYKG

SEQ ID NO: 5731 - protein, 190 aa, Gephyrocapsa oceanica
GNAVNNMIKAGLNGVDFVVANTDAQALSGSHAERRIQMGAQLTEGLGAGSDPEIGRAAAEEAMAEIVDQIQGSHMVFVTAGMGGGTGTGAAPVIARACREQGILTVGVVTKPFEFEGPRRMNSADEGIANLASEVDTLIIIPNQNLFRVANEQTGFVEAFAIADEVLHSGVASVTDLMTKPGLINLDFAD

SEQ ID NO: 5732 - protein, 367 aa, Geobacillus kaustophilus
MELFQYMEKYDYEQVLFCQDKESGLKAIIVIHDTTLGPALGGTRMWMYNSEEEALEDALRLARGMTYKNAAAGLNLGGGKTVIIGDPRKDKNEAMFRAFGRFIQGLNGRYITAEDVGTTVADMDIIYQETDYVTGISPEFGSSGNPSPATAYGVYRGMKAAAKEAFGSDSLEGKVVAVQGVGNVAYHLCRHLHEEGAKLIVTDINKEAVARAVEEFGAKAVDPNDIYGVECDIFAPCALGGIINDQTIPQLKAKVIAGSANNQLKEPRHGDMIHEMGIVYAPDYVINAGGVINVADELYGYNRERAMKKIEQIYDNIEKVFAIAKRDNIPTYVAADRMAEERIETMRKARSQFLQNGHHILSRRRAR

SEQ ID NO: 5733 - protein, 326 aa, Zea mays
MASTLLHAATASLQSPSQPSRGGAATAFHPLASTPSIRLARSSFSSNRRLEVSLRAVSAGHRFAGRGAPRGRRVVAALAGEQTEGSEVGDDKDNSNGEIKPEEAQEAWKVMLEQFKAEALRMQALSVQAYDVYSKRAREVLLEASEKLKIQADKAQKDLSVIATEVSQEGQEYLVMAARNSPDSIKDITTTFRALGRLNWPSEYEDYHVGIPFGTFLTVGGFLNFMLTGSTSALRFGIVLGLALLTLGISSLRSHREGDRRPRLLVKGQAAIALVIFFREFSVLLQNGWFPKIFIVLLSGVVAAFYFYRIATGNPKDLSSKNDSAN

SEQ ID NO: 5734 - protein, 623 aa, Xylella fastidiosa Temecula1
MRSPIMSNERTAQQSDIKQLISKGLEQGYLTYAEVNDHLPEDLVDPDQIEDIIGMINGMGIEVHEVAPDAETLLLNEGNTGNREVDDTAAEEAAAALSALDTEAGRTTDPVRMYMREMGTVELLTREGEIAIAKRIEEGLSEVQAALGAFPLSTELLLSEYELHKEGKRRLTEVVVGFNDLIEEDNSVTSSVDVTDESIVEVDEEDDDSVGNDEDAPMIGPDPAEVASRIESLSTEYAKFKKLYAKHGPEHKAVIKVREDVAAIFVTFKLSLPLTDLLVQQLQNMVNSVKDHERKVLHLATNVAKMPRKDFIRSWENNQTNLEWVEDAIKRKQKWSSALRDIKDQITAEQQASIDLEKVNSLTLADIKEINRMMVYGEAKASKAKKEMVEANLRLVISIAKKYTNRGLQFLDLIQEGNIGLMKAVCKFEHRRGFKFSTYATWWIRQAITRSIADQARTIRIPVHMIETINKLNRISRQMLQQFGREATPEELAKEMDMPEDKIRKVMKIAKEPISMETPIGDDEDSHLGDFIEDPNVESPVDTTTNVNLSETVREVLAGLTPREAKVLRMRFGIDMNTDHTLEEVGKQFDVTRERIRQIEAKALRKLRHPSRSEQLRSFLDID

SEQ ID NO: 5735 - protein, 586 aa, Medicago sativa
MCGILAVLGCSDDSQAKRVRILELSRRLKHRGPDWSGLHQHGDNYLAHQRLAIVDPASGDQPLFNEDKSIIVTVNGEIYNHEDLRKQLPNHKFRTQCDCDVIAHLYEEYGENFVDMLDGIFSFVLLDTRDNSFIVARDAIGVTSLYIGWGLDGSVWIASELKGLNDECEHFEVFPPGHLYSSKDREFRRWYNPPWFNEAVIPTTPYDPLVLRNAFEKAVIKRLMTDVPFGVLLSGGLDSSLVAAVTARYLAGTKAAKQWGAKLHSFCVGLKGAPDLKAGREVADFLGTVHHEFQFTIQDGIDAIEDVIYHTETYDVTTIRAATPMFLMSRKIKSSGVKWVISGEGSDEIFGGYLYFHKAPNKEEFHQETCRKIKALHRYDCLRANKSTYAWGLEARVPFLDKEFIKVAMDIDPEYKMIKHEEGRIEKWILRKAFDDEENPYLPKHILYRQKEQFSDGVGYGWIDGIKDHAAKHVTDRMMLNASHIFPFNTPLTKEAYYYRMIFERFFPQNSARLTVPGGASVACSTEKAIEWDASWSSNLDPSGRAAFGVHNSAYENQVNSVAKTVEPEKIIPKMEISNLGVAIQS

SEQ ID NO: 5736 - protein, 475 aa, Ralstonia eutropha JMP134
MYQDLALYIDGEFIKGGDRKEQDVLNPATQEVLGKLPHASRADLDRALAAAQRAFESWKKTSPLERSKILRRVGELARERAKDIGRNITLDQGKPLAEAVGEVLVCAEHADWHAEECRRIYGRVIPPRQPNVRQIVVREPIGVCAAFTPWNFPFNQAIRKIVSAVGAGCTLILKGPEDSPSAVVALAQLFHDAGLPPGVLNIVWGVPSEVSTYLIESPIVRKISFTGSVPVGKQLAALAGAHMKRVTMELGGHSPVLVFDDADIEPAAEMLARFKLRNAGQVCVSPTRFYVQEKAYDKFLARFTEVIGSIKVGNGLEDGTQMGPLAHERRVFSMEQFLDDANQRGGKVVAGGSRIGDKGYFFAPTVVTDLPDDAKLMVDEPFGPVAPVTRFKDTAEVLRRANSLPFGLASYVFTNSLKTATEVSNGLEAGMVNINHFGMALAETPFGGIKDSGIGSEGGQETFDGYLVTKFITQV

SEQ ID NO: 5737 - protein, 324 aa, Brassica oleracea
MKGLFKSKPRTPADIVRQTRDLLLYADRSKSLPDLRESKREEKMAELSRNIRDMKSILYGNSEAEPVAEACAQLTQEFFREDTLRLLITCLPKLNLETRKDATQLVANLQRQQVNSRLIASDYLEANLDLMDVLMEGFENTDLALHYGAMFRECIRHQIVARYVLESEHVKKFFDYIQLPNFDIAADAAATFKELLTRHKSTVAEFLTKNEDWFFTDYNSKLLESSNYITRRQAIKLLGDILLDRSNSAVMTRYVSSRDNLRILMNLLRESSKSIQIEAFHVFKLFAANQNKPADIINILDERFEADKSQVLREIAALEPRDLA

SEQ ID NO: 5738 - protein, 239 aa, Wolbachia sp.
PIAELGLEELQKYVDTLIVIPNQNLFRIANEKTTFSDAFKLADNVLHIGIRGVTDLMVMPGLINLDFADIETVMSEMGKAMIGTGEAEGEDRAISAAERAISNPLLDNVSMKGAQGILINITGGVDMTLFEVDAAANRVREEVDENANIIFGATFDQAMEGRVRVSVLATGIDGRNNKSETSPISQSEDSEKEKFKWPYSHSESMQDKTLETKPTEQVSEGAKWGSNVYDIPAYLRRKK

SEQ ID NO: 5739 - protein, 349 aa, Arabidopsis thaliana
MGVDYYNVLKVNRNANEDDLKKSYRRMAMKWHPDKNPTSKKEAEAKFKQISEAYDVLSDPQRRQIYDQYGEEGLKSTDLPTAAETAAQQQQRSYSSSNSEFRYYPRDAEDIFAEFFGESGDAFGGGSSGRTRGDGGDGGGRRFKSAEAGSQANRKTPPTNKKTTPPANRKAPAIESKLACTLEELYKGAKKKMRISRVVPDDFGKPKTVQEILKIDIKPGWKKGTKITFPEKGNQEPGVTPADLIFVVDEKPHSVFKRDGNDLILEKKVSLIDALTGLTISVTTLDGRSLTIPVLDIVKPGQEIVIPNEGMPTKDPLKRGDLRVTFEILFPSRLTSEQKNDLKRVLGGS

SEQ ID NO: 5740 - protein, 54 aa, Glycine max
KFGIPWPECNDGLSYDDVVRASDAGATLIEFYSTKYKSSAPLQGWLQRIKSGQV

SEQ ID NO: 5741 - protein, 110 aa, Anabaena variabilis ATCC 29413
MSSITNVTEATFKQEVLDSNVPVLVDFWAPWCGPCRMVAPVVDEVASEYEGLVKVVKLNTDQNPTVASHYGIRSIPTLMVFKGGRQVNTVVGAVSKTTLTKTLTQHIQEA

SEQ ID NO: 5742 - protein, 519 aa, Arabidopsis thaliana
MASHSPPLDALVVPSEDYHQSEYVSARDKRREFVSGFSGSAGLALITKKEARLWTDGRYFLQALQQLSDEWTLMRMGEDPLVEVWMSDNLPEEANIGVDSWCVSVDTANRWGKSFAKKNQKLITTTTDLVDEVWKSRPPSEMSPVVVHPLEFAGRSVSHKFEDLRAKLKQEGARGLVIAALDEVAWLYNIRGTDVAYCPVVHAFAILTTDSAFLYVDKKKVSDEANSYFNGLGVEVREYTDVISDVALLASDRLISSFASKTVQHEAAKDMEIDSDQPDRLWVDPASCCYALYSKLDAEKVLLQPSPISLSKALKNPVELEGIKNAHVRDGAAVVQYLVWLDNQMQELYGASGYFLEAEASKKKPSETSKLTEVTVSDKLESLRASKEHFRGLSFPTISSVGSNAAVIHYSPEPEACAEMDPDKIYLCDSGAQYLDGTTDITRTVHFGKPSAHEKECYTAVFKGHVALGNARFPKGTNGYTLDILARAPLWKYGLDYRHGTGHGVGSYLCVHEGKTSPS

SEQ ID NO: 5743 - protein, 739 aa, Thermotoga maritima MSB8
MRTYRSFKMFTNSSQGVRKVRVGIAGLGTVGGSIYRILKERGNEIEKRIGEKFIISKVINRSPQKYELLGVPKEEIAFDFDDLILNSDVVVEAIGGTDVAVDLVRRALELGRIVVTPNKNLISEYGNEFSEYIKKRKLFFEASVGGGIPIISLLQDYLIFQKVTRIRGIMNGTTNYILTEMSKGRHFEEVLKEAQELGYAEADPTNDIEGYDVAYKVSVLAGVVTGRFPGINSVQFEGITRIDPEYLKEIVRSGKKLKLIGELDFSTNRYEVRLREVTPEDPFFNVDGVDNAIEVSTDLAGDFLLKGRGAGGYPTASAVIADLFRVAKYKVLGGAEKFSVVVMKFGGAAISDVEKLEKVAEKIIKRKKSGVKPVVVLSAMGDTTDHLIELAKTIDENPDPRELDLLLSTGEIQSVALMSIALRKRGYKAISFTGNQLKIITDKRYGSARIIDINTDIISRYLKQDFIPVVAGFQGITETGDITTLGRGGSDLTAIALAYSLGADLCELYKDVDGVYTADPRIVKDARVIKELSWEEMIELSRHGAQVLQARAAEFARKYGVKVLIKNAHKETRGTLIWEGTKVENPIVRAVTFEDGMAKVVLKDVPDKPGVAARIMRTLSQMGVNIDMIIQGMKSGEYNTVAFIVPESQLGKLDIDLLKTRSEAKEIIIEKGLAKVSIVGVNLTSTPEISATLFETLANEGINIDMISASSSRISVIIDGKYVEDAVKAIHSRFELDRE

SEQ ID NO: 5744 - protein, 136 aa, Triticum aestivum
  misc_feature (78)..(78): Xaa can be any naturally occurring amino acid
  misc_feature (98)..(98): Xaa can be any naturally occurring amino acid
  misc_feature (106)..(106): Xaa can be any naturally occurring amino acid
  misc_feature (122)..(122): Xaa can be any naturally occurring amino acid
  misc_feature (128)..(128): Xaa can be any naturally occurring amino acid
EYRSIVFKEPRFVEYFRLATPETEYGRMNIGSRPSKRKPSGGIDSLRAIPWIFAWTQTRFHLPVWLGFGAAFKNVLQXKDIRNLHMLQEMYNEWPFFXRVTIDLVXEMVFPKGIPGIAALLXTILLSXGLHPLGEN

SEQ ID NO: 5745 - protein, 312 aa, Campylobacter jejuni RM1221
MLDVAIIGGGPAGLSAGLYATRGGLKNVVMFEKGMPGGQITSSSEIENYPGVAQVMDGISFMTPWNEQCMRFGLKHEMVGVEQILKNSDGSFTIKLEGGKTELAKAVIVCTGSAPKKAGFKGEDKFFGKGVSTCATCDGFFYKNKEVAVLGGGDTALEEALYLANICSKVYLIHRRDEFRAAPSTVEKVKKNEKIELITSASVDEVYGDKMGVTGVKVKLKDGSIRDLNVPGIFTFVGLNVRNEILKQDDGKFLCNMEEGGQVSVDLKMQTSVAGLFAAGDLRKDAPKQVICAAGDGAVAALSAMAYIESLH

SEQ ID NO: 5746 - protein, 104 aa, Campylobacter jejuni RM1221
MGKYIELTSDNFAQAKEGVALVDFWAPWCGPCRMLAPVIDELANDFDGKAKICKVNTDEQGDLAAEFGVRSIPTLIFFKNGEVVDQLVGAQSKQAISDKLNSLL

SEQ ID NO: 5747 - protein, 411 aa, Lupinus luteus
MNALAATNRNFKLASRLLRLDSKLEKSLLIPFREIKVECSIPKDDGTLATYVGFRIQHDNARGPMKGGIRYHPEVNTDEVNALAQLMTWKTAVANIPYGGAKGGIGCDPAELSNSELERLTRVFTQKIHDLIGVQIDVPAPDMGTGPQTMAWILDEYSKFHGHSPAVVTGKPIELGGSLGRDAATGRGVLFATETLLNEHGKSISGQRFVIQGFGNVGSWAAQLISEKGGIVVAVSDITGAIKNSKGLDIPSLIKHSKEHKGVKGFHGGDPIDPKSIFSEDCDVLVPAALGGVINRENANDIKAKFIVEAANHPTDPEADEILKKKGVVILPDIFANSGGVTVSYFEWVQNIQGFMWDEEKVNNELKRYMTKGFKDVKEMCKTHDCDLRMGAFTLAVNRVARATVLRGWEA

SEQ ID NO: 5748 - protein, 283 aa, Cochliobolus heterostrophus
HTFYNELRVAPEEHPVLLTEAPINPKSNREKMTQIVFETFNAPAFYVSIQAVLSLYASGRTTGIVLDSGDGVTHVVPIYEGFALPHAISRVDMAGRDLTDYLMKILAERGYTFSTTAEREIVRDIKEKLCYVALDFEQEIQTASQSSSLEKSYELPDGQVITIGNERFRAPEALFQPSVLGLESGGIHVTTFNSIMKCDVDVRKDLYGNIVMSGGTTMYPGISDRMQKEITALAPSSMKVKIIAPPERKYSVWIGGSILASLSTFQQMWISKQEYDESGPSIV

SEQ ID NO: 5749 - protein, 432 aa, Bacillus cereus G9241
MLSLNNSTYLEKLAVGGKFLIKKYTCKNGVRIVMENIPTVRSVAIGIWIHAGSRNENEKNNGISHFLEHMFFKGTETRSAREIAESFDSIGGQVNAFTSKEYTCYYAKVLDEHAKYALDVLADMFFNSTFDEEELKKEKNVVCEEIKMYEDAPDDIVHDMLTKATYETHPLGYPILGTEETLNTFTGDTLRQYIKDHYTPENVVVSIAGNIDEAFLQTVEQYFGSYEGTTNREQVHSPIFHFNKVARKKETEQAHLCLGYKGLQMGHEDIYNLIVLNNVLGGSMSSRLFQEVREQRGLAYSVFSYHSSYEDTGMLTLYGGTGSQQLDTLYETMQETLETLKNTGITEKELMNSKEQLKGNLMLSLESTNSRMSRNGKNELLLRKHRSLDEIIESVNTVTKENVDELIRNMFTDEFSAALISPDGKLPKGIKL

SEQ ID NO: 5750 - protein, 214 aa, Rhodospirillum rubrum ATCC 11170
MNQIFANPLSLPGTAQERVSRAVDSLRQGQGVIVVDDEDRENEGDLIFAAETLTAEQMSRMIRDGSGIVCLILTDPDLDRLALPPMVAHNTSRNGTGFTVSIEAREGVTTGVSAADRVTTIRAAIDPASTADDLARPGHVFPLRAHADGLSARRGHTEATIALMRLAGLRPAGVLCEVMNPDGTMARLPTLIGYGQAHGLPIVSIEDLVAVGAR

SEQ ID NO: 5751 - protein, 602 aa, Ustilago maydis 521
MKSSTKCGTGCGGCMPLSTSILNKALKEAGVEVSNHLCGHFAYSRQDLYQIIKFKKLKDFTTVMSTVGKKADSLGCEVCRPAIGSILSSLYNDWIMAPQLRQTQDTNDRYLANMQRDGTYSVVPRLAAGEITPAGLKVIGEVAEEYGLYTKITGGQRIDMFGAKKQDLPAIWTKLVDAGFESGHAYGKALRTVKSCVGSTWCRYGVGDSVGLAHELETRYKGIRAPHKFKGGISGCVRECAEAQGKDFGLIATTKGWNVYVGGNGGAKPRHAELIAEDVTRRQAIKILDRFILFYIRSADKLERTARWIEKFPGGLKGLKEVIVDDKLGICEDLEKEMEVLVGTYHCEWTKVVRDPTRHKAFRQFVNTDETQPVSEMMSERDQQRPADWPVETGPLHFSILDVAKEAVWEWRSVCKYTDLDPQKDSPSSATIKYGDTQIAVWNIPGRGVRAAQNMCPPRRAFVLADGLVGEDDKGREYVSCPLHKRNYILSANADEEGGKCNDGDYSIMTFEAKMDEEKDLVYLKLPPTEALDAVLSTSKWMLRRATEESDAMAGGQSHSVEITGPLDMDTLEKGPSSPNKPGSPPAKKTKASCGEQSSLDW

SEQ ID NO: 5752 - protein, 114 aa, Oryza sativa
MARAQLVLVALVAALLLAAPHAAVAITCGQVNSAVGPCLTYARGGAGPSAACCNGVRSLKAAASTTADRRTACNCLKNAARGIKGLNAGNAASIPSKCGVSVPTPSALPSTAPG

SEQ ID NO: 5753 - protein, 283 aa, Venturia inaequalis
HTSYNELRVAPEEHPVLLTEAPINPKSNREKMTQIVFETFNAPAFYVSIQAVLSLYASGRTTGIVLDSGDGVTHVVPIYEGFALPHAISRVDMAGRDLTDYLMKILAERGYTFSTTAEREIVRDIKERLCYVALDFEQEIQTASQSSSLEKSYELPDGQVITIGNERFRAPEALFQPSVLGLESGGIHVTTFNSIMKCDVDVRKDLYGNIVMSGGTTMYPGISDRMQKEITALAPSSMKVKIIAPPERKYSVWIGGSILASLSTFQQMWISKQEYDESGPSIV

SEQ ID NO: 5754 - protein, 314 aa, Podospora anserina
MGGKSANKAGYFDKLKGLLEEYKSIFIVSVDNVSSQQMHEIRQALRDQGVVLMGKNTMVRRALKTFLVDSPEYERLLPFVKGNVGFVFTNGDLKEIRDKILANKVAAPARAGAVAPVDVWIPAGNTGMEPGKTSFFQALGVPTKIARGTIEITTDLKLVEAGAKVGPSEATLLNMLNISPFTYGMGIAQVYDQGNTFPSSVLDISEEQLLKAFSSAITTIAAVSLALNFPTLPSVIHSLVNSYKKVLAVAIETEISWPEIEELKDRIANPEAYAAAAPVAAADSGAAAGGAAAEEEKEEEEESDEEGGFGDLFG

SEQ ID NO: 5755 - protein, 337 aa, Ajellomyces capsulatus
MVVKVGINGFGRIGRIVFRNAIEHGEVDVVAVNDPFIETHYAAYMLKYDSTHGQFKGTIEVNSNGLTVNGKAVTFYQERDPANIPWGKHGVEYVVESTGVFTTTEKASAHLKGGAKKVIISAPSADAPMFVMGVNEKTYDPSVNVLSNASCTTNCLAPLAKVINDNFGLTEGLMTTIHSYTATQKTVDGPSSKDWRGGRTAAQNIIPSSTGAAKAVGKVIPSLNGKLTGMSMRVPTANVSVVDLTCKTEKPVTYDQIKQTIKKASEGELKGILGYSEDALVSSDLNGDSRSSIFDASAGIALNDHFIKLISWYDNEWGYSRRVVDLIAYIAKVDAGK

SEQ ID NO: 5756 - protein, 920 aa, Streptococcus pyogenes serotype M3
MPLKKLESSNNQTIIAEEVALLKEMLENITRRMIGDDAFTVIESIMVLSEKQDYIELEKVVANISNQEMEVISRYFSILPLLINISEDVDLAYEINHQNNTDTDYLGKLALTIKDLAGKDNGKDILEQVNVVPVLTAHPTQVQRKTILELTTHIHKLLRKYRDAKAGVINLEKWRQELYRYIEMIMQTDIIREKKLQVKNEIKNVMQYYDGSLIQAVTKLTTEYKNLAQKHGLELDNPKPITMGMWIGGDRDGNPFVTAETLCLSATVQSEVILNYYIDKLAALYRTFSLSSTLVQPNSEVERLASLSQDQSIYRGNEPYRRAFHYIQSRLKQTQIQLTNQPAARMSSSVGLNTSAWSSPASLENPILAYDSPVDFKADLKAIEQSLLDNGNSALIEGDLREVMQAVDIFGFFLASIDMRQDSSVQEACVAELLKGANIVDDYSSLSETEKCDVLLQQLMEEPRTLSSAAVAKSDLLEKELAIYTTARELKDKLGEEVIKQHIISHTESVSDMFELAIMLKEVGLVDQQRARVQIVPLFETIEDLDNARDIMAAYLSHDIVKSWIATNRNYQEIMLGYSDSNKDGGYLASGWTLYKAQNELTAIGEEHGVKITFFHGRGGTVGRGGGPSYDAITSQPFGSIKDRIRLTEQGEIIENKYGNKDVAYYHLEMLISASINRMVTQMITDPNEIDSFREIMDSIVADSNTIYRKLVFDNPHFYDYFFEASPIKEVSSLNIGSRPAARKTITEITGLRAIPWVFSWSQNRIMFPGWYGVGSAFKRYIDRAQGNLERLQHMYQTWPFFHSLLSNVDMVLSKSNMNIAFQYAQLAESQDVRDVFYEILDEWQLTKNVILAIQDHDDLLEDNPSLKHSLKSRLPYFNVLNYIQIELIKRWRNNQLDENDEKLIHTTINGIATGLRNSG

SEQ ID NO: 5757 - protein, 337 aa, Ajellomyces capsulatus
MVVKVGINGFGRIGRIVFRNAIEHGEVNVVAVNDPFIETHYAAYMLKYDSTHGQFKGTIDVNSNGLTVNGKAVTFYQERDPASIPWGKHGVEYVVESTGVFTTTEKASAHLKGGAKKVIISAPSADAPMFVMGVNEKTYDPSVNVLSNASCTTNCLAPLAKVINDNFGLTEGLMTTIHSYTATQKTVDGPSSKDWRGGRTAAQNIIPSSTGAAKAVGKVIPSLNGKLTGMSMRVPTANVSVVDLTCKTEKPVTYDQIKQTIKKASEGELKGILGYSEDALVSSDLNGDSRSSIFDASAGIALNDHFIKLISWYDNEWGYSRRVVDLIAYIAKVDAGK

SEQ ID NO: 5758 - protein, 343 aa, Oryza sativa
SDSRRPRLGIRAVAAMGGGGGAEEELTAQETALYDRQIRVWGVDAQKRLSKAHVLVCGMNGTTTEFCKNIVLAGVGSLSLMDDHLVTEDDLNANFLIPHDESIYGGRSRAEVCCESLKDFNPMVRVAVEKGDPSLIDGEFLDKFDIIVVSCASIKTKLLINDNCRKRSKHIAFYAIECKDSCGEIFVDLQNHSYVQKVGGEPKPKELAYPSLQEAISVPWKNLPRKTTKLYFAMRVLENYESSEGRNACEASLSDRPAVLALRKDMCDKMSLSESQIPTALLERLLAAGKKQHPPVCAILGGILGQEVIKSISGKGDPIKNFFYYDAADGKGIAEDIPPLSSD

SEQ ID NO: 5759 - protein, 374 aa, Zea mays
MAPTTATKDDSGYGDERRRELQAFDDTKLGVKGLVDSGVKSIPSIFHHPPEALSDIISPAPPLPPSSPSGAAIPVVDLSVTRREDLVEQVRHAAGTVGFFWLVNHGVAEELMGGMLRGVRQFNEGPVEAKQALYSRDLARNLRFASNFDLFKAAAADWRDTLFCEVAPNPPPREELPEPLRNVMLEYGAAVTKLARFVFELLSESLGMPSDHLYEMECMQNLNVVCQYYPPCPEPHRTVGVKRHTDPGFLHILLQDGMGGLQVRLGDGQNGGCWVDIAPRPGALMVNIGDLLQLVTNDRFRSVEHRVPANKSSDTARVSVASFFNTDVRRSERLYGPIPDPSKPPLYRSVRARDFIAKFNTIGLDGRALDHFRL

SEQ ID NO: 5760 - protein, 677 aa, Rhodospirillum rubrum ATCC 11170
MNDSFDGLDIDSITRDLEGIGGALSPGDLATLVAGAAAAPAAGGEGWLDLIGAPVNAPLRGALVDLRARAAKAFAHSRVPLPERLVAVRRRMAEENLDGLIVPHADEYQNEFIPLRAERLAWLTGFSGSAGTAVVLAERAAIFVDGRYTLQVRGEVDAGAFSFHHLIDEPPARWLETALPTGARLGYDPWLHSPAERDRLREACKRAGAHLVALETNLLDAAWSDQPPTPLSPVVPHPEGYSGRGGAEKREDIAEALTKDGQDAVVLSAPDSIAWLFNIRGGDVAFTPLPLSYALLHGDGSAEIFVDPLKVSAGLAAHLGNRVRLSPPSALAPALSALGRRHAKVRVDWTATPSWIVDRLEEAGAAIVRAADPCVLPKAIKNAVELEGSRAAHRRDGLAMVRFLHWLSQEAPKGTLSELAVAEKLGRLRAVDPLLRGLSFGTISAAGPNAAFCHYHASPESDRRLVPGSLYLVDSGGQYLDGTTDITRTVAIGTPTPAMRRCFTLVLKGHLALGRARFPQGTTGHQLDALARQPLWAEGMDYDHGTGHGVGSFLGVHEGPARISKAANAVPLVPGMILSNEPGYYREGEFGIRIETLVAVRPVDPAPEAADRVFLEFETLTVVPLDRTLIDAALLDIYERAWVDAYHARVRETHAPLLDTPDDRPVLDWLIAATAPL

SEQ ID NO: 5761 - protein, 361 aa, Solibacter usitatus Ellin6076
MNLNVLVLPGDGIGTEVTCQAVRVLEHVAKKWNHTLHLTEGLLGGIAIHKTGTPFPQETAKLAASADATLMGAVGLPEFDNAPPEKRPEKGLLGIRQALGVYANLRPVRAYASQLDSSPLKNHLVEGTDMIIVRELTGGIYYGTPRGISGSGLEERAVNTMTYTRAEIERVARMAFHLARARRKKVTSVDKSNVLENSQLWRRVVVEVAKNFPDIELDHILVDNCAMQLVLNPKRFDIVLTENMFGDILSDEGAVLAGSIGMLPSASIGDQRPSGAWVGLYEPVHGSAPDIAGQNKANPLGAIGSVAAMLAYSFGLKEEAAAVETAIEAVLTSGQVTADLRPAGAPATTAQVGQAVCAAIG

SEQ ID NO: 5762 - protein, 226 aa, Nitrosomonas europaea ATCC 19718
MYRIAPSILSANFARLGEEITQVLDSGADIIHFDVMDNHYVPNLTIGPLVCEAIRPLTQAMIDVHLMVEPVDRIIPDFAKAGANIISFHPEASRHIDRTIGLIKEQGCKAGLVFNPATPLSYLDHVLDKLDLILIMSVNPGFGGQTFIPEALNKLRLTRERITASSRDILLEIDGGVKVDNIAEIARAGADTFVAGSAIYGAGKESDPHRYDSIIAAMRAELAKVA

SEQ ID NO: 5763 - protein, 391 aa, Solibacter usitatus Ellin6076
MSDRVYIFDTTLRDGEQSPGCSMTVPEKLTMARKLVELGVDILEAGFPIASEGDFDAVDAVSREFPWAQVAALARCCTLDVERAAKSLAHAKRPRIHTFIATSDIHLKFKLKKTQQQVLDEAVAAVELARRHVDDVEFSAEDGARTEPEFLEKISKAVVAAGARTVNIPDTVGYSTPKEYGALIGRIAKALGDCAIVSVHCHDDLGLAVANSLAAIEAGARQIECTINGIGERAGNCSLEEIVMILKTRADSYPYHTGIHTEHLYSASQLLTSTITFGPQPNKAIVGRNAFAHEAGIHQDGYLKEKTTYEIIDPRTVGIPEGSLVLGKHSGRHALNQRAIEMGYQLSKPELDDLYHRFTAVADHRKKGLMDEEIVALIKECQQKALGVAAD

SEQ ID NO: 5764 - protein, 621 aa, Dunaliella salina
MSYHSIDGIGNSRHPLMQLRSVLVGGVKIASLDVWKTQLLLFSHTVSQPSHNTNPVLTDGPGAMGEPAKADEHRDSNGENGNGKPAPGQLFPDYRRTVALKYVSRGLQVAFSYISLTMLATPFVVFGSLELFNLYRQGELQKLVEVAKQTEMTFDMITVMGCIAMMVVGLLLYFFLRKNPVYLVDFSVFRANDSSWNATYKRFMNGSFMTRRFTEDSLNFQKKILERSGLGQDTMLPPAMQTMCSLDWKTLELSHDPAQTLASVAPRPGMKLAREEFEVVIFSTVQDLLNKTGVRAKDIGILVVNCSLFNPTPSLCAMVINHFKMRSNIISYNLSGMGCSASPIAIDLANQMLQLYSGTYALVISTENITQNWYFGNDRSMLLPNCLFRVGGAAMLLSNRRRDGLRAKYELQHVVRTHLGAKDQAYGCIFQTEDDEDNVGVRLTKELMAVAGEALKVNVTTLGPLVLPISEQALFIFNLIVRKTFNKKLKPYIPDFKLAFDKICIHTGGRAVIDEIEKQLRLTPEMVEPSRAVLFRYGNVSSSSIWYVLAYMESIEGVKRGDRIWQLGFGSGFKCNSAVWRSKRRIKNMHYAWEGFNLQEMRDHLASLAIHKARHLEQKPK

SEQ ID NO: 5765 - protein, 189 aa, Brassica napus
MAFAISTQSHFAIRPLQLNQFKNSCPRAFLGSCFKPRPDSSYLRSKELPKLGLVPRHRQKFQVGVGTGGELADSGEVADSVASDAPESFSWSSVILPFIFPALGGLLFGYDIGATSGATLSLQSATLSGTTWFNLSPVQLGLVVSGSLYGALLGSTLVYGIADFLGRRRELIIASGLYLLGSLITGCAP

SEQ ID NO: 5766 - protein, 101 aa, Arabidopsis thaliana
  misc_feature (83)..(83): Xaa can be any naturally occurring amino acid
MASSMLSSATMVASPAQATMVAPFNGLKSSGGFPGTRKGNNDITFITSNGGRGNWMPGWASIGKEKVETFFYLSDLTDFQLAXGGDFLIRNQGVPWGGIQV

SEQ ID NO: 5767 - protein, 494 aa, Thermus aquaticus
PLITTETGKKMHVLEDGRKLITVIPGDGIGPECVEATLKVLEAAKAPLAYEVREAGASVFRRGIASGVPQETIESIRKTRVVLKGPLETPVGYGEKSANVTLRKLFETYANVRPVREFPNVPTPYAGRGIDLVVVRENVEDLYAGIEHMQTPSVAQTLKLISWKGSEKIVRFAFELARAEGRKKVHCATKSNIMKLAEGPKRAFEQVAQEYPDIEAVHIIVDNAAHQLVKRPEQFEVIVTTNMNGDILSDLTSGLIGGLGFAPSANIGNEVAIFEAVHGSAPKYAGKNVINPTAVLLSAVMMLRYLEEFATADLIENALLYTLEEGRVLTGDVVGYDRGAKTTEYTEAIIQNLGKTPRKTQVRGYKPFRLPQVDGAIAPIVPRSRRVVGVDVFVETNLLPEALGKALEDLAAGTPFRLKMISNRGTQVYPPTGGLTDLVDHYRCRFLYTGEGEAKDPEILDLVSRVASRFRWMHLEKLQEFDGEPGFTKAQGED

SEQ ID NO: 5768 - protein, 522 aa, Shewanella sp. MR-7
MSNRVIIFDTTLRDGEQALAASLSVKEKLQIAMALERLGVDVMEVGFPVSSPGDFESVQTIARTIKNSRVCALSRALEKDIDAAAQALSVAEQFRIHTFISTSTIHVESKLKRSFEQVLEMAVGAVKYARRFTDDVEFSCEDAGRTPIDNLCRMVEAAIHAGARTINIPDTVGYTVPSEFGGIIQTLFNRVPNIDQAIISVHCHDDLGMSVANSITAVQHGARQIECTMNGIGERAGNCSLEEIAMILATRKNLLGVETGINAKEIHRTSNLVSQLCNMPIQSNKAIVGANAFTHSSGIHQDGMLKAQNTYEIMTPESIGLNRNNLNMTSRSGRHVIKHRMEEMGYSEQNYNLDALYEQFLHLADKKGQVFDYDLEALAFMEAQAAEDNFYQLQQLVVQSDSTEGVATATVRIDVGGEIKTEAATGNGPVDAAYNAIARATDRRIDIISYKLSAKGEGQNALGQVDITAVYHEQNFHGVGLATDVVEASARALVHVMNLTCRADKVADYKQNMHKNRELGGV

SEQ ID NO: 5769 - protein, 476 aa, Bacillus thuringiensis serovar konkukian str. 97-27
MAKEQVQAITKMEEDFAQWYTDIVKKAELVDYSSVKGCMILRPYGYALWENMQKVMDEKLKATGHENVYMPMFIPESLLQKEKDHVEGFAPEVAWVTHGGDEKLAERLCVRPTSETLFCEHFSKIVQSYNDLPKLYNQWCSVVRWEKTTRPFLRTTEFLWQEGHTIHETAEESQAETLNILNLYASFCEDYLAIPVIKGQKTEKEKFAGAKATYTIESLMHDGKALQTGTSHNFGTNFSEAFDIKFLDRNGKWQYVHQTSWGVSTRMIGGLIMVHSDNNGLVMPPKVAPVQVVIVPIAQHKEGVLAKAIELQGHIQKVARVKIDASNKTPGWKFNEYEMKGIPIRLEVGPKDIEKNQVVLVRRDTKEKEFISMDQLEERIPALLEEIHNSLFNKAKVFRDENTYSVTSFEEMKKVADEKQGFIKAMWCGEVACEEKLKEEVGVSSRCMPFEQEHLADECVCCGKEAKQMVYWGKAY

SEQ ID NO: 5770 - protein, 105 aa, Pasteurella multocida subsp. multocida str. Pm70
MTLNITSKQMEITPAIRAHVEDRLAKLGKWQTQLINPHFILNKIPKGFSVEASIGTPLGDLFAKAESEDMYKAVNEVEEKLERQLNKLQHKGEARRADERLKDSF

SEQ ID NO: 5771 - protein, 322 aa, Fusobacterium nucleatum subsp. nucleatum
MEKKLAILTSGGDAPGMNAAIRATAKIAEYYGFEVYGIRRGYLGMLNDEIFPMTGRFVSGIIDKGGTVLLTARSEEFKEARFREIAANNLKKKGINYLVVIGGDGSYRGANLLYKEHGIKVVGIPGTIDNDICGTDFTLGFDTCLNTILDAMSKIRDTATSHERTILIQVMGRRAGDLALHACIAGGGDGIMIPEMDNPIEMLALQLKERRKNGKLHDIVLVAEGVGNVLDIEEKLKGHINSEIRSVVLGHIQRGGTPSGFDRVLASRMAAKAVEVLNKGEAGVMVGIEKNEMVTHPLEEACSVDKRKSIEKDYELALLLSK

SEQ ID NO: 5772 - protein, 388 aa, Arabidopsis thaliana
MAAFLQTNISLNAIKIVPGKYSSLTDHQFRAPYRIRCAAASPGKKRYNIALLPGDGIGPEVISVAKNVLQKAGSLEGLEFDFKEMPVGGAALDLVGVPLPEETFTAAKLSDAILLGAIGGYKWDKNEKHLRPEMALFYLRRDLKVFANLRPATVLPQLVDASTLKKEVAEGVDMMIVRELTGGIYFGEPRGITINENGEEVGVSTEIYAAHEIDRIARVAFETARKRRGKLCSVDKANVLDASILWRKRVTALASEYPDVELSHMYVDNAAMQLIRDPKQFDTIVTNNIFGDILSDEASMITGSIGMLPSASLGESGPGLFEPIHGSAPDIAGQDKANPLATILSAAMLLKYGLGEEKAAKRIEDAVVDALNKGFRTGDIYSPGNVCA

SEQ ID NO: 5773 - protein, 458 aa, Aspergillus oryzae
MSNLPIEPEFEQAYKELASTLENSTLFQKNPEYRKALAVVSVPERVIQFRVVWEDDNHQVQVNRGFRVQFNSALGPYKGGLRFHPSVNLSILKFLGFEQIFKNALTGLNMGGGKGGSDFDPKGKSDNEIRRFCVAFMTELCKHIGADTDVPAGDIGVTGREVGFLFGQYRKIRNQWEGVLTGKGGSWGGSLIRPEATGYGVVYYVEHMIKHATDGKESFAGKRVAISGSGNVAQYAALKVIELGGSVVSLSDSKGALIVNGEGSFTPEEINTIAQIKVDRKQISEIASTEAFASKFKYIPGARPWTHVGKVDIALPSATQNEVSGEEAQALIDAGCKFIAEGSNMGSTQDAIDIFEAHREANKGASAIWYAPGKAANAGGVAVSGLEMAQNSARINWTSEEVDARLKGIMEDCFKNGLETAIEYATPAEGVLPSLVTGSNIAGFTKVAAAMKDQGDWW

SEQ ID NO: 5774 - protein, 422 aa, Geobacter sulfurreducens PCA
MKVVTVGTGMAAAEFVERLRLDGFAGEIVMCGDEEFAPYSPCVIPFYLAGEPLETVYWKGSDFYGRYRVTPRLADPVVEVDAERRLVRTASGRSEQYDRLFYAAGARSWYPRPDWLDTRGVFGFKTLSDMVAIDRYIREHNVGEAVVFGGGFIGVDAALALWHRGLAITLVHRNTRVLSQMTDEEGGQFATAKLVEKTGMDIRLRTTVADIVTTGGELSAVRFSDGTARETKLLIVAIGVSPNSEPLRGDDKGVPSDRQMLAEAGIYAAGDVAVTPHAVTGEAGVYATYPNAMRQARTAARHLLNGDGSYAGSVNTNVLKKHIDFPIVSAGSFTGEPVTWQRGDVWRRVYLKDGMINGYIIIGDTKMSGYVYQLYVSRQRVDGTIRTILSSPRHDAYYRQVTGCGAGRASGRGYGMQGVMAG

SEQ ID NO: 5775 - protein, 377 aa, Escherichia coli CFT073
MSNGIVIIGSGFAARQLVKNIRKQDASIPLTLIAADSMDEYNKPDLSHVISQGQRADDLTRQTAGEFAEQFNLRLFPHTWVTDIDAEAHVVKSQNNQWQYDKLVLATGASAFVPPVPGRELMLTLNSQQEYRACETQLRDARRVLIVGGGLIGSELAMDFCRAGKAVTLIDNAASILASLMPTEVSSRLQHRLTEMGVHLLLKSQLQGLEKTDSGILATLDRQRCIEVDAVIAATGLRPETALARRAGLTINRGVCVDSYLQTSNADIYALGDCAEINGQVLPFLQPIQLSAMVLAKNLLGNNTPLKLPAMLVKIKTPELPLHLAGETQRQDLRWQINTERQGMVARGVDDADQLRAFVVSEDRMKEAFGLLKTLSM

SEQ ID NO: 5776 - protein, 333 aa, Aspergillus oryzae
MSSTQSRYAKAHESLGGPGDARPTALQIVQDENRVNDLTDKVIMITGCSSGLGIETAKALFHTGATLYLTARDLGKAKTALGDLVDSPRVHLLHLDLNSLASVRACAEEFKSKESTLNILIEDAGVMACPEGRTADGFETQFGTNHLAHFLLFYLLKPQFLSSSTFSFQSRLVVVASSAHRVSSVHFDNITLEGEYEPWKAYGQSKTANIWTANEIERRYGSQGLHAFSLHPGAIATELLRHVSDEQKSVWDADDWLKKYWKSPEQGAATSVWGAVARDLEGTGGKYLDNCQIASPADPTKRHGPGYATWAYNPDGEAKLWAKTLELLELKDE

SEQ ID NO: 5777 - protein, 146 aa, Pringlea antiscorbutica
VDGFPCKDAGNVTSLDFFSQGIANPGLTNNTFGALVTGANVMTIPGLNTHGVSLARIDYAPGGLNPPHTHPRATEVVFVLEGTLDVGFLTTANKLISQSLKKGDVFAFPKGLVHFQKNNGHVPASVISAFNSQLPGTQSLGATLFG

SEQ ID NO: 5778 - protein, 550 aa, Oceanobacter sp. RED65
MLTSLPEYQALSQHYSDVQQTSMRQWFEQNPNRFTEYTLQAAGITLDYSKNRVACETMQKLADLARARFIPEAIEAMFKGDLVNPSEGRPALHTALRNFSDGPVMVDGKDVMPEVRKTLTRMKEFCWRIRNQHWRGFSNKPFTDVVSIGIGGSFLGPKLASQALKPYWGKKINCHYLANIDGSNLTEVLQGLNPETTLFIVQSKSFGTQETLKNAIECRQWFLDNGGQESDLPRHFTAVTANVEKAKAFGINEKNIFPMWDWVGGRYSLWSAIGLPLMLTIGHENFKQVLQGAHEMDVHFRTAPLEQNMPVIMAMLGVWYINFFNAQSHAILPYDHYLRGLPAHIQQLDMESNGKSVDIHGSKLNYQAGPIIWGGVGSNGQHAYHQLLHQGTQFVPCDFIMPLQTHNPVDSFHELLISNCLSQSQALMQGKTLEEAKEELRKEGKSEREIAVLAPQKVIPGNRPSNTIFFDKANPKIVGALIALYEHKVFVQGKIWDINSFDQWGVELGKQLGNQVHAAIQAEGDTNIDNHFDASTLGLIKAFRSMKHKL

SEQ ID NO: 5779 - protein, 418 aa, Thiobacillus denitrificans ATCC 25259
MAKKMNAFYAQSGGVTAVINASACGVIETARKNKDKIGKVYAGRNGIIGALTEDLIDTSKESDAAIAALRSTPSGAFGSCRFKLKSLEANKREYERLIEVFKAHNIGYFFYNGGGDSADTCFKVSQLSEAMGYPIQAIHVPKTVDNDLPITDCCPGFGSVAKYIAVSTLEASYDVRSMAKTSTKVFVIEVMGRHAGWIAAAGGLVEDHGIPVVILFPEIEFDQKKFLALVDKKVKEFGFCTVVVSEGCHYPDGKFLAEQGTRDAFGHAQLGGAAPVVANMIKDALGHKFHWAVADYLQRAARHIASKTDVKQAYELGKKAVELAIRGHNSVMPTVDRLSDKPYKYKIGVADLKDVANVEKFMPRDFITKDGFGITDKCKRYLTPLIQGEDYPKYKDGLPVYVTLKNVAVAKKLAEFKL

SEQ ID NO: 5780 - protein, 229 aa, Roseovarius nubinhibens ISM
MGRTQEFLKQIIYGGNDGIVTTFAIVAGFAGASAEGVLQIGGLAVLVFGLANLFADAVSMGLGEFLSLRSQHDLYRKRRESELREIAENPDHERMELFEILRQRGVPPGEADTAAELLSRHPSIMADLMMTYEFGMSHPEDDSPALSGLFTFLAFVVFGAVPLLPYFVMEPTPQAFWWSVATTFGALSALGLLRWNATGEPIARSVGETILVGAVCAVVAYGVGLVVAG

SEQ ID NO: 5781 - protein, 496 aa, Pseudoalteromonas tunicata D2
MTIEIKVPVLPESVADATIATWHVSVGDKVSRDQNLVDIETDKVVLEVVAPQDGVVTSISQQEGATVLGQQVIALIGASDATAVAQEQTAAPVAQAPVSEGNAVDILVPVLPESVADATIATWHVKPGEAVSRDQNLVDIETDKVVLEVVAPADGVMGEQLHGEGETVLGQQLIGKLLAGATASATPAAAPAPSAAPAAAASDDSASDVLTPSVRRLIAEKGLDASKIKGTGKGGRVTKEDVDAFLKAPAATSAPVATPAALAGRTQKRVPMTRLRKTIANRLLEAKNSTAMLTTFNEVNMKPIMDLRKQYQDVFEKRHGIRLGFMSFYVKAVTEALKRFPDVNASIDGDDIVYHNYFDISIAVSTPRGLVTPVLRDCDKLSVAEIEQGIRDLAIKGRDGKLTMDDMTGGNFTITNGGVFGSLLSTPIINLPQSSILGMHKIQDRPMAVNGKVEILPMMYLALSYDHRQIDGKESVGFLVTIKELLEDPTRLLLDV

SEQ ID NO: 5782 - protein, 287 aa, Picea mariana
YKVTKGMAEKYGDLRVLDTPIAENSFTGMGVGAAMTGLRPVIEGMNMGFLLLAFNQISNNCGMLHYTSGGQFTIPVVIRGPGGVGRQLGAEHSQRLESYFQSVPGLQMVACSTPYNAKGLMKAAIRSENPVILFEHVLLYNLKEKIPDEEYVCCLEEAEMVRPGADVTILTYSRMRYHVMQAAKTLVNKGYDPEIIDIRSLKPFDLHTIGNSIKKTHRVLIVEECMRTGGIGASLRAAIIENFWDYLDAPIMCLSSQDVPTPYAGTLEDWTVVQPPQIVSAVEQICQ

SEQ ID NO: 5783 - protein, 161 aa, Nostoc punctiforme PCC 73102
MSNTISDIAVKTINGEDKQLKDYTGKVLLIVNVASYCGYTSQYEGLEKLNQKYREQGLRILGFPCNDFGAQEPGSNEEIVQFCTSKYSVTFELFDKIHAKGPQQHPLYERLTKAVEPTGTIAWNFEKFLVNKKGEVTARFNSSVQPNSPELIAIIEKELAK

SEQ ID NO: 5784 - protein, 219 aa, Prunus persica
FIGSWLVMRLLERGYTVRATVRDPTNQKKVKHLLELPKAETHLTLWKADLADEGSFDEAIQGCTGVFHVATPMDFESKDPENEVIKPTINGVLDILKACLKAKTVRRLVFTSSAGTVNVEEHQKSYYDETDWSDVEFCRSVKMTGWMYFASKTLAEQAAWKFAKENNIDFITIIPTLVIGPFLMPSMPPSLITGLSPLTGNTSHYSIIKRGQYVHLDDL

SEQ ID NO: 5785 - protein, 455 aa, Gluconobacter oxydans 621H
MASLILMPALSPTMTEGTLARWVKKAGDAVAAGDVIAEIETDKATMEVEAVDEGMIGKTLVDEGTQNIAVNTPIAVLLAEGEDASAADDVVRSSDPAVGAPVAIETPSDPAITEAPEVAQAEDDRDWGETSEITVRQALRDAMAAELRRDEDVFLIGEEVAQYQGAYKISQGLLEEFGEKRVIDTPITEHGFTGMAVGAALTGLKPIVEFMTMNFSLQAIDHIINSAAKTLYMSGGQMGCPIVFRGPNGAAARVGAQHSQCFASWYAHIPGLKVVAPWSAADAKGLLRAAIRDPNPVIVLENEILYGQKFPCPVDEDFILPIGRAKIEREGTDVTLVAFSIMVGVALEAAAILADEGISAEVINLRSIRPLDTETIVRSVKKTNRIVSVEEGWPVAGIGAEICTVAVEQAFDWLDAPPARVCGLDLPMPYAANLEKLALPKPEWVVDAVRKQLRD

SEQ ID NO: 5786 - protein, 486 aa, Nostoc punctiforme PCC 73102
MNKHIRPWQRLLALAIGSMVFAVFAPTIVQATDPPTVQSLSETTTKLQISIDTIWVLITGFLVFFMQTGFAMLEAGLNRQRGVVNALLENFINAAVTILVWWGIGFGIAFGTSAGGLVGIDTFFLSQLPGADGSYILAAPGSTAAINTYTLFFFQFAFAATATTIATGSMAGRTDFIGDLIYSAIMGAIAYPIVVHWVWNSDGWLSKLSYHDFAGSSVVHTVGGWTALVGAYLLGSRPGRPAWGTLPPAHNLGLATLGTMILWFGWYGFNPGSTLSTGNTGLIGLVTVNTTLSAGAGALSAIIFQYTRKGKWDLVYSLNGSLAGLVAITAPCAYVAPWASVLIGLTSGILVTVGMDLIESVHIDDPVGAFAVHGINGMMGTLSVGFLGQAELTLNQKAGLFLGGGFELLGIQLLGVVAIAVFTVAFSFLMFGGLKAVGHLRVNSEADRIGIDAYEHGASVWSDVYAIEKKEINCAETTEIEALDSE

SEQ ID NO: 5787 - protein, 773 aa, Alkaliphilus metalliredigenes QYMF
MDDMKKEEVNTNYKNVLEDLMDIILIVDKNGKIVYGNKRAVETYGYTYEELVNLSVFDLRNQDIEEPVQEQLKQALLRGIEFKTYHYKKNGTKFPVEVRSRYSGEQSKGNVVSIIRDISHIDKIAKDAEMFSVSLDILDDAIVTFTKDLKVSLWSKAAEEKLGYTKEEIVGQNIKILVPNEKIKEFENEIFEVRKGNVVERLETIRLHKNGNAIDVSISVSPFYDPDGVLIGVLGVYKDISQRKELAKQLKRNEERWRYALEGGRFGIWDWDIENNKIFSADLWKEILGYNEGELNDTYEDWMSKVHPEDFPYVKDKLNKHSRGEKYIDEFRMKCKDNTYKYLRAKGQIIEWREDGNPLRMMGTLEDITDRKIIEEELKEKYKQLELLKEEAENANKAKSQFLANMSHEIRTPMNGIFGVVQLLESTDVGAEQNKYINMLKESTHTLAGIINDILDISKIESGTFKLNNEPFNLTEMISSIYHGLLVDGNAKGLEVGYYLDPNINPQVIGDELKLKQILTNLISNAVKYTEQGFVSFRVNRISFDEHTEKIQFNVKDSGIGIKDGFKEKIFEDFSQEDSSTRKKYQGTGLGLAISKNLALLMQGDISFESKLGEGSIFTFTCELQKSRTEDVNTKNHDIVKEKVEYSNQNSNKVILCVEDNIMNQEVMESIVTKKGYQYLAAYNAKEALDILENKKVHLILMDIQLPDLNGFEITKSIRMAKGPMKDVPIIAVTAYVDHKIENKCIQAGINDYMPKPLDLEKLYEMLESYLEG

SEQ ID NO: 5788 - protein, 290 aa, Pseudoalteromonas tunicata D2
MSVLINKDTKVICQGFTGGQGTFHSEQAIAYGTQMVGGVSPGKGGQTHLGLPVFNTVRDAVDATGATASVIYVPAPFCKDAILEAIDAGIELIVCITEGIPTLDMVDVKVKLEQTGVRMIGPNCPGVITPGETKIGIMPGHIHLPGKVGIVSRSGTLTYEAVKQTTDYGFGQSTCVGIGGDPIPGTNFIDVLKLFQEDPQTEAIVMIGEIGGTAEEEAAEYIKAHVTKPVVSYIAGVTAPEGKRMGHAGAIIAGGKGTAVEKFAALEAAGVKTVRSLADIGKALKEKTGW

SEQ ID NO: 5789 - protein, 336 aa, Anabaena variabilis ATCC 29413
MRVKLSPGLTYCFMTSVVSSARRTIRIGSRKSQLALVQTYWVREQLQNSFPDINFEVHTMSTQGDKILDVALAKIGDKGLFTKELEVGMINEEIDFAVHSLKDLPTNLPEGLALAAITERENPADALVVHENFKDKQIDTLPAGAVIGTSSLRRLAQLRNQFPHLTFKDVRGNLNTRLAKLDAGEYDGLILAAAGLQRLGMGDRIHQVLPKEVSLHAVGQGALGIECRANDAELITILKAIEHPQTRDRCLAERSFLRSLEGGCQVPIGVNTEINGDELILTGVVASVDGQNLVKDTVSGDASDAEAIGIRLAELLREQGAQEILNTIFAEIQRGS

SEQ ID NO: 5790 - protein, 118 aa, Glycine max
MSRAAIISIAILLITRSGALASISCATVIEEVAPCTSFLQGGSKQPSVACCNGIKKLSGEAGTHQNRTAICQCLKEGLATIGNYDPKRVPQVPKDCGLSATLPPIDKNTDCSNISFMM

SEQ ID NO: 5791 - protein, 371 aa, Magnaporthe grisea 70-15
MVKETKLYDALGIKPDATQDDIKKGYRKQALKWHPDKNKNNTDAAEKFKEVSQAYEILSDPEKRKTYDQYGLEFLLRGGVPMDTDGGNPFAGGAGGMPGGFQNFGFGGPGGGGTFRFSTNGSGFSFSNPDSVFSDFFRQASGGGGGGMGGINPEDLEDILGGGARSSRGGPRVRSSFGDSVPGGGARSQRQPTPEITTVERPLPVTLEEMFNGTTKKMKIKRKMFDDSGKRTTTDTVLEVPIKPGLKKGSKIRFKGVGDQEEGGQQDLVFIVEEKKHALYTREGDDVVHDVDLELKEALTGWKRTITTIDGKQLQIDKAGPTQPGSRDTYPGLGMPISKKPGQRGNFVVKYNVKFPTYLTPEQKTKLKEIL

SEQ ID NO: 5792 - protein, 183 aa, Glycine max
EEKKKKEKKTGGWDNWKTRMALQRSGKDFAIMKVLPSGVYLYRFIVDGRMRYTPDSPWAQDDAGDAYNILDLQDYVPEDIGSISSFEPPQSPDSSYDNLYLSSEDYAKEPPLVPPLLQMTLLNVPATNMKIQPPMSRPRHGVLNHLYAQKGKSSPSVVGLGTTHRFLAKYVTVVLYKSLQGKP

SEQ ID NO: 5793 - protein, 904 aa, Xanthomonas axonopodis pv. citri
MNEYRSSLVFATPDLPLRDDVRRLGALVGDLLAEQVSAEFLDEIERVRTTAISRRESDAPPSTLSEQLAGRQPRDAEALVRAFSTYFQVVNIAERVHRIRRRREYQRSGTDTPQPDGLHDALRRLKAQGVTLDELSQWLPRIDVEPVFTAHPTEAVRRALLEKEQLMVASLVDNLDGMRTPNERASDAARFRMALTASWQTADSSPVRPTVDDEREHVGFYLTQVLYRVIPVMYETLEHAIEETYGSVPALPRLLRFGTWVGGDMDGNPNVDAKTIAGTLDAQRRAVLDRYQKELWQLASLLSQSTTLVQVSGELTAQLERYRALLPDAAARSRPRHGDMPYRLLNDLMRARLQATLDDADGAYAAPSELEHDLQLILDSLQANKGLHAGWFAARRLLWRVRSFGFHLARLDVRQESSVHARAVADALGQTDWDAQDATQRAAVLGPYAAGQDPLPRVDDEGNARLDAVFAALADARTRHGADALGSYIISMAHNRADVLTVLALARRGGLVDDAGAVPLDIVPLFETVDDLRGGTGTVQDLLADPVYRQHLAARGDTQMVMLGYSDSGKDGGIAASRWGLQRAQVELLEAAAELGVRLTFFHGRGGSIARGGGKTSRALDAAPRGSVDGRLRVTEQGEVIHRKYGIRALALRSLEQMTGAVLLSSLRPRAPEPREARWRPVMDLVAERSTVAYRAFVGAPEFMQYFRLATPIDVIERMTLGSRPSRRLGQDAALSNLRAIPWVFAWSQARAVIPGWYGVGSGLQAAVDAGHEETLREMAQDWPFFRTFLDDIAMVLSKGDLNIAELFSRLSGDLHTRFFPLIRDELALTKGWVKALLQQQSLLQHDPRLALSIRLRNPYIDPISVLQVDLLQRWRATDGEDEALLRALVACVNGVSQGVQNTG

SEQ ID NO: 5794 - protein, 131 aa, Brassica carinata
FIGSWLVMRLLERGYFVRATVRDPGNLKKVQHLLDLPNAKTQLTLWKADLSDEGSYDDAINGCDGVFHIATPMDFESKDPENEVIKPTVNGVLGIMKACDKAKTVRRIVFTSSAGTVNVEEHQKDVYDEND

SEQ ID NO: 5795 - protein, 298 aa, Bacillus halodurans C-125
MYECVIVGGGIAGLQAAIQLGRYEHHVAIIDNGGGRSSLCRRYHNLLGWPDGISGQAIREAGRKQATSLGVEFIDSSVHSVRRQAEHFVIETESTTFEAKRLLLATGISDRIPPFPSLYPMLGKHVFLCPDCDGYEVRGQDTIVIGSGQAGANLSLALTYWKPNLTYINHEQQPLSPEVEQKLASKNILVVHEKVETILHDEETFQGVMLQDGTVHSAPKAFLAMGGAKVESDLAKQLGVERLENHHIVVNPRTKETNVKHVWAVGDVTVHSQLLSIAMGDGAQAAIWIHKSLLHERT

SEQ ID NO: 5796 - protein, 401 aa, Mycobacterium tuberculosis CDC1551
MRLRVCQQTHRRTEPHQGGSRTMTPPHNYLAVIKVVGIGGGGVNAVNRMIEQGLKGVEFIAINTDAQALLMSDADVKLDVGRDSTRGLGAGADPEVGRKAAEDAKDEIEELLRGADMVFVTAGEGGGTGTGGAPVVASIARKLGALTVGVVTRPFSFEGKRRSNQAENGIAALRESCDTLIVIPNDRLLQMGDAAVSLMDAFRSADEVLLNGVQGITDLITTPGLINVDFADVKGIMSGAGTALMGIGSARGEGRSLKAAEIAINSPLLEASMEGAQGVLMSIAGGSDLGLFEINEAASLVQDAAHPDANIIFGTVIDDSLGDEVRVTVIAAGFDVSGPGRKPVMGETGGAHRIESAKAGKLTSTLFEPVDAVSVPLHTNGATLSIGGDDDDVDVPPFMRR

SEQ ID NO: 5797 - protein, 651 aa, Yarrowia lipolytica CLIB122
MLRLRLPQLSFLTRTRSFHTDFTMTASSGEKLALLRQLMASKGLGVYIVPSEDAHQSEYTSVCDQRRAYISGFTGSAGTAVITSDTAALATDGRYFLQADEQLDKKYWNLLKQGVKGVPTWQEYAIDYAIKHGVDIGVDSRLVSAVEAEDITKKLALKIEEAGVQADEKNASSVKLVGLHDNLVDAVWSKLDTQPCRPGDPAFPLDVKYTGKPFDLKLEELRVKMRESGGSAIIISALDEIAWLLNLRGSDIPYNPVFFGYVIVTPNYTTLYCDSKKITEACEKHLDGLIDLRPYDDVFADFKKLGEAAQHDKLVFVPKNSSWALVECLGGFKNENKTYTQITSPVLKAKAVKNKTEQEGARAAHLKDGAALCEFFCWLEGVYDAGNPDKLDEVDAASKLVEFREKQPNFVGLSFESISSVGPNAAIIHYAPEKPKAAILDPSKVYLSDTGSQFLEGTTDTTRTWHFGSPSDEERTSNTLVLKGHIALAESVFPEGTTGFALDILARQFLWKYGLDYRHGTGHGIGAFLNVHEGPFGIGFRPAYRDFPMEIGNVVSNEPGYYKDGEYGIRIESVLICKEKKTQENFGGKKYLGFETITRVPLCHKLIDVSMLEDSEKKWVNHYHQVVRNEVGPLVEGEVKEWLLKETAPLE

SEQ ID NO: 5798 - protein, 536 aa, Zea mays
MAATLPSPAAGASPLLLHCNAAPSVSFRHRRRWQRPAATRHDARVAQLLLPVARRWLPEAAPPGVNGARGGIAASGSGAGAAAGEAPYRGNEGQGSLWMVSLATAVVVCGSFEFGTCVGYSAPTQAGIVSDIGLSNSEYGVFGSVLTIGAMIGAVTSGSLADILGRKMTMRFAAVVGIFGWLTVYFAKDAMMLYAGRVLLGYCTGVLSYVVPVYISEIAPKGIRGGLATSNQLFICSGCSAAYIIGALVSWRCLVVVGLIPCAVLFVGLFFIPESPRWLANIGKEREFHASLHEFRGEDSDISEEATEIKDYIESVRRLPKARIQDLFQRKNMYAVTVGVGLMIFQQLGGINALGFYTSYIFSSAGFSGKLGTTLIGVIQIPITFFGALLMDRSGRRALLLVSSSGTFLGCFLTGLSFYFKAQGLCTQLVPTLALCGILVYYAAYSVGMGPVPWVIMSEIFSIDMKAIAGGFVTLASWIGSFAISYSFNFLMDWNPAGTFFLFSAASLVTVLFVAKLVPETKGRTLEEIQTLLKAT

SEQ ID NO: 5799 - protein, 557 aa, Schizosaccharomyces pombe
MDFNNIPLATIKSSDDKGKDFIVEMTTRPSETKKKVPFSEDMREIPSLPNEEEANATDPQANEVADENGEGFEAEKISSWIWVLSAVAGISGLLFGYDTGVISGALAVLGSDLGHVLSSGQKELITSATSFAALISATTSGWLADWVGRKRLLLCADAIFVIGSVIMAASRNVAMMVVGRFIVGYGIGLTSLIVPMYITELAPARLRGRLVIIYVVFITGGQLIAYSLNAAFEHVHQGWRIMFGIGAAPALGQLISLFWTPESPRYLLRHNHVEKVYKILSRIHPEAKPAEIAYKVSLIQEGVKVDFPEGNKFQHFFHSLKVLFTVPSNRRSLFIGCFLQWFQQFSGTNAIQYFSAIIFQSVGFKNSISVSIVVGATNFVFTIVAFMFIDRIGRRRILLCTSAVMIAGLALCAIAYHFLPADTTQNTNSGWQYVVLASIIIFLASYASGIGNIPWQQAELFPMEVRALGAGFSTAINWVGNLIISASFLTMMESITPTGTFALFAGFCFVGLVTSYFTYPELAGMSIENIHKLLEKGFWQAVKESTKRVRKGRIDEA

SEQ ID NO: 5800 - protein, 622 aa, Oryza sativa (japonica cultivar-group)
MPPPTLLLLFITYLAWESQAFRTSADANPEEGCAASTVCGKVTISSPFAVVPEQATESKCGWLGFQVICRNDTPYLGYYKLGYRIQVLDIFYGNNSLLVSDVHKLGGFDVFSGASKEYSCHVPRTNTSSKVALPFSISTTNLNLFLYSCSKALVPRDGDGDLVETRCGNKTFARVGGNYSDSGDYPAFYMEGCNATVVPVLGTDARSYEQLIRDGFLLTWQGPPSSGAVFYRSFLISQTLHTSEGASRRSSCRRIPGRCRNSRRSKLKLIVIVSLSATTSLILTCLVWITCRQKEKGSLLTLQKYVANESKIEEALKEYDSLAPKRYNYSELKKITRSFKDKLGQGGYGMVFKGILQDGRIVAVKLLTGTKGNGEEFLNEVISIGRTSHVNIVSLLGFCLQGSKRALVYEYMANGSLDNYIYSEESKIVVGWGKLQQIAIGIARGLEYLHCRCNTRIIHFDIKPQNILLDEDFCPKVADFGLAKLCRLKDSALSMAEARGTVGFIAPEVFSRGFGVVSTKSDVYSYGMLLLELVGGRRHANELTTSHSTGNYFPNRIYDCLVKDLQTHAIITEEEEIAKLMTLVGLWCIQTNPGNRPSISRVIEMLEKNINEMEVPPKPFLS

SEQ ID NO: 5801 - protein, 364 aa, Shewanella sp. MR-7
MSYQIAVLAGDGIGPEVMAEARKVLKAVEARFGLNIEYTEYDVGGIAIDNHGCPLPEATLKGCEAADAILFGSVGGPKWEKLPPNEQPERGALLPLRGHFELFCNLRPAKLHDGLEHMSPLRSDISARGFDVLCVRELTGGIYFGKPKGRQGEGESEEAFDTMRYSRREIARIARIAFEAARGRRKKVTSVDKANVLACSVLWRQVVEEVAVDFPDVELEHIYIDNATMQLLRRPDEFDVMLCSNLFGDILSDEIAMLTGSMGLLSSASMNSTGFGLFEPAGGSAPDIAGKGIANPIAQILSAALMLRHSLKQEEAASAIERAVSKALNSGYLTGELLSSDQRHKAKSTVEMGDFIADAVKAGV

SEQ ID NO: 5802 - protein, 507 aa, Solanum tuberosum
MASFSLPLPSLHQQFPSKYSTFRPIIVSLSEKPTIVVTQPTKLPTRTIPGDYGLPGIGPWKDRLDYFYNQGKDEFFESREVKYKSTIFRTNMPPGPFISSNPKVIVLLDGKSFPVLFDVSKVEKKDLFTGTYMPSTELTGGYRVLSYLDPSEPNHEKLKKLMFFLLSSRRDHVIPKFHETYTEFFETLDKEMAEKGTAGLNSGNDQAAFNFLARSLFGVNPVETKLGTDGPTLIGKWVLLQLHPVLTLGLPKFLDDLILHTFRLPPFLVKKDYQRLYDFFYTNSASLFAEAEKLGISKEEACHNLLFATCFNSFGGMKIFFPNMLKSIAKAGVEVHTRLANEIRSEVKSAGGKITMSAMEKMPLMKSVVYEALRVDPPVASQYGRAKQDLKIESHDAVFEVKKGEMLFGYQPFATKDPKIFDRPEEFVADRFVGEEGEKLLKYVLWSNGPETESPTVGNKQCAGRDFVVMVSRLFVTEFFLRYDTFNVDVDKSALGASITITSLKKA

SEQ ID NO: 5803 - protein, 456 aa, Bacillus halodurans C-125
MKVTKFGGTSVASAEQIRKVATIVADDVERKIVVVSAPGKRHSSDTKVTDLLIRLGETYLEKGYANEELEAVLRRYEEIAKGLELGQEIIDQIANDLHTRLTFNQSNPGAFMDQLKASGEDNNAKLIAAYLQTKGMNAVYVSPKEAGLLVSDEPGNAQVLPEAYDHLKKLRERDEMIVFPGFFGFSPDGALVTFPRGGSDITGAILAAGVKAELYENFTDVDSVFAANPNVVESPAQIRRMTYREMRELSYAGFSVFHDEALIPAFRQKIPVCVKNTNNPSSPGTMILAEREYFLNPVIGIAADKGFATIYVRKYLMNREIGFGRRLLQIIEDEGLSYEHIPSGIDDASVILRQEQLTDEIEHRILARIKEELCVDDVFVEKDFAMVMIVGEGMHNTVGISARATAALARAHVNIEMINQGSSEVSLVLGIHEKDADAAVRELYEEFFGGAEETVQ

SEQ ID NO: 5804 - protein, 207 aa, Oryza sativa (japonica cultivar-group)
MTSLPGRGVSPSSSDPLCEGNAAPSSSSSSGQDLKQLKNSILSCVFSSPFSIFEAHQDSSANRSLKPHSGSYAWSRFLRRIACTGSMWRFLGASKALTSSDVWFLGKCYKLSSEELSNSSDCESGNAAFLEDFSSRIWITYRKGFDAISDSKYTSDVNWGCMVRSSQMLVAQALIFHHLGRSWRKPSQKPYSPEYIGILHMFGDSEA

SEQ ID NO: 5805 - protein, 510 aa, Eustoma grandiflorum
MAVGNGVLLHIAASLMLFFHVQKLVQYLWMNSRRHRLPPGPIGWPVLGALRLLGTMPHVALANMAKKYGPVMYLKVGSCGLAVASTPEAAKAFLKTLDMNFSNRPPNAGATHLAYNAQDMVFADYGPRWKLLRKLSNIHILGGKALQGWEEVRKKELGYMLYAMAESGRHGQPVVVSEMLTYAMANMLGQVMLSKRVFGSQGSESNEFKDMVVELMTVAGYFNIGDFIPSIAWMDLQGIQGGMKRLHKKFDALLTRLLEEHTASAHERKGSPDFLDFVVANGDNSEGERLQTVNIKALLLNMFTAGTDTSSSVIEWALAELLKNPIILRRAQEEMDGVIGRDRRFLEADISKLPYLQAICKEAFRKHPSTPLNLPRIASQACEVNGHYIPKGTRLSVNIWAIGRDPSVWENPNEFNPDRFLERKNAKIDPRGNDFELIPFGAGRRICAGTRLGILLVEYILGTLVHSFVWELPSSVIELNMDESFGLALQKAVPLAAMVTPRLPLHIYSP

SEQ ID NO: 5806 - protein, 476 aa, Mycoplasma mobile 163K
MNIKLLDKITPLEQDFAKWYTDVITKGNLATYGVLKGNIVFMPNSYGIWENVQSNFNKIIKELNVKNLYLPTLIPESLINSEKDHVQGFAPELITVEKVGDKVLNEKLFLRPTSEVLFAEYFKTQLNSYNDLPLLLNQWANVFRWEKTTSPFLRNSEFLWQEGHTSHYSEEEAHQFSKKMIQIYANFFEEFLAIPVIIGQKTESEKFAGAHTTYTIEAMMKDGRALQSGTSHYLGQNFAKAFDISFKDKDNSKSFVYQTSWGISTRLIGAIIMVHGDNRGIIMPPKIATNQVDIITVFANKNPEVLQKANDLFKTLKNDFRVRINDSNKSVGFKAAQSEIEGTPIRIEIGPEDLKQNKVILIRRDTQEKIDVKIDELKSEIFSQIEKIHENLLMQAKRLLNEKIVDVEDYESLKKEIAKGNFVRVPFDGDKKEEEIIKKETFATPRCIPLNFIGETKKCIMTNKETKRYVIFAKSY

SEQ ID NO: 5807 - protein, 347 aa, Eustoma grandiflorum
MEKSGGAASTVCVTGAAGYIGSWLVMRLLERGYTVRATVRDPGDVKKVKHLFELPKASTNLTVLKADLIEEGSFDEAIQGCHGVFHMATPMEFESKNPENEVIKPTIDGVLSVIRSSVKAKTVKKIVFTSSAGTVDVQKEQKSVYDENDQSDLDFIYSKKMTGWMYFVSKILAEKAAWEAAKANNIGFISIIPTVVVGPFITCTFPPSLITALSLLTGNEAHYSIIKQGQFVHLDDLCEAHIFLYEHPEAEGRYICSSHDTTINDLAKMIRHRWPEYNVPTNLKGIDEDIPLASFSFKKLTGMGFQYKYTLEDMFRGAIETCREKGLLPHSNENHVIMQQTEHGKDT

SEQ ID NO: 5808 - protein, 156 aa, Zea mays
MLLLLCRVDVMCGILVGLGCSHWAQAKRARILVWSGRVKHRGPDWWCLYHDDGNFLAQQRLADCSPLSGDQLLFNEDRTDVVVVNGEIYNHKNVRKQFAGTHDYRRCSDCGVIMPLHDNYSENFENMMDRPFVFVLYHIRDRTNGVESDAIVDEPL

SEQ ID NO: 5809 - protein, 376 aa, Dunaliella viridis
MATSMAKSAFTGNMAGLKNFQRVQPARGAVKMEVVAQKKVRVAINGFGRIGRNFLRCWEGRKDSLLDVVCVNDSGGVKQASHLLKYDTTLGKFDADVKAVDDKTISVNGKNIAVVSSRDPTQLPWKAMDIDLVIEGTGVFVDTPGAGKHIQAGAKKVLITAPAKGNDIPTFVVGVNCDGYNHSYPIISNASCTTNCLAPFVKVLHEKFRIVKGTMTTTHSYTGDQRLLDASHRDLRRARAAALNIVPTTTGAAKAVALVLPDLKGKLNGVALRVPTPNVSIVDLVVQVEKKTFAEEVNNAFREAAAGPMSNVLAVADEPLVSADFKGMDQSTAIDSALTMVMGDDMVKVVAWYDNEWGYSQRVVDLAELTAQRWAA

SEQ ID NO: 5810 - protein, 403 aa, Gluconobacter oxydans 621H
MPALSPTMTEGKLARWLKAEGDTVSAGDVIAEIETDKATMEVEAVDEGILSRILIQEGVEGIPVNTPIAVLVEDGEAVPEASSTQAPAAPKAEAAPAVLTGTAPAKAAPEEKGERIFVSPLARRMARERGIALDALTGSGPNGRILKRDVEKGVTAPKTSPKAAPSAAPLAASEETVRHVPNSTMRKVIARRLTESKTQVPHFYVSVDIELDALLDLRAKLNATAQENSFKISVNDMMIKAVALALKKVPGVNVQFTDAETLHFENVDISMAVSVPDGLITPIIRNADRKSLRQISVEAKDLAKRARAGKLKPEEFQGGTFSISNMGMFGVREFAAIINPPQAGILAIASGEKRAVVRGSEIAVATVMTATLSVDHRAVDGALGAEWLNALRDIVQNPYTLVV

SEQ ID NO: 5811 - protein, 457 aa, Staphylococcus aureus subsp. aureus MSSA476
MAIAVLLNRMFRMEHNPLFEYIYQQKEDIDACYFIIPEEDMSSASDLKAQFYRGTLQRFYQSLHAEKLTPYVMSYDDIISFCKENNISEVVTAGDIMSYHLEEYDILHQRSLFNEARIAVTLIRGNHYFKASKTMNQQGEPYKVFTSFYKKWRPYLRHRDVYHYDLKSFEDFVIASPDDLVFDDIAFGSSQIIEQNKWQHFLDQDIQNYESGRDYLPEVLTSQLSVALAYGLLDIIEIFNDLLARYDEDEANYEAFIRELIFREFYYVLMTQYPETSYQAFKPKYRQIKWSQNEADFNAWCEGQTGFPIIDAAIMELTQTGFMHNRMRMVVSQFLTKDLFIDWTWGEKFFRKHLIDYDAASNIHGWQWSASTGTDAVPYFRMFNPIRQSERFDAKALYIKTYLPIFNQIDAKYLHDTQRNESNLFEQGIELGSHYPRQMVDHQEKRTQVLATFKALD

SEQ ID NO: 5812 - protein, 130 aa, Vitis riparia
MAYQQDPCANPTRQTGKTGGQTDQYGNPVHQTEALGAYGAGTGTGMHGGEHQQQPHQQPGVLHRSGSSSSEDDGQGGRRKKGMKEKIKERIPGMGRKDEQKQTSATSTPGQGQQQKGMMEKIKEKLPGAH

SEQ ID NO: 5813 - protein, 993 aa, Xylella fastidiosa Temecula1
MFSASHFCSGSLMMSHPLSSLRDLEYHGAFVERHIGPNDVEIAQMLRVVGYDSLESLTDAIVPEKIRSTVALDLPKGITEEEALAKIRVIANKNRVFRSFIGQGYYGTHTPKVILRNILENPAWYTAYTPYQAEISQGRMEALINFQTMCADLTGMEIANASLLDEATAAAEAMSLAKRSAKSRSDLFFVHDAVHPQTLELLRTRAEPLGIVLRVGTPEEALQVDVFGILLQYPDTFGRIGDHRVLADAVHARGGLVAVASDLLALTLITPPGEWGADIVVGNSQRFGVPFGFGGPHAGFMACRDIYKRSIPGRLIGVSVDAAGHPAYRLALQTREQHIRREKATSNICTAQVLLAVMASMYAVYHGPQGLLRIAWRTHRMAAILAAALRGAGLTVGEYFFDTLHIVGIDALAIHCAAAAAGMNLRMIDNAQIGISLDETVTRSDVVALGQVFGVQVDVEALDAITADALPAGLLRSSAFLTHPVFNTHHSEHELLRYLRMLADKDLAMDRTMIPLGSCTMKLNATAEMIPVTWQEFACIHPLAPVVQWSGYRQLIDELEAMLVECTGYDAISLQPNSGAQGEYAGLLAIRAYHRSRGEERRNVCLIPESAHGTNPASAQLCGMQVVIIKCDRSGNVDVDDLRMKAEKYSDTLAALMVTYPSTHGVFEEAITEICEIVHAHGGQVYTDGANMNALVGVAKPGRWGSDVSHLNLHKTFCIPHGGGGPGVGPCAVKAHLAPFLPKTLPLPGDAAGLPVQGTQEAKVGMVSAANFGSASILPVSWMYITMMGAAGLRKATQVALLNANYIAKRLAPHYKTLYTGRHGLVAHECILDVRSLEKVSGVSAEDIAKRLIDFGFHAPTLSFPVAGTLMVEPTESESQQELDRFVDAMIQIRGEIAAIEKGHLDPEDNPLKQAPHTAVQVMASQWGHAYSRELAAFPLGVLHHAKYWPPVARVDNVYGDKHVMCACIPVEAYKEKGDSEIQDLIEEDASRC

SEQ ID NO: 5814 - protein, 119 aa, Zea mays subsp. parviglumis
MARTQSAVAVAVVAAVLLLAAAATTSEAAITCGQVSSAIAPCLSYARGTGSAPSASCCSGVRNLKSAASTAADRRAACNCLKNAARGVSGLNAGNAASIPSKCGVSIPYTISTSTDCSR

SEQ ID NO: 5815 - protein, 590 aa, Pseudomonas fluorescens Pf-5
MCGLAGELRFDHQPADLAAVERITHHLAPRGPDAWGFHSQGPIALGHRRLKIMDLSDGSAQPMVDNQLGLSLAFNGAIYNFPELRAELEAKGYAFYSGGDTEVLLKGYHAWGADLLPKLNGMFAFAIWERDAQRLFIARDRLGVKPLYLSRTGQRLRFASALPALLKGGDINPLLDPVALNHYLNFHAVVPAPRTLLAGIEKLPPATWMRIEADGRTEQQTWWTLPYGPRADETNLTLEDWRDRVLDSTREAVAIRQRAAVDVGVLLSGGVDSSLLVGLLREVGVDNLSTFSIGFEDAGGERGDEFQYSDLIARHYGTRHHQLRIDEREIIEQLPAAFRAMSEPMVSHDCIAFYLLSREVAKHCKVVQSGQGADELFAGYHWYPQVDGASDPYAAYRAAFFDRSYDDYAATVQPQWLTANDAAGDFVREHFAQPGADAAVDKALRLDSTVMLVDDPVKRVDNMTMAWGLEARTPFLDYRLVELSARVPARFKLPDGGKQVLKEAARLVIPSEVIDRKKGYFPVPGLKHLQGATLDWVRELLLDPSQDRGLFKPAMLDRLLTDPQGQLTPLRGSKLWQLAALNLWLSEQGI

SEQ ID NO: 5816 - protein, 320 aa, Desulfotalea psychrophila LSv54
MQNIPTGVILLNMGGPTQTKDVRPFLYNLFSDREIIPLGPRLMQKPLAWLIAKRRAPKSAATYERIGGGSPLKQITEAQAEALEKSLQAHGNFTVTYAMRYWPPYCDEALDYLLSKGVERLVALSLYPHYSKATTGSSLTQLHKTLKKKNISLPLTEIPSWPKQRDYIAAIAANIKKGLATFHGEKTEIVYSAHSLPTSFIEAGDPYVEHTKQSIGAIEEITGKRGRLCFQSKSGPVEWLEPSTPDVLIQLAQEGVKNILMVPISFVSDHVETLYEIDILYKKQAKKLGMRLTSCPSLNTQEQFITGLRQLVLESSVNSD

SEQ ID NO: 5817 - protein, 340 aa, Thiobacillus denitrificans ATCC 25259
MNLDELQAVARAIVAPQKGVLAADESGPTIKKRFDTIAVESTEKSRRRYREIMFTAESIERYIGGVILYDETLRQSTRDGTPFPQLLAGRGIIPGIKVDQGAKPLALCPGEKVTEGLDGLRERLVEYHGLGAQFAKWRAVIDIDAHDLPSPFGIHANAHALARYAALCQEVGLVPIVEPEVLMDGAHDVERCEAVTARALEAVFAELDAHGVGLEGVLLKPNMVVAGKKSTRQAGVQEVAEATLRCLRRHVPAAVPGIVFLSGGQSAEEATAHLSAMNAMGPHPWQVSFSYGRALQAPVLAAWRGHEANAAAAQAALLERARLNGLARDGAYGPEMESAG

SEQ ID NO: 5818 - protein, 547 aa, Xanthomonas axonopodis pv. citri str. 306
MAERVRTGYNLHDGQRDTSREVLQSVADAIRRAATRHSTELVLDYGLPATTLPDAIGRLDALQKLTLLHTGLQSLPDSLGQLHQLRHLQIAGALGLKTLPPSLTRLSNLRTLQLTMIPLDELPVGIGRMQGLRSLTLGGGHYARLPASIVELSGLTELRMPHSSHFRELPENIGLMQGLRSLEVASNSELEQLPGSLTQLHRLEKLTLSSNRRLAHLPEDIGQLRGLTELSLKNCAALRQLPDSVGDLAQLQLLDLRGTGLQTLPQSLARLPAQCDIKVPDHLAGQLLQIRDPERAAREPQRAAQRLAERRRRAPVPAAQQAGASWNRMPEFARVLRTVDADLGERFDKWTQGLAQTARISGASITPADMPLLDQVVTEAIRSPEFRSSFGQFLSDHTLKTLNMDGMTQVGGFGPAVRGDVKTAFAEMLKHKLMHTQDHQTALGLLQDALQNPDLGLSREMLLRSRNELTGRVEMWPPLKAYISMHDVEGQAAQDAAITWTMAQFEEAQQGGIGDAEAKQESERAQANANRFIEQRARVLLREWDIR

SEQ ID NO: 5819 - protein, 512 aa, Triticum aestivum
  misc_feature (133)..(133): Xaa can be any naturally occurring amino acid
  misc_feature (144)..(145): Xaa can be any naturally occurring amino acid
  misc_feature (163)..(163): Xaa can be any naturally occurring amino acid
  misc_feature (230)..(230): Xaa can be any naturally occurring amino acid
NKFVQKSRLVPVRNSRDIVDPRVRTKKPTSLRVEATSTKVELDFNDASWKQKFQEDWDNRFNLPRITDIYDLKPRPTTFSLMKQRTPTGDEDSTPMDMWNGYVNNDDRALMKVIKYSSPTSAGAECIDPDCTXVEQWVHRAGPXXDIYYEPNEVKAAIVTCGXGLCPGLNDVIRQVVFTLATYGVKNIVGIPFGFRGFFEKCLKEMPLSRNLLENINLAGGSFLRVSRGXAKTSEIVHSIQATRIDMLFVLGGNGTHAGANAIHDECRKRKLKVSVVAVPKTIDNDIPLMDKTFGFDTAVEEAQRAINSAYIEARSAYHGIGLVKLMGRSSGFIAMHASLSSGQVDVCLIPEVSFALDGEYGVLQHLEQLIKNKGFCVVCVAEAAGQELLQNSGATDASGNAILSDIGVHMQQKIKTHFKGIGVHADIKYIDPTYMVRACRANASDAILCTVLGQNAVHGAFAGFSGITSCICNTHYVYLPVTQVITAPKRVNHKGRMWHRCLTSTGQPDFR

SEQ ID NO: 5820 - protein, 352 aa, Pyrococcus abyssi GE5
MVYKLLVVKFGGSSVRYAFEEALELVKYLSERIPIVVVVSALKGVTDELIRFANGDKGALPRIERIHEEFLNYHGLNTKISISFRKDMPPEALRDEIISLGERISAKIFAEGLELLGIKSKVVDPLEFLIAKGEFGDAYINIQESKRRAGKLIRLIKSGVIPVIPGFYGNLNGFRVTFGRGGSDYSATALARILDSRCVLIMSDVEGIFTADPKLVPSARLIPYLSYEEIKVAAKLGMKALHWKAVDPVVGDIPIIFGKTKDWKFGTIVLNARSNFPIIVHRVREDFAEIFVVGRNISLPGFLVEEEREDFVKIVVAREDLPEAIREIHREVVEREEKNLRTGNNSELWARI

SEQ ID NO: 5821 - protein, 609 aa, Arabidopsis thaliana
MYYLPSSCLVLFLFFSLFYHLPCASSKQTLGWCESQFQCGNITAGFPFWGGNRPEVCGHPLLELHCLDNITSLTISDHLYHVLSINHTYNTLRVARTDFLQSICLSPFPFANATLPPEIFDILPTYKSVTLYRCYPVIPDLARYGCPAIGSVSVSDNLENPVSCEARFTVNIPTSFVPNEKRLNITSLVRDVRNGFEVRLRIDENSCQECSSSHKYCGFTGTLPLETKCRPLNLPTPTIAGVSLLPFLVLTLVVHIIRKQKTSNDKGQQDLKEHIPKPRIKALIQLKQYSYEQVKRITNSFAEVVGRGGFGIVYRGTLSDGRMVAVKVLKDLKGNNGEDFINEVASMSQTSHVNIVTLLGFCSEGYKRAIIYEFMENGSLDKFISSKKSSTMDWRELYGIALGVARGLEYLHHGCRTRIVHFDIKPQNVLLDDNLSPKVSDFGLAKLCERKESILSLMDTRGTIGYIAPEVFSRVYGSVSHKSDVYSYGMLVLDIIGARNKTSTEDTTSSTSSMYFPEWIYKDLEKGDNGRLIVNRSEEDEIAKKMTLVGLWCIQPWPLDRPAMNRVVEMMEGNLDALEVPPRPVLQCSVVPHLDSSWISEENSISSEI

SEQ ID NO: 5822 - protein, 181 aa, Arabidopsis thaliana
  misc_feature (10)..(10): Xaa can be any naturally occurring amino acid
  misc_feature (144)..(144): Xaa can be any naturally occurring amino acid
MAASMLSSFXFVTSPAQATMAGPFTDMKSFAFFPDTRKANNDITFITNNGGRINFLKAWPPFEKKTVGTLYYLPDLTDVELAKEVDYLLRNKRIPCVEFHLEHGFVYREHRNTTGYYDGRYWTMRKLTLIGCTDYAQVLKEVEXCKKDYPGALIMIIGINNTRHVQSITIIAYKRSSFTDA

SEQ ID NO: 5823 - protein, 325 aa, x Doritaenopsis sp.
MESGSFPVINMELLQGSQRPAAMALLRDACENWGFFELLNHGISHELMNRVEAVNKEHYRRFREQRFKEFASKTLDSVENVDPDNLDWESTFFLRHLPTSNISQIPDLDDDCRATMKEFARELEKLAERLLDLLCEDLGLEKGYLKRVFCGGSDGLPTFGTKVSNYPPCPKPDLIKGLRAHTDAGGIILLFQDDKVSGLQLLKDREWIEVPPLRYSIVVNIGDQLEVITNGKYKSVLHRVVAQTDGNRMSIASFYNPGSDAVIFPAPALVEKEAEEEEKKEIYPKFVFQDYMNLYIRKKFEAKEPRFEAMKSMEIVMSSQPIPTA

SEQ ID NO: 5824 - protein, 270 aa, Prunus persica
ERPKVAYNNFSNEIPIISLAGIDEVEGRRADICKKIVEACEDWGIFQIVDHGVDTKLISEMTGLAREFFALPSEEKLRFDMSGGKKGGFIVSSHLQGEAVQDWREIVTYFSYPIRHRDYSRWPDKPEGWREVTQKYSDELMGLACKLLGVLSEAMGLDTEALTKACVDMDQKVVVNFYPKCPQPDLTLGLKRHTDPGTITLLLQDQVGGLQATRDDGKTWITVQPVEGAFVVNLGDHGHFLSNGRFKNADHQAVVNSNSSRLSIATFQNP

SEQ ID NO: 5825 - protein, 368 aa, Pyrococcus abyssi GE5
MRKMIVLKFGGSSVKNDFHEAVSLTKSIFEEKEVAVVVSALKGITDMLIKYAKTFDSKYAIKIADSYVKFARTNGVDPNILSPHIQELFNPPSLPKDALTDYILSIGELLSAVIFAEVVEGQVIYPWELFSAYGKFGDGFIDLKKSKKNAKIIYEVIDSGKIPIVPGFVGGMDGYRVTLGRGGSDYSAVALGVILNSELVAIMSNVEGIFTADPKLVPSARLIPYLSYEEALIAAKHGMKAIQWKAAELAKEKKILMLFGRTNNWRMGTVISNRTSRMPLMTYKDGLLLINVEEELEYRVIDEGPFWKLYDVPGNEGIRIIRELHKAIFGNVLSMLQEPGKHIRINRHKVGKSFEHMTFNQSFSRKFY

SEQ ID NO: 5826 - protein, 465 aa, Pseudomonas aeruginosa PAO1
MAARKVQITMKTPARRRVGLLLASLCLPLFAQAAETQPTHEFSLDNGLKVIVREDHRAPVVVSQLWYRIGSSYETPGLTGLSHALEHMMFKGSRKLGPGEASRVLRDLGAEENAFTTDDYTAYYQVLARDRLPVALEMEADRMAHLSLPVDQFKSEIEVIKEERRLRTDDNPNALAFERFKAAAYPASGYHTPTIGWMADLQRMTIDDLRHWYESWYAPNNATLVVVGDVTADEVKTLAKRYFGEIPWRQLPPARKPLELAEPGERRLKLYVRTQLPNLIMGFNVPSLGSSENPREVNALRLIGALLDGGYSARLASRLERGEELVAGASTYYDAFNRGDSLFVLSATPNVQKGKTLEQVEAGLWKQLDDLKQNPPSAAEIERVRAQMIAGMVYEKDSIAAQASSIGQLESVGLSWKLIDQDLEALKAVTPDDIQKAARTYFTPSRLTLAQVLPVKAEEKEARHE

SEQ ID NO: 5827 - protein, 69 aa, Phaseolus vulgaris
MADWGPVIIAVVLFVLLSPGLLFQIPSRGRIAEFGNMQTSGASILVHAVIYFGLITIFLIAIGVHIYTG

SEQ ID NO: 5828 - protein, 274 aa, Prunus persica
DEGPQVPTIDLKEIDSENENVRERCREELKKAAVDWGVMHLVNHGISDELMDRVRKAGKAFFDLPIEQKEKYANDQASGKIQGYGSKLANNASGQLEWEDYFFHLVYPEDKRDLSIWPQTPADYIEATAEYAKELRALATKVLRVLSLGLGLEEGRLEKEVGGLEELLLQMKINYYPLCPQPELALGVEAHTDVSALTFILHNMVPGLQLFYEGKWVTAKCVPNSIIMHIGDTIEILSNGKYKSILHRGMVNKEKVRISWAVFCEPPKEKIILK

SEQ ID NO: 5829 - protein, 598 aa, Oryza sativa (japonica cultivar-group)
MLVLASFLLLLCHHAHADCEPATCGNLTINPPFWLDEPGRPPCGPPTFQLQCRGSEAFVAHSFFQTYQVVRIFTGNSSVVVVDRSLPLESGCPVPWFNISIGFVMGPFLISRANKELVFVHNCTTTKRRPPQGFRRMPCSPDESFVFLGDGRPRLLLPGCSMSVVPVLGLQDGDYVASMRRGLLLEWMLVPGDCQKCSASGGQCEYSSDGMGFSCKCPSGVHNPTSCVAGDSKSNGRKKTLIVLIPVAVSLLFPCAYVLIWHRKGQILCYLLCNKTRSRNESNIQKLIVSYGSLAPKRYKYSEVAKITSFLSNKLGEGGYGVVFKGKLQDGRLVAVKFLHDSKGNGEEFVNEVMSIGRTSHVNIVSLFGFCLEGSKRALIYDYMPNSSLDNYIYSEKPKETLGWEKLYDIAIGIARGLEYLHHGCNTRIVHFDIKPQNILLDQDFCPKIADFGLAKLCCTKESKLSMTGARGTIGFIAPEVLYRSFGVVSIKSDVYSYGMMLLEMIGGRKNVKSMVQNSSEKYFPDWIYDHFYQGDGLQACEVTSEVEEIAKKMTLIGLWCVQVLPMHRPTITQVLDMFEKALDELDMPPKQSFCESL

SEQ ID NO: 5830 - protein, 318 aa, Streptomyces coelicolor A3(2)
MSGVVDLAAVKQAQEAKAKAEQARAEAARTGGAGAVSPADLVIDVDEAGFESDVLQRSTEVPVVIDFWAEWCEPCKQLSPVLERLAVEYNGRFLLAKIDVDANQMLMQQFGVQGIPAVFAVVAGQALPLFQGAAGEQQIRQTLDQLVQVGEERFGLTGLVVDPEAEPGAERPAAPERPAGPHDAALDAAVQAMDAGDLGGAVQAYKNVLAEEPGNTEAKLGLAQAELLQRVQDADPQKVRREAADKPGDAQAQIAAADLDLVGGHVEDAFGRLIDTVRVTAGDDRDAVRLRLLELFEVVGADDPRVAAARRALARALF

SEQ ID NO: 5831 - protein, 600 aa, Oryza sativa
MEIGAVENGGVVGGEVVAGKRGKTPQGWKCMPFIIATETFEKVATIGVVANLTVYLVKRFNIGQIEAANITNIFFGTLNFAPLLGAFISDVYLGRFKTLAYGCFASLLGMLGMTLYASLPALKPPICHEKTRLGGGCNSPSTLQLSVLYLSLGFLIIGGGAIRPCSLPFGVDQFDKTDEEGRKGLNSYYNWYYGTSTAALVLSMIVIIYIQNNVSWPIGFGIPTLLMFLAIIMLFLGTNLYVHVQPEGSIFAGIAQVLVASFKKRNLKLPCPHDINQQGLMLYNPPSKGNRVFRLPLTSQFRFLNKGAIVMGDDINVDGSARNSWELCNVQQIEEVKCLIRIVPVCISGVLCFVALAQQFTYIILQTFTMDCHFGTHFEIPAGSVVSISLIALTLFIPIYDRILVPIARGFTGVESGITLLQRQGIGLAISPISMVVAGLVERKRRNSALSNGGISPMSVLWLAPQLVLMGIAEAFNAVGQIEFYNKQFPENMQTLAGSLFFCTIAGANYLSTALANIMRKVTTRDGHSSWLTDNINLGKLDYYFYFIALMGVLNLIYFLICSHFYQYKVMSLHSEESIKIPTKEEEATEIDIDTDAPSK

SEQ ID NO: 5832 - protein, 365 aa, Yersinia pestis KIM
MRLAMKKTYRIAAIPGDGIGHEVMPEGINVLQAAALRWDLDISFENIEWASCEYYQHHGQMMPNDWQRQLQCFDAIYFGAVGWPATVPNHISLWGSLLKFRRDFQQYVNLRPVRLFPGIPCPLVGKQPGDIDFYVVRENTEGEYSSVGGRLFEGTEQEMVLQASIFTRRGVDRILKYAFELAQMRPRKRLTSATKSNGLAFSMPYWDERFEVMAAQYPQISADKQHIDILCARFVLNPERFDVVVASNLFGDILSDLGPACAGTIGIAPSANLNPERDFPSLFEPVHGSAPDIYKRNIANPIAMIWAGAMMLDFLGQGDERYHAAHNGILNAIEQVIAQGPKTPDMCGDASTQQVGSAIVQVLSH

SEQ ID NO: 5833 - protein, 338 aa, Debaryomyces hansenii CBS767
MAFLFKRNPKTAPDLVRVLNDQVAKLDLNNDNNKKYQDECSRYLKQIKVILHGGDDSEPQPEQISQLAQEIYSSDCLYHLISNMRKLDFDSRKDVLILFLTLLRRQIGSTSPTVSYLLNSKPDILVLLMKGPETQETGLICGQILRDCIKFEAINKFIINNPLFWSYFKYVQIPIFEIATDSFITLHDLLTTHKKLVSEFLASNYEIFTSHINQLIQSNNYVTKRQSVRLLAELVLQRQNQFFLNKYFDDTNNLKLIMLLLSDKLKNLQIEGFHIFKFFVAKPKKSQKILDILIKNKENFIAFFRNFNINSFNDSNLIDERDYILNEIQKLPDIERIN

SEQ ID NO: 5834 - protein, 289 aa, Mycobacterium sp. KMS
MSDWTAADLPSFAGRSVIVTGANSGLGLVTARELARVGADVVLAVRNTAKGDEAAATMTGNVTVRKLDLQDLASVREFAAGTDRVDVLVNNAGIMAVPYARTVDGFESQIGTNHLGHFALTNLLLPKITDRVVTVSSFMHVLGRINLDDLNWKARPYSAWLAYGQSKLANLLFTSELQNRLRRAGSPVRALAAHPGYSHTNLQGQSGRKLGDALMAFGGEYFATDADFGARQTLYAVAQDLPGDTFVGPKFAMRGPTGPVWRTPLARDMKTAAALWELSEQLTGTRFPL

SEQ ID NO: 5835 - protein, 425 aa, Arabidopsis thaliana
MEGENNMEKGLLLAKKEDSANTTPLLIFSTFIIVSASFTFGAAIGYTADTMSSIMSDLDLSLAQFSLFGSLSTFGGMIGAIFSAKAASAFGHKMTLWVADLFCITGWLAISLAKDIIWLDMGRFLVGIGVGLISYVVPVYIAEITPKHVRGAFTFSNQLLQNCGVAVVYYFGNFLSWRTLAIIGSIPCWIQVIGLFFIPESPRWLAKKGRDKECEEVLQKLRGRKYDIVPEACEIKISVEASKKNSNINIRSLFEKRYAHQLTIGIGLMLLQQLCGTAGISSYGSTLFKLAGFPARIGMMVLSLIVVPKSLMGLILVDRWGRRPLLMTSALGLCLSCITLAVAFGVKDVPGIGKITPIFCFIGILSFTMMFAIGMGALPWIIMSEIFPMDIKVLAGSLVTIANWFTGWIANYAFNFMLVWSPSGE

SEQ ID NO: 5836 - protein, 428 aa, Rhizobium leguminosarum bv. viciae
MTASAYRDHLGRPIVAVTGMGIITSLGQGLSDNWAALSSGTSGIHEINRFPTEGLSTRIAGTVDFIGIPVPNAVERSYAFARETTIEALADAGLSGDFNGPLFLAAPPIEPEWSARFELADRSPASDHPGDAYERFLTALRQRPDPAFHEAALFGAISERLADRFGTRGLPVTLSTACASGVTAIQLGIEAIRQGRTTRALTVATDGSLSAEALIRFSLLSALSTQNDPPTRASKPFSKDRDGFVIAEGAATLVLESLESAVARGAKVLGIMKGAGDKADSFHRTRSSPDGGPAIATIRAALADAGMSEGDIGYINAHGTSTPENDKMEYGSMSAVFGEKLVGIPVSSNKSMIGHTLTAAGAVEAVFSLQTMLTGTLPPTINYNNPDPSIILDVVPNKKREAQVSAVLSNSFGFGGQNASLVMALEPA

SEQ ID NO: 5837 - protein, 95 aa, Vibrio harveyi
MQINIQGHHVDLTDSMQEYVDSKFQKLERFFDHINQVHVVLKVEKLNQIAEATLHINQGEIHASSNDESMYAAIDSLVDKLVRQLNKHKEKLNSH

SEQ ID NO: 5838 - protein, 419 aa, Oryza sativa (japonica cultivar-group)
MRRKKTGRRTILIVLTAAAAGLLLPCIYVLIWHGKGKQLRYFLYTKTSSTSERNIEALIISYGSIAPTRYKYSEVTKITSFLNYKLGEGGYGVVFKGRLQDGRLVAVKFLHDSKGNGEEFVNEVMSIGRTSHINIVSLFGFCLEGSKRALLYEYMPNGSLDDYIYSENPKEILGWEKLYGIAIGIARGLEYLHHSCNTRIIHFDIKPQNILLDQDFCPKIADFGLAKLCRTKESKLSMTGARGTIGFIAPEVIYRSFGIVSTKSDVYSYGMMLLEMVGGRKNAKSMVENSSEKYFPDWIYDHFALDDGLQACEVTSEVEQIAKKMTLIGLWCVQVLPMHRPTITQVLDMFERSLDELEMPPKQNFSELLEHPAQEINTESTSSTINTKAAQALSEVLRVEETSLVNSKDPTVTTNYAKR

SEQ ID NO: 5839 - protein, 451 aa, Thermoanaerobacter tengcongensis MB4
MPKRYVIIGGDAAGMSAASQIRRMDKEGEVLVFEKEGVISYAQCGLPYWVGGVVSEKKKLIARTAEEFLNRYNIDVKLYHEVVKIDPSKKEIKVFRREEKDEIAVPYDVLLIGTGSTAIVPPWEGRNLPGVFTLKTMGDAEKLLDWLSSHTPTKAVVIGGGYIGLETAEALHSRGFKVTVLDLAPQLIPTFDKEIAEIAQDALTRHGVEVHLNEEVVGLEGDEKGVKAVVTKNGKFEADLVIISIGVRPVSELAKEAGIELGPKNAILVNERLETSIPDIYAAGDCATHFNRIKNAPDYIPLGTTANKQGRIAGINMAGGDAKFAGVVGTAIVKVFDRTIARSGLGERDCEALGIPYQVVLIKARPVSHYYPWEDEILTIKLCYHKDNRKLLGGQIAGGLGGVDKRIDVLATALFHEMTIDELQALDLAYAPPYNSVWDPLQQASTVAQRG

SEQ ID NO: 5840 - protein, 431 aa, Candida glabrata CBS 138
MTANNNPYAPSPTDYLSNVNSFQLIDSTLREGEQFANAFFDTEKKIEIAKALDDFGVDYIELTSPVASEQSYKDCKAICNLGLKAKILTHIRCHMDDAKVAVETGVDGVDVVIGTSKFLRQYSHGKDMNYIAKSAIEVIEFVKSKGIEIRFSSEDSFRSDLVDLLNIYKTVDKIGVNRVGIADTVGCANPRQVYELVRTLKSVVSCDIECHFHNDTGCAIANAYTALEGGAKLIDVSVLGIGERNGITPLGGLMARMIVAAPDYVKSKYKLHKIRDIENLVAEAVEVNIPFNNPITGFCAFTHKAGIHAKAILANPSTYEILDPHDFGMKRYIHFANRLTGWNAIKARVDQLNLNLTDDQIKEVTAKIKKLGDVRPLNIDDVDSIIKDFHAEITTPQLRSINGQARTSAIDLQSLDTVEENEPAQKKARVD

SEQ ID NO: 5841 - protein, 615 aa, Bacillus halodurans C-125
MCGITGWVDWRRNLQNETETIKQMAETQTHRGPDDLNVWTEKHAALGHSRLIVVDPEGGCQPMMRERNGKRYTIVYNGELYNTEDLRKELIVKGYQFQGHSDTEVLLVSYIEWGYQCVEKFNGIFAFAIWNDKDQSLFMARDRLGVKPLFYTVRHGFLLFATEIKALLAHPEIEPVLTEEGLSEVLGLGPSRSPGNGVFDDIQELRPAHLLTYDRNGAKVSRYWRLKSMAHSEDAMETAAHLRDLLEDTVERQLFADVPVGMFLSGGVDSSALTAIAALIYEREGKGLIRTYSIDYDENDKYFKANDFQPNADGPWVEKVSTTFRTNHHNAVISIEELANQLKRAVELRDLPGMADVDSSLYWFCKQIKKDVTVGLSGECADEIFGGYPWFHKPEVMNFNGFPWMRSADERQELLHERWRQKLNLPKYVHDRYKETIAETPRFEEDTPEEARRREISYLNMVWFMTTLLDRKDRMSMGASLEVRVPFSDHRIVEYAWNIPWEIKQFGGREKGILRKALEGILPDEVLYRKKSPYPKTHHPKYTKMVQQEMERILGQSDSPLFDVVNRKKLKELTETGGKALTTPYFGQLMTGPQLLAHFIQMEHWLKHYNIKLIG

SEQ ID NO: 5842 - protein, 457 aa, Agaricus bisporus
MVLPHEPEFEQALHELETSLQPFLTTNPQYKKALEIIQVPERVLQFRVTWEDDQGKPQVNRGFRVQYNSALGPYKGGLRLHPTVNLSILKFLGFEQTFKNALTGLSMGGGKGGSDFDPKGKSDNEIRRFCVAFMSELFRHIGQDTDVPAGDIGTGAREIGFLFGAYRRLKNEFTGMLTGKGINWGGSFIRPEATGYGLIYYVEHMIAHACPEYSLDRPSTLVAISGSGNVSQFTALKVIELGATVLSLSDSKGSLISEKGYTKEAIEKIAELKLKGGALEAIVDDLGAGYTYHAGKRPWTLLPQVHIALPGATQNEVSQEEAEALVKAGTRIVAEGSNMGCTEEAIAIFENSRRASRAGVWYAPGKASNCGGVAVSGLEMAQNSQRLAWSTQEVDAKLKSIMAECYQICYTAGSRWSGEKVAEGVAEGEALPSLLSGANLAGFIKVADAMKEQGDWW

SEQ ID NO: 5843 - protein, 140 aa, Triticum aestivum
  misc_feature (123)..(123): Xaa can be any naturally occurring amino acid
MAPTVMASSATSVAPFQGLKSTAGLPVSRRSNGASLGSVSNGGRIRCMQVWPIEGIKKFETLSYLPPLSTEALLKQVDYLIRSKWVPCLEFSKVGFIFREHNASPGYYDGRYWTMWKLLCSGXTDATQVINEVEEVRRST

SEQ ID NO: 5844 - protein, 119 aa, Zea mays subsp. parviglumis
MARTQSAVAVAVVAAVLLLAAAATISEAAITCGQVSSAIAPCLSYARGTGSAPSASCCSGVRNLKSAASTAADRRAACNCLKNAARGVSGLNAGNAASIPSKCGVSIPYTISTSTDCSR

SEQ ID NO: 5845 - protein, 306 aa, Staphylococcus aureus subsp. aureus MSSA476
MIYTVTFNPSIDYVIFTNDFKIDGLNRATATYKFAGGKGINVSRVLKTLDVESTALGFAGGFPGKFIIDTLNNSAIQSNFIEVDEDTRINVKLKTGQETEINAPGPHITSTQFEQLLQQIKNTTSEDIVIVAGSVPSSIPSDAYAQIAQITAQTGAKLVVDAEKELAESVLPYHPLFIKPNKDELEVMFNTTVNSDTDVIKYGRLLVDKGAQSVIVSLGGDGAIYIDKEISIKAVNPQGKVVNTVGSGDSTVAGMVAGIASGLTIEKAFQQAVACGTATAFDEDLATRDAIEKIKSQVTISVLDGE

SEQ ID NO: 5846 - protein, 570 aa, Geobacter sulfurreducens PCA
MRYTNYFIPTLKETPSDAEVVSHQLMLRAGMIRKLAAGIYNYLPLGLRSIRKVETIVREEMDRAGAIELLMPSVQPAELWQESTRWEQYGKELLRFKDRKDAEFCLGPTHEEVVTDIVRREVKSYRQMPFNLYQIQAKFRDEIRPRFGLMRGREFIMKDAYSFDVDSSASDLSYDKMYQAYRRIFQRCGLKFRAVEADTGSIGGSSSHEFMVLADSGEDAIVSCTQCEYAANVEKAEARPAPAEHAEPRPLEKVETPAKRSVEEVTAFLGIPSSALVKTLLVVADGTPVAALVRGDHDLNEIKLKHLLGCETLEMANEEMVTRVTGAPVGFAGPVGLNIKIVADLAVQGMKNFVTGANAGDLHLKNVTIGRDFTPTQYADIRNVVHGDPCPRCEAGHLELWRGIEVGHVFKLGTKYSEALRATYLDADGKEQIIFMGCYGIGISRTVAACIEQNHDADGIIFPIPIAPFHCIVSAVNTKDAEVMAACESLYLDLRAAGVEVLFDDRDERPGIKFKDADLIGIPLRLVVGSKNLADGKVELKSRRTGEVELLPLAGAVEKVRNIVAEALGR

SEQ ID NO: 5847 - protein, 347 aa, Nocardioides sp. JS614
MTITETPTTPTPHSRRLTTSKAIVEAIAFEMERDPSVFYLGEDVGSYGGIFGSTGGLLDRFGKDRVIDTPISETAFIGLGIGAAVEGMRPIVELMFADFMGVCLDQIYNHMAKIHFESGGNVKVPMVLTMAAGGGYSDGAQHSQCLWGTFAHLPGMKVVVPSSPADAKGLMTAAIRDDNPVVYLFHKGVMGLPWMAKNPRSNDAVPDGDYETPIGKANVVRSGSDVTVVTISLSVHHALDVAERLADDGIDVEVLDLRSLVPLDREAILASVAKTGRLVVVDEDYLSFGMSGEVVATIAEHDPTLLKRPAERVAVPDVPIPYAHALEYAVLPRQDRIEAAVRRVVAG

SEQ ID NO: 5848 - protein, 506 aa, Coccidioides immitis RS
MPRPGQVLGLVGTNGIGKSTALKILSGKLKPNLGRYDNPPDWEEILKYFRGSELQNYFTKVLEDDLKAVVKPQYVDQIPKAVKGPVRSVAPLIKARSQMDNMEHIMEVLELNQVKDRDISLLSGGELQRFAIALVCVQQADVYMFDEPSSYLDVKQRLSAARTIRELLRPDDYVIVVEHDLSVLDYLSDFICVLYGRPAVYGVVTLPASVREGINIFLDGHIPTENLRFREESLTFRIAEAGDDFIVDQGRAFSYPAMEKSLGSFHLSIEAGRFTNSEIVVMMGENGTGKTTFCKMLAGVEKPDGGKAVPAMNISMKPQKITPKFQGTVRQLFFKRIKAAFLSPQFQTDVYKPLKIDDFIDQEVQNLSGGELQRVAIVLALGIPADIYLIDEPSAYLDSEQRIVAARVIKRFIMHTKKTAFIVEHDFIMATYLADRVIVFDGKPSIDARANKPESLLTGCNRFLKNLDVTFRRDPNSYRPRINKDKSQLDQEQKLSGNYFFLEEES

SEQ ID NO: 5849 - protein, 119 aa, Zea mays subsp. parviglumis
MARTQSAVAVAVVAAVLLLAAAATTSEAAITCGQVSSAIAPCLSYARGTGSGPSASCCSGVRNLKSAASTAADRRAACNCLKNAARGVSGLNAGNAASIPSKCGVSIPYTISTSTDCSR

SEQ ID NO: 5850 - protein, 637 aa, Mesorhizobium sp. BNC1
MVGEICRSRIAETIAWRICACNVCVESLEIFIRPAQRAASFLVGIMSSGDGEPTMMAAAPQPWSKRLSQRAASLLPFGPLSFGSTQKRRSTFMSAYARALDALRQHRRETEDFDLRQAFGADPDRFSRCSAALDDMLLDYSKCAVSDETLALLDKIAEAAGVIERREEMFSAKRINVTENRAVLHTALRNDSTRPVMLDGKDVMPDVEAVLAAMSTFSEGIRSGTIKAATGKSFTDVVNIGIGGSDLGPAMATLALAPYHDGPRLHYVSNVDGAHIHDTLKALDPDTTLFIIASKTFTTIETMTNAGTARSWIAEKLGQDAVGSHFAAVSTALDKVAAFGIDESRVFGFWDWVGGRYSLWSAIGLPIMIAIGPENFRRFLDGAELMDRHFREAPSRENLPMMLGLIGFWHRVICGYPARAVIPYDQRLARLPAYLQQLDMESNGKRVTFEGESVTVPTGPLVWGEPGTNGQHAFFQLLHQGTDIIPVEFMIAARGHEPELKHHHDLLIANCLAQSEALMKGRTLQEAKAQLLAKGMSEAEADKLAPHRVFPGNRPSVTIIYEKLDPFTLGRLIALYEHRVFVEAALFRINAFDQWGVELGKELATELLPVVEGKKDASGRDSSTAGLVAQIAALRDS

SEQ ID NO: 5851 - protein, 175 aa, Xylella fastidiosa Temecula1
MHPKNFQHQLKTIPQPPEETRDFVFNHTMLRVKDINASLDFYARILGFRLIDQRDFPEAQFSLYFLALLPQTVHISDNDTERRLWMSGIPGVLELTHNYGTETQEGQIYHNGNSEPRGFGHICISVPDLYSACARFDTLQVPYQKRLTDGRMKNIAFIKDPDGYWVEIISNTPLP

SEQ ID NO: 5852 - protein, 484 aa, Aspergillus oryzae
MSAKSILEADGKAILNYHLTRAPVIKPTPLPPSSTHNPPARLASLYFPEDRAVKDVLDQAEVTYPWLLASGAKFVAKPDQLIKRRGKSGLLALNKTWAEAREWIEARAAKDVQVETVTGVLRQFLVEPFVPHPQETEYYINIHSVREGDWILFTHEGGVDVGDVDAKAEKLLIPVNLKNYPSNEEIAATLLKKVPSGVHNVLVDFISRLYAVYVDCQFTYLEINPLVVIPNADATSAEVHFLDLAAKLDQTAEFECGTKWAIARSPANLGIAVAPQEGKVNIDAGPPMEFPAPFGREMSKEEKFIAELDAKTGASLKLTVLNPKGRVWTLVAGGGASVVYADAIASAGFVSELANYGEYSGAPTETQTYNYAHTVLDLMLRAPIHPDGKVLFIGGGIANFTNVASTFKGVIRALREVAPVLNEHKVQIWVRRAGPNYQEGLRNIKSVGEELGLNMHVYGPEMHVSGIVPLALLGKKSDVKEFSA

SEQ ID NO: 5853 - protein, 537 aa, Oryza sativa
PPPPRERRASSRRRASPYARYPAATACPSSRRCATASTTSTSRAPRSTSDHAGLLIREIPGGYGVPFLSPLRDRLDYYYFQGADEFFRSRVARHGGATVLRVNMPPGPFLAGDPRVVALLDARSFRVLLDDSMVDKADTLDGTFMPSLALFGGHRPLAFLDAADPRHAKIKRVVMSLAAARMHHVAPAFRAAFAAMFDEVDAGLVAGGPVEFNKLNMRYMLDFTCAALFGGAPPSKAMGDAAVTKAVKWLIFQLHPLASKVVKPWPLEDLLLHTFRLPPFLVRREYGEITAYFAAAAAAILDDAEKNHPGIPRDELLHNLVFVAVFNAYGGFKIFLPHIVKWLARAGPELHAKLASEVRAAAPAGGGEITISAVEKEMPLVKSVVWEALRMNPPVEFQYGRARRDMVVESHDAAYEVRKGELLFGYQPLATRDEKVFDRAGEFVPDRFVSGAGSAARPLLEHVVWSNGPETGTPSEGNKQCPGKDMVVAVGRLMVAGLFRRYDTFAADVEELPLEPVVTFTSLTRAADGDGAARRGV

SEQ ID NO: 5854 - protein, 656 aa, Aspergillus oryzae
MSSTAPLVNTANGGSANDNITRFAPPSRVLSPLNHALFHNKTRCFVYGMQPKAVQGMLDFDFICKRSTPSVAGIIYTFGGQFVSKMYWGTSETLLPVYQDVSKAMAKHPDVDTVVNFASSRSVYSSTMELMNCPQIKSIAIIAEGVPERRAREILVTAKEKGITIIGPATVGGIKPGAFKIGNTGGMMDNIVASKLYRKGSVGYVSKSGGMSNELNNIVSQNTDGVYEGVAIGGDRYPGTTFIDHLLRYQNEPECKILVLLGEVGGVEEYRVIEAVKNGTITKPIVAWAIGTCASMFKTEVQFGHAGASANSDLETAVAKNKAMREAGIHVPETFEDMPGVLKQVYDQEVSKGNIQPQPEPVPPKIPIDYSWAQELGLVRKPAAFISTISDDRGQELLYAGMPISDVFREDIGIGGVMSLLWFRRRLPAYASKFLEMVLMLTADHGPAVSGAMNTIITTRAGKDLISALVSGLLTIGSRFGGALDGAAEEFTKAFDKGLSPRDFVDTMRKENKLIPGIGHRVKSRNNPDLRVELVKEFAKKHFPSTKLLDYAIAVETVTTSKKDNLILNVDGCVAVCFVDLMRNSGAFSPEEVEDYMKMGVLNGLFVLGRSIGLIAHYLDQKRLRTGLYRHPWDDITYLLPALQKGGSEGRVEVNI

SEQ ID NO: 5855 - protein, 300 aa, Cryptococcus neoformans var. neoformans B-3501A
MLLPLVRHVSKSLTKQRCFAAWGRTISTTPEPHAYLRPLLSTTADAKLPELDKVMTLMLNRPATKNALTVQMVSEMREALATLNPADSRLLLIQSSNPSLFCSGADLRERRTMSPMQVSNFLDNLRQLLAELEALPIPTVAVIDGYALGGGAELALGCDLRVGGDNTKIALPETKLGIIPGAGGTQRLTRIVGMAKSKELIFTGRHVQGPEAERIGLLNIYASSPSSPFEAALILARQILTSAPLALAAAKRAISSAPELSLEAGLDLERAVYNGLLDTDDRQEGLKAFAEKRRADFRGR

SEQ ID NO: 5856 - protein, 261 aa, Roseovarius nubinhibens ISM
MALLERNDTGPVAHLRLNAPERINALSDAMLAALQSQIDTLREDRSIRAVVISGAGKAFCAGHDLKEMTAGRQSEDGGRAYFADLFNRCASVMTGLRALPQPVIAAPHGIATAAGCQLVASCDLAIAAEGTRFGVNGVNIGLFCSTPMVALSRNIPRKQAFEMLTTGEFIDTDRAQALGLINRAVPADDLLPAAMEMAETIAAKLGAAVRIGKEAFYNQLEMGLDAAYAYTGQVMVENMLRSDTAEGISAFIEKRAPDWDQ

SEQ ID NO: 5857 - protein, 107 aa, Zea diploperennis
VAAVLLLAAAATTSEAAITCGQVSSAIAPCLSYARGMGSAPSAGCCSGVRNLKSAASTAADRRAACNCLKNAARGVSGLNAGNAASIPSKCGVSIPYTISTSTDCSR

SEQ ID NO: 5858 - protein, 480 aa, Gluconobacter oxydans 621H
MTTPLWRTKPVSSAADSQTGLKRVLGPWQLVALGVGVTIGAGLFSLTGVAAGQNAGPAVTLSFVIAAVACGFAGLCYGELASMIPSGGSAYSYAYASMGELIAWIIGWDLVLEYTVGAAAVASSWSGYLASLLGGWGIHIDPRLLATPMTPVTMPDGSMASAWLNLPAVCALWGVTALLMRGVSESTTINTIVVCIKLAVIVAVIAACAPHISFEHYHPFIPQNTGTFGQFGMSGVMRAAGMAFFAYLGFDIVSTTAQDSRNPARDIPIGILGSLLVCSVVYAVFSMVLTGVVDYRAMANDPSPVATAIDVAGMPWLASLVKLGITAGYISVLFGLLMGQARVFLIMSHDGLLPPVFSKLNARTHTPWTSHLMFAALTSVFAAVLPIGQLGNMTSIGTLLAFIIVCIGVPVLRHRYPEAPRQFRVPGGLLVPVLGILSCGAVMVSLDRLTWIRLVVWLAIGLAVYFAYGIRNSRLCRSES

SEQ ID NO: 5859 - protein, 183 aa, Brassica napus
RYLQLHTQIKRKDISKKIVRSKKIFLRTMASASLPPPPPSSTSLTSQQSSPPPSQLPIRKMPGSYGLPLVGPLSDRLDYFWFQGPDKFFKSRSEKYKSTVFRTNIPPSFPFLGNVNPNIVAVLDVKSFSYLFDMDLVDKRDVLIGDFRPSLDFYGGIRVGVFLDTTEPKHAKVCMYIQYVAVC

SEQ ID NO: 5860 - protein, 393 aa, Mycobacterium tuberculosis H37Rv
MSGEDSIRSFPVPDLGEGLQEVTVTCWSVAVGDDVEINQTLCSVETAKAEVEIPSPYAGRIVELGGAEGDVLKVGAELVRIDTGPTAVAQPNGEGAVPTLVGYGADTAIETSRRTSRPLAAPVVRKLAKELAVDLAALQRGSGAGGVITRADVLAAARGGVGAGPDVRPVHGVHARMAEKMTLSHKEIPTAKASVEVICAELLRLRDRFVSAAPEITPFALTLRLLVIALKHNVILNSTWVDSGEGPQVHVHRGVHLGFGAATERGLLVPVVTDAQDKNTRELASRVAELITGAREGTLTPAELRGSTFTVSNFGALGVDDGVPVINHPEAAILGLGAIKPRPVVVGGEVVARPTMTLTCVFDHRVVDGAQVAQFMCELRDLIESPETALLDL

SEQ ID NO: 5861 - protein, 75 aa, Arabidopsis thaliana
  misc_feature (2)..(2): Xaa can be any naturally occurring amino acid
  misc_feature (9)..(11): Xaa can be any naturally occurring amino acid
  misc_feature (15)..(15): Xaa can be any naturally occurring amino acid
  misc_feature (25)..(25): Xaa can be any naturally occurring amino acid
  misc_feature (57)..(57): Xaa can be any naturally occurring amino acid
  misc_feature (67)..(67): Xaa can be any naturally occurring amino acid
MXSSMLSSXXXVTSXAQATMVAPFXGLKSSASFPVTRKANNDITSITSNGGRVSCMXVWPPIGKKKXFETLSYLP

SEQ ID NO: 5862 - protein, 418 aa, Desulfotalea psychrophila LSv54
MSEPIFIFYKESVNVMAVSSIEEAIEDIKAGKMVILVDDEDRENEGDLCMAAEFVAAADINFMATHGRGLICLTLTPKLVDQLALPMMVQENKSPYGTGFTISIEAKTGVETGISAADRARTIQVAVADGAGPQDLVSPGHVFPLRAREGGVLCRTGQTEGSVDLARLSGATPAGVICEIMKDDGTMARMPDLEIFAAEHELKIVTVADLVEYRLRQDLLVHRQVAARIPTADAGEFTAIVYTNDVDNFEHLALVKGDLEAAEEVLVRVHSECLTGDLFGSARCDCGPQLHEAMRMIDRAGCGVVLYMRQEGRGIGLINKLKAYNLQDNQGLDTVEANIELGFKADLRDYGIGAQILRDLGITKMSLLTNNPKKIIGLEGYGIEVISRVPIEIEASEENEGYLRCKRDRMGHLLNMKE

SEQ ID NO: 5863 - protein, 341 aa, Streptomyces coelicolor A3(2)
MRIGVLTAGGDCPGLNAVIRSVVHRAVDNYGDEVIGFEDGYAGLLDGRYRALDLNAVSGILARGGTILGSSRLERDRLREACENAGDMIQNFGIDALIPIGGEGTLTAARMLSDAGLPVVGVPKTIDNDISSTDRTFGFDTAVGVATEAMDRLKTTAESHQRVMVVEVMGRHAGWIALESGMAAGAHGICLPERPFDPADLVKMVEERFSRGKKFAVVCVAEGAHPAEGSMDYGKGAIDKFGHERFQGIGTALAFELERRLGKEAKPVILGHVQRGGVPTAYDRVLATRFGWHAVEAAHRGDFGRMTALRGTDVVMVPLAEAVTELKTVPKDRMDEAESVF

SEQ ID NO: 5864 - protein, 492 aa, Mycobacterium sp. KMS
MAGHGGAPVGGDLPIGDDEFTSGKTAIRIASVAALGGLLFGYDSAVINGAVDSIQEDFGIGNASLGFAVASALLGAAAGAMTAGRIADKIGRIAVMKIAAVLFLISAFGTGFAHEVWAVVLFRIVGGIGVGVASVIAPAYIAETSPPSIRGRLGSLQQLAIVSGIFLSFVVNWLLQWAADGPNKPLWFGVDAWRWMFLAMAVPAVVYGALAFTIPESPRYLVASHKIPEARRVLSTLLGKKNLEITITRIRETLEREDKPSWRDLRKPTGGLFGIVWVGLGLSIFQQFVGINVIFYYSNVLWQAVGFSADESAVYTVITSVINVLTTLIAIALIDKIGRKPLLLIGSSGMAVTLITMAVIFANATLDADGNPSLPGASGVIALIAANLFVVAFGMSWGPVVWVLLGEMFPNRIRAAALGLAAAGQWAANWLITVTFPGLREHLGLAYGFYGMCAILSGLFVWRWVRETKGVSLEDMHGEILKHDLPTGAKEG

SEQ ID NO: 5865 - protein, 501 aa, Aspergillus oryzae
MELLPKLVILLLAALGIASVSIRRFLNRRQFARRCGCQPVARSFSKDPFLGLDTIPGTIRAIRQHRVLGRSCEIFRAYGNTFTVKELHQSAIVTIEPENIQAVLSLNFKDYTLRHRLELFMPLLGRGIFNTDGQHWASSRALIRPSFAREQVANLSLLERLMQDLFVLLPRDSTTVDLQELFFRYTIDSATDLLFGQSVGALKKSQSGLAFADALQYALKAIPVRDMLGPLNAVYRDRKTDECNRICRDFVQQYVEEAVYAAGPKKEEKESRTTETKRRYILSHELASRTSDKQRMVDELINVLLAGRDTTGSLLGNLFFMLAKNPVIWAKLRAEVAVLQNRPPTYEELRGLRYVQCCVNESLRLHPVVPTNKRKAMRDTVLPRGGGNDGLSPVFVPAGTLVGYNIYAMHRRTDFYGPDAKEFRPERWEDGKLQPRWGYLPFNGGPRICLGQRYALTEASYVLVRMAQEFRGLESRDPGSWEEGLVLTVCPRNGTKVGLIP

SEQ ID NO: 5866 - protein, 363 aa, Pichia jadinii
MPEKTIVVLPGDHVGTEITAEAIKVLKAIEEVKPEIKFNFQHHLIGGAAIDATGVPLPDDALEASKKADAVLLGAVGGPKWGTGAVRPEQGLLKIRKELNLYANLRPCNFASESLLDLSPIKAEVVKGTDFVVVRELVGGIYFGERKEDDGSGVASDTETYSVPEVQRITRMAAFMALQHNPPLPIWSLDKANVLASSRLWRKVVTETIEKEFPQLTVQHQLIDSAAMILIKYPTQLNGIVITSNMFGDIISDEASVIPGSLGLLPSASLASLPDSNKAFGLYEPCHGSAPDLPANKVNPIATILSAAMMLKLSLDLYEEGVAVETAVKQVLDAGIRTGDLKGTNSTTEVGDAVAEAVKKILA

SEQ ID NO: 5867 - protein, 542 aa, Zea mays
MAASASTTLFSPCALTSKLGAGHASYGSVRRANVRRRGRLSVVAVQTGPQKPSPLSSQAAAAEDEADALQKLLKREYKYGFVSDFESFSIPKGLSEATVRRISELKAEPAWMLDFRLAAYRRFLTMVEPTWSDNEYAPVDLQSICYYSAPKTKPKLNSLDEVDPELLNTFDRLGIPLSEQKRLANVAVDAVIDSTSIATTHREALMAKGVIFCSISEAIREYPDLVRRYLGSIVPPGDNYYAALNSAVFSDGSFCYVPKDTVCPMEISTYFRINDKETGQFERTLIVADERSTVSYLEGCTAPAYDSNQLHAAVVELVCEDGAEIKYSTVQNWYSGDEEGRGGIYNFVTKRGRCKGRGSKISWTQVETGSAITWKYPSVELVGDDSVGEFYSVALTKDCQQADTGTKMIHKGKNSRSRIISKGISAGKSRNCYRGLVLMNSSAENAYNSSQCDSLLIGDNAAANTYPTIQVGCTSGRVEHEASTSKIGEDQLFYFQQRGVDHEKAVAAMIGGFCRSVFEHLPYEFAQEVDALMNLKLEGSVG

SEQ ID NO: 5868 - protein, 493 aa, Xanthomonas axonopodis pv. citri str. 306
MNALTSATAAATDTPAWHGCIFNGDWVPGRGGSLPIHEPATGALLHEVGKADLSDLAAAIAQAKQAQRAWSATPPRERAAVFHRAAQAMQARSAEAALLIARETGGILPKAQREVDESVVFYQQAAAMPLQASGQMLPTSAGQLSLARRLPLGVIGVISPFNFPLILSLRSVAPALAMGNAVILKPDPRTPYTGGVIIAQVLEQAGLPKGLLHVLHGDAQLGQALVESPDVPMIAFTGSTAAGRCIGEIAGRHLKKVSLELGGNNAVIVLDDADLDKAASAVAFGAYMHQGQICMATGRVLVHRSVAQALTQQLAEKARHLPVGDPVSGTVALGPIIDQRQLQRVVDIVNDSVAAGAVVEAGATHEGLFYAPTVLSNVRPGMRAFDEEVFGPVINITVFDTDDEAAELANQGEYGLAAGILSASVSRALALGEKLHTGLLHINDQTVADEVVNPFGGTGASGNGTSVGGPADWEQYTHWQWLTIKNEVPQYPF

SEQ ID NO: 5869 - protein, 707 aa, Oryza sativa
MGKSSKKSAVEVAPTSVSVSEGKSGKKGKRNAEDEIEKAVSAKKQKTVREKVVPSKEEAKKVKKQPPPKKVESSSSEEDSSESEEEVKAQPKKTVQPKKAAQPAKEESSDDSSDDSSSDDEPAKKPVARPNKAALSTNSSSSDDSSDESSSDDEPVKKPAAPLKKPVALATNGSKKVETDSSSSDSSSDEESDEDDKKTAAPVKKPSVAAIQKKTQESDSSDSDSDSESDEDVPTKAPAVAKKKEESSESSDSESDSDSDDEAAAVKKEEESSDSSDSDSESESDSDEPAKPTIPAKRPLTKDTKKGQSKDESEDSSDESSEESDDEPPQKKIKDSTTSGTTKPSPKATKKEISSDDESDEDDSSDESSDEDVKQKQTQAKKQAPVAQESSSSDESSEEDSDMESDEPAKTPQKKETAVSVGSNKSATKLGQEEPKTPASNQNQATGSKTLFVGNLPYNVEQEQVKQFFQEAGEVVDIRFSTFEDGNFRGFGHVEFATAEAAKKALELAGHDLMGRPVRLDLARERGAYTPGSGRDNSSFKKPAQSSGNTIFIKGFDTSLDIHQIRNSLEEHFGSCGEITRVSIPKDYETGASKGMAYMDFADNGSLSKAYELNGSDLGGYSLYVDEARPRPDNNREGGFSGGRDFNSSGRGGRRGGRGDGSRGRGDRGRGRGFGRGDRGHGGRGTPFKQSAGTPSAGKKTTFGDDD

SEQ ID NO: 5870 - protein, 683 aa, Oryza sativa (japonica cultivar-group)
MDTPLLLLLPFLAACLLAPRHAAEAAVTSCAPRRCGNVTIAYPFWLPDSSPPPSSSSAPCGPAAFQVNCDNGSRASLARSFRSGYKILGVSYANRTVVVANDNVQTDASGCPVPKIDVSASLTLAPFTASPANSQLVFLFNCTSSSRPPPAGFVNVTCPGAKAVVRLDTSYNNTAARVVAGGCDYAAVPVVGVPGASPTDYPQLLRGGYMLEWRAPAGDCMACNASGGQCGYDADTEAFACICSDGSSRPGICDAKKSGNKVILIVSLSICATGLVLLACIAIVYKCRRRMQNRFSFLNAMDGASRTDTAKVEKLLQSYGSLAPRRFRYSELKKITKSFSQRLGEGGYGTVFSGTLADGRAVAVKFLHHSKPNGEEFLNEVVSIGRTSHVNIVSLLGFCLEGSKRALVYEYMPNGSLDKYIYSTSAAAAAEAEEAEATASPDRDVLGWKVLQEIAVGVARGLEYLHDGCNTRIIHFDIKPHNVLLDEGFRPKIADFGMAKLCNPKESILSMADTRGTIGFIAPEVFSRGFGDISTKSDVYSYGMLLLEMVGGGSNVKAYAEKGASGTFFPLWVYDHLLEDGGVLQSVAAAAAATAGGGAGSPGGEEIARKMALIGLWCIQTVPANRPSMGKVLEMLERSVHELAMPPRPYHSNSSSPSRPSSYPSSASDFTQRSRLSTPGSTA

SEQ ID NO: 5871 - protein, 355 aa, Arthrospira platensis
MTQNYRITLLSGDGIGPEIMAVAVDVLKAVGKQLDLNFEFKEALMGGVAIDATGEPLPEESLQACRDSDAVLLAAIGGYKWDNLPRPERPETGLLALRAGLGLFANRARLLFCPHVLDASSLKREVVEGVDIMVVRELTGGIYFGQPKGIFETETGKNEGSNTMAYGESEIDRIGRVGFETAKKRQGRLCSVDKANVLDVSQLWRDRIMALAADYPEVELSHLYVDNAAMQLVRWPKQFDTIVTGNLFGDILSDAAAMLTGSIGMLPSASLGASGPGVFEPVHGSAPDIAGQDKANPLAQVLSAAMMLRYGLDEPAASDPVEKAVLKVLDWGYPTGDIMSEGMKAVGCRKWGICY

SEQ ID NO: 5872 - protein, 414 aa, Glycine max
MASFRRTLSPAYPDRQYLNGSFSVSSPSHKLPSSNAKYSSPLPELVAAFLRLAGGVFTRRHGRKGQWRRVVVRCVLCFFVGFLLGMFPFGHVSEDVRSHEISFEMKPPPLPRAANNAQQLLLEDRVLRNRVEREGLVIDPVSLSAEWERRSERFDFTPRKPLIVVTPTYDRAFQAYFLNRLGQVLRLVPPPVVWIVVEMKAASMETAEVLRKTGVMYRHLVCNRNSTDVKDRGVHQRNTALEHIERHRLDGIVYFADDDNVYSLELFDALRDIRIRFGTWPVAMLAPSKNKAILEGPVCNASQVIGWHTNEKSKRLRRFHVDMSGFAFNSTILWDPKRWRRPSSNPVRQLDTVKEGFQETTFIEQLVEDESQMEGSPPGCSKILNWHLHLAANNIVYPKGWVLQKNLDAVIPVK

SEQ ID NO: 5873 - protein, 344 aa, Thermus aquaticus
MRVAVLPGDGIGPEVTEAALRVLKALDEREGLGLTYETFPFGGAAIDGYGEPFPEVTRKGVEAAEAVLLGSVGGPKWDALPRKIRPESGLLALRKSQDLFANLRPAKVFPGLERLSPLKEEIARGVDVLIVRELTGGIYFGEPRGMSEAEAWNTERYSKPEVERVAKVAFEAARKRRRHLTSVDKANVLEVGEFWRKTVEEVHKGYPDVALDHQYVDAMAMHLVKNPARFDVVVTGNIFGDILSDLASVLPGSLGLLPSASLGRGTPVFEPVHGSAPDIAGKGIANPTAAILSAAMMLEHAFGLVELARRVEAAVAKALRETPPPDLGGSAGTQAFTEEVLRHL

SEQ ID NO: 5874 - protein, 250 aa, Streptococcus thermophilus CNRZ1066
MATQEVRAVSLRGRVSSYLADFSKLDNVYRFVEEIKRDFQRIDILFNNAGLYAGKERKASGENVELTFMLSVLVPYIFITELIPLLEKLPDGLVINTSSYMHHFAKVKDLDFGFEKEYNPGLAYNNSKLYTIWMTRYLARDFFLKGSNTTINAYHLGLILTNLGNNSSDKKTEKSLFGRLMKSLSKDLDQGIETGYYLTLSEEVSCLTGYYFDEKKVKSVSEKVYSFEKTQKLMNYCQEKVKMFKEKQNV

SEQ ID NO: 5875 - protein, 655 aa, Zea mays
  misc_feature (345)..(345): Xaa can be any naturally occurring amino acid
GAADAGGQDAGGQGPCPHFSCGDLGNISKPFRRPGDPEECGVKAYELVCSNGKATIRINTGTYFVTSINYTNRSFWVVDANLDMHSSCPLPRWDQFPYTSEGLFWRSGKHTHIDLPTDDASLWACFVNCSRAVRITNNLGYKPVTCLSGSSSFVYIYVQYGACTVGSLEPFCGYLAEISFGTNPKGTNASYADIIQVVKKGFSVGFPKDEYDYSYHNTSWIFKTCLNNFTRYFHEQLSSGGIVGITRAFFWSDVFLLKCAESYNATTVILDFDVISVVTGVKITTLLVLFRFVFTALAVQMFLAHKYWKTPIAIDAVEKFLHMQQMLGPTRFAYTDITAITGHFXDKLGQGGYGSVYKGALLSGNMHVAVKMLGNSNCNGDEFISEVSTIGRIHHINVVRLVGFCAEEMRRALVYEYMPNGSLDKYIFSAERSFSWDMLNEIALGIARGINYLHLGCDMQILHFDIKPHNILLDSNFVPKVSDFGLAKLYPRDKSFVPASAMRGTIGYIAPEMISRSFGAISSKSDVYSFGMLLLEMAGGRRNADQNAANSSRAYYPAWVYDRLAEQDAGEISVAADMHELERKLCIVGLRCIQMKPQDRPTMSEVIEMLECGTHGLGLQMPSRPFFCDDDDPNMPAADSYHFSSELTAISEEDG

SEQ ID NO: 5876 - protein, 340 aa, Pseudomonas syringae pv. phaseolicola 1448A
MTDHALLLVNLGSPASTQVADVRSYLNQFLMDPYVIDLPWPVRRLLVSLILIKRPEQSAHAYASIWWDEGSPLVVLSKRLQQAMKKEWSHGPVELAMRYGEPSIETVLTRLSEQGFKKVTLAPLYPQFADSTVTTVIEEAKRVVRAKSLKMQFSVLQPFYDQPEYLSALVESVRPHLEQPYDHLLLSFHGLPERHLHKLDPTGKHCLKDDCCMTAPAEVLATCYRAQCIQSAATFAKRMGIPDGKWSVSFQSRLGRAKWIEPYTEARLDELAAQGVKRLLVMCPAFVADCIETLEEIGDRGAEQFKEAGGEELVLVPCLNDDPNWAKELNRLCERAPLML

SEQ ID NO: 5877 - protein, 465 aa, Bacillus subtilis subsp. subtilis str. 168
MAKKMPDIGEYKYGFHDKDVSIFRSERGLTKEIVEEISRMKEEPQWMLDFRLKSLEHFYNMPMPQWGGDLNSLNFDEITYYVKPSERSERSWDEVPEEIKQTFDKLGIPEAEQKYLAGVSAQYESEVVYHNMKEDLEAQGIVFKDTDSALKENEDIFREHWAKVIPPTDNKFAALNSAVWSGGSFIYVPKGVKVETPLQAYFRINSENMGQFERTLIIVDEEASVHYVEGCTAPVYTTNSLHSAVVEIIVKKGGYCRYTTIQNWANNVYNLVTKRTVCEENATMEWIDGNIGSKLTMKYPACILKGEGARGMTLSIALAGKGQHQDAGAKMIHLAPNTSSTIVSKSISKQGGKVTYRGIVHFGRKAEGARSNIECDTLIMDNKSTSDTIPYNEILNDNISLEHEAKVSKVSEEQLFYLMSRGISEEEATEMIVMGFIEPFTKELPMEYAVEMNRLIKFEMEGSIG

SEQ ID NO: 5878 - protein, 462 aa, Arabidopsis thaliana
MESERLESHLLNKQEEEASSFTSGLLLSTSVVVAGSFCYGCAMSYSSPAQSKIMEELGLSVADYSFFTSVMTLGGMITAVFSGKISALVGRRQTMWISDVCCIFGWLAVAFAHDIIMLNTGRLFLGFGVGLISYVVPVYIAEITPKTFRGGFSYSNQLLQCLGISLMFFTGNFFHWRTLALLSAIPSAFQVICLFFIPESPRWLAMYGQDQELEVSLKKLRGENSDILKEAAEIRETVEISRKESQSGIRDLFHIGNAHSLIIGLGLMLLQQFCGSAAISAYAARIFDKAGFPSDIGTTILAVILIPQSIVVMLTVDRWGRRPLLMISSIGMCICSFFIGLSYYLQKNGEFQKLCSVMLIVGLVGYVSSFGIGLGGLPWVIMSEIFPVNVKITAGSLVTMSNWFFNWIIIYSFNFMIQWSASGTYFIFSGVSLVTIVFIWTLVPETKGRTLEEIQTSLVRLS

SEQ ID NO: 5879 - protein, 363 aa, Arabidopsis thaliana
MLGILRQRAIDGASTLRRTRFALVSARSYAAGAKEMTVRDALNSAIDEEMSADPKVFVMGEEVGQYQGAYKITKGLLEKYGPERVYDTPITEAGFTGIGVGAAYAGLKPVVEFMTFNFSMQAIDHIINSAAKSNYMSAGQINVPIVFRGPNGAAAGVGAQHSQCYAAWYASVPGLKVLAPYSAEDARGLLKAAIRDPDPVVFLENELLYGESFPISEEALDSSFCLPIGKAKIEREGKDVTIVTFSKMVGFALKAAEKLAEEGISAEVINLRSIRPLDRATINASVRKTSRLVTVEEGFPQHGVCAEICASVVEESFSYLDAPVERIAGADVPMPYAANLERLALPQIEDIVRASKRACYRSK

SEQ ID NO: 5880 - protein, 284 aa, Streptococcus pyogenes MGAS315
MTELIDGKALAQKMQQELAAKVNNLKQKKGIVPGLAVILVGDDPASQVYVRNKERAALTVGFKSETVRLSEFICQEELIAVIERYNADNTIHGILVQLPLPNHINDKKIILAIDPKKDVDGFHPMNTGHLWSGRPLMVPCTPSGIMELLREYNVNLEGKHAVIIGRSNIVGKPMAQLLLDKNATVTLTHSRTRQLEEVCRCADVLIVAIGQGHFITKQYIKEGAIVIDVGMNRDDNGKLIGDVAFDEVAEVAAKITPVPGGVGPMTIAMLLEQTYQSALRSTHK

SEQ ID NO: 5881 - protein, 191 aa, Triticum aestivum
  misc_feature (178)..(178): Xaa can be any naturally occurring amino acid
PDRASYNILVDAYGRAGLHREAEAVFESLKRQGMAPTMKSHMLLLAAHARSGNVARCEEVMAQLHKSGLAPDTFALNAMLNAYGRAGRLDDMERLLAAMERRGTRDVGTYNVAVNAYGRAGYLERMEAAFASLGRRGLAADVVTWTSRMGAYARKKEYRRCLEIFEEMADAGCYPDAXTAKVLAAVCSDER

SEQ ID NO: 5882 - protein, 437 aa, Bacillus subtilis subsp. subtilis str. 168
MTLGTKLSVDQEYLKSFSEKHQEPAWLKNLRLQALEQAEDLPMPKPDKTKITNWNFTNFAKHTVDNEPLSSLEDLTDEVKALIDIENEDKTLYVQRDQTPAHLSLSQELKDKGVIFTDILTAAREHSDLVEKYFMKDGVKVDEHKLTALHAALVNGGAFLYVPKNVQVETPVQAVYVHESNDTALFNHVLIVAEDHSSVTYVENYISTVNPKDAVFNIISEVITGDNASVTYGAVDNLSSGVTTYVNRRGAARGRDSKIEWALGLMNDGDTISENTTNLYGDGTYGDTKTVVVGRGEQTENFTTQIIHFGKASEGYILKHGVMKDSASSIFNGIGKIEHGASKANAEQESRVLMLSEKARGDANPILLIDEDDVTAGHAASVGRVDPIQLYYLMSRGIPKEEAERLVIYGFLAPVVNELPIEGVKKQLVSVIERKVK

SEQ ID NO: 5883 - protein, 396 aa, Xanthobacter autotrophicus Py2
MAKEKFNRSKPHCNIGTIGHVDHGKTSLTAAITKILAETGGATFTAYDQIDKAPEEKARGITISTAHVEYETQNRHYAHVDCPGHADYVKNMITGAAQMDGAILVVSAADGPMPQTREHILLARQVGVPALVVFLNKCDMVDDEELLELVELEVRELLSKYDFPGDDIPIIRGSALVALENGDPKLGRDAVLKLMEAVDAYIPQPERPVDLPFLMPIEDVFSISGRGTVVTGRVERGIIKVGEEVEIVGIRPTQKTTVTGVEMFRKLLDQGQAGDNVGILVRGTKREDVERGQVVCKPGTVKPHTKFKAEAYILTKEEGGRHTPFFTNYRPQFYFRTTDVTGVCTLPEGTEMVMPGDNVSMDVALIVPIAMEEKLRFAIREGGRTVGAGVVASIIE

SEQ ID NO: 5884 - protein, 469 aa, Streptococcus pyogenes MGAS315
MVSVMWFRRDLRIDDQKALAHAIASQSPTLCVFQFNNEQLNLLHSRNQSSFITSVLAFRKLLKCEGIDLYLMYGDLMTCFEQLLTQLKDWTDVYFNYDESGYGRLRDQKAAQFFKKNGIAVHTYQDHYLHGSQEIINQSGQPYKVFTPYYRIWQNYPKETPIKVELSQGRWLNLETPDDVLRTVESFKDEKYQDVATFDEASKQLNRFIQDQLAAYHANRDFPAQLGTSRLSPFLRIGAIGIRTVYHAVRQAPNSLGQATFLKELAWRDFYNMVYVAYPDQKTQPIQKAFSQIEWVNNPDWFQLWKEGKTGYPIVDAAMLQLQKTGWMHNRLRMIVASFLTKDLLCDWRLGEQYFQQQLIDYDAASNIGGWQWAASTGTDAVPYFRIFNPVTQGKRFDPKGEFIKAYLPQLEHVPEKYLHEPWKMPKYLQESVSCIIGTDYPQPIVDHAKQREQAIAKYEWAKEKAKIE

SEQ ID NO: 5885 - protein, 395 aa, Shewanella sp. MR-7
  misc_feature (127)..(127): Xaa can be any naturally occurring amino acid
MFEIMDTHSDDAVIKVIGVGGGGGNAVEHMVKHNIEGVEFVVTNTDAQALRKSGAGSTIQLGRDVTKGLGAGANPEVGRAAAEEDRENIRAAIKSSDMIFIAAGMGGETGTGAAPVVAQIAREEGIXTVAVVTKPFPFEGKKRMAYAEQGIAELAKHVDSLITIPNEKLLKVLGRGTSLLDAFAAANNVLLGAVQGIAELITRPGLINVDFADVKTVMSEMGNAMMGTGVARGEDRAEEAAEAAVASPLLEDIDLAGARGVLVNITAGMDMSIEEFETVGNHVKAYASDNATVVVGAVIDPEMSDELRVTVVATGIGAEKRPDIQLVSKPAPRPEPVVVEPKVEAYVEEATHVSYAAPKGNVLPASPAPAPAPAPSTKHELDYLDIPAFLRKQAD

SEQ ID NO: 5886 - protein, 260 aa, Streptococcus thermophilus CNRZ1066
MILEPHYSYYSVMGYEKFLESEHIRFQIIKDWYREPSLLHYWADEIRKILDQIGDDSYKVIFSAHSVPVLALDFGDPYIDQIYDNSRLIAEDLGLREEQYTNTWQSESDIGIPWIKPDVLEYLRDEREHPDHYIFVPIVFISEHIEVLFDNDVECKELCQELGVAYHRPPMPNRDPRLIKALLSAIQSHIDGDYSYYQPQLETFDELETPSSTGQILDEEKDIQMPDFVKKLIAKKGLENVKMPYLVKKMLEKKYGKKYD

SEQ ID NO: 5887 - protein, 353 aa, Arabidopsis thaliana
MTMTAFLARRLIGNGSSQILGTSSSSSGPFISVSRAFFSSSTPIKATLFPGDGIGPEIAESVKQVFTAADVVIDWDEQFVGTEVGLKGPMATPIGKGHRSLNLTLRKELNLYANVRPCYSLPGYKTRYDDVDLITIRENTEGEYSGLEHQVVKGVVESLKIITRKASMRVAEYAFLYAKTHGRKKVSAIHKANIMQKTDGLFLQCCDEVAAKYPEIYYEKVVIDNCCMMLVKNPALFDVLVMPNLYGDIISDLCAGLVGGLGLTPSMNIGEDGIALAEAVHGSAPDIAGMNLANPTALLLSGVMMLRHLKLNKQAEQIHSAIINTIAEGKYRTADLGGSSTTTDFTKAICDHL

SEQ ID NO: 5888 - protein, 280 aa, Mycoplasma mobile 163K
MIILDGKKLSQKDTIFLKEKVNQFKIKPVFTIVQVGNLFSSNKYIKTKMDKALEIGVVSRLIKIPESISEKDLISIIEEESKISHGLIVQLPLPLQFDQSKILNSVPITKDIDGLSEKNSKNLYSGKSCIQPATARGIIDLIKEYNFTIKDKKVYVIGESNLVGKPIKELFKQAGAIVKSFNINTGIKGSEEADILIVAAGHPNLVKPENVKNNSIVIDVGINSIGENDKMIVTGDVDFSNVKTKVKAISPVPGGVGPMTVISLFKNLIEIFEKYLLDDN

SEQ ID NO: 5889 - protein, 107 aa, Medicago truncatula
MASDLRITIERNPSQSRLAELNIKCWPKWGCSPGKYQLKFDAEETCYLLKGKVKAYTKGSSDFVEFGAGDLVTIPKGLSCTWDVSVAVDKYYKFESSSSSSSSSPSC

SEQ ID NO: 5890 - protein, 484 aa, Chlamydophila caviae GPIC
MSQSIEDFLQNHQDYPYGFVTPIESEGLTRGLSKETIEEISQLRKEPSFILDFRLKAYQHWKKLQEPGWARLNYNPMDYEEIVYFSAPKQKNPLGRLEEADPEILETFKKLGIPLDEQKRLLNVQNVAVDLVFDSVSIGTTFKEALDKAGVIFCSMSEAIREHPELIKKYLGTVVSHRDNYFAALNAAVFSDGSFVYIPKGVRCPMEISTYFRINDKESGQFERTLIIAEDDAFVSYLEGCTAPSFSSNQLHAAVVELVAHERAVIRYSTVQNWFSGDKKTGKGGIYNFVTKRGLCAGYKSKISWSQVEVGAAITWKYPSCILRGKESVGEFYSIALTNGKMQADTGTKMIHVGEKTTSTIVSKGISSEDSHNTFRSLVSISEGAVGSRNYTQCDSMLIGQSCGAYTDPKITVENSKSSVEHEATTSKLRADQLMYLRSRGLSAEEAVSLVVHGFCREIIEQLPLEFAREASKLLFVKLENSVG

SEQ ID NO: 5891 - protein, 316 aa, Triticum aestivum
TGPEFRVDPASGDMLERRVASRLPDAAVDDLLIPSYSYLVETLYDVECVERIVRHFLEGRGGVEEVDEEGSEAETPGREASRRAMLAVSRLMDAYLGEIAADPRLRTDKFCDLAWALPDGARVYDDGLYRAVDIYIKAHPALREEEKEKVSGVVDGRKLTLEACTHAAQNERLPLRTVVQVLFFEQLQLRRAIARTIVANEGGAAGQGEEDGDSDGGRTWRVATRGNQMLRLDMDSMRNRVQELERECTTMRKAIQKIDRRGGAAGDRGAAAPAAEGRWGSMVTKRFGCKFPAQVCQSQPRSVVARPRRARIEQSP

SEQ ID NO: 5892 - protein, 967 aa, Aspergillus nidulans FGSC A4
MSPPNRKSFATNVAAFVAEHELDGVDFDWEYPGAIDIPGTPPGLETDGPNYYKFLIVMRGQLAKEKSLLIAAPASYWYLKAFPIAQMAKQLDYIVFMAYDLHGEVGSTRFSPVANIRKANGMPVTSMQQRAVRRETAYEVTATGSTLQQQKGVCTDTGGYISNAEIDEIAILGDNVQTWHDGASNSDIMVYNDTQWVADMSRTTKETRRLHWKNYNFAGTIDWAVVLQSYADDEYYDYETGEGGEELLPPLPDDPDCSGSYHDLESIEKDFGTIDELCLGQYILEVLQKNFTSSLAAYDDLMKDGYDGKFKTYAKSVVSASKKVVENFMYENGKSYFSCSSQRPSSVDCRYCEEYDCIPEGNCDNPEVHCETPEYRYRNMTQPCPPDYSLRGQCQTIDARYSQSVYWTLEYPDAFWADLYTETGVAQEDIERKNVRHFPCYLTEKHCENTYWDYNFPVPSEYDEEDVVNPKDVVSEAYNKLKALLPQLSDVVERVKNEKFFGDINELIDAVSMPVLMVSDAIEHMQSIIEIAKEIEEAKAKAILFAFMGAIIFFVPVIGEVMGAVSSLASIGRIVSLLGATGNVGLDVYTILDDPENAPLAIFSLILSPLALMDVVKVGQAARAHIILYDSLNPKIFSRIMFRSSNTFNPNTDIPDLSGKVYVVTGGSAGIGFGICAHLLQHNPAALYLLGKKEEHIQEATEGLKKYGDTSKVHSVQIELEDLKQTDQVAKELASKLDRLDGLICNAGLGSGVFNLTNDGIDSHMQVNHISQFHLSRILLPLLQKTSNSRLVLQSSDLHRAISDVKFESLEELNTDIGPTKLYNRTKLAMVLYIRALAERKGKGQLGFDPKTDTGPWMNATHPGAVSTDQQKQAEDAYGVLGKVGVAIVRPFLKDPVDQGCRPALFAATGEDIVKDAIQGQYIVPDRSPTSPSSEAQNHQLQENLWKLTEKILVDKLGSVPYETQYV

SEQ ID NO: 5893 - protein, 378 aa, Dechloromonas aromatica RCB
MQQPFITINDTTLRDGEQSAGVAFSLDEKLDIARQLAAIGVPELEVGIPAMGDEERDSIRAVADLQLAPRLMVWSRMHPTDIAACAGLGAHLIDISVPASDQHLAYKLKQDRAWLLRELPKFIGAALSLGLEVGLGCEDASRADMNFLCALAETAERAGARRLRFADTLGILEPFGTFDRISTLRRNTGLEIEMHAHDDMGLATANTLAACKAGATHVNTTVNGLGERAGNAPLEEVVLGLTKLYGIETNVSLKGFPSLSAKVASASGRAIPWQKSVVGAGAFTHEAGIHVDGLLKHPDNYQGFDPREVGQSHRIVLGKHSGSRAVQVVYAGLGFELGETEAQAMLPRVRTFVAEHKHPPEVSDLRDLLSSLRSNLHV

SEQ ID NO: 5894 - protein, 423 aa, Streptomyces aureofaciens
MSRRVVITGIGVVAPGGVGTKEFWSLLTAGKTATRAISLFDASPFRSRIAAEADFNPLDHGFTAEEAMRLDRAAQFAIVSASEAVRDSGIDTAELDPTRTGVTLGSAVGCTTGLDVEYNAVSRGGSTWQVDHTLAVPHLFDYFVPSSMAAEVAWRVNAQGPVSMVSTGCTSGLDSIGHAVELIREGSADVMITGATEAPISPITVACFDAIKATSPRNDDPGTASRPFDATRNGFVLGEGSAVLVLEDLESARKRGAHVYAEISGFASRCNAYHMTGLRADGVEMAEAITVALDEARLDPSAVDYINAHGSGTKQNDRHETAAFKRSLGQRAYEVPVSSIKSMIGHSLGAIGSSKVAASALAIEYNTVPPTANLHTPDPLCDLDYTPLTAREQRTDAVLSVGSGFGGFQSAMILTRPRLGDAA

SEQ ID NO: 5895 - protein, 474 aa, Candida albicans SC5314
MSSSQFYNKGVDESVVSRQEIEEFTKRNEFFLKPSSRKYAKQYFSMYQYRLKNLRDRVHKTAMEKWGHGTKKINGNTIEKQDKILDIASGKLCWVIGTVFCDAKYKLDILNDVEKGTDDVLPLEPVTYVNEDEQPIVMLEDESGRAILNNDNFLAKNLLVTGCIVAVLGIEIQAGIFEIMDIAYPDCAPQKPLPLGENKRGKIALVSGLNIGDEGHYDLKLELLKQYLLGELGNAEDKLDGSLISQLIIAGDSIMPIQNLRAEMDLKNFVTTNNYGSKNISKYNVESFKKLDEFLTDILVSLPVAVMPGKNDPAEICLPQQPLHRSLFKNNSSLLDGNRLTRLTNPQWIDAQTVKILGTSGQNVDDIQKYIVPKKDHQFTSIEIMENNIKWQNFVPTAPDTLYCYPYENYDPFIFSDDLPHVYFVGNQQQFDSKLFEHDGVNVRLISIPKFKESGQFVLLDLDTLETEVVTIEI

SEQ ID NO: 5896 - protein, 347 aa, Zea mays
MARLLIPLPFAAASASSLHLAVSRLPLAAVSAARRECLFGGRVVGGVVRAPARLSKRGLCAGAEAGDSAVTVEAMEWVKKDRRRLLHVVYRVGDLDKTIKFYTECLGMKLLRKRDIPEERYTNAFLGYGPEDSHFVVELTYNYGVESYNIGTGFGHFGIAVEDVAKTVELIKAKGGTVTREPGPVKGGKSVIAFIEDPDGYKFELIERGPTPEPLCQVMLRVGDLDRAINFYEKAFGMELLRKRDNSEYKYTIAMMGYGPEDKNAVLELTYNYGVKEYDKGNAYAQIAISTDDVYKTAEAIRVNGGQITREPGPLPGITTKITACTDPDGWKTVFVDNIDFLKELEE

SEQ ID NO: 5897 - protein, 157 aa, Glycine max
  misc_feature (100)..(100): Xaa can be any naturally occurring amino acid
TLIQMISRRALKRRTVVEGLTNRQWVLDIHGGLSVTVLVEYLQLWNLVDGIVLQPDIADQHIWRLSAHGTYCSKSAYDALFTGSIPFGPWRRVWKTWASXRCKFFVWLAIKNRVWTADRLAKRGLPHPVACPLCDQAEETIQHIPVSCVFARQIGRV

SEQ ID NO: 5898 - protein, 209 aa, Triticum aestivum
  misc_feature (194)..(194): Xaa can be any naturally occurring amino acid
MASRRRTLLKVIILGDSGVGKTSLMNQYVNKKFSNQYKATIGADFLTKEVQFEDRLFTLQIWDTAGQERFQSLGVAFYRGADCCVLVYDVNSMKSFDNLNNWREEFLIQASPSDPDNFPFVLLGNKVDVDGGNSRVVSEKKAKAWCASKGNIPYFETSAKDGINVEEAFQCIVKNALKNEPEEELYMPDTVDVXGGNRGQDPQGAVRPE

SEQ ID NO: 5899 - protein, 231 aa, Brassica napus
PPVSRNFFASLAPSGNCGLLAPGGPQAALPILHVEECFLPSSRGGFGRFAMQPGPPLAPVFCVGPPGVSWWCKPCHPLFLLPFGARLFPPLFSGGFLGPPPPFPPPLLVVVGPPLVVRKLPPPPDGFVAEVPRLFGAPLEVLFLLFSTPAFFSVLLFLLFFFLFVLVVLFFFLLFLFFFWWFFFFFRLFFSLFLPFFYNKTPKNKKKKKKKKKKKKKKKKKKKKKKKKRAA

SEQ ID NO: 5900 - protein, 138 aa, Arabidopsis thaliana
  misc_feature (2)..(2): Xaa can be any naturally occurring amino acid
  misc_feature (11)..(11): Xaa can be any naturally occurring amino acid
  misc_feature (17)..(17): Xaa can be any naturally occurring amino acid
  misc_feature (26)..(26): Xaa can be any naturally occurring amino acid
  misc_feature (32)..(32): Xaa can be any naturally occurring amino acid
  misc_feature (35)..(35): Xaa can be any naturally occurring amino acid
  misc_feature (52)..(53): Xaa can be any naturally occurring amino acid
  misc_feature (57)..(59): Xaa can be any naturally occurring amino acid
  misc_feature (64)..(64): Xaa can be any naturally occurring amino acid
  misc_feature (68)..(69): Xaa can be any naturally occurring amino acid
  misc_feature (79)..(79): Xaa can be any naturally occurring amino acid
  misc_feature (85)..(85): Xaa can be any naturally occurring amino acid
  misc_feature (88)..(88): Xaa can be any naturally occurring amino acid
  misc_feature (91)..(91): Xaa can be any naturally occurring amino acid
  misc_feature (96)..(96): Xaa can be any naturally occurring amino acid
  misc_feature (100)..(100): Xaa can be any naturally occurring amino acid
  misc_feature (105)..(105): Xaa can be any naturally occurring amino acid
  misc_feature (109)..(109): Xaa can be any naturally occurring amino acid
  misc_feature (111)..(111): Xaa can be any naturally occurring amino acid
  misc_feature (117)..(119): Xaa can be any naturally occurring amino acid
  misc_feature (121)..(122): Xaa can be any naturally occurring amino acid
  misc_feature (124)..(125): Xaa can be any naturally occurring amino acid
  misc_feature (128)..(129): Xaa can be any naturally occurring amino acid
  misc_feature (131)..(131): Xaa can be any naturally occurring amino acid
  misc_feature (133)..(136): Xaa can be any naturally occurring amino acid
MXSSMLSSAAXGTSPAXATMVAPFTXLKSSAXFPXTRKNNKDITSIASNGGXXNCMXXXPPIGXKKFXXLSYLPDLRDXKLGKEXDYXLRXKGIPXGEFXLKNGXFVYXEXGKTPGXXXGXXWXXGKXXLXGXXXXLK

SEQ ID NO: 5901 - protein, 288 aa, Arabidopsis thaliana
MKTSLLCIAEDNSGLVVWNPYLCQTKWIRLRNTFHRYDVFALGHDNNRNHKILRFLYDAKKYRTGRGRDNDVYDFSSDSWRRVFDVNPHRGELFYYSGVSLKGNSYFFGQEVTIEEEEEEVISQPRDYLLCFDFTTERFGPRLSLPFNPPSPNFDYLTLSWARDEKLAVLYNHYNTREIIEIWISTKIEPNTVSWSTFLTVDTSLINGLPDRFSTFYGPRSFFIDEEKKVAVFFDNKGTETGCYQVAYIIGDNGYFKSVKIGVISNSQWQQGILVCSSYVPSLVQLQD

SEQ ID NO: 5902 - protein, 162 aa, Oryza sativa
MTEAGGERRIGVAMDFSPSSKKALQWAADNLLRKGDTLVLLHIRHHGRDEAKNVLWSHTGSPLIPLEELMETAVRQRYDIPSDEEVFDMLNAVSREKELSVVLKMYWGEPREKVCEAVGELNLESLVMGSRGLGQIQRILLGSVTNYVLSNASCPVTVVKAK

SEQ ID NO: 5903 - protein, 477 aa, Comamonas testosteroni
MSTVLYRCPELLIGGEWRPGRHEQRLVVRNPATGEPLDELRLASADDLQLALQTTQQAFEHWRQVPAHERCARLERGVARLRENTERIAHLLTLEQGKTLAEARMECAMAADLIKWYAEEARRVYGRVIPARLPNSRMEVFKFPVGPVAAFSPWNFPLVLSARKLGGAIAAGCSIVLKAAEETPASVAAMVDCLNQELPPGVVQLLYGVPAEVSQALIASPVVRKVTFTGSVPVGRHLAELSARHLKRITLELGGHAPVIVCGDADIARTVNLMVQHKFRNAGQACLAPTRFFVDRRIYGDFVDAFGAATQALRVGAGMAAETQMGPVASARRQAAVQDLIARSVAAGARPVASAVPEAGYFVAPTLLADVPLDAPVMSEEPFGPVACAVPFDSLDQAIAQANHNPYGLAGYLFTDSAKAILAVSERLEVGSLAVNGMGVSVPEAPFGGVKDSGYGSESGTEGMEAFLDTKFMHYVA

SEQ ID NO: 5904 - protein, 501 aa, Brassica napus
MDPHKKVTLETEFFTEYGEASRYQIQEVIGKGSYGVVASAIDTHTGEKVAIKKINDVFEHVSDATRILREIKLLRLLRHPDIVEIKHVMLPPSRREFRDIYVVFELMESDLHQVIKANDDLTPEHYQFFLYQLLRGLKFIHTANVFHRDLKPKNILANSDCKLKICDFGLARVSFNDAPSAIFWTDYVATRWYRAPELCGSFFSKYTPAIDIWSIGCIFAEMLTGKPLFPGKNVVHQLDIMTDLLGTPSPEAISRIRNEKARRYLGNMRRKPPVPFTHKFPHVDPLALRLLHRLLAFDPKDRPTAEEALADPYFYGLANVDREPSTQPIPKLEFEFERRKIMKEDVRELIYREILEYHPRMLQEYLRGGEQTSFMYPSGVDRFKRQFAHLEEHYGKGERSAPLQQRHASLPRERVPAPKEENRPAATLATTPESPQSSQHEGSNYMNGMSQTGYSARSLLKSASISASKCIGVKQRNQSEHGESNSDATDALSQKAAALHT

SEQ ID NO: 5905 - protein, 428 aa, Campylobacter jejuni RM1221
MVVVALALVFLNGFFVLSEFSIVKVRRSKLEEMVKEKKAGAKKALEVTSRLDTYLSACQLGITLSSLALGWIGEPAIAKMLEIPLINLGFSTVIIHTMAFIIAFSIITLLHVVLGELVPKSIAIAVADKAVLFIARPLHWFWMLFLPCIKIFDFLAAISLKLFGIKPAKESELTHSEEEIKIIASESQKGGVLDEFETEIIRNAVDFSDTVAKEIMTPRKDMICLNKQKSYEENMQIICEHKHTRFPYIDGSKDTILGMIHIRDIIQNELNHKSQNLDTFVKPLILVPENISISKVLVMMNKELSHTALVVDEYGGTAGILTMEDIMEEIIGEIKSEHEEDSYKKLAENIYEFQGRCDIETVEEMLVINYDEDLEQVTIGGYVFNLLGRLPMVGDRIEDELCYYEVKKMDGNSIERVKVVKKTNKDEE

SEQ ID NO: 5906 - protein, 138 aa, Sulfolobus solfataricus P2
MTEGRIQSYRKKIYVIRQKLKAKKPKFLRYDSDKFYRLGRQEKWRRPYGRDNKTRLKVRGFPAIVSVGYRLPKKVRGFHPSGLRQVIVHNVNELVKVQNQKDNVIVTISSSVGFKKRLEILNKARELGLKVSNEGVVT

SEQ ID NO: 5907 - protein, 296 aa, Oceanicola granulosus HTCC2516
MSEILDGKAFAAEVRAKVAEQVARLKDAHGITPGLAVVLVGDDPASQVYVRSKGKMTKEVGMSSFEHRLAEDTSEADLLALVGQLNEDPEVHGILVQLPLPAHVDADAVINAIAPEKDVDGFHISNVGLLGTGQKAMVPCTPLGCLMMLRAHHGSLSGLDAVVIGRSNIVGKPMASLLLGESCTVTIAHSRTKDLPEVVRRADIVVAAVGRPQMVPGGWIKEGATVIDVGINRVPGEGDKTRLVGDVDFASAAERAGAITPVPGGVGPMTIACLLANTLTACCRASGLPEPEGLTA

SEQ ID NO: 5908 - protein, 396 aa, Desulfotalea psychrophila LSv54
MSKEKFERTKPHVNVGTIGHIDHGKTTLTAAITRVLSTKGQASFTDFSDIDKAPEEKERGITIATAHVEYETVNRHYAHVDCPGHADYIKNMITGAAQMDGAILVVAATDGAMPQTREHILLARQVGVPAMVVFLNKCDMVDDDELIELVEMELRELLDDYEFPGDDVPFIHGSALLALENPEDEDKAACIWELMDQIDSYIPEPERDVDQPFLMPVEDVFSISGRGTVATGRVERGIIKVGEEVAIVGVRDTVKTTCTGVEMFRKLLDEGRAGDNIGALLRGVKREDIERGQVLAKPGTITPHTKFKAECYILGKDEGGRHTPFFNGYRPQFYFRTTDVTGIVTLPEGIEMVMPGDNVAVEAELITPIAMDAGLRFAIREGGRTVGAGVISEIIA

SEQ ID NO: 5909 - protein, 375 aa, Exophiala dermatitidis
MEEEVAALVIDNGSGMCKAGFAGDDAPRAVFPSIVGRPRHHGIMIGMGQKDSYVGDEAQSKRGILTLRYPIEHGVVTNWDDMEKIWHHTFYNELRVAPEEHPVLLTEAPINPKSNREKMTQIVFETFNAPAFYVSIQAVLSLYASGRTTGIVLDSGDGVTHVVPIYEGFALPHAISRVDMAGRDLTDYLMKILAERGYSFSTTAEREIVRDIKEKLCYVALDFEQEIQTASQSSRLEQSYELPDGQVITIGNERFRAPEALFQPSVLGLESGGIHVTTFNSIMKCDVDVRKDLYGNIVMSGGTTMYPGIADRMQKEITALAPSSMKVRIIAPPERKYSVWIGGSILASLSTFQQMWISKQEYDESGPSIVHRKCF

SEQ ID NO: 5910 - protein, 104 aa, Streptomyces coelicolor A3(2)
MPEVTDADFAAEVIGSELPVLVEFTADWCPPCRQMAPVLSALAEEEGDRFRVVQLNVDQNPATTNAYKVLSMPTFMVFRGGEPVKSMVGSRPKRRLLEELADVV

SEQ ID NO: 5911 - protein, 412 aa, Xanthomonas axonopodis pv. citri str. 306
MAHFELIEKMAPNAVIKVVGVGGGGGNAVAHMVNTNVDGVEFITANTDSQAIKNCGAKLQLQLGTNVTKGLGAGANPEVGRQAALEDRERIMDALQGADMVFITAGMGGGTGTGAAPVVAQLAKEMGILTVAVVTKPFPFEGRRRMQVALKGIEELSQHCDSLITIPNEKLITVLGRNATMIQAFRAANDVLQGAVQGIADLIVRPGLINVDFADVRTVMSEMGLAMMGTGSARGDDRAQAAAEAAIQNPLLDDVNLAGANGILVNITAGPDFTMSEFDEIGRTIEAFASEDATVVVGTVLDPDMQDEVRVTVVATGLNRAVARQTQRPDQRAPIKLVRNATTGQPEFGDFDTTSGDAVSKAVGGSMGLGLRRPSSDSVGSGSHNSGGSSTPAADLPNDYLDIPAFLRRQAD

SEQ ID NO: 5912 - protein, 137 aa, Catharanthus roseus
MASADVEFRCFVGGLAWATTDQSLSEAFSQYGEVLESKIINDRETGRSRGFGFVTFGDEKSMKDAIEGMNGQTLDGRNVTVNEAQSRGSGGGGGGGGFRGPRREGGGCYGGGGRRNGGYGGNGGGYGGGRRDGGRRW

SEQ ID NO: 5913 - protein, 164 aa, Catharanthus roseus
MASADVEYRCFVGGLAWATTDQSLSEAFSQYGEILESKIINDRETGRSRGFGFVTFKDEQSMRDAIEGMNGQTLDGRNITVNEAQSRGSGGNGGGGFRGPRRDGGGGGGYGGGRRDGGYGGNGGYGGGRREGGYGGGDRGYGGGGGGGSRYSRGGGASDGNWRN

SEQ ID NO: 5914 - protein, 160 aa, Catharanthus roseus
MASADVEFRCFVGGLAWATTDQSLSEAFSQYGEVLESKVINDRETGRSRGFGFVTFGDEKSMKDAIVGMNGQTLDGRNITVNEAQSRGSGGGGGGGGFRGPRREGGGGYGGGGRRDGGYGGNGGGYGGGRRDGGYGGGDRGYGGGDRYSRGGGSDGNWRN

SEQ ID NO: 5915 - protein, 962 aa, Shewanella sp. MR-7
MTKQTLTQLEQHDLFLRRHIGPDSSQQQEMLNYVGAESLDDLTAQIVPESIRLNQELSIGDSCGEAEGIAYIRGLAKQNQVFKSYIGMGYYGTQVPNVILRNVFENPGWYTAYTPYQPEIAQGRLEAILNFQQVSMDLTGLDLASASLLDEATAAAEAMALAKRVSKAKKANIFFVADDVFPQTLDVVKTRAECFGFEVVVGPAHEAVNHELFGALFQYSNRFGQITDFTDLFAELRAKNVVVTVAADIMSLVLLKSPGAMGADVVFGSAQRFGVPMGFGGPHAAFFVARDEHKRSMPGRIIGVSKDTRGNRALRMAMQTREQHIRREKANSNICTAQILLANMASFYAVFHGPQGLKTIASRINRFTDILAAGLQAKGVSLVNNTWFDTISIKGLDVAAVNARALAAEMNLRFDADGIVGVSLDETTLRTDIEALFDVILGAGHGLDVAALDAQIVAQGSQSIPEALVRQDAILSHPTFNRYQSETEMMRYIKRLESKDLALNYSMISLGSCTMKLNAAVEMLPVSWPEFANMHPFCPLDQAKGYTQLIEELSSWLVNVTGYDAVCIQPNSGAQGEYAGLLAIRKYHESRGEAHRNICLIPQSAHGTNPASAQLAGMQVVVTACDKQGNVDLEDLKAKAAEVAENLSCIMITYPSTHGVYEESIREICNIVHQHGGQVYLDGANMNAQVGLTSPGFIGADVSHLNLHKTFAIPHGGGGPGMGPIGVKAHLAPFVAGHVVVKPGRESDNNGAVSAAPYGSAGILPISWMYIKLLGSNGLKKSTQTALLNANYVMKKLSEHYPVLFRGRNDRVAHECIIDLRPIKEASGVTEMDIAKRLNDYGFHAPTMSFPVAGTLMIEPTESESKVELDRFIDAMVSIRAEIAKVEAGEWPADNNPLHNAPHTMADIMDPAFDSRPYSREVAVFPSAAVRTNKFWPTVNRIDDVYGDRNLFCACVPLSDYE

SEQ ID NO: 5916 - protein, 598 aa, Alkalilimnicola ehrlichei MLHE-1
MTQDQQSQIKQLIAKGKEQGFLTYAEVNDHLPDDIVDPEQIEDIIGMINDMGINVHEVAPDADELLLSDAAVSTDEDEAEEAAAALAAVDAEFGRTTDPVRMYMREMGTVELLTREGEIELAKRIEEGLDQVLAALSAYPGAAAKLLDLYRKVQDGEMRLNELMGGFRNPDEELSAYSADAGKEEDEDGEEAVVDNGPDPEMAAELFRRLAEADQRMQEVLRRQGSDSPECAELREQLAEIFLTFKFPPKIIDQLVDGLRRDVNVLRRNERHILKACTKAGMPRKTFVRSFISRETDPGWLDEMLASKEPWAQRLAEHEDDIRRAQQVLIDAERKVGMTIGEIKDINRRMSIGEAKARRAKKEMVEANLRLVISIAKKYTNRGLQFLDLIQEGNIGLMKAVDKFEYRRGYKFSTYATWWIRQAITRSIADQARTIRIPVHMIETINKLNRVSRQMLQEMGREPSPDELAERMEMPEDKVRKVLKIAKEPISMETPIGDDEDSHLGDFIEDINAMSPVDSATREGLRESVKGVLSGLTPREAKVLRMRFGIDMNTDHTLEEVGKQFDVTRERIRQIEAKALRKLRHPTRSEGLRSFLDE

SEQ ID NO: 5917 - protein, 251 aa, Zea mays
MKFNIANPSTGCQKKLEIDDDQKLRAFYDRRISQEVSGDALGEEFKGYVFKIMGGCDKQGFPMKQGVLTSGRVRLLLHRGTPCFRGYGRRNGERRRKSVRGCIVSQDLSVINLVIVKKGENDLPGLTDTEKPRMRGPKRASKIRKLFNLAKDDDVRKYVNTYRRTFTTKNGKKVSKAPKIQRLVTPLTLQRKRARIADKKKRIAKKKSEAAEYQKLLAQRLKEQRDRRSESLAKRRSKLSAAAKASAATSA

SEQ ID NO: 5918 - protein, 317 aa, Haemophilus ducreyi 35000HP
MATKHTKLLILGSGPAGYTAAVYAARANLSPILVTGMQQGGQLTTTDEIENWPGEYEQTTGTALMDKMLKHAEKFETEIVFDHIHHVDLSVRPFVLTGDNHSFTCDALIIATGASAKYLGLASEEAFKGKGVSACATCDGFFYRNKPVAVVGGGNTAVEEALYLANIASEVHLVHRRDSFSAEKILLGRLAKRVEQGKIILHTDRVVDEILGDDFGVTGVRLSSTQQNLSEEIAVAGCFIAIGHAPNTAIFEGQLALENGYIKVNSGLEGNATATSVAGVFAAGDVMDHIYRQAITSAGTGCMAALDAERFLDAQAH

SEQ ID NO: 5919 - protein, 107 aa, Zea mays
  misc_feature (41)..(41): Xaa can be any naturally occurring amino acid
  misc_feature (57)..(57): Xaa can be any naturally occurring amino acid
MARLQNLALATAAGGALVLLAGGTSEAAISCGQWGSAMGPXISYPRGQGWGPSAGCXRGLRSLKNAAGTTADRGAACNCLKNAAAGVRVLNAGNAARIPSKGGVRIP

SEQ ID NO: 5920 - protein, 119 aa, Brassica napus
MAAAPAGPQNRCVFVGNIPYDATEELLVQICEEVGPVVSFRLVVDKETGKPKGYGFCEYKDEETALSARRNLQGHDVNGRQLRVDFAENGRNTDRNREKVEDPQFITVEEPYFSPSKSY

SEQ ID NO: 5921 - protein, 80 aa, Arabidopsis thaliana
  misc_feature (60)..(60): Xaa can be any naturally occurring amino acid
MASSMLSSATMVASPAQAIMVTPFTGIKSTAAFPSTGNAKKYTTSHQKRTVSRVHCKHVXPPIVKKKFETLSYRPDLTDS

SEQ ID NO: 5922 - protein, 116 aa, Zea diploperennis
TQSAVAVAVVAAVLLLAAAATTSEAAITCGQVSSAIAPCLSYARGTGPAPSASCCSGVRNLKSAASTAADRRAACNCLKNAARGVSGLNAGNAASIPSKCGVSIPYTISTSTDCSR

SEQ ID NO: 5923 - protein, 175 aa, Zea mays
MASAPSTTAPTLAPSLRTPFSSAPRGARLAAAPRLSRAQPGQAGCRAAPGRLARPRSRVRCGAAARFIGQGEFPAEVLESELPVLVDFVADWCGPCRLIAPVVDWASEEYDGRVKIVKIDHDANPQLIEEYKVYGLPTLIFFKNGREVADSRREGAMTKDKFKQYLEPFLTTTVT

SEQ ID NO: 5924 - protein, 207 aa, Glycine max
MGYWKSKVLPKIKKVFEKNSTKKAAAAEATKSFDESKEEYNKAFEEKKTELQTKVVEIYEASSTEIKSLVKEPKEAGLKKNSTEVQKFLEELVKIDFPGSKAASEASSKFGPALASGSVFFVFEKVSTFIVTEEKEVEAPPAVETKTEEETSSVVKERETVVEEEKKEEEKPQADETSDEKKVEEKQAETAAKEEEKPAEPAEPPKP

SEQ ID NO: 5925 - protein, 383 aa, Geobacter sulfurreducens PCA
MEHTLKHEVIIDDTTLRDGEQTAGVVFSKKEKIAIARMLDSIGVRELECGIPAMGEDERAAVRALVDLGLSARLITWNRALVADIQASIDCGITAVDISLSVSDQMIAHKLRKDRRWVKEQLRHSLGFAKEKGLYVSVGGEDSSRADLLFLVELMEVARDMGADRFRFCDTLGILDPFTMYEKVRTLRTAVPELDIEVHTHNDLGMATANAIAGIKAGARFVNTTVNGLGERAGNAALEEVVMALKLACGCDPGIDTQRFHEISRFVGRASQRPVPPWKAVVGERVFSHESGLHADGVIKNPLNYEGFDPAEVGLRRHIVVGKHSGTSGLVERFRSMGVELAREEAAELMDEVRAVAQRLKRPLSDGDLRRLYAAGKHDRLAA

SEQ ID NO: 5926 - protein, 855 aa, Mycobacterium avium subsp. paratuberculosis K-10
MSADGISRDGCAPRHIIVVGHGMVGHRFVEALRARDTEGRWRITVFAEEADAAYDRVGLTSYTESWDRALLALPGNDYQGDPQVRLVLNQRVTEIDRATKSVVTADGQRHHYDTLVLATGSYAFVPPVPGHELPACHVYRTLDDLDAIRADAQRAAQTAHARAGVVIGGGLLGLEAANALRQFGLATHVVEMMPRLMAQQIDEAGGALLARMIGDLGISVHVGTGTEAIEPVEGPDGSTTVRVRLSDGQVIDAGLVIFAAGIRPRDELAVAAGLARAERGGVLTDLSCRTSDPDIYAIGEVAAIDGRCYGLVGPGYTSAEVVADRLLDGSAEFGEADLSTKLKLLGVDVASFGDAMGTTENCLEVAINDAVNRTYAKLVLSDDAKTLLGGVLVGDASSYGVLRPMVGSELPGDPLALIAPASSGGGTALGVGALPDSAQICSCNNVTKGDLKCAIADGCADVAALKSCTSAGTSCGSCVPLLKQLLEAEGVEQSKALCEHFSQSRAELFEIISATEIRTFSGLLERFGRGKGCDICKPVVASILASTGSEHILEGEQASLQDSNDHFLANIQKNGSYSVVPWVPGGDIKPEHLILIGQIAQDFGLYTKITGGQRIDMFGARVDQLPAIWKRLVDGGMESGHAYGKALRTVKSCVGTDWCRYGQQDSVQLAIDLELRYRGLRAPHKIKMGVSGCARECAEARSKDVGVIATEKGWNLYVGGNGGMTPKHAQLLASDLDTETLVRYIDRFVMYYIRTADRLQRTAPWVESLDGGLDHVREVVCEDSLGLAEEFEAAMERHVRNYKCEWKGVLDDPDKLSRFVSFVNAPDAVDSTVAFTEHAGRKIPVSIGMPKIRQG

SEQ ID NO: 5927 - protein, 405 aa, Chromobacterium violaceum ATCC 12472
MTKPRAVYLQSGGPTAVLNASAQGAIETARRLGLSLYAAYDGLAGLLDGRLCDTDGVSDTAIAQLAFMPGGSFGVSRRMIGTFEEAPEDWLRLRDVLAKHDIHYLLINGGNGSLGCAERLVDFEKHTGYKLGVIGIPKTIDNDLVGTDNSPGYGSSAKFLASAMREVGLDMTSMGWGRVFIMETMGRHTGWLAAACAAASRNPHEAPHLLLLPEVPFDQARFLAALDASLAKYGQCAIAVAEGITGQDGRFVAEAKKSETYGHEQLGGAGHWLAQLILRERGISAHVAQVDYLQRAGGHLASATDVRQAYVMGERAVEWLLAGKTGLMAGIRRLNDHPYCWDVAEVPLSAVGDKEKRLPPEFIGADGFSVTQAFLDYVKPLIEGERIPPFKDGLPDYRPIAWPRV

SEQ ID NO: 5928 - protein, 143 aa, Arabidopsis thaliana
  misc_feature (80)..(80): Xaa can be any naturally occurring amino acid
  misc_feature (96)..(98): Xaa can be any naturally occurring amino acid
  misc_feature (106)..(106): Xaa can be any naturally occurring amino acid
  misc_feature (112)..(112): Xaa can be any naturally occurring amino acid
  misc_feature (118)..(118): Xaa can be any naturally occurring amino acid
  misc_feature (124)..(126): Xaa can be any naturally occurring amino acid
  misc_feature (133)..(133): Xaa can be any naturally occurring amino acid
  misc_feature (136)..(138): Xaa can be any naturally occurring amino acid
MASSMLSSAAVVTSPAQATMVAPFTGLKSSASFPVTRKANNDITSITSNGGRVSCMKVWPPIGKKKFETLSYLPDLTDVXLAKEVDYLLRNKWIPXXXFELEHGFXYREHGXNTPGYXDGRYSXXXESFPLFXCTXXXLKYLK

SEQ ID NO: 5929 - protein, 112 aa, Geobacter sulfurreducens PCA
MKLIEAIIKPFKLDEVKDALNEIGIEGITVSEVKGFGRQKGHTELYRGAEYVVDFIPKVKLEIAVADELVAKVVETIESTAKTGRIGDGKIFILSLDEAVRIRTGEKGNEAI

SEQ ID NO: 5930 - protein, 244 aa, Zantedeschia aethiopica
MASSAAFTAAPSPVRPLHGLADGGRRALRPALASATFSIRAPSGLSEFSSSLRRRFSLSSSTIRVSESKPRRTSGVVYATAATEKSIHDFTVKDIDGKDVSLSKFKGKVLLIVNVASRCGLTTSNYMELSHIYEKYKTQGFEILAFPCNQFGSQEPGTNSEIKQFACTRFKAEFPIFDKVDVNGPKTAPVYQFLKSSAGGFLGDLIKWNFEKFLVDKNGKVVERYPPTTSPFQIEKDIRKLVAA

SEQ ID NO: 5931 - protein, 449 aa, Clostridium symbiosum
SKYVDRVIAEVEKKYADEPEFVQTVEEVLSSLGPVVDAHPEYEEVALLERMVIPERVIEFRVPWEDDNGKVHVNTGYRVQFNGAIGPYLGGLRFAPSVNLSIMKFLGFEQAFKDSLTTLPMGGAKGGSDFDPNGKSDREVMRFCQAFMTELYRHIGPDIDVPAGDLGVGAREIGYMYGQYRKIVGGFYNGVLTGKARSFGGSLVRPEATGYGSVYYVEAVMKHENDTLVGKTVALAGFGNVAWGAAKKLAELGAKAVTLSGPDGYIYDPEGITTEEKINYMLEMRASGRNKVQDYADKFGVQFFPGEKPWGQKVDIIMPCATQNDVDLEQAKKIVANNVKYYIEVANMPTTNEALRFLMQQPNMVVAPSKAVNAGGVLVVGFEMSQNSERLSWTAEEVDSKLHQVMTDIHDGSAAAAERYGLGYNLVAGANIVGFQKIADAMMAQGIAW

SEQ ID NO: 5932 - protein, 116 aa, Zea diploperennis
TQSAVAVAVVAAVLLLAAAATTSEAAITCGQVSSAIAPCLSYARGMGSAPSAGCCSGVRNLKSAASTAADRRAACNCLKNAARGVSGLNAGNAASIPSKCGVSIPYTISTSTDCSR

SEQ ID NO: 5933 - protein, 190 aa, Arabidopsis thaliana
MCAPQPSNEFPLIFRKDGKTCVFWDVEDYPIPADLHPRSIRRRIVKDVKKYGCDAEVSIHAYANDNTVSVTMRRQFSAAGIKLEVFTQGDKYARHCSLYGDIMLWSLENPPPSNIIVIAKIIDDDLADRIGCLTTVWSYGLLISQVKPEWLERLFPVGSYPSFLAAIFDGGLPKSSKANKDRFPLDESDD

SEQ ID NO: 5934 - protein, 987 aa, Candida albicans SC5314
MPSSSDAINRISYISLVTSDNDKFNQTFQFYSQLGFRLTKSFSKVSSYGSGLGANHPEFQLGVSHDSLKEVWLESYPLQNVDSNGNLRPWQEMEVYDGDNCERLNESTVIKVRLLGETPLKSISQKQFVFFTTQLNKIEKILTDANVKYGKVVDNVILAEDPLSNIISFSNTQNELCKTRFQSPEEYVEKTTAEILAKRKKSQLGSKFGSFEEISPSEVGGGNGLRKKKIGVMTSGGDAPGMNPAVRAVVRAGIYYGCDVYAVYEGYEGLVKGGDLLKKMEWSDVRSYMSLGGTSIGTARCKEFRERAGRLQGAYNMIKNGIDALVVCGGDGSLTGADLFRSEWPSLVKELVDTGKLTKEEVSPYEHLTIVGLVGSIDNDMSGTDVTIGAFSALERITEMVDYIGATAASHSRAFVVEVMGRHCGWLALLSGLATGADFVFIPERPPKAGLWKEQLKEVCLRHREYGRRKTTVIVAEGAIDDELNPITSEEVKQVLADLGLDTRNTILGHVQRGGTAVAFDRRLATLQGVEAVKAVLEMTPDTPSPMIGILKHKIVRIPLVDAVKQTKAVAEAISNKDFDKAMSLRDNSFYDDYRYFRDISIYDDGSKQLSEDKRLNIAIVHVGAASAGLNAATRAVALYSLSRGHKLYAVQDGFAGLVKGDLKNLTWMDVEGWHSLGGSEIGTNRSLPSQNIGKVAYNLQKFNIQGLLIVGGFEAFTSLHELSEQKANYPIFEIPMVVVPATVSNNVPGTEYSLGADTCLNQLVSYCDAVQQSASSTRRRVFVVEVQGGHSGYVASYCGLITGALATYTPESNINLRELQGDIDLLQKVFATDRGEDHNGTLIVRNEQASAVYSTQLIADILKENANKRFETRTAIPGHVQQGFTPSANDRVMAVKFSLKAMEFIETRNGCYGKHDRKFSDEEISEHSQVVIGIHGDVVKFTCIKHLYDNEANVALRKGKTVHWTDMIDVANILNGKSLLKKQERY

SEQ ID NO: 5935 - protein, 165 aa, Vicia faba
MVEDRKVGVGIDFSKNSKNALKWAIVNMADKGDTFYLIHINSNSSDESRSKLFAKTGSPLIPLEELKEAGVMKQYGVQTDVEVIDLLEIAATQKEVSVVAKLYWGDARQKLMDSIEDLKLDALVLGSRGLSTIKRILLGSVSNFVMVHSPCPVTIVKDYSSSSSD

SEQ ID NO: 5936 - protein, 486 aa, Silicibacter pomeroyi DSS-3
MTTLALNDPGLLETRAYVNGVWIEGGARFAVQDPATGDLIAEVADLGAADTAAAIDAAHAAGPGWAALTGKERGAILRRWHDLMIQNADDLATILTAEMGKPWAEARGEILYGASFLEWFAEEAKRVYGETIPGHQRDKRIVVLKQPVGVVGSITPWNFPNAMIARKVAPALAVGCTFVARPAELTPLSALAMAVLAERAGVPAGVFNVIPSQDAAGVGAELCANPKVAKITFTGSTRVGRLLMQQCAPTIKKMSLELGGNAPFIVFDDADLDAAVDGAMIAKFRNNGQTCVCANRIYVQARVYDAFADKLAAKAAQLRVGNGFDTGVTTGPLINSAAVSKVEAHIADALAGGAEVVLGGTRAPLGGTFFAPTVLRDVTRDMLVCREETFGPLAALVRFESEDEVIDMANDSEFGLAAYFYSRDLARVWRMAEALESGMVGVNTGLISTEVAPFGGIKQSGLGREGSRHGIEDYLELKYLCLGGIG

SEQ ID NO: 5937 - protein, 630 aa, Mesorhizobium loti
MCGIFGIVLKNEGTPVCAAAVERCADALAHRGPDASGLYINQSVAFAHRRLSIVDAHSRANQPYRDANTGVVVTYNGEIFNYREIKAELRDMGFSFSTVSDTEVLILSYIAWGKSFLNRLDGIFAFALFDPRKSLVLIARDRLGVKPLYYTICDVGLLFASQPNALIRWPGVMHGPDMIGALSFLSYRAVVGARTLFAGISKLEPGHLLEIRNGRHTSERWWNLSARISRSKPDYSDIRRLFGSAVERQLVADVPVAALLSGGLDSSILAYEASARSQIRPVCYTGKVETPDYDETAYAMEVAAEFGLTHRVVPIGEPSDINAVAELVRLRGHPLGMHNETAMFTLAKAISKEHKVVLTGEGADEIFAGYSRLFRTPYDYNRSKIITALPPALAQIARRRLGLGVHCSQLQFFLERYSYFPADEIRSLAIDGQMRTEHEMELFDHFSTQFAEAGGDFFSKISYVLVSTHLPALLEMVDNTTMAAGLEARVPYTDHQLVTAAMAMPGSQRLRWRSPIASAQALWHPVASFSERLDVSKYPLRREYRSVLPKSVLSRKKMGFPLPLGQWAVGEGATEYRRLLFDKDSPLGDLFDPAALRRWFKAGRRNPSDSFGRKFWLLANLGIFFKEVFS

SEQ ID NO: 5938 - protein, 164 aa, Vicia faba
MVEDRKVGVGIDFSKNSKNALKWAIVNMADKGDTFYLIHINSNSSDESRSKLFAKTGSPLIPLELKEAGVMKQYGVQTDVEVIDLLEIAATQKEVSVVAKLYWGDARQKLMDSIEDLKLDALVLGSRGLSTIKRILLGSVSNFVMVHSPCPVTIVKDYSSSSSD

SEQ ID NO: 5939 - protein, 287 aa, Thiobacillus denitrificans ATCC 25259
MTLSPHVFDATADNFNRLVLENSHKGPVLVHFWTPKAGPCFVLMPRLVRLAAEYGGKFLLVMLNAEELPQLAQRFAVNSVPTVKFFWRGEVAHTIHGAEPDSTFREALDRFIAGDANRAHALGVAAWQAGKLSEARMLLANAAMAEPDNLDIPRDLAKLLWAEGDGDQALKLLESLPPEARKDARIAPLHAHLRLAETARQAPALATLDEHIASQPDDIETHYQRAAVLLAGDDYAGAMDELLFIARTDRDFGQDIGRISLLALFDLLGSADPLTLKYRRLLSESLH

SEQ ID NO: 5940 - protein, 519 aa, Arabidopsis thaliana
  misc_feature (338)..(338): Xaa can be any naturally occurring amino acid
MASISTPFPISLHPKTVRSKPLKFRVLTRPIKASGSETPDLTVATRTGSKDLPIRNIPGNYGLPIVGPIKDRWDYFYDQGAEEFFKSRIRKYNSTVYRVNMPPGAFIAENPQVVALLDGKSFPVLFDVDKVEKKDLFTGTYMPSTELTGGYRILSYLDPSEPKHEKLKNLLFFLLKSSRNRIFPEFQATYSELFDSLEKELSLKGKADFGGSSDGTAFNFLARAFYGTNPADTKLKADAPGLITKWVLFNLHPLLSIGLPRVIEEPLIHTFSLPPALVKSDYQRLYEFFLESAGEILVEADKLGISREEATHNLLFATCFNTWGGMKILFPNMVKRIXGRAGHQVHNRLAEEIRSVIKSNGGELTMGAIEKMELTKSVVYECLRFEPPVTAQYGRAKKDLVIESHDAAFKVKAGEMLYGYQPLATRDPKIFDRADEFVPERFVGEEGEKLLRHVLWSNGPETETPTVGNKQCAGKDFVVLVARLFVIEIFRRYDSFDIEVGTSPLGSSVNFSSLRKASF

SEQ ID NO: 5941 - protein, 294 aa, Gibberella zeae PH-1
MSTRPPSRVVFVGNIPYGLTEEQITEIFSSAGKVERFRLVYDSETGRPKGFGFADYPDTDSASSAVRNLNDHEIMGRKLRVDFSNEQKGSDDDKDPSTSGYSMHASNGAATNYNAQPSTLPPLPSGKELPPGVSCTDSISRTLQTLPPAQLLDILSQMKTLATNDPQRATELLQQAPQLGYAVFQALLLMGLVSPEAIQSVVEPGAPPPAAFPPAPMPGFPGVSNTPPVAAMPYQAPPQQYAAPPPAAPAPVAPDQDALMRAVMELPQAQIDMLPEAERQQILALRATFGGQRR

SEQ ID NO: 5942 - protein, 478 aa, Nostoc punctiforme PCC 73102
MPVVTNSIKFGTDGWRGVIGDEFTFERLALVAPVAAKVLYDTYFSTVGSRTIIVGYDRRFMAEDFARAVADTVSAVGFDVLLSEDYAPTPAYSWAAKELNALGALVITASHNPGKYLGLKVKGYFGGSVPSEVTKKIEEQLSVGVPLAATPGKQEKFDPWPSYTQALERKVDIAKLREAIASGKLTLFADVMHGAAAGGLARLLGNQVKEINSQRDPLFGGGAPEPLPKYLSKLFEVIKTHRETDKSGLTVGLVFDGDCDRIAAVDGEANFLSSQVLIPILIDHLTLRRNFSGEIVKTVSGSDLMPLVAALHNLSVFETAVGYKYIADRMLVAKVLLGGEESGGIGYGSHIPERDALLSALYVLEAIVESGLDLGEYNRYLQKQTGFTSAYDRIDLPLASMEVRSRLLQQLQTKPLTEIAGLAVIDCQTIDGYKYRLADQSWLMIRFSGTEPVLRLYCEASTIEQVHQTLAWAKQWAG

SEQ ID NO: 5943 - protein, 294 aa, Arabidopsis thaliana
MSPPPQRIGLPWPELNDGLAYKDAISSSESELTTVSEFYFTKYKSSAPLLGWIQRIQNGQIQIDGEVVKDPNTLLRSGSKLVYSRLPWKEPDTPYSLEVLYEDDDLIALNKPSGLQVLPGGLFQQRTVLTQLQWCFGKNDSYIGSRESPHPVPVHRLGRGTSGILLCAKTKLAKTKLAAYFAEGTSLVGSGNLDQECGTGRKLSKIYRALADGIVEEDEVVIKQPIGVVRYPGVAQGLYVASPEWKPAFSKVFVLERDREKNCSLVKVEIQSGRPHQIRIHLAYMGHPLGTLFM

SEQ ID NO: 5944 - protein, 186 aa, Glycine max
  misc_feature (184)..(184): Xaa can be any naturally occurring amino acid
TLARAAAAAVMDGGGGVGGGMGPVGGGVGGMVGPVGVGGGGGGSDVELVSKTLQFEHKLFYFDLKENPRGRYLKISEKTSTTRSTIIVPHRRRRLVPRPLRLLHPHRRARRLQQGATPRYQGVLLRYWGEQERRYLKVSEASVNRNRSTIIVPAGSSGEEGWEAFRNVLLEINDEASRLYVLPXHQ

SEQ ID NO: 5945 - protein, 112 aa, Nostoc punctiforme PCC 73102
MKKVEAIIRPFKLDEVKIALVNAGIVGMTVSEVRGFGRQKGQTERYRGSEYTVEFLQKLKVEIVVDDNQVDMVVDKIIAAARTGEIGDGKIFISPVEQVIRIRTGEKNTEAV

SEQ ID NO: 5946 - protein, 410 aa, Thiobacillus denitrificans ATCC 25259
MSKRRVVVTGLGIVSPVGNTIPEAWDNLVAGRPGISRITRFDPTPFASQMAGEVRNFDVAQYLNPKDARRMDVFIQFGMAAGIQAIRDSGIEVTEANSDRIGINIGSGIGGLPLIEETHGLLMESGPRKISPFFIPGSIINMISGNLSILYGINGPNLAVVTACTTGLHAVGLSARMIQAGDTDVMIAGGAECATSPLGVGGFAAARALSTRNDDPATASRPWDKDRDGFVLGEGAGVLVLEEYEHAKARGAKIYSEVAGFGMSGDAYHMTAPSTDGPRRSMVNAMRDAGLNPDQIQYINAHGTSTPLGDKNETEAIKLALGDAAYKAVVNSTKSMTGHLLGGAGGVESVFSVLAVHHQVSPPTINIFSQDPECDLDYCANTARDMKIDAALKNNFGFGGTNGSLVFKRV

SEQ ID NO: 5947 - protein, 315 aa, Prochlorococcus marinus str. NATL2A
MTLDQLRIASRRSQLAMVQTNWVRDELQREHPDLVITIEAMATQGDKILDVALAKIGDKGLFTKELEAQMLLGHAEIAVHSLKDLPTNLPDGLILGCITKREDPSDALVVNEKNQIHKLETLPEGSVVGTSSLRRLAQLRYHYPHLVFKDVRGNVITRLEKLDSGEYDCLILAAAGLQRLGFANRIHQLIPTDISLHAVGQGALGIECVSGQQKVLDILKTLEHESTSKRCLAERSFLRELEGGCQVPIGVRTEINNNELILEGMVASLDGKRLIRDIKKGSVSSAEEIGIDLANELKGRGAGEILEEIFKSARA

SEQ ID NO: 5948 - protein, 349 aa, Yarrowia lipolytica CLIB122
MTETLRTQCTWLGLYFFFNLALTLFNKAVLGSFPFPYTLTGIHTLCGTLGCALLHWRGVFKLTRLSDQENTTLILFSILYTINIAISNVSLQMVTVPFHQVVRATTPFFAMLINVVFLRHSYTVLTYLSLVLVCAGVGFATAGDYYFTAMGFILTILGAVLAAVKTVVTNRIQTGRFRLSPLELLYRMSPLAFVQTLVYAYLAGELDVLGLRLSSPEDVVGATASATSGPLSFLGGIDYTEIEFEYSQKLMLHLLLNGIIAFGLNIVSFTTNKKTGALTMTVAANVKQILTIVLAIFFFNLTVTPLNMMGILVTLLGGAWYAKLELDRKSDNSGAESALPVKEANRSQA

SEQ ID NO: 5949 - protein, 106 aa, Arabidopsis thaliana
MAKSYGAIFLLTLIGLFMLQTMVMASSGSNVKWSQKRYGPGSLKRTQCPSECDRRCKKTQYHKACITFCNKCCRKCLCVPPGYYGNKQVCSCYNNWKTQEGGPKCP

SEQ ID NO: 5950 - protein, 157 aa, Sulfolobus solfataricus P2
MASWKYPQLDVDELKIAKAVIRDVPESIRDLYNVCKAIRGMYLNDAKDFLNRVLEEKEALPFWRYNKGASHKSNISAKWKIKAGRYPKKAIRQVLKVLENAEANATNKGLDVDKLIIRHIAAHKGITLQRYMPRAFGRATAKYRRTSNIEVILEEVE

SEQ ID NO: 5951 - protein, 227 aa, Brucella suis 1330
MTSFSPFGKSFDAFLFDMDGTILSSIAATERVWSEWARRHGIDPVTFLPTIHGVRAVETVRRLALPGVDPIREAEILLEAEMADLDGIAPIEGAYEFLHSLPENRWAIVTSAPLELARRRIKAAGLPMPKTIVSAEDVERGKPSPECFELGAKRLGFAPRDCLVFEDAPAGIVAGETAGASVVVVTATHPHSPRTSHLSIESYRYLQLTIEESGKLSLSPTVPASVG

SEQ ID NO: 5952 - protein, 155 aa, Pyrococcus furiosus DSM 3638
MAKRFGYSFQNFDPKRMARASARDLRISPKLAVEVCRELRGMMLNDALRYLDDVIALKRPVPLKRYNDSQGHKPGKGFGPGRYPVKVAKAIKKVLLNVKNNAVQKGLDPDKLKIIHIAAHKGPVLRGWYPRAFGRATPFNEQTTHIEVVVEEIRR

SEQ ID NO: 5953 - protein, 314 aa, Actinobacillus pleuropneumoniae serovar 1 str. 4074
MMNLPMKDTLRIATRQSPLALWQANFVKDELEKRFPELSVELVTMVTKGDVILDTPLAKIGGKGLFVKELELALLENRADIAVHSMKDVPMTFPEGLGLAVICEREDPRDAFVSNKYQNLDELPAGAVVGTSSLRRQCQLMAKYPHLEVKSLRGNVGTRLSKLDNGEYDAIILASAGLIRLGMPERIRSFISVEQSLPAAGQGAVGIETRVNDERVLNYLATLNHNPTACCVIAERAMNTRLQGGCQVPIGGFATLNGNEITLNALVGALDGSNIIRASGVADRENAEQLGISVAEQLLAQGADKILAEVYKDE

SEQ ID NO: 5954 - protein, 95 aa, Photobacterium sp. SKA34
MQINITGHHVDVTDSLREYVTTKFEKLERFFDKINNVQVILNVEKLQQIAEATLHINSGEIHAKADSENMYAAIDELTDKLVRQLNKHKDKLNSH

SEQ ID NO: 5955 - protein, 495 aa, Ustilago maydis 521
MTARRYTQGVRCSTGDAVDGRVRGRDKKGKAKQMSAEDAVGLQGQMRRPVSSMSGLAWRPTGVVRTASMWSKRRCLVDARWTGWLLSHGVHTFTGAMNAARTSSARSSSVSSTGPSTSPTAPVAPASSSPYSPATPASLAGLGTTQLSPDIMLRCTIFDSTGSATSTSGVFKKSRLCSDHGLEPRDLRKIDSRVPNLVPTILVRRGGILVNILHIRAMIKKDKVLLFDSYGSTDSQLHSAFVYNLQHNLRPPHQNAHQHTSTSSSPGALAYEFRALESILVSVLDALRIELGVVRGWTSEVLEQLDDDVDRDKLRTLLQVSRKLNAFLSRSKAVKNAVVEVLENDEDMQLMHLSSIPPSASTDKGCASSNDAHTSSANTSSSCDATASNDGSQAMDELELLLESFDKQVEEVVAETTQLHSDMTNTQEVVELILDNNRNKLLALDLKTSIATMGISAGTLWAGLFGMNLKSHMEELDWAFAGTRKVAQGGLGHEG

SEQ ID NO: 5956 - protein, 229 aa, Kluyveromyces lactis NRRL Y-1140
MSTITALSPNQVNDELQKMQAFIKKEAEEKAREIELKAQQEYEIEKTGLVRNETSAIDNNIASRMKKAALKQQIVKSTIANKMRLKVLGTREEVLDSIFEKTKAELKQISSKKEEYKPVLHSLVLESLLKLLEPSAIIKVRETDVEIIESLVDDVAKEYEEKTGKPIKIELSSSYLNKDIAGGVIVSNGNGRIEVDNTLEERLKLLSEESLPAIRLELFGPSKTRKFFD

SEQ ID NO: 5957 - protein, 354 aa, Oncidium Gower Ramsey
MGIENKGTVAVTGASGYVGSWLVMKLLQKGYEVRATVRDPTNFEKVKPLLDLKGSNELLSIWKADLNDINESFDDVTRGCVGIFHVATPMNFQSKDPENEVIKPAINGMLGILRSCKRAGTVKRVIFTSSAGTVNVEEHQAEVYDESSWSDLEYITRVKMTGWMYFLSKTLAEKAAWEFVRDNDIHFITIIPTLVMGSFLISGMPPSMITALSLITGNEAHYSIIKQAQFVHLDDLCDAHIFLFEHPEANGRYICSSHDSTIYGLAKKLKNRYVTYAIPQKFKDIDPDIKSVSFSSKKLMDLGFKYKYTMEEMFDDAIKACRDKNLIPLNTEKMVSAAEKFNEIKEKFCLVNNE

SEQ ID NO: 5958 - protein, 987 aa, Streptomyces avermitilis MA-4680
MTEGEAVGVPAQGCPSKVASDQEASAMTAHRIPLSDLEQGIPFEQRHIGPDSEARAKMLAQVGYGSLDELTATAVPDVIKNAEALELPGARTEAEVLAELRSLADRNQVLGSMIGLGYYGTFTPPVILRNVMENPAWYTAYTPYQPEISQGRLEALLNFQTVVAELTGLPTSGASLLDEGTAAAEAMALSRRMGKNKKGLFLVDADALPQTIAVIETRAEPTGVEVVVADLSEGIPAGIAEREINGVLIQYPGASGAVRDIKPLVEQAHELGAVVTVAADLLALTLLTSPGELGADIAVGTTQRFGVPMGFGGPHAGYMAVREKFARSLPGRLVGVSVDADGHKAYRLALQTREQHIRREKATSNICTAQVLLAVMAGMYAVYHGPDGLRTIARRTHRYATILAEGLKAGGVEVVHGAYFDTLTARVPGRAAEIVAAAREGGVNLHLVDADLVSISCDETTTRAQLGAVWTAFGVEGDIEALDAAAEDTLPAALLRTDDYLTHPVFHQYRSETAMLRYLRRLSDRDYALDRGMIPLGSCTMKLNATTEMEPVTWPEFGQLHPFAPAEQAQGYLTLIRELEERLAEVTGYDKVSLQPNAGSQGELAGLLAVRGYHRANGDEQRTVCLIPSSAHGTNAASAVMAGMKVVVVKTADDGEIDVEDLRAKIEQYRDELSVLMITYPSTHGVFEEHVADICAQVHEAGGQVYVDGANLNALVGLAKPGHFGGDVSHLNLHKTFCIPHGGGGPGVGPVGVRAHLAPYLPNHPLQPEAGPATGVGPISAAPWGSAGILPISWSYVRLMGGEGLKRATQVAVLSANYIAKRLEPHYPVLYTGPGGLVAHECIIDLRPLTKATGVSVDDIAKRLIDYGFHAPTMSFPVAGTLMIEPTESEDLGELDRFCEAMIAIRAEVEKVGSGEWPAEDNPLRNAPHTAAALGGEWEHAYSREEAVFPAGVSAADKYWPPVRRIDQAFGDRNLVCSCPPLDAYDD

SEQ ID NO: 5959 - protein, 334 aa, Oncidium Gower Ramsey
MRSGLQSEIQVSNISNCNFIANFEKVKPLLDLKGSNELLSIWKADLNDINESFDDVTRGCVGIFHVATPMNFQSKDPENEVIKPAINGMLGILRSCKRAGTVKRVIFTSSAGTVNVEEHQAEVYDESSWSDLEYITRVKMTGWMYFLSKTLAEKAAWEFVRDNDIHFITIIPTLVMGSFLISGMPPSMITALSLITGNEAHYSIIKQAQFVHLDDLCDAHIFLFEHPEANGRYICSSHDSTIYGLAKKLKNRYVTYAIPQKFKDIDPDIKSVSFSSKKLMDLGFKYKYTMEEMFDDAIKACRDKNLIPLNTEKMVSAAEKFNEIKEKFCLVNNE

SEQ ID NO: 5960 - protein, 160 aa, Gloeobacter violaceus PCC 7421
MATVSDITVQTVDGQARSLGRYKGQVLLIVNVASYCGYTPQYAGLEKLYRRYKDAGLRVLAFPCNDFGGQEPGSNAEIAEFCSRYDVSFELFDKVGARGYYKHPLYVRLSEAAEPAGEVSWNFEKFLIAKSGEIVGRYRSGIGPEDPQLVADIERELAKS

SEQ ID NO: 5961 - protein, 319 aa, Wolbachia sp. Abt
LCDKKIQLGINLTKGLGAGALPDVGKGAAEESIDEIMEHIKDSHMLFITAGMGGGTGTGAAPVIAKAAREARAAVKDRAPKEKKILTVGVVTKPFGFEGVRRMRTAEFGLEELQKYVDTLIVIPNQNLFRIANEKTTFSDAFKLADNVLHIGIRGVTDLMVMPGLINLDFADIETIMSEMGKAMIGTGEAEGEDRAISAAEAAISNPLLDNVSMKGAQGILINITGGGDMTLFEVDAAANRVREEVDENANIIFGATFDQAIEGRVRVSVLATGVDGRNNKSETSPISQSEDSEKEKFKWPYSHSESTQDKTLETKPTE

SEQ ID NO: 5962 - protein, 354 aa, Oncidium Gower Ramsey
MGIENKGTVAVTGASGYVGSWLVMKLLQKGYEVRATVRDPTNFEKVKPLLDLKGSNELLSIWKADLNDINESFDDVTRGCVGIFHVATPMNFQSKDPENEVIKPAINGMLGILRSCKRAGTVKRVIFTSSAGTVNVEEHLAEVYDESSWSDLDFITRVKMTGWMYFLSKTLAEKAAWEFVRDNDIHFITIIPTLVVGSFLISGMPPSMITALSLITGNEAHYSIIKQAQFVHLDDLCDAHIFLFEHPEANGRYICSSHDSTIYGLAKKLKNRYVTYAIPQKFKDIDPDIKSVSFSSKKLMDLGFKYKYTMEEMFDDAIKSCRDKNLIPLNTEKMVSAADKFNEIKEKFCLVNNE

SEQ ID NO: 5963 - protein, 311 aa, Mycoplasma mobile 163K
MHNEKIYDVIIIGGGPAAMSAAIYASRANLSTVFIEKGAPGGKMVTTSRIENYPGFTTIGGPDLAIEMLNHAKAYKAEYKFGNVLKINNHGPFNKEVLLERKNEIIKGKSIIIATGMVNRVPRDIEGIEEFNHKGVSYCAICDGPLFGKTPSAIIGGGNSAVEEAIYLASIASEVHVFVKDSKFNAEEKSVNDLKLLKNVKIHMNSSILKLKGSNKLEEADVLINGKKETIKLTSLFPYIGFIPSVDFAKHLGITNEQGFIQTNEKLETKLENIFAAGDIRVKDIRQVATAIGDGAIAGKEVANKINSEKK

SEQ ID NO: 5964 - protein, 164 aa, Vicia faba
VEDRKVGVGIDFSKNSKNALKWAIVNMADKGDTFYLIHINSNSSDESRNKLFAKTGSPLIPLEELKEAGVMKQYGVQTDVEVIDLLEIAATQKEVSVVAKLYWGDARQKLMDSIEDLKLDALVLGSRGLSTIKRILLGSVSNFVMVHSPCPVTIVKDYSSSSSD

SEQ ID NO: 5965 - protein, 140 aa, Roseovarius nubinhibens ISM
MKYLHTMVRVKDLEASMRFYELLGLRETRRYDSEEGRFSLIFMAPPGQEDCPVELTYNWDGDDALPSDSRHFGHLAYEVENIYATCQYLLDNGVVINRPPRDGRMAFVRSPDNISVELLQAGDPLPAEAPWSAMENTGHW

SEQ ID NO: 5966 - protein, 363 aa, Aspergillus nidulans FGSC A4
MHVRSSDLNPVTSGVWNAPAPAISAFAYFGFFKSSAYSEQNPDEPIPEQGTTSFRQPYPASCSMEFWLIPIGKPLLSTDEDEDEDDTITNGSGSMEHDVEAQRSRAYHTFRDSSPSSSNYDVESTGSSNTRSRIDPRIVSDAILGLSDGLTVPFALSAGLSALGDTKVVVLGGLAELAAGAISMGLGGYVGAKSEAESYQTTVRETTELIDSSPSETQAIVYDIFASHGVPDDAIAPINASLHASRDRLREFLITFHHKESEPDCNQAWTSAITLALGYFIGGFIPLIPYFFLNQVLIALYCSVAVMAITLLVFGYIKTAVVRGWSGKDNILAGVKGGIQMVVVGAFAAGAAIGLVRLINGES

SEQ ID NO: 5967 - protein, 319 aa, Wolbachia sp. Abt
LCDKKIQLGINLTKGLGAGALPDVGKGAAEESIDEIMEHIKDSHMLFITAGMGGGTGTGAAPVIAKAAREARAAVKDRAPKEKKILTVGVVTKPFGFEGVRRMRTAEFGLEELQKYVDTLIVIPNQNLFRIANEKTTFSDAFKLADNVLHIGIRGVTDLMVMPGLINLDFADIETIMSEMGKAMIGTGEAEGEDRAISAAEAAISNPLLDNVSMKGAQGILINITGGGDMTLFEVDAAANRVREEVDENANIIFGATFDQAMEGRVRVSVLATGIDGRNNKSETSPISQSEDSEKEKFKWPYSHSESTQDKTLETKPTE

SEQ ID NO: 5968 - protein, 595 aa, Rhodopirellula baltica SH 1
MSLIVQKFGGTSVADTEKIRAAARKAIRAQKAGHRVVMVVSAMGKNTDTLLDLASQISDEPPAREMDMLLSTGEQVSVALVAMAIHSMGSKAVSLTGGQIGLKTDNSFSKARIQSIDTGRIERLLDAGNIVVAAGFQGIDDDLNITTLGRGGSDTTAVALAAVLGADACEINTDVDGVYTTDPRLLAEARRVDVISYDEMLELASLGAGVMHSRSIEFAKKFEVPIHVRSSFSDQDGTMIVAQPESETAPVSGAALTRDEARVTVLGVPDVPGMSQKIFSAIAAQKVAVDMVVQNVGTSGKADVSFTVAGGELKKTLAALEGILDSLGADGVTHDDQVSKVSVVGLGMAHQKAVAASMFRALAEANVNIHMITTSEIKISCLVPRDQANEALRAVHEAFSLDQRPSDAKTWNEIKASNAKEADVADVVARLQNDALEALTLTDISIVPAQARVTLDGVPDQVGVAADMFEQIGEAGIFVDMIVQGYDGEDGSTSVSFTVEQADLDAAQKVAREICGKHSMRDVRGASGITKLSVSGIGLRSHTQVGTVLFEQLASAGINVEMIATSELQVNVVIQSDQAGDAATRLKQAFAEALH

SEQ ID NO: 5969 - protein, 520 aa, Arabidopsis thaliana
MAQVSRICNGVQNPSLISNLSKSSQRKSPLSVSLKTQQHPRAYPISSSWGLKKSGMTLIGSELRPLKVMSSVSTAEKASEIVLQPIREISGLIKLPGSKSLSNRILLLAALSEGTTVVDNLLNSDDINYMLDALKRLGLNVETDSENNRAVVEGCGGIFPASIDSKSDIELYLGNAGTAMRPLTAAVTAAGGNASYVLDGVPRMRERPIGDLVVGLKQLGADVECTLGTNCPPVRVNANGGLPGGKVKLSGSISSQYLTALLMSAPLALGDVEIEIVDKLISVPYVEMTLKLMERFGVSVEHSDSWDRFFVKGGQKYKSPGNAYVEGDASSASYFLAGAAITGETVTVEGCGTTSLQGDVKFAEVLEKMGCKVSWTENSVTVTGPPRDAFGMRHLRAIDVNMNKMPDVAMTLAVVALFADGPTTIRDVASWRVKETERMIAICTELRKLGATVEEGSDYCVITPPKKVKTAEIDTYDDHRMAMAFSLAACADVPITINDPGCTRKTFPDYFQVLERITKH

SEQ ID NO: 5970 - protein, 322 aa, Staphylococcus epidermidis ATCC 12228
MKKIAVLTSGGDSPGMNAAVRAVTRTAIYNNIEVYGVYQGYQGLLDDDIHKLELGSVGDTIQRGGTFLFSARCPQFKEEDVRKKAIENLRKRGIEGLVVIGGDGSYRGAQRISEECKEIQTIGIPGTIDNDINGTDFTIGFDTALNTIIESVDKIRDTASSHARTFIVEVMGRDCGDLALWAGLSVGAETIVLPEVNTDIKDVAEKIEQGIKRGKKHSIVMVAEGCMSGQECADELTKYINIDTRVSVLGHIQRGGSPSGADRVLASRLGGYAVELLKQGETAKGVGIRNNQLTSTPFDEIFAESDRKFNSQMYELAKELSI

SEQ ID NO: 5971 - protein, 319 aa, Wolbachia sp. Abt
LCDKKIQLGINLTKGLGAGALPDVGKGAAEESIDEIMEHIKDSHMLFITAGMGGGTGTGAAPVIAKAAREARAAVKDRAPKEKKILTVGVVTKPFGFEGVRRMRTAEFGLEELQKYVDTLIVIPNQNLFRIANEKTTFSDAFKLADNVLHIGIRGVTDLMVMPGLINLDFADIETIMSEMGKAMIGTGEAEGEDRAISAAEAAISNPLLDNVSMKGAQGILINITGGGDMTLFEVDAAANRVREEVDENANIIFGATFDQAMEGGVRVSVLATGIDGRNNKSEASPISQSEDSEKEKFKWPYSHSESTQDKTLETKPTE

SEQ ID NO: 5972 - protein, 359 aa, Sulfolobus tokodaii str. 7
MRLHKLKELLEVKGLKCAIITSPASIFYLTGYDYITTDIGNFVALVYCDGIATLIVPLLELYRAQDKVKEIDLVAYSTTLEGEKIIKGSLKDAILNFIKENKIGLDIQNTSSIFYNYFSKFEIIDLSKDISIMRSVKDQEELELIKRAGDITTAAMKIAQDKLTNSEISEKYLAGIIDMTMRTEGAEDYAFPSIVAFAENSAFPHHIPSDKVIKEGQNAVVDIGARYEKYCFDSTRTFLKGENTEIKKIYEIVLQAQLEAIDKVKEGVKASEVDLAARRVIEKAGYGKYFIHSTGHGVGIEVHEYPSISPNSDAELKENMVITIEPGIYLKNKFGIRIEDTVIVTKRKPIVLETTFKYL

SEQ ID NO: 5973 - protein, 261 aa, Silicibacter pomeroyi DSS-3
MSDSPVRTRRDGAIFEVTLDRPKANAIDLVTSRIMGEVFREFRDDTDLRVAILTGGGEKFFCPGWDLKAAADGDAVDGDYGVGGFGGLQELRDMNKPVIAAVNGIACGGGLELALSADMIIAADHATFALPEIRSGTVADAASVKLPKRIPYHIAMELLLTGRWFDADEAHRWGLVNEIVPGTQLMERAWDLARLLASGPPLVYAAIKEIVREAEDAKFQDTMNKITKRQLRTVDVLYSSDDQLEGARAFAEKRDPVWKGR

SEQ ID NO: 5974 - protein, 961 aa, Echinochloa crus-galli
MASERHQSIDAQLRLLAPGKVSEDDKLVEYDALLVDRFLDILQDLHGPHLREFVQECYELSAEYENDRDEARLGELGSKLTSLPPGESIVVASSFSHMLNLANLAEEVQIAHRRRIKLKRGDFADEASAPTESDIEETLKRLVSQLGKSREEVFDALKNQTVDLVFTAHPTQSVRRSLLQKHGRIRNCLRQLYAKDITADDKQELDEALQREIQAAFRTDEIRRTPPTPQDEMRAGMSYFHETIWKGVPKFLRRIDTALKNIGINERLPYNAPLIQFSSWMGGDRDGNPRVTPEVTRDVCLLARMMAANLYFSQIEDLMFELSMWRCSDELRIRADDLHRSTKRAAEHYIEFWKQVPPNEPYRVILGDVRDKLYYTRERSRHLLTTGISEIPEDATFTNVEQFLEPLELCYRSLCACGDKPIADGSLLDFLRQVSTFGLALVKLDIRQESDRHTDVLDSITTHPGIGSYAEWSEEKRQDWLLSELRGKRPLFGSDLPLTEETADVLGTFHVLAELPTDCFGAYIISMATAPSDVLAVELLQRECHVKQPLRVVPLFEKLADLEAAPAAVARLFSIGWYMNRINGKQEVMIGYSDSGKDAGRLSATWQMYKAQEELIKVAKHYGVKLTMFHGRGGTVGRGGGPTHLAILSQPPDTIHGSLRVTVQGEVIEHSFGEELLCFRTLQRYTAATLEHGMHPPISPKPEWRALMDEMAIVATKEYRSIVFQEPRFVEYFGSATPETEYGRMNIDSRPSKRRPSGGIESLRAIPWIFAWTQTRFHPPVWLGFGAAFKHIMQKDIRNTHTLKEMYNEWPFSRVTLDLLEMVFAKGDPGIAAVYDKLLVADDLQSFGEQLRKNYEETKELLLQVAGHKDVLEGDPYLKQRLRLRESYITTLNVCQAYTLKRIRDPSFQVSPQPALSKEFVDESQPAELVRLNPESEYAPGLENTLILTMKGIAAGMQNTG

SEQ ID NO: 5975 - protein, 220 aa, Neorickettsia sennetsu str. Miyayama
MHRMIKISPSLLSADFLNLHSDVKLLEESGADSIHIDVMDGHFVPNLTFGPVIIEQIKRITSIPIEVHLMILNAEQTFQDYINAGADTIFVHSEACFHLDRMVNAIKSQSVKVGVALNPATSEEALRYLYNSIDAVLIMTVNPGFASQVFLTSQLAKVSLVRRRIVELGVDVTLAVDGGINAETANLVVSAGAGTLVTGSYLFSNRKNLGAKIASLRVLA

SEQ ID NO: 5976 - protein, 560 aa, Rhodopirellula baltica SH 1
MSVEHNAPVRLVIVGGVAGGASAATRARRMNEQAEIILFEKDEDVSFANCGLPYHIGEEIKNRDALVVASADFLRRRFQLDVRTREEVVSINREKRCVTVVRHGATSEKDKTYEQPYDKLILAPGASPIVPALPGVDASNVLTLRNLVDMDRIKARVDSGSVRRAVVVGAGYIGLEMVEQLRRREMDVDLIELREQVLPLLDHEMARPIEDALRRNNVGIHLGVGLESIQLDGDRATSVRLSDGTELSTDLVILGIGVRPNSELAKEAGLEIGSTGGITIDEFSRTSDSDIYAVGDASEPVYGPTGTPMRVPLAGPANRSGRLAGEHAVTGQSAAATPVWGTSVVRVFDVSVGMTGLTRASAKRFGKDATSVTIVAKHHAGYFPGAEVMTLKLAFEPATGKVLGAQCVGGEGIDKRIDVIATAMHFGGTVRDLAGLDLAYAPPFGSAKDPVHMAAFAACNALDEIESFRDSDDSLDEVQVVDVRGAGEIEKTPLREASGAIHIPVDELRERLSELDRSKPTVVSCAVGVRGHIAARILRQNGFDVQNLSGGATVRNRCFE

SEQ ID NO: 5977 - protein, 541 aa, Roseovarius nubinhibens ISM
MFKVQDELKARGEAARARGILPLFEEDAGRAEAFSIGFDGLLFDYAKTHLDREDRAALLGWAEAAGVAARRDAMFSGARINETEGRAVLHTALRNLEGGPVEVDGRDVMPEIRDTLERMKRFARRVRAQSYKGAGGEITDVVNIGIGGSHLGPEMAVRALETFRQGPRCHFLSNVDGADAADILDHLDPRQTLVIVASKSFTTQETMTNAATVRDWMATAVDNPAKQFVALSSSKEKTAEFGVPPEQVFDFGDYVGGRYSVWGPIGLSLMIAIGPEAFGMMLRGGAAMDRHFREAPLAENMPVMLGLVGLWHHQVMGFPTRAVLPYAQRLERLPAYLQQLEMESNGKRVRMDGRTLDLPSGPVVWGEPGTNGQHAFYQLIHQGTQVVPCEFIVAAEGHEPTLAHHHRLLLANCLAQSEALMRGRDMATAQALMAEAGYEGAERDRQAAHRVFEGNRPSVTLMIDQLTPYRLGQIIALYEHRVFVEGVMLGINSFDQWGVELGKELARALEPVLAGEESAEGKDGSTRALVAYAQRFWARER

SEQ ID NO: 5978 - protein, 525 aa, Treponema denticola ATCC 35405
MEWKNLDKCTSFTQLQKAHKEQAENLKLADIFDTENSVKRVKNYSVKMGGNLKYNYAAKPVNDEILKALQSLADEQKLIEKYELLLNGDFINTGENRMVLHQLTRGQLKNDVVYKGVNMRSFYLNELKKIKEFSEAVHSGKIKTSQGKVFTDVVQIGIGGSDLGPRAMYIALKNRAKKKMRAHFISNVDPDDAAEVLNSINLASTLFILVSKSGTTQETLANERFVKSVLEKNGLDCKKQMLAVTSETSPLANNPDYLTSFYMDDFIGGRYSSTSVCGAAVLALAFGMETVEAFLKGAAEGDKLSLNKNIKENASLLDALLGVYERNILGCSATAILPYSQALSRFPAHLQQLDMESNGKTVNRFGEKVSYKTGPVIFGEPGTNGQHSFYQLLHQGSDIIPLQFIGFKKSQIGLDIESEGSTNMQKLNANLAAQIMAFAAGKTDENKNKDFAGNRPASLIYGEELNPENLGALLAHYENKVMFQGFIWNLNSFDQEGVQLGKTLAKKVLSNDMPPALKAFSEFLL

SEQ ID NO: 5979 - protein, 569 aa, Xanthomonas axonopodis pv. citri str. 306
MSLDQTRHHQMFPELDAGQLSITRRFASGPAQRFGAGDTVFEVGDAHAPVWVVLEGAIEVVRRDGLGNEKPITRHTPGQFTGEVSQLAGRASLAAGRAGPDGCLALPFDTAHLRALMISSAEVGEVVMRALILRRVGLIEGDASGSVLIGEPDDPHLTRLQGFLTRNGYPNTVMDVSDDEGRALVQRLGIQEHDLPVMVCPSGRVLRQPSDAEAAHCLGMTPDIDPDKRYDVAIVGAGPAGLATAVYAASEGLSVLVLDQRAIGGQAGASARIENYLGFPTGISGQALAGRAYNQALKFGAELAIPIEAAMLECGRDDGALKLDLADGKQLLASTVVIASGARYRRPEIEGLDRFEGHGVSYWASPVEARLCEGGVVALVGGGNSAGQAVAFLAPRVKELHLIIRGDGLESSMSQYLIERIAALPNVQLHTGTEVAALEGDPERGLQAAVLRTRKDGATARVELRHLFLFVGADPNTGWLQDCVDTDKRGFVMTGTARGDGVPACLPLETNRPGVFAIGDVRAGSVKRVAAAVGEGAAVVAQIHQYLAHQANPVPVSELASATQESTSA

SEQ ID NO: 5980 - protein, 336 aa, Sulfolobus solfataricus P2
MTFRVAVIPGDGIGPELYEGSKRIIAKLIEKYNLDIDLIEVEAGDVALNKYGEALPRHTLDVIEKADMILKGPVGETAMDVVVKLRQMYDMYANIRPAKSLPNVQSKYPNVDLVIVRENTEDLYKGFEFVTSTGVTIAIKVTTEFASKRIVNVALNYALMRRRKVTCVHKANVMRVTDGLFASVCREILKGKVNFEEMYVDAAAANLVRDPTRFDVIVTSNVYGDILSDEASQIAGSLGLAPSANIGDRKSMFEPVHGAAFDIAGKGIANPTAFLLSVSMMLSRMYELSKENKYILASKSLENAIIETYKSGNKLTEDVGGSAKLKDMVDEIYKYM

SEQ ID NO: 5981 - protein, 530 aa, Solanum tuberosum
MASTSLSLPSLKLQFPSHKSSSSRKNSSSHRVSIRPIQASVSERPPYISSPSPSPSPPVKQAKLPTRKVPGDYGLPLVGPWKDRLDYFYNQGKNEFFKSRIQKHQSTVFRTNMPPGPFISFNPNVVVLLDGKSFPILFDVSKVEKKDLFTGTFMPSTDLTGGYRVLSYLDPSEPNHAKLKKLMFYLLSSRRNEVIPEFHNSYSELFETLENELSTKGKARLNAANDQAAFNFLARSLYGINPQDTKLGTDGPKLIGKWVLFQLHPLLILGLPKVLEDLVMHTFRLPPALVKKDYQRLYNFFYENSTSVLDEAEKIGISREEACHNLLFATCFNSFGGIKIFFPNMLKWIGRAGAKLHSQLAQEIRSVISSNSGKVTMAAMEKMPLMKSVVYESLRIEPPVASQYGRAKHDMVIESHDASFEIKEGELLYGFQPFATKDPKIFDRSEEFVADRFIGEEGEKLLKHVLWSNGSETENPSINNKQCAGKDFVVLVSRLLLVELFLRYDSFEIEVGASPLGAAITLTSLRRASF

SEQ ID NO: 5982 - protein, 147 aa, Pisum sativum
GFTDKQEALVNSSSEFKQNLPGYSILFYTIVLEKAPAAKGLFSFLKDTAGVEDSPKLQAHAEQVFGLVRDSAAQLRTKGEVVLGNATLGAIHVQKGVTNPHFVVVKEALLQTIKKASGNNWSEELNTAWEVAYDGLATAIKKAMKTA

SEQ ID NO: 5983 - protein, 177 aa, Brassica napus
  misc_feature (38)..(38): Xaa can be any naturally occurring amino acid
  misc_feature (49)..(49): Xaa can be any naturally occurring amino acid
  misc_feature (82)..(82): Xaa can be any naturally occurring amino acid
  misc_feature (95)..(95): Xaa can be any naturally occurring amino acid
  misc_feature (139)..(139): Xaa can be any naturally occurring amino acid
  misc_feature (156)..(156): Xaa can be any naturally occurring amino acid
  misc_feature (159)..(159): Xaa can be any naturally occurring amino acid
MGREAKAKGDAAFSSGEFTSARNHFTEAINLSPTNHVXLFSNRSGGHAXSLHQYQGGLSGAKETGGLKPGWAKGYRRLGAAXHGGRETRSEEAAXAYSKGLGVGPRNEAVEAGLGDAAARARAGAPQNNPVGEAFKGAXSGAKLSADPATRRVLAXPGXGNMRREIQRRPSNLNLYL

SEQ ID NO: 5984 - protein, 343 aa, delta proteobacterium MLMS-1
MTVTSVHTLIIGAGPAGLAAATALARAGREVVVLERLPTVGAKPCAGGIPAGGLAGELPRELLERSFRQQRVVTDRHDFTISAPEPIIHTVDREKLGRWQRQQAEAAGAKILTATRALQIDHHQLESDRGSWRFSFLVGADGSNSLVRRHLGLGLQRAGLGITYQVPGDFAEMEWHLNPAHFGNGYAWIFPHGASASVGVYAYRGVIRSHQLHEHFRQWAEQRGIKLADSHPRASLVSFDYRGARFGNILLAGDAAGLASGLTGEGIAAAIYSGRQVAAAILADGEQPPDLSKLLRRHAIHRRLAVLSAKNSFARRLLLATLVLALRRQLLGAGALELIKPDK

SEQ ID NO: 5985 - protein, 143 aa, Vicia faba
GFTEKQEALVNSSSQLFKQNPSNYSVLFYTIILQKAPTAKAMFSFLKDSAGVVDSPKLGAHAEKVFGMVRDSAVQLRATGEVVLDGKDGSIHIQKGVLDPHFVVVKEALLKTIKEASGDKWSEELSAAWEVAYDGLATAIKAA

SEQ ID NO: 5986 - protein, 581 aa, Cichorium intybus
MKKSLSSFIALCFLVIVLETGRVKATSRDLNDVILLANQQIQQPYRTGYHFQPPSNWMNDPNGPMLYQGVYHFFYQYNPYAATFGDVIIWAHAVSYDLVNWIHLDPAIYPTQEADSKSCWSGSATILPGNIPAMLYTGSDSKSRQVQDLAWPKNLSDPFLREWVKHPKNPLIIPPEGVKDDCFRDPSTAWRGPDGVWRIVVGGDRDNNGMSLLYQSTDFVNWKRYDQPLSSAIATGTWECPDFYPVPLNSTNGLDTSVYGGSVRHVMKAGFEGHDWYTIGTYSPDRENFLPQNGLSLTGSTLDLRYNYGQFYASKSFFDDAKNRRVLWAWVPETDAPEDDIEKGWAGLQSFPRALWIDRSGKQLIQWPIEEIEELRQNEVNLQNKNLKPGSVLEIHGITASQADVTISFKLEELKDAEVLDTTSVDPQVLCNERGASSRGAIGPFGLLAMASKDLKEQSAIFFRVFQNQLGRYSVLMCSDLSRSTVRSNIDTTSYGAFVDIDPKSEEISLRNLIDHSIIESFGAGGKTCITSRIYPQFVNNEEAHLFAFNNGTQNVKISKMSAWSMKNAAFVVDQNVKSAA

SEQ ID NO: 5987 - protein, 153 aa, Lupinus luteus
GALTESQAALVKSSWEEFNANIPKHTHRFFILVLEIAPAAKDLFSFLKGTSEVPQNNPELQAHAGKVFKLVYEAAIQLQVTGVVVTDATLKNLGSVHVSKGVADAHFPVVKEAILKTIKEVVGAKWSEELNSAWTIAYDELAIVIKKEMNDAA

SEQ ID NO: 5988 - protein, 728 aa, delta proteobacterium MLMS-1
MSNSKGLYVMMFSIHGLVRGQSPELGRDADTGGQVKYVLELARALEQRPEVERVELVSRLIADKIVSKDYAKAVEPLGDQARLIRIQCGGRKYIRKELLWPHLDEMVDKTVKYLKKEGRIPDIFHGHYADGGYVARELAAFFGVPLVFTGHSMGAHKKGKLLGEGLSEEEINRRYQMDYRIGVEERIIRDSEQIIVSTSHEIDKQYALYESFAAGAYNVVPPGIDLETFYPYYHNDFEHGHGGDELARQTRAMLLQELDRFWSETHKPFILALCRPDQRKNISGLIKAYGEDKELQAIANLAIFAGIRKDITQMEENERHVLTRMLLLMDTYDLYGKLAIPKKHDFTLEVPELYRLAAERRGVFVNPALVEPFGLTLVEAAATGLPLVATKDGGPSDIIANCENGILIDPTDSGAIAEACRKVLVDRELWDHYSRNGIMGVRKHYSWEAHCVTTMEVYQRALEAMPTVRSRPSSKMPRAIGKRLAQVDRLLISDIDHTLVGDEAAMRELLELLEQHRQLVGWGVATGRSLEVTRELLSRYQIPEPDIIIAAVGTEIYYGPEFNLDNGWRQHLRHQWKPAEIRKALAGLSFLHPQENGDQHPFKVSYLMPDERDLLAKVHFTLQERKLHYTLEFSHGQFLDILPYRASKGKALRYLSYKWNIPLTKVMICGDSGSDAQMLRGETCGVVVGNYSRELEPLRGMRKLYFSKKEYAAGILDGIKHYKFLEKK

SEQ ID NO: 5989 - protein, 162 aa, Pseudomonas syringae pv. phaseolicola 1448A
MSAFHDIKLKALGGQELPMAGFKNKVVLVVNVASKCGLTPQYAALENLYQQYKDKGLEILGLPCNQFAGQEPGSEKEIAEFCELNYGVTFTLGEKLDVNGPDRHSLYRLLAGEGAEFPGDITWNFEKFLVGKNGGVSARFSPRTAPDDPAVIQAIEKALAQS

SEQ ID NO: 5990 - protein, 500 aa, Petunia x hybrida
MVLSKTVSQSDVSIHSTFASRYVRTSLPRFKMPDNSIPKEAAYQIINDELMLDGNPRLNLASFVTTWMEPECDKLMMDSINKNYVDMDEYPVTTELQNRCVNMIAHLFNAPLEDGETAVGVGTVGSSEAIMLAGLAFKRKWQNKMKAQGKPCDKPNIVTGANVQVCWEKFARYFEVELKEVKLSEGYYVMDPEKAVEMVDENTICVAAILGSTLNGEFEDVKRLNDLLVEKNKETGWDTPIHVDAASGGFIAPFIYPELEWDFRLPLVKSINVSGHKYGLVYAGIGWVVWRNKDDLPDELIFHINYLGADQPTFTLNFSKGSSQVIAQYYQLIRLGYEGYKNVMENCQENASVLREGLEKTGRFNIISKEIGVPLVAFSLKDNRQHNEFEISETLRRFGWIVPAYTMPPNAQHITVLRVVIREDFSRTLAERLVRDIEKVLHELDTLPARVNAKLAVAEEQAAANGSEVHKKTDSEVQLEMITAWKKFVEEKKKKTNRVC

SEQ ID NO: 5991 - protein, 342 aa, Geobacillus kaustophilus HTA426
MKAKVAINGFGRIGRMVFRRAINSPDLDIVAVNASYPPETLAHLVKYDSNHGKFDGEVIALEDGLLVNGKKVRLLNSRDPKQLPWKELDIDIVIEATGKFNDREKASLHLEAGAKRVILTAPGKNEDVTIVVGVNEHMLDIDRHFIISNASCTTNCLAPVVKVLDEAFGIENGLMTTVHAYTNDQKNIDNPHKDLRRARSCAQSIIPTTTGAAKALGLVLPHLKGKLHGMALRVPTPNVSLVDLVVDLKRDVTVDEVNEALIRAANGPLKGILDFTMEPLVSIDFNTNPHSAIIDGLSTMVMEGRKVKVLAWYDNEWGYSCRVVDLAHLVAAKMNERLSVNA

SEQ ID NO: 5992 - protein, 355 aa, Alternaria brassicicola
MAEFVRAQIFGTTFEITSRYTDLQPVGMGAFGLVCSAKDQLTSQAVAIKKIMKPFSTPVLSKRTYRELKLLKHLRHENIISLSDIFISPLEDIYFVTELLGTDLHRLLTSRPLEKQFIQYFLYQILRGLKYVHSAGVVHRDLKPSNILVNENCDLKICDFGLARIQDPQMTGYVSTRYYRAPEIMLTWQKYDVEVDIWSAGCIFAEMLEGKPLFPGKDHVNQFSIITELLGTPPDDVIQTICSENTLRFVQSLPKRERQPLSNKFKNAEPQAVDLLENMLVFDPKKRVRAEQALAHPYLAPYHDPTDEPIAEEKFDWSFNDADLPVDTWKIMMYSEILDYHNVDAAAQEQENNGS

SEQ ID NO: 5993 - protein, 159 aa, Hyacinthus orientalis
MSDEGASLRVEADAGASKTYPQQAGTIRKNGYIVIKNRPCKVVEVSTSKTGKHGHAKCHFVAIDIFTAKKLEDIVPSSHNCDVPHVTRTDYQLIDISEDGFVSLLTENGGTKDDLRLPTDDSLLTQIKDGFAEGKELVVSVMSAMGEEQINALKDVGPK

SEQ ID NO: 5994 - protein, 526 aa, Zea mays
MGARRRLQADAPPGHRHRQGAPAPDWSAGYLNGWLSQPTPVFGLRLWVLIGIAVGAAIVLVLLLIFVCLSRRRRRRRLAANPYYPADTKLLKKHLQQQATPTPTPTKDIQEIVRRQQEPAVQLAKAVPQPQPQPQTPPPPPPPQHRPPARKTPGSGVSATTSGGSERDGATPRSTGSGAGLPEVSHLGWGHWFTLRELEEATGGLAEENVIGEGGYGIVYKGTLHDSTLVAVKNLLNNRGQAEKEFKVEVEAIGRVRHKNLVRLLGYCVEGAYRMLVYEYVDNGNLDQWLHGDVGEVSPLTWDIRMNIMLATAKGLAYLHEGLEPKVVHRDIKASNILLDQQWNAKVSDFGLAKLLCSERSYVTTRVMGTFGYVAPEYASTGMLNERSDVYSFGVLIMEIITGRCPVDYTRAAGEVQLVEWLKNMVAERKAEEVVDSKMAERPPPKTLKRALLVALRCVDPDANKRPKMGHVIHMLEMDDLQFRDDKRPGAGRDGRRPQGPDRYSSKLGGGREPQQARAPASVQMR

SEQ ID NO: 5995 - protein, 319 aa, Wolbachia sp. Abt
LCDKKIQLGINLTKGLGAGALPDVGKGAAEESIDEIMEHIKDSHMLFITAGMGGGTGTGAAPVIAKAAREARAAVKDRAPKEKKILTVGVVTKPFGFEGVRRMRTAEFGLEELQKYVDTLIVIPNQNLFRIANEKTTFSDAFKLADNVLHIGIRGVTDLMVMPGLINLDFADIETIMSEMGKAMIGTGEAEGEDRAISAAEAAISNPLLDNVSMKGAQGILINITGGGDMTLFEVDAAANRVREEVDENANIIFGATFDQAIEGRVRVSVLATGIDGRNNKSETSPISQSEDSEKEKFKWPYSHSESTQDKTLETKPTE

SEQ ID NO: 5996 - protein, 139 aa, Brassica napus
ADARIHFLANELLYGESFPISEEALDSSFCLPIGKAKIEREGKDVTITTFSKMVGFALKAAEKLAEEGISAEVINLRSIRPLDRATINASVRKTSRLVTVEEGFPQHGVCAEICASVVEESFSYLDAPVERISRADVPM

SEQ ID NO: 5997 - protein, 86 aa, Sulfolobus tokodaii str. 7
MFVDCWAPWCAPCHIYEPIFNKMAEKYKDKIVFGRLNVDENPKTADKYGVMNIPTTLIFLNGNLVDQIVGAVDETTLEEYIKKYLS

SEQ ID NO: 5998 - protein, 319 aa, Wolbachia sp. Abt
LCDKKIQLGINLTKGLGAGALPDVGKGAAEESIDEIMEHIKDSHMLFITAGMGGGTGTGAAPVIAKAAREARAAVKDRAPKEKKILTVGVVTKPFGFEGVRRMRTAEFGLEELQKYVDTLIVIPNQNLFRIANEKTTFSDAFKLADNVLHIGIRGVTDLMVMPGLINLDFADIETIMSEMGKAMIGTGEAEGEDRAVSAAEAAISNPLLDNVSMKGAQGILINITGGGDMTLFEVDAAANRVREEVDENANIIFGATFDQAMEGRVRVSVLATGIDGRNNKSETSPISQSEDSEKEKFKWPYSHSESTQDNTLETKPTE

SEQ ID NO: 5999 - protein, 321 aa, Xylella fastidiosa Temecula1
MSDYPASAKHSRLLILGSGPAGWTAAVYAARANLQPVLITGLQQGGQLMTTTEVDNWPGDAHGLMGPDLMERMQAHAERFETEVIFDQIYKADLSTRPFTLFGDSGIYTCDGLIIATGANAKYLGIPSEEAFKGRGVSACATCDGFFYRDQDVAVIGGGNTAVEEALYLSNIARKVYLIHRRDKLRAEKIMQNKLFSKAATGKIELIWNNAVEEVLGNDAGVTGVRIRSTQDSSTRDIDVQGLFVAIGHHPNTDLFAGQLAMNNGYLQIHSGTAGNVTQTSVEGVFAAGDVADQHYRQAITSAGFGCMAALDAERFLDKGN

SEQ ID NO: 6000 - protein, 326 aa, Archaeoglobus fulgidus
MKKIVVIPGDGIGKEVMEAAMLILEKLDLPFEYSYYDAGDEALEKYGKALPDETLEACRKSDAVLFGAAGETAADVIVRLRRELGTFANVRPAKAIEGIECLYPGLDIVVVRENTECLYMGFEFGFGDVTEAIRVITREASERIARYAFELAKREGRKKVTALHKANVMKKTCGLFRDVCREVAKDYPEIQYNDYYIDAACMYLVMDPFRFDVIVTTNMFGDIVSDLAAGLVGGLGLAPSANVGERTAIFEPVHGAAFDIAGKGIANPTAMILTACMMLRHFGYVEEAKKVEEAVEKTIKEGKKTPDLGGNLKTMEFANEVASLLD

SEQ ID NO: 6001 - protein, 320 aa, Escherichia coli O6
MIKKIGVLTSGGDAPGMNAAIRGVVRSALTEGLEVMGIYDGYLGLYEDRMVQLDRYSVSDMINRGGTFLGSARFPEFRDENIRAVAIENLKKRGIDALVVIGGDGSYMGAMRLTEMGFPCIGLPGTIDNDIKGTDYTIGFFTALSTVVEAIDRLRDTSSSHQRISVVEVMGRYCGDLTLAAAIAGGCEFVVVPEVEFSREDLVNEIKAGIAKGKKHAIVAITEHMCDVDELAHFIEKETGRETRATVLGHIQRGGSPVPYDRILASRMGAYAIELLLAGYGGRCVGIQNEQLVHHDIIDAIENMKRPFKGDWLDCAKKLY

SEQ ID NO: 6002 - protein, 434 aa, Pasteurella multocida subsp. multocida str. Pm70
MFEPVDYDLGEMDGALIKVVGVGGGGGNAVNHMVANMIKNDIGGTLLDEAVMNSDEHGKIIFYAVNTDAQALRKSQVQQTVQIGGSTTKGLGAGANPNVGRKAAEDDQEAIRAMLEGADMVFIAAGMGGGTGTGAAPIVAQIAKELGILTVAVVTKPFSFEGKKRMLFAEMGIKELSKHVDSLIIIPNEQLAKALPKNATLLQAFSAANDVLRNSVTGISDMITSPGLINVDFADVRTVMSEMGQAMIGFGSCKGTAGEGRAEEATRIAVKSDLLERVDLSGAKGVLVNITSGMDLGLDEFNVVGKTVAEFASQEATVVIGTTLVPEMVDEIRVTIVATGIGDIEAPEMPMPHRQQQPIQHTVGESRPLQPANLSGHPTPSSGYGAQQGHVPPRPTDLTKTSILDTPITARTSNNLQKDENLFNVQNFIRNTDK

SEQ ID NO: 6003 - protein, 338 aa, Oryza sativa (japonica cultivar-group)
MGAGNGEVRYGGGGAGAGEAAVMADDGTTVFRGTAQPPVRTTVALALWLGAIHFNAFLLLASLFLFPRRVAAMVLATQLFFMFAPVNDMSRLGRKIARFISKCVIGYFPVTLHVEDYKAFDPNRAYVFGYEPHSVLPIALGVLLELVGFMPLPKIKVLASSAVFYTPFLRQIWTWLGLVPASRKNFYSYLKAGYSCVIVPGGVQEMLHMDHDSEVAFLKSRKGFVKIAMETGSPLVPVFAFGQSYVYKWWRPGGKLIVKIARAIKFTPIMFWGKFGTPIPFATPMHVVVGRPIEVKKNAQPTFDEINEVHEQFVVALQELFEKYKTKAGYPNLHLRVL

SEQ ID NO: 6004 - protein, 574 aa, Ralstonia solanacearum
MKASQFFISTLKEAPADAEIVSHKLMMRAGMIKKLGAGLYTYMPVGLRVIRKVEQIVREEMNASGAVEVLMPVVQPAELWQETGRWDKMGDEMMRVKDRHERDLVIQPTSEEVVTDIARTEIRSYKQMPVNFYQIQTKFRDERRPRFGIMRGREFTMKDAYSFDRDAEGLKVSYEKMYGAYTRIFQRFGLEFRAVAADNGAIGGSGSHEFHVIADTGEDAIVYSPDSDYAANIEAAEALAPAMPRGAATEALTKTHTPKRAKCEAVAEQLGIALQRTVKSIVLAKDVEGGEPQIWLLLLRGDHELNEIKASKVPGLADFRFATEGEILRAFGTPPGYLGPIGTKQPVKVVADRTVAAMSDFVVGANEEDFHYTGVNWGRDLPEAEVYDLRNVVEGDPSPDGKGTLAICRGIEVGHVFMLGTRYSESMSATFLDENGKTQPMMMGCYGIGITRILGAAIEQNYDARGIIWPVSIAPFEVVICPVGYDRSEAVRAEADRLHAELAAAGIDVILDDRGERPGAMFADWELIGVPFRVVVGERGLKDGKLELQGRRDEAAAAVAPADVLATLKSRLAQ

SEQ ID NO: 6005 - protein, 106 aa, Oceanicola granulosus HTCC2516
MATVAVTDDTFDSEVRQSDIPVVVDFWAEWCGPCKQIGPALEEIAAEMDGKVKIVKVNVDENPNSPAQMGIRGIPALFIFKDGEVVSNRAGAAPKAALQGWIQDSI

SEQ ID NO: 6006 - protein, 314 aa, Mycoplasma gallisepticum R
MMSYRVDGKNDLFDLVIVGSGPAGISAAIYAKRANINVCVVEGSAPGGKILKTGFIDNYPGYSSIKGPDLAVNMLNQLNSLSVPIFYSQVNAIEKQENYFFTYLDSKTLLSKAVIVATGTLERKLGLANEAKFETKGISYCAICDGPLYKNRDVAVVGGGNAAVEESLYLSGICNKVYLVHRRDEFRADSYAVAKLKEKKNVHFLLSHVVDSYLGDQTLKGIKVKNLKNNELTDLTIDCLFPYIGAVPNTSFLKPFNILNEEGYVLVDANQKTSVDGLYAAGDCVHKKIRQISTAISDGTIAALAVNDFFKLHK

SEQ ID NO: 6007 - protein, 660 aa, Chromobacterium violaceum ATCC 12472
MSDSPPIPWHSGEREMQRRAGSLEHMAATGPRVVRDHMPEQHRDFFRQLPFMVMAAVDEAGRPWAGIVEGRPGFVDSPDPRSLRIAAQPSPADPLRDCLRPGAAVGLLGIELHTRRRNRMNGELTAMDDGGFAVAVGQSFGNCPKYIQLREFEFSREPGPRILGSVEWMDELDDDARAAIAAADTFFVASAVQDSHGRWQADASHRGGKPGFVKMDGDTLTIPDFAGNGYFNTLGNLLLQPRAGLLFVDFASGDTLQLAGRAEVPDTETPPPFAGAERWWTFRVERVVRRRNALALRWTLREYSPFALATGAWPHAAPERQWLPLRVVHAEDESDAVRSIYLEPADGSAPPPFLPGQHLSLKVAGVDGVRMRNYTLSQTGGYRISVKRQGKASARLHQLAPGDIVEALPPRGDFTLARADRPIALLAGGIGITPLLAMLHQLTARPAAMPPTLLAYATRTIAERAFDAELEALQAKAAGRLRIVKAASQPETGRRLGVDYQHAGHVDIDLLRRNGLSLDGDFYLCGPAGFMQALYEQLIAAGVDDKRIHAEAFGPAGIQRIGQVAGKRPPPADHAVPVRFSASSIDAEWRPGQSLLELAESCGLNPDFSCRGGACGSCRAALLSGEATYLQPPEYAARSGEILLCCAYPAEGSGKLEINL

SEQ ID NO: 6008 - protein, 145 aa, Glycine max
MGAFTEKQEALVSSSFEAFKANIPQYSVVFYTSILEKAPAAKDLFSFLSNGVDPSNPKLTGHAEKLFGLVRDSAGQLKANGTVVADAALGSIHAQKAITDPQFVVVKEALLKTIKEAVGDKWSDELSSAWEVAYDELAAAIKKAF

SEQ ID NO: 6009 - protein, 497 aa, Zea mays
MVLSHASSGRDDDDAVASTFASRYVRERLPRYRMPERSIPREAAQQIISDELMLDGNPRLNLASFVTTWMEPECDKLIMDSINKNYVDMDEYPVTTELQNRCVNMIAHLFNAPIKEDETAIGVGTVGSSEAIMLAGLAFKRKWQNKRKEQGKPCDRPNIVTGANVQVCWEKFARYFEVELKEVKLSEGYYVMDPVKAVEMVDENTICVAAILGSTLTGEFEDVKQLNDLLTEKNKETGWDVPIHVDAASGGFIAPFLYPELEWDFRLPLVKSINVSGHKYGLVYPGVGWVIWRSKDDLPEELIFHINYLGTDQPTFTLNFSKGSCQIIAQYYQLIRLGFEGYRNIMENCQENAAILREGIAATGRFDVLSKDAGVPLVAFSLRDSSRFSVFDVSENLRRFGWIVPAYTMPADAEHVAVLRVVVREDFSRSLAERLVSDVRKILRELDARATHAVRVSTATAEQSGDGVVAKKSVLEIEREVAARWMNAVNKKKTGVC

SEQ ID NO: 6010 - protein, 227 aa, Triticum aestivum
MDSEHWISRLAAAKRFYAAQLGHAGADRAGMDELDMDGDENAGRPDFACPYCYEDHDVASLIAHLEEDHPFEPHAAPCPICSEKVSKDMLNHITMQHGYLFKNRRRLRRFAVPGSQSLSLLSRDLREAHLQVLLGGGGHRSSNNNAANISADPLLSSFGLSFPTLDAEETSKLSTPAQSDVPVLKEAAARPWRSSMDSSLTREEREQASVRAMFVQDLLLSTLFRDQ

SEQ ID NO: 6011 - protein, 365 aa, Candida boidinii
MSIIEKKIVLLPGDHVGVEVVEEAVKILKSISEVKPEIQFKFENHLIGGAAIDATGVPLPDEALEAAKKSDAVLLGAVGGPKWGTGEVRPEQGLLKIRKELNLYANLRPCNFASDKLLDLSPLKSDIVKGTDFTVVRELVGGIYFGDRVEDDGSGFASDSESYSVPEVERITRMAAFLSLQNDPPLPIWSLDKANVLASSRLWRKTVDRVIKEEFPKLTVQHQLIDSAAMILVKSPTKLNGIVITNNMFGDIISDEASVIPGSLGLLPSASLASLPDTNQAFGLYEPCHGSAPDLPKNKVNPIATILSAAMMLKLSLNLVKEGNAVEEAVRKVLDQGIMTGDLGGNNSTTEVGDAIAKEVKLLLA

SEQ ID NO: 6012 - protein, 410 aa, Coxiella burnetii
EFGESGPDPLITQQHMEELKKLYGRYQNAIKRYGKKAPATLKHQKALAELFSTFKLSIKQFNRLTGQLRRMLRAARAQERLIMSYCVVKAKTPRKKFIASFPHNETNMKWLEQYKNENKEQAKRLEKYSKEIYRAQRNLAQLEEQNNLNIQEIKEINRRVAIGEAKSRRAKKEMIEANLRLVISIAKKYTNRGLQFLDLIQEGNIGLMKAVDKFEYRRGYKFSTYATWWIRQAITRSIADQARTIRIPVHMIETINKLNRISRQILQETGIEATPEELGRRMDMPEEKVRKVLKIAKEPISMETPIGEDEDSNLGDFIEDINMESPVDFATSAGLMEATRRNFVYAYPARSQVLRMRFGIDMNTDHTLEEVGNNSDVTRERIRQIEAKALRKLRHPSRAEKLHSFIEVEE

SEQ ID NO: 6013 - protein, 145 aa, Phaseolus vulgaris
GAFTEKQEALVNSSWEAFKGNIPQYSVVFYTSILEKAPAAKNLFSFLANGVDPTNPKLTAHAESLFGLVRDSAAQLRANGAVVADAALGSIHSQKGVSNDQFLVVKEALLKTLKQAVGDKWTDQLSTALELAYDELAAAIKKAYA

SEQ ID NO: 6014 - protein, 646 aa, Xanthomonas axonopodis pv. citri str. 306
MFNINRLLRSRPRTDTADQAPAEDRPSHQPSAAEGLLSPLLARPRRRESAAAPRNAGQRSPFRSPLRASGQPAALAGASSAPPRSIEHDIDDWLAQSLPMAERVRTGYNLHDGQRDTSREVLQSVADAIRRAATRHSTELVLDYGLPATTLPDAIGRLDALQKLTLLHTGLQSLPDSLGQLHQLRHLQIAGALGLKTLPPSLTRLSNLRTLQLTMIPLDELPVGIGRMQGLRSLTLGGGHYARLPASIVELSGLTELRMPHSSHFRELPENIGLMQGLRSLEVASNSELEQLPGSLTQLHRLEKLTLSSNRRLAHLPEDIGQLRGLTELSLKNCAALRQLPDSVGDLAQLQLLDLRGTGLQTLPQSLARLPAQCDIKVPDHLAGQLLQIRDPERAAREPQRAAQRLAERRRRAPVPAAQQAGASWNRMPEFARVLRTVDADLGERFDKWTQGLAQTARISGASITPADMPLLDQVVTEAIRSPEFRSSFGQFLSDHTLKTLNMDGMTQVGGFGPAVRGDVKTAFAEMLKHKLMHTQDHQTALGLLQDALQNPDLGLSREMLLRSRNELTGRVEMWPPLKAYISMHDVEGQAAQDAAITWTMAQFEEAQQGGIGDAEAKQESERAQANANRFIEQRARVLLREWDIR

SEQ ID NO: 6015 - protein, 424 aa, Arabidopsis thaliana
MAVEYVCCSPNFFIHIAVIVFLVLFAGLMSGLTLGLMSLSLVDLEVLAKSGTPEHRKYAAKILPVVKNQHLLLVTLLICNAAAMETLPIFLDGLVTAWGAILISVTLILLFGEIIPQSICSRYGLAIGATVAPFVRVLVFICLPVAWPISKLLDFLLGHRRAALFRRAELKTLVDFHGNEAGKGGELTHDETTIIAGALELSEKMVKDAMTPISDIFVIDINAKLDRDLMNLILEKGHSRVPVYYEQPTNIIGLVLVKNLLTINPDEEIPVKNVTIRRIPRVPEILPLYDILNEFQKGLSHMAVVVRQCDKIHPLPSKNGSVKEARVDVDSEGTPTPQERMLRTKRSLQKWKSFPNRASSFKGGSKSKKWSKDNDADILQLNGNPLPKLAEEEEAVGIITMEDVIEELLQEEIFDETDHHFEDS

SEQ ID NO: 6016 - protein, 341 aa, Neisseria gonorrhoeae
MGIKVAINGYGRIGRQVLRSIYDYQIQDQLQIVAVNASGSLETNAHLTKFDTVHGRFEADVSHDGGNLIVNGDKIPFFSTRNPAELPWKELGVDLVMECTGAFTSKEKAKIHLESGAKKVLISAPGGDDVDATVVYGVNDSVLTADMTVVSNASCTTNCLSPVAKVLSESVGIVKGAMTTIHALTNDQTVTDVRHKDLRRARSGVENMIPTKTGAAKAVGLVLPELKGRLDGLAIRVPTVNVSLVDLSLQAARDTTVEEINALMKAASEAGALKGVLGYNTLPLVSMDFNHTTEASHFDATLTKVVDGNMVKVFAWYDNEWGFSCQMLNTARRMFGLEVRP

SEQ ID NO: 6017 - protein, 343 aa, Atropa belladonna
MATLVSNWSTNNVSESFVAPLEKRAENDVPLGNDVPIIDLQQDHLVVVQQITKACQDFGLFQVINHGLPEKLMAETMDVCKEFFALPAEEKEKLQPKGEPAKFELPLEQKAKLYVEGEQLSDEAFLYWKDTLAHGCHPLDEELVNSWPEKPATYREVVAKYSVEVRKLTMRILDYICEGLGLKLGYFDNELSQIQMMLTNYYPPCPDPSSTLGSGGHYDGNLITLLQQNLPGLQQLIEDAKWIAVEPIPTAFVVNLGLTLKVITNEKFEGSIHRVVTNPTRDRVSIATLIGPDYSCTIEPAKELLSQDNPPLYKPYSYAEFGEIYLSDKSDYDAGVKPYKINA

SEQ ID NO: 6018 - protein, 78 aa, Zea mays
GTVVLRENSVLKRAVSIQHERQKEFDERSYEVQNLKHLVVKNQEQGRTLEMNNYALTMHFKQAQQNSYIPGRYNPEVF

SEQ ID NO: 6019 - protein, 821 aa, Saccharomyces cerevisiae
MENITQPTQQSTQATQRFLIEKFSQEQIGENIVCRVICTTGQIPIRDLSADISQVLKEKRSIKKVWTFGRNPACDYHLGNISRLSNKHFQILLGEDGNLLLNDISTNGTWLNGQKVEKNSNQLLSQGDEITVGVGVESDILSLVIFINDKFKQCLEQNKVDRIRSNLKNTSKIASPGLTSSTASSMVANKTGIFKDFSIIDEVVGQGAFATVKKAIERTTGKTFAVKIISKRKVIGNMDGVTRELEVLQKLNHPRIVRLKGFYEDTESYYMVMEFVSGGDLMDFVAAHGAVGEDAGREISRQILTAIKYIHSMGISHRDLKPDNILIEQDDPVLVKITDFGLAKVQGNGSFMKTFCGTLAYVAPEVIRGKDTSVSPDEYEERNEYSSLVDMWSMGCLVYVILTGHLPFSGSTQDQLYKQIGRGSYHEGPLKDFRISEEARDFIDSLLQVDPNNRSTAAKALNHPWIKMSPLGSQSYGDFSQISLSQSLSQQKLLENMDDAQYEFVKAQRKLQMEQQLQEQDQEDQDGKIQGFKIPAHAPIRYTQPKSIEAETREQKLLHSNNTENVKSSKKKGNGRFLTLKPLPDSIIQESLEIQQGVNPFFIGRSEDCNCKIEDNRLSRVHCFIFKKRHAVGKSMYESPAQGLDDIWYCHTGTNVSYLNNNRMIQGTKFLLQDGDEIKIIWDKNNKFVIGFKVEINDTTGLFNEGLGMLQEQRVVLKQTAEEKDLVKKLTQMMAAQRANQPSASSSSMSAKKPPVSDTNNNGNNSVLNDLVESPINANTGNILKRIHSVSLSQSQIDPSKKVKRAKLDQTSKGPENLQFS

SEQ ID NO: 6020 - protein, 341 aa, Neisseria gonorrhoeae
MGIKVAINGYGRIGRQVLRAIYDYQIQDQLQIVAVNASGSLETNAHLTKFDTVHGRFEADVSHDGGNLIVNGDKIPFFSTRNPAELPWKELGVDLVMECTGSFTSKEKAKIHLESGAKKVLISAPGGDDVDATVVYGVNDSVLTADMTVVSNASCTTNCLSPVAKVLSESVGIVKGAMTTIHALTNDQTVTDVRHKDLRRARSGVENMIPTKTGAAKAVGLVLPELKGRLDGLAIRVPTVNVSLVDLSLQAARDTTVEEINALMKAASEAGALKGVLGYNTLPLVSMDFNHTTEASHFDATLTKVVDGNMVKVFAWYDNEWGFSCQMLNTARRMFGLEVRP

SEQ ID NO: 6021 - protein, 404 aa, Bacillus halodurans C-125
MDKKLFDPIEEAIYELMQGRVVIVCDDEDRENEGDFVALAEKATPEVINFMITHGRGLVCTPITEERAKELDLVPMVDHNTDPHGTAFTVSIDHQMTTTGISAHERAMTIQALIDKKTKKHHFKRPGHIFPLIAKNGGVLRRAGHTEAAVDLARLSGAEPAGVICEIIKEDGSMARVPDLRKIADQFELKMITIKDLIEYRHRKDKLVKREVDISLPTDFGSFRAIGYTDVIDGKESVALVKGQIVEGEPTLVRVHSECLTGDVFGSHRCDCGPQLQAALTQIEQQGKGILLYMRQEGRGIGLMNKLKAYKLQEEGYDTVEANEKLGFPADLRDYGMGAQILRDLGVSKMRLLTNNPRKITGLKGYGLEVVERVPLQLPHNKDNERYLKTKHEKLGHLLNFTHS

SEQ ID NO: 6022 - protein, 341 aa, Neisseria gonorrhoeae
MGIKVAINGYGRIGRQVLRAIYDYQIQDQLQIIAVNASGSLETNAHLTKFDTVHGRFEADVSHDGGNLIVNGDKIPFFSTRNPAELPWKELGVDLVMECTGAFTSKEKAKIHLESGAKKVLISAPGGDDVDATVVYGVNDSVLTADMTVVSNASCTTNCLSPVAKVLSESVGIVKGAMTTIHALTNDQTVTDVRHKDLRRARSGVENMIPTKTGAAKAVGLVLPELKGRLDGLAIRVPTVNVSLVDLSFQAARDTTVEEINALMKAASEAGTLKGVLGYNTLPLVSMDFNHTTEASHFDATLTKVVDGNMVKVFAWYDNEWGFSCQMLNTARRMFGLEVRP

SEQ ID NO: 6023 - protein, 857 aa, Medicago truncatula
MAILLTMLDIFIIITINVFVVLSHVSYATDTITKSASLSNGSTLVSKDGTFEMGFFRPGKSLNRYVGIWYKNIPVRRVVWVANRNNPTKDDSSKLIISQDGNLVLLNHNDSLVWSTNASRKASSPVVQLLNNGNLVLRDEKDNNEESFLWQGFDHPCDTLLPGMTFGYNRKLDFYWNLTAWKNEDDPSSGDLYASVVFTSNPESMIWKGSTKICRSGPWNPLSSGVVGMKPNPLYDYKVVNNEDEVYYQFVLRNSSVTSIAVLNQTLLIRQRLVYVPESKIWSVYQIMPSDTCEYYNVCGANAQCTIDGSPMCQCLPGFKPKSPQQWNSMDWTQGCVRGGNWSCGIKNRDGFQKFVRMKLPDTTNSWINLNMTLQDCKTKCLQNCSCTAYTYLDPNGAVSGCSLWFNDLIDLRLSQSSEGDDLYIRVDRDSNFGHIHGRGKKVVMVVSITVSMLLVMLLVLSYVYIFKPKLKGKKERDGGEHEDFDLPFFDLATIIKATDNFSTNNKLGEGGFGPVYKATLQDGHVIAVKRLSGNSEQGSKEFKNEVILCVKLQHRNLVKVLGCCIEGDEKLLIYEYMPNKSLDSFLFDPTQSKLLSWSMRLNILNAIARGIQYLHQDSRLRIIHRDLKASNILLDNEMDPKISDFGMARMCGGDQIEGKTRRIVGTYGYMAPEYVIHGLFSIKSDVFSFGVLLLETISGKKNRTLTYHEHDHNLIWHAWRLWNEGTPHELIDECLRDTCVLHEALRCIQIGLLCVQHVPIDRPNMKYVIMMLDSENTLPQPKEPGFLNQRVLIEGQPSSENGITISLLSGLECFTASTFSDSRINTKVLAVKFGNIQPEVKKCQTALVTSSLTIVQ

SEQ ID NO: 6024 - protein, 366 aa, Geobacillus thermocatenulatus
MELFKYMEMYDYEQVLFWQDKESGLKAIIAIHDTTLGPALGGTRMWMYNSEEEALEDALRLARGMTYKNAAAGLNLGGGKTVIIGDPRKDKNEAMFRAFGRFIQGLNGRYITAEDVGTTVADMDIIYHETDYVTGISPEFGSSGNPSPATAYGVYRGMKAAAKEAFGSDSLEGKVVAVQGVGNVAYHLCRHLHEEGAKLIVTDINKEAVARAVEEFGAKAVDPNDIYGVECDIFAPCALGGIINDHTIPQLKAKVIAGSVNNQLKEPRHGDMIHEMGIVYAPDYVINAGGVINVADELYGYNRERSMKMIEQIFDNIEKVFAIAKRDNIPTYAADRMAEERIETMRKARSQFLQNGHHILSRRRAR

SEQ ID NO: 6025 - protein, 341 aa, Neisseria gonorrhoeae
MGIKVAINGYGRIGRQVLRAIYDYQIQDQLQIVAVNASGSLETNAHLTKFDTVHGRFEADVSHDGGNLIVNGDKIPFFSTRNPAELPWKELGVDLVMECTGAFTSKEKAKIHLESGAKKVLISAPGGDDVDATVVYGVNDSVLTADMTVVSNASCTTNCLSPVAKVLSESVGIVKGAMTTIHALTNDQTVTDVRHKDLRRARSGVENMIPTKTGAAKAVGLVLPELKGRLDGLAIRVPTVNVSLVDLSLQAARDTTVEEINALMKAASEAGALKGVLGYNTLPLVSMDFNHTTEASHFDATLTKVVDGNMVKVFAWYDNEWGFSCQMLNTARRMFGLEVRP

SEQ ID NO: 6026 - protein, 165 aa, Nocardia farcinica IFM 10152
MPEPANTESTVVATADLADEIGPEIRSCDTQFIQFGGRAAFSGRITTIRCFQDNLLVKQTLGEPGEGKVLVVDGGASVHTALVGDIIAGRGVDNGWAGVIVNGAVRDSAILRTLDIGIKALGTNPRKSTQTGSGERDVPVEFGGVTFVPGEMLYSDHDGIVVRAE

SEQ ID NO: 6027 - protein, 115 aa, Medicago truncatula
MKSSLIAFSALVLLIFVASNSEAAISCSDVIKDLKPCVSYLVSGSGQPPAACCSGAKALASAVSTSEDKKAACNCIKSTSKSIKINSQLAQALAGNCGINTPITISPDADCSKVG

SEQ ID NO: 6028 - protein, 341 aa, Neisseria gonorrhoeae
MGIKVAINGYGRIGRQVLRAIYDYQIQDQLQIVAVNASGSLETNAHLTKFDTVHGRFEADVSHDGGNLIVNGDKIPFFSTRNPAELPWKELGVDLVMECTGSFTSKEKAKIHLESGAKKVLISAPGGDDVDATVVYGVNDSVLTADMTVVSNASCTTNCLSPVAKVLSESVGIVKGAMTTIHALTNDQTVTDVRHKDLRRARSGVENMIPTKTGAAKAVGLVLPELKGRLDGLAIRVPTVNVSLVDLSFQAARDTTVEEINALMKAASEAGALKGVLGYNTLPLVSMDFNHTTEASHFDATLTKVVDGNMVKVFAWYDNEWGFSCQMLNTARRMFGLEVRP

SEQ ID NO: 6029 - protein, 319 aa, Geobacillus kaustophilus HTA426
MKRIGVLTSGGDSPGMNAAIRAVVRKAIYHGVEVYGIYHGYAGLIAGNIKKLEVGDVGDIIHRGGTILYTARCPEFKTEEGQKKGIEQLKKHGIEGLVVIGGDGSYQGAKKLTEHGFPCVGVPGTIDNDIPGTDFTIGFDTALNTVIDAIDKIRDTATSHERTYVVEVMGRHAGDIALWSGLAGGAETILIPEADYDMDDIIARLKRGHERGKKHSIIIVAEGVGSGVDFGRQIQEATGFETRVTVLGHVQRGGSPTAFDRVLASRLGARAVELLLEGKGGRCVGIQNNQIVDHDIAEALAKTHTVDQRMYTLSKELSI

SEQ ID NO: 6030 - protein, 50 aa, Glycine max
SFGLVLCSGPSRFDWDRDTKAWIYRRNKANLYKILEGEFEQLCGKPIDLS

SEQ ID NO: 6031 - protein, 366 aa, Agrobacterium tumefaciens str. C58; identical to SEQ ID NO: 681

SEQ ID NO: 6032 - protein, 529 aa, Fragaria x ananassa
MGNCCVTPPQTGSPLKNKKNKPNPFAIDYVVANGGKLSVLKNPTGTEIEQTYELGRELGRGEFGITYLCTDKATNENYACKSISKQKLRTAVDIEDVRREVEIMKHLPKHPNIVSLKDTYEDDNAVHLVMELCEGGELFDRIVSRGHYTERAAAAVTKTIVEVVQMCHKHGVMHRDLKPENFLFANKKETAPLKAIDFGLSVFFKPGERFSEIVGSPYYMAPEVLRRNYGPEVDVWSAGVILYILLCGVPPFWAETEQGVAQAIIRSVVDFKRDPWPKVSDNAKDLVKKMLDPDPKRRLTAQQVLDHTWLQNAKRAPNVSLGETVRARLKQFSVMNKLKKSALKVIAEHLSQEEVAGIQEGFKIMDTSNKGKINIDELRVGLHKLGHQIPDADVHILMEAGDVDNDGYLDYGEFVAISVHLRRMGNDDEHLRKAFDFFDQNKSGFIEVEELRTALATEVDDHVEDVISAIISDVDTDKDGKISYEEFATMMKAGTDWRKASRQYSRERFNSLSLKLMRDGSLEGKTESK

SEQ ID NO: 6033 - protein, 794 aa, Dechloromonas aromatica RCB
MFRLGLISRIAFLVIGVEVAAFGVLGAFYIDRFNTALDTNIHSRLSLVGQMIAGDELAVSAISRVSFMSELLGAPYLKGIVVGGNGRVIVSTDASQLGQEARNVSDIDPRWLDASAADEQFVIGPDSLCSIRHIHGAANGAPPLYITIITISTAALNAQKRSVALWGQIGSLLFILLSSAAIVLIAQHLITRRVKLSLDVLKKVEDGAIDARIPVSLEDELGQLQRGINSMTAKLGELLRQHRGNADELKKQKELLQSVIEHTPLRVFWKDKDCRYLGCNSLFALDAGLTSPDELIGKSDFELSWREQAELYRADDQAVMVSGVPKIDFEEPQTTPDGHTIWLSTSKVPLHTGDDEVIGVLGIYTDITERKNTAQELAKHRLHLEQLVEERTEELLLAKDAAENANMAKSAFLANMSHEIRTPLNAIAGMAHFIRRGGLSPKQSEQLEKLEGASTHLLNIINAILELSKIEAGKFEIEESPIKVESILGNVLSLLHDRAEAKHIKLLCEIELLPKDLLGDATRLQQALLNYTTNAVKFTETGSVTLRVHPVDENAISTVLRFEVRDTGIGIAPEVLPKLFSAFEQADNSTTRKYGGTGLGLAITKKLAEMMGGDSGAESTLGRGSTFWFTVRLRKGPAQVAETQFSPVTDAEMQLKTNFAGRRILLAEDEPINREITLSLLEDVGLTVDIAEDGIEALKLAGANNYALVLMDMQMPGMDGLEATRSIRRLPVSGDVLILAMTANAFVEDKQRCLDAGMNDFISKPVDPKLLFNKLLKWLSQGSPRREDTQLSVN

SEQ ID NO: 6034 - protein, 189 aa, Brassica napus
  misc_feature (89)..(89): Xaa can be any naturally occurring amino acid
  misc_feature (103)..(103): Xaa can be any naturally occurring amino acid
ISDPALCTNHCLLIYRLGSSYASYYDVFVTQHDVLRDLALHLSNKGKVNIRKRLLMPKREKALPKEWGRNIDEPYRAQIVSIHTGKRLXKVQLYITRMVMLTXNYVSIAEEMDEMGWSDFEMDFPKAEILILNFSSDKYVLPPFITKMSKLRVLVIINNGMSPAVLHDFSIFANLSYLRTLWLERVHVP

SEQ ID NO: 6035 - protein, 487 aa, Ralstonia eutropha JMP134
MNAPQFPDKAVSPQFRAEALRIDGQKVVRERVIEVRNPYDGTLVGTVPKATVEDVRRAYEVAHGYRSTLTRYERAAILNRAAALLRERTEEASDLITLESGLSKKDSIYEIGRVADVLGFAATETLRDDGQMFSCDLTPHGKRRRVMTQREPLLGAICAITPFNHPMNQVAHKVAPSIATNNRMVLKPSEKVPLSAYYLADLLYESGLPPQMLQVITGDPREIADELITHPLVDLITFTGGVAIGKYIANKAGYKRVVLELGGNDPLIVLDDADLDRASDLAVQGSYKNSGQRCTAVKRMLVHEAVAARFTELVVEKTRAWRYGNPMDRSVDMGTVIDAQAAELFEARVNEAVAQGARLLIGNKRNGASYSPTVLDRVDPSMTVVREETFGPVSPIITFRDVDDAIRISNGTAFGLSSGVCTNRMDDFTKIANSLQVGTVNLWEVPGYRIELTPFGGIKDSGLGYKEGVQEAVKSFTNLKTVTLPWG

SEQ ID NO: 6036 - protein, 334 aa, Clostridium acetobutylicum
MAKIAINGFGRIGRLALRRILEVPGLEVVAINDLTDAKMLAHLFKYDSSQGRFNGEIEVKEGAFVVNGKEVKVFAEADPEKLPWGDLGIDVVLECTGFFTKKEKAEAHVRAGAKKVVISAPAGNDLKTIVFNVNNEDLDGTETVISGASCTTNCLAPMAKVLNDKFGIEKGFMTTIHAFTNDQNTLDGPHRKGDLRRARAAAVSIIPNSTGAAKAISQVIPDLAGKLDGNAQRVPVPTGSITELVSVLKKKVTVEEINAAMKEAADESFGYTEDPIVSADVVGINYGSLFDATLTKIVDVNGSQLVKTAAWYDNEMSYTSQLVRTLAYFAKIAK

SEQ ID NO: 6037 - protein, 149 aa, Dunaliella viridis
VAIKKIQSVFDNVADATRILREIKLLRLLKHSDVVDIKHVMLPPDPKTFKDIYVIFELMESDLHTVIEANDDLTHDHHKVFLYQLLRGLDFIHSSGVLHRDLKPKNILANSNCKLKICDFGLARPFISDPATSPIFWTDYVATRWYRAP

SEQ ID NO: 6038 - protein, 382 aa, Arabidopsis thaliana
MDIASSSLSQAHKVVLTRQPSSRVNTCSLGSVSAIGFSLPQISSPALGKCRRKQSSSGFVKACVAVEQKTRTAIIRIGTRGSPLALAQAYETREKLKKKHPELVEDGAIHIEIIKTTGDKILSQPLADIGGKGLFTKEIDEALINGHIDIAVHSMKYVPTYLPEKTILPCNLPREDVRDAFICLTAATLAELPAGSVVGTASLRRKSQILHKYPALHVEENFRGNVQTRLSKLQGGKVQATLLALAGLKRLSMTENVASILSLDEMLPAVAQGAIGIACRTDDDKMATYLASLNHEETRLAISCERAFLETLDGSCRTPIAGYASKDEEGNCIFRGLVASPDGTKVLETSRKGPYVYEDMVKMGKDAGQELLSRAGPGFFGN

SEQ ID NO: 6039 - protein, 545 aa, Dechloromonas aromatica RCB
MAHPLAGQAAPLASLTDIPALLAAYHQQPDINEPAQRVAFGTSGHRGCAFNGSFNEAHILAIAQAVAEYRLQAGIRGPLFLGMDTHALSAPAQQNVLEVLAANGVLIHLQENQGYTPTPVISRAILVHNAQPAVERADGIVITPSHNPPQDGGIKYNPPHGGPADTDVTGWIEQRANALMADGNRGVKRLPYGQALAAATTRAVDLMTPYIAELGSVIDMQSIRRAKLRIGVDPMGGAAVAYWKPIAEHYGLDITVVNPAVDPTFGFMTLDHDGKIRMDCSSPYAMASLVALKDKFDIAWGNDADVDRHGIVTPSLGLMNPNHYLAVAINYLLAHRPQWPHSSAVGKTLVSSGLIDRVVKGLDRTLLEVPVGFKWFSAGLLDGSICFGGEESAGASFLRRDGSVWTTDKDGIILGLLAAEITAVTGRDTGSHYLDLASRYGTPYYLRIDAAATPAQKVAFKQLTGDRVSAATLAGEPITARLTRAAGNNAAIGGLKVTTENGWFAARPSGTEDIYKIYAESFKSEAHLQQLVAEAGTIVTAALAA

SEQ ID NO: 6040 - protein, 219 aa, Citrus sp. cv. Murcott x Citrus aurantium
ATLVVSGDGRYYSKDAIQIITKMAAANGVRRVWIGQNGLLSTPAVSAVIRERVGSDGSKATGAFILTASHNPGGPSEDFGIKYNMDNGGPAPEGITDKIYENTKTIKEYSIAEDLPDVDISAVGVTSFGGPEGQFDVEVFDSASDYVKLMKSIFDFELIRKLLSSPKFTFCYDALHGVAGAYAKRIFVEELGAQESSLLNCTPKEDFGGGHPDPNLTYA

SEQ ID NO: 6041 - protein, 447 aa, Ralstonia eutropha JMP134
MNSPSLDAFLAGVARRDPGQPEFLQAVKEVMMTLWPFVERHPRYADQALLERLVEPERVIQFRVAWTDDQNRVQVNRAFRVQHSSAIGPYKGGMRFHPTVNLSVLKFLGFEQTFKNALTTLPMGGGKGGSDFDPKGKSDAEVMRFCQALVTELYRHLGPDTDIPAGDIGVGAREVGFMAGMMKKLSNQSACVFTGKGLAFGGSLMRPEATGYGTVYFAQEMLHRRGMDFDGLRVLLSGSGNVAQYAAEKAIELGAKVLTLTDSGGVLHYPEGMTTEQLAEVMAFKNEERGRLSDFAARHGMKFEAGRTPWHVPADVALPCATQNELDGNDAETLLGNGVICVAEGANMPSTLEAVDRFVDAKILYAPGKASNAGGVATSGLEMSQNAMRLSWHHAEVDEKLHAIMKDIHQNCIHHGQKDGGYVNYVEGANIAGFVKVADAMLAQGVI

SEQ ID NO: 6042 - protein, 481 aa, Zea mays
  misc_feature (15)..(15): Xaa can be any naturally occurring amino acid
  misc_feature (305)..(305): Xaa can be any naturally occurring amino acid
LDCFGSAMGLVSNLXKSFVIPIRCNDQAVQMGCNILQCTSSTFPCTYLGLPISDTKLRKSDLMVWVDKVADRLPNWKARLLSLAGRTAMVRFVLSAIPVYLLIAMKIPKWVINSIDKIRRGFIWRGRKEVNGGSCLVSWDIVTRPLYLGGLGISNLLYQSWALQAKWLWLQKTDPNKPWSGLEFPIQQHVKSFFSASIVTMVGNGCNTLFWTDRWVDGSRIQDFAPAVVANVGKRALSSRTVAHALENWQWVSDIVTPLNLSGLQQYLNLWDTLRGVVLTQEADRHVWIHSSSGQFSSKSCYKAXFLGSITFEPWKRLWKSWAPPKCKFFIWLAIRNKCWTADRLQKRGLDHPEVCPLCDQEPENIQHLLCTCVFSRQFWYYILSSLGMANLSPDSNESTFADWWAKVSKQVHKSKRRGFNSIIILGAWCLWLHRNKVVFDGVSPSIIGIKANFLDEVEFWRLAGARHLEALVPGAGIFRS

SEQ ID NO: 6043 - protein, 319 aa, Polaromonas sp. JS666
MSANEIAVKVARKVREAQDINSYELVSVNGQALPAFEAGAHVDVHLPNGLVRQYSLCGMPHQKDRYRIAVLRDPKSRGGSEAVHDLVHEGDTLRISAPRNLFRLAAGEQTSVLLAGGIGVTPLLAMAYHLHALGSAFALHYFARSRDRVAFLAELQNSGFARNVVLHLDDEAVAGARPLRSLLETLQRDAHIYTCGPTGFLNHVLETASALDWPGGQVHYETFSPPQPTAGDSFEVRISSTGQSVVVAADESVVSAVARLGIEIPVSCEQGICGTCLTRVAEGVPDHHDQYLTNEEHERNDQFTPCCSRARSKVLVLDL

SEQ ID NO: 6044 - protein, 346 aa, Yarrowia lipolytica CLIB122
MSETPNLATEAVLVHSAPVPEDAVPVSGIDFDKPENKNTRAADLVGAMNGMGFQATSLGQACNIIDEMRTWEGVDKEGNPAKTTIFLGYTSNLISSGLRSTLKYLVKNKMVSAIVSSAGGIEEDLIKCLAETYLGDFALKGSVLRETGMNRIGNLLVPNDNYCKFEEWVVPILDTMLEEQEKQGVSWTPSTVIDRLGKEIDNEDSVLYWAHKNQIPVFCPALTDGSLGDMLFFHTFKASPLQLKIDIVADIRKINSMSMAATRAGMIILGGGLVKHHIANACLMRNGADYAVYINTGQEFDGSDAGARPDEAISWGKIKAGAKHVKVYADATLVFPLVVAATFAKE

SEQ ID NO: 6045 - protein, 391 aa, Prochlorococcus marinus str. NATL2A
MARVGVLLLNLGGPERIKDVGPFLYNLFSDPEIIRLPVRAFQKPLAWLISLLRSSKSQEAYRSIGGGSPLRRITEQQARELQSYLRNIGIDATTYVAMRYWHPFTESAVADMKADGVSEVVVLPLYPHFSISTSGSSFRELKRLKDGDDEFAELSIRCIRSWFDHPAYVSSMAELIKKQILACDLPQESHVFFTAHGVPKSYVEEAGDPYQDQIQNCSLLIIDQLENSLGFTNSFSLAYQSRVGPEEWLKPYTEEVLEKLGKSGVKELVVVPISFVSEHIETLQEIDIEYKEIAQKNGIVNFKRVPALDVYPLFIEGLADLVSSCLNGEGISLEEASKLPERVKLYPQEKWQWGWNNSSEVWNGRVAMIVFLSFLMELIIGGGPLHQIGLL

SEQ ID NO: 6046 - protein, 582 aa, Prochlorococcus marinus str. NATL2A
MTLTSTPNQIEDSGTQTQYEMSGADALMDSLRRHGVDTIFGYPGGAILPIYDAVFKAEQEGWLKHILVRHEQGGTHAADGFARATGKVGVCFGTSGPGATNLVTGIATAQMDSVPLVVITGQVPRPAIGTDAFQETDIFGITLPIVKHSWVVRDPSEIAKVVAQAFLIASSGRPGPVLIDIPKDVGQEMFKYVPVEPGSIKPLGFELPFAPEHKAISSALDLIENAEQPLLYVGGGVISSGAHETLAAIANRYQIPVTTTLMGKGAFDERDPLSVGMLGMHGTAYANFAVTECDLLIAIGARFDDRVTGKLDTFAPKAKVIHFEIDPAEINKNRVVEVSVLGDVGISLVKLLDLSNQRKTNPRTSQWLNKIKNWKNNFPLITPPKEGEIYPQEVLIALRDLAQDAYITTDVGQHQMWAAQYLLNGPRQWISSAGLGTMGFGMPAAMGVKVALPKEKVICIAGDASILMNIQELGTIAQYKLNLKVIIINNHWQGMVRQWQESFYDERYSASNMSVGEPDFISLSKAFGIEGIVISERENLIPQLQKALENEGPVLVNVNVRKGENCYPMVPPGKSNAEMVGI

SEQ ID NO: 6047 - protein, 498 aa, Chlamydomonas reinhardtii
MADEMDPMTACITALTDAAMTTAQATALCGQFAFAADNSDLSDRLDQTNQGLNTLYLVSCGALVFVMHAGFAMLCAGAIRSKNTMNILLQTVMDAAVSAVAFYILGYGFAYGIGNNPNGFIGDSLFGLSRWVSHSSSSDAGANWQAWFFQWAFAATATTIPAGAVAERLNFNAYLIYSFFISAFVYPVVVHWVWAAEGWLGYARFGGYSHLFRSGMIDFAGSGVVHMTGGLAGLAGCIMVGPRMGRFDSNGQPVEMPGHSATLVVLGTVLLWFGWYGFNPGSQLIINYTASAAVVGRAAVTTTLSGAAGCLSCLLTAFLRHKAWDLVSGCNGALVGFVSITASANVVEPWAALIAGLVGGWVFDAVCLLFLKLRIDDPLSAAPMHAFCGAWGVFFAGLLAKKEYICESYGRDCEGYVADGLFYVGDGRLLAQVIGIISIFAWVFGLMLLLFGGLKAVGLLRISAEEEQAGLDVSKHGGSAYNYDHGLGKPEKAQALGL

SEQ ID NO: 6048 - protein, 479 aa, Synechococcus sp. WH 7805
MTSTSTRDLVSQPYKYGFVTEIETDKIAKGLSEDVVRLISGKKDEPDFLLQFRLKAFRHWLTLEEPDWAALGYPPIDYQDIIYYAAPKQQDKKASLDEVDPKLLETFDKLGIPLSEQKRLSNVAVDAVFDSVSIATTYKEKLAEHGVVFCSFSEAVKEHPALIERYLGTVVASNDNYFAALNSAVFSDGSFVFIPKGVECPMELSTYFRINSGDTGQFERTLIVAEEGASVSYLEGCTAPMFDTNQLHAAVVELVALDDASIKYSTVQNWYAGDENGVGGIYNFVTKRGQCRGARSRISWTQVETGSAITWKYPSCVLQGADSVGEFYSVALTNNRQQADTGTKMVHVGPRTRSTIVSKGISAGHSSNSYRGLVQIGPGASGARNYSQCDSMLIGDQAGANTYPYIRSQQPDSAVEHEASTCRISEDQLFYLQSRGIGFEEAVSMMVSGFCRDVFNQLPMEFAAEADKLLALKLEGSVG

SEQ ID NO: 6049 - protein, 521 aa, Xanthomonas axonopodis pv. citri str. 306
MTTSISPGASAGARLPLQIPFIIGNEACERFSFYGMRNILVQFLITSLLLQEISGPGREAEAKHILHSFMIGVYFFPLLGGWLADRFSGKYNTILWFSLVYCAGHACLALFEGSRDGFFLGLGLIALGAGGIKPLVASFMGDQFDQSNKHLAKVVFDAFYWIINFGSLFASLLIPLALKNLSPAWAFGIPGILMFVATLVFWLGRKRYVLVPLPPKDPHGFAAVVRTALLTHAPGQGRPGLLLAVVSVLLALAGFALIEPLGIVVCLCIALVLLLAGIGGGTWWQLERARGTHPDVAVEGVRALLRVLVIFALVMPFFSLFDQKASTWVLQGREMTMPAWFTASQMQALNPLLVMLLIPFNNLVLYPLLRRGGWEPTPLRRMTSGIAFSGVAWIAVGAIQMIMDGGEPMHIAWQILPYALLTFGEVLVSATGIEFAYSQAPPSMKGVVMSFWYLTTTVGNLWVLLSNVAVRNATVTAHIADTGLSEAAFLMFFFAAFAFLAALAFGLYARRYRMVDNYRTA

SEQ ID NO: 6050 - protein, 361 aa, Pyrococcus abyssi GE5
MVLDSTLREGEQTPGVNYTPEQRLEIAIALDEVGVDFIEIGHPAVSEDVFRGMKLIAEQGLNVELLAHSRALIEDIDYVLKTGVDWVGIFFCLSEACLRKRFRITLDHALEKISRAIEYAKDHGLKVRFTPEDTTRTEWANLKRAIRLAKELKVDRISVADTTGSTHPLRFYTLVKKIVNFGIPVNVHCHNDLGLALANAIMGIEAGATLVDATVNGLGERAGIVDLAQIITVLYYHYGIKKYRLDLLYRVSNLVSEITGISPQPNYPIVGENAFTHKAGLHVSAVLKDPRFYEFLPAEVFGRERTIYVDRYAGKDTIRYYLEKFGIRDHGIVTSLLRKVKSSREPFTWEKLLEEARRVKE

SEQ ID NO: 6051 - protein, 416 aa, Rhodococcus erythropolis
MTSASTRKGKFPDIVVTSLATSTSVAGDVDGTWKALLAGESGIGILDDPFIDEFDLPIRIGGHLKVSPDEGLSRVEIRRMSWVERLALTLSRTVWSNAGSPEVDQDRLAVVIGTGLGGGDTLIDAVDKLRGGGYRKVSPFSVQMVMPNGPAATVGLELGARGGVITPVSACSSGSEAIAHAHRMLVMGDADMVVAGGVESFIDAVPIASFAMMRAMSTNNDNPTAASRPFDKDRDGFVFGEAGALMILETEEHAKARGATIHARLLGSGITSDGYHIVAPHPEGLGAARAMTRAIEMAGLTKSDIKHINAHATATPIGDIAEAKAINAAVGNHAAVYGPKSALGHSIGAVGALESVLTVLAVRDGIIPPTLNVDSQDPEIDLDVVKGEPRTGSFDFALNNSFGFGGHNVALAFGRA

SEQ ID NO: 6052 - protein, 315 aa, Arabidopsis thaliana
MGRKRKHSETVTAAPVKDSAPERPQRTLLGWKDKKEDAENSKPAYASVFRNKEKVLVTCSRRINFRYRHLMLNMVSLLPHCKKDSKVEAKSSRGATLNELIELKGSSSCLFFECRKHKDLYMWMVKSPGGPSVKFLVNAVHTMEELKLTGNHLKGSRPLLTFSSNFENDAHWKLLKEMLTQIFGIPEGHRKSKPYHDHVFVFSIVDDHIWFRNYQISVPHNESDKIARGDLDKMTLIEVGPRFCLNPIKIFGGSFGGTTLYENPFYVSPNQIRALEKRNKAGKFAKKIKAKTRRKMHELSNPLEPDEFTDMWNDE

SEQ ID NO: 6053 - protein, 341 aa, Neisseria gonorrhoeae
MGIKVAINGYGRIGRQVLRAIYDYQIQDQLQIVAVNASGSLETNAHLTKFDTVHGRFEADVSHDGGNLIVNGDKIPFFSTRNPAELPWKELGVDLVMECTGAFTSKEKAKIHLESGAKKVLISAPGGDDVDATVVYGVNDSVLTADMTVVSNASCTTNCLSPVAKVLSESVGIVKGAMTTIHALTNDQTVTDVRHKDLRRARSGVENMIPTKTGAAKAVGLVLPELKGRLDGLAIRVPTVNVSLVDLSFQAARDTTVEEINALMKAASEAGALKGVLGYNTLPLVSMDFNHTTEASHFDATLTKVVDGNMVKVFAWYDNEWGFSCQMLNTARRMFGLEVRP

SEQ ID NO: 6054 - protein, 341 aa, Neisseria gonorrhoeae
MGIKVAINGYGRIGRQVLRSIYDYQIQDQLQIVAVNASGSLETNAHLTKFDTVHGRFEADVSHDGGNLIVNGDKIPFFSTRNPAELPWKELGVDLVMECTGAFTSKEKAKIHLESGAKKVLISAPGGDDVDATVVYGVNDSVLTADMTVVSNASCTTNCLSPVAKVLSESVGIVKGAMTTIHALTNDQTVTDVRHKDLRRARSGVENMIPTKTGAAKAVGLVLPELKGRLDGLAIRVPTVNVSLVDLSFQAARDTTVEEINALMKAASEAGALKGVLGYNTLPLVSMDFNHTTEASHFDATLTKVVDGNMVKVFAWYDNEWGFSCQMLNTARRMFGLEVRP

SEQ ID NO: 6055 - protein, 328 aa, Magnetococcus sp. MC-1
MSQPKPMNTIAVMTSGGDAPGMNSAIRAVVRTAIGAEMEVLGIRRGYSGLLEGDLIPMDAASVGNILQKGGTVLGTSRCAEFLKPEIRQEAANILRRKHVDGLVVIGGNGSFNGAYQLHQEHDIPVVGVPGTIDNDIQGTHYTIGFDTAVETGVYAVDKIRDTANAHDRIFLVEVMGRHSPAIAIHTGVCTGAEHVIHTPENTDYDTLVSGIRRGRKRGKNSFIIIVAEGQVPGSAYQVQKHLADNYQIASHVAILGHLQRGGSPTAHDRFIAASMGFHAVQALKTGEVATVTACRDGRIQLVPLQECLEKNDAIDAFSLNLTQQLAI

SEQ ID NO: 6056 - protein, 641 aa, Ustilago maydis 521
MAPMIPGDKYKPYTPIHLANRTWPTKVQTKSPIWTSVDLRDGNQALINPMSGEQKLKFYQKLVEVGFKEIEVAFPSASDTDFGFVRHIIEQNMIPDDVYIQVLTPAREELIRRTFESIKGAKNVILHMYNASSPLFRNVVFNNSQEQTIELAVRHTKIVRQLVDHYSKPENGGTNFKYEYSPETFTQTEMDFAVKICEEVRTAWGKASHDKPIIFNLPATVEVGPPNHYADQIEYFCNNITDRKSVIVSLHPHNDRGCAVAATELGLLAGGDRVEGCLFGNGERTGNVDIVTLALNLFSQGIQPGELDLSDIQSVVDVVSGCNDIPVHPRHPYAGDLVFTAFSGSHQDAIKKGFAAQAKRISEGDNTWEIPYLPIDPVDLGCTYEAVIRVNSQSGKGGVAYLVAQSLGLDLPRRMQVAFYQVIQQVADRTGKEMTSEDITRIFTQTYHVGSIASLASLQVGAAVASKSEARFALRGYSLSDDLSSSITSEDADSGVETPRHRRFTGKILYQGTVHELTGTGNGALSALLDAIESTFGIKAEIREYSEHAITKSSSLQTGAAGAAGANGSKAQAASYVELIDPLQKAQIGEKKAPGFWGVGIDVDITTASLKAVLSALSNISKREAVIADAVNVAVAANGKH

SEQ ID NO: 6057 - protein, 366 aa, Triticum aestivum
  misc_feature (165)..(165): Xaa can be any naturally occurring amino acid
YQLLRLITPRYLCDTIEYSSYASNALGALPYGRPAGGRTSDSRPRCHFRDKLGQGCYGSVYKGVLLPGGVHVAVKMLEGNSNCNGEDFISEVSTIGRIHHVNVVRLVGFCSVEMRRALVYEYMPNGSLDKYIFSTEKSFSWDKLNEIALGIARGINYLHQGCDMXILHFDIKPHNILLDSNFIPKVADFGLAKLYPKGDSFVPLSAMRGTIGYIAPEMISRSFGVISSKSDVYSFGMLLLEMAGGRRNADPKMRPLSQAYYPSWVYDQLTQEEAGEISPVAAHMHELEKKLCVVALWCIQMRSRDRPTMSEVIEILEAGVDGLQMPSRPFFCDEGHIHVEDSYLFTSELSAVSEEELSVVSEEDDV

SEQ ID NO: 6058 - protein, 330 aa, Neisseria gonorrhoeae
VAINGFGRIGRLALRQIEKAHGIEVAAVNDLTPAEMLLHLFKYDSTQGRFQGTAELKDDAIVVNGREIKVFANPNPEELPWGELGVDVVLECTGFFTNKTKAEAHIRAGARKVVISAPGGNDVKTVVYGVNQDILDGSETVISAASCTTNCLAPMAAVLQKEFGVVEGLMTTIHAYTGDQNTLDAPHRKGDLRRARAAALNIVPNSTGAAKAIGLVIPELNGKLDGSAQRVPVATGSLTELVSVLERPVTKEEINAAMKAAASESYGYNEDQIVSSDVVGIEYGSLFDATQTRVMTVGGKQLVKTVAWYDNEMSYTCQLVRTLEYFAGKI

SEQ ID NO: 6059 - protein, 721 aa, Capsicum annuum
MAVPTIALYASPPSSVCSTPYQCHSHASYDFDLNGRSTSSSSSTTSSSQKSIVGGLSSLFSSPTVKANYSTGTEDLGLGSLWHDRGDELSSSFRGSSLKRDHQSPVSVFQGPVSCSTSSSGIGSYSRSPPKRIGGDVCSIRSGSGGLFNGFVRHALGSCVDHDPATFQVLDVDSGSSGLLDELTFNMEEGFLESNSEPYAKNLLLGAQARHKIFYDDFVVKAFYEAEKAHRGQVRATGDPYLQHCVETAVLLATIGANSTVVAAGLLHDTLDDTFITYDYIFRTLGAGVADLVEGVSKLSQLSKLARDFNTASKTVEADRLHTMFLAMTDARAVLVKLADRLHNMITLDALPPMKQQRFAKETLEIFAPLANRLGISTWKEQLENQCFKHLNPDQHNELSSKLMDSFDEAMITSAVGKLEQALKDKSLSYHVLSGRHKSLYSIYCKMLKKKLNMDEVHDIHGLRLIVETEEDCYKALQVVHQLWCEVPGRSKDYIAKPKCNGYQSLHTVVLGEGMVPLEVQIRTKEMHLQAEYGFAAHWRYKEDDCKHSSFVLQMVEWARWVVTWQCETMSRDQSSVGHTESIQPPCKFPAHSEDCPFSCKPDCGTDGPVFIIMIENDKMSVQEFAANSTVKDLLERAGRGSSRWTPYGFPLKEELRPRLNHEPVSDPNCKLRMGDVIELTPAIRHKSLTEYREEIQRMYDRGVSPLPAAAAANTVVGLRS

SEQ ID NO: 6060 - protein, 107 aa, Synechococcus sp. WH 5701
MSSATAVTDASFELDVLKSDVPVLVDFWAPWCGPCRMVAPIVDEIAKEFEGKLKVYKLNTDENPNVASQYGIRSIPTLMIFKGGQKVDTVVGAVPKNTLSGTIAKYL

SEQ ID NO: 6061 - protein, 125 aa, Triticum aestivum
  misc_feature (76)..(76): Xaa can be any naturally occurring amino acid
MAARRAHAAAALALLVAALVLSAAPAPAEGAVANCGQVVSYLAPCISYAMGRVSVPGGGCCSGVRGLNAAAATPAXDRKTTCTCLKQQASGMGGIKPNLVAGIPGKCGVNIPYAISQGTDCSKVR

SEQ ID NO: 6062 - protein, 333 aa, Pseudomonas fluorescens PfO-1
MTDTPHFPLSAVVGADDLKLALYLTAIDPKIGGVLIEGPRGMAKSTLARGLADLLASGQFVTLPLGATEERLVGTLDLDAALSDGRAQFSPGVLAKADGGVLYVDEVNLLPDHLVDLLLDVAASGTNLIERDGISHRHSAKFVLIGTMNPEEGELRPQLLDRFGLNVALSGHTAPAERGQIIRRRLDFDSDPQVFCAQWEADQQALRERCESARHALANIPLDDEALAQITERCFAAGVDGLRADLVWLRAARAHAAWRGAETIAEQDIDAVAELALRHRRREQSSSPAQPPAQSPSGTHAEPSEGQGQWGEMPAPALVTGARREVPTWPKKL

SEQ ID NO: 6063 - protein, 460 aa, Sinorhizobium meliloti
MPVEILMPALSPTMEEGTLSKWLKNEGDKVSSGDVIAEIETDKATMEVEAVDEGTIGKLLIAAGTEGVKVNTPIAVLLQDGEAASDIDSMKTEAPKAETPKPAAAEAPAASAAPVAAQPKADVPSDPAIPAGTEMATMTVREALRDAMAEEMRANEDVFVMGEEVAEYQGAYKVTQGLLQEFGARRVVDTPITEHGFAGVGVGAAMTGLRPIVEFMTFNFAMQAIDQIINSAAKTLYMSGGQMGAPIVFRGPSGAAARVAAQHSQCYAAWYSHIPGLKVVMPYTAADAKGLLKAAIRDPNPVIFLENEILYGQSFEVPKLDDFVLPIGKARIHRTGKDATLVSFGIGMTYAIKAAAELEAQGIDVEIIDLRTIRPMDLPTVIESVKKTGRLVTVEEGYPQSSVGTEIATRVMQQAFDYLDAPILTIAGKDVPMPYAANLEKLALPNVAEVVDAVKAVCYK

SEQ ID NO: 6064 - protein, 216 aa, Citrus sp. cv. Murcott x Citrus aurantium
YGNTLSISEIKMADIPDVDLSSLGVTNFGNFSVEVVDPVSDYLELMENVFDFPLIRSLLSRSDFRFVFDAMHAVTGAYAKPIFVEKLGAKPDSILNGVPLEDFGHGHPDPNLTYARDLVAIMYGENGPDFGAASDGDGDRNMILGKGFFVTPSDSVAIIAANAQEAIPYFKSGPKGLARSMPTSGALDRVAEKFKLPFFEVPTGWKFFGNLMDAES

SEQ ID NO: 6065 - protein, 578 aa, Triticum aestivum
MGGGNGIVDGFRRLFHRRTPSGSVLGSSNQSSAGEDSSDVEAAEGLDLVGLRSIRVPKRKMPLPVESHKKNIMEKEFFTEYGEASQYQIQEVVGKGSYGVVAAAIDTRTGERVAIKKINDVFEHVSDATRILREVKLLRLLRHPDVVEIKHIMLPPSRREFQDIYVVFELMESDLHQVIRANDDLTAEHYQFFLYQLLRALKYIHGANVFHRDLKPKNILANADCKLKICDFGLARVSFNDAPSAIFWTDYVATRWYRAPELCGSFFSKYTPAIDIWSIGCIFAELLTGRPLFPGKNVVHQLDIITDLLGTPSSETLSRIRNEKARRYLSCMRKKHPVPLTQKFPNADPLAVRLLGRLLAFDPKDRPSAEEALADPYFASLANVEREPSRHPISKLEFEFERRKVTKDDVRELIYREILEYHPQMLEEYMKGGDQISFLYPSGVDRFKRQFAHLEEHYSKGERGSPLQRKHASLPRQRVGASNDGNNEQHISDQEMSAEPDAHGAVSPQKSQDAPGVGQNGLSPTSLSSRTYLKSASISASKCVVVNPNKQPEYDDAISEETEGAVDGLSEKVSKMHA

SEQ ID NO: 6066 - protein, 278 aa, Triticum aestivum
MADRLTRIAIVNDDRCKPKKCRQECKKSCPVVKTGKLCIEVGPASKVSFISEELCIGCGICVKKCPFDAIEIFCLPNDLEKDTTHRYGPNTFKLHRLPVPRPGQVLGLVGTNGIGKSTALKVLAGKLKPNLGRFKNPPDWQEILTYFRGSELQNYFTRLLEDNLKAIIKPQYVDHIPKAVHGNVGQVLELKDERDMKAELCADLELNQVIDRNVGELSGGELQRFAIAVVAVQSAEIYMFDEPSSYLDVKQRLKAAQVIRSLLRSNSYVIVVEHDLSV

SEQ ID NO: 6067 - protein, 227 aa, Zea mays
NLSWPASHICRVKSLSSNCTSLASRRRTLLKVIILGDSGVGKTSLMNQYVNKKFSNQYKATIGADFLTKEVQFEDRLFTLQIWDTAGQERFQSLGVAFYRGADCCVLVYDVNSMKSFDNLNNWREEFLIQASPSDPDNFPFVLLGNKVDVDGGNSRVVSEKKAKAWCASKGNIPYFETSAKDGTNVEDAFQCIVKNALKNEPEEELYVPDTVDVVGGNRAQRSSGCC

SEQ ID NO: 6068 - protein, 213 aa, Candida tropicalis
ISLLNILVAGRDTTAGLLSFVFFELARTPRVANKLREEIEDKFGLGQDARVEEISFESLKSCEYLKAVLNECLRLYPSVPQNFRVATRNTTLPRGGGKDGLSPVLVRKGQTVMYSVYAAHRNKQIYGEDALEFRPERWFEPETKKLGWAFLPFNGGPRICLGQQFALTEASYVTVRLLQEFSHLTMDPNTEYSPKKMSHLTMSLFDGANIQMY

SEQ ID NO: 6069 - protein, 528 aa, Bacillus thuringiensis serovar konkukian str. 97-27
MTTFRELGLSDSLLQSVESMGFEEATPIQAETIPHALQGKDIIGQAQTGTGKTAAFGLPLLDKVDTHKESVQGIVIAPTRELAIQVGEELYKIGKHKRVRILPIYGGQDINRQIRALKKHPHIIVGTPGRILDHINRKTLRLQNVETVVLDEADEMLNMGFIEDIEAILTDVPETHQTLLFSATMPDPIRRIAERFMTEPQHIKVKAKEVTMPNIQQFYLEVQEKKKFDVLTRLLDIQSPELAIVFGRTKRRVDELSEALNLRGYAAEGIHGDLTQAKRMSVLRKFKEGSIEVLVATDVAARGLDISGVTHVYNFDIPQDPESYVHRIGRTGRAGKKGIAMLFVTPRESGQLKNIERTTKRKMDRMDAPTLDEALEGQQRLIAEKLQSTIENENLAYYKRIAEEMLEENDSVTVVAAALKMMTKEPDTTPIALTSEPPVVSRGGGSKKRGGNGGGYRDGNRNRSRDGRGGDGRNRDRNRDGRNRDGNRDRNREGSRDGNRGRRGEGQGRPGSSNGRGERKHHSRKPQA

SEQ ID NO: 6070 - protein, 346 aa, Pyrococcus abyssi GE5
MYRVAVIKGDGIGPEVVDSAIRVVNSVTDRIRFYEFEGGFEVFKRIGSPISEDDLKEIRKMDAILFGATTTPFNVPGYRSLIVTLRKELDLYANLRIIPDLSNGKEIVIVRENTEGLYARDGIGFSDRAIDFRIITLEGARRIAKFAINLAKERNSFITFVHKANVLKGDRFFREIVLEIAEREGVEVREAIIDSFMIKLVKNPWDHGVILTENMFGDIISDLATIHAGSIGIVPSGNYGDEIALFEPIHGSAPDIAGKGIANPIGAILSAAMMLDYLGLNGKVVWEATRRYVRYGNLTPDMGGTATTSEVTKGIISEIYSFDPFDIDEIWVEEIRLGRIPLTLWR

SEQ ID NO: 6071 - protein, 333 aa, Mycoplasma gallisepticum R
MMAIQTQRIAILTSGGDSPGMNPAIYGLVQQAIINNIQPYLVYEGYKGLVEDQIVLANQQEVIDHFFDSGTFIYSARLVEFKDLEVRKKAVSNLKAKKIDTLVVIGGDGSYQGAKLLSEMGINVIVMPGTIDNDVSSSDYTIGFYSALEHITRTIQEIISTSVSHNRVSISEVMGRHCGDLAVYAALATKADLVITSENIKTTQEIVDLAAKRMLQDHKRTFTVIVCEHIYGEDGRDSLKTIAQQINDQLGIKTNLNILTYGQRGQVPTPMERILAMKFAIKAFECINEQRYGVVLGLSGDEIVAYNFQEALNKRNPSRIKLINLSNRINGGF

SEQ ID NO: 6072 - protein, 107 aa, Glycine max
MAKFFAAMILALFAISILQTVVMAANEQGGHLYDNKSKYGSGSVKSYQCPSQCSRRCSQTQYHKPCMFFCQKCCRKCLCVPPGYYGNKAVCPCYNNWKTKEGGPKCP

SEQ ID NO: 6073 - protein, 440 aa, Mycoplasma gallisepticum R
MFEYKFTDVGEGLHEGVVAQIYVKVGDTIKEGDPMFSVETDKVTTDLPAPEGGKVTAILASVGQTVHVGEVMLVLNGDGSSAPAAAPATPAFVAPTPAVTPAPTPAEAAPSGGGGGGGASVVGEVKVSNTLFGLFGDQRAASTPTPAPTPAFAPTPVPVATPLAQAVASDLNVNLHNVTPANGAKIFSSDVFASAQQSSPAASVAANDNETYKEITSIRKAIAKAMTTAHEEIPATVLTFNFDVTKLVSYRKQVKDAVLASYNVKLSFLPFLLKAITKAVVAHPIFNSHYDKASNRLVLKKKINLGIAVDTADGLMVPNIKSAQDKSVIELAREVNNLAEKARSKKIGLADLADGTISVTNFGSIGALFGTPIIKFPEVAIIATGTVEEKLARTPENQIVIKQIMPITIAADHRWIDGADIGRFAKTLKEIVENLNGLLI

SEQ ID NO: 6074 - protein, 517 aa, Neisseria gonorrhoeae FA 1090
MTQANRVIIFDTTLRDGEQSPGAAMTKEEKIRVARQLEKLGADIIEAGFAAASPGDFEAVNAIAKTITKSTVCSLSRAIERDIRQAGKAVAPAPKKRIHTFIATSPIHMEYKLKMKPKQVIEAAVKAVKIAREYTDDVEFSCEDALRSQIDFLAEICGAVIEAGATTINIPDTVGYSIPYKTEEFFRELIAKTPNGGKVVWSAHCHNDLGLAVANSLAALKGGARQVECTVNGLGERAGNASVEEIVMALKVRHDLFGLETGIDTTQIVPSSKLVSTITGYPVQPNKAIVGANAFSHESGIHQDGVLKHRETYEIMSAESVGWSANRLSLGKLSGRNAFKTKLADLGIELESEEALNAAFARFKELADKKREIFDEDLHALVSDEMGNMNAESYKFISQKISTETGEEPRADIVFGIKGEEKRASATGSGPVDAIFKAIESVAQSGATLQIYSVNAVTQGTESQGETSVRLARGNRVVNGQGADTDILAATAKAYLSALSKLEFSAAKPKAQGSGTI

SEQ ID NO: 6075 - protein, 332 aa, Mycoplasma gallisepticum R
MNWRIYTMSDKIIVNNIEALNNALDIALSKDKSVVLYGQDAGFEGGVFRATKGLQQKHGADRVWDTPISEAAMTGAAIGASYAGLKPIVEIQFSGFSYPAMQQLFCHAARIRNRSRGKLNAPIVIRMPMGGGIKALEHHSESLEAIYAHIPGVKVVMPCNPYDTKGLMLAAINDPDPVVFFEPKKLYRSFKQEIPAGEYVVEIGKANVLTQGSKLTIVTYGANVIDTLEIVNQYPAGDLELIDLRTISPIDWNTVLGSVQKTGRLLVVHEAVKSFSVSAEIMARVSETLHSSLKKAPVRVTGFDITVPLAKGEAIQFDLKKRTVDAINELLA

SEQ ID NO: 6076 - protein, 226 aa, Zea mays
GYLEAGRELPLEAARTSLTAPLDGVPAVPPPFGGARGAAPPLGGVREQEPQPLPLVFAGAGASGGSGSSVRPWGSSGGTSVSSSGKRIQKELLDLNASDCSAGPKGDNLYHWLSTIIGPQGSPYEGGIFFLDIVFPPDYPFKPPMVTFKTRIYHCNIDSTGKVHLDILKDGWSPAFTISKVLLAIKDIISNPDPYSPLMMSISRQYLTDRAKHDEIAAEWTMRFAR

SEQ ID NO: 6077 - protein, 180 aa, Triticum aestivum
  misc_feature (126)..(126): Xaa can be any naturally occurring amino acid
  misc_feature (158)..(158): Xaa can be any naturally occurring amino acid
ARSTYRWLCAGGVTSPFAACIWKSWATLKCKIFAWLAVQHRLWTSDRRARHGLQDHPSPCYTCLQCEENVEHILIQCMYAREVWEGCLSALHLNIPRPSTQDNYLQWWLSSRKHYQKAQKRGFDTXAIVVAWNLWKQRNARVFNRENVPRRDLIHKIXQEIEEWRSAGVGVVGLHRFVRE

SEQ ID NO: 6078 - protein, 183 aa, Brassica napus
YLRKTKIERDRFTLFNFSIPKSSKIDSDRKRKKDSVSSTDRPSEEKPKDKRDDHHSNKHRKKSKMSSRDQVKASHILIKHQGSRRKASWKDPEGKVIMTTTREAAVEQLKSIREDILSGKANFEDVAARVSDCSSAKRGGDLGPFGRGQMQKPFEEATYALKVGDISEIVDTDSGVHIIKITA

SEQ ID NO: 6079 - protein, 405 aa, Sinorhizobium meliloti
MSGRLVVVGGGQAAFALVAKLRALKDMRPITVVAAEASLPYQRPPLSKKYLLREMTLDRLLYRPEAWYAEHEIDIRLSTTVTRVDRLAKQVALSDGSMLTYETLAFATGATPRRLPAAVGGDLAGVFVVRDFRDADRLAEEMQPGRRVLVVGGGYIGLEAAAVARTSGLEVTVIEMADRILQRVASAATSAIVREIHRSHGVDIRERTGLHRLIGDNGRVTAAELSDGSVIPVDIVIVGIGVAANDALAHEAGIETANGIVVDSHGRTSDPTIVAMGDCAVLPWDGMRIRLESVQNAVDQAEAVAAVLAGGTDPYDPKPWFWSDQYDVKLQIAGFGLGHDETLVRQGQRQGSVSVWYFRQGKLIAVDAINDAKAYVTGKKLLEAGATPDRLLLADPQVDLKALLV

SEQ ID NO: 6080 - protein, 395 aa, Mesembryanthemum crystallinum
MITTLKQPTISFSNPDVLRKKFQVPTSQFASFAPLIRRKSDLLIQKPLHVSSVKGLGFGLGDGLLRERKPLIKCEAYEADGSEPIKPEPVPVPIPGEAARKVKIGIYFAVWWALNVVFNIYNKKVLNAFPYPWLTSTLSLAMGSLIMVVSWATRIAEAPNTDSDFWKALLPVAVAHTIGHVAATVSMSKVAVSFTHIIKSAEPAFSVLVSRFFLGESFAAGVYWSLVPIIGGCALAAVTELNFNMIGFMGAMISNLAFVFRNIFSKKGMKGKSVSGMNYYACLSILSLVLLTPFALYVEGPKMWAAGWDKAVSDIGSNFIWWLTAQSVFYHLYNQVSYMSLDEISPLTFSIGNTMKRISVIVSSIIIFRTPVQPVNALGAAIAVFGTFLYSQAKQ

SEQ ID NO: 6081 - protein, 540 aa, Synechococcus sp. WH 5701
MAKDPGRVLIFDTTLRDGEQSPGASLNLEEKLAIAHQLARLRVDIIEAGFPFASPGDFNAVQRIAAAVGTPEGPVICGLARAARGDIKACAEAVAPAANRRIHTFIATSDIHLEHKLRKSRAEVVAITAEMVAYARSLVEDVEFSCEDAGRSDPHYLYEVIEAAIAAGATTINIPDTVGYTTPAEFGGLIAGIEAHVPNIDQAVISVHGHNDLGLAVANFLEAVKNGARQLECTINGIGERAGNASLEELVMALHVRRAYFNPFLGRQASSSEPLTGVRTEEIYKTSRLVSNLTGMAVQPNKAIVGANAFAHESGIHQDGVLKNRLTYEIVDARTIGLADNRISLGKLSGRSAFRARLEDLGYTLERDDLDEAFARFKELADRKREITDRDLEAIVSDQAQQTEARYVLKLVQVSTGTNLQPTATVTLTTSDGAELTEAAIGTGPVDAVCQALNSLARVPNELVEFSVKSVTEGIDAMGEVTIRLRHHGVLYAGHAADTDIVVAAAQAFVNALNRLVHGMERQPLHPQKASLPVAELPRL

SEQ ID NO: 6082 - protein, 414 aa, Galdieria sulphuraria
MAFLSTSCVNLVGSHRCYKDKTSQAICQRSFLKRRSFLCGSDSTGYSLFTSSFVSYHNRDLDLSSKTNANQRWVMQAKVRVAINGFGRIGRNFLRCWATRPSSHLDVVAINDTTGAKTAAHLLKYDSILGTFEKDVRAGEDCITVDGKEIKVVSNRDPLQLPWKDLNIDLVVEATGVFVDSKGAGKHLQAGAKKVLITAPGKGEDVGTFVIGVNEHSYDHQVHHIVSNASCTTNCLAPFIKVLHEEFGIVKGTMTTTHSYTGDQRLLDAAHRDLRRARSAALNIVPTTTGAAQAVALVIPELKGKLNGLALRVPTPNVSVVDMVCQVGRKTFKEEVNGAFLKASQGSLRGILRYSDEQLVSCDYRKTNESSIIDASLTMVLGDDLVKVVAWYDNEWGYSQRVVDLGELMASKWK

SEQ ID NO: 6083 - protein, 400 aa, Mycoplasma mobile 163K
MAKIDFDRSKEHVNIGTIGHVDHGKTTLTAAIATVLAKHVEGNEARDYGSIDNAPEERERGITINTSHIEYNTEKRHYAHVDCPGHADYVKNMITGAAQMDGAILVVAATDGPMPQTREHILLSKQVGVPKMVVFLNKVDLLGSGSEAEEMADLVEFEIRDLLSQYEFDGENTPVVRGSALKALNGEKAWEDKVMELMSQVDNWIDAPLREVDKPFLMAVEDVFTITGRGTVATGKVERGELKINEEVDIVGYTEKPKRTTVTGIEMFRKNLKTALAGDNAGLLLRGINREQIERGQVLAKPGTIVPHTKFKAAIYALKKEEGGRHTPFFKNYKPQFYFRTTDVTGGIELPNNIEMVTPGDNVDLIVDLISPIAVEVGTKFSIREGGRTVGAGSVTEIVK

SEQ ID NO: 6084 - protein, 183 aa, Triticum aestivum
MATILENIQKARFLPTRPLRDDLPTFQGGKEEESHLMGLRKRLSSFSGKIQPISSASAEWAFRRTRSAPSLAAEFAGGPLKRWWDWGLGWLLSKKLGFAGDLEMNEEEAAALGRQSRGTWAHVLYKVRSGVRRLVASDHSLPPTHHRKASLPPSLLRTSTASPAPQFRLHPRASKLRPSHWPT

SEQ ID NO: 6085 - protein, 400 aa, Ralstonia solanacearum
MDFDMIETEMQDGTIIKVVGVGGAGGNAVQHMINRGVQGVEFICMNTDAQALKRSSASRVLQLGNSGLGAGAKPEVGKTCAEQAREQIADALRGSHMVFITAGMGGGTGTGAAPVVAQIAKEMGILTVGVVSKPFDFEGARRAKVGEHGADELEGHVDSLIVVLNEKLFEVMGDDAEMDKCFQCADDVLHNAVAGIAEIINVDGLVNVDFEDVKTVMGEQGKAMMGTATVSGVDRARLAAEQAVASPLLEGVDLSGARGVLVNITASRSLKLSETKEVMNTIRSYAAEDATVIFGTVYDDAMGDALRVTVVATGLGRAARNKQQQQQTMTLLKTGTDNQPVAFGGGVVGHAVAAAPDYSNFDTPAVWRSSRESASAHVAALQEKGVDTYDIPAFLRKQAD

SEQ ID NO: 6086 - protein, 480 aa, Gluconobacter oxydans 621H
MTEKNNLFINGSWVAPKGGEWIKVENPATKAVVAEVAKGGQADVDAAVSAAKSAFIGWSRRTATERADYIHALKDLVKRDKEKLAAIITSEMGKPLKEARIEVDFAIGLLRFSAENVLRLQGEIIPGSSPEEKILIDRVPLGVIGAITAWNFPLALCARKIGPAVAAGNTIVVKPHELTPLACLHLAKLVEEAKIPHGVINVVTGDGKDVGVPLVAHKDIKLITMTGSTPAGKKIMAAASETLKEVRLELGGKAPFMVMEDADIDRAADAAVTARFNNAGQVCTCNERTYIHEAVYDRFVQKVREKIEALKVGLPTDPSTDMGPKVSEDELNKVHEMVEHAVRQGARLAIGGKRLTGGVYDKGYFYAPTLLTDVTQDMDIVHNEVFGPVMSLIRVKDFDQAIAWANDCRYGLSAYLFTNDLSRILRMTRDLEFGEVYVNRPGGEAPQGFHHGYKESGLGGEDGQHGMEAYVQTKTIYLNA

SEQ ID NO: 6087 - protein, 354 aa, Zea mays
MAPTAAKDSGSADRWREVQAFDDTKLGVKGLVDSGVKSIPSIFHHPPEALSDIISPAPLPPSPPSGAAIPVVDLSVARREDLVAQVKHAAGTVGFFWVVNHGVPEELMASMLSGVRQFNEGSLEAKQALYSRDPARNVRFASNFDLFESAAADWRDTLYCKIAPDPAPRELVPEPLRNVMMEYGEELTKLARSMFELLSESLGMPSDHLHKMECMQQLHIVCQYYPPCPEPHLTIGVRKHSDTGFFTILLQDGMGGLQLVTNDRYKSVDHRVPANKSSDTARVSVAAFFNPDEKRTERLYGPIPDPSKPPLYRSVTFPDFIAKFNSIGLDGRVLDHFRLEDDGPTRLAAPAHHV

SEQ ID NO: 6088 - protein, 507 aa, Staphylococcus aureus subsp. aureus NCTC 8325
MLNADLKQQLKQLLELMEGNVEFVASLGSDDKSKELKDLLTEITDMSPRLSLSEKSLKRTPSFSVNRPGEETGVTFAGIPLGHEFNSLVLAILQVSGRAPKEKQSIIDQIKKLEGSFHFETFISLTCQKCPDVVQALNLMSVINPNITHSMIDGAVFREESENIMAVPAVFLNGEEFGNGRMTIQDILSKLGSTADASEFENKEPYDVLIVGGGPASGSAAIYTARKGLRTGIVADRIGGQVNDTAGIENFITVKETTGSEFSSNLAAHIDQYDIDAMTGIRATDIEKTDEAIKVTLENGAVLESKTVIIATGAGWRKLNIPGEEQLINKGVAFCPHCDGPLFENKDVAVIGGGNSGVEAAIDLAGIVNHVTLFEFASELKADNVLQDRLRSLSNVDIKTNAKTTEVVGEDHVTGIRYEDMNTGEEHLLNLDGIFVQIGLLPNTSWLNDAVELNERGEIVIDRNNNTNVPGIFAAGDVTDQKNKQIIISMGAGANAALNAFDYIIRN

SEQ ID NO: 6089 - protein, 311 aa, Neisseria gonorrhoeae FA 1090
MNPKKLVIASRESLLAMWQAKHIQGRLKALYPDCEVEILGMTTRGDRILDRTLSKVGGKGLFVKELEQSLQDGRADLAVHSIKDVPMDLPEGFALAAISERANPFDAFVSNRYARLEEMPEGAVVGTSSLRREAQLRARYPHLVIKPLRGNVQTRLSKLDNGEYDAIILAAAGLQRLELDERIRMILSESDSLPAAGQGALGIEIATHREDLYEVLKPLNHDTTHACVTAERALARALGGSCQVPLAAYCTEENGLLILRGLVGHPDGSIVLQADAQAPAGYADALGRAVAKKLADDGAQELIGAVLNTEN

SEQ ID NO: 6090 - protein, 291 aa, Buchnera aphidicola str. Sg (Schizaphis graminum)
MSNKDTQGTDKINRKGFFSILLNQIFHDEPKNREELLVLIRDSEQNELIDQDTCDMLEGVMHIAKKRIKDIMIPRTQMITLKLNYNLNKCLDIIIESAHSRFPVMSRDQNYVEGFLIAKDLLPFMKHPEDAFCIKNILRSAVVVPESKSVDTMLKEFRLKRSHMAIVIDEFGAVSGLVTIEDILELIVGEIQDEYDDEEKVNIRKLKKCIFSIKALTEIKEFNDTFETNFSDEEVDTIGGLVMKAFGHLPSRGDHININGYNFKVSIADSRKVIQIHVTVPENKIPKKLEK

SEQ ID NO: 6091 - protein, 375 aa, Zea mays
SKVKNLWFLLAKKTSSSANERNTEALIESYGSLAPKRYKYSEVLNITSSLDNKLGEGGYGAVYKGRLHDDLDVAVKFLHECKGDGEEFLNEVVSIGRTSHVNIVSLFGFCLERSRRALIYEYMPNGSLDRVAELKLYAIAIGIARGLEYLHHSCNTRIVHFDIKPQNILLDKDFCPKIADFGLAKLCHSKDSKLSSVTDARGTIGFIAPEVHSRTFGVVSTKSDVYSYGMMLLEMVGGRKNVKSVVENSSEKYFPHWIHDHFAQEGGSSQGYGGGVTGEVEETARKMTLIGLWCIQILPVHRPTITKVLEMFERDLHKRLDMPPKQNFSQILEDSAVYNLNTESMMSPSSSSMETQGSSEGLKAEEMKCVNSNVI

SEQ ID NO: 6092 - protein, 704 aa, Arabidopsis thaliana
MSENCNSRHFSWLMKSCLPNPSDAKSLVQIHQPSSTAANSSATIASLPDDLLLECISRVPSSSIPSLAVVCRRWSRLLHSPYFLHLRRRLGLLRHSLFAISTVDSGLFAADLQFQSEIASWKVSLAVSSRSVGVDGSYGSLSHARAAAIGPRVYVVSRNAVLRYDSWMGTLNLRSPMIFPRKKFAIAVVSGKIYVAGGGGGSEVAAAVEEYDPELNRWEVVTQSARKRYGCIGAAVDGVFYVIGGLKIGNETSRAVAARAYASSMDLFDVESRQWLRSRSVPGGGCVVAACAAVGYVYVLTSHAVELSFWRFDARRRGGNSGFGEWQRLKSPPLPAQVRLDGTVRFSCVGVEDKVAVVQVVGCIDDLLRRSGRGSNLYFSILINYKQLFIKNIKSISNIIWKYYNFTILYNPEPCVSYTIILRKKTKLSVRNQTCFKKSSLSSSSTAKKTTNLSMREQTMFKKALELSTLCNIDVCVIYYGRDGKLIKTWPDDQSKVRDMAERFSRLHERERCKKRTNLSLFLRKKILDDTKLSEKVLEMEDSLESGLRVLQDKLLLLQPEKNQTEFGQTRAVSSTTNPLSPPPSLIEDHRHQQRTEPLMSGVSNTEQDLSTSSLSQNQSKFSVFLYNHDNCSFYQVPDSVSSFDSLTSTGLLGEQGSGLGSSFDLPMVFPPQMQTQTPLVPFDQFAPWNQAPSFADPMMFPYN

SEQ ID NO: 6093 - protein, 349 aa, Nicotiana tabacum
MAFANLSQYLCLALFFICLGLWSSQVALSRPINYEATMRARHDQWIVHHEKVYKDLNEKEVRFQIFKENVERIEAFNAGEDKGYKLGFNKFSDLTNEEFRVLHTGYKRSHPKVMTSSKGKTHFRYTNVTDIPPTMDWRKKGAVTPIKDQKECGCCWAFSAVAAMEGLHQLKTGELIPLSEQELVDCDVEGEDEGCSGGLLDTAFDFILKNKGLTTEVNYPYKGEDGVCNKKKSALSAAKITGYEDVPANSEKALLQAVANQPVSVAIDGSSFDFQFYSSGVFSGSCSTWLNHAVTAVGYGATTDGTKYWIIKNSWGSKWGDSGYMRIKRDVHEKEGLCGLAMDASYPTA

SEQ ID NO: 6094 - protein, 475 aa, Ralstonia metallidurans CH34
MYQDLALYIDGEFIKGGDRREQDVINPATQELLGKLPHATTADLDRALSAAQRAFETWKKTSPLERSQILRRVAELTRTRAKEIGRDITLDQGKPLAEAVGEVMICAEHAEWHAEECRRIYGRVIPPRNPAVRQIVVREPIGVCAAFTPWNFPFNQAIRKIVAALGAGCTLILKGPEDSPSAVVALARLFHDAGLPPGVLNIVWGVPSEVSTYLIESPIVRKISFTGSVPVGKQLAAMAGAHMKRVTMELGGHSPVLVFGDADIEPAAEMLARFKLRNAGQVCVSPTRFYVQEKAYDKFLARFTEVIGSIKVGNGLDDGTQMGPLAHERRIASMEQFLDDASHRGGKIVAGGSRIGDKGFFFAPTVVTDLPDDAKLMVDEPFGPVAPVTRFKDAEEVLRRANSLPFGLASYVFTNSLKTANLVSNGLEAGMVNINHFGMALAETPFGGIKDSGIGSEGGQETFDGYLVTKFITQV

SEQ ID NO: 6095 - protein, 644 aa, Photorhabdus luminescens subsp. laumondii TTO1
MRHHYMTTETEISFADLGLSAPILSALEDLGYEKPSPIQQQCIPHLLNGRDVLGMAQTGSGKTAAFSLPLLHNINAELKAPQILVLAPTRELAVQVAEACADFSKHMRNVNVVALYGGQRYDVQLRALRQGPQIVVGTPGRLLDHLKRGTLDLSNLSGLVLDEADEMLRMGFIEDVENIMSQIPAEHQTALFSATMPEAIRRITRRFMNDPQEVRIQASVTTRPDISQSYWSVYGMRKNEALVRFLEAEDFDAAIIFVRTKNATLEVAEALERNGYNSAALNGDMNQALREQTLERLKDGRLDILIATDVAARGLDVERISLVVNYDIPMDAESYVHRIGRTGRAGRAGRALLFVENRERRLLRNVERTMKLTIPEVELPNAELLSQRRLERFAANVQQQLESSDLDQYRTLLSKLQPAEDLDIETLAAALLKMAQGERPLILPPDPVRRPRREFNERDDRRRNGFDDRGERSDRPRRERRDVGEMELYRIEVGRDDGVEVRHIVGAIANEGDISSRYIGNIKLFATHSTIELPKGMPGDLLSHFTRTRILNKPMNMQLMGDAQPFERRERRGGGRNGNGNGNSSGSGPRRDRENFNGGGRRFNGERRGGEGRGEGQSRSNFRGRGDDHGSSAPRRRYNNSNAQ

SEQ ID NO: 6096 - protein, 492 aa, Oceanicola granulosus HTCC2516
MLDDTTDFTALLSDPSLVCSQAFVGGKWVDAASGETFDVTNPARGDVIARIPDLSREEVAEAIAVADRARHAWAAKTGKERAAVLRKWFDLMMANQEDLAIIMTAEQGKPLAESRAEIAYGAGFIEWFGEEAKRIYGETIPGHQPDKRITVLRQPIGVAAGITPWNFPNAMITRKVAPALAAGCSFVIRPASQTPLSALAMAKIAEEAGVPAGVFSVVTSTSASEIGREFCENPKVRKLTFTGSTEVGRILLRQAADQVMKCSMELGGNAPFIVFDDAEIDAAVQGAIMCKFRNNGQTCVCANRIYVQDAVYDTFAEKLKAEVEKLSVGDGLDDGTQLGPLIEPAAIKKVREHLQDALDKGAKILTGGEAHPLGEQFFQPTVVTEANQQMKVATEETFGPFAPLFRFKDEDEVIELANDTIFGLASYFYAKDLSRVVKVQEALEYGIVGVNTGIISTEVAPFGGVKQSGLGREGSRHGIEDYLELKYICTSV

SEQ ID NO: 6097 - protein, 318 aa, Neisseria gonorrhoeae
MKHLHDLPAWSKLWNHFDDSKTLHMREMFEQDPQRAERYWLQVGGLTLDYSKNRINDETMSLLFELAREAGVPERMRQMFHGEKINTTENRAVLHVALRNRTNSPIMVDGEDVMPKVNRVLQRMGEFAHEVRSGSWLGYTNQVITDVVNIGIGGSDLGPLTMCTALKPFGHPRLNMHFVSNVDGSQLRDVLSKVHPETTLFIIASKTFTTQETLTNALTAREWFLNHAGDEEAVAKHFAAVSTNRKAVAEFGIDIANMFEFWDWVGGRYSLWSAIGLPIMLYLGEENFIEMLNGAHLMDQHFINTPLERNLPVILALI

SEQ ID NO: 6098 - protein, 501 aa, Clarkia modesta
MASPALISETEAWKDLKAHLEDIKMTHLRELMGDTERCQSMMVEFDNIFLDYSRQQASPDTISKLYKLADAAHLKQKIDRMYNGDHINTTENRSVLHVALRAPRNSAICSDGKNVVPDVWNVLDKIKDFSDRVRNGSWIGATGKKLKDVIAVGIGGSFLGPLFVHTALQTDPESSKNARGRELRFLANVDPIDVARNISGLNPETTLVVVVSKTFTTAETMLNARTLREWISSALGPSAVAKHMVAVSTNLPLVEKFGIDPNNAFAFWDWVGGRYSVCSAVGVLPLSLQYGFAVVEKFLQGAHSIDQHFSSAPFEKNVPVLLGLLSVWNVSFLGYPARAILPYSQALEKLAPHIQQVSMESNGKGVSIDGLPLPFESGEIDFGEPGTNGQHSFYQLIHQGRVIPCDFIGVVKSQQPVYLKGEVVNNHDELMSNFFAQPDALAYGKTPEQLKKENVSEHLIPHKTFTGNRPSISILLPTLDAYRIGQLLAIYEHRVAVQGFV

SEQ ID NO: 6099 - protein, 273 aa, Azoarcus evansii
MSGTDWSMQGETIRLDVVEGVATLTLNRPDRLNSFTSRMHEEVRGALAKVKEGRAAGVVRVLVLTGAGRGFCAGQDLSDRAVAPGAAPVDLGESVEKNYKPLVLALRSLELPVIAAVNGVAAGAGASIALACDLVFAARSASFIQSFSKLGVVPDTGGSWILPRLVGPARAMGMALLGEKLSAEQAESWGLIWKCVDDEALIPTVQQVATGLAKGPTFGYAKTKQAIWASSTNDFETQLNLERDLMTVCGNSNDYREGVAAFMEKRNPNFKGD

SEQ ID NO: 6100 - protein, 509 aa, Desulfovibrio vulgaris subsp. vulgaris str. Hildenborough
MAERIRIFDTTLRDGEQSPGATMNIKEKLRLAHQLQTLGVDIIEAGFPAASPGDFESVRAIAKTVKGMTVAGLCRALPADIDRAWDAVCVAESPRLHTFLATSPVHMQYKLRKTPDEVVRMVDAAVRHAAGHTSNVEFSAEDASRSDRDFLVRVFTTAIEAGATTINIPDTVGYAQPEEFGALVRYVIENTPNAHKAVFSVHCHNDLGLGVANTLAALRAGARQAEVTISGIGERAGNAALEELVMALRTRHDYFGLDTGIVTEQLYPTCRLLSMIIGQPIPANKAIVGANAFAHESGIHQDGMLKHRETYEIMTPESIGRTRTELVLGKHSGRNAVKNKLEELGYRLEEDQLNTVFDAVKQLADKKKQIHDEDVEALVLEEVYRIPDRYRLVNLSVQCSDTGMPPTAAVVMEVDGETMRHAGFGAGPIDAVFNAIAHIVGRTPQLERYSVTAITGGTDAQGEVTVRVRENGGTAVGRGSHPDIIIASARAYLNALNRLVKKEEEKEGI

SEQ ID NO: 6101 - protein, 569 aa, Clarkia modesta
MATPSLISETEAWKDLKAHLEGIKRTHLRELMGDTERCQSMMVEFDNIFLDYSRQQASPDTINKLYKLADAAHLKQKIDRMYNGDNINSTENRSVLHVALRAPRNSAICSDGKNVVPDVWNVLDKIKDFAERVRNGSWVGATGKELKNVIAIGIGGSFLGPLFVHTALQTDPEASKNARGRELRFLANVDPIDAARNISGLNPETTLVVVVSKTFTTAETMLNARTLREWISSALGVSAVAKHMVAVSTNLPLVEKFGIDPNNAFAFWDWVGGRYSVCSAVGVLPLSLQYGFAVVEKFLQGANSIDQYFSSAPFEKNIPVLLGLLSVWNVSFLGYPARAILPYSQALEKLAPHIQQVSMESNGKGVSIDGLPLPFESGEIDFGEPGTNGQHSFYQLIHQGRVIPCDFIGVVKSQQPVYLKGEVVNNHDELMSNFFAQPDALAYGKTPEQLKKENVSEHLIPHKTFTGNRPSLSILLPTLDAYRIGQLLAIYEHRVAVQGFVWGINSFDQWGVELGKSLATQVRKQLHASRVKGEPVEEGFNFSTKTLLTRYLEATSDVPADPSTLLPKI

SEQ ID NO: 6102 - protein, 917 aa, Pseudomonas fluorescens
MLKKLGIKGRVLLLTLLPTSLMALVLGGYFTWMQLSDLQTQLLQRGEMIAEQLASLVAPAMGNHNTQMLERIATQALEQQDVRAVSLLAPDRSLLAHAGPSMLNPPPAGNSSHMMQRSGSDATRYQLPVFGRHRNLAGDLIPDESDRLLGWVELDLSHSGMLLRGYRNLFASLLLIPAGLAVTALLAVRMGRTINNPLTQIKQAVAQLKDGNLETRLPPLGSQELDELASGINRMASTLQNAQEELQHSIDQATEDVRQNLETIEIQNIELDLARKEALEASRIKSEFLANMSHEIRTPLNGILGFTHLLQKSELTPRQLDYLGTIEKSADSLLGIINEILDFSKIEAGKLVLDSIPFNLRDLLQDTLTILAPAAHAKQLELVSLVYRDTPLSLVGDPLRLKQILTNLVSNAIKFTREGTIVARAMLEEEHEDSVQLRISIQDTGIGLSNQDVRALFQAFSQADNSLSRQPGGTGLGLVISKRLIEQMGGEIGVDSTPGEGSEFWISLNLPKTRDDAEDLPGPPLLGRRVAVLENHELARQALQHQLEDCGLEVTPFNTLEALTNGITGVHQSEQAIDLAVLGITTNDMSPERLSQHIWDLEHLGCKVLVLCPTTEQTLFHLSVPNPHSQLQAKPACTRKLRRALSDLVTPRRARSEPEETLSSRAPRVLCVDDNPANLLLIQTLLEDMGAKVLAVDNGYAALNAIQTEPFDLVMMDVQMPGMDGRKSTEAIRQWESERHGTPLPIVALTAHAMANEKRALLQSGMDDYLTKPISERQLAQVVLKWTGLALRNQGPERASERPELGLELQVLDQDEGLRLAAGKADLAADMLAMLLASLDADREAIKAARAANDQNALIERVHRLHGATRYCGVPQLRAACQRSETLLKQEDAKAFAALDELDHAIGRLAAEARTNA

SEQ ID NO: 6103 - protein, 483 aa, Candida glabrata CBS 138
METIHNISNRLQEVLATNKSVNVDTDNDSLSSNQEDNEVEKVRHLVVILGEKYSYAVDRNTGINALMQWFTTNSEIPEEILNAIRSKLNFTYRTNFEPIERAPDGPSPINPLIMLRINPIDAIENVFNNRECFFTDVGWGCMIRTGQSLLGNALQRVKSTVKDQPYIYEMDDTKEITDLFKDNTKSAFSLQNFVKCGRIYNKIAPGEWFGPATTATCIRYLIQENPCYGIEACYISVSSGDIFKENIQGMIDRYPNGNILILLGIKLGLDSVHERYWGEIKTMLESPFSVGIAGGRPSSSLYFFGYFDDTLLFFDPHNSQTALIDDFDESCHTENFGKLNFSDLDPSMLLGFLLPCSKWDEFQEFTSLLTIVNVLDGMDQYRDPDLNSNDIGNVELSPQLKLSQTPDAITDDDYVDIGALIQGNSMNINDRDNGYQEVQCKNQQIVIMDSLNETKPLEIEKVLVGQGTNLVNATTPCREAFPK

SEQ ID NO: 6104 - protein, 494 aa, Geobacillus stearothermophilus
SSIAAPKLKEKVEKFLSGKKKMYINGSFVESASGKTFDTPNPATGERLATVYEGDAEDIDRAVKAAREAFDRGPWSRMSAAERSRLMYKLADLMEENKEELAQLETLDNGKPIRETINADVPLAIEHMRYYAGWSTKIVGQTIPVNGPYFNYTRHEPVGVVGQIIPWNFPLLMAMWKLGAALATGCTVVLKPAEQTPLSALYLAELIEEAGFPAGVVNIVPGFGETAGDALVKHPQVDKIAFTGSTEVGKLIMANASKSLKRVTLELGGKSPNIILPDADFSKAIPGALNGVMFNQGQVCCAGSRVFIQKKQYDNVVADMVSHAKSIKQGFGLKADTEMGPLVSSEQQNRVLGYIEKGLEEGAELLTGGQKPSEQGYFVEPTIFANVEDSMTISKEEIFGPVIAALPYEDIDELIERANDTNYGLAAGVWTRDVTKAHYIANKLRAGTVWVNCYNVFDAASPFGGYKESGIGREMGSYALDNYTEVKSVWIAQN

SEQ ID NO: 6105 - protein, 354 aa, Magnaporthe grisea 70-15
MDPRSREVHLVTGGNGYIGLHVVTALLSKGFIVHTTVRSNKFKKVAALYALRDRHQPGRLQIFHADLLRPGSFTKAMKGCTVVHHIASPFLLPEDIKDGETQCIIPAVEGARNVLASVNETYSVKRVVFMSSVGAIYGDSRDVIEYMDGTLTEEYWNETSTSHHYPFHYSKVLAEKEAWMISKEQSRWDMVVICPGLALGPSLSQDGSDSGSVVLMNRIFGGQLFFGAPNLHLPVVDVREVATAHVQAADLPWASGRYILAATETRSLGDIARICRRQKGASRLIPTHKVPDFLLRICAPWIRLSQYWLSRNLGVGFSLDNSRSYKDLGIDYRPLEETIADHFVVWKEAKLARR

SEQ ID NO: 6106 - protein, 398 aa, Shewanella sp. MR-7
MSIEIKVPVLPESVADATIATWHVKVGEQVSRDQNLVDIETDKVVLEVVAPEDGHIGEFLFQEGDTVLGEQVIAKFIAGAVSGQEVTKAEAEAAAPVAAAVTEESNDALSPSVRRLLAEHNVDASKVKGTGVGGRITKEDVEAFIKSAPKAAAAPAAPAVQPLAAGRSEKRVPMTRLRKTIANRLLEAKNSTAMLTTFNEVNMKPIMDIRKQYQEIFEKRHGIRLGFMSFYVKAVTEALKRFPEVNASIDGDDIVYHNYFDVSIAVSTPRGLVTPVLRDTDTMSLADIEKAVRDLAIKGRDGKLTVADMTGGNFTVTNGGVFGSLMSTPILNLPQSAILGMHAIKDRPMAVNGQVEILPMMYLALSYDHRIVDGRESVGFLVAIKDFLEDPTRLLLDL

SEQ ID NO: 6107 - protein, 968 aa, Magnetococcus sp. MC-1
MRLNHKILLLTIAILALLLSGSTALNVASFRSTYTDALLRGSFGIGHGINDILNEMLSLGLPLNSLDGMDTKLSNIVKQTPHITYAAITDLQGMVLFHSDAQLIGRHFKDEAAIKSTNTREPIWQIYNRFDGKRYYDVALPIFDQTKQHIGVIRLGFNSKEVDDRVWHEITLIVINMFITFGLIALLLNFVLVRLIIKPVEILSQQARAISEGHFETGPPTQRSDEVGQLSTALDRMSATLHQQFQDLTQYQAELELKVTRRTHELAAANHLLLERNDDLEQAITTQRRLNDQLHQNKEALRESKTLLVSILQSLSVGVFGLDLTGKIQFINPAAANMLGGVIESMLGQSGLSLWYHDGTGKNPNPIGVTLTNHQPQQGEGRFVHMRGHTLQVGYTVMPILEQGQVTGVVVTFNDITANRRTERLTRTIIQGTSKVTGEAFQRELVRNISESLEMRFVFVGRFHEDPMPRIETTSVWANGRQGAPFNYLLADTPCAEVIGKETSVYAEHVQTHFPNDPLLAELKVESYMGTPLFRSDGKPLGILVVMDVQPLTDIELARSILGIFSGRAAMELEREETELALRVAKERAEAASQAKSEFLAMMSHEIRTPMNAILGITELLQEQPSKKEQLEFLTVQAKAGQALLTLINDILELSRLEAGREQLQTAPFDLYELLRSVSTLLEPSAKHKGLSVHLEIAEGLSPNWIGDERRLRQVLINLVGNGIKFTNRGSIWISAQPMANGLEIRVKDSGAGINPRHHDKIFERFHQVDSTATRKHGGTGLGLAITKKLMDLMGGEIRMESQPDQGSCFTLALPLSEAPCALPAAEEAALPPLDVTAPLRALKILLVEDSADNALLIRSFLKSTPYHLEIVEDGQQALDRLQDSNFDLVLMDMQMPVMDGYTATSQIRLREALDELPPSIIIALTAHALKGDREKCLKAGCDDFLTKPIRKKQLLAFLAHYAVSPTL

SEQ ID NO: 6108 - protein, 274 aa, Zea mays
MAAALRFPGVARESLSLDAPVAASKLGRERRPAPASANPGPQCWRRRRGLAVRCQTGSTAPPVLRTEEAPAAAAGARNAQAGFTVVMKFGGSSLASAERMREVAGLILSFPDETPVVVLSAMGKTTNNLLLAGEKAVSCGAPKASEIPELAVIKDLHLRTVDELGLDRSIVSGLLDELEQLLKGVAMMKELTLRTRDYLVSFGECMSTRIFAVYLNKLGKKARQYDAFDIGFITTDDFTNADILEATYPAVAKRLHEDWMDDPAIPIVTGFLGK

SEQ ID NO: 6109 - protein, 624 aa, Glycine max
MATVIRNPIPFPSTSHRPNQNHSNNTFLIFRFPQTSRSSLHSKSRFAFSCSQSEPPPPSPSASPRRRPPYIPNRIPDPSYVRIFDTTLRDGEQSPGASMTSKEKLDVARQLAKLGVDIIEAGFPAASKDDFEAVKMIAQEVGNAVDDDGYVPVICGLSRCNEKDIRTAWEAVKYAKRPRIHTFIATSAIHMEYKLRMSKDKVVDIARNMVKFARSLGCEDVEFSPEDAGRSDREFLYEILGEVIKAGATTLNIPDTVGITMPSEFGKLIADIKANTPGIENVIISTHCQNDLGLSTANTIEGARAGARQLEVTINGIGERAGNASLEEVVMALRCGAHVNGNLYTGINTKHIFLTSRMVEEYTGLQLQPHKALVGANAFAHESGIHQDGMLKHKGTYEIISPEDIGLERTNEAGIVLGKLSGRHALRKRLEELGYELSDDQVQTLFWRFKAVAEQKKRVTDADLRALVSDEVFQAEPVWKLGDLQVTCGTLGLSTATVKLLSSDGSTHVACSVGTGPVDSAYKAVDLIVKEPVTLLEYSMNAVTEGIDAIATTRVVIRGESETSTSTTHALTGEAVLRTFSGTGAGMDVVVSSVKAYIAALNKMLGFKETSPSAEKIPVSSLKI

SEQ ID NO: 6110 - protein, 290 aa, Shewanella sp. MR-7
MSVLINKDTKVICQGFTGGQGTFHSQQAIDYGTQMVGGVSPGKGGTEHLGLPVFNTVKDAVAATGATASVIYVPAPFCKDAILEAIDGGIELIVCITEGIPTLDMLEVKVKLEETGVRMIGPNCPGVITPGECKIGIMPGHIHLKGKVGIVSRSGTLTYEAVKQTTDEGFGQSTCVGIGGDPIPGTNFIDVLEMFQNDPQTEAIVMIGEIGGTAEEEAAAYIKANVTKPVVSYIAGVTAPAGKRMGHAGAIIAGGKGTAADKFAALEAAGVTTVRSLADIGKALRAKTGW

SEQ ID NO: 6111 - protein, 250 aa, Oryza sativa
MKFNIANPTTGCQKKLEIDDDQKLRAFYDKRISQEVSGDALGEEFKGYVFKIMGGCDKQGFPMKQGVLTSGRVRLLLHRGTPCFRGYGRRDGERRRKSVRGCIVSQDLSVINLVIVKKGDNDLPGLTDTEKPRMRGPKRASKIRKLFNLAKDDDVRKYVNTYRRTFTTKNGKKVSKAPKIQRLVTPLTLQRKRARIAQKKQRIAKKKSEAAEYQKLLAQRLKEQRERRSESLAKRRSKLSAATKAAATTA

SEQ ID NO: 6112 - protein, 152 aa, Zea mays
NGGDEESKDEGGGKHGEQKKKKKKYTTGRLSFCSFSFPSASGRRRFAAVRASAETMATEKLGIKVERNPPESRLSELGVRQWPKWGCEKSKFPWTYSAKETCYLLQGKVKVYPEGHGEEFVEIGAGDLVVFPKGMSCTWDVAEAVDKHYNFE

SEQ ID NO: 6113 - protein, 334 aa, Pseudomonas chlororaphis
MALSKEVPEFDIDDEVLLMETDIATDSMSNEGSAVPSVRAKSKHSASLKQHKHIDYTRALDATQLYLNEIGFSPLLSPEEEVHFARLSQSGDPAGRKRMIESNLRLVVKIARRYVNRGLSLLDLIEEGNLGLIRAVEKFDPERGFRFSTYATWWIRQTIERAIMNQTRTIRLPIHVVKELNVYLRAARELTQKLDHEPSPEEIANLLEKPVGEVKRMLGLNERVSSVDVSLGPDSDKTLLDTLTDDRPTDPCELLQDDDLSQSIDQWLSELTDKQREVVVRRFGLRGHESSTLEDVGLEIGLTRERVRQIQVEGLKRLREILEKNGLSSESLFQ

SEQ ID NO: 6114 - protein, 376 aa, Candida albicans
MDGEEVAALIIDNGSGMCKAGFAGDDAPRAVFPSLVGRPRHQGIMVGMGQKDSYVGDEAQSKRGILTLRYPIEHGIVSNWDDMEKIWHHTFYNELRVAPEEHPVLLTEAPMNPKSNREKMTQIMFETFNVPAFYVSIQAVLSLYSSGRTTGIVLDSGDGVTHVVPIYAGFSLPHGILRIDLAGRDLTNHLSKILSERGYSFTTSAEREIVRDIKERLCYVALDFEQEMQTSSQSSAIEKSYELPDGQVITIGNERFRAPEALFRPADLGLEAAGIDQTTFNSIMKCDMDVRKELYGNIVMSGGTTMFPGIAERMQKEITALAPSSMKVKIIAPPERKYSVWIGGSILASLSTFQQMWISKQEYDESGPSIVHHKCF

SEQ ID NO: 6115 - protein, 74 aa, Crocosphaera watsonii WH 8501
MSNINEQIKKETEEARNVCSTEGASSGDCAAAWDAVEELQAEASHQREKETPKTGFQQYCDDNPDAVECRVYED

SEQ ID NO: 6116 - protein, 291 aa, Escherichia coli W3110
MAEEELLSQGATQRVLDATQLYLGEIGYSPLLTAEEEVYFARRALRGDVASRRRMIESNLRLVVKIARRYGNRGLALLDLIEEGNLGLIRAVEKFDPERGFRFSTYATWWIRQTIERAIMNQTRTIRLPIHIVKELNVYLRTARELSHKLDHEPSAEEIAEQLDKPVDDVSRMLRLNERITSVDTPLGGDSEKALLDILADEKENGPEDTTQDDDMKQSIVKWLFELNAKQREVLARRFGLLGYEAATLEDVGREIGLTRERVRQIQVEGLRRLREILQTQGLNIEALFRE

SEQ ID NO: 6117 - protein, 112 aa, Prochlorococcus marinus str. MIT 9313
MKKVEAIVRPFKLEDVKLALVNAEIIGMTVSEVRGFGRQKGQVERYRGSEFTVEFLQKLKVEVVVDDDKVEAVVNAIAEAAKTGEIGDGKIFISPVDSVVRIRTGERDSKAL

SEQ ID NO: 6118 - protein, 498 aa, Geobacillus kaustophilus HTA426
MTMISAQTTEADLWIDGEWRPAASGERFDVIDPATGEVTARVANAGEDDVDAAVAIAEEAFSDRRWLAISPLERGRILRRIAELIRQHHCELAQLMTRENGMPINLALFIEIPLAADCFDFFASLVVKPQGEVLPFSVAGSAPDYMAWTMKEPIGVAGLITPWNFPLLMPTWKIAPALAAGCTMVVKPAPETPLTALKLAEICHEAGVPEGVINVLPGLDEAGKALVRHPRVPKIAFTGETETGRHILQAAAPHIKRVTLELGGKSPNIIFADADLEQAAKSALFGVFYNSGQVCQAGSRILVERTVYEPFVERLAERAKKLKVGPGTNPRSDLGPVISREQYEKVLRYIEIGKQEGARLAAGGRALDGGGGGYFIEPTVFADVSPSMRIACEEIFGPVAAVIPFADEEEAVRIANGTMYGLAAAVWTNDIKRALRLARRVKSGTVWLNTYQVLSPTAPFGGYKQSGLGRELGMQALDAYLETKTVICDLNDRPMTLF

SEQ ID NO: 6119 - protein, 428 aa, Agrobacterium tumefaciens str. C58
MTRLSSGLTVVTERMPHLESVALGVWIKSGSRNETTAEHGIAHLLEHMAFKGTARRTARQIAEEIENVGGEVNAATSTETTSYYARVLKDHVPLAVDILADILTESLFDEDELEREKNVILQEIGAATDTPDDVIFDNFSGVAYRDQTIGRPILGTPDTVQSFTSGEIRHYLARNYTTDRIFVVAAGAVDHESFVKQVEERFASLPLVPAAPPVMEKAIYTGGEIRETRDLMDAQVLLGFEGKAYHARDFYCSQILANILGGGMSSRLFQEVREARGLCYSVYAFHWGFSDTGIFGVHAATGGNDLPELIPVIVDELRKSSETIHQDEINRARAQIRAQLLMGQESPAARAGQIARQMMLYGRPIPNEEMMTRLEDITRERLTDLAGRLFFDTVPTLSAIGPLEQLPPLSDITAALSAQQPARIKANG

SEQ ID NO: 6120 - protein, 99 aa, Rhodospirillum rubrum ATCC 11170
MATKVRIFQPAKTAMQSGRANTKRWVLEFEPTEKKVHDDLMGWVGSGDMNGQLRLFFATRKDAESYAKRKGFTYTAQDANPRVIKPKSYSDNFAYHKIS

SEQ ID NO: 6121 - protein, 357 aa, Desulfovibrio vulgaris subsp. vulgaris str. Hildenborough
MHMNICLLPGDGIGPEIVAQGTKVLDAVARRFGHTVSTSSALIGGAAIDATGSPLPDATVEACRTSDAVLLGAVGGPKWDDLPSEKRPEKGLLGIRKALGLFANLRPAALFPELAGACLLRADIAAAGLDLVVVRELTGDVYFGQPAGIETRDGLRTGFNTMIYDEDEVRRIARVAFDTARARKRRVCSVDKANVLATSRLWREVVEEVARDYPDVELSHMYVDNAAMQLVRWPAQFDVIVTGNLFGDILSDEAAVITGSIGMLPSASMGSGGPALFEPIHGSAPDIAGQDKANPIATILSVGMMLRLGFGLAAEADAIDAAVRRVLAEGYRTGDIMENGRTLVGTVSMGNLIAERI

SEQ ID NO: 6122 - protein, 318 aa, Musa acuminata
MDSFPVIDMEKLLGRERGAAMEILRDACEKWGFFEILNHGISHDLMDEVEKVNKEQYNKCREQKFNEFANKALENADSEIDHLDWESTFFLRHLPVSNISEIPDLDDQYRKAMKEFAAAIEKLAERLLDLLGENWKLEKGYLKKAFSNGSKGPTFGTKVSSYPPCPRPDLVKGLRAHTDAGGIILLFQDDQVSGLQFLKDGEWLDVPPMRHAIVVNLGDQLEVITNGKYKSVVHRVVAQTDGNRMSIASFYNPGSDAVIFPAPALVEKEAEEKKEVYPRFVFEDYMKLYVGHKFQAKEPRFEAMKAMEAVATHPIATS

SEQ ID NO: 6123 - protein, 107 aa, Haemophilus influenzae R2846
MTLNITSKQMDITPAIREHLEERLAKLGKWQTQLISPHFVLNKVPNGFTVEASIGTPLGNLLASATSDDMYKAINEVEEKLERQLNKLQHKSESRRANERLKDSFEN

SEQ ID NO: 6124 - protein, 430 aa, Kluyveromyces lactis NRRL Y-1140
MSFLAPRFLTTKVFRPMSIGARTFSSSIRVSAAAFDRSKPHLNIGTIGHVDHGKTTLTAAITKTLAERGGADFLDYSSIDKAPEERARGITISTAHVEYETDKRHYSHVDCPGHADYIKNMITGAAQMDGAIIVVAATDGQMPQTREHLLLARQVGVQHIVVFVNKVDTIDDPEMLELVEMEMRELLTQYGFDGDNTPVIMGSALCALEGKQPEIGEQAIMKLLDAVDEYIPTPARDLEKPFLMPVEDIFSISGRGTVVTGRVERGNLKKGEEIEIVGHNTTPFKTTVTGIEMFRKELDQAMAGDNAGVLLRGVRRDQLKRGMVLAKPGTVKAHTKFLASLYILTKEEGGRHSGFGENYRPQIYVRTADVTVVLKFPEAVEDHSMQVMPGDNVEMECELVHPTPLEAGQRFNIREGGKTVGTGLVTRILE

SEQ ID NO: 6125 - protein, 539 aa, Neisseria gonorrhoeae
MDAFTRAWYALERHYQDTCHILLRDRFAAEPDRFERMHERLDGMLFDYSKNRFGEDTLQLLCRLAETADLEGKMRALRTGAKVNGSEGRAALHTALRLPDGADAVYADGRDVLPEIRRELNRALKFAHSLDDGLYQGITGKRIADFVHIGIGGSDLGPAMCVQALEPFRRQISVHFVSNADPACLDEVLCRLNPETTMFCVASKSFKTPETLLNAEAVKAWYRGAGFSESETARHFCAVSADTEAAQSFGIAAERVFAMYDWVGGRYSVWSPVGLPVMVAVGGARFRELLAGAHAMDSHFFHTPPRRNIPVLMALIAVWYNNFQHADGQTAVPYSHNLRLLPAWLNQLDMESLGKSRASDGSPAACKTGGIVFGGEGVNCQHAYFQLLHQGTRLIPCDFIVPMTAQGAEDGRSRFTVANAFAQAEALMKGKTLDEARAELADLPEAERERLAPHKEFPGNRPSNSILLDRLTPYNLGMLMAAYEHKTFVQGAIWNVNPFDQWGVEYGKQLATTIIGELEGGTSVHDASTEGLMAFYREC

SEQ ID NO: 6126 - protein, 289 aa, Glycine max
MGAGDYYKILKMNRNATDEELKRAYKRLAMKWHPDKNHPHHHQHVTKEEAEAKFKQVSEAYDVLSDPKKRQIYDFYGHYPLNSMKVNEENGDGDVNRVPKGVKNVGVVESKLVCTLEELYKGCKKKLKISKTIPHEFGKTKTVEEVLKIYIKPGWKKGTKITFPGKGNQEAEATAPDDLIFVVDEKPHALFKRDGNDLVVTQKILLVEALVGKTLNLTTLDGRELTIQVTEVVKPKYVLVVPNEGMPISKEPGKKGNLRIKFDVMFPSRLTSQQKYELKRILSNSTADD

SEQ ID NO: 6127 - protein, 539 aa, Neisseria gonorrhoeae
MDAFTRAWYALERHYQDTCHILLRDRFAAEPDRFERMHERLDGMLFDYSKNRFGEDTLQLLCRLAETADLEGKMRALRTGAKVNGSEGRAALHTALRLPDGADADYADGRDVLPEIRRELNRALKFAHSLDDGLYQGITGKRIADFVHIGIGGSDLGPAMCVQALEPFRRQISVHFVSNADPACLDEVLCRLNPETTMFCVASKSFKTPETLLNAEAVKAWYRGAGFSESETARHFCAVSADTEAAQSFGIAAERVFAMYDWVGGRYSVWSPVGLPVMVAVGGARFRELLAGAHAMDSHFFHTPPRRNIPVLMALIAVWYNNFQHADGQTAVPYSHNLRLLPAWLNQLDMESLGKSRASDGSPAACKTGGIVFGGEGVNCQHAYFQLLHQGTRLIPCDFIVPMTAQGAEDGRSRFTVANAFAQAEALMKGKTLDEARAELADLPEAERERLAPHKEFPGNRPSNSILLDRLTPCNLGMLMAAYEHKTFVQGAIWNVNPFDQWGVEYGKQLAKTIIGELEGGTSVHDASTEGLMAFYREC

SEQ ID NO: 6128 - protein, 121 aa, Triticum aestivum
  misc_feature (37)..(37): Xaa can be any naturally occurring amino acid
  misc_feature (44)..(44): Xaa can be any naturally occurring amino acid
  misc_feature (54)..(55): Xaa can be any naturally occurring amino acid
  misc_feature (64)..(64): Xaa can be any naturally occurring amino acid
  misc_feature (67)..(67): Xaa can be any naturally occurring amino acid
  misc_feature (75)..(76): Xaa can be any naturally occurring amino acid
  misc_feature (90)..(90): Xaa can be any naturally occurring amino acid
  misc_feature (93)..(93): Xaa can be any naturally occurring amino acid
  misc_feature (104)..(104): Xaa can be any naturally occurring amino acid
AHRRRPFLNRPPSPAALVAPGQRGVIAARGTPARAQXRSLPKGXLPGPRKFYKXXAILRPWRVXHVXSGLLQMGXXGVTVSDVRGYGGAXRGXRERYQGSEFSXDTFIAKVKMAKSQRSVC

SEQ ID NO: 6129 - protein, 323 aa, Gluconobacter oxydans 621H
MTQTAAPAWSTDSLERLDGKTALITGSTGGLGFEVACGLAKQGAAILLSGRNHNKGQAALARLHERVPFVKARFELLDLASLAGIEAFASAMRSRGEPIHLLANNAGVMGPATRLTTKDGFELQFGTNHLGHFALTGRLLPLLAAGNATVMTVASLAALKGEIPFGDLNARHSYNPMVRYRQSKLCNLLFALELNRRALKAPWPIHSRAAHPGWAASDIVANNGSLDQSANKAARFMRGLARRVAGPVFHAMGQTVEEGAWPLLYALASPEARDGGYYGPQGPGERRGVPGIAGLPALAHVPELAERLWTVSEQMTGVKYGLV

SEQ ID NO: 6130 - protein, 334 aa, Crocosphaera watsonii WH 8501
MRYDDTRGPGKGGVRYHPNVTMDEVQSLAFWMTFKCALLNLPFGGAKGGITLNPKELSKQELERLSRGYIEAIADFIGPDIDILAPDVYTNQMIMGWMMDQYNIIQRKISPGVVTGKPQTMGGSQGRDTATGTGAYYVIQTILPKFELIPEKTTVAVQGFGKAGAVVAELLGKVGYKVVAVSDSKGGIYAEQGLDIVSIRNYKEEHQGIAAIYCQDTVCNIGEHQSITNEELLGLDVDVLIPAALENQITEENADNVRAKFIFEVANGPINSAADTILDEKGIYVFPDILVNAGGVTVSYFEWVQNRSGLYWTKTEVNQRMRDKMMSEAQEVWV

SEQ ID NO: 6131 - protein, 263 aa, Geobacillus kaustophilus HTA426
MPYETLRIERRNKGVAWVMIHNPPANAISERLMEELEKAADELEADRGVRVVVIASAHPKTFLAGADLKDMIQRGTQFAGNEAGIAEQSARMQRCFDRFATMPKPVIAAINGYALGGGCELALACDFRIMGGGKIGLTEVSLGLIPGAGGTQRLTRLVGRAKATELIFLARRLDPQEALELGLVHRVTPPERLEEEASAFAEQLSEGAVRAMGLAKRAIYAAEGLPEDGFGIEAASFAATFKTGEPAIGLAAFFQKKQPQFLR

SEQ ID NO: 6132 - protein, 154 aa, Crocosphaera watsonii WH 8501
MPLPTSLVTLEGTALPLSELENKVILFVNVASKCGLTPQYSGLVQLDKKYGERGFKVVAVPCNQFGEQEPGTPAEIKEFTSTKYDVEFTLLEKQDVNGSNRSPLYQFLVKDGEDIAWNFGKFLVGRDGEVVARFEPATAPDDAQLEAAIDKALG

SEQ ID NO: 6133 - protein, 302 aa, Roseovarius nubinhibens ISM
MIELGTTPPADDLIKDVSEADFMAEVVEMSQTVPVIVDFWAPWCGPCKTLGPALEAAVTKARGAVRMAKVNVDENQMIAGQLRVQSIPTVYAFWQGQPVDGFQGAVPPSEIDAFVERVVKTAGGDASGGLDDAIAAAEEMLDAGAASDAAQTFAAILEEDPQNAAAYGGMARAYIALDDADQAEAVLNGVPAELSNSPEIEAAHAQLALLRQAADAGPVAELRAAVEANPEDNQARFDLAQALHASGDAEAAVEELLTLFRRDREWNDGAAKQQLFTIFDALKPNDPVVLNGRRKLSSMIFA

SEQ ID NO: 6134 - protein, 573 aa, Haemophilus influenzae 86-028NP
MKKLSGAEMVVQSLRDEGVEYVFGYPGGAVLDIYDAIHTLGGIEHILVRHEQAAVHMADGYARSTGKVGCVLVTSGPGATNAITGILTAYTDSVPMVIISGQVMSNLIGSDAFQECDMLGISRPVVKHSFIVKKAEDIPSTLKKAFYIASTGRPGPVVVDIPKDTVNPNFKYPYEYPESVELRSYNPTVNGHKGQIKKALKALLVAKKPILFVGGGAITAECSKQLIQFAQRLNLPVTSSLMGLGAYPSTDKQFLGMLGMHGTLEANTAMHESDLILGIGVRFDDRTTNNLEKYCPNAKVIHIDIDPTSISKNVPVAIPIVGNAKNVLEEFLGLLNEEGLKSQTDLESWWQEINQWKAKKCLEFDRTSGVIKPQQVVEAVYRLTKGQAYVASDVGQHQMFAALHYPFDEPRHWINSGGAGTMGFGFPAALGVKLAHPEGTVVCVTGDGSIQMNIQELSTATQYGIPVVIICLNNHFLGMVKQWQDLIYSGRHSQTYMNSLPDFAKLAESYGHVGIKIATPDELESKLQEAFSIKNKLVFVDINVDESEHVYPMQIRGGAMNEMILSKPQEETN

SEQ ID NO: 6135 - protein, 814 aa, Dechloromonas aromatica RCB
MSKPRLVLIGNGMAGVRTVEELLKIKPDHYDITIFGAEPHPNYNRILLSPVLAGEMTISEIVLNELEWYKENNIKLHTGKQIKTIDRVKRKVIAEDGTEEEYDRLLIATGSTPFMLPIPGNDLPGVIGYRDIKDTDEMIEAAKLHKHAVVIGGGLLGLEAANGLKLRGMDVTVVHLGPWLLERQLDEVAGKMLQKSLEDKGLKFLLQKQTEMLVQGESGRVAAVRFKDGMTIPADLVVMAAGIRPNYALAESSGIYCNRGIVVNDTMQTYDPKVYAVGECVTHRGIAYGLVAPLFEQAKVAANHLAGYGIGRYTGSVTSTKLKVTGIDLFSAGNYMGGEGTEEIVLNDPYGGVYKKLVLKDNKLVGGVMYGDTADGPWYFQLLKDGRDIHDIRDQLIFGQSLVGDVGHAGNSKAADMPDSAEVCGCNGITKGVIVQAIKAKGLFTLDEVKKHTKAASSCGSCAGLVEQILASTIGGAYTPAASDKKPVCGCTEQSHKAVREAILNQHLITKEAVFAALEWKTPNGCDKCRPAVNYYLISTWPHEAKDDPQSRFINERSHANIQKDGTYSVVPRMWGGLTNPKELRAIADAAEKYNVPTVKVTGGQRIDLLGVKKEDLPAMWADLNAAGMVSGHAYGKSIRTVKTCVGMEHCRFGTQLAMSMGVKLEKMLFDMYAPHKVKLAVSGCPRNCAEAGIKDVGIIGVDSGYEIYIAGNGGIKTEVAQFLCKVSSDEDVMEYSGAFLQLYRLEGWYLERTCHYLERVGMDYIKGRILEDEEGRKALYAALLDSLKDAKDPWATSREPEAIKQFIPIMVEA

SEQ ID NO: 6136 - protein, 299 aa, Ulva intestinalis
RHYAHVDCPGHADYVKNMITGAAQMDGAILVVSGADGPMPQTKEHLLLAKQVGVPNIVVFLNKEDQVDDAELLELVQLEVQETLEAYEFPGEDVPIVTGSALLALEALIENTDVSDNKWVNKIYDLMKEVDNYIPTPERETDKTFLMAIEDVFSITGRGTVATGRVERGVLKTGETVDLVGLGDTKNVTVTGLEMFQKTLDETVAGDNVGVLLRGVQKDEIQRGMVIAAPNSIEPHTKFEAQVYVLTKEEGGRHTPFFPGYRPQFYVRTTDVTGKIENFTADDGSETKMVIPGDRVKMV

SEQ ID NO: 6137 - protein, 581 aa, Triticum aestivum; identical to SEQ ID NO: 606

SEQ ID NO: 6138 - protein, 300 aa, Ulva sp. WA4-20b
AHVDCPGHADYVKNMITGAAQMDGAILVVSGADGPMPQTKEHLLLAKQVGVPNIVVFLNKEDQVDDVELLELVQLEVQETLETYEFPGEEVPIVTGSALLALEALIENTEASDNEWVKKIYTLMEKVDSYIPTPERETDKTFLMAVEDVFSITGRGTVATGRVERGVLKTNETVDLVGLGDTKNVTVTGLEMFQKTLDETVAGDNVGVLLRGVQKDEIQRGMVIAAPNSIEPHTKFEAQVYVLTKEEGGRHTPFFPGYRPQFYVRTTDVTGKIENFTADDGSETKMVIPGDRVKMVVELI

SEQ ID NO: 6139 - protein, 337 aa, Cryphonectria parasitica
MVVKVGINGFGRIGRIVFRNAHEHSDVEIVAVNDPFIEPHYAAYMLKYDSQHGNFKGDVTVEGSDLVVGGKKVRFYTERDPAAIPWSETGADYIVESTGVFTTTEKAKAHLKGGAKKVIISAPSADAPMYVMGVNEKTYDGSGMVISNASCTTNCLAPLAKVINDEFKIIEGLMTTVHSYTATQKTVDGPSAKDWRGGRTAAQNIIPSSTGAAKAVGKVIPELNGKLTGMSMRVPTSNVSVVDLTVRIEKGATYEQIKTAVKKAADGPLKGVLAYTEDDVVSTDMNGNPNSSIFDAKAGISLNDHFVKLVSWYDNEWGYSRRVLDLISHVAKVDGNA

SEQ ID NO: 6140 - protein, 308 aa, Ulva californica
HYAHVDCPGHADYVKNMITGAAQMDGAILVVSGADGPMPQTKEHLLLAKQVGVPNIVVFLNKEDQVDDPELLELVQLEVQETLEAYEFPGEEVPIVTGSALLALEALIENTEASDNKWVEKIYALMEQVDSYIPTPERETDKTFLMAVEDVFSITGRGTVATGRVERGVLKTNETVDLVGLGDTKNVTVTGLEMFQKTLDETVAGDNVGVLLRGVQKDEIQRGMVIAAPNSIEPHTKFEAQVYVLTKEEGGRHTPFFPGYRPQFYVRTTDVTGKIENFTADDGSETKMVIPGDRVKMVVELIQPMAIE

SEQ ID NO: 6141 - protein, 523 aa, Gluconobacter oxydans 621H
MSFHHPSFGTIADDRVIIFDTTLRDGEQSPGFSMNLEEKLRMAHALSNLGVDVIEAGFPVASEGDFESVRRIAEEVRGSVICGLARSGGKRDIESCGEALKKAERPRIHNFISTSPLHMKYKLRMEPETVLEIIASGNQKARQFTDDVEWSAEDGSRTDPDFLCRCVEVAIRNGANTINIPDTVGFATPEEMRAIFTMLRERVPGADQVIFSAHNHNDLGLGVANTLASVEGGARQIECTINGIGERAGNAALEEIVMALRTRHDQYGKTTGIETTKLLGMSRMLATITGFDVQPNKAIVGRNAFAHESGIHQDGILKNAATYEIMTPESVGWNKTSLVMGKHSGRAAFRDKLAQLGYPPLEDEALNAAFARFKDLADSKKVVFDDDIRALVDDESRDHERVHLISLELASGTKQKSHAKLEISVDGAIQYAAVSGNGPVDAAFRAIGEAFPHTAELALFSVANVTEGTDAQARTTVRLQENGKLVDGQGADADTVVSAVRAYIHALNKLLTKRERTEPEALS

SEQ ID NO: 6142 - protein, 555 aa, Debaryomyces hansenii CBS767
MEPASKKTKLEELSKFGSKYYPYDIDNKTIISKYIKREDLKPINVLEAKLNDTRANRNNIDVGDSIAHLFLRDFRTIDNKGLSIASELATTTKTPLITFHIFCLEEFDAHSVSPFKLEYMLGSLDVLKKDLREMNIPLVSLQVEKRKDVPTKIAEFLEQNNTSHVFCNMEYEVDELRLLSKLVCFLLDKHISFNPVHDSCIVKPGELKTKSKGTQYAVFTPWYKAWCNYLKIEDAPFMEYPRPHANESFSDPNKLFDSEIPQVPESKRLTHDQQKEFDTCWKCGEHEAWLALSVFLESDKFKKYDESRNEISEESVSRMSCPISSGIISTRSIIRYILENKFVKKIDSGEQGTGWIRQIAWRDFYRHILCNWPYVCMFKPFLLEYDDLNWEYNSDHFYKWCQGKTGFPIVDAAMRQLNQTGYLHNRCRMIVASFLSKHLLIDWKYGEYYFMEHLIDGDFASNNGGWGFSSSTGVDPQPYFRIFNPWLQSERFDKKGTYIRTWVPELKDIQDEKGIHNPYEKGYGHIAEKNGYPKPIVDHKYCRERALNRFKDAKY

SEQ ID NO: 6143 - protein, 563 aa, Haemophilus influenzae 86-028NP
MRLKFQLFLMKGNTMKNINPTHTQAWKSLEAHKAELSNTTIQDLFKQEKNRFDDYSLTFNNQILVDFSKNNINQTTLSHLRQLAQECALDSAKEAMFTGEKINRTENRAVLHTALRNRTNTPVLVDGKDVMPEVNAVLAKMKDFCQRIISGEWKGYTGKAITDVVNIGIGGSDLGPYMVTEALRPYKNHLNMHFVSNVDGTHIAETLKKVNPETTLFLVASKTFTTQETMTNAQSARDWLLKAAKDESAVAKHFAALSTNAKDVEKFGIDTNNMFEFWDWVGGRYSLWSAIGLSIALSIGFENFEALLNGAHEMDKHFRTTPIEKNIPTTLALVGLWNTNFLGAQTEAILPYDQYLHRFAAYFQQGNMESNGKYVDRDGNVINNYQTGPIIWGEPGTNGQHAFYQLIHQGTTLIPCDFIAPAQSHNPLADHHNKLLSNFFAQTEALAFGKTKEEVEAEFVKAGKSLDDVKNIVPFKVFTGNKPTNSILVQKITPFTLGALIAMYEHKIFVQGVIFNIFSFDQWGVELGKQLANRILPELTDSEKVASHDSSTNGLINQFKAWR

SEQ ID NO: 6144 - protein, 238 aa, Brassica napus
YDECIKDCDKAVERGRELRSDYKMVAKALTRKGTALGKMAKVSKDYEPVIETYQKALTEHRNPDTLKRLNEAERAKKELEQQEYFDPAIGDAEREKGNEFFKEQKYPDAVRHYTEAIKRNPKDPRAYSNRAACYTKLGAMPEGLKDAEKCIELDPTFSKGYSRKGAVQFFMKEYDNAMETYQEGLKHDPNNQELLDGVRRCVQQINKANRGDLTPEELKERQAKGMQDPEIQNILTDP

SEQ ID NO: 6145 - protein, 357 aa, Oceanicola granulosus HTCC2516
MLDNQPTAVRPPHAPDDHPKLPREKVGILLANLGTPDGTDYWSMRRYLNEFLSDKRVIDYSRWVWQPILQTIVLTKRPFTSGAAYRSIWNEEADESPLATITKQQTAAIAATLRTRFGDETVVDYCMRYGNPSTESKVKALIAQGCHRILFFPLYPHYAGATSATANDAFFAALMREKWQPVARVVPPYFEEPTYIDALAASVERAYAELEARPDVLLCSYHGLPERYLREGDPYHCQCQKTTRLLKERLGWGDDEIATTFQSKFGPEEWLKPYTVEEVARLAKAGKKRIAVCAPAFSADCIETLEEINEEIRDSFLEAGGESFTYIPCLNDDAAHIAALCGVIEDNLKGWLDPIPG

SEQ ID NO: 6146 - protein, 752 aa, Oryza sativa
MAATVAAASSRKRGFSVADILDDPFPLPSHHLAKRGRCSSSAASAADLGVSLEFDPIEVLQLIFPHEDPQLLKSFFEASGNVLDAAIRGFKHRLQSHTDTEITEAASGDTGNEVVSPKVESDLSAMNIPSNGSEWAELVVKEMSSALDLVDAKNRAFRLLDLFEKSTAACISPVEMRKMREEHKILKLMLGGLLEQNGVLKRAFLKQHNRLNDYEKKMSQERSQIIDTYEKEIKALQFATTAKLKQRNMEQYLFLATLLILSLAFVKLRPRNNGENPPPGPWQLPVIGSLHHLAGALPHRALRDLATRHGELMLLRLGELPVVVASSPAAAREVMRTHDAAFATRPQTATLRALTRDGLGVAFAPQGEHWRCLRKLCVTELLGARRVRCLRRAREAEAAALVASLSTTTPEPVNVSSLVARYVTDAVVRAVVGDRISDRDAFLERLEEGVKVAAGFTLADVFPSSRLARALSGTARRAEAHSREMTRLMDGVIEEHRQRRAATGWRDEEDEDLLDVLLRIQKDGGLQIPLDMGTIRAIIIDLFSAGSETTGTTLQWAMAELMRNPAALRKAQAEVRGVLAGHSHVTEDALPDLHYLHLVIKETLRLHVAVPLLLPRECQEPRLRVLGYDVPERAMVLVNAWAICRDTAVWGPDAEEFRPERFDGGAVDFKGTDFEFVPFGAGRRMCPGVAFAVAIMELGLASLLFHFDWELAGGTAAGELDMAEGLGITARRKSDLWLHATVSVPVPNTETS

SEQ ID NO: 6147 - protein, 401 aa, Ralstonia solanacearum
MLSEQSKPLIDASVPVLREHGLTITQTFYRNMFASHPELTNLFNMGNQANGSQQQSLASAVFAYAANHGNNAALAPVVGRIVHKHAAVGIRPSHYPIVGRHLLGAIAEVLGDAATPELLAAWDEAYWLLAAELIAAEARLYAHTQSGPDHRQPVRIIERHAQAEDVVSFTLEAVGGAKLADFLPGQYISVQVELAPGVLQQRQYSLSDAPNGRTWRISVKRDAGGSGRPAGTVSNWLHDNARPGEVLLVSQPYGDFVPQLATDSPIVLMSAGVGITPMIATLNALARRNTARKVVFSHAGQAASHVAHADDLERAAQVLPDFAAHVFLESGEAADFAARPARPGRMTVETFLDDGVADADFYLCGPLPFMQAQRAALLAGGVPAGRIHREVFGPDLLDDIL

SEQ ID NO: 6148 - protein, 883 aa, Salmonella enterica subsp. enterica serovar Typhi str. CT18
MNEQYSALRSNVSMLGKVLGETIKDALGEHILDRVETIRKLSKSSRAGNEANRQELLTTLQNLSNDELLPVARAFSQFLNLANTAEQYHSISPKGEAASNPEVIAHTLRKLKNQPDLNDATIKKAVESLSLELVLTAHPTEITRRTLIHKMGEINNCLKQLDNTDIADYERHQVMRRLRQLIAQSWHTDEIRKQRPSPVDEAKWGFAVVENSLWQGVPNYLRELNEQLEENLGYKLPVDFVPVRFTSWMGGDRDGNPNVTAEITRHVLLLSRWKATDLFLKDIHVLVSELSMVDATPELLALVGEEGASEPYRYLMKKLRARLMATQSWLEARLKGEKLPKPAGLLTQNEQLWEPLYACYQSLQACGMGIIANGELLDTLRRVKCFGVPLVRIDIRQESTRHTEALGEITRYLGIGDYESWSEADKQAFLIRELNSKRPLLPRNWEPSNDTREVLETCKVIAEAPKGSIAAYVISMAKTPSDVLAVHLLLKEAGIGFAMPVAPLFETLDDLNNADDVMTQLLNIDWYRGLIQGKQMVMIGYSDSAKDAGVMAASWAQYQAQDALIKTCEKAGIELTLFHGRGGSIGRGGAPAHAALLSQPPGSLKGGLRVTEQGEMIRFKYGLPEVTVSSLSLYTSAILEANLLPPPEPKDSWRHIMDELSVISCETYRGYVRENKDFVPYFRSATPEQELGKLPLGSRPAKRRPTGGVESLRAIPWIFAWTQNRLMLPAWLGAGTALQKVVEDGKQSELEAMCRDWPFFSTRLGMLEMVFSKADLWLADYYDQRLVAKTLWPLGKELRDLLEEDIKVVLAIANDSHLMADLPWIAESIQLRNVYTDPLNVLQAELLYRSRLTEEQGKSPDPRVEQALMVTIAGVAAGMRNTG

SEQ ID NO: 6149 - protein, 567 aa, Vibrio vulnificus CMCP6
MTKIVIVGGVAGGASAAARARRLSEDAQIIMFERGPFVSFANCGLPYHIGGDIKERSKLLLQTPESFLARFNVDVRVMNEITAINRHEKTVTVKNLIDGSEYAESYDFLLLSPGAGPVVPPIPGIDNPLTHSLRNIPDMDRIIQTIQTNNVEHATVVGGGFIGLEMMEAFHQLGIKTTLLELADQVMTPVDREMAGFAHAEIRAKGIDLRLGTALTSVEYIANDHVASENAGEDIQHQHISGHLALSLSTGDTLNTDVLIMAIGVRPETKLAQQAGLQIGELGGIYTNDMMQTSDPSIYAVGDAVEEKDFVTGKQTLVPLAGPANRQGRMAADNMLGRSERYQGTQGTAICKIFDLAVASTGKNEKQLKRDGVEYEKVYVHTASHASYYPGAEIVSFKMLFDPKTGKIFGAQAVGKDGVDKRIDVMAVAQRAGMTVEQLQHLELTYAPPYGSAKDVINQAAFVANNLIKGDAKAIHFDEIEHLNDDQLLLDVRNPGELQAGGYLPGAINIPVDQLRQRMDELPKDKEIIIYCQVGLRGNVAYRQLVNNGYKARNLLGGYRTYMFSKC

SEQ ID NO: 6150 - protein, 593 aa, Oryza sativa (japonica cultivar-group)
MESTMKGIRGDNAPCVLDLDDAATVGGGVGDTYGEDCATEEQLVTPWTVSVASGYNLLRDPRYNKGLAFNERERETHYLRGLLPPAIVSQELQERKIMHNIRQYQLPLQKYMAMMDLQEGNERLFYKLLIDNVEELLPVVYTPTVGEACQKYGSIFSRPQGLYISLKEKGKILEVLKNWPERSIQVIVVTDGERILGLGDLGCQGMGIPVGKLALYTALGGVRPSACLPITLDVGTNNEALPNDEFYIGLRQKRATAQEYADFLHEFMTAVKQNYGEKVLIQFEDFANHNAFELLAKYGTTHLVFNDDIQGTASVVLSGLVAALKLVGGSLSEHSYLFLGVGEAGTGIAELIALEISRQTKAPIEECRKKIWLVDSKGLIVSSRKETLQHFKKPWAHEHEPVGNLLDAVKTIKPTVLIGTSGKGQTFTQEVVEAISSFNERPVIFALSNPTSQSECTAEQAYTWSKGRAVFASGSPFDPVEYDGKIYVPGQANNAYIFPGFGLGVVMSGAIRVHDDMLLAASEALAQQVTQENFDKGLTYPPFSNIRKISAHIAANVAAKAYELGLASRRPRPKDLVKYAESCMYSPLYRNYR

SEQ ID NO: 6151 - protein, 537 aa, Xanthobacter autotrophicus Py2
MTTSQSGARERLYLFDTTLRDGAQTNGVDFTVADKLRVLALLDQLGVDYVEAGYPGANPTDTQLFSQEHPAKARVTAFGMTKRPGRSAANDPGIAALVGAKADAICFVAKASAYQVRVALETTKEENLASIRESVQAAEAAGREALVDCEHFFDGFKEDRDFALACARTAYEAGARWVVLCDTNGGTLPHEVEAIVSELVKVVPGDHVGIHAHNDTEQAVANSLAAVRAGARQIQGTLNGLGERCGNANLCSIIPTLLLKPDYSAHFDIGVSRAALADIANVSRTLDEMLNRAPDRHAPYVGESAFATKAGIHASAILKDPATYEHVPPEAVGNRRKLLVSDQAGKSNVLAELERLGVPVEKADPRISRLLDEVKTREALGYAYEAADASFALLARRILGSVPDFFDVERFSVNVERRFNSKGEMSTVAEAIVKVKVGEEVLISAAEGNGPVNALDVALRKDLGKYQPFISGLHLTDYRVRVLNGGTEAVTRVLIESADETGERWTTVGVSPNIIDASFEALIDSITWKLLKEGATA

SEQ ID NO: 6152 - protein, 574 aa, Candida glabrata CBS 138
MCGIFAAYKHQDVHAFKPKALQLSKRIRHRGPDWSGNVVKNSTIMVHERLAIVGLDSGAQPITSEDGDYTLCVNGEIYNHIQLREQFPDYKFKTLSDCEPIIPAYLEHDIDAPKYLDGMFAWCLYDAKQDRIVAARDPVGITTLYMGRCSSSPKTVFFASELKCLTDDCDEITAFPPGHVYDSKTDQITRYFTPDWIDESRIPTTPVNFKDIRESLEKAVRKRLMAEVPYGVLLSGGLDSSLIASIAARETEKANEENDAADNDASASKQLAGIDNQGHLHTAGWSRLHSFAIGLPNAPDLQAARKVAKFIGSIHHEHTFTLQEGLDALDDVIYHLETYDVTTIRASTPMFLLSRKIKAQGVKMVLSGEGSDEIFGGYLYFAQAPSATEFHIESVKRVKNLHLADCLRANKSTMAWGLEARVPFLDKEFLQLCMNIDPKDKMIDQSAGRIEKYILRKAFDTSDEPDVKPYLPEEILWRQKEQFSDGVGYSWIDGLKDTAERVISDTMFSNPKIEWGEDIPTTKEAYWYRLKFDALFPQKTAASTVMRWIPKADWGCAEDPSGRYAKIHEQHVTA

SEQ ID NO: 6153 - protein, 488 aa, Geobacillus stearothermophilus
MKVQTEIKTYFNYINGNWVSSVSNNVEPSINPANRHDIVGYVQRSTLEDVNEAVTAANEAQTSWWKRSGVERGEYLYKAAHILEQCLQDIAETMTREMGKTLAEAKAETMRGVHILRYYAGEGARKIGDVIPSSDSEGLLFTTRVPLGVVGVISPWNFPVAIPIWKMAPALVYGNTVVLKPASETAVTAAKVIECFHEAGFPKGVVNMVCGSGSVVGQGIANHPDIDGVTFTGSNTVGKQVGRAAFERGAKYQLEMGGKNPVIVAKDADLDLAVEGTISGGLRSTGQKCTATSRVFIEREVYEPFKAKLLERVKQLKIGNGLDAETWMGPCASESQFHTVLSYIEKGKSEGAKLIYGGNRCLEGELANGFFVEPTIFEDVDLQMTIAREEIFGPVLALIQVDSIEEAIKLANDTEYGLSASIYTKNIGNALEFIKDIEAGLIKVNAETAGVEFQAPFGGMKQSSSHSREQGQAAIEFFTSIKTVFVKA

SEQ ID NO: 6154 - protein, 539 aa, Streptococcus pyogenes MGAS10394
MKFIEFNLSQDIQSAVVTAGFEKASPIQEMTIPLALEGKDVIGQAQTGTGKTAAFGLPTLNKIRTNENIIQALVIAPTRELAVQSQEELFRFGREKGVKVRSVYGGSSIEKQIKALKSGAHIVVGTPGRLLDLIKRKALILDHVETLILDEADEMLNMGFLEDIEAIISRVPADRQTLLFSATMPAPIKQIGVKFMKDPEHVQIKNKELTNVNVDQYYVRVKEQEKFDTMTRLMDVNQPELSIVFGRTKRRVDEITRGLKLRGFRAEGIHGDLDQNKRLRVIRDFKNDQIDILVATDVAARGLDISGVTHVYNYDITQDPESYVHRIGRTGRAGKSGESITFVSPNEMGYLSMIENLTKKQMKPLRPATAEEAFQAKKKVALKKIERDFADETIRSNFDKFKGDAVQLAAEFTPEELALYILSLTVQDPDSLPEVEIAREKPLPFKYVGGGHGNKNGKGGRGRDNRNRGDRRGGYRGDRNRDERDGDRRRQKRGKRDGHDGSGNRDFKRKSKRNSKDFFNKEKKSSAKNTGFVIRHKGE

SEQ ID NO: 6155 - protein, 361 aa, Bacillus anthracis str. 'Ames Ancestor'
MDILKLLMVAILIGLTAFFVAVEFAIIKVRSSRIDQLVSEKRRGALAAKKVTSNLDEYLSACQLGITITALGLGWLGEPTIKHLLEPLFLKLNLSPAIASTVSFIIAFAVITFLHVVIGELAPKTFAIQRAEQVSLLLSKPLIYFYRIMYPFIWALNGSARLVTGLFGLHPASEHEVAHSEEELRLILSESYESGEINQREFKYVNNIFEFDNRVAKEIMVPRTEVIGLYEDEPFETHIKIIAQEKYTRYPVFGEDKDEIIGMVNVKDLFIRYMDGNRDEECSITPYTRPVIEVLENIPIHDLLLQMQRKHIPLAVLYDEYGGTAGIVTLEDILEEIVGEIRDEYDEDEHPPIEHISEGGH

SEQ ID NO: 6156 - protein, 972 aa, Oryza sativa (japonica cultivar-group)
MSAAGGGGGVGKVERLSSIDAQLRQLVPAKLSEDDKLIEYDALLLDRFLDVLHGLHGDDLKDLVQECYEVAAEYETKHDVQKLDELGNMITSLDPGDSIVIAKAFSHMLNLANLAEEVQIAYRRRIKLKKGDFADENSAMTESDIEETLKRLVFDLKKSPAEVFDALKSQTVDLVLTAHPTQSVRRSLLQKHSRIRNCLVQLYSKDITPDDKQELDEALQREIQAAFRTDEIRRTQPTPQDEMRAGMSYFHETIWKGVPKFLRRVDTALKNIGIDERVPYNAPLIQFSSWMGGDRDGNPRVTPEVTRDVCLLARMMAANLYCSQIEDLMFELSMWRCNEELRSRADDLHRSSKKDAKHYIEFWKKVPLNEPYRVILSDVRDKLYNTRERSRELLSSGYCDIPEEATLTNVEQLLEPLELCYRSLCACGDRAIADGSLLDFLRQVSTFGLSLVRLDIRQESDRHTDVLDAITTYLGIGSYREWSEERRQEWLLSELNGKRPLFGPDLPRTDEVADVLDTFHVIAELPADSFGAYVISMATAPSDVLAVELLQRECHVKTPLRVVPLFEKLADLESAPAALTRLFSISWYRQRINGKQEVMIGYSDSGKDAGRLSAAWQMYKAQEQLVKVAKDFGVKLTMFHGRGGTVGRGGGPTHLAILSQPPDTINGSLRVTVQGEVIEQSFGEEHLCFRTLQRFTAATLEHGMHPPSAPKPEWRALLDEMAVVATKEYRSVVFQEPRFVEYFRLATPETEYGRMNIGSRPSKRKPSGGIESLRAIPWIFAWTQTRFHLPVWLGFGAAFKHALQKDIRNLHMLQEMYNEWPFFRVTLDLIEMVFAKGNPGIAALYDKLLVSEDLQPLGEKLRANYVETQKLLLQVAGHRDLLEGDPYLKQRLRLRDAYITTLNVCQAYTLKRIRDPDYHVTLRPHLSKEVMDGSKPAAELVKLNPGSEYAPGLEDTLILTMKGIAAGLQNTG

SEQ ID NO: 6157 - protein, 539 aa, Neisseria gonorrhoeae
MDAFTRAWYALERHYQDTCHILLRDRFAAEPDRFERMHERLDGMLFDYSKNRFGEDTLQLLCRLAETADLEGKMRALRTGAKVNGSEGRAALHTALRLPDGADAVYADGRDVLPEIRRELNRALKFAHSLDDGLYQGITGKRIADFVHIGIGGSDLGPAMCVQALEPFRRQISVHFVSNADPACLDEVLCRLNPETTMFCVASKSFKTPETLLNAEAVKAWYRGAGFSESETARHFCAVSADTEAAQSFGIAAERVFAMYDWVGGRYSVWSPVGLPVMVAVGGARFRELLAGAHAMDSHFFHTPPRRNIPVLMALIAVWYNNFQHADGQTAVPYSHNLRLLPAWLNQLDMESLGKSRASDGSPAACKTGGIVFGGEGVNCQHAYFQLLHQGTRLIPCDFIVPMTAQGAEDGRSRFTVANAFAQAEALMKGKTLDEARAELADLPEAERERLAPHKEFPGNRPSNSILLDRLTPYNLGMLMAAYEHKTFVQGAIWNVNPFDQWGVEYGKQLAKTIIGELEGGTSVHDASTEGLMAFYREC

SEQ ID NO: 6158 - protein, 1079 aa, Ustilago maydis 521
MAPSLLVRSRVVASRSIRSTPLAATLRLTLGSNARLYTVAAAPAAVRAQRRGLATLSSTENAPELGARHVAKSIFAPLDTFESRHIGPRDHDSAKMLEALGYSEMEQLIADTVSPSVRLAQDASFYDQIKPLSESELAQRAETIAKMNRPFKSLIGMGYQNTLVPPVILRNVLENPAWYTSYTPYQPEISQGRLESLINFQTMVKSLTGLDLANASLLDEGTAAAEAMILAYGQTKSKRKTFLVDRGVLPQTLAVLRQRAKGFGINVVATDLRTPEGHRLPPADQIPRDDIIGALVQYPDVDGRITDWEALANEIKGFGGMVIAATDLLALTMIKPPGEWGADIALGNAARFGVPPGFGGPHAAFFAVRDSIKRKIPGRLVGLSKDARGGPAYRLALQTREQHIRREKATSNICTAQALLANMSAMYAVYHGPDGLRKIAAKTHALTRLLKHELTELGVRVVNRDGAFFDTLTIDLSKAGIGAVRIHEEAKKAEINLRRISDTRIGITLDETVSIEELTDVLNVFAYALKPAKTGEVPYKPADLIEIASRIGLDAASTETLTISTPVKVRPNNATAESSDLPPVPDFARTSKFLQQPVFSAHRSETQMLRYIHSLQAKDLSLVHAMIPLGSCTMKLNSTSSMMLISKPEFSQLHPFAPEDQAQGYDVLIRELERDLCLITGFPAVSLQPNSGAQGEFAGLSVIRAYHESKGQGKRDVCLIPTSAHGTNPASAIMAGMRVVPVKTKPDGSIDLEDLRAKAELHKNELAATMITEPATTGCYFKDIQEAFKVVHDNGGQVYLDGANLQAQVALTNPAIMGADVTHLNLHKTFSIPHGGGGPGVGPICVAEHLAPFLPGHPLASTGGEMAINPISAAPWGSASILTIAWAYIKMLGWGGLKKSTETALLAANYVAHRLKDHYKLKYTGDRGRVAHELLIDVAEFEDVGLKVMDFAKRLIDYGFHPPTCSWPISTGLLIEITESESLQEIDRLIEAFISIRHEVEEIRAGKQPKDNNLLKNAPHTMQAVTEDKWERPYSRERAVFPVNELRQNKFWPPVARIDDAFGDRVLVCECGGVEDYVN

SEQ ID NO: 6159 - protein, 159 aa, Brassica napus
MSDEEHHFESSDAGASKTYPQQAGNIRKGGHIVIKGRPCKVVEVSTSKTGKHGHAKCHFVAIDIFTAKKLEDIVPSSHNCDVPHVNRVDYQLIDISEDRFGSLLTDSGGTKGDLKLPTDDNLSALMKSGFEEGKDVVVSVMSSMGEEQICAVKEVGGGK

SEQ ID NO: 6160 - protein, 129 aa, Arabidopsis thaliana
  misc_feature (27)..(27): Xaa can be any naturally occurring amino acid
  misc_feature (95)..(95): Xaa can be any naturally occurring amino acid
  misc_feature (112)..(112): Xaa can be any naturally occurring amino acid
RNIRGDPRVRAQATMVAPFTEHEVFLXFPATPKAGDDITFITSNGGRVSCMKVGTPVVKHKAETLSYLPDLRDVELANEADYLPRNNSPRWVRFXLEHGFVFREHGNTSGYXDGRYWTMWKLPLFGCTD

SEQ ID NO: 6161 - protein, 539 aa, Neisseria gonorrhoeae
MDAFTRAWYALERHYQDTCHILLRDRFAAEPDRFERMHERLDGMLFDYSKNRFGEDTLQLLCRLAETADLEGKMRALRTGAKVNGSEGRAALHTALRLPDGADAVYADGRDVLPEIRRELNRALKFAHSLDDGLYQGITGKRIADFVHIGIGGSDLGPAMCVQALEPFRRQISVHFVSNADPACLDEVLCRLNPETTMFCVASKSFKTPETLLNAEAVKAWYRGAGFSESETARHFCAVSADTEAAQSFGIAAERVFAMYDWVGGRYSVWSPVGLPVMVAVGGARFRELLAGAHAMDSHFFHTPPRRNIPVLMALIAVWYNNFQHADGQTAVPYSHNLRLLPAWLNQLDMESLGKSRASDGSPAACKTGGIVFGGEGVNCQHAYFQLLHQGTRLIPCDFIVPMTAQGAEDGRSRFTVANAFAQAEALMKGKTLDEARAELADLPEAERERLAPHKEFPGNRPSNSILLDRLTPCNLGMLMAAYEHKTFVQGAIWNVNPFDQWGVEYGKQLAKTIIGELEGGTSVHDASTEGLMAFYREC

SEQ ID NO: 6162 - protein, 150 aa, Synechococcus sp. WH 5701
MDIRFREVDPFNCWIWLRFPNPPGQGEKGYIDTVFDSWFFLGKLGGFNAECLQVHEEGIDLSAMHYDIEAAEATLPALMHSMGEPEYRDAWCRCWVDLGTSDGVALDVLINALRQLDNDVVEIEEIVIGGVNDDWPVEEVPEALFPHGAN

SEQ ID NO: 6163 - protein, 598 aa, Haemophilus influenzae Rd KW20
MKNFKYFAQSYVDWVIRLGRLRFSLLGVMILAVLALCTQILFSLFIVHQISWVDIFRSVTFGLLTAPFVIYFFTLLVEKLEHSRLDLSSSVNRLENEVAERIAAQKKLSQALEKLEKNSRDKSTLLATISHEFRTPLNGIVGLSQILLDDELDDLQRNYLKTINISAVSLGYIFSDIIDLEKIDASRIELNRQPTDFPALLNDIYNFASFLAKEKNLIFSLELEPNLPNWLNLDRVRLSQILWNLISNAVKFTDQGNIILKIMRNQDCYHFIVKDTGMGISPEEQKHIFEMYYQVKESRQQSAGSGIGLAISKNLAQLMEGDLTVESERGKGATFHLTLHAQEISEKESVKKNIPSLNTLLVEDVDLNIMVAKTILEKLGHHVDVATNGKQAITLFEKNVYDILLLDIKLPDMSGFEIAQYLRENYENGIYDFLPPMIAFTANVMQSEQEYLEMGMDGVLRKPISIKDLHHCLQQFFADESESIIEMNDDNELSEQFDLALIETLGKSQILENLSLFKQTMPNYLAQLSKDNMKETEDTAHKIKGAAASVGLNHLRQLADTLESAAKNSDVFNCGELIDKIGNLWLEDVEDLLKFCKF

SEQ ID NO: 6164 - protein, 137 aa, Glycine max
  misc_feature (69)..(69): Xaa can be any naturally occurring amino acid
TLAFLPVLAFEGGTRRNIPRFEIGTLIYVRVIKAYPGMNPELSCTDASGKAAEFGALKDGYMFECTTGXLSSPTCPVLDALGKKLSFEIAVGLNGRVWVDAASPHTTIVVANAIMNSETLSGAQQRIMVEKLLQRIQ

SEQ ID NO: 6165 - protein, 353 aa, Vallisneria natans
APRAVFPSIVGRPRHTGVMVGMGQKDAYVGDEAQSKRGILTLKYPIEHGIVSNWDDMEKIWHHTFYNELRVAPEEHPILLTEAPLNPKANREKMTQIMFETFDSPAMYVAIQAVLSLYASGRTTGIVMDSGDGVSHTVPIYEGFTLPHAILRLDLAGRDLTDCLMKILTERGYSFTTTAEREIVRDIKEKLAYVALDYEQELEAAKTSSSIEKSYELPDGQVITIGAERFRCPEVMFQPSLIGMESPGIHETTYQSIMKCDVDIRKDLYGNIVLSGGSTMFNGIADRMSKEITSLAPSSMKIKVVAPPERKYSVWIGGSILASLSTFQQMWISKAEYEEYEEIGPAIVHRKCF

SEQ ID NO: 6166 - protein, 523 aa, Sulfitobacter sp. EE-36
MTDTTQQDRVLIFDTTLRDGEQSPGATMTHAEKIEIAGLLDEMGVDIIEAGFPIASEGDFAAVSEIAKLSKNSVICGLARAQFGDIDRCYEAIKHAAQPRIHTFIGTSPLHRAIPNLTMDEMADRIHETVTHARNLCDNVQWSPMDATRTELDYLYRVVEIAIKAGATTINIPDTVGYTAPRESADLIRKLLENVPGADEIVFATHCHNDLGMATANSLAAVEAGARQIECTINGLGERAGNTALEEVVMALKVRNDIMPFQTKIDSTKIMNISRRVAAVSGFAVQFNKAIVGKNAFAHESGIHQDGMLKNAETFEIMRPEDVGLTETNIVMGKHSGRAALRSKLENLGYELGDNQLKDVFVRFKELADRKKEIYDDDLIALMRTATDPESDRIVLGSMTVVCGTEGPQKAEMSLTVDGAETSTSQTGDGPVDAAFNCIKALVDHSARLQLYQVHAVTEGTDAQATVSVRLEEDGRIVTGQSADTDTVVASVRAYIHALNRLLVRREKGGTDKREISYKDVVG

SEQ ID NO: 6167 - protein, 296 aa, Ulvaria obscura var. blyttii
YAHVDCPGHADYVKNMITGAAQMDGAILVVSGADGPMPQTKEHLLLAKQVGVPNIVVFLNKQDQVDDLELLELVELEVRETLDAYEFPGDDVPIVAGSALLALEALIENTEISDNEWVNKIYDLMENVDNYIPTPKRETDKTFLMAVEDVFSITGRGTVATGRVERGVLKIGETVDLVGLGDTKNVTVTGLEMFQKTLDETVAGDNVGVLLRGIQKEEIQRGMVLAAPNSIEPHTKFEAQVYVLTKEEGGRHTPFFQGYRPQFYVRTTDVTGKIEAFTADDGSETKMVIPGDRIKM

SEQ ID NO: 6168 - protein, 289 aa, Percursaria percursa
ADYVKNMITGAAQMDGAILVVSGADGPMPQTKEHLLLAKQVGVPNIVVFLNKEDQVDDPELLELVELEVQETLDAYEFPGDEVPIVAGSALLALEALIENTEVSDNKWVKKIYDLMENVDNYIPTPERETDKTFLMAVEDVFSITGRGTVATGRVERGILKTGETVDLVGLGDTKNVTVTGLEMFQKTLDETVAGDNVGVLLRGVQKDEIQRGMVIAAPNSIEPHTKFEAQVYVLTKEEGGRHTPFFPGYQPQFYVRTTDVTGKIENFTADDGSETKMVIPGDRVKMVV

SEQ ID NO: 6169 - protein, 312 aa, Ruthnielsenia tenuis
SYAHVDCPGHADYVKNMITGAAQMDGAILVVSGADGPMPQTKEHLLLAKQVGVPNIVVFLNKEDQVDDPELLELVELEVQETLDAYEFPGDEVPIVSGSALLALEALIENTEVSDNKWVNKIFELMENVDNYIPTPERETDKTFLMAVEDVFSITGRGTVATGRVERGTLKTGETVDLVGLGETKNVTVTGLEMFQKTLEETVAGDNVGVLLRGVQKDEIQRGMVIAAPNSIEPHTKFEAQVYVLKKEEGGRHTPFFPGYRPQFYVRTTDVTGKIETFTADDGSETKMVIPGDRVKMVVELIHPIAIEDNMR

SEQ ID NO: 6170 - protein, 540 aa, Burkholderia mallei ATCC 23344
MTLNSLPVWPALQAHYEEIRDAHLRDWFAPANDRAPTRAERFTFEGGGLAADFSKNRLTDATLALLVRLAREAGVEARRDAMFAGETVNPTEGRAALHTALRANAPDAPFQAQVAAERAKMARFADAVRSGAWTGYTGKRIRHVVNIGIGGSDLGPKMVVHALHHVATPDIATHFVSNVDGADLARVLERIDPEETLAIIVSKTFTTLETMTNARSLRDWFVANGCPEGALAKHFVGVSANPAEVVKFGIAEANVFEMWDWVGGRYSLWSAVGLSIMIAIGPERFDELLAGARDMDEHFRTAPLERNLPVLQGLVGIWYRNFFGAQSYLVAPYSEALHYLPSYLQQLEMESNGKSARIDGAFVDYPTSAVTWGEPGTNGQHAFFQMLHQGPTLVPIDFIAVLTPEHPLASHHPKLLANCFAQSEALMLGRTLDEARKIAGPAKPELAPHLTFPGNRPTTTLLVDALTPRTLGALIALYEHKVLVQAAVWNINPFDQWGVELGKILGKVVEADLTAAQVDPAKHDSSTSALIARARKALGE

SEQ ID NO: 6171 - protein, 311 aa, Ruthnielsenia tenuis
YAHVDCPGHADYVKNMITGAAQMDGAILVVSGADGPMPQTKEHLLLAKQVGVPNIVVFLNKEDQVDDPELLELVELEVQETLDAYEFPGDEVPIVSGSALLALEALIENTEVSDNKWVNKIFELMENVDNYIPTPERETDKTFLMAVEDVFSITGRGTVATGRVERGTLKTGETVDLVGLGETKNVTVTGLEMFQKTLEETVAGDNVGVLLRGVQKDEIQRGMVIAAPNSIEPHTKFEAQVYVLKKEEGGRHTPFFPGYRPQFYVRTTDVTGKIETFTADDGSETKMVIPGDRVKMVVELIHLLLLKIICV

SEQ ID NO: 6172 - protein, 693 aa, Mycobacterium sp. JLS
MPPLNTTQRRPRRGGGLETPGLSVPSCPTTAALGILGAVCGLLAFLKDPSAQSSPALVGAVSGAAELMRHRGPDEPGTWADDTDDPGIVLGFNRLSIIDIAHSHQPLRWGPPEAPLRYVLVFNGEIYNYLELREALRTEHGAEFATDGDGEAIVAAYHHWGPAALSRLRGMFAFALWDTVTGELFCARDPFGIKPLYIATGPGGTAVGSEKKCLMAVADQLGIDTGLDERAVQHYTVLQYVPEPETLHRGVRRLESGSYLRMRPGQAPVVTRYFTPRFDAVPFRAASAPGSAGGVDQARYDEITAVLEDSVAKHMRADVTVGAFLSGGIDSTAIAALAMRHNPRLITFTTGFEREGFSEVDVAVASAEAIGARHVTKVVSQAEFVEALPAIVWYLDEPVADPALVPLYFIAREARKHVKVVLSGEGADELFGGYTIYREPLSLRAFDYLPRPVRRSLRRASAPLPEGMRGKSLLHRGSQTLEERYYGNARSFSDEHLRAVLRRFSPDWTHTDVTAALYRESDGWDPVARMQHIDLFTWLRGDILVKADKMTMANSLELRVPFLDPEVFAVASRLPLEQKITRATTKFALRRALEPVVPAHVLNRPKLGFPVPIRHWLRAGELLEWAYETVAASQTGDLIDAEAVRTMLDEHRTGVSDHSRRLWTVLIFMLWHAIFVEGSVTPRIEEPHYPVQL

SEQ ID NO: 6173 - protein, 467 aa, Arabidopsis thaliana
MKALCDRFVPQQCSSSSKSDTHDKSPLVSDSGPSDNKSKFTLWSNVFTSSSSVSQPYRESSTSGHKQVCTTRNGWTAFVKRVSMASGAIRRFQERVLGPNRTGLPSTTSDVWLLGVCYKISADENSGETDTGTVLAALQLDFSSKILMTYRKGFEPFRDTTYTSDVNWGCMIRSSQMLFAQALLFHRLGRAWTKKSELPEQEYLETLEPFGDSEPSAFSIHNLIIAGASYGLAAGSWVGPYAICRAWESLACKKRKQTDSKNQTLPMAVHIVSGSEDGERGGAPILCIEDATKSCLEFSKGQSEWTPIILLVPLVLGLDSVNPRYIPSLVATFTFPQSVGILGGKPGASTYIVGVQEDKGFYLDPHEVQQVVTVNKETPDVDTSSYHCNVLRYVPLESLDPSLALGFYCRDKDDFDDFCLRALKLAEESNGAPLFTVTQTHTAINQSNYGFADDDSEDEREDDWQML

SEQ ID NO: 6174 - protein, 258 aa, Ralstonia solanacearum
MSYQHILVETRGRVGLVTLNRPKALNALNDALMDELGAALLAFDADEGIGAMIITGSDKAFAAGADIGAMADYDFATVYKNEYITRNWETIRRIRKPVIAAVAGYALGGGCELAMMCDIILAADTARFGQPEIKLGTMPGAGGTQRLPRAVSKAKAMDLCLTARMMGADEAERAGLVSRVIPADKLLDEALAAAETIAGFSLPTAMMIKESINAAYETTLSEGVRLERRLFHATFATEDQKEGMHAFLGKRQPAFKHR

SEQ ID NO: 6175 - protein, 193 aa, Streptococcus gordonii
INDYSYEEVERIVRKAFDIARGRRKRVTSIDKQNVLATSKLWRRVADEVAKDYPDVTLEHQLVDSAAMLMITNPAKFDVVVTENLFGDILSDESSVLSGTLGVMPSASHSADGPSLYEPIHGSAPDIAGQCIANPISMILSVAMMLRDSFAELEAAEAIEAAVEKTLAQGILTRDLGGQVGTAQMTESIINNL

SEQ ID NO: 6176 - protein, 300 aa, Ochlochaete hystrix
YAHVDCPGHADYVKNMITGAAQMDGAILVVSGADGPMPQTKEHLLLAKQVGVPNIVVFLNKEDQVDDPELLELVELEVRETLDTYEFPGDDVPIVSGSALLALESLIENTEVSDNRWVNQIYTLMERVDEYIPTPQRETDKTFLMAIEDVFSITGRGTVATGRVERGILKTGQTVDIVGLGDTKNVTVTGLEMFQKTLDETVAGDNVGVLLRGIQKEEIQRGMVIAAPNSIKAHTKFEAQVYILTNEEGGRRTPFFAGYRPQFYVRTTDVTGKIETFTTDDGAQTKMVIPGDRVKMVVQL

SEQ ID NO: 6177 - protein, 50 aa, Mannheimia haemolytica
AFEFACSGGKITREPGPVLGGTTVIAFAEDPDGYKIEFIENKDAKAALGN

SEQ ID NO: 6178 - protein, 84 aa, Zea mays
  misc_feature (19)..(19): Xaa can be any naturally occurring amino acid
  misc_feature (24)..(26): Xaa can be any naturally occurring amino acid
  misc_feature (31)..(31): Xaa can be any naturally occurring amino acid
  misc_feature (38)..(38): Xaa can be any naturally occurring amino acid
  misc_feature (45)..(46): Xaa can be any naturally occurring amino acid
  misc_feature (49)..(49): Xaa can be any naturally occurring amino acid
  misc_feature (51)..(51): Xaa can be any naturally occurring amino acid
  misc_feature (54)..(54): Xaa can be any naturally occurring amino acid
  misc_feature (61)..(61): Xaa can be any naturally occurring amino acid
  misc_feature (64)..(64): Xaa can be any naturally occurring amino acid
  misc_feature (72)..(72): Xaa can be any naturally occurring amino acid
  misc_feature (74)..(74): Xaa can be any naturally occurring amino acid
  misc_feature (77)..(77): Xaa can be any naturally occurring amino acid
NPNRDLRSSKPYLAMDGGXGGGGXXXGVGAXVMVGGGXLPGGGGXXLEXVXKTXQFEHKLXYFXLKENPRGXYXKIXEKTLGTR

SEQ ID NO: 6179 - protein, 677 aa, Arabidopsis thaliana
  misc_feature (194)..(194): Xaa can be any naturally occurring amino acid
MIPLSFAALGDIVDKKLDEDYVKEEVEMMIQVSLLSTQAAPGERPTMSEVEIFRNSCLCYINWFCNIISIIYSNSLLLRIDSGSSSISVVFLVFTLSRMEQRRMLTAARPRLSSTIRTITSHVAFSASRLLKPYVAYRLGLEDANQRKTENESTGGDKEIANSLLHCLKFHYLLLHFPSFSLQIHNRSTSLSLXRFEKMAKLVMLLVLCILPAIAMAARRGNIGKNTMVVQGSTYCDICKFGFETPESSYFIPGATVKLSCKDRKTMEEVYTDKAVSDKEGKYKFIVHDDHRDQMCDVLLVKSSDKTCSKISVGREKSRVILNHYSGIASQIRHANNMGFEKEVRMATSTTMSHQAIGSVVSQRPFKASQFLKEPLNNVPMKFRQKRFKIEATASQISVVDNTFLSPSPSKNKPHESKKKSNEAALILIRHGESLWNEKNLFTGCVDVPLTQKGVGEAIEAGKKISNIPVDLIFTSSLIRAQMTAMLAMTQHRRKKVPIILHNESVKAKTWSHVFSEETRKQSIPVIAAWQLNERMYGELQGLNKKETAERYGTQQVHEWRRSYEIPPPKGESLEMCAERAVAYFEDNIKPELASGNNVMIAAHGNSLRSIIMYLDDLTSQEVTTLDLSTGVPLLYIFKEGKFMKRGSPVGSTEAGVYAYTKRLAQYREKLDAAATI

SEQ ID NO: 6180 - protein, 481 aa, Clostridium tetani E88
MEKLSFKSFGISEDILEALLKLGYKNPSKVQQKVIPVAIKNKDIIVKSKTGSGKTASFGIPICENVNLEERKPQALVLTPTRELCIQVKEDIKNIGRFKRIKCSAIFGKQPFKTQALELKQRTHVVVGTPGRTLDHIERGTIDLDKIKYFIVDEGDEMFNMGFIDQVESIMRKLPKKRVNMLFSATIPEKIEKLCEKYMKSPIMIEVNPEEFTEEKIQHIYYEIEDKNKFDLLNKILITENPDSSIIFCRTQENVNKLAKLMENKDYPCKALHGGMMQDKRIDIMNRFKRGEFMFLVATDLAARGIDVENVTHIINYDIPMEKENYVHRTGRTGRAGREGCAISLVTPYEDRFFKQIEEYIGFKIKLGDEITKESVENGEKAFIEKIKAMPKIKKQKADKLDKDITKIYLSAGKKKKIRPGDIVGGITNISGVTPEDIGIIDIQDVCSYVDILNGKGKLVLEGLKSTTIKGKKLRAEKATK

SEQ ID NO: 6181 - protein, 131 aa, Vibrio vulnificus CMCP6
MNRLPVERVSDSPNCGKCKSDLFDGAPIEGTNDNFTHLLQSDQPVVVDFWAPWCNPCVGFAPVFQDVAAERKGKVRFIKINTEIEQQLAAQFQIRSIPTVMVFKNGQRVDVINGALPKSQFDQWLNQALTK

SEQ ID NO: 6182 - protein, 588 aa, Prochlorococcus marinus str. NATL2A
MALLVQKFGGTSLGSIERIKAVAQRIKSSKEKGDDLVVVVSAMGHQTDELTRLASEITVDPPHREMDMLLSTGEQVSISLLTMALNELGTPAISLTGTQAGIITESAHGRARILEIRTERIKNLLDQGQTIVIAGFQGTTLGIGGIAEITTLGRGGSDTSAVALAASLEAAKCEIYTDVPGVLTTDPRIVKNAKLMKSISCDEMLELASLGAAVLHPRAVEIARNFGVTLVVKSSWDNLDGTTLTSNKKPDFSQGGIEHRSPVDGLELLENQAVVALSNIPDRPGIAAELFESLSEGGVNVDLIIQATHQIDSNDITFTVAENELHNALTQCKKLVNTIGGDISFQKDLTKLSIYGAGIMGRPGIASSLFQILSDSGINIRLIATSEVKVSCVIDAELGKKALRNVSEVFKLTDKQITVNPTIENNNEPEVRGIALDKDQIQISVKNVPDKPGTASTICSTLAEKNISLDTIVQSERKHKDKTKDISFTLKKNDRSDAKYALKELIGNWKGSNLEEGESIVRISAVGSGMPFTKGTAGKIFRALANQKINIEMIATSEIRTTCIISEKYGEKALNEIHSCFKLGKNES

SEQ ID NO: 6183 - protein, 409 aa, Thiobacillus denitrificans ATCC 25259
MALIVQKYGGTSVANVERIRAVAERVAKFKMLGHQVVVVLSAMSGETNRLIGLAKQIQAEPDPRELDMMVSTGEQVTIALLAMALKDLGLKAKSYTGAQVRILTDDAFTKARILSIDEAKMRRDLDSGHVVVVAGFQGVDEGGNITTLGRGGSDTTGVALAAALKADECQIYTDVDGVYTTDPRIVPEARRLKTVTFEEMLEMASLGSKVLQIRSVEFAGKYKVKLRVLSSFQDEGDGTLITFEENDNMEQAIISGIAFSRDEAKITVVGVPDHPGIAYQILGPVADANVDVDMIVQNVGHANTTDFTFTVHRNDFAKAMSLVKATAATVGAREVTGDDKIAKVSIVGVGMRSHVGIAKKMFETLSKENINLQMISTSEIKISVVVEDKYLELAVRALHQAFELDKATA

SEQ ID NO: 6184 - protein, 130 aa, Triticum aestivum
  misc_feature (105)..(105): Xaa can be any naturally occurring amino acid
MARVALLAVFAVLAALAVAEMASGAVTCGDVTSAIAPCMSYATGQASSPSAGCCSGVRTLNGKASTSADRQAACRCLKNLAGSFKGISMGNVANIPGECGVSVSXPHQLQRQLRHPSLSYLPASSSQQAS

SEQ ID NO: 6185 - protein, 513 aa, Triticum aestivum
MSAAAQETTAGGGGDGKRQGPCRPGHLKLGYHIVVSNAVYVLLAPFAAALALRASRLTPSDLAAARAYLLANLHLAVSLVSVATALATVYLARRPRAVYLLDFACYKPGPDHVVTRETFMKQSSKAGVFTDDNLAFQRKILERSGLGQGTYFPAAVLNSPPNPCMAEARREAEAVMFGAIDSLLAKTGVRARDIGVVVVNCSLFNPTPSLSAMVVNHYKLRGNVASYNLGGMGCSAGLISIDLAKQLLQVHRNSYALVVSMENITLNWYWGNDRSMLMSNCLFRMGGAAILLSNRAADKRRSKYQLVHTVRTHHGADDRAYRCVFQEEDKAGRVGVALSKDLMAVAGEALKTNITTLGPLVLPMSEQILFLTSLIGKKIFGLKMKPYIPDFKMAFEHFCIHAGGRAVLDTIEKNLELSDWHMEPSRMTLNRWGNTSSSSLWYELAYTEAKGRVRRGHRAWQIAFGSGFKCNSAVWRALKDIHPSKEAGSNPWIEEIHRFPVEVPKVESVVSSP

SEQ ID NO: 6186 - protein, 279 aa, Coxiella burnetii RSA 493
MNEDPHPHRSWLERLSHALLWEPKDREQLIELLHDAKERNLLDQDALAMIEGVLRVSEKKVRDVMIPRAQMVVVDHDATPQSTLPIIIESAHSRFPIISESRDEVIGILLAKDLLQYTVGEKQAKAQIKDLARPAIFIPESKRLDVLLNEFRLKRYHMAIVVDEYGSVSGLITIEDVLEQIVGSIQDETDIVEEEPITKLNPKEFTVKALTPIDVFNNYFGTKINDEDFDTIGGYVMQQIGHLPKRGESIVIDSMKITVMLATKRSIQLLHLTKKTENE

SEQ ID NO: 6187 - protein, 637 aa, Ralstonia solanacearum
MTHHYPFAAIVGQEPLKRALLLCAIDPTLGGVLIRGDKGTAKSTAARGLTDVLPPITRVAGCAFNCAPDAPLAECEACRAGDAAHASAPVPFVNLPLGATEDRVLGHLDIERALKDGRKAFQPGLLASAHRGLLYIDEVNLLADHLVDVLLDVSAMGHNTVERDGLAMRHPARITLLGTMNLEEGDLRPQLLDRFGMMVEVAAPRDAAVRTEVVRRRLAFEADPAGFVAAWQADTDALRARLAAAQAMLARVALPDTLFAFISTLCCEFEVASLRADIVMHKAARALAALDGRTEVTAEDVRDAAELVLPHRRRRKPFEQSGLDRERLDELIRQATPPPASPDTGPGTETDTTPPEDDGGETAPADGAAEQVFAAGPAATVGRIEVTARQAHEAGGRRSLATGTRRGHAIGAVPNEAPSRLAVDATLRHALLRDPAGFSVTRADLHEKVHAGRQGNLILLVADASGSMAARRRMEMVKASVLGLLQDAYQRRDQVALICFRGEQAELVLPPTRQVELAERALAALPTGGRTPLAHALQLAAQTLAQACDLTPLLVVISDGRANIALDAGQDPWRETLALAEHLAARGTPALVLDTEQDYVRLGRARELAQALQADCLPLDHLSGEQLMLTIRERVPG

SEQ ID NO: 6188 - protein, 310 aa, Dehalococcoides ethenogenes 195
MITTVTLNPCLDKHIDVHGLVLYETNRWHLMSKYAGGKGIDVSRAIHEMGNDTIACGFLGSEEGREIETLLAKQGLKYRFTPISQPTRSCFIIYDTKTRRQTNLNAPGPRITPSELKLFHEDLHRESASSNIIVMSGSVPPGIPSNVYFTLIKSAHKLGKQTILDTTGKYLRAGLKAKPCLVKPNIREAEELLGRKLETEAEIILGAKEIVQMGAGIAVISMGKKGLIASDGKQVIKASSPYVRVKSAVGAGDSTVAGLAISLCRGDSLEEACRLGVAMGTAAVMTPGTELCHREDVLYWLPRIKIRRLA

SEQ ID NO: 6189 - protein, 255 aa, Colwellia psychrerythraea 34H
METILVERRERVGMITLHRPKSLNALSRQLAREVVDTLKTFDADDNIGAIVITGSARAFAAGADIEEMANLTYAEFYCDDIFAPWDELRSISKPIIAAVSGYALGGGCELALMCDFIIASEDAQFGQPEIKLGILPGIGGSQRLANAVGKSLAMDLVLTGRTIDVHEAKAAGLVARVVPGKELLQTALEAAHTIAGYNSPAVRMAKEAVNVAFETSLTEGMRHERRLFQAAFATEGQKEGMHAFIAKRAPVFRHR

SEQ ID NO: 6190 - protein, 260 aa, Geobacillus kaustophilus HTA426
MSALVSFETQENGIAIVTLNRPEAANALSRALLLELGALFQEIKFRKDVRVVMLTGAGDKVFCAGADLKERAGMNETEVRQAVALISKTINEVEKVPQPVIAVLNGSAFGGGLELALACDIRFAADDIQLGLTETSLGIIPGAGGTQRLPRLVGIGKAKELIFAAKRITAKEAERIGLVEYAVPRSELMERALCLAQQIADNAPIAVRQAKRAIQSVFNVDLETGLAIEQLAYEATIPTKDRLEGLQAFKEKRKPVYKGE

SEQ ID NO: 6191 - protein, 434 aa, Ashbya gossypii ATCC 10895
MPLLQQNPPIQPPYSRASQKLKSLLSSYGENTSTTTAAKEMNGIAPMNLIEKSVVHPPRTIYTKANFSIPGHYEVLQMLGKGSYGTVVSAIDNLNANYPIRIAIKKITNIFQREVLLKRAIRELKFMHYFKGHKNIVSLINLEIVNEKPYDGLYCYQELIDYDLARVIHSNVQFSEFHIKHFTYQILCGVKYIHSADVIHRDLKPGNILCSISGQLKICDFGLARGISPLFTNTKTSNHITNYVATRWYRAPELILSHKRYNKSIDMWAIGCILAEFYGRKPIFMGQDSMHQISEIVKVLGTPSRDTIIKYGSSRAYDIFCPPKPQYAKIPWAEIYPFAGPDALDLIERLLDWDPDRRLTVEEAIEHDFVKSVRDVNDEPCCPHGPFNFSYEAEFKSMSNLREVLYAEVKQFQEECATKDVVPSLPIPQQIYPI

SEQ ID NO: 6192 - protein, 362 aa, Pyrococcus furiosus DSM 3638
MEEMLNLATKFYEDEYKDSILYTYLGNSEKDPKLREEFLRLSKIESNHARFWHEFLIKRGRTPKKPKINKINLFFVKLLRKLLGPGIIVSLLEMGENSAIQKYFNFLTKYQLSEEERKILSKVILDELEHERFFHESKKRFHTENIRDFVLGMNDGLVELLGAVTGLSAVYLHNPRVVGISGLIVGVAGALSMGIGAFISVRSQRQVNESVRQRMEVLFKVSPEKAKEELSRKLLETGIPEEVVEEVVEKLSSNEDALINLLVQESGENELRSALYTGLAYLTGVAFPVLPYFIASSSLTALPFSILLAGTALAIVASVISAISGISIKKKVVEMISTGLGAAFLSYLFGRLMESLFHISTL

SEQ ID NO: 6193 - protein, 236 aa, Saccharomyces cerevisiae
MKLNISYPVNGSQKTFEIDDEHRIRVFFDKRIGQEVDGEAVGDEFKGYVFKISGGNDKQGFPMKQGVLLPTRIKLLLTKNVSCYRPRRDGERKRKSVRGAIVGPDLAVLALVIVKKGEQELEGLTDTTVPKRLGPKRANNIRKFFGLSKEDDVRDFVIRREVTKGEKTYTKAPKIQRLVTPQRLQRKRHQRALKVRNAQAQREAAAEYAQLLAKRLSERKAEKAEIRKRRASSLKA

SEQ ID NO: 6194 - protein, 308 aa, Narcissus pseudonarcissus
MAVWISAAPPALAISSAPRIRRVILFSPLHSRQIGWPPIRNRRKRSKSTVFFASDVDVGKSNGGDGIVDKIERLKKQEQLMISKSRTTERMERKRSERTTYLIAAMMSSLGITSMAIVSVYYRFAWQMEEGEIPVTEMLGTFALSVGAAVGMEFWARWAHRALWHASLWHMHESHHKPRDGPFELNDVFAVINAVPAISLLYYGFFNRGLVPGLCFGAGLGITLYGMAYMFVHDGLVHRRFPVGPIADVPYFRRVAAAHRIHHTEKFNGVPYGLFLGPKELEEVGGEEELEKLIKRRIEINSRSLDVK

SEQ ID NO: 6195 - protein, 697 aa, Desulfovibrio vulgaris subsp. vulgaris str. Hildenborough
MCGIAGIVSPGAPVASATLAAMTESLAHRGPDACGLFIRPSGAGSPHVGLGHRRLSILDLSDAGAQPMQSEDGAFTLVFNGEIYNYPDLRRDLEAAGHIFRSTSDTEAILRGYMAWGEGVVARLKGMFAFALWDERKRSLLLARDRFGKKPLHYAVTRQGTLLFASEPKALLAHPEFRPEPDAASLLHFLRYDYVPAPRSIYAGAAKLPPSHLMVWRDGRLEVRRYASLAFSGATGDRGVPLREAEAAVDALLDAAVQRRLASDVPLGVFLSGGLDSSTVLAYMTRHIPAHDIRTFAIGFDEASYDESAHAEAMARHAGSHHTMMRLPAARMLDLLDMVWTTQDEPMADASIIPTLLLCRFAREHITVALGGDGGDELFAGYDPVLADLPARCLDWLPPAALRLLQGIALRLPTGDANMSLGFKVQRFLSGLGAREVAARHQTWLGAFDDEGARAMLHPDLRAATRDVSPLDALDMLREECRDASRFDAMLHFYQRFYMCGSILTKVDSASMAVSLEVRSPFLDQDLADYVNRLPREHKLRGLTRKVLLRRLMRSRMPDALLKRPKKGFGLPLARWFRHELRPLVTAMLDPGRVAQGGLLDPVTVERMVRDHLSGRRDHRKEIWSALCVEAWRERYLHHSRATASDTIEFGTTPHGDGHLITAQAVPARSSAAINDSTNDSPSWAASPSRHRCNDSI

SEQ ID NO: 6196 - protein, 460 aa, Alkalilimnicola ehrlichei MLHE-1
MPFIPHTEAEVRRMLEVIGVRHLDALFDEIPAALRAPPPQGVPEGLPEMAVRRIARRRAAQDRQPVSFLGAGCYEHHIPAAVWQIAARGEFYSAYTPYQAEASQGTLQVIYEFQSMLSALTGLAVSNASLYDGATATAEAALMAVRQRRRDAAHRVLVPHTLHPLYRRVLSTLLAPQGIELTLLDYDPDQGHLPEHALEGVSGGFDALLLPQPNFLGVLEPVDTLTRAAQARGALVIGVVNPIALARLAPPGEWGEAGADIACGEGQPLGIPMSSGGPGFGFLTCRRPLMRQLPGRLVGRTVDLDGKPGYTLTLQAREQHIRRGRATSNICTNQGLMATAATLYLALLGPDGLERVADCCLARTHALVEALTGLPGVQSALRGPHFHEAVLRLDRPVAPVLQALEDHGILGGHDLSADYPELGNALLVCATEMRDEVDIEYYRDSLAAVLNTRPDPVPSP

SEQ ID NO: 6197 - protein, 444 aa, Magnetococcus sp. MC-1
MSKIRLFRFSLVVLGLLFALFLTPVHAAPQVTRVVLPNQFHGVLVESHSNPMVEVCLYIRAGSVMDPQGQEGTAYMLGWLINEGAGQQDSTQFQQAMDNYGITLNGTASRDYLKVTMRALSKDMVYAFELLGAAINQPRLDQEPIERAKREMVASFEQNREDADVRVEERLEALLLGQHPYGRRVEGDPESITKISREGLRRFHAQAMRGPNMVLSVAGDMRPEQFMALVHQHFGGLSADPGPFGATIPTVASPVPQPWQVEHVEMDKAQSVIAVGWPGPNRQHPDYYAITVLDHILGGSGFGSRLTERLREEQGLTYSVYSYFSPWEGQGIWQVAMATKPENVPHAVSEIRTILSQLAKDGVQEDALKRAKENLLGGFPIALDTLGKLASTWGLIGYYKRGWDYLDQWPKRIERVTQEDIQRVARSFFQEPKMRVVTAGRATP

SEQ ID NO: 6198 - protein, 397 aa, Xylella fastidiosa Temecula1
MSASFSPHTITLIKSTVPLLAEHGTTIIEAMYHRLFEDPQIEALFNQANQKNGTQIHALAGAILAYARNIDNPGVLASAIERISQKHVGYAIHPEHYPHVATALLGAIKQVLGDVATSEVLEAWGEAYWFIANLLKDREAVIREGIMTKNGGWIHWRRFVISKRIPESETITSFMLHPEDGGPVVPHQAGQYLTFRFDAAGMPGMKRNYSISCGPNSDHYRITVKREHGTGASAFLHDQAKVGTIIECTPPVGDFFLPSVIERPIVLLSGGVGLTPMVSMMEQIAEAYPDAQVWYVHGTQNRETHAMDAHIRALVSRHKHMKATTFYTQRSEADDAEAGFITIDWLRANTPFQKADFYLCGPRPFLRTFVRDLIGAGVPAAQVHYEFFGPMDEEMAA

SEQ ID NO: 6199 - protein, 425 aa, Sulfolobus tokodaii str. 7
MEEKKLSLSQALALGLGNIIGAGIFVMAGVSITAAGPAALLAFLITAVYAMSVGLNNAELASVFPKVEGGVYSFALLSLGETIGFLVGWFRVIGYAISGGATALGFSGYLITTFSLPSFLYFLLAILLIIVLIIIDYLGLKLAAEIESILVVLNILGLVIFSITALVISGIRLQNFSPFLPHGITGVLTASNIAFFAYSGFNTIATLTPSVKEGERTVPKAIVLSLLISAFLYMLVTFSMVDAIGYKNFKTNSAPLQLVLSTIHAPFYVYFFVNLTAILATITVTLSTIIATERTMVQMELDNLLPKVKGGKLSILLIIGLVMIASLGLGNVEVIALVSNFGIVFSYMLSGIEVAVVRHRGLRGVFKSPGFPFVQIISVILSGVFIYSLGFQSLLIGFVTLLIGLVIHSIHKEIMKKEGIFSRKK

SEQ ID NO: 6200 - protein, 246 aa, Clostridium tetani E88
MSKVLAVFNGRKITDGDLNNTIAQFPAERQQFFKTEEGRKNLLNEIISFELIHDYAKDNKFDLDDLYLEKIEAIKKETLIQWTISKVLSEAEIKEEDIKEFYNNNKNMFIEEERVSTKHILVETKEEAENIVDEIKNGLSFEEAAKEYSNCPSKGAGGDLGTFGRGRMVKEFEEAAFEMKEGTISNPVKTQFGYHIIKLEKKYAKGTKEYNEVKDLIKKQLHQEKERDLYKKFTEDLKNKYSVELK

SEQ ID NO: 6201 - protein, 527 aa, Triticum aestivum
MALEAANHYLQLAGVHGTSTPAVLLTVLLLLIIRLAWVRTATASTRFGKQQQLPPSPPGKLPIIGHLHLLGSQTHISIRDLDAKHGRNGLLLLRIGAVPTLFVSSPSAAEAVLRTHDQIFASRPPSMAANIIRYGPTDIAFAPYGEYWRQARKLLTTHMLSAKVVHSFRHGRQEEVRLIINKIRAAATRGTAVDMSELLSGYTNDVVCRAVLGESHRKEGRNRLFSELTEINVSLLGGFSLENYIPPNMVMADALLRLVSVKAQRLNKRWDDLFNEIIEEHLHPSKPSSGEQQAADFIDLLLSLKEEYGLTTDNIKAILVDMFEAGIETSYLTLEYGMAELMNNRHILTKLQEEVRSQGKKLDMITEEDLSSMAYLRATIKETLRMHPPAPFLLPHFSTADCKIDGYLIPANTRVLVNAWALGRDPSSWERPEDFWPERFLQDQDGDVDTQMRGKDLRFLPFGFGRRICPGMNFGFATMEVMLANLMYHFDWDVPNMVGTGAGVDMAESFGLTLRRKEKLQLVPQIP

SEQ ID NO: 6202 - protein, 947 aa, Sulfitobacter sp. EE-36
MVFKPTEYLPYDFANRRHIGPSPAEMSDMLKTVGAQSLGALIDDTMPAQIRQKEPLDFGKPMSEREVLEYMRVVAGKNKVLTSLIGQGYHGTVTPPAIQRNIFENPAWYTAYTPYQPEISQGRLEALLNFQTMVSDLTGLEVANASLLDEATACAEAMTMAMRLSKSKAKAFFVDRDCHPQNIAVIQTRAAPLDIEVIIGDPDKMDASAVFGALFQYPGTYGHVRDFTDHMAALHEAGALGVVSADPMALTLLKEPGAMGADIAVGSTQRFGVPEGYGGPHAAYMACKDAYKRAMPGRIVGVSIDAHGNRAYRLSLQTREQHIRREKATSNVCTAQALLAVMASMYAVFHGPEGLKAIAQRIHRKAVRLANGLEEAGFKVDPKSFFDTVTVDVGPLQAAVMKSAVDEGINLRRVGETRVGITLDERTVPETIEAVWRAFGIRRSDETFEAQYRFPDDMLRESAYLTHPIFHMNRAETEMMRYMRRLADRDLALDRAMIPLGSCTMKLNSAAEMMPVSWREFSMIHPFVPQDQALGYKHMIDDLSAKLCDITGYDAISMQPNSGAQGEYAGLLAIASYHRANGQGHRNICLIPMSAHGTNPASANMVGWKVVVIKTAANGDIDLDDFRAKAEKHSENLAGCMITYPSTHGVFEETVTEVTKITHDHGGQVYIDGANMNAMVGLARPGDVGGDVSHLNLHKTFCIPHGGGGPGMGPIGVKSHLIPHVPGHPNGGEGAVSAAPYGSPSLLPISWSYCLMMGGDGLTQATRVAILNANYIAKRLEGAFEVLYKGPTGRVAHECIFDVRPFEDSAGVTVDDIAKRLIDAGFHAPTMSFPVAGTLMVEPTESETKAELDRFCDAMLAIRDEIRAIENGDMPRENNALKNAPHTVEDLVGEWDRPYTREQGCFPPGAFRVDKYWPPVNRVDNVHGDRNLICTCPPMEEYAEAAE

SEQ ID NO: 6203 - protein, 644 aa, Zea mays
MISARTAAASPASLWKQGGRSEGGGSCDGCRTYRNTLRRAAAAKVRALPSRAVEAVKMGSAAEMEQEEAEVAAAADGVVVEDHYGEDSATEELPIMPWAFSVASGYTLLRDPHHNKGLAFTEKERDAHHLRGLLPPAVLSQELQIKKFMHTLRQYQTPLQRYIAMMNLQETDERLFYKLLIDNVVELLPFVYTPTVGEACQKYGSIFGRPQGLYVSLRDKGKVLEVLRNWPHRNIQVICVTDGERILGLGDLGSQGMGIPVGKLALYTALGGVRPSACLPITIDVGTNNEKLLNDEFYIGLRQKRATGEEYHELMEEFMAAVKQIYGEKVLIQFEDFANHNAFNLLAKYSKSHLVFNDDIQGTASVVLAGLLAALKVVGGTLAEHTYLFLGAGEAGTGIAELIALEISKQTSAPIEECRKKIWLVDSKGLIVDSRKNSVQSFKKPWAHEHEPLTTLYDAVQSIKPTVLIGTSGVGRTFTKEVVEAMASFNERPIIFSLSNPTSHSECTAEEAYNWTQGRVIFASGSPFGPVEYDGKVFVPGQSNNAYIFPGFGLGLVISGAIRVHEDMLLAASEALAAQATQENFDKGSIFPPFTNIRKISARIAAAVAAKAYELGLATRLPPPRDLVKYAQSCMYTPVYRNYR

SEQ ID NO: 6204 - protein, 470 aa, Corynebacterium diphtheriae
MTEHTAPTLTKGLKVRHLTMMGLGSTIGAGLFLGTGVGIKAAGPAVLIAYIIAGFIAVMIMRMLGEMGSVVPASGSFSEYADAGIGHWAGFIQGWVYWLATVAVLGAEITGASGFVASWLGVSPWIPALVFVAFFGLVNLMRVRAFGEFEFWFAFIKVAVLVVFLIIGSLLVLGLLPNHDFVGLSNVRAEGFAPTGLGGIAAALLAVAFGFGGIEVVAIASAESEDPQKSLVNAVRTTITRISIFYLGSVAIIVLLLPYSSLGKAKSAAESPFSQVLAMANIPGVVGVIEVVIVLALLSAFNAQIYASSRMMMSLAERRQAPNIFARVDNRGVPLPAIVLSVVLSVIMVILNYVDTGWLLTFLLNAAGASLLTVWTFIAVSQLKLRRRLEALQGNLAVRMWAFPGLTIATLAILFGLAILMLSDAGARIELLSAIAMVAILFAISLIAVKQPFDKALLPREASYPQNSPS

SEQ ID NO: 6205 - protein, 559 aa, Magnetococcus sp. MC-1
MNGSMPFHKYSPYPPVALANRQWPNRTLTKAPLWCSVDLRDGNQALANPMGPQAKRRMFDLLVEIGFKEIEVGFPSASRDDFQFLRDLIEQKAIPDDVTVQMLVQSRAHLIERTFEALQGAKRAIVHLYTPTSSLQRRVVFGKSQQEIIDVAVEGTQMIKEHAQRSPETEIVLEFSPESFTGTELPFALAISEAVQQVWQPTPAQPMILNLPATVEMSTPNIYADQIEWMLSHLSDPQSIIISLHAHNDRGTAVAATELAMLAGAGRVEGTLFGNGERTGNTDVVAVAMNLHSQGIDAGLNFSEMPRIIATSEACTGMSVPPRQPYAGELVFTAFSGSHQDAIRKGLHLHKQEQAQQWAVPYLPIDPQDLGRHYEPVIRINSQSGKGGMAFIMEERCGIHMPKAMQVEFSRVIQAVTDEMGRELQADEIEQLFFKNFVLQENPLSLGHVEHREETEERHHLHAQVSYAGTVQALQAHGNGPMSALVNALETFYSMTIQIHDYHQHARTAGRDSEAVSFVQISVNGGKPTFGVGLHTDSSRSALEAVLCSINRALATSLT

SEQ ID NO: 6206 - protein, 306 aa, Acrochaete viridis
YAHVDCPGHADYVKNMITGAAQMDGAILVVSGADGPMPQTKEHLLLAKQVGVPNIVVFLNKEDQVDDPELLELVELEVRETLEDYEFPGDDVPIVAGSALEALEALINNPEVSDNPWVNKIFKLMENVDKYIPTPERETDKSFLMAVEDVFSITGRGTVATGRVERGVLKTGETIDLVGLGDTQNLTVTGLEMFQKTLDETVAGDNVGILLRGVQKEDIQRGMVISAPNSIEPHTNFEAQVYVLTKEEGGRHTPFFQGYRPQFYVRTTDVTGKIETFTADDGSETKMVIPGDRVKMIVELIQPIAI

SEQ ID NO: 6207 - protein, 311 aa, Acrochaete leptochaete
YAHVDCPGHADYVKNMITGAAQMDGAILVVSGADGPMPQTKEHLLLAKQVGVPNIVVFLNKEDQVDDPELLELVELEVRETLEDYEFPGDDVPIVAGSALEALEALINNPEVSDNEWVNKIFKLMENVDSYIPTPERETDKSFLMAVEDVFSITGRGTVATGRVERGVLKTGETVDLVGLGDTQNLTVTGLEMFQKTLDETVAGDNVGILLRGVQKDDIQRGMVIASPNSIEPHTNFEAQVYVLTKEEGGRHTPFFQGYRPQFYVRTTDVTGKIETFTADDGSETKMVIPGDRVKMVVELIQPIAIEDGMR

SEQ ID NO: 6208 - protein, 257 aa, Dechloromonas aromatica RCB
MTQVVLTEVIGKVGLIRINRPEAMNALNNDVVDGIGAAIDIYEADENIGCIVITGNEKAFAAGADIGFMKDFDYMHAYKTDFITRNWERIKTTRKPVIAAVSGFALGGGCEMAMMCDMIFAADTAKFGQPEIRLGTMPGAGGTQRLPRAVGKAKAMDMCLTARMMDAAEAEKAGLVARIIPADQLLDETLKAAQTIAGYSLPVVMMIKESVNRAYESSLNEGLLFERRVFHSAFALEDQKEGMAAFVEKRKPVFKNR

SEQ ID NO: 6209 - protein, 291 aa, Acrochaete leptochaete
ADYVKNMITGAAQMDGAILVVSGADGPMPQTKEHLLLAKQVGVPNIVVFLNKEDQVDDPELLELVELEVRETLEDYEFPGDDVPIVAGSALEALEALINNPEVSDNEWVNKIFKLMENVDSYIPTPERETDKSFLMAVEDVFSITGRGTVATGRVERGVLKTGETVDLVGLGDTQNLTVTGLEMFQKTLDETVAGDNVGILLRGVQKDDIQRGMVIASPNSIEPHTNFEAQVYVLTKEEGGRHTPFFQGYRPQFYVRTTDVTGKIETFTADDGSETKMVIPGDRVKMVVEL

SEQ ID NO: 6210 - protein, 378 aa, Medicago sativa
MAIHHHHQQHTCSLFDALYCDEEKWEDDEGEVVDEGEQSDVTTTNYDILDSTSLLPLLLLEQNLFNEDEELNTLFSKEKIQQETYYEDLKNVINFDSLSQPRREAVEWMLKVNAHYGFSALTATLAVNYLDRFLLSFHFQKEKPWMIQLVAVTCISLAAKVEETQVPLLLDLQVQDTKYVFEAKTIQRMELLILSTLKWKMHPVTTHSFLDHIIRRLGLKTNLHWEFLRRCENLLLSVLLDSRFVGCVPSVLATATMLHVIDQIEQSDDHGVDYKNQLLNVLKTSKEKVDECYNAILHLTNANNYGHKRKYEEIPGSPSGVIDAVFSSDGSNDSWTVGASSYSTSEPVFKKTKNQGQNMNLSPINRVIVGILATATSP

SEQ ID NO: 6211 - protein, 297 aa, Endophyton ramosum
VDCPGHADYVKNMITGAAQMDGAILVVSGADGPMPQTKEHLLLAKQVGVPNIVVFLNKEDQVDDPELLELVELEVRETLEDYEFPGDDVPIVAGSALEALEALINNPEVSDNTWVNKIYKLMENVDNYIPTPERETDKSFLMAVEDVFSITGRGTVATGRVERGVLKTGETVDLVGLGDTQNLTVTGLEMFQKTLDETVAGDNVGILLRGVQKEDIQRGMVIAAPSSIEPHTKFEAQVYVLTKEEGGRHTPFFQGYRPQFYVRTTDVTGKIETFTADDGSETKMVIPGDRVKMIVEL

SEQ ID NO: 6212 - protein, 121 aa, Oceanobacter sp. RED65
MPSLYEKLGGDKAVSATVEIFYKKVIADKELSPFFSGINIDRQKRMQSKFLTVAFGGPNNYSGQTMRAAHRRPVELGLNEHHFNLVAGHLKQSLIELQVPPELVHQVMAIAASTKQDVLNQ

SEQ ID NO: 6213 - protein, 222 aa, Medicago sativa
MAIHHHHHNHQQLQQHTSSLFDALYCDEEEKWEDDEGEVVDEGEQSDVTTTNYDILDSTSLLPLLLLEQNLFNEDEELNTLFSKEITQQETYYEDLKNVINFDSLSQPRREAVEWMLKVNAHYGFSALTATLAVNYLDRFLLSFHFQKEKPWMIQLVAVTCISLAAKVEETQVPLLLDLQVQDTKYVFEAKTIQRMELLILSTLKWKMHPVTTHSFLDPGNS

SEQ ID NO: 6214 - protein, 301 aa, Acrochaete repens
SYAHVDCPGHADYVKNMITGAAQMDGAILVVSGADGPMPQTKEHLLLAKQVGVPNIVVFLNKEDQVDDPELLELVELEVRETLEDYEFPGDDVPIIAGSALEALEALINNPEVSDNTWVNKIYKLMENVDNYIPTPERETDKSFLMAVEDVFSITGRGTVATGRVERGVLKTGETVDLVGLGNTQNLTVTGLEMFQKTLDETVAGDNVGILLRGVQKDDIQRGMVIAAPNSIEPHTKFEAQVYVLTKEEGGRHTPFFQGYRPQFYVRTTDVTGKIETFTADDGSETKMVIPGDRVKMIVEL

SEQ ID NO: 6215 - protein, 550 aa, Thiobacillus denitrificans ATCC 25259
MKPLKTLPAWKALEQHFKSMRNFDMRAAFREDAARFETLSLRCGNLLLDYSKNRVTQETMRHLAQLARESELEEMRNAMCTGERINFTEKRAVLHVALRAPVRPALMVEGVDVEREIAKVLHRMQRFVESVHNGSWRGHTGKPIRNVVNIGIGGSDLGPAMVCHALDHYAVENVRVHFVSNLDPSHLAGTLAQLDPETTLFIVASKTFTTLETLANANSAKAWLLAALRAPEAVARHFVALSTNAQAVEAFGIDPENMFIFWDWVGGRYSLWSAIGLSIALQIGWGNFQALLAGAHAMDVHFKEAPLEANMPVILGMLGIWYANFWGTDTYGVFPYDQRLRLLVPFLQQLDMESNGKNVNRANKLVNYNTGPIVWGAPGTNGQHAFFELVHQGTRLIPTDFLVAAVNLTPLADQHEWLLANCLAQTEALLKGKSRAVIEAELIAQGMTRDDARALAPHKVFPGNRPSNTLLYQKLDPHTLGMLIALYEHKVFVQGVIWQINSFDQWGVELGKQLAPPIRAALSSVRVIGEHDGSTQGLIADIRRRRGLST

SEQ ID NO: 6216 - protein, 244 aa, Oxyrrhis marina
TFNVPAMYVQIQAVLSLYASGRTTGVVMDSGDGVSHTVPIYEGYALPHAMFRLDLAGRDLTEYMMKLLTERGYSFTTTAEREIVRDVKEKLCYVALDFDSEMKAASESSDKEKTYELPDGNIITVGNERFRCSEVLFQPSFLGKESSGIHDTVFKCVMQCDVDIRKDLYANVVLSGGTTMFPGIGERMTKELTALAPSTMKIKVVAPPERKYSVWIGGSILSSLSTFQQMWISKQEYDESGPTI

SEQ ID NO: 6217 - protein, 76 aa, Glycine max
  misc_feature (47)..(47): Xaa can be any naturally occurring amino acid
VTGHTHQFKAYKHEGGVVINPGSATETYSSITYDVNPSFVLMDIDGXRVVVYVYELIDGEVQVDKIDFKKTATMHG

SEQ ID NO: 6218 - protein, 523 aa, Magnaporthe grisea 70-15
MFLQRGSRHLLRQLPKGVIAIPTTPTVTTTVSARSRQQPTQQRQQQRHCRTTRGFHSTRRLLDVKPVLLADIGEGIVECEIIQWFVEPGARVEEFSPLCEVQSDKASVEITSRFSGVVKKLYYDAGEMAKVGKPFVDIDITGDLEAEPEKVLAGDVAPAKPVEEKTTQKAVETAPDMIGTPASVGGAERKRGKCAALATPAVRHLSKELKVDINEIDGTGRDGRVLKEDIYKFVQGKQSGSGVAPTIPAAPAAPAPQAASKVPPTPAPLPSQPGTPQTEEVMQLSHTQQMMFKTMTRSLTIPHFLYADEIDFTSLVELRTRLNRVLAAGGTGGPGTAEISKLSYLPFIIKAVSLALYQYPILNARVDIPSDGGKPSLAMRKQHNIGVAMDTPSGLLVPVVKNVNERNVLSIAAELVRLQSLATAGKLSPADMSGGTMTVSNIGSIGGTYLSPVVVEREVAILGVGRMRTVPAFDENDKVVKKHVCNFSWCADHRVVDGATLARAANMVRQVVEEPDVMVMHLR

SEQ ID NO: 6219 - protein, 560 aa, Coxiella burnetii RSA 493
MNNVHAYKRRIGPIGLMMSAVSAMIGSGWLFSSLYVGRLAGPASILAWIFGGILVMIVALTYAEIVTMLPITGGSTRFPQLTHGTFVSLFFGWITWFTLMTAPAIEVQAMIQYAANYWPTLIRHHGAGMHGLSPLGYLIATLMMIGFSLINIYSIRLITRLNNIFSFWKLIIPVLTAIVLMVVAFHPNNFNNPHYGGFMPNGWKGVFAALATGGILFAFNGFKQAVELAGEAENPNRTVIIGILGSLIIVLIIYLLLEIGFIGALSPESLSKGWFFVHFIGDAGPLAGLLMTFGVTWMAILLYIDAMIATSAAGLVYSTSSSRTLYGLSANRQLPKFLQEVNERGIPAKAVFVNFIVGMTFFLPFHGWYAMAEFMSSIIALSYITGPICCLSLRYQLPEHKRVFRLPLITVWSFFGFYICTLIVYWAGWSVVSKLGLSLFISFMLFVVYRLFSKRPRGIHMNWRAATWMWPYLVGLNVISYLGSYGGGINKIHFGWDFLYLAILCFCCLYLAVTFRASDKHVAETLVRFEEEVKTGIPSTVPDEEFENPSLVRKEVSYID

SEQ ID NO: 6220 - protein, 196 aa, Burkholderia multivorans
IHFDVMDNHYVPNLTIGPLVCEAIRPHVQVPIDVHLMVRPVDRIVPDFAKAGANLISFHPEGSDHIDRTLTLIRDHGCKAGLVFNPATPLNYLDHVMDRLDYVLLMSVNPGFGGQSFIPETLNKLREARARIDAYTERTGREILLEVDGGVKADNIAEIAAAGADTFVAGSAIFGKPDYRKVIDEMRAALAAVERS

SEQ ID NO: 6221 - protein, 706 aa, Saccharomyces cerevisiae
MSFLPLRSRSRSGAPHWVYIILYHIFTIPKIYSLPLLSGSHVLNSRDVADSGHSVGDEASVTTYYIISIILVLLGGVFAGLTLGLMGQDEVYLKVISTSGSNSEKKLAKRVLDLISRGKHWVLVTLLLSNVITNETLPIVLDRCLGGGWQAVVSSTILIVIFGEIIPQSVCVKYGLQVGAFFCPFVLVLMYLMYPVAYPIATLLDYMLGEDHGTMYKKSGLKTLVTLHRTMGVERLTKDEVTIISAVLDLKAKRVEEIMTPIENVFTMSADTILDDKTVEKIFNSGFSRIPIFLPNEPNNFIGMLLVRVLISYDPDDCLPISHFPLATLPETSPNTSCLNILNYFQEGKAHMCVVSKEPGSSHGAIGVLTLEDVIEELIGEEIVDESDVFVDMHQHIMRQQPGPLSKRHITSYLHHLYTSSHKEHKAADQADESSPLLSPSNSNHPSEHPQQDLNNKSWKQKSNDGYDRSNAVLSPTPQVTEHGTIIPSNLASNPLNVNKSFVTIKKPANVPKIITTHTPHSSKEPSPAPHSNDKSLSAEEQQLLSDHAELSRQAVLHTQRSGQPTQVTTSTKTTRNSPDSISIPNSGANHGNENQNVTISTSYQNTKNGIVESVITVKGVPKTIIGPAKDWDESKSEYGNENINQENSNRSDDRESSSSNASLFSSIKNKFKNENANNNDRSNFTDSLSRTSNYDANGSSSTIKR

SEQ ID NO: 6222 - protein, 256 aa, Bifidobacterium longum NCC2705
MGARGCRLNRMTYKLVLLRHGQSAWNKTNQFTGWVDVPLTEQGEAEAKRGGELLKEKNVLPDIVFTSLLRRAINTANIALDAADRLWIPVQRDWRLNERHYGALQGKNKTEIREEYGDEKFMLWRRSYATPPPEIDPNDQYAQNNDPRYAGDPVPEAECLANVVERVKPYFESAIEPELKAGKTVLIAAHGNSLRAIVKMLDNLSEEEIAKVNIPTAIPLLYELDENFKPIKPRGEYLDPEAAAAGAAAVAAQGQK

SEQ ID NO: 6223 - protein, 102 aa, Glycine max
  misc_feature (12)..(12): Xaa can be any naturally occurring amino acid
  misc_feature (14)..(15): Xaa can be any naturally occurring amino acid
  misc_feature (23)..(23): Xaa can be any naturally occurring amino acid
  misc_feature (28)..(28): Xaa can be any naturally occurring amino acid
  misc_feature (35)..(35): Xaa can be any naturally occurring amino acid
  misc_feature (37)..(37): Xaa can be any naturally occurring amino acid
  misc_feature (41)..(41): Xaa can be any naturally occurring amino acid
  misc_feature (43)..(43): Xaa can be any naturally occurring amino acid
  misc_feature (48)..(48): Xaa can be any naturally occurring amino acid
  misc_feature (54)..(55): Xaa can be any naturally occurring amino acid
DKSTIAMLGYGXEXXDIWLELTXLYGVXEYSKGNXYXQIAXGXHDVYXSAEVVXXVIKQVGGKITRQPGPISGLNTQTTSLLDPDGWKTVLVVNVDFLEELK

SEQ ID NO: 6224 - protein, 126 aa, Methanothermobacter thermautotrophicus str. Delta H
MAFKVVISDKEKSVQMEVDPSESRGLIGLTIGDEFDGSIIGLSGYKLKITGGSDKNGFPMKKTVPGARRIRSLVSGGVGYKPRRDGERRRKTFRGNTISDDIVQINTVVIEKGEKPLEELLGADEE

SEQ ID NO: 6225 - protein, 160 aa, Vibrio vulnificus CMCP6
MKDITPDICDQHEDKVTLLNLPLQNFGQKAAFFGEIVTVRCYHDNSKVRDVLSENGKGKVLVVDGHGSCQKALLGDQLAILAIENDWEGVIVFGAVRDVAQMSQMELGIKALGTSPFKTEKRGAGEVNVTLTMHNQMVQPKDYIYADWNGILISKELLQF

SEQ ID NO: 6226 - protein, 335 aa, non-culturable plant pathogenic bacterial sp.
VLCTRGLAKSRAYDQIDNAPEERERGITIKTSHVEYETEKRHYAHVDCPGHADYVKNMITGAAQMDAAILVVSGADSVMPQTREHILLARQVGVPKIVVFLNKCDLSPDEQILELVEMEVRELLSQYDFPGDEIPVIRGSALKALEGDAHYVAQVNELIETLDTYIEDPMREVDKPFLMPVEDVFTITGRGTVVTGRVERGQVKAGDEVEIVGLKETRKTIVTAVEMFKKDLDFAQAGDNIGALLRGINREDVQRGQVLAKPGSVKPHSKFFAQVYVLTKEEGGRHTAFFSQYRPQFYFRTTDITGVVELQGDVKMVMPGDNAELVVTLNNPIAI

SEQ ID NO: 6227 - protein, 312 aa, Bacillus halodurans C-125
MENRRIVIITGANSGIGKEAAQRFANEGDHVIMACRNIAFSRKVQHDIIAASGNDHVDLLELDVSSFASIRTFCTTFNSQYKRLDILIHNAAYFNHGEPYRLSPDGIELTFATNVFGPYLLTSLLRDRLKQSEDPRILHAGSNIIKHFFDPKQTFDLDLLQGNHGTKSYSVYKMYCQSKMALMLLTFQMAEVFADDGIKVNALQINGAKMSKRTIQKVKPWWRPIAWGQNLFFPPPSYMADKYFTICTSDKYKQTTGKLFNDKLEIMEPSPTHYPGFFKQMKLLLGSNVYPAYENTNIREKLWALCKELVGE

SEQ ID NO: 6228 - protein, 689 aa, Streptomyces avermitilis MA-4680
MSTPFPFTAVVGQDDLRLALLLNAVSPAVGGVLVRGEKGTAKSTAVRALSALMPEVDVVAGCRFSCAPGSPDPACPDGPHEVGPGVRRPARMVELPVGASEDRLVGALDIERALAEGVKAFEPGLLADAHRGILYVDEVNLLHDHLVDLLLDAAAMGASYVEREGVSVRHAARFLLVGTMNPEEGELRPQLLDRFGLTVEVAASREPDQRVEVVRRRLAYDDDPEAFAARWADEESAVRARIVAARELLPSVRLGDGALRQIAATCAAFEVDGMRADIVMARTATALAAWDGRSDVLAEDVRQAALLALPHRRRRNPFDAPGLDENKLDETLEEFGGQNEDEGDDDPDPDGPGGGGQPPENGPEGGPQDGPQDGSQEGPQDGADSSEPGGDEAARPQAGESGQPGASGAGEQQAVRAGEPFRTKVLSVPGLGEGAAGRRSRARTEHGRTTGARRPRGTLTKLHLAATVQAAAPHQRARGRSGRGLVVRRDDLRQATREGREGNLVLFVVDASGSMAARQRMSAVKGAVLSLLLDAYQRRDKVGLVTFRGSAAEVALPPTSSVDAAAVRLESLPTGGRTPLATGLLKAHDVLRVERLRDAARRPLVVVVTDGRATGGPEPVALAGRAARLFAADGVASVVVDCESGPVRLGLAGQLAGELGGTPVTLDELRADSIAGLVRDVQSSNRRAA

SEQ ID NO: 6229 - protein, 229 aa, Candida albicans SC5314
MVKSNVESAWETMEDTFSEIQNKFHQIYKPIDTGKPDEDDETTKKESLDITDDSTLSVSPITQLLYLARSKFYDLTPLDNQKSPFPFKNLRGKVVLIVNVASRCGFSFQYNGLEQLNKRFANDDFVLLGVPCNQFLWQEPGTNDQIVTKCKKKYDVSFQILDKINVNGEQADPVYKFLKAQKEGLWGTNRVKWNFEKFLIDKNGRVVERYSTFTRPVAIIPKIEQLLES

SEQ ID NO: 6230 - protein, 553 aa, Colwellia psychrerythraea 34H
MSIHPFAGKPARPEDRINIGQLVSDYFLQTPDVSLAAEQVSFGTSGHRGCANKRSFNEQHIIAICQAIAEYRQQNAINGPLFLGKDTHALSEPAFANAISVLIANGVNVVIQSDSLSGKGFTPTPVISRLIICHNKSASEKLADGIVITPSHNPPSDGGIKYNPPHGGPAEGGITKKIEQRANEIIIAGLIDVKQLSYPEALKSSLLTKEDFISHYVGQLNEVIDMQAISKAGITIGVDPLGGSGIAYWPVIAEQYNLNISVVNEVVDASFAFMPLDKDGKIRMDCSSKYAMAGLIAMKDDFDISVGNDPDFDRHGIVTSSGGLMNPNHYLAVAIHYLMTHRDWPKSCKIGKTLVSSSLIDRVAAQLSRPLSEVPVGFKWFVDGLADASYAFGGEESAGASFLSRDGSTWTTDKDGFILALLAAEILAVTGKDPYQYYLELTKTLGQPCYGRVEAVASFEQKRVLTALSSNDVKAQSLAGDKILHVLSHAPGNNAAIGGIKVVTDNGWFAARPSGTEDIYKIYAESFIDEDHLQIIISEAQAIVGDSFKAAGL

SEQ ID NO: 6231 - protein, 479 aa, Alkalilimnicola ehrlichei MLHE-1
MGDATLVWLRRDLRLTDNPALDQAARRGGPVIAVYLHAPEETPQYPPGAASHWYLHHSLKALGPALAQAGIPLVLRRGPALATLRALIRATGAGAVYWNRLYEPDAVARDRTVKQALRTEGLDCRSFPTALLHEPWAVRNQADRPYRAFTPFWRACRRQPPPAAPLPAPDLRDRPVPAVEGLDLAALGLLPRTPWDTGLRNTWQAGESAALARLEAFAADRLARYAQDRDRPAEPGTSGLSPALHFGELSPRQVWWQVMAAREAGVPEDACETFLSELGWREFAHHLLWSHPDLGDAPVDDRFGAFPWRPDPGDGWLHAWQAGRTGIPLVDAGMHELWQTGWMHNRVRMVTGSFLVKHLRLPWQRGERWFRDTLVDWDAASNAMGWQWVAGCGADAAPYFRIFNPVRQGERFDPQGRYVRRWLPALANLPDKYIHAPWTAPEAVLRRAGVTLGSDYPCPLIDLRLGREQALSAFQAIKG

SEQ ID NO: 6232 - protein, 348 aa, Francisella tularensis subsp. tularensis SCHU S4
MFNKLSQDNILRRLKMRVVINGFGRIGRLAFRQMFGKDNIEIVAINDLTNPEMLAHLLKYDSAQGRFSKAAVTVVKESSIVVDGKEIKIYAEKDAANLPWGELNVDVVLECTGFYVSKAKSQAHIDAGAKKVVISAPAGNDLPTVVFGVNHDILSADDKIISAASCTTNCLAPMAKALHDLATIESGFMTTIHAYTGDQNTLDAPHAKNDFRRARAAAVNIVPNSTGAAKAIGLVIPELAGKLDGAAQRVPVATGSLTELVAVVSKKVTAEDVNAAMKAAANKSFGYTEEELVSSDIIGISEGSLFDATQTKVTSLGDKSLVKVVSWYDNEMSYTNQMVRVVEYFGAL

SEQ ID NO: 6233 - protein, 337 aa, Alkalilimnicola ehrlichei MLHE-1
MAIKVAINGYGRIGRGVLRALYESGRSDELRIVAVNDLCELRTAAHLTRHDTTHGRFPGDVQTGEGELVVNGDRIRYTSERDPDRLPWEALGVDLVMECTGRFASREQAERHLRAGARKVLISAPGGPEVDATVCYGVNHDILRAEHTVVSNASCTTNCLAPIVQPLHRALGIEQGLLTTIHAYTNDQVLTDSPHADLRRARSATLSQVPTKTGATRALGLVLPEMAGRLDGYAMRVPTLNVSLVDLTFDAGRATSVEEVHEIIRAAAAGPMAGVLAVNDDPLVSIDFNHHPASAVFDATLTKVKGRLVKICAWYDNEWGFANRMLDTAVAMMRAAG

SEQ ID NO: 6234 - protein, 335 aa, Brucella melitensis 16M
MAVRVAINGFGRIGRNILRAIVESGRTDIQVVAINDLGPVETNAHLLRYDSVHGRFPKEVEVAGDTIDVGYGPIKVHAVRNPAELPWKEENVDIALECTGIFTSRDKAALHLEAGAKRVIVSAPADGADLTVVYGVNNDKLTKDHLVISNASCTTNCLAPVAQVLNDTIGIEKGFMTTIHSYTGDQPTLDTMHKDLYRARAAALSMIPTSTGAAKAVGLVLPELKGKLYGVAIRVPTPNVSVVDLTFIAKRETTVEEVNNAIREAANGRLKGILGYTDEKLVSHDFNHDSHSSVFHTDQTKVMDGTMVRILSWYDNEWGFSSRMSDTAVALGKLI

SEQ ID NO: 6235 - protein, 518 aa, Agrobacterium tumefaciens str. C58
MLCTNSSAMLHPSKNRGGLPMKEIGHFINGKHVPGASGRTSNVYNPATGEVQATVALASDAELRAAVESAKAAQPKWAATNPQRRARVFFKFVELLNRDLNELAVLLSSEHGKTVEDSKGDIIRGLEVCEFVCGIPHLQKGEFTEGAGPAIDMYSIRQPVGIGAGITPFNFPGMIPMWMFAPAIACGNAFILKPSERDPSLPIRLAELMIEAGLPAGMLNVVNGDKGAVDAILTDPDIGAVSFVGSTPIARYVYGTAAMNGKRAQCFGGAKNHMIIMPDADLDQAVNALMGAGYGSAGERCMAVSVAVPVGEDTANRLVEKLIPQIESLRIGPYTDDKADMGPLVTKEAQTRVRGLIDSGVEQGAKLLVDGRDFKLQGYEDGYFVGGCLFDHVTPDMDIYKTEIFGPVLSVVRAKNYEDALELPMKHEYGNGVAIYTRDGDAARDFASRINIGMIGINVPIPVPLAYHSFGGWKASSFGDLNQHGTDSIKFWTKTKTITSRWPSGIKSGAEFVMPTMK

SEQ ID NO: 6236 - protein, 479 aa, Bacillus cereus E33L
MTTSNTYKFYLNGEWRESSSGETIEIPSPYLHEVIGQVQAITRGEVDEAIASAKEAQKSWAEASLQDRAKYLYKWADELVNMQDEIADIIMKEVGKGYKDAKKEVVRTADFIRYTIEEALHMHGESMMGDSFPGGTKSKLAIIQRAPLGVVLAIAPFNYPVNLSAAKLAPALIMGNAVIFKPATQGAISGIKMVEALHKAGLPKGLVNVATGRGSVIGDYLVEHEGINMVSFTGGTNTGKHLAKKASMIPLVLELGGKDPGIVREDADLQDAANHIVSGAFSYSGQRCTAIKRVLVHENVADELVGLLKEQVAKLSVGSPEQDSTIVPLIDDKSADFVQGLVDDAVEKGATIVIGNKRERNLIYPTLIDHVTEEMKVAWEEPFGPILPIIRVSSDEQAIEIANKSEFGLQASVFTKDINKAFAIANKIETGSVQINGRTERGPDHFPFIGVKGSGMGAQGIRKSLESMTREKVTVLNLV

SEQ ID NO: 6237 - protein, 764 aa, Magnetococcus sp. MC-1
MLIMLLLTRTLMGSLESNYLLAKQRQANENNIEILLASATEALENRNIIGLKKIFAQALRSQPQLLELTILNDDGKPLFSSTREQAPNTTLTHFRTPIMVQGSFQGILVGAWDLAPDLRAIDTHVNHILLLTSLLFGLITLMVIFMVHRLAIQPVDAIYNRLIKQISPPQSKPETFHAARELRRLHQTVESFSRTAASHLENARTLQESEALLKQRVERRTRELRLAKEAAEQANLAKTEFLATMSHEIRTPLNGVLGMSDLLLESDLNSYQRHHVETIHRSGRTLLRVINDILDLSRIQAGRMPLEVTAFKLRACLEDVQALFKDQARRKGLSFSINCQEELPQRLLGDATRLNQILFNLVGNALKFTERGFVRVSVQAEQVREADLLLRIQVEDSGIGISDEYKNRLFEIFSQQDSSISRRYGGSGLGLVITRKLAQIMGGKLGFSSRSGAGSTFWVTARFGRVPDTLPDHPLLPREEQQSNLLNQRFRAHILLAEDNPVNQDVARLNLERLGCRVTLVENGQQAVTVFQENRFDLVLMDCEMPIMDGYTATRTIRDLERQQGRRATPIIAVTAHALASHRNKAIATGMNDFLSKPFSTTKLIKLLATYLPPHTVIAQPDPAPPVVTQETAPSADPAHKTLDHRALDQIRALDPADPQGMLNRMIDLYFEQSAKDFKAIENGLATQNAELIRFHAHKLKSSSAQMGGQQLSLLCRTIEEQCHTFTRVEESMSQASKAQHELCAALHALRQTAPPTPPSEGEI

SEQ ID NO: 6238 - protein, 293 aa, Acrochaete endozoica
HADYVKNMITGAAQMDGAILVVSGADGPMPQTKEHLLLAKQVGVPNIVVFLNKEDQVDDSELLELVELEVRETLEDYEFPGDDVPIIAGSALLALEALIENPEVSDNSWVNKIFELMKNVDTYIPTPERETSKSFLMAVEDVFSITGRGTVATGRVERGVLKTGETVDLVGLGETQNLTVTGLEMFQKTLDETVAGDNVGVLLRGVQKDDVQRGMVIAAPNSIEPHTKFEAQVYVLTKEEGGRHTPFFQGYRPQFYVRTTDVTGKIETFTADDGSETKMVIPGDRVKMVVELI

SEQ ID NO: 6239 - protein, 166 aa, Oryza sativa (japonica cultivar-group)
MVKEFVQDEEKQRLLLDEHTEKHFTAGEVAAEIADILSQYGLGPEEYGPVVNSLRSNPKAWLEFMMKFELGLEKPEPRRALMSAGTIALAYVVGGLVPLLPYMFVPTADRAMATSVVVTLAALLFFGYVKGRFTGNRPFISAFQTAVIGALASAAAFGMAKAVQSI

SEQ ID NO: 6240 - protein, 1202 aa, Magnetococcus sp. MC-1
MSMHRLLLRQLRRSMGLVDESAVDALLQELDALPAEQISPASVKALHGLKTLLQRVEQTYEHNERDLLLRNRSLHLSSEELSDANERLRRETARQEQLLSTLRQTANHLLEADQKPTLGEDEASLEQLSDLMSRLALERSEFRRHLERQKFALDQHAIVSITDTKGVILYANDRFCQISGYTQDEILGQAHNLVNSGYHDSGFFEVMWRTIARGEVWNGEVCNKAKDGRLYWVSATIVPFLDERGKPIQYIAIRTDITRQKALEEKIEDNRRFLQSISDNIGEGVFALDVQGFCTFLNPEAERLLGWTQDELAGRSFHDTVHYQDAEGMPMNEADCPVHDAVDRGVDYRSDEDVFIHRDGGIFPVNISVVPVREDGVVTGAVGVFQNITESKQIQRQLKQSEERLQIALDASNTGFWDWDPLQDRAYFSDQWLSMVGYQQGDILNNSTGWLDLLHGEDLPHVERELEAHLNGQRKNFEVEFRMRHKQGHWVWILSSGRVIERDEEKRALRMAGIHKDISDRKRVEDELKKAMLDAESANRSKSEFLANMSHEIRTPMNGVVGMMELLSNTELTPEQQSHMRTARNSAESLLTIINDILDFSKIEAGKLELEEIAFDLAELVEDVTALLAQRVDSEKLELLHNAPADLPMQVAGDPTRLRQVLVNLVGNAVKFTPEGEVEVRMTVERQDADTVTVLTEVRDTGIGIDEAVRPRLFRMFTQADGSTTRRFGGTGLGLAISKQLVELMGGEVGFSSVMGQGSTFWFRITFPIVAKAQAVAGGVDSLQGLRALVVDDNATNRNLLGRYLSNWGVTHLECASGKQALEKIADAAKFGLSFDLAILDLLMPGMDGLALAERITQMVQDKQIKPLRMVLLTSAHARREELEQAGVVAALSKPIRQAQLRALLGQVMRGERVVGGLVERISQNNMSATFDAAVLLVEDHPINQQVARGMLAGLGCRVEIANDGHEGVRLFARHRYDLVLMDIQMPGMDGYETTDAIRQMERSERWPRTPIVALTANAMEQDRDRCLAADMDDYLSKPISLDRLKAAMSKWLKTIAKSEEPEEVLGGAVGQPESPLGAVATGGEDDSVVDLRTLAALKSSMAVIEGGFLQILQSYLQSTPKALESIEQGMIDGDAARVRGAAHNLKSTSLSLGAITLGKVAQEIETRGKEVKLDNMAPLLARAKACYALVAARLEAEQANL

SEQ ID NO: 6241 - protein, 301 aa, Phaeophila dendroides
CPGHADYVKNMITGAAQMDGAILVVSGADGPMPQTKEHLLLAKQVGVPNIVVFLNKKDQVDDEELLELVDMEIRETLTAYEFPGDDIPIVAGSALLALEALIENPDATDNEWVEKIYELMNNVDNYIPTPERQTDKSFLMAIEDVFSITGRGTVATGRVERGVLKPGETIEIVGLADTKSVTVTGLEMFQKTLDETVAGDNVGVLLRGVQKNDIQRGMVIAAPGTIDPHTKFEAQVYVLTKEEGGRHTPFFPGYRPQFYVRTTDVTGKIETFTADDGSQPKMVIPGDHVTMIVELINQLQL

SEQ ID NO: 6242 - protein, 240 aa, Prototheca wickerhamii
VLALAECSGDRQRTGASRCCCWEREAWARVATVNSLLGERAAVVSSFQATGLGVHMHTRTLPGGFALNLIDTPSLLDQDSVSTSRLEQIGSAIKGVKIDAVLFLDRLDVYSTDTLDEQVVDGVTAYFGEDMWDHAVLGLTRATSSAPPLSTDFGEWVVERSLQLQSLIAKARAQYAPRRRRGEAPPLTPAGCRESQECPRKLRGSGSSPATAPGSPTCMPRWRSAATGAGQAWLHDAARR

SEQ ID NO: 6243 - protein, 303 aa, Phaeophila dendroides
YAHVDCPGHADYVKNMITGAAQMDGAILVVSGADGPMPQTKEHLLLAKQVGVPNIVVFLNKKDQVDDEELLELVDMEIRETLTAYEFPGDDIPIVAGSALLALEALIENPDATDNEWVEKIYELMNNVDNYIPTPERQTDKSFLMAIEDVFSITGRGTVATGRVERGVLKPGETIEIVGLADTKSVTVTGLEMFQKTLDETVAGDNVGVLLRGVQKNDIQRGMVIAAPGTIDPHTKFEAQVYVLTKEEGGRHTPFFPGYRPQFYVRTTDVTGKIETFTADDGSQPKMVIPGDHVTMIVELINH

SEQ ID NO: 6244 - protein, 104 aa, Arabidopsis thaliana
VVRLVENPTSGNAAAAPGKRKALLHTPSGEVVTSYASLERKLAALGWERYYAGGGDGGGAGLLQYHKRTSVDLISLPKDFAHFGSVHMYDIVIKNRDAFRVIDA

SEQ ID NO: 6245 - protein, 294 aa, Phaeophila dendroides
ADYVKNMITGAAQMDGAILVVSGADGPMPQTKEHLLLAKQVGVPHIVVFLNKKDQVDDEELLELVDMEIRETLTAYEFPGDDIPIVAGSALLALEALIENPEVTNNEWVEKIYELMNNVDNYIPTPERQTDKSFLMAIEDVFSITGRGTVATGRVERGILKPGETIEIVGLGETRSVTVTGLEMFQKTLDETVAGDNVGVLLRGVQKQDIQRGMVIATPGTIDPHTKFEAQVYVLTKEEGGRHTPFFPGYRPQFYVRTTDVTGQIETFTADDGSEPKMVIPGDHVTMVVELIQP

SEQ ID NO: 6246 - protein, 496 aa, Triticum aestivum
  misc_feature (13)..(13): Xaa can be any naturally occurring amino acid
  misc_feature (26)..(26): Xaa can be any naturally occurring amino acid
  misc_feature (38)..(38): Xaa can be any naturally occurring amino acid
  misc_feature (66)..(66): Xaa can be any naturally occurring amino acid
  misc_feature (68)..(68): Xaa can be any naturally occurring amino acid
  misc_feature (125)..(126): Xaa can be any naturally occurring amino acid
  misc_feature (138)..(141): Xaa can be any naturally occurring amino acid
  misc_feature (144)..(144): Xaa can be any naturally occurring amino acid
  misc_feature (147)..(148): Xaa can be any naturally occurring amino acid
  misc_feature (256)..(256): Xaa can be any naturally occurring amino acid
  misc_feature (260)..(260): Xaa can be any naturally occurring amino acid
  misc_feature (262)..(262): Xaa can be any naturally occurring amino acid
  misc_feature (264)..(266): Xaa can be any naturally occurring amino acid
  misc_feature (274)..(274): Xaa can be any naturally occurring amino acid
  misc_feature (276)..(276): Xaa can be any naturally occurring amino acid
  misc_feature (278)..(279): Xaa can be any naturally occurring amino acid
  misc_feature (281)..(281): Xaa can be any naturally occurring amino acid
  misc_feature (283)..(283): Xaa can be any naturally occurring amino acid
  misc_feature (285)..(285): Xaa can be any naturally occurring amino acid
  misc_feature (288)..(290): Xaa can be any naturally occurring amino acid
  misc_feature (299)..(301): Xaa can be any naturally occurring amino acid
  misc_feature (303)..(304): Xaa can be any naturally occurring amino acid
  misc_feature (309)..(313): Xaa can be any naturally occurring amino acid
  misc_feature (315)..(316): Xaa can be any naturally occurring amino acid
  misc_feature (318)..(318): Xaa can be any naturally occurring amino acid
  misc_feature (323)..(324): Xaa can be any naturally occurring amino acid
  misc_feature (328)..(330): Xaa can be any naturally occurring amino acid
  misc_feature (332)..(334): Xaa can be any naturally occurring amino acid
  misc_feature (338)..(338): Xaa can be any naturally occurring amino acid
  misc_feature (344)..(346): Xaa can be any naturally occurring amino acid
  misc_feature (348)..(350): Xaa can be any naturally occurring amino acid
  misc_feature (353)..(354): Xaa can be any naturally occurring amino acid
  misc_feature (356)..(356): Xaa can be any naturally occurring amino acid
  misc_feature (360)..(360): Xaa can be any naturally occurring amino acid
  misc_feature (363)..(363): Xaa can be any naturally occurring amino acid
  misc_feature (365)..(365): Xaa can be any naturally occurring amino acid
  misc_feature (371)..(371): Xaa can be any naturally occurring amino acid
  misc_feature (377)..(378): Xaa can be any naturally occurring amino acid
  misc_feature (385)..(386): Xaa can be any naturally occurring amino acid
  misc_feature (388)..(388): Xaa can be any naturally occurring amino acid
  misc_feature (390)..(390): Xaa can be any naturally occurring amino acid
  misc_feature (394)..(394): Xaa can be any naturally occurring amino acid
  misc_feature (398)..(398): Xaa can be any naturally occurring amino acid
  misc_feature (424)..(424): Xaa can be any naturally occurring amino acid
  misc_feature (460)..(460): Xaa can be any naturally occurring amino acid
  misc_feature (472)..(472): Xaa can be any naturally occurring amino acid
MAGTGVFADVLDXEVYKYYADGEWRXSASGKTVAIVNXTTRQTQYRVQACTQEEVNKVMDAAKVAXKXWARTPLWKRAELLHKAAAILKEHKTPIAECLVKEIAKPAKDAVSEVVRSGDLVSYTXXEGVRILGEGKLXXXXSFXGNXXNKYCLSSKIPLGVVLAIPPFNYPANLAGSKIGPALIAGNALVLKPPTQGAVAALHMVHCFHLAGFPKGLISCVTGKGSEIGDFLTMHPGVNCISFTGGDTGIAISKKXGMVXLXMXXXGKDACIVXEXAXXDXVXAXIVXXXFSYSGQRCXXXKXXLIMEXXXXXVXXKXNAKLXXLKVXXXEXXXDITXVVTESXXXFXXXSGXXCXGERXNFXPXVQEKGXLIWPLXXDHVRPDXXIXWXEPFXPVLXVIRINSVEEGIHHCNASNFGLQGCVXTRDINKAIMISDAMESGTVQINSAPARGPDHFPFQXLKDSGIGSQGIXNSINMMTKVKSTVINLPSPSYTMG

SEQ ID NO: 6247 - protein, 116 aa, uncultured epsilon proteobacterium
WTMVAGGGASVVYADTIADMAGGVEDLANYGEYSGGPTTDETRFYTETVLDLMTREKDPKGRDKILIIGGATANFTDVAKTFTGIIQAFEKYADKMKDVGTRIYVRRGGPNYKGEF

SEQ ID NO: 6248 - protein, 294 aa, Phaeophila dendroides
ADYVKNMITGAAQMDGAILVVSGADGPMPQTKEHLLLAKQVGVPNIVVFLNKEDQVDDAELLELVDLEVRETLNEYEFPGDDVPIVAGSALLALEALIENPEVSDNSWVNKIYELMDNVDNYIPTPERETEKSFLMAIEDVFSITGRGTVATGRVERGVLKSGQTVELVGLAETKSVTVTGLEMFQKTLDETVAGDNVGVLLRGVQKTDIQRGMVIAAPGTIDPHTRFEAQVYVLKKEEGGRHTPFFPGYRPQFYVRTTDVTGKIETFTADDGTKPKMVIPGDHVTMIVELIQP

SEQ ID NO: 6249 - protein, 828 aa, Escherichia coli CFT073
MKLSRRSFMKANAVAAAAAAAGLSVPGVARAVVGQQEAIKWDKAPCRFCGTGCGVLVGTQQGRVVACQGDPDAPVNRGLNCIKGYFLPKIMYGKDRLTQPLLRMKNGKYDKEGEFTPITWDQAFDVMEEKFKTALKEKGPESIGMFGSGQWTIWEGYAASKLFKAGFRSNNIDPNARHCMASAVVGFMRTFGMDEPMGCYDDIEQADAFVLWGANMAEMHPILWSRITNRRLSNQNVTVAVLSTYQHRSFELADNGIIFTPQSDLVILNYIANYIIQNNAINQDFFSKHVNLRKGATDIGYGLRPTHPLEKAAKNPGSDASEPMSFEDYKAFVAEYTLEKTAEMTGVPKDQLEQLAQLYADPNKKVISYWTMGFNQHTRGVWANNLVYNLHLLTGKISQPGCGPFSLTGQPSACGTAREVGTFAHRLPADMVVTNEKHRDICEKKWNIPSGTIPAKIGLHAVAQDRALKDGKLNVYWTMCTNNMQAGPNINEERMPGWRDPRNFIIVSDPYPTVSALAADLILPTAMWVEKEGAYGNAERRTQFWRQQVQAPGEAKSDLWQLVQFSRRFKTEEVWPEELLAKKPELRGKTLYEVLYATPEVSKFPVSELAEDQLNDESRELGFYLQKGLFEEYAWFGRGHGHDLAPFDDYHKARGLRWPVVNGKETQWRYSEGNDPYVKAGEGYKFYGKPDGKAVIFALPFEPAAEAPDEEYDLWLSTGRVLEHWHTGSMTRRVPELHRAFPEAVLFIHPLDAKARDLRRGDKVKVVSRRGEVISIVETRGRNRPPQGLVYMPFFDAAQLVNKLTLDATDPLSKETDFKKCAVKLEKV

SEQ ID NO: 6250 - protein, 553 aa, Rhodopseudomonas palustris CGA009
MLKNPETKYRPFVTPVDLPDRQWPSRRLRSAPRWLSTDLRDGNQSLANPMGVERKQRFYDMLIAIGFKEIEVAFPSASQTEFDFVRSLINDDRIPNDVTIQVLTQSRTELIARTFESLEGAQRAIVHLYNATAPLFRRVVFGMERRDVVDLAITGVTAMLDESLKRPGTDWTFEYSPETFCFTEPDFALEICERVLDVWQPTPERPAILNLPATVEVAMPNVYADQIEWFCRNISRRDSVVISLHPHNDRGTGVAAAELGLLAGADRVEGCLFGNGERTGNVDLVTLALNLYTQGIDPGLSFPAMREVVNTVEHCTELPVHPRHPYAGEMVHAAFSGSHQDAIRKGFAAYAQRNDGLWEMPYLPIDPADIGETYEAVIRVNSQSGKGGVAWVLEQDKGLKLPKRMQADFSTHVQKLADDLGRELNTSDIWQCFAGCYLQRPTDRFVLVDYKETGPVGQRTFIGRIAIDGEVRSLSGRGNGLISGVVAALQDAGGPALDVADYQEHAIGSGATAQAAAYVECRTSDGRTVFGTGIDPDVATASVRALLHAANNA

SEQ ID NO: 6251 - protein, 337 aa, Methanococcoides burtonii DSM 6242
MSKTAAVIEGDGVGPELVDAMVKVAEAVGTNVEFVKCEAGVQWWEKNGGATLIPDETWALLDEADACFKGPTTTPGGAGSPRSVAVSIRQKYNLYANVRPIKTFPNTNNPLGDVDFVCVREGTEGMYIGEEVKLTDDVYIAIRKITRPACKNIATYSFEEAKKRGYDTVVPIHKSNILKMTCGTFLEEVEKVAEGYPGIDVWEYHVDNIAQQLIKNPQLFNNKILLSTNLFMDVISEECSALIGSIGLIYSANIGDNFAMFEPAHGSAPKYAGLDKVNPVATILAGAWMLDYLGESDKFAQIFKATEDVISEGKHLTYDLGGKASLSEMTDAIISKL

SEQ ID NO: 6252 - protein, 343 aa, Vibrio fischeri ES114
MTQFIWPTTPVQLRCDKKWQETDDTISLQLISEHKETFDFKPGQFVSIGIEIEGKMEYRAYSISSVPNQDFLQLTIKRVEGGKVSNYLIDQLNEGDEVAVLAPTGPFNSIDCKPRKKVALLSAGCGITPVMSMAKSWIAQNKDIDITFIHMEKSPEHTIYFDELQYLNKQHANFNLKLLLKNPQFTDYPQGRLDQEWLVTLCPDLVERTVFLCGPTNFMQDMKKYVEAIGLDMAHFFQESFTPIEPEIMETVENSGVVQFDVPAFGVSKEIDKGATLADVLEESGVPIIIACRSGMCGSCKCKVTKGDVSRTSTETLSEEDIAQGYTLACSSQVQSDVEVSLV

SEQ ID NO: 6253 - protein, 425 aa, Methanococcoides burtonii DSM 6242
MKLYKTYEDLPKIKLPKGQEVSISDSTLRDGAQMPGIVLKVDHKVKIYEYLHNIGIEKLETFVYNDRDRNAISMMLDRGYEFPEVTGWARAATSDIDLVLDIGAIEETGILMSVSDVHIFDKMGLPSREAAEEKYLDALQYAVDHGLRTRAHIEDMTRADNTNFVYPMIKKILEIDPKCTIRLCDTIGFGIPFVDVEEPFGIPEMVRHVKEELKAVNIETHCHDDFGLAVANSIAGYWHGANWSNVTFLGIGERAGNAELEKLLLFLERRIEGFDKYDLKSLFEFAKFMEREIGIRIPRNKSIVGNNVFAHESGIHTAGVIKNPFTYEPYPPEVVGGKRAFLIGDSSGIEVLRFKVEDTLHDLLDVKISVEKNDPRLRAIQADIQNLYNNEKRVSCISDEEIQAYVEKYFLFEPIVEKSMGRKTL

SEQ ID NO: 6254 - protein, 644 aa, Mycobacterium tuberculosis
  misc_feature (1)..(1): Xaa can be any naturally occurring amino acid
  misc_feature (41)..(41): Xaa can be any naturally occurring amino acid
  misc_feature (90)..(90): Xaa can be any naturally occurring amino acid
  misc_feature (98)..(98): Xaa can be any naturally occurring amino acid
  misc_feature (105)..(105): Xaa can be any naturally occurring amino acid
  misc_feature (257)..(257): Xaa can be any naturally occurring amino acid
  misc_feature (270)..(270): Xaa can be any naturally occurring amino acid
  misc_feature (390)..(390): Xaa can be any naturally occurring amino acid
  misc_feature (404)..(404): Xaa can be any naturally occurring amino acid
  misc_feature (441)..(441): Xaa can be any naturally occurring amino acid
  misc_feature (480)..(480): Xaa can be any naturally occurring amino acid
  misc_feature (559)..(559): Xaa can be any naturally occurring amino acid
XTTSESPDAYTESFGAHTIVKPAGPPRVGQPSWNPQRASSXPVNRYRPFAEEVEPIRLRNRTWPDRVIDRAPLWCAVDLRDGNQALIDPXSPARKRRXFDLLVRXGYKEIEVGFPSASQTDFDFVREIIEQGAIPDDVTIQVLTQCRPELIERTFQACSGAPRAIVHFYNSTSILQRRVVFRANRAEVQAIATDGARKCVEQAAKYPGTQWRFEYSPESYTGTELEYAKQVCDAVGEVIAPTPERPIIFNLPATVEXTTPNVYADSIEWXSRNLANRESVILSLHPHNDRGTAVAAAELGFAAGADRIEGCLFGNGERTGNVCLVTLGLNLFSRGVDPQIDFSNIDEIRRTVEYCNQLPVHERHPYGGDLVYTAFSGSHQDAINKGLDAXKLDADAADCDVDDXLWQVPYLPIDPRDVGRTYEAVIRVNSQSGKGGVAYIXKTDHGLSLPRRLQIEFSQVIQKIAEGTAGEGGEVSPKEXWDAFAEEYLAPVRPLERIRQHVDAADDDGGTTSITATVKINGVETEISGSGNGPLAAFVHALADVGFDVAVLDYYEHAXSAGDDAQAAAYVEASVTIASPAQPGEAGRHASDPVTIASPAQPGEAGRHASDPVTSKTVWGVGIAPSITTASLRAVVSAVNRAAR

SEQ ID NO: 6255 - protein, 968 aa, Prochlorococcus marinus str. NATL2A
MSKAELKDFTFKSRHIGPTNEDEALMLQHLGYENAEEFISSVIPNEIFDSENNGVSIPDGCDQNKALTEINIISKKNVEHRSLIGLGYHSTVIPPVIQRNVLENPNWYTAYTPYQAEISQGRLEALFNFQTLISELTGLPISNASLLDEATAAAEAISLSLTVRKNKNANKFLVDQEILPQTLDVLKTRCEPLGISLEMFDNNNFEIDKNVFGILIQLPGKNGRIWDPTKIINDAHKCNAIVTIAIDPLAQVLIKPMGEFGADIVVGSAQRFGVPIAFGGPHAAFFATKEIYKRQIPGRIVGQSVDVEGNQALRLALQTREQHIRRDKATSNICTAQVLLAVLSSFYAVHHGPKGLKQIAENVVKYRSNFESILMNLEYPIEKYSAFDSVDVYCSEASEVIQLASEEGYNLRVLPIGSDFENAKGFGVTFDELTCDEEIYKLHQILAQVKGKKTHDLSNFIFENASLIDIPLREKSWLEQSVFNQYQSETDLMRYIHCLVSKDFSLVQGMIPLGSCTMKLNAAAELLPIEWREFSSIHPFAPHTQLTGFHEIINDLENWLSALTGFQGVSLQPNAGSQGEFAGLLVIRSWHQSLGEGHRNICLIPTSAHGTNPASAVMSGFKVVSVKCDEYGNVDLEDLKNKSKIHSKNLAALMVTYPSTHGVFEPNIREMCQVIHQEGGQVYLDGANLNAQVGICRPGSYGIDVCHLNLHKTFSIPHGGGGPGVGPIAVADHLVPYLPGHSIIKCGGQKAISAVSAAPFGSAGILPISWMYIRMMGSDGLRKASSIAILSANYLAKRLDPYYPVLFKDPNGLVAHECILDLRPLKSQLGIEVEDVAKRLMDYGFHAPTISWPVAGTLMVEPTESESLPELDRFCDAMIGIREEIEQIKLGKIDPINNPLKQSPHTLKTVTSDDWDRPYSRKEAAYPLPDQEKYKFWPSVSRINNAYGDRNLICSCPSVQDLEDINSV

SEQ ID NO: 6256 - protein, 227 aa, Magnaporthe grisea 70-15
MASSGAGGWSTLRNQARTLEKDTEALFHTYSQIATSSNIPAKPTEQERETEARLREILDKRENVIAQLTRLLDSDSDLASSSTKVRNLALFRDKLAEQRRELPRLRSRIQETRNRANLLSNVRNDIDAYRASNPEQAEAEYMLDERSRIDNSHSMADDVLYQAYAINDNFNSQREMLASINRRITLAASQVPGINTLMTRISAKKRRDGIIMGSFIAICFFVFWFFL

SEQ ID NO: 6257 - protein, 399 aa, Methanococcoides burtonii DSM 6242
MIYDVVVVGAGPTGSTAARYATMGGAKVLIIEEHFSIGSPVECTGLLSTRAVSECDVRPEDDFVLNSVRGAFVNSPNGTCLPIDGKRTKAYVVSRKIFDRHLVSLAVDTGAELMLKGRVTGIQQKDGIQLLSVIHMGKMITVRSKVVIGADGVKSNVARYTGLGKVDRILSGVQIEAVYSSNDTDFVELFVGSQAPGFFAWTVPVNERISRIGLAVEPGNEHNAINYLRKIVNKNKHLAGNCTNNMLDLVVGGIPIGPLKRTYSDGILIAGDAAGQVKPTSGGGVYTGAVCAKMAGQVAAEAVSEENFSANRLKEYESRWKSALGRELRTGMKIHDFVGGLTDKELDDLIGSMNNNAILELITKYGDMDHPSILLKKLLNPMNSRHLIGVFRAFAKAVL

SEQ ID NO: 6258 - protein, 254 aa, Salmonella enterica subsp. enterica serovar Typhi str. CT18
MNSQFAGLTREACVALLASYPLSVGILAGQWIALHRYLQQLEALNQPLLHLDLMDGQFCPQFTVGPWAVGQLPQTFIKDVHLMVADQWAAAQACVKAGAHCITLQAEGDIHLHHTLSWLGQQTVPVIDGEMPVIRGISLCPATPLDVIIPILSDVEVIQLLAVNPGYGSKMRSSDLYERVAQLLCLLGDKREGKIIVIDGSLTQDQLPSLIAQGIDRVVSGSALFRDDRLVENTRSWRAMFKVAGDTTFLPSTA

SEQ ID NO: 6259 - protein, 225 aa, Solanum demissum
MVKAIIAPSMLSSDFANLASEAERMLNCGADWLHMDIMDGHFVPNLTLGAPIIESLRKHTKAYLDCHLMVTNPLDYVEPLGKAGASGFTFHVEASRDNWQELVQKIKSKGMKPGVSLKPGTPIEEVYPLLDGENSVELVLVMTVEPGFGGQKFMPEMMDKVRTLRKKYPSLDIEVDGGLGPSTIEAATSAGANCIVAGSSVFGAPDPAQVITLLRGSVEEAQKRS

SEQ ID NO: 6260 - protein, 421 aa, Colwellia psychrerythraea 34H
MSIDFILPDIGEGIVECELVEWLVKEGEVIVEDQPIADVMTDKALVQIPAMHSGVVEKLYYKQGEIAKVHSPLFAMTPEGDDSTNDIVAAEPEVNAQVDNVKTELVTKEISVPSVAPSSVKGEPAVSNTKTDGSKALASPAVRRVARELDINIHQVEGSGKKGRVYKDDVVAYSQNGSSVIPTVVNGGTSVEPIRGIKKIMATAMQNSVSTIPHFTYCEEIDLTELIALRTELKDVYAKQDIKLTMMPFFMKAMSLAIKEYPVVNSKVNDDCTELTYFNDHNIGMAVDSKVGLLVPNIKQVQTKSILDLANDIMRLTNDARSGRVASEDLKGGSITISNIGAIGGTVATPIINKPEVAIVALGKLQKLPRFNEQGDVEARSIMQVSWSGDHRVIDGGTIARFCNLWKSFLEKPSHMLVHMS

SEQ ID NO: 6261 - protein, 396 aa, Saccharomyces cerevisiae
MTVTIKELTNHNYIDHELSATLDSTDAFEGPEKLLEIWFFPHKKSITTEKTLRNIGMDRWIEILKLVKCEVLSMKKTKELDAFLLSESSLFVFDHKLTMKTCGTTTTLFCLEKLFQIVEQELSWAFRTTQGGKYKPFKVFYSRRCFLFPCKQAAIHQNWADEVDYLNKFFDNGKSYSVGRNDKSNHWNLYVTETDRSTPKGKEYIEDDDETFEVLMTELDPECASKFVCGPEASTTALVEPNEDKGHNLGYQMTKNTRLDEIYVNSAQDSDLSFHHDAFAFTPCGYSSNMILAEKYYYTLHVTPEKGWSYASFESNIPVFDISQGKQDNLDVLLHILNVFQPREFSMTFFTKNYQNQSFQKLLSINESLPDYIKLDKIVYDLDDYHLFYMKLQKKI

SEQ ID NO: 6262 - protein, 329 aa, Synechococcus sp. WH 7805
MAGSGYRDYFKVLGVDRGADADAIKRAFRKLARQYHPDVNPGDKTAEAKFKEVSEAYEVLSDPEKRKRYEQFGQYWNQAGSGGAGMGDVDFGRYGNFDDFINDLLGRFGGQGGGGFGGAPGGFSGGGFPGGGFPGGFAGGGFPRGASRPPVNLDAEATVKVSFAEAFRGGERMLSVNDERVQVRIPAGVKNGSRLRLKGKGNLQPGTGRRGDLYLNLEVQAHPVWRFDGDQLRADLPVALDELALGGIVTVMTPDGEAEVSIPAGTSPGRSLRLKGKGWPLKTGRGDLLFTLSLQWPSQWSETQRSLLERLREERGDDPRRDWIQTARL

SEQ ID NO: 6263 - protein, 420 aa, delta proteobacterium MLMS-1
MFRQSELANGVRIVTEQAPSKVVAVGIWIEVGARDEHDLTSGFAHFVEHMLFKGTERRSAHQIAREFDVMGGMANAFTSTETTCVQATVLADRLPQVADLLADIVLAPAFVPAEVENEREVIGQEIAMVEDTPDDLIHDLFNRQLWGRHPLGNPVLGSARVIGALNSEHLRSFHRRHYIPQRILIAAAGQLEHEQFCQLWADSFGALSAPEGTGAGAGRQPPRFAEPERRVFDRGLEQLHLMLGTYGPAENDPDRYAFHLLNTILGGNMSSRLFQEIREKRGLAYAVFSYLNCHSDSGNFGLYLGVDPLAAEEAAGLAAREIRRLRREPVTAGELDEARDYARALIMLAEENMEARMSRLARNTMAFGRELPVTEILAKLDRVSVDDIMAVADQTFTRPLNGVALGPLDDELLDWDVLDA

SEQ ID NO: 6264 - protein, 363 aa, Haloferax mediterranei
MGDGSAEVGGPTDINRSGTMTDDELQAVLKDLQTNITVVGCGGAGGNTVNRMHEEGIKGAKLVAANTDVQHLVEIGADTKILMGEQKTQGRGAGSLPQVGEEAALESQEEIYDAIEGSDMVFVTAGLGGGTGTGSAPVVAKAARESGALTIAIVTTPFTAEGEVRRTNAEAGLERLRDVSDTVIVVPNDRLLDAVGKLPVRQAFKVSDEVLMRSVKGITELITKPGLVNLDFADVKTVMERGGVAMIGLGESDSESKAQESVKSALRSPLLDVDISGANSALVNVTGGSDMSIEEAEGVVEEIYDRIDPDARIIWGTSVDDELEGMMRTMIVVTGVESPQIYGRNGEVQAQAEGRLEDIDYVE

SEQ ID NO: 6265 - protein, 189 aa, Leptospira interrogans serovar Lai str. 56601
MKEGASFMYSKYFIWFMTLGIFLPLAGIFAKGSFYDFKVKDIKGNEVSLSKYKGKVVMVVNVASKCGYTYQYEHLEKVYKKYKDQGFAVVGFPANNFGGQEPGTDQEIETFCRIQKGASFDMMSKISVKGKDIHPLYSYLIQNSPNPGEVEWNFEKILISKNGTIEARYRSSVEPDSSAVTQKIETLLK

SEQ ID NO: 6266 - protein, 1118 aa, Magnetococcus sp. MC-1
MDHRNSLLTLYMVMVVAVVAVAAGLLLLLYQDSFAKKQAHLQDLATNQARLIDEVANFNHSYRHDYPTGAVEATISQIRDAHGKSIGFGQTGEFIIAYRKSGHSHVHFIVAHRFTQAVTPSFRENPNHLHPAMARAMAGESGFMEGTDYRGKQVLIAYAPVVKLRMGVVAKMDVQEVLAPFERILKIGLSITLLLIGGGSVAYLWVAKGVAGRMEWQHQRLAMLVEGMPAVIYTEDLRTQLPYYVSPQAVVLLGGQGCQADEPLDVWWNRHVWAEDWETLQHARQMLKKHKRPMQVEYRMVRQDGQLIWVRDVARLVCDEQGLPLLVQGMVMDVSEARHTHEKLIASEVRFRQLYENAPIAYQSLNTEGVIQNVNQAWLKKTGYELSQVLDHSLFEFLVVGQEQEVAKKFEAFLQAGYVQDLHYELRCADGRALKVSINGQVSRDRSGRLVKTHCVLTDITEQDRAAQALQESESRLRLILASTGEGLFGLDLQGNFIFANPACLRMMGYRDDRQLLGKPMLEIVSCCSSQFVRRGKGSCPISQILKTGLPNHAEGELFRRADGSFFSTEFWSHPIQQNGELVGAVVTFIDISQRVLNQTALKASELKYRTIFESVPTPLLILDTSGVVRDVNSAHQSTFGRFAGGSLMGVSIREHPGVAGSLLAESFLALAKGEPMPLQQASYTMEAEGEAIHFNVRGVPFVTRDGEGREDLQGALVIHENITDLKQTELKLRKAVEEADCATHAKGDFLAVMSHEIRTPMNLVVGMAELLLETDVNAEQKHYLEKLQKAGDTLLSLINNILDLTKLDEGQLKLLDEPFAPQALLDEVSGIISLAAEAKGLTLSCEIQEGVPERVLGDSVRIKQVLLNLLSNALKFTQQGFIRLSLTVEGAEGAQQLCYAVSDSGMGIPDYHLDEVFERFSQGDSSMTRRFGGSGLGLAICKKLVILMQGQIQVSSQVDVGAIFQIRLPLRAAALAPASSQQQVKRRLNQGVRVLLAEDAVDNRMLIQAYLRNSPHDLVMVEDGQQALQLIEEGTDFNLILMDVQMPVMDGYSATRAILAELGAQQRPPCPIVALTAHALEGDQARSLQAGCVAHLTKPIKKKILLEAIQTYARLAP

SEQ ID NO: 6267 - protein, 419 aa, Francisella tularensis subsp. tularensis SCHU S4
MKSNRRVVVTGLGMVTPLGNDVPTTWANILAGKSGVETITGFDTPAPDISEFKVRFAARIKNFDVDALVGKKDAKRVDPFCYYGIAAANEALKDAGIDKVSEEDSYKFGVCVSSGIGGIETLETTKAVIDTKGPSKISPFCIPSSIVNMLSGIISINHGLRGPNIPIVTACTTGTHNIGMAARLIASGDANTMLAGGSEKASNAIGMGGFAAARALSTRNDDPQGASRPWDKDRDGFVLGDGAGVVVLEEYERAKARGAKIYAEVVGFGMSADGYHMTMPYAPGQERCIQNALADAGLENNPDAIDYVNAHSTSTPLGDVQESQVVEKVIGQYRKDLVMSSTKSMTGHLLGAAGAIESIFSVLAIRDQVAPPTINLHNLDDGCNLDYAANAAKKMKIDYVLNNSFGFGGTNGSVIFKKI

SEQ ID NO: 6268 - protein, 564 aa, Arabidopsis thaliana
MDFDEYEYLEKTVENPHLENEVGNGGGDEKVKSEGKERSRSSRHRGDKKKERDEDEDGRRSKRSRSHHRSRSRDRERDRHRSSREHRDRDREKDVDKEERNGKDRERDRDKDRDSKGRDHEKDRSRRSRSRSERHRSQEREKSLEIEPKERETKDRDRDRRRHKDKKEDKVEPEADPERDQRTVFAYQIALRATERDVYEFFSRAGKVRDVRIIMDRISRRSRGIGYVEFYDTMSVPMAIALSGQPLLGQPVMVKPSEAEKNLVQSTTAAAGAGGMLGPYSGGARRLYVGNLHINMSEDDLRKVFESFGSVELVQVPRDETGLCKGFGFVQFARLEDARNALNLNGQLEIAGRAIKVSAVTDQTEVPEAGQTQTTGDLDDDDGGGLPYLSLNAQSRALLMQKLDRSGTASSTGLTTAASFNGGVSTISSLAAPALVQGSFPAVAGLAGSGIIPGVIPAGFDPIGVPSECLLLKNMFDPSTETEDDFDEDIKEDVKEECSKFGKLNHIFVDKNSVGFVYLRFENAQAAIGAQRALHGRWFAGKMITATYMTTEAYEAKFPESKVV

SEQ ID NO: 6269 - protein, 397 aa, Methanothermobacter thermautotrophicus str. Delta H
MIIMVTEVDVLVIGAGPAGSTAAKHAALGGADVLLIDKKSEIGAPKRCAEGVSIGGLESLGIEPNPRWITKKLDGVRMVSPNGTDVWLTSDKVELPEAGYILERKVFDKFMAMDAARAGSRIMVKTIATGMERTDDGYLVSAECMGEKFEIKARIVIAADGPESRVARWAGLNTATRPKDMESAAQFEMVGVEMEDNNCIEFYFGSVAPGGYALDIPEGDDIANVGLGVLSTETDKSAYEHLLEFVESCPATRNAQPVELNIGGDPVGGMPKKLVADSLMVVGDAAGQVNPLTGGGIISGMKGGMLAGQVAAAAVSEGDVTARRLGEYERLCREEIGDEISKYLKVKEYLLTLSDSELDSIAEAFQDVEFEKVSTTELVKKLIKVSPKALLKLGKLF

SEQ ID NO: 6270 - protein, 515 aa, Geobacillus stearothermophilus
MRNIKFFDTTLRDGEQSAGVNLNLQEKLEIARQLERLRVDIIEAGFPASSKGDFEAVKQIAETVRTCSVTGLSRSVRSDIDAAWEALKGGAEPRLHLFIATSPIHMVHKLRMTPEQVIEAAVEAVKYAKRFFPIVQWSAEDACRSELPFLAKIVAEVIKAGASVINIPDTVGYITPKEYGEIFLYLQNNVQNIENVSLSAHCHDDLGMAVVNSLSAIEHGATQVECTINGIGERAGNAALEEIAVALHIRKDYYQVETRLNLQEIKRTSNLVSKLTGVVVPPNKAVVGKNAFAHESGIHQDGVLKEKTTYEIISPELVGVPSNSMVLGKNSGRHALRYRVEELGYTLSDEEINQLFVRFKELADKKKDITDDDLIALIFEEKFDHFKDFYQLSSIQVQYGTNQIPTAVVVLKYGKGNEIQEAATGSGSVYALYNTLERCFQTEVTLLDYRIESVGGGRDALAQVFVKVRVRDVETSGRGTAQDVLEASAKAYINAMNRVFMIEAMRAENEKVATS

SEQ ID NO: 6271 - protein, 847 aa, Salmonella enterica subsp. enterica serovar Paratyphi A str.
MSKVRLAIIGNGMVGHRFIEDLLDKSDASLFDITVFCEEPRKAYDRVHLSSYFSHHTAEELSLVREGFYEKHGVKVLVGERAITINRQEKVIHSSAGRTVYYDKLIMATGSYPWIPPIKGSETQDCFVYRTIEDLNAIEACARRSKRGAVVGGGLLGLEAAGALKNLGVETHVIEFAPMLMAEQLDQMGGEQLRRKIESMGVRVHTSKNTQEIVQQGNEARKTMRFADGSELEVDFIVFSTGIRPRDKLATQCGLAVAQRGGIVINDTCQTSDPDIYAIGECASWNNRVYGLVAPGYKMAQVAVDHILGSENAFEGADLSAKLKLLGVDVGGIGDAHGRTPGARSYVYLDESKEVYKRLIVSEDNKTLLGAVLVGDTSDYGNLLQLVLNAIELPENPDSLILPSHAGSGKPAIGVDKLPDSAQICSCFDVTKGDLIAAINKGCHTVAALKAETKAGTGCGGCIPLVTQVLNAELAKQGIEVNNNLCEHFAYSRQELFHLIRVEGIKTFEELLAKHGKGYGCEVCKPTVGSLLASCWNEYILKPQHTPLQDTNDNFLANIQKDGTYSVIPRSAGGEITPEGLVAVGRIAREFNLYTKITGSQRIGLFGAQKDDLPEIWRQLIEAGFETGHAYAKALRMAKTCVGSTWCRYGVGDSVGFGVELENRYKGIRTPHKMKFGVSGCTRECAEAQGKDVGIIATEKGWNLYVCGNGGMKPRHADLLAADLDRDTLIKYLDRFMMFYIRTADKLTRTAPWLDNLEGGIEYLKSVIIDDKLGLNEHLEEEMARLRAAVVCEWTETVNTPAAQVRFKHFINSDKRDPTVQVVPEREQHRPATPYERIPVTLVEENA

SEQ ID NO: 6272 - protein, 357 aa, Prochlorococcus marinus str. MIT 9313
MRQHRIVLLPGDGIGPEITAVAKLLLDALGHQHGFKLNFEQHPIGGVAIDASGSPLPASTLEACQASDAVLLAAIGSPRFDALPREQRPETGLLSLRAGLKLFANLRPVTILPALIDASSLKANVIKGVDLMVVRELTGGIYFGQPKGRIEADGDERAFNTMTYSRTEVDRIAKVAFELARDRSGKLCSVDKANVLDVSQLWRDRVDALAANYGDVELSHMYVDNAAMQLVRNPRQFDVLLTGNLFGDILSDEAAMLTGSIGMLPSASLGSEGPGLFEPVHGSAPDIAGQDLANPMAMVLCAAMMLRIGLKENDAARALEGSVERVLAAGFRTGDLMSEGCTQLGCAEMGEQLLQAL

SEQ ID NO: 6273 - protein, 205 aa, Emericella nidulans
MSSRKKVMLKVIILGDSGVGKTSLMNQYVNKKFSGSYKATIGADFLTKEVLVDDRLVTMQIWDTAGQERFQSLGVAFYRGADCCVLVYDVNNSKSFEALDSWRDEFLIQASPRDPESFPFVVIGNKIDMEESKRMISSKRAMTFCQSKGNIPYFETSAKEAVNVEQAFEVIARSALAQEEAEEYGGDYTDPINIHDTTERDGCAC

SEQ ID NO: 6274 - protein, 338 aa, Aspergillus oryzae
MATPKVGINGFGRIGRIVFRNAIASGDVDVVAVNDPFIETHYAAYMLKYDSTHGRFQGTIETYDEGLIVNGKKIRFFAERDPAAIPWGSAGAAYIVESTGVFTTTEKASAHLKGGAKKVIISAPSADAPMFVMGVNNKEYKTDINVLSNASCTTNCLAPLAKVINDNFGLVEGLMTTVHSYTATQKTVDAPSAKDWRGGRTAAQNIIPSSTGAAKAVGKVIPSLNGKLTGMSMRVPTANVSVVDLTCRTEKAVTYEDIKKTIKAASEEGELKGILGYTEDDIVSTDLIGDAHSSIFDAKAGIALNEHFIKLVSWYDNEWGYSRRVVDLIAYISKVDGQ

SEQ ID NO: 6275 - protein, 292 aa, Halochlorococcum moorei
ADYVKNMITGAAQMDGAILVVSGADGPMPQTKEHLLLAKQVGVPHIVVFLNKEDQVDDAELLELVDLEVRETLDAYEFPGDDIPIISGSALLALEALIDNPSVDDNKWVNKINELMEQVDTYIPTPQRDTDKTFLMAVEDVFSITGRGTVATGRVERGLLKTGATVEIVGLTNTQTVTVTGLEMFQKTLDETVAGDNVGVLLRGVQKEDIQRGMVLADPKTILPHTKFEAQVYVLTKEEGGRHTPFFPGYRPQFYVRTTDVTGKIETFTADDGSETKMVIPGDRVKMIVELI

SEQ ID NO: 6276 - protein, 116 aa, uncultured epsilon proteobacterium
WTMVAGGGASVVYADTIADMAGGVEDLANYGEYSGGPTTDETRFYTETVLDLMTREKDPKGRDKILIIGGAIANFTDVAKTFTGIIQAFEKYADKMKDVGTRIYVRSGGPNYKGEF

SEQ ID NO: 6277 - protein, 292 aa, Bolbocoleon piliferum
HADYVKNMITGAAQMDGAILVVSGADGPMPQTKEHLLLAKQVGVPTIVVFLNKEDQVDDPELLELVDLEVRETLDAYEFPGDDVPIISGSALLALESLIENPDATDNKWVEKIYELMQNVDTYIPTPERDTDKTFLMGIEDVFSITGRGTVATGRVERGVLKTGETVELVGLADTKNVTVTGLEMFQKTLDETVAGDNVGVLLRGVQKDEIQRGMVIAAPGTIDPHTTFEAQVYVLTKEEGGRHTPFFPGYRPQFYVRTTDVTGKIETFTADDGSETKMVIPGDRIKMVVEL

SEQ ID NO: 6278 - protein, 308 aa, Klebsiella pneumoniae
INGFGRIGRIVFRAAQKRSDIEIVAINDLLDAEYMAYMLKYDSTHGRFDGTVEVKDGHLVVNGKKIRVTAERDPANLKWDEVGVDVVAEATGIFLTDETARKHITAGAKKVVLTGPSKDNTPMFVRGANFDAYAGQDIVSNASCTTNCLAPLAKVINDNFGIVEGLMTTVHATTATQKTVDGPSHKDWRGGRGAAQNIIPSSTGAAKAVGKVLPELNGKLTGMAFRVPTPNVSVVDLTVRLEKAASYEEIKKAIKAASEGAMKGVLGYTEDDVVSTDFNGEVCTSVFDAKAGIALNDNFVKLVSWYDN

SEQ ID NO: 6279 - protein, 337 aa, Cryptococcus curvatus
MATKVGINGFGRIGRIVLRNALEHGDIDVVAINDPFIDLDYMVYMFKYDSTHGRFKGKVETKDGKLVIEGKPISVFGERDPAAIPWGKAGADYVVESTGVFTTIEKASLHLKGGAKKVIISAPSADAPMFVCGVNLEAYKPEYEVISNASCTTNCLAPLAKVIHDNFGIVEGLMTTVHATTATQKTVDGPSHKDWRGGRGAAANIIPSSTGAAKAVGKVIPSLNGKLTGMSFRIPTSDVSVVDLVVRLEKGASYDQIKEVIKKASEGELKGILGYTEDEVVSTDFLGSTESSVFDAKAGIPLNDKFVKLISWYDNEYGYSRRVCDLIAYVAKKDKSA

SEQ ID NO: 6280 - protein, 294 aa, Bolbocoleon piliferum
HADYVKNMITGAAQMDGAILVVSGADGPMPQTKEHLLLAKQVGVPTIVVFLNKEDQVDDPELLELVDLEVRETLDAYEFPGDDVPIISGSALLALESLIENPDATDNKWVEKIYELMQNVDTYIPTPERDTDKTFLMGIEDVFSITGRGTVATGRVERGVLKTGETVELVGLADTKNVTVTGLEMFQKTLDETVAGDNVGVLLRGVQKDEIQRGMVIAAPGTIDPHTTFEAQVYVLTKEEGGRHTPFFPGYRPQFYVRTTDVTGKIETFTADDGSETKMVIPGDRIKMVVELIQ

SEQ ID NO: 6281 - protein, 310 aa, Zea mays; identical to SEQ ID NO: 446

SEQ ID NO: 6282 - protein, 514 aa, Oryza sativa (japonica cultivar-group)
MGDATMIASPFPAVEKCSSKDRGGDTIVADLDGTLLCGRSSFPYFAHMAFETGGVLRLLALILLAPLAGVLYYLVSESAGIQVLIFASMAGARVADVEAVARAVLPKFYCSDIHPESWRVFSACGRRCVLTANPRMMVEAFLKEYLGADIVVGTELVVWRGRATGLVRSPGVLVGENKAAALREAFGDASPEIGIGDRRTDYPFMRLCKEGYVVPVSPTPRPVPREELPKPVVFHDGRLVQKPSPALALLTVLWIPIGFVLACLRIAAGALLPMRVVYHAFRALGVRVTVKGTPPPPASRETGQSGVLFICSHRTLLDPIFLSTALGRPITAVTYSVSRLSEILSPIRTVRLTRDRAADAAMIRRLLAEGDLVICPEGTTCREPFLLRFSALFAELTDEIVPVAMENQMSMFHGTTARGWKALDPFYFFMNPSPGYVVTFLSKLPGELTCNGGGGGGGGRSSHEVANYIQRLIASTLSYECTSFTRKDKYRALAGNDGTVVSKPNIDEKKAMGC

SEQ ID NO: 6283 - protein, 160 aa, Klebsiella aerogenes
MDQTCTLEGFLTRVQQRDPHQTEFAQAVREVMTTLWPFLEENPRYRQLALLERLVEPERVIQFRVVWVDDRNQVQVNRAWRVQFNSAIGPYKGGMRFHPSVNLSILKFLGFEQTFKNALTTLPMGGGKGGSDFDPKGKSDGEVMRFCQALMTELYRHLGP

SEQ ID NO: 6284 - protein, 303 aa, Bolbocoleon piliferum
YAHVDCPGHADYVKNMITGAAQMDGAILVVSGADGPMPQTKEHLLLAKQVGVPTIVVFLNKEDQVDDPELLELVDLEVRETLDAYEFPGDDVPIISGSALLALESLIENPDATDNKWVEKIYELMQNVDTYIPTPERDTDKTFLMGIEDVFSITGRGTVATGRVERGVLKTGETVELVGLADTKNVTVTGLEMFQKTLDETVAGDNVGVLLRGVQKDEIQRGMVIAAPGTIDPHTTFEAQVYVLTKEEGGRHTPFFPGYRPQFYVRTTDVTGKIETFTADDGSETKMVIPGDRIKMVVELIQP

SEQ ID NO: 6285 - protein, 116 aa, uncultured epsilon proteobacterium
WTMVAGGGASVVYADTIADMAGGVEDLANYGEYSGGPTTDETRFYTETVLDLMTREKDPKGRDKILIIGGAIANFTDVAKTFTGIIQAFEKSADKMKDVGTRIYVRRGGPNYKGEF

SEQ ID NO: 6286 - protein, 300 aa, Bolbocoleon piliferum
YAHVDCPGHADYVKNMITGAAQMDGAILVVSGADGPMPQTKEHLLLAKQVGVPTIVVFLNKEDQVDDPELLELVDLEVRETLDAYEFPGDDVPIISGSALLALESLIENPDATDNKWVEKIYELMQNVDTYIPTPERDTDKTFLMGIEDVFSITGRGTVATGRVERGVLKTGETVELVGLADTKNVTVTGLEMFQKTLDETVAGDNVGVLLRGVQKDEIQRGMVIAAPGTIDPHTTFEAQVYVLTKEEGGRHTPFFPGYRPQFYVRTTDVTGKIETFTADDGSETKMVIPGDRIKMVVEL

SEQ ID NO: 6287 - protein, 408 aa, Novosphingobium aromaticivorans
MKSIAVVGANLAGGRAVESLRQAGFDGRITLIGEEPWRPYERPPLSKEVLWDPANVPDNFFLHDEAWYAANRIEMRLGTRAEALDLAASAVRLTGGDLVQADRILLTTGGSARKLNMEGADAANVHYLRTRDDATRMATDLRDGARIVIIGMGVIGAEVAASAVKLGCRVTAIEPLAAPMIRALGPQFGQWLGEEHRQRGVDTRFGRGVNAMKVLDGRVTQVELDDGSLVDCDAVVVGVGIVPEISLARDAGIVTNNGIIVDRQCRTSNENVFAAGDVAEQDSFFGGHIRQETYQNAADQAQAAALAMLGQDVDYCKPVWYWSDQFDLNIQFCGHIPVQAEVTLRGDMASNQFTAFFRSGETIEGILTVNRAPDMGIGKRLIERRARAQAAQLADADVSLREILKQAG

SEQ ID NO: 6288 - protein, 157 aa, Brassica napus
  misc_feature (152)..(152): Xaa can be any naturally occurring amino acid
FGGEDGLPSILARHQIPGLDVVVDPCAAILVFIVTGFLCLGIKESTFAQGIVTAVNVCVLLFVIVAGSYLGFKTGWAGYELPTGFFPFGVDGMFAGAATVFFAFIGFDSLASTAEEVKNPQRDLPIGIGLALFLCCSLYMMVSIVIVGLVPXYAMDP

SEQ ID NO: 6289 - protein, 159 aa, Brassica napus
  misc_feature (15)..(15): Xaa can be any naturally occurring amino acid
  misc_feature (99)..(99): Xaa can be any naturally occurring amino acid
KLVYDTLEEIISQSXFPTYAEFKNTGLERAEKLDTDLKWFKEQGYEIPEPTATGKKYSQYLKDLADKDPPSFICHFYNIYFAHSAGGRMIGRKVAERIXDNRELEFYKWDGDLSELLQNVREKLNKVAEEWTREEKNHCLEETEKSFKYSGEILRLILS

SEQ ID NO: 6290 - protein, 150 aa, Anabaena variabilis ATCC 29413
MHIQFREFDQFDVWMWLKFSTIPSQREKQYVEEVFNSWFYLGKLGAFNAENLQVQETGVDLSYLNYDSQGYDKSLLALMHNMGELEYEGQWARCWFDLGTSDAIAIDILINALTQLSEEYVTIEEFYIGGENENWPVEDSDSRPHSIYDN

SEQ ID NO: 6291 - protein, 199 aa, Triticum aestivum
AYLGDTIEQVCTKKQAGTGPEFPGYRRPTRPAALAAPEYCNANFTLYFTDAFWRHPAYSSVFANRTRAPCYFNTGVMVIDLDRWRAGGYTAKLEYWMDVQKQEARIYELGSLPPFLLVFAGDVKAVQHRWNQHGLGGDNVAGQCRELHPAPVSLLHWSGKGKPWLRLDAGRPCPLDALWAPYDLLRRRGARDDLLAAVA

SEQ ID NO: 6292 - protein, 399 aa, Ustilago maydis 521
MEATCADAAASTAPLDPSDQTSPTNATANGNSVTEDEAALYDRQIRLWGLAAQTRLRCAHILILGWNGIATEILKNTVLSGIGSITILDPTCIDGSVDLLSGFFFRDEEVGQPKCSQGPLGRVRALNPLVKVNGIADMASYTKLMQGGKEAQAWIMERGVDVVVAGTPLPEESGVAHVGSRASLVKLNETTRSAGVKFFFSATCGFGGFYFADQITHDYLLEKAAPPPTANSTTSTDTSETQRVKKRQNFVPLSSSLATKWHLSERQQRRTRIPLDWFIWLALTDLETRLAPDSALTTLSSAALKERTEALIREKGLVPNVILANHEDSVFDIVAAQGAMGVTLSPVAAVVGGILSQDILNSIGGREEPVVNWLFLNMDASGATTVHRIGELPSAVVVD

SEQ ID NO: 6293 - protein, 91 aa, Fragaria x ananassa
MMMISLLVFNPVEADGVVVNYGQHASLLAKIDCGGACKARCRLSSRPHLCKRACGTCCQRCSCVPPGTAGNYDVCPCYATLTTHGGKRKCP

SEQ ID NO: 6294 - protein, 348 aa, Pyrococcus furiosus DSM 3638
MKERLEKLVKFMDENSIDRVFIAKPVNVYYFSGTSPLGGGYIIVDGDEATLYVPELEYEMAKEESKLPVVKFKKFDEIYEILKNTETLGIEGTLSYSMVENFKEKSNVKEFKKIDDVIKDLRIIKTKEEIEIIEKACEIADKAVMAAIEEITEGKREREVAAKVEYLMKMNGAEKPAFDTIIASGHRSALPHGVASDKRIERGDLVVIDLGALYNHYNSDITRTIVVGSPNEKQREIYEIVLEAQKRAVEAAKPGMTAKELDSIAREIIKEYGYGDYFIHSLGHGVGLEIHEWPRISQYDETVLKEGMVITIEPGIYIPKLGGVRIEDTVLITENGAKRLTKTERELL

SEQ ID NO: 6295 - protein, 113 aa, Brassica napus
  misc_feature (88)..(88): Xaa can be any naturally occurring amino acid
  misc_feature (101)..(101): Xaa can be any naturally occurring amino acid
MTANRSKSEKKDAEKQLRRYPYEVLGVLKNSTDQEIKSTYRKLSLKYHPDKTANDPVAADMFKEVTFSYNILSDPEKRCQYDTAGFEXAVEVEGQELEQWXLDLSSLGAVLPT

SEQ ID NO: 6296 - protein, 178 aa, Triticum aestivum
MKSRAGTPPVLYSYASMQQRSGGGMRWRECVAVLGAAAMVVFVVTHSLLPGARVGDLGDVVSPVLRLRRARREEAAVPSSEKTVGEIGDEADGFPWSNAMLQWQRTGYHFQPDKNYMNDPNAPMYYRGWYHFFYQYNPEGVTWGNISWGHAVSRDMVHWHHLPLAMVPDRWYDINGVL

SEQ ID NO: 6297 - protein, 453 aa, Schizosaccharomyces pombe
MPVRPCIHFTPPEGFMNDPNGLVYSNGKWHLFFQWNPTGNQAGNQHWGHAVSKNLYKWKLLPTALAPGDDHGLMFSGSAVIDKTNSSGFFESGFFSRKSVDPEERIVLIYTTHYDNRETQNIAYSLDGGITFIKYKKNPILDIKESQFRDPKVFWHEESRAWIMVVVLAQKYKVLFYHSLNLRDWVKLSEFGSAGVLGYQYECPDFVRLPIEGTDEFRWVLIVSINPGSSINGGSMVQYFIGDFDGQTFTPIDSASRILDCGHDCYATQTFGNAPDGRVISISWASNWNYTNDVPMRMKHRGMFTIPRELTLCYTHLNQETRGLVLRQRPVNLHHLYYPDSLPAPLLLNRVCEFPTVWTSATVFYLAVSIPKSIVLESPMEFLCLTWSTTPDVETSKEYFELGYRFHDGAVYVERGVCSSSWKYPLYPERCTSSVPPSSYEDNYILEIEAVVD

SEQ ID NO: 6298 - protein, 361 aa, Arabidopsis thaliana
MESSDRSSQAKAFDETKTGVKGLVASGIKEIPAMFHTPPDTLTSLKQTAPPSQQLTIPTVDLKGGSMDLISRRSVVEKIGDAAERWGFFQVVNHGISVEVMERMKEGIRRFHEQDPEVKKRFYSRDHTRDVLYYSNIDLHTCNKAANWRDTLACYMAPDPPKLQDLPAVCGEIMMEYSKQLMTLGEFLFELLSEALGLNPNHLKDMGCAKSHIMFGQYYPPCPQPDLTLGISKHTDFSFITILLQDNIGGLQVIHDQCWVDVSPVPGALVINIGDLLQLISNDKFISAEHRVIANGSSEPRISMPCFVSTFMKPNPRIYGPIKELLSEQNPAKYRDLTITEFSNTFRSQTISHPALHHFRI

SEQ ID NO: 6299 - protein, 187 aa, Prototheca wickerhamii
EAVQIILKLAAGNGLQKVVVGRNGITATPAMSAIIRRRGLYGGLIMSASHNPAGPNEDWGIKFNYSSGEPAPEKITDKIYGFTQSIKELQVADIPDVDLSVLGTTTFGDFEVEVIDYTVDYFNQLKEVFDFEALRTLLASPDFSFVYDALHAVTGAYAEPLFVDELGASPDSLKNCVPLEDFGGGHP

SEQ ID NO: 6300 - protein, 579 aa, Glycine max
  misc_feature (134)..(134): Xaa can be any naturally occurring amino acid
KKSCPVVKTGKLCIEVGPASKVSFISEELCIGCGICVKKCPFDAIEIINLPKDLEKDTTHRYGPNTFKLHRLPVPRPGQVLGLVGTNGIGKSTALKVLAGKLKPNLGRFKNPPDWQEILTYFRGSELQNYFTRXLEDNLKAIIKPQYVDHIPKAVHGNVGQVLELKDERDMKAELCVDLELNQVIDRNVGDLSGGELQRFAIAVVAVQSAEIYMFDEPSSYLDVKQRLKAAQVIRSLLRSNSYVIVVEHDLSVLDYLSDFICCLYGKPGAYGVVTLPFSVREGINIFLAGFVPTENLRFRDESLTFKIVDTQDNAEEIETYQRYKYPTMSKTLADFKLTVMEGEFTDSQIVVMLGENGTGKTTFIRMLAGHLKPDTVDGVEIEIPEFNVSYKPQKISPKFPGSVRQLLHKKIRDSYTHPQFISDVMKPLQIEQLMDQEVLNLSGGELQRVALCLCLGQPAEIYLIDEPSAYLDSEQRIVASKVIKRFILHAKKTAFIVEHDFIMAAYLADKVVVYEGRPSVECTACTPQSLVSGMNRFLSHLDITFRRDPTNYRPRINKMDSTKDREQKAAGSYYYLDD

SEQ ID NO: 6301 - protein, 276 aa, Bradyrhizobium japonicum USDA 110
MTTETTVDTGTSELLCVIRDRVAVITLNRPEARNSLSDSLTPALRTMIRTCGESPDVGALLITGAGEAFCAGGNVKGMGAHRDPKKLEMSLEDRVADLQERQRLLTGALVSVRKPTIAALPGPAVGAGLAIAMACDIRIAAQSAFVATGYARIALSGDYGIAWLLTRLVGTARARELMFTGDRVDAARCEAIGLVNRVVPDDKLQAEAFALAKSLAEGPRLALRYMKDNLDEAIQFDFETARDHEAERLIRLTATADHKEAVQAFIEKRKAVFTGK

SEQ ID NO: 6302 - protein, 597 aa, Gluconobacter oxydans 621H
MTAAERDAGTGNEALNGAEVLLRVLDEEGVEVIFGYPGGAVLPIYDALFKQDRIRHVLVRHEQAAVHAAEAYARSTGKVGVVLVTSGPGATNAVTGLVDALMDSIPLVCLSGQVPTKLIGNDAFQEADTTGITRPATKHNYLVREPGTLAQTVREAFEVARSGRPGPVLVDLPKDITVGKAPLTKPALSRLQRLSHQGGPDAEAIARTVEAMKTAKRPLFYTGGGIINSGPEASELLRRLARKTGFPVTSTLMGLGAFPSPDPQFLGMLGMHGSVEANMATHGCDLLIALGSRFDDRVTGRVDAFSPNSFKVHADIDPSQIDKIVPVDVRIEGDVRDTLEALLEAWGDTPAPDLSTWWNQIASWRSVDGFGFTQDMDPSAIIRPQHAIRRLYVLAKETGRDTFVSTEVGQHQMWAAQHFQFDKPNRWLTSGGLGTMGYGLPAAVGAQVAHPDALVIDIAGEASTLMNIQELGTIAQYRLPVKIFILNNHYMGMVRQWQELLHGSRYSQSYSEALPDFVKLAEAFHATGMRATHVGELDDVIRRMLAHDGPVVADICVAEGENCYPMIPSGAAHNQMLLGPDQDSEAAGLTEEGKMLV

SEQ ID NO: 6303 - protein, 324 aa, Arabidopsis thaliana
  misc_feature (177)..(177): Xaa can be any naturally occurring amino acid
MGVDYYKVLQVDRNAKDDDLKKAYRKLAMKWHPDKNPNNKKDAEAKFKQISEAYDVLSDPQKRAIYDQYGEEGLTSQAPPPGAGGGFSDGGASFRFNGRSADDIFSEFFGFTRPFGDSRGAGPSNGFRFEEDVFSSNVVPPRKAAPIERQLPCSLEDLYKGVSKKMKISRDVLDSSXGRPTTVEEILTIEIKPGWKKGTKITFPEKGNEQRGIIPSDLVFIVDEKPHAVFKRDGNDLVMTQKIPLVEALTGYTAQVSTLDGRSVTVPINNVISPSYEEVVKGEGMPIPKDPSKKGNLRIKFTVKFPSRLTTEQKSGIKRMFSSS

SEQ ID NO: 6304 - protein, 418 aa, Oryza sativa
MAGARRTMALVALVAVVAAAVVAERASAAVSCGDVTSSIAPCLSYVMGRESSPSSSCCSGVRTLNGKASSSADRRTACSCLKNMASSFRNLNMGNAASIPSKCGVSVAFPISTSVDCSKPGQAPGGHPLLGRRQRRRRSLRRDIGRIVRSLQTRRGGGGVSGAAGGGDEAGFLEQRRRRWVPQLRLGNEKRSGDVAWTAIRTASMTSAAPLGPGDFKLVRRIGGRDIGWLTRGYHGWSTKAYKQALTHLNFQGGTKPPLYNHFWATWAKYTLLGFKRAGVLHRDGVPVPPPELTGIRGSEGELCLYAMKVVDRSTTPSSSTLFADFDATTHFSCVVMEFCAGGDLHSLIHRMPSRRFPLPSAHFYAAEVLLAIKYLHMIGDIDDEQDDTAGGGASCFPDHLLQFKRRRRRLCGSWPSR

SEQ ID NO: 6305 - protein, 258 aa, Arabidopsis thaliana
MDLDILPQGAGKGQALAYLLKKLKTEGKLPVNTLACGDSGNDAELFSIPDVYGVMVSNAQEELLKWHAENAKDNPKVIHAKERCAGGIIQAIGHFKLGPNLSPRDVSDFLEIKVENVNPGHEVVKFFLFYERWRRGEVENSEAYTASLKASVHPGGVFVHPSGTEKSLRDTIDELRKYHGDKQGKKFRVWADQVLATDTTPGTWIVKLDKWEQDGDERRCCTTTVKFTSKEGEGLVWEHVQQTWSKETMVKDDSSWII

SEQ ID NO: 6306 - protein, 116 aa, uncultured epsilon proteobacterium
WTMVAGGGASVVYADTIADMAGGVEDLANYGEYSGGPTTDETRFYTETVLDLMTREKDPKGRDKILIIGGAIANFADVAKTFTGIIQAFEKYADEMKDVGTRIYVRRGGPNYKGEF

SEQ ID NO: 6307 - protein, 294 aa, Pseudoneochloris marina
ADYVKNMITGAAQMDGAILVVSGADGPMPQTKEHLLLAKQVGVPNIVVFLNKEDQVDDAELLELVELEVRETLETYEFPGDDVPIVAGSALLALQALIENPTIQPGDNEWVDKILKLMEQVDTYIPTPQRQTDKTFLMAIEDVFSITGRGTVATGRVERGVLKTGETVELVGLKDTTTTTVTGLEMFQKTLDETVAGDNVGVLLRGVQKQDIQRGMVLAAPGTITPHTKFESQVYVLNKEEGGRHTPFFPGYRPQFYVRTTDVTGKIESFTADDGTETQMVIPGDRVKMVVELI

SEQ ID NO: 6308 - protein, 155 aa, Aquilegia formosa
GLEIQGKFVKFTAIGVYLEEQKAISSLAVKWNGKSAEELTDSIEFFRDIVTGPFEKFIMVTMILPLTGQQYSDKVVENCVAAWKAWIYTEAESKAVEEFIQVFKDETFPPGSSILFTQSSPALTIGFSKDGSIPKEGKATIANKPLSEAVLESII

SEQ ID NO: 6309 - protein, 116 aa, uncultured epsilon proteobacterium
WTMVAGGGASVVYADTIADMAGGVEDLANYGEYSGGPTTDETRFYTETVLDLMTREKDPKGRDKILIIGGAIANFTDVAKTFTGIIQAFEKYADQMKDVGTRIYVRRGGPNYKGEF

SEQ ID NO: 6310 - protein, 296 aa, Acrosiphonia arcta
ADYVKNMITGAAQMDGAILVVSGADGPMPQTKEHLLLAKQVGVPDIVVFLNKEDQVDDPELLELVELEVRETLDTYEFPGDDIPIIPGSALLALEALVANPDIKKGENPWVDKIITLMENVDSYIPTPVRDTDKTFLMAIEDVFSITGRGTVATGRVERGVLKTGATIEIIGLKDTTTTTVTGLEMFQKTLDETVAGDNVGVLLRGVPKENILRGMVLAAPGTILPHTKFEAQVYVLNKEEGGRHTPFLPGYRPQFYVRTTDVTGKIESFTSDDGVETKMILPGDRVKMIVELIQP

SEQ ID NO: 6311 - protein, 264 aa, Aquilegia formosa
RPKVAYNNFSNDVPVISVAGIDDEEKRSEICKKIVNACEDWGIFQVVDHGVDTSLITEMSRLAKEFFALPPEDKLRFDMSGGKKGGFIVSSHLQGEAVQDWREIVTYFSYPVQNRDYSRWPDKPEGWKTVTQTYSEKLMELACKLLQVLSEAMDLDKDALTKACVDMDQKVVVNFYPKCPQPDLTLGLKRHTDPGTITLLLQDQVGGLQATRDDGKTWITVQPIEGAFVVNLGDHGHYLSNGRFKNADHQAVVNSSYSRLSIAT

SEQ ID NO: 6312 - protein, 227 aa, Prototheca wickerhamii
AQRATVERTRTHSSLRMAALVGSRISRTCPGASKSQTSTLSPACIFIRSNVAPKGRLSAGRMMIKTHAKKEMMMWESLREGLDEEMERDPNVCLMGEDVGHYGGSYKVSYGLHKKYGDMRLLDTPICENGFMGMGVGAAMTGLRPVVEGMNMGFLLLAFNQISNNCGMLHYTSGGQFKVPMVIRGPGGVGRQLGAEHSQRLESYFQSIPGVQLVAVSTARNAKGLLK

SEQ ID NO: 6313 - protein, 581 aa, Glycine max
MCGILAVLGCSDDSRAKRVRVLELSRRLKHRGPDWSGLHQHGDCFLAHQRLAIVDPASGDQPLFNEDKSVIVTVNGEIYNHEELRKQLPNHNFRTGSDCDVIAHLYEEHGEDFVDMLDGIFSFVLLDTRDNSFIVARDAIGVTSLYIGWGLDGSVWISSEMKGLNDDCEHFECFPPGHLYSSKERGFRRWYNPPWFSEAIPSAPYDPLVLRHAFEQAVIKRLMTDVPFGVLLSGGLDSSLVASITSRYLANTKAAEQWGSKLHSFCVGLEGSPDLKAAKEVADYLGTVHHEFTFTVQDGIDAIEDVIYHIETYDVTTIRASTPMFLMSRKIKSLGVKWVISGEGSDEIFGGYLYFHKAPNKEEFHRETCRKIKALHQYDCLRANKSTFAWGLEARVPFLDKAFINAAMSIDPEWKMIKRDEGRIEKWILRRAFDDEEHPYLPKHILYRQKEQFSDGVGYSWIDGLKAHAAKHVTEKMMLNAGNIYPHNTPKTKEAYYYRMIFERFFPQNSARLTVPGGASVACSTAKAVEWDAAWSNNLDPSGRAALGVHISAYENQNNKGVEIEKIIPMDAAPLGVAIQG

SEQ ID NO: 6314 - protein, 393 aa, Staphylococcus epidermidis ATCC 12228
MQFDTIELAIEALRNGESIIVVDDEDRENEGDLVAVTEWMDDNTINFMAKEGRGLICAPIDKSIAERLKLQSMEQNNTDIYGTHFTVSIDHYKTTTGISAHERTQTARALIDENTNPEDFHRPGHLFPLIAKENGVLTRNGHTEAAVDLARLTGAQPAGVICEIMNDDGTMAKGEDLQSFKERHHLKMITIKSLVAFRKAVELNVNLKAKVKMPTDFGHFDMYGFTTDYSDEEIVAIVKGDLKSNPNVRMHSACLTGDIFHSQRCDCGAQLEASMKYIDEHGGMIIYLPQEGRGIGLINKLRAYELIEKGYDTVTANLALGFDEDLRDYHVAAEILKYFDISEINLLSNNPKKFEGLEDYGIEIVDRIELIVPETQYNHSYMETKKNKMGHLI

SEQ ID NO: 6315 - protein, 295 aa, Ulothrix zonata
SLSRRLRKNMITGAAQMDGAILVVSGADGPMPQTKEHLLLAKQVGVPTLVVFLNKEDQVDDAELIELVELEIRETLDKYEYPGDDIPVIAGSALKALQALVENPTLKPGENPWVDKILKLMDSVDNFIPTPVRETDKTFLMAIEDVFSITGRGTVATGLVERGTLKTGTVVEIIGLGPTSTTTVTGLEMFQKTLDETVAGDNVGVLLRGVAKESIQRGMVLAAPGTIKPYTKFEAQVYILTKEEGGRHTPFFAGYRPQFYVRTTDVTGKIVSFTADDGSEALMANSGDRLKMVVD

SEQ ID NO: 6316 - protein, 269 aa, Aquilegia formosa
DNLKKVQHLLDLPYAKTNLTLWKADLVDEGSFDDAIEECTGVFHVATPMDFESKDPENEVIKPTIEGMLNIMRSCLKAKTVRRLVFTSSAGTVNVEEHQQPEYDENCWTDIDICRTKKMTGWMYFVSKTLAEKAAWEFAEQNNIDFISIIPTLVVGPFLMSSMPPSLITALSPITRSEAHYSILKQIQLVHLDDLCNAHIFLFEHPEAKGRYICSAYNATIMDVANLLRNKFPEYNVPTKFKDVDENLKAVSFSSKKLTDLGFSYKYTE

SEQ ID NO: 6317 - protein, 329 aa, Schizosaccharomyces pombe
MGKTLIFIKLSSLNECIKYSTIISKIARELSIHKGNELYIWVSCSEMCQKRTKHLFRELQNALCELYLSSATTNDSSLLSVVPTIVLFEYWSNIQLGSITDSWNSVYYSENAKDQILNIPAKSFQSIGPDVLNEIHNIEHLPKKDESEDSGKEINNMVSAVGGTFDHLHVGHKVLLTLTAWFGVKEVIVGVSGTKNENGRTLIILGDELLKKKVQKEFLENIQKRKEEVSNFLHSIKEDINCRVVTIHDPFGPTITDAEIDSLIVSEETKTGATAVQEERVKRGLPELSIYCIDLLYPAQELNLKDNNSLKVSSTAIREELAKLAYKNK

SEQ ID NO: 6318 - protein, 171 aa, Spinacia oleracea
MASDSSAQPKSVHEFVVRDARGNDVDLSIYKGKVLLIVNVASQCGLTNSNYTEMTELYEKYRELGLEILAFPCNQFGNQEPGSNEEVLEFACTRFKAEYPIFDKVDVNGSNAAPIYKFLKSSKGGLFGDGLKWNFTKFLVDKDGNVVDRYAPTTSPKSIEKDVKKLLGIQK

SEQ ID NO: 6319 - protein, 119 aa, Glycine max
MEIESVKCECCGLKEDCTQEYIRDVKAKFDSKWLCGLCSEAVRDEVNRAKRPFAMEEAVKAHMSFCGKIKSNPAVRVADGMRQMLRRRSTDLSSSSSKYSGRSNTTSQVTDSFTFPLHP

SEQ ID NO: 6320 - protein, 408 aa, Methanococcoides burtonii DSM 6242
MKDQYDLVVVGAGPAGSIAATTAAKKGLSVLMLEKRQEIGEPVRCAEGVGKKRLRQHIELDEKWLCGEVSSAKIISPNGTTLTMAEEDAGSEVGYVLDRKIFDRTLVELSGEAGVDIMVKARVTGLIIEENTVCGVEMMHLGKTYSIRSKLVIGADGVESKVGRWAGIDTSLKPSHIETCAQFLVSGVDIDQSSCYFYMGNKVAPGGYVWVFPKGNNMANVGIGILGSRAGEKKPIEYLTDFVEANYPNGSIIEQVAGAVPASGPIEKTIANGLMLVGDAARQSDPFTGGGISNAMDAGLYAGEVAAEAIAQDDVSEKILQKYEKRWRGSFGNEIANNLIVKETFFSLSDEDLDSLALSIKDVDFKKMDLIDFIAALFKANKKLLWNLRPLFTQKLKQKFSGLTKFKR

SEQ ID NO: 6321 - protein, 319 aa, Prochlorococcus marinus str. MIT 9313
MAGSGYRDYFKVLGVERNADSDDIKRAFRKLARQYHPDVNPGDSTAEAKFKEVSEAYEVLSDPDKRSKYEQFGRYWNQASGMGGGGPAGAGFEVDFGRYGNFDDFINDLLGRFGGPQAAAGFGAGFPGGAGFPRGSSRAPVNLDAEATLKVSFAEAFRGTERTLSVNEERVQVRIPQGIKPGSRLRLKGKGNLQPGTGRRGDLFLNIDVQNHPLWRLDGDQLRADLPVALDEFALGGTATVMTPDGEAQVTIPAGTSPGRSLRLKGKGWPSPGGRGDLLLTLNLKLPSEWSADELELLKRLQQSRSTDPRQAWLQMAPL

SEQ ID NO: 6322 - protein, 473 aa, Arabidopsis thaliana
TPPQTTMATTVTLKSFTGLRQSSTEQTNFVSHVPSSLSLPQRRTSLRVTAARATPKLSNRKLRVAVIGGGPAGGAAAETLAQGGIETILIERKMDNCKPCGGAIPLCMVGEFNLPLDIIDRRVTKMKMISPSNIAVDIGRTLKEHEYIGMVRREVLDAYLRERAEKSGATVINGLFLKMDHPENWDSPYTLHYTEYDGKTGATGTKKTMEVDAVIGADGANSRVAKSIDAGDYDYAIAFQERIRIPDEKMTYYEDLAEMYVGDDVSPDFYGWVFPKCDHVAVGTGTVTHKGDIKKFQLATRNRAKDKILGGKIIRVEAHPIPEHPRPRRLSKRVALVGDAAGYVTKCSGEGIYFAAKSGRMCAEAIVEGSQNGKKMIDEGDLRKYLEKWDKTYLPTYRVLDVLQKVFYRSNPAREAFVEMCNDEYVQKMTFDSYLYKRVAPGSPLEDIKLAVNTIGSLVRANALRREIEKLSV

SEQ ID NO: 6323 - protein, 320 aa, Lactobacillus plantarum WCFS1
MKRIGILTSGGDAPGMNAAVRAVAGKAMAEGLEAYGINYGFAGLVAGDIHKIEAADLDGVIQRGGTLLYSARYPEFAHEEGQLKGIEQLKRFGIDALVVIGGDGSYHGALRLTEHGYNTIGLPGTIDNDIPYTDFTIGFDTAVNTNVQALDRIYDTAHSHDRTFVVEVMGRGAGDVALWSGVSIGATAIVVPEVDWDMEEIANKIKHNRANGHRSNLIVLAEGVMGAQEFVEKLSEYGDFDARGNTIAHMQRGGNPTAKDRVMASKMGAYAVELLLAGKGGLAVGIQNNQLVNHNILDLFESKHDVEVSLDKLNEEISFK

SEQ ID NO: 6324 - protein, 49 aa, Moringa peregrina
GMSYFHETIWKGVPKFLRRIDTALKNIGINERLPYNAPLIQFSSWMGGD

SEQ ID NO: 6325 - protein, 354 aa, Triticum aestivum
  misc_feature (296)..(296): Xaa can be any naturally occurring amino acid
MDGNKGPVVVTGASGFVGSWLVMKLLQAGYTARATVRDPANVEKNKPLLELPGDKERLSIWKADLSDEGSFDDAIAGCTGVFHVATPMDFDSKDPENEVIKPTVEGMLSIMRACKEAGTVKRIVFTSSAGSVNIEERQRPAYDQDNWSDIDFCRRVKMTGWMYFVSKALAEKAAMEYASENGLDFISIIPTLVVGTFLSAGMPPSLVTALALITGNEAHYSILKQVQLVHLDDLCDAMTFLFEHPEANGRYICSSHDATIHGLARMLRDRFPEYSIPQKFAGVDDDLQPIHFSSKXLLDHGFSFRYTAEDMFDAAIRTCREKGLIPLGDAPAPAAAGKLGALAAGKGQAIGAET

SEQ ID NO: 6326 - protein, 315 aa, Clostridium tetani E88
MNKEEKILDLVIIGSGPAGLTAAIYASRMKLDFIVLENELVGGQIRSTYSIENYPGFRSISGEELVNKIYDHAVDLGAKIDEFDEIQYIKLTEEEKLIETYEYIYKPKAVIIAAGAKYRPLPIPEEKKYHGNGIHHCELCDGEFYQNKSIMVVGGGNSALEGAIFLSRYAKNITMVHQLDYFQGEKSLQDEVFNNSKIKILWNTDIKNAFGENKLEEVLVEDLKTKEQYKINVDGIFVYIGMVPNTDLYKDYINLNERGYIIADESTKTNIEGVFAAGDVRAKQFRQLVTANADGAVAALSAEKYISKKRRENND

SEQ ID NO: 6327 - protein, 51 aa, Moringa borziana
RMSYFHETIWKGVPKFLRRVDTALKNIGINERVPYNAPLIQFSSWMGGDRD

SEQ ID NO: 6328 - protein, 213 aa, Methanococcoides burtonii DSM 6242
MFNTLIFDADGVLVNSMPFHADAWIQTFSEVGIDVIRQDIYDIEGSNFVGIIELIFKKAGRDADPELIEKLRVRKRELFFKYEKATAFEGMYDFLNEKKDKYNLAVVSGSDRPIIDKMFNKLYPDIFDLLISGADVAHGKPHPEPYLKAVEYFGVDKEKCLVIENAPLGVESAKNASLYCVAVSTHVNPKGLEKADKVFNNHSELLEFLKQLV

SEQ ID NO: 6329 - protein, 333 aa, Vibrio vulnificus CMCP6
MQTHNVGRDAALEDKERIKELLIGADMVFIAAGMGGGTGTGAAPVIAEVAKELGILTVAVVTKPFSFEGKKRLAFAEQGIDELSKHVDSLITIPNEKLLKVLGRGITLLEAFASANDVLKNAVQGIAELITRPGMINVDFADVRTVMSEMGHAMMGSGVAKGEDRAEEAAEMAISSPLLEDIDLAGARGVLVNITAGLDMRLDEFETVGNTVKAFASDNATVVIGTSLDPDMADEIRVTVVATGIGNDKKPDITLVSGGKAKVAQPTAAPQPVVAAKVEEKPAQTLQERPQVTPQPSTPVSSSPASGSQNAAPKQEKESGYLDIPAFLRRQAD

SEQ ID NO: 6330 - protein, 551 aa, Colwellia psychrerythraea 34H
MDIKKLSSLAHCAKTRSIVSLFDQKERANDFSLSTSHLYLDYSKQNITDVELEQLIEIAEDVGLSESITGQFNGDKINNTEGRSVLHTILRAPQVIKQQILGDTLANEVEAAELQMAKVVNDVQKGILTSHTGQRFTDVLAIGIGGSYYGVKVSLSALEHYRDLALSVHVIANVDGGALEEKLKTLNFETTLVVVISKTFTTQETMLNAKAVKQWMLSCASVKDLELNNVPLIIEKQWFAVSSNIEAAKEFGINIKHILPMWDWVGGRFSIWSTVGLPLALAIGNDNFNKLKQGAYEMDVHFKSTDFKNNMPVIMALLGIWNRNALEYPTLAILPYAHSLRALPGYLQQTDMESNGKSVSKSGDKLSWLTAPVVFGQEGTNGQHAFMQLMHQSDDIIPTDFIVALKGRSQYTENHKVLVANCFAQSEALMQGKTLTQVESELEMSALSTAEISLIAPHKTMKGNTPSNTLVMDLLTPETIGSLLALYEHKIFVQGVLWQVNSFDQWGVELGKQLGTRILSAIDGAEDDLLSASSQSLIARFRARSNVTPSV

SEQ ID NO: 6331 - protein, 256 aa, Thauera aromatica
MPVTLEVSNHVAYVTLNRPEAMNSLDPESTADLTEIWARVRTDPDIRVAVLTGAGEKSFCTGTDMKKSPPPTECMAATYLRDGQPILPHMKMWKPIIAAINGYAVGGGLEIALACDLRIASTNAKFGLTEVKVASLAGLNGTQALPRAIPQAVAMKMLLTGEMISAEEALRYGLVSDVVEPSALADLARSYAEKIASAAPLSVQATKQAAVLGKDMPLEHGILYSHLLWGVLRDTEDRKEGFKAFGERRAPAFRGA

SEQ ID NO: 6332 - protein, 227 aa, Phleum pratense
YYEAGARFAKWRAVLKIGPNEPSQLSIDQNAQGLARYAIICQENGLVPIVEPEILVDGPHDIDRCAYVTEVVLAACYKALNDQHVLLEGSLLKPNMVTPGSDAKKVAPRESLAEYTVRTLQRTVPPAVPAIVFLSGGQSEEEATVNLNAMNKLQTKKPWFLSFSFGRALQQSTLKAWSGKEENVGKAQKAFLVRCKANSEATLGTYKGDATLGEGASESLHVKDYKY

SEQ ID NO: 6333 - protein, 920 aa, Corynebacterium glutamicum
MTDFLRDDIRFLGRILGEVIAEQEGQEVYELVEQARLTSFDIAKGNAEMDSLVQVFDGITPAKATPIARAFSHFALLANLAEDLHDEELREQALDAGDTPPDSTLDATWLKLNEGNVGAEAVADVLRNAEVAPVLTAHPTETRRRTVFDAQKWITTHMRERHALQSAEPTARTQSKLDEIEKNIRRRITILWQTALIRVARPRIEDEIEVGLRYYKLSLLEEIPRINRDVAVELRERFGEDVPLKPVVKPGSWIGGDHDGNPYVTAETVEYSTHRAAETVLKYYARQLHSLEHELSLSDRMNKVTPQLLALADAGHNDVPSRVDEPYRRAVHGVRGRILATTAELIGEDAVEGVWFKVFTPYASPEEFLNDALTIDHSLRESNDTLIADDRLSVLISAIESFGFNLYSLDLRQNSESYEDVLTELFERAQVTANYRELSEEEKLEVLLKELRSPRPLIPHGSDEYSEVTDRELGIFRTASEAVKKFGPRMVPHCIISMASSVTDVLEPMVLLLKEFGLIAANGDNPRGTVDVIPLFETIEDLRAGAGILGELWKIDLYRNYLLQRDNVQEVMLGYSDSNKDGGYFSANWALYDAELQLVELCRSAGVKLRLFHGRGGTVGRGGGPSYDAILAQPKGAVQGSVRITEQGEIISAKYGNPETARRNLEALVSATLEASLLDVSELTDHQRAYDIMSEISELSLKKYTSLVHEDQGFIDYFTQSTPLQEIGSLNIGSRPSSRKQTSSVEDLRAIPWVLSWSQSRVMLPGWFGVGTALEQWIGEGEQATQRIAELQTLNESWPFFTSVLDNMAQVMSKAELRLAKLYADLIPDREVAERVYSVIHEEYFLTKKMFCVITGSDDLLDDNPLLARSVQRRYPYLLPLNVIQVEMMRRYRKGDQSEQVSRNIQLTMNGLSTALRNSG

SEQ ID NO: 6334 - protein, 536 aa, Linum usitatissimum
MASSALNNLVAVNPNTLSPSPKSTPLPNTFSNLRRVSAFRPIKASLFGDSPIKIPGITSQPPPSSDETTLPIRQIPGDYGLPGIGPIQDRLDYFYNQGREEFFKSRLQKYKSTVYRANMPPGPFIASNPRVIVLLDAKSFPVLFDMSKVEKKDLFTGTYMPSTELTGGYRILSYLDPSEPNHTKLKQLLFNLIKNRRDYVIPEFSSSFTDLCEVVEYDLATKGKAAFNDPAEQAAFNFLSRAFFGVKPIDTPLGKDAPSLISKWVLFNLAPILSVGLPKEVEEATLHSVRLPPLLVQNDYHRLYEFFTSAAGSVLDEAEQSGISRDEACHNILFAVCFNSWGGFKILFPSLMKWIGRAGLELHTKLAQEIRSAIQSTGGGKVTMAAMEQMPLMKSVVYETLRIEPPVALQYGKAKKDFILESHEAAYQVKEGEMLFGYQPFATKDPKIFDRPEEFVADRFVGEGVKLMEYVMWSNGPETETPSVANKQCAGKDFVVMAARLFVVELFKRYDSFDIEVGTSSLGASITLTSLKRSTF

SEQ ID NO: 6335 - protein, 256 aa, Azoarcus sp. EbN1
MDEVLIERPGPGIVLLRLNRPDARNALNQEVRQQLATHFTAFGQDPDVRCIVLTGGDKFFAAGADIRAMADAGAIDMMLRHTHRLWQAIASCPKPVIAAVNGYAWGGGCELAMHADIIVAGESASFCQPEVKVGIMPGAGGTQRLTRAVGKFKAMKMVLTGQPVNGRDALEMGLASEVVADADVQAHAVELAAQIAALPPLAIAQIKEVLIAGQDASLETALMLERKAFQLLFASRDQKEGMQAFLEKRKANFEGR

SEQ ID NO: 6336 - protein, 701 aa, delta proteobacterium MLMS-1
MRQKSGPSLYLLWIPFLLVAVTALFSITFLSSQQRSSLQQHAELQLEQQQVKTSVELTIARMMQAVVTRDDGGYIVAAGNARDLMVKLAELEQRMCGDICITPNCLTSIYRDFYRDLITTVSLYHENRFHEAADAMLFVRHQQQLLTKEINNITAIINSRHAADLKRLNLIFIAVGLLMTVVAVLNAWLIIPALVIRPMQRVTDQAEAANAAKSEFLANMSHEIRTPMNGVLGMTTLLMDTGLNREQRHLAGIIQASGEDLLRVINDILDFSKIEAGQLDLEVIDFDLQELLDNFAAAMAIPARAKKLALIGELDPATPRFLRGDPGRIRQILTNLVGNAIKFTEQGEVALHFDATEHSPERLTLRCRVRDTGIGIPADKRDRLFKSFSQADSSTTRQYGGTGLGLAIAKQLAEKMAGAISVTSVSGQGSEFTVTMVLGQQQQARQAAPRPLPPAADTRDLFGGSEARILLAEDNPTNQLVALGILKKLGLRADAVGNGEEAVEALKNRPYDLVLMDLQMPVLDGMEATRRIRNPEGGAINPAIPIIALTASALPSDAEACFAAGMNGFVPKPIEPSVLATELQRWIGKALFDRSAILDRLDGDEELFLAVAASFVQEAANIIAALEEAEKSGDRAALQLHAHTIKGHFATFSYPDGQACAAELEQVAKVENGEVAELVRLSAAHIRALDRALAEVVKANR

SEQ ID NO: 6337 - protein, 236 aa, Streptomyces avermitilis MA-4680
MTEPTHDEAHGGALGSRLNWLRAAVLGANDGIVSTAGLVVGVAGATGARSALLTAGLAGLLAGSMSMAAGEYVSVSTQRDSEKAALALEKRELTEQPEAELEELTELLEERGLSRDVAREAAQQLTERDALRAHARVELGIDPDELANPWHAAWASFLAFTVGALLPLLAIVLPPADWRLPVTVLSVLAALVVTGWVSARLGAARPGRAVLRNVGGGALAMGVTYAAGALLGAAGV

SEQ ID NO: 6338 - protein, 482 aa, Escherichia coli K12
MKLNDSNLFRQQALINGEWLDANNGEAIDVTNPANGDKLGSVPKMGADETRAAIDAANRALPAWRALTAKERATILRNWFNLMMEHQDDLARLMTLEQGKPLAEAKGEISYAASFIEWFAEEGKRIYGDTIPGHQADKRLIVIKQPIGVTAAITPWNFPAAMITRKAGPALAAGCTMVLKPASQTPFSALALAELAIRAGVPAGVFNVVTGSAGAVGNELTSNPLVRKLSFTGSTEIGRQLMEQCAKDIKKVSLELGGNAPFIVFDDADLDKAVEGALASKFRNAGQTCVCANRLYVQDGVYDRFAEKLQQAVSKLHIGDGLDNGVTIGPLIDEKAVAKVEEHIADALEKGARVVCGGKAHERGGNFFQPTILVDVPANAKVSKEETFGPLAPLFRFKDEADVIAQANDTEFGLAAYFYARDLSRVFRVGEALEYGIVGINTGIISNEVAPFGGIKASGLGREGSKYGIEDYLEIKYMCIGL

SEQ ID NO: 6339 - protein, 332 aa, Candida glabrata CBS 138
MVRVAINGFGRIGRIVLRIAMKRDGIDVVAINDPFITNDYAAYMFKYDSTHGRYDGEVTHDDKDLIIDGKAIKCYQERDPADLPWGDNDIDIVIEATGVFTAKDLAEKHITAGAKKVVITGPSATAPMFVKGVNDDKYTSDVTVISNASCTTNCLAPLAKVLQDNFGIEEALMSTVHSQTATQKTVDGPSKKDWRGGRTASANIIPSSTGAAKAVTKVLPELEGKLTGMAFRVPTVDVSVVDLTVRFAKDVTYDEIKAAIKKASEGEMKGILAYTEDAVVSTDFLGDTHSSIFDASAGIQLSPRFVKLVSWYDNEYGFSARVVDMVELVSKA

SEQ ID NO: 6340 - protein, 135 aa, Haemophilus influenzae R2846
MQILHTMLRVGDLDRSIKFYQDVLGMRLLRTSENPEYKYTLAFLGYENGESAAEIELTYNWGVDKYEHGTAYGHIAIGVDDIYATCEAVRTSGGNVTREAGPVKGGSTVIAFVEDPDGYKIEFIENKSTKSGLGD

SEQ ID NO: 6341 - protein, 310 aa, Staphylococcus aureus
MILTLTLNPSVDISYPLTALKLDDVNRVQEVSKTAGGKGLNVTRVLAQVGEPVLASGFIGGELGQFIAKKLDHADIKHAFYNIKGETRNCIAILHEGQQTEILEQGPEIDNQEAAGFIKHFEQLLEKVEAVAISGSLPKGLNQDYYAQIIERCQNKGVPVILDCSGATLQTVLENPYKPTVIKPNISELYQLLNQPLDESLESLKQAVSQPLFEGIEWIIVSLGAQGAFAKHNHTFYRVNIPTISVLNPVGSGDSTVAGITSAILNHENDHDLLKKANTLGMLNAQEAQTGYVNLNNYDDLFNQIEVLEV

SEQ ID NO: 6342 - protein, 486 aa, Azoarcus sp. EbN1
MTLALNDPDLFRSRCLVGGTWADADSGATIAIHNPATGEQLGTIPKMGAAETRRAIDAASRAWPAWRALTAGARARVLRKWFDLIVEHQEDLALLMTSEQGKPLGEARGEVLYAASFVEWFAEEAKRIYGDVIPGHQPDKRIVVTKEPVGVCAAITPWNFPLAMITRKAGPALAAGCTMVLKPATQTPYSALALAVLAERAGVPAGVFSVLTGSATEIGGELTANPIVRKLTFTGSTEVGIKLAAQCAPTIKKLSLELGGNAPFIVFDDADLDAAVDGALASKYRNTGQTCVCANRLLVQDSVYDAFAEKLTAAVAKLKVGNGVDEGVTQGPLIDMRAVEKVEEHIADALAKGARVVTGGGRHALGRTFFEPTILADVTPQMKVAREETFGPVAPLFRFKDEAEAIRMANDTEFGLAAYFYSVGMNRVWRVSGALEYGIVGINTGIISTEVAPFGGMKSSGLGREGSKYGIEDYLEIKYLCMGGVQ

SEQ ID NO: 6343 - protein, 365 aa, Candida glabrata CBS 138
MAKKGVKKQVKNKEEGLSRERIGRALGSLKKYLEAQEGGEKTQLLEDESLGDLQLLFTNAESFTGSKKSFKLKLVDVKHSLYAKWKAASATEIKDFKVLLILKDSDVSKVTQDELYDQLNESGIEIDEIICGKDLKTTYKAYEARNAFISQFSLVIADDSVVTALPKLLGGKAYSKVETTPIPIRCNLKGQFSLNALTNQIKKIYLHKLPVRAPRGNMLNVHLGRVNWFTDEEIIDNIESVADALIKDAKIRNIMLKTTTSPSLPIYRNDNVIDEMVKENTVDDEKAEDVKTVKIGEVDVELSNFDRALMEVANPEEYETMFSKQISKAKRAREEEPEVEEKTPVKKGKNDSKQVKGKKSPKSKK

SEQ ID NO: 6344 - protein, 313 aa, Brassica napus
  misc_feature (82)..(82): Xaa can be any naturally occurring amino acid
GVLPYTTKNVEDDYFLGQILGQGQFGTTFLCTHKKTAQKLACKSIPKRKLLCQEDYDDVLREIQIMHHLSEFPNVVRIRTRXEDTSSVHIVMELCEGGELFDRIVKRGHYSEREAAKLIKTIVGVVEACHSLGVMHRDLKPENFLFASCDEDASLKSTDFGLSVFCKPGATFSELVGSAYYVAPEVLHKHYSRECDVWSAGVILYILLCGFPPFWDESEFGIFRKILQGKIDFETRPWPSISESAKDLIVKMLEKDPKKRLTAHQVLCHPWIGDDKGAPDKPLDCAVLSRLKNFSAMDKLKKMAFRVIAERLS

SEQ ID NO: 6345 - protein, 960 aa, Zea mays
MPERHQSIDAQLRLLAPGKVSEDDKLVEYDALLVDRFLDILQDLHGPHLREFVQECYELSAEYENDRDEARLGELGSKLTSLPPGDSIVVASSFSHMLNLANLAEEVQIAHRRRIKLKRGDFADEASAPTESDIEETLKRLVSQLGKSREEVFDALKSQTVDLVFTAHPTQSVRRSLLQKHGRIRNCLRQLYAKDITADDKQELDEALQREIQAAFRTDEIRRTPPTPQDEMRAGMSYFHETIWKGVPKFLRRIDTALKNIGINERLPYNAPLIQFSSWMGGDRDGNPRVTPEVTRDVCLLARMMAANLYFSQIEDLMFELSMWRCSDELRIRAHELHRSSKKAAKHYIEFWKQVPPNEPYRVILGDVRDKLYYTRERSRHLLTSGISEIPEEATFTNVEQFLEPLELCYRSLCACGDKPIADGSLLDFLRQVSTFGLALVKLDIRQESDRHTDVLDSITTHLGIGSYAEWSEEKRQDWLLSELRGKRPLFGSDLPQTEETADVLGTFHVLAELPADCFGAYIISMATAPSDVLAVELLQRECHVKQPLRVVPLFEKLADLEAAPAAVARLFSIDWYMNRINGKQEVMIGYSDSGKDAGRLSAAWQMYKAQEELIKVAKHYGVKLTMFHGRGGTVGRGGGPTHLAILSQPPDTIHGSLRVTVQGEVIEHSFGEEHLCFRTLQRYTAATLEHGMHPPISPKPEWRALMDEMAVVATKEYRSIVFQEPRFVEYFRSATPETEYGRMNIGSRPSKRKPSGGIESLRAIPWIFAWTQTRFHLPVWLGFGAAIKHIMQKDIRNIHILKEMYNEWPFFRVTLDLLEMVFAKGDPGIAAVYDKLLVADDLQSFGEQLRKNYEETKELLLQVAGHKDVLEGDPYLKQRLRLRESYITTLNVCQAYTLKRIRDPSFQVSPQPPLSKEFTDESQPAELVQLNEQSEYAPGLEDTLILTMKGIAAGMQNTG

SEQ ID NO: 6346 - protein, 279 aa, Mesorhizobium loti MAFF303099
MDLKDKTILITGSTDGVGRVVAQRLGADGARVLVHGRDAARGKAAVAEIEAAGGRAEFFAADLASLAEIRHLAEAVRARTNRLDILINNAGIGTAAAKRQVSADGYELRFAVNYLAGFLLTSELLPLLKASAPARIVNVASAGQQAIDFGDVMLTHGYSGVRAYCQSKLAQILFTVDLAEQLKGTGVTVNALHPASYMNTTMVRQAGVTPWSSVETGAEAIVNLAASPALEGRSGLYFDGLREARADAQAYDATARQQLRSLSRDLVGAASSKSRERHS

SEQ ID NO: 6347 - protein, 608 aa, Oryza sativa (indica cultivar-group)
MAIPGAYAHAVQALATGILFVVVSLVLDHVEGRHHKCPSFSCGRLKGVSAPFRRAADPPGCGSKSYELVCSDTNATILIDNATYHVNEIDYDYKRFWVVDANIAGSTCPLPRWNHLLDQYKRKVSGHRIEFELAPGAYNHAYFVRCSREVKDNGIYRPVTCASSNYSFIYVLLSSDSDNPGYIESLEPSCGYLAMTPLGDWRSTTVPRNASYEDVKKFMRGGFTVRFPVNYGAGNIKECLMDSISLSRLLLTPVHCMHYAVLCRFVLVPLAILTFLAHKYWKTRLAIDAVEKFLQMQQVLGPTRYAYTDLTAVTSHFRDKLGQGGYGSVYKGVLLSGDVHVAVKMLNGTSTYDGEEFISEVSTIGRIHHVNVVRLVGFCSEELRRALVYEYMPQGSLDKYIFSSERSFSWDKLNEIAIGIARGINYLHQGCDMQILHFDIKPHNILLDDNFVPKVADFGLAKLYPRNKSFVSDRALRGTVGYIAPEMVSRSFGVISSKCDVYSFGMLLLEMAGGRRNADPNTNPNASQSYYPSWVYGQLTGEQVGETSGAADMHELQKKLCLVGLWCIQMKSHDRPTMSETIEMLEGDVNALQVPPRPFFCDGVLCLM

SEQ ID NO: 6348 - protein, 951 aa, Gluconobacter oxydans 621H
MPENLPVTTLWPAQTEDFSSRHIGPRPSEIGEMLRVVGASSLDDLIDKTIPAAILDRGDHGIGAALTEQDALARLRQIASRNQVLTSMIGQGYYDTVLPPVIQRNILENPAWYTAYTPYQPEISQGRLEALLNFQTLVADLTGLDIANASLLDEGTACAEAMALAQRVGKSKATAFFVDADTHPQTIAVIRTRAEPLGWDVVVGDPETDLDASSVFGALLSYPGSSGQVRDPRKVIAALHEKGAIAALACDPLALVLLESPGALGADIAIGSMQRYGVPMGAGGPHAAFMATRDAFKRHMPGRLVGVSRDSAGKPAYRLALQTREQHIRREKATSNICTAQALLAIIASMYAVYHGPEGLKAIAARTHRMAAILSAGLKTLGATVETDVFFDTITVQAGASAPQVLARAVASGINLRDAGDGRIGMSCDETTTPETIRAVWAAFAGEGADLSAIEQALDVADALPEGLSRTAPLLTHPVFHAHRSETDLLRYMRALADKDLALDRTMIPLGSCTMKLNATAEMIPITWPEFARIHPFAPADQVQGYTELFAYLERTLCAISGYDAVSLQPNSGAQGEYAGLLAIRGYHRARGDENRDVCLIPASAHGTNPASAQMAGMRVVVVACDENGNVDVEDLKAKIAQHDGRVAAIMITYPSTHGVFEERIVEICELVHAAGGQVYLDGANLNAQVGLARPGLYGADVSHFNLHKTFCIPHGGGGPGMGPIGVGKHLAPYLPGRHGIAVSAAPFGSASILPISAAYIMMMGDEGLRQATTMAILNANYIASRLEGHYPVLYRGTNGFTAHECIVDLRSLKDAVGVTVDDIAKRLIDHGFHAPTVSFPVAGTFMIEPTESEGKGELDRFCDAMIAIRAEIAEVEAGRVGMEDSPLRFAPHTTADLAGDWERSYSREAGCFPGGVDTAKYWSPVGRLDNAWGDRNLVCSCPDISTYVEG

SEQ ID NO: 6349 - protein, 657 aa, Oryza sativa (indica cultivar-group)
MDFTNLLITVLLLLSPLKYESDVATASDDEDFFKTCSSQRCSKHGPEIRYPFRLSTQPPSCGAPGMQLSCSGQDTILDHPVLGSCKVTMIYYRHVIMNAIPLVDSLPHCPLQKLVSVNQSTAVYKPHTSEVASVVGCSRDSIDTNQYGIVGPTSCPSLANNASQFWYLAYPYDNMSILPLGCTIVSKDIPMPYSYDKNGPNFDISIFTETAKRVISTGETVFTWYQVTVTSICQQCEREGRRCGFSSQRESSILPASYVNRVETRTYPSYTTLVRKLCTCIFPAMLCKIIESGPRVTIIAATSSVGTFIVLSLIVATALYISLKSRYNEEIHLKVEMFLKTYGTSKPTRYTFSEVKKIARRFKDKLGHGAFGTVYKGELPNGVPVAVKMLENSVGEGQEFINEVATIGRIHHANIVRLLGFCSEGTRRALIYELMPNESLEKYIFPHGSNISRELLVPDKMLDIALGIARGMEYLHQGCNQRILHFDIKPHNILLDYSFNPKISDFGLAKLCARDQSIVTLTAARGTMGYIAPELYSRNFGAISYKSDVYSFGMLVLEMVSGRRNTDPPAENQNEFYFPEWVFERVMNGQDLVLTMETTQGEKEMVRQLAIVALWCIQWNPKDRPSMTKVVNMLTGRLQNLQVPPKPFISSQNQLVI

SEQ ID NO: 6350 - protein, 116 aa, uncultured epsilon proteobacterium
WTMVAGGGASVVYADTIADMAGGVEDLANYGEYSGGPTTDETRFYTETVLDLMTREKDPKGRDKILIIGGAIANFTDVAKTFTGIIQAFEKYADRMKDVGTRIYVRRGGPNYKGEF

SEQ ID NO: 6351 - protein, 364 aa, Triticum aestivum
  misc_feature (147)..(147): Xaa can be any naturally occurring amino acid
  misc_feature (305)..(305): Xaa can be any naturally occurring amino acid
  misc_feature (313)..(313): Xaa can be any naturally occurring amino acid
  misc_feature (347)..(347): Xaa can be any naturally occurring amino acid
HEYSGLSFLNKGNAFILLLLAVAVPSLLRTGEASVHEYSGLSFLYAPVSPANATAEEDDDEAAADAFIRFDKITFRRPEEANDSVKETSSSKVQIIVFEIEDREMIGGSAYGGQKAICCTSDLAKLGACVEGSVIYRPSQVNPGWPXLLFASFDGSDLIATLPSRTIPVKKTGMYNMYFIHCDPALAGLEIDGKTIWKNPTGYLPGRMAPLKNFFGLMSFAFVILGIYWFYQYMKFWREVLPLQNCITLVITLGMLEMALWYFEYAEFNETGVRAKAITFWAVTFGTIKRTVARLIILIVSMGYXGVVRPTLXGLTSKVVMLGGTFFVATEILELVENLSTVNDLSXKARLFLVYPVAILDASF

SEQ ID NO: 6352 - protein, 380 aa, Mycobacterium tuberculosis CDC1551
MSKKHTTLNASIIDTRRPTVAGADRHPGWHALRKIAARITTPLLPDDYLHLANPLWSARELRGRILGVRRETEDSATLFIKPGWGFSFDYQPGQYIGIGLLVDGRWRWRSYSLTSSPAASGSARMVTVTVKAMPEGFLSTHLVAGVKPGTIVRLAAPQGNFVLPDPAPPLILFLTAGSGITPVMSMLRTLVRRNQITDVVHLHSAPTAADVMFGAELAALAADHPGYRLSVRETRAQGRLDLTRIGQQVPDWRERQTWACGPEGVLNQADKVWSSAGASDRLHLERFAVSKTAPAGAGGTVTFARSGKSVAADAATSLMDAGEGAGVQLPFGCRMGICQSCVVDLVEGHVRDLRTGQRHEPGTRVQTCVSAASGDCVLDI

SEQ ID NO: 6353 - protein, 222 aa, Rhodobacter sphaeroides
MNDYSTTRDRVEHYFDRTATHTWERLTSSAPVSRIRQTVREGRDTMRAKMLWRLPKDLTGLRVLDAGCGAGQMTVELAARGAQVMAVDISPQLVEIARKRLPPEHQDRVTFASGDMLADDLGRFDYVVAMDSLIYYTDADIAAALDRLGARTRHSVVFTVAPRTPFLMAFWTMGKLFPRSDRSPVMIPHPFQPLNEATGGRLVKVGRVSRGFYISECLEFRP

SEQ ID NO: 6354 - protein, 468 aa, Frankia sp. CcI3
MAVLTSRSTDFPRWYQDVLAKAELADNGPVRGTMVIRPYGYAIWERMQAEVDSRIKAAGAVNAYFPLFIPESYLRREAEHVEGFSPELAVVTIGGGKELEEPVVVRPTSETVIGEYLAKWTQSYRDLPLLLNQWANVVRWELRPRLFLRSSEFLWQEGHTAHADEADAAAYARRIALEVYRDFMTQVLAVPVFVGVKTRRERFAGATNTMTCEGMMGDGKALQMATSHELGQNFARAFDIDFLGADGARHLAWTTSWGCSTRMVGGLIMAHGDDNGLRVPPRLAPTQVVVLPVRDEETVVAKARQIAAALTDAGLRVQVDARPGLSFGRRVTDAEIKGIPVRVEVGPRDLAAGNVTLVRRDTSEKVPVPLAEVATRVPVLLGEVQADLYAEALALRESRTTDVATVAEAARAAQAGFARIPWRLVGEEGEAELAEEALTVRCIQTPDGGIPEAGSDADDLVCLIARSY

SEQ ID NO: 6355 - protein, 315 aa, Oryza sativa (japonica cultivar-group)
MRDLQLSLNQTQRVRLEAALHELQTVAPAAAVTVADTIPVNDEDNILKGHGTSDQDGEVVATLCGVVERVNKLVYVRTLRARYKPEVGDIIVGRVIEIAPKRWRLEINFSQDAVLMLSSMNLPDGIQRRRTAVDELNMRTIFEENDVICAEVRGFQHDGSLHLQARSQKYGKLERGQLLVVPAYLVKRRKQHFHHLEQYDVDLILGCNGFIWVGEHVVVGENANMMENKLNLSAEVENFTPLETRKHICRLANAVRVLSALGFTLTVELIIETAEASVSSNIEINNMLGAEFYVQTAEREVKRRADLLRKKSGAR

SEQ ID NO: 6356 - protein, 482 aa, Zea mays
  misc_feature (135)..(135): Xaa can be any naturally occurring amino acid
  misc_feature (159)..(159): Xaa can be any naturally occurring amino acid
  misc_feature (187)..(187): Xaa can be any naturally occurring amino acid
  misc_feature (247)..(247): Xaa can be any naturally occurring amino acid
WISSQLAVSDKKLGRRDLLQWIANRLPGWKAPLLNLAGRAALVRFVLSAIPVYLFIAMNVPKWVISAIDKIRRGFLWKGRKDVKGGHCLVAWDKVTRPLDLGGLGIPNLIYKSWALQAKWLWLIKTDPNRPWSGXDLPVQSQVRKLVASSMYTNVGNGXTPFFWRDRWINGCSIADLAPEVISKVDXKFASTRTVHQALEGMSWVRDIKPTLSLIGIQQYLTLWDTLGEIVLTSQEDHHVWRFESSXSSSLFSSRSCYKVLFLGSITFEPWKRLWKSWAPPKCKTFLWLAMQNKCWTADRLQKRGLPHPEACPLCEQEQETVQHLLTGCVFARQFWHSILSPFGMGHLTPGPEDTNFADWWGLVTIQVHRSKRKLVNSAIILGAWCLWLHRNRVIFDGDLPTIGKVHRSFVDELSLWVGASWCQTPRKPWFCCCSRRSKLDLIFSLVVSLYLFPMDGFIMLVAGHHRVVIVLVLLDLKFPSS

SEQ ID NO: 6357 - protein, 269 aa, Streptomyces collinus
  misc_feature (254)..(254): Xaa can be any naturally occurring amino acid
MRHADTVLYEVSDGLATITLNRPEAMNALNIATKVALREAAESAAADTAVRAILLTAAGERAFCVGQDLKEHIGLLAQDRETGSGQTMSTVKEHYNPIVRALAGAAKPVVAAVNGVAAGAGFGFALTADYRVVADTASFNTSFAGVALTADSGISWTLPRVIGPSRAADLLLFPRSISAQDALELGIANRVVPAAELRAEAEKVARALAEGPTVAYAAIKEAVAYGLTHSLAETLEKEDELQTRAGQSEDHAIXVQAFVNKERPKYLGR

SEQ ID NO: 6358 - protein, 370 aa, Oryza sativa (japonica cultivar-group)
MLISQSQWTISRVFWRGARQASLLASRERWVGNGEPPPHGGAGWGGGGGGGSVVGRRGLGRRERQVGAVRAAPADLTRMHRERMAFISSRGRRRVAETASAFVMLLSSGVYTGTGQSHPATSSPTMPRPKRRRSPLPPPAPPGFPTERKHHLPELQPPAVAAASPGVAGVPADLGDALLRCGKLLDKLLEHEDGWVFAEPVDARALRLVDYYLRISDPMDLGTVRRRLERRRYADPWAFAADVRLTFNNAMSYNSAGDPVYESAAELSEIFEAGWPSVLAAPPRPPDAERKRRLSGLLPRLPVGAQVTVAEIMKKRDGCLREVNGMMEVDLDRADSATLDELDRMVAEHGAALAGVVKVKQNAVGFNRTS

SEQ ID NO: 6359 - protein, 242 aa, Auxenochlorella protothecoides
QFGHAGAKSGGDHGPCVSGAHNTIVTARAGKDLISSLVSGLLTIGPRFGGAIDGAAQYFKEAVDEGWEPDEFVEKMKKAGDQVPGIGHRIKSKDNRDKRVELLQRYARTHFPSTRYLDYAVEVEGYTLQKAANLVLNVDGCIGALFLDLLNSGTLPPRQSCIPATPVDPTSLPSPNQTSTPPLTPQSVCSTKVEIDSIVKIGYLNGLFVLARTIGLIGHCLDQKRLGQPLYRHPWDDVLYAK

SEQ ID NO: 6360 - protein, 921 aa, Arabidopsis lyrata
MASATVDFGIGRILSVLENETLLLSGVHVEIDKMKKELLIMKSFLEDTHQHGGNGSIATTTQVFQTFVANTRDRRHSRRVWLSHPRYRSCAKLWRAFHFPRYMWARHSIAQKLGVVNVMIQSISDSMKRYYHSENYQAAILSPTDDGDAKWVNNISESSLFFSENSLVGIDAPKGKLIGRLLSPEPQRIVVAVVGMGGSGKTTLSANIFKSQSVRRHFECYAWVTISKSYEIEDVFRTMIKEFYKEAETQIPAELYSLGYRELVEKLVEYLQSKRYIVVLDDVWTTGLWREISIALPDGIYGSRVMMTTRDMNVASFPYGIGSTKHEIELLKEDEAWVLFSNKAFPGSLEQCRTQNLEPIARKLLERCQGLPLAIASLGSMMSTKKFESEWKKVYSTLNWELNNNLELKIVRSILLLSFNDLPYPLKRCFLYCSLFPVNYRMKRKRLVRMWMAQRFVEPIRGVKAEEVADSYLNELVYRNMLQVILWNPFGRPKAFKMHDVIWEIALSVSKLERFCDVYNDDSDGDDAAETIENYGSRHLCIQKEMTPDSIRATNLHSLLVCSSAKHKMDLLPSLKLLRALDLEDSAISKLPDCLVTMFNLKYLNLSKTQVKELPKDFHKLINLETLNTKHSKIEELPPGMWKLQKLRYLITFRRNDGHDSNWNYVLGTRVVPKIWQLKDLQVMDCFNAEAELIKNLGNMTQLTRISLVMVRREHGRDLCDSLNKIRRLRFLSLTSIHEEEPLEIDDLIATASIEKLFLAGKLERVPIWFNTLQNLTYLGLRGSQLQENAILSIQTLPRLVWLSFYNAYMGPRLCFAQGFQNLKILEIVQMKHLTEVVIEDGAMFELQKLYIRACRGLESVPKGIENLINLQELHLIHVSNQLVEGISGDGSVDRSRVKHIPAIKHYVRTDNGSFYVSLSS

SEQ ID NO: 6361 - protein, 116 aa, Zea mays
MAASLLHAAAASLQSSTQHARAGAAAFHPRDRHVVAALAGEQTEGSEVGDDRNGEIKPEEAQEIWKVMLEQFKAEALRMQALSMQAYDVYSERMREVLLEASEKLKIQADKAQKDL

SEQ ID NO: 6362 - protein, 276 aa, Auxenochlorella protothecoides
CFAYSFSSILVEIQDTLRQPPKAAKTMSKATNVSVTASFAFYFVVAIGGYASLGNDVPSYILGGLQGPEWVIFVANLCVLLHMWSAYQIYAHPMFDTLESHVKAFKLRQAKAKGDAELPAKVEELKRMSLAARQGSAAGTKTMDDTAPAAPPAANPLCRLSRVSAMAGEKLQRLSQNAAMYRVSTGFADTSVPSNDDHFVLPWWQRLITRRMYVVRTTLIAAIMPFFGAMAGLVGALAFFPLTSSSPSAAGAPCTSPLGGSITCCTSSSSAWRWCA

SEQ ID NO: 6363 - protein, 547 aa, Lactobacillus plantarum WCFS1
MTKTASEILNNPFLNKGTAFTKEERQALGLTGTLPSKVQTIDEQATQAYAQFKSKPSRLEQRIFLMNLFNENRTLFFHLMDEHVVEFMPIVYDPVVADSIEQYNELFLDPQNAAFVSVDAPEDIEATLKNAADGRDIRLVVVTDAEGILGMGDWGVNGVDIAIGKLMVYTAAAGIDPSQVLPVSIDAGTNNQKLLDDPLYLGNRHKCVSGEQYYDVIDKFVAAEQQLFPDSLLHFEDFGRDNAQVILDKYKDQIATFNDDIQGTGMVVLAGILGALNISKESIKDQKILSFGAGTAGMGIANQILDELMQAGLTEEEAKQHFYAVDKQGLLFDDTEGLTPAQKAFTRKRSEFSNADELTNLEAVVKAVHPTVMIGTSTQPGTFTESIIKEMAAHTERPIIFPLSNPTKLAEAKAEDLIKWTDGRALVATGIPADDVEYKGVTYQIGQGNNALMYPGLGFGLIASTAKVLNAETLSAACHALGGIVDTSKPGAAVLPPVAKITEFSQKLAEVVAQSVIDQKLNKEPIADAKQAVADMKWVPEYRAISK

SEQ ID NO: 6364 - protein, 51 aa, Moringa ruspoliana
GMSYFHETIWKGVPKFLRRVDTALKNIGINERVPYNAPLIQFSSWMGGDRD

SEQ ID NO: 6365 - protein, 401 aa, Bradyrhizobium sp. ORS278
MSTSSETFDVVVVGGGPAGATAANDLARQGHHVLLLDKAGRIKPCGGAIPPRLISEFEIPDHLLVARISSARMVSPSNRDVDMPIDGGFVGMVDREHYDEWLRARAAEGGAVLRTGTFSHIARDADGTAVVHYERRMDDGSVREDSVRARAVIGADGAVSAVARQCIPEGAEIRYVFAYHEIVRSPERGHPLFDATRCDVVYRGQLSPDFYSWVFPHGATTSIGTGSAHKGFSLRGSVAQFRKVAGLDDLETIRREGAPIPLRPLSRWDNGRDVVLAGDAAGVVAPASGEGIYYAMAGGRAAADAVALFLKTGDAAALATARKAFMRKHGAVFFILGMMQRYWYTNDARRERFVAICRDKDVQQLTWDAYMNKELVKAKPLSHVRIFFKNIAHLTGLAKAA

SEQ ID NO: 6366 - protein, 538 aa, Desulfotalea psychrophila LSv54
MLIGLSIFMISLCQPYSPGRGVTSYEDNMESIKKLHIKKANSGICTGTEWISPAGSKVIESISPVDGRIIAKIQAGGAPEYKRIITQAQKAFPLWRKIPAPERGEIVRQIGEALRKDKENLGRMICLEMGKSLQEGYGEVQEMIDVCDFAVGQSRMLYGATMPSERPSHRLYDQYHPLGVVGIITAFNFPAAVWAWNAMLSTVCGNVLVWKPSSQVGLTAIAIQHIIARVLKKNKLPEGIFSLICGSGKDIGDLMLADTRLPLISFTGSVRTGRHAAQIIAGRLGKSLLELGGNNSIIISPEADLAIAIPAVVFGAVGTAGQRCTTTRRLIIHESIYDKVRDGLTKAYKSLRIGSPLNQDNHMGPLVNQDAVANYLAAVETIKDQGGEILCGGHALQGEGFESGCYVAPTLVEVKSDIPIIKEETFAPILYLIRYSGDINQAIEINNSAHEGLSSAIFSNNLREAETFLSPWGSDCGIANVNIGTSGAEIGGAFGGEKDTGGGRESGSDAWKAYMRRQTVTINYGHELPLAQGINFTI

SEQ ID NO: 6367 - protein, 1089 aa, delta proteobacterium MLMS-1
MESLFPSPWPSRKADKMPLFNAPYRLTRRVLLWVLPPTILLLLLINTMALTLHQQSLEREIELRLVNLAESHHTLLRETLDALRGQGRFLAASDLVKNGLIDTEDRYRYLPILFRSLQNIAWSETRGRFALLDFQGVDIFSNELAGFPAAEREAAIGGSDFFAGRQELLLFNQDGIIFLTPVLIHDFIEGWVEISLPGSEALQLFHSWEDGNHAMALLDRQGVVVFADTLHRRKRESDTSRPPAFSTTLPVKVAGLEGYQLEIIISRGRIDAGINELRRRLLFTIAGALLAVIAAIVLATRLTSRPLEQLGQRFKAIAAAPDLQTRLPGEGPLEVHQLTAAINQTLDQLERNYTDKTRLDQLMAGSPGVIYALDPETLHPHFVSGNTEELYGESNREIMATTDWWRQRVHPGDLAAATAETAAWLAAACPGNNIHRYRMVRRDGTQLWVEDRIKALRDSSGRIREIVGNHIDISARKKDEEKLREAKIAAEAANLAKSAFLANMSHEIRTPMNAIIGLSELTLQGELAAEQRDSLEKIHSSSQLLLGIINDILDYSKIEAGHLQLAPHPFRPARLVERLGHLFRQNAAAKGLELVYHLDPEIPPVLLGDELRLGQIFTNLLANALKFTRKGRVELRIQRLAAVAEAEADAAAAAVGLRCAVSDTGVGIDQEQRKRLFKPFSQADDTTTRKYGGTGLGLVISARLVEQMGGRLQLESEPGRGSTFFFTITLPQAGADAIDQEGKHFPPHPSAGQEVPDLTGKIIMVAEDNQLNREVAQRMLARTGAEILLADHGAQALELINSHDCDLVLMDLQMPVMDGFTAARLIRKQFPRLPIIALSAAAMEEDRQQALAAGMNDHMAKPIDSGCLYRTLSQLFATPPRREQTGPPTAASPSNILPPLEGFALQRGLNRFGGDDELYLQTLHLFALELGEKFADLAQRLAASDESSRWDLHTLKGTAALVGAERLAAVTAELYEGLRLGGIVSAERINELSRVQTAVAEQLAQLPVLLRKSAGLNPGQAAVAIAQLRQQLADHQIVDRELLLHVADFLTSRLGREQVTPLLEQIERFAYREAKEILERLVNLIGVEQ

SEQ ID NO: 6368 - protein, 330 aa, Methanococcus maripaludis S2
MHKICVIEGDGIGKEVVPAAVEVLKATGVEFEFNHALAGDEVFEKTGVALPEETIAAAKAADAILFGAAGETAADVIVKLRKILDTYANIRPVKSYNGINCLKTGIDYIIVRENTEGLYKGIEAEIADGVTVATRVITKDASERIFKHAFEMAKDRKKQGTAGKVTCAHKANVLKITDGLFKKTFYEVSNDYKDIQTEDFYVDAMNMFIISRPETFDIVVTSNLFGDILSDGAVGMVGGLGMAPSGNVGDKYGLFEPIHGSAPDIAGKGLANPTATILTAVMMLRYLKENEAAEKVEKALEEVLSLGLTTPDLGGTLSTSEMGQEVAKRV

SEQ ID NO: 6369 - protein, 447 aa, Saccharomyces cerevisiae
MPKESEVINSEFHVDVQDPERLNGHPVAKFINKLSGQPESYVNRTNYIFGRTLGAGSFGVVRQARKLSTNEDVAIKILLKKALQGNNVQLQMLYEELSILQKLSHPNIVSFKDWFESKDKFYIVTQLATGGELFDRILSRGKFTEVDAVEIIVQILGAVEYMHSKNVVHRDLKPENVLYVDKSENSPLVIADFGIAKQLKGEEDLIYKAAGSLGYVAPEVLTQDGHGKPCDIWSIGVITYTLLCGYSPFIAESVEGFMEECTASRYPVTFHMPYWDNISIDVKRFILKALRLNPADRPTATELLDDPWITSKRVETSNILPDVKKGFSLRKKLRDAIEIVKLNNRIKRLRNMYSLGDDGDNDIEENSLNESLLDGVTHSLDDLRLQSQKKGGELTEEQMKLKSALTKDAFVQIVKAATKNKHKVLAGEEEDDSKKTLHDDRESKSED

SEQ ID NO: 6370 - protein, 616 aa, Zea mays
MASISGAAAAPSSAACRLRLRRHLLLRPSHLRLRAPHSIADLSRSSSSSNSAPTRAQPLGSRPENGGVRAVEKDPIKLWERYVEWLYQHKELGLFVDVSRMGFTEDFLRQMEPRMQRAFAAMRELEKGAIANPDEARMVGHYWLRDPALAPNSFLRSKIETTLDRILAFSQDVVSGKIQSPSGRFTSILSIGIGGSALGPQFVAEALAPDNPPLKIRFIDNTDPAGIDHQIAQLGPELATTLVIVISKSGGTPETRNGLLEVQKAFRDAGLQFSKQGVAITQENSLLDNTARIEGWLARFPMFDWVGGRTSEMSAVGLLPAALQGIDIKEMLAGAALMDEETRNTVVKENPAALLALCWYWASEGIGNKDMVVLPYKDSLLLLSRYLQQLVMESLGKEFDLDGNRVNQGLSVYGNKGSTDQHAYIQQLREGVHNFFVTFIEVLRDRPAGHDWELEPGVTCGDYLFGMLQGTRSALYANDRESISVTVQEVTPRAVGALVALYERAVGLYASLVNINAYHQPGVEAGKKAAGEVLALQKRVLTVLNEATCKDPCEPLTIDEIADRCHCPEDIEMIYKIVQHMAANDRAIIAEGSCGSPRSVKVYLGECNVDEDLQAA

SEQ ID NO: 6371 - protein, 335 aa, Alkalilimnicola ehrlichei MLHE-1
MASRKITVLPGDGIGPSIVEATQRVLDRLNCGLEYEYADVGLTALEQGRELIPQEALDAIERNGIVLKGPITTPVGEGFTSVNVTLRKEFQLFANVRPVITIPGTRARYENIDIITVRENTEGMYSGIGQTLSEDGNTAEARSVITRDESLRLVRFAFDMARRLGRQQVTVVHKANILKTTSGLFLNCAREVAEDYPDIEMNEMIVDACCMKLVMNPEQFDVIVTTNLFGDIISDLCAGLVGGLGMAPGANIGEDKALFEAVHGSAPDIAGKNIANPTAMMLAAALMLDHMQLHEPASRMRTAIRNAIFAGDRVTPDLGGHGTTTGFTDAVIERI

SEQ ID NO: 6372 - protein, 317 aa, Zea mays
MSSAYCSSAVAVSTAATVSSATTFNPLFSFHSNFKLFYRITPKPFKLVAKCPTPPLFLHLNTHRHRLFCAAEDEIPPSSEEDEEENEEDEDADETQTTQASVEEGRLYVGNLPYTITASELSQLFGEAGNVIDVQIVYDKVTDRSRGFGFVTMGTIEEAKEAIQMFNSSQIGGRTVKVNFPEVPRGGEREVMRTKIRDSNKSYVDSPHKIYAGNLGWNLTSQGLKDAFGNQPGVLGAKVIYERNSGRSRGFGFVSFESEGELQSALSAMNGVEVEGRALRLNLASERATTESRSSVAGGETEEGSLESSEVVSNIST

SEQ ID NO: 6373 - protein, 340 aa, Synechococcus sp. WH 5701
MTLRVAINGFGRIGRNFMRCWLSRGENTGIEVVGLNDTSDPHTNAHLLEYDSMLGKIRDTEVGYTKDTITVNGKPIKCFSDRNPLNLPWKDWGVDLVIEATGVFIDTEGAGKHIKAGASKVLITAPGKGEGIGTFVVGVNDDQYRHDDYNVISNASCTTNCMAPLVKVLDQAFGIVKGTMTTTHSYTGDQRILDASHRDLRRARAAAINIVPTSTGAAKAVALVYPPMKGKLNGIAMRVPTPNVSVVDLVIEVSRGTTREEVNAVLKQASENGMKGIIKYSDLPLVSSDHAGTDESTIVDADLTLVMGDNMVKVIAWYDNEWGYSQRVVDLAELVAKNWK

SEQ ID NO: 6374 - protein, 280 aa, Chlorella vulgaris
TNWDDMEKIWHHTFYNELRVAPEEHPVLLTEAPLNPKANREKMTQIMFETFNAPAIYVAIQAVLSLYASGRTTGIVLDSGDGVTHTVPIYEGYALPHAILRLDLAGRDLTDWLMKILMERGYSFTTTAEREIVRDIKEKLAYVALDFDQEMATSMSSSALEKNYELPDGQVITIGNERFRCPEVLFNPSMVGMEANGIHDTTFNSIMKCDVDIRKDLYSNIVLSGGTTMFPGIADRMSKEITALAPTAMKIKVVAPPERKYSVWIGGSILASLSTFQQMW

SEQ ID NO: 6375 - protein, 819 aa, Serratia marcescens
MRVLKFGGTSVANAERFLRVADIMESNARQGQVATVLSAPAKITNHLVAMIDKTVAGQDILPNMSDAERIFADLLSGLAQALPGFEYDRLKGVVDQEFAQLKQVLHGVSLLGQCPDSVNAAIICRGEKLSIAIMEGVFRAKGYPVTVINPVEKLLAQGHYLESTVDIAESTLRIAAAAIPADHIVLMAGFTAGNDKGELVVLGRNGSDYSAAVLAACLRADCCEIWTDVDGVYTCDPRTVPDARLLKSMSYQEAMELSYFGAKVLHPRTITPIAQFQIPCLIKNTSNPQAPGTLIGKDSTDADMPVKGITNLNNMAMINVSGPGMKGMVGMAARVFAVMSRAGISVVLITQSSSEYSISFCVPQGELQRARRALEEEFYLELKDGVLDPLDVMERLAIISVVGDGMRTLRGISARFFSALARANINIVAIAQGSSERSISVVVSNDSATTGVRVSHQMLFNTDQVIEVFVIGVGGVGGALIEQIYRQQPWLKQKHIDLRVCGIANSRVMLTNVHGIALDSWRDALAGAQEPFNLGRLIRLVKEYHLLNPVIVDCTSSQAVADQYVDFLADGFHVVTPNKKANTSSMNYYQQLRAAAAGSHRKFLYDTNVGAGLPVIENLQNLLNAGDELVRFSGILSGSLSFIFGKLDEGLSLSAATLQARANGYTEPDPRDDLSGMDVARKLLILAREAGYKLELSDIEVEPVLPPSFDASGDVDTFLARLPELDKEFARNVANAAEQGKVLRYVGLIDEGRCKVRIEAVDGNDPLYKVKNGENALAFYSRYYQPLPLVLRGYGAGNDVTAAGVFADLLRTLSWKLGV

SEQ ID NO: 6376 - protein, 259 aa, Helianthus annuus
ANYGGDKQYGRETRHTGDYENPIHSTGGQYEREVLQTDEYGNPVRRTGQTDEYGNPVRRTDEYGNPVHSTTGGTMGDYGSTGLGQGTGTGGIGTGGYGTTGHHGLGTGVGHTTGGTGTDYTSGGRSTGQTGYQGLGTESEFGGKTGTFQNQPSATPVGGVGLSSGAGAGVGGTGTGTGILHRSGSSSSSSSEDDGQGGRRKKKGVMQKIKEKLPGGHRQEEQYQSQTTTTTTGGGAGYGETHEKKGMMEKIKEKLPGHH

SEQ ID NO: 6377 - protein, 112 aa, Haemophilus influenzae R2846
MKKIEAMIKPFKLDDVRESLSDIGISGMTITEVRGFGRQKGHTELYRGAEYMVDFLPKVKLEVVVPDELVDQCIEAIIETAQTGKIGDGKIFVYNVERAIRIRTGEENEDAI

SEQ ID NO: 6378 - protein, 1214 aa, Dechloromonas aromatica RCB
MRNNGAVSGKEIELRDDQLIISRTDNQGRIVYVNPDFIEISGFSEAELIGQPHNMIRHPDMPPEVFADLWRDLRAGRPWIGLIKNRCKNGDAYWVEAHVSPIWDKDEISGYMSMRRKASRGEIQAAEQTYAAMQKDADNAPIFEHGAASQRKPWRSLHNAFSNAPLAIKFILASLTAAALVLGLTTYFLASHVSRTLDENARNQLKHDVSLLRAAVSARVEGANIEAVEYSKVLAKRVYAAIGGQKNASRQSLEAMIEKMSASPGNPIDIFLHDLRGVGTIFILTPEGFQRRMTTAVDDHGGSPVGSYLTTDHPAYLQLSAGQTFVGPARVFNRQYVTRYTPILDAQGTVVGATVIGIDIGEQLDTLKRQIRSMQVGETGYYYIVDTTPGANFGTLILHPYKEGQGLANFRMDNGKGLIEEMARIGTGEISYRWKNEEAGEVVARKKLVIFETLDEPKWTVAGGTSVDEFTALSDRIVWLVIAGGLAMATTIFVIILILLRKLILNPLNSQVLPTFHAISAGHFDTALDVRGNDEMAQVVQGLESLRNRLAYNNERERTLSAMRELARQEAEGLARARAEFLANMSHEIRTPLNAVIGLAYLLLQNKLGEREMEYVKRIEGAGKLLLAIVNDVLDFSKIDAGKMQLEESSFQLDDLLDNLSSLVRTRAQEKNLVLEYVVAPDATQNLRGDALRLSQILINLVSNAIKFTAEGSITVFIDVASNKDNRIELEFRIQDTGIGMSAEQTDNLFRAFSQADSSVTRKFGGTGLGLAISKRLIEMMGGTIWAHSVPQVGSTFSFRVWLGIDETKPEVLRKVGYHVLVVDDNNLARSVLSSLLKKHGCTVLAAESGEAALAALHASAMTSFDCIMVDLNMPDMDGLALAQHIRSERGQSTKLIMVTGENVHSSRYRHALGDFDAIVEKPVTAARIGEVLAHLEDDAPPRRPATLLPVPAAPLSGLRILVAEDVPTNQLIMRDLLESLGATVEMADNGEQAIEQLAAAGDDIDLILMDIQMPEMDGLEATHRIRTGQKRANIPIIALTAHALEEERQRAAASGMNDFLTKPIEPANLINVIQRWRPTPVRAETTAPAPLQAVKPIQIPDIPGIDVTAGLHRMLNRPALYEKVLRDFHTRFIGEADRIRSALASEETVSAARGAHSLKGTGGMIGANTLAAIAAELEQAITTGSPDISADLERFEKELNRVLDGVKSAFNIA

SEQ ID NO: 6379 - protein, 376 aa, Pythium splendens
MADEDVQALVVDNGSGMCKAGFAGDDAPRAVFPSIVGRPKHLGIMVGMDQKDAYVGDEAQSKRGVLTLKYPIEHGIVTNWDDMEKIWHHTFYNELRVAPEEHPVLLTEAPLNPKANRERMTQIMFETFNVPAMYVNIQAVLSLYASGRTTGCVLDSGDGVSHTVPIYEGYALPHAIVRLDLAGRDLTDYMMKILTERGYSFTTTAEREIVRDIKEKLTYIALDFDQEMKTAAESSGLEKSYELPDGNVIVIGNERFRTPEVLFQPSLIGKEASGIHDCTFQTIMKCDVDIRKDLYCNIVLSGGTTMYPGIGERMTKELTALAPSTMKIKVVAPPERKYSVWIGGSILSSLSTFQQMWISKAEYDESGPSIVHRKCF

SEQ ID NO: 6380 - protein, 257 aa, Helianthus annuus
ANYGGDKQYGRETRHTGDYGNPIHSTGGQYEQEVLQTDEYGNPVRRTGQTDEYGNPVRRTDEYGNPVHSTTGGTMGDYGSTGLGQGTGGIGIGGYGTTGHHGFGTGVGHTTGGTGTDYTSGGRSTGQTGYQGLGTESEFGGKTGTFQNQPSATPVGGVGLSSGTGAGVGGTGTGTAILHRSGSSSSSSSEDDGQGGRRKKKGVMQKIKEKLPGGHRQEEQYQSQTTTTTTGGGAGYGETHEKKGMMEKIKEKLPGHH

SEQ ID NO: 6381 - protein, 883 aa, Salmonella enterica subsp. enterica serovar Paratyphi A str.
MNEQYSALRSNVSMLGKVLGETIKDALGEHILDRVETIRKLSKSSRAGNEANRRELLTTLQNLSNDELLPVARAFSQFLNLANTAEQYHSISPKGEAASNPEVIARTLRKLKNQPDLNDATIKKAVESLSLELVLTAHPTEITRRTLIHKMGEINNCLKQLDNTDIADYERHQVMRRLRQLIAQSWHTDEIRKQRPSPVDEAKWGFAVVENSLWQGVPNYLRELNEQLEENLGYKLPVDFVPVRFTSWMGGDRDGNPNVTADITRHVLLLSRWKATDLFLKDIHVLVSELSMVDATPELLALVGEEGASEPYRYLMKKLRARLMATQSWLEARLKGEELPKPAGLLTQNEQLWEPLYACYQSLQACGMGIIANGELLDTLRRVKCFGVPLVRIDIRQESTRHTEALGEITRYLGIGDYESWSEADKQAFLIRELNSKRPLLPRNWEPSNDTREVLETCKVIAEAPKGSIAAYVISMAKTPSDVLAVHLLLKEAGIGFAMPVAPLFETLDDLNNADDVMTQLLNIDWYRGLIQGKQMVMIGYSDSAKDAGVMAASWAQYQAQDALIKTCEKAGIELTLFHGRGGSIGRGGAPAHAALLSQPPGSLEGGLRVTEQGEMIRFKYGLPEVTVSSLSLYTSAILEANLLPPPEPKDSWRHIMDELSVISCETYRGYVRENKDFVPYFRSATPEQELGKLPLGSRPAKRRPTGGVESLRAIPWIFAWTQNRLMLPAWLGAGTALQKVVEDGKQSELEAMCRDWPFFSTRLGMLEMVFSKADLWLADYYDQRLVAKTLWPLGKELRDLLEEDIKVVLAIANDSHLMADLPWIAESIQLRNVYTDPLNVLQAELLYRSRLTEEQGKSPDPRVEQALMVTIAGVAAGMRNTG

SEQ ID NO: 6382 - protein, 475 aa, Lactobacillus plantarum WCFS1
MKASQRLLVKKSVNPANFNKGGLEKTLSAFSLTMMGVGAIVGSGIFITPGIIAAKYAGPAAMLSFVIAAVVCSLAALCYAEFSSTIPLAGSAYTYVYTVFGEFLAWILGWSLISEYLFAVSSVAVSWSSYFQNLMSGFGLKLPTFLTAAAGTAGVSGAGFNLIAFVVVLAVSLLLVGGLQESTRVNSIMVIVKILVIVLFIGVAIFFVKPANYHPFMPHGVSGLVKGASLAFYAYIGFDAVSTASEEVKNPKRNMPIGIVGSLVVASILYVAMAAVLVGVVHYSKLNVGDPVAYALAVIHQNWAAGIVSLGAVVGMTTVLIVMLYGGTRLLFAISRDGLLPKVFRTVSPHTKVPVKSTWIFGIIASVFAAVIPLDKIAELVNIGTLFAFAMVSIGVVFLRRHETLQQINSSFKVPFYPVLPVVSFLACVYLMLNLQAFTWHMFGIWLVIGIVIYFAYSYRHSRIRAGLRAKESKS

SEQ ID NO: 6383 - protein, 257 aa, Helianthus annuus
ANYGGDKQYGRETRHTGDYENPIHSTGGQYEQEVLQTDEYGNPVRRTGQTDEYGNPVRRTDEYGNPVHSTTGGTMGDYGSTGLGQGTGGIGTGGYGTTGHHGLGTGIGHTTGGTGTDYTSGGRSTGQTGYQGLGTESEFGGKTGTFQNQPSATPVGGVGLSSGAGAGVGGTGTGTGILHRSGSSSSSSSEDDGQGGRRKKKGVMQKIKEKLPGGHRQEEQYQSQTTTTTTGGGAGYGETHEKKGMMEKIKEKLPGHH

SEQ ID NO: 6384 - protein, 227 aa, Prochlorococcus marinus str. MIT 9313
MSTKPLVIAPSILSADFSRLGEDVQAVDQAGADWIHVDVMDGRFVPNITIGPLIVEALRPVTSKPLDVHLMIVEPERYVGDFAKAGADHIYVQVEACPHLHRNLAQIKDLGKKAGAVLNPSTPLDTLEYCLELCDLVLIMSVNPGFGGQSFIDNQVQKIRELRRICDEQGLDPWIEVDGGIKADNAWKVIEAGANAIVSGSGVFNQPDYAEAIRGIRNSKRPEGVVV

SEQ ID NO: 6385 - protein, 92 aa, Prunus persica
MITCGQVSSSLAPCIPYVRGGGAVPPACCNGIRNVNNLARTTPDRQAACNCLKQLSASVPGVNPNNAAALPGKCGVSIPYKISASTNCATVK

SEQ ID NO: 6386 - protein, 253 aa, Helianthus annuus
ANYGGDKQYGRETRHTGDYENPIHSTGGQYEQEVLQTDEYGNPVRRTGQTDEYGNPVRRTDEYGNPVHSTTGGTMGDYGSTGLGQGTGGIGIGGYGTIGHHGLGTGVGHTTGGTGTDYTSGGRSTGQTGYQGLGTESGFGGKTGTFQNQPSATPVGGVGLSSGTGAGVGGTGTGTGILHRSGSSSSSSSEDDGQGGRRKKKGVMQKIKEKLPGGHRQEEQYQSQTTTTTTAGGAAHEKKGMMEKIKEKLPGHH

SEQ ID NO: 6387 - protein, 316 aa, Helicobacter hepaticus ATCC 51449
MAGGAAIDECGECLPMKSLQICKQSDSVLLGAVGGPKWDNEPSHNRPEKALLTLRKELGLFANIRPATLLPQLSKASPLKDEILNRGIDFIIVRELIGGVYFGEHKLEEINGEKVASDAMTYSASQIESIAKVAFNIARNRKKEIVCVDKANVLSSSRLWREVVDKVAQNYKDVHLSYMYVDNAAMQICRAPSQFDVILTENMFGDILSDEASIITGTIGVIPSASLSNGTLGMYEPIHGSAPDIAGQDKANPIGTILSAAMMLELSFGLTKESEVIQKAVQNALDKGYRTGDMMSEGMQLVGCEQMGDVILESVI

SEQ ID NO: 6388 - protein, 482 aa, Pseudomonas fluorescens
MLDVPLLIGGQSRPARDGRTLERRNPVTGAVVSRVAAATLDDADAAVAAAQAAFPAWAALAPNERRSRLLKAAEQLQARSGEFIAAAGETGAMANWYGFNVRLAANMLREAASMTTQINGEVIPSDVPGSFAMALRQPCGVVLGIAPWNAPVILATRAIAMPLACGNTVVLKASELSPAVHRLIGQVLQDAGLGDGVVNVISNAPVDAAAIVERLIANPAVRRVNFTGSTHVGRIVGELAARHLKPALLELGGKAPLLVLDDADLDAAVAAAAFGAYFNQGQICMSTERLIVDAKVADAFVAKLAAKVATLRAGDPSAADSVLGSLVDVSAGTRIKALIDDALSKGARLVVGGQLDGSILQPTLLDGVTESMRLYREESFGPVAVLLRGSGDEELLRLANDSEFGLSAAIFSRDTGRALALAQRVESGICHINGPTVHDEAQMPFGGVKSSGYGSFGGKASIEHFTQLRWVTLQHGPRHYPI

SEQ ID NO: 6389 - protein, 918 aa, Salmonella enterica subsp. enterica serovar Typhi str. CT18
MTNYSLRARMMILILAPTVLIGLLLSIFFVVHRYNDLQRQLEDAGASIIEPLAVSSEYGMNLQNRESIGQLISVLHRRHSDIVRAISVYDDHNRLFVTSNFHLDPSQMQLPAGAPFPRRLSVDRHGDIMILRTPIISESYSPDESAIADAKNTKNMLGYVALELDLKSVRLQQYKEIFISSVMMLFCIGIALIFGWRLMRDVTGPIRNMVNTVDRIRRGQLDSRVEGFMLGELDMLKNGINSMAMSLAAYHEEMQHNIDQATSDLRETLEQMEIQNVELDLAKKRAQEAARIKSEFLANMSHELRTPLNGVIGFTRLTLKTELNPTQRDHLNTIERSANNLLAIINDVLDFSKLEAGKLILESIPFPLRNTLDEVVTLLAHSSHDKGLELTLNIKNDVPENVIGDPLRLQQVITNLVGNAIKFTESGNIDILVEKRALSNTKVQIEVQIRDTGIGIPERDQSRLFQAFRQADASISRRHGGTGLGLVITQKLVNEMGGDISFHSQPNRGSTFWFHINLDLNPNVIIDGPSTACLAGKRLAYIEPNATAAQCTLDLLSDTPVEVIYSPTFSALPLAHYDIMILSVPVTFREPLTMQHERLAKAASMTDFLLLALPCHAQINAEKLKQGGAAACLLKPLTSTRLLPALTEYCQLNHHPEPLLMDTSKITMTVMAVDDNPANLKLIGALLEDKVQHVELCDSGHQAVDRAKQMQFDLILMDIQMPDMDGIRACELIHQLPHQQQTPVIAVTAHAMAGQKEKLLSAGMNDYLAKPIEEEKLHNLLLRYKPGANVAARLMAPEPAEFIFNPNATLDWQLALRQAAGKPDLARDMLQMLIDFLPEVRNKIEEQLVGENPNGLVDLVHKLHGSCGYSGVPRMKNLCQLIEQQLRSGVHEEELEPEFLELLDEMDNVAREAKKILG

SEQ ID NO: 6390 - protein, 349 aa, Hordeum vulgare subsp. vulgare
MSLSTLILALLAMSSAVAAPRALAARQLAGDEAITVDAAMVSRHEKWMAEHGRTYANEEEKARRLEVFRANAKLIDSFNSAEDSTHRLATNRFADLTDEEFRAARTGLRRPPAAAAGAGSGAGGFRYENFSLADAAGSMDWRAMGAVTGVKDQGSCGCCWAFSAVAAVEGLTKIRTGRLVSLSEQQLVDCDVYGDDEGCAGGLMDNAFEYMINRGGLTTESSYPYRGTDGSCRRSASAASIRGYEDVPANNEAALMAAVAHQPVSVAINGGDSVFRFYDSGVLGGSGCGTELNHAITAAGYGTASDGTKYWIMKNSWGGSWGEGGYVRIRRGVRGEGVCGLAQLASYPV

SEQ ID NO: 6391 - protein, 133 aa, Griffithsia japonica
MPFPLVKSKIVKKRTKKFKRHQSDTAIRVSESWRRPKGIDSRVRRKWRGKVLMPNIGYGSNKKTRHLLPNGFYKMLISNVDELDVLMMHNRTYCVEIAHSVSSRKRIAILDRAAQFDLKVTNAGAKVKVEETQ

SEQ ID NO: 6392 - protein, 389 aa, Arabidopsis thaliana
MTKISDLPRDLAEEVLSRVPVTYLRAIRFTCKKWNTLTKRRSFTKKLIGQEKAEAKVKEFHAIMTLNSRLHLMSVNLDGIHKDENVESSIKQKGKLISLTVADPDRIVISQVYHCDGLLLCITNEINSRLVVWNPYSGQTRWIEPRTSYREWDIYALGYESKNNAKRSYKILRYLDAYEDMGDMSVEPRTRVCEFEIYSLDTNSWKVIEVTTDWDLCFLHRGVTLKGNTYWFAREKIPPPPRERVIEDIPLEKFGSRLPLPFRPCVDDTITLSSVREEKLAVLYQRWDITWTGIWISNKIEPNAVSWSKLFFPMGRIRPLEAASGTFFVDEENKLVVLFDKGESILNPTRNTAYIVGEDGYIKPVDLGESVHKYCFPLACSYVPSSVQI

SEQ ID NO: 6393 - protein, 490 aa, Novosphingobium aromaticivorans
MGVTIPPLERSDFLTGQPLVDGTEICAGSTYAVTNPATGKTLANVVKLGAAQTRRAIESNSRALIDWRKRPAQERARLLHDWLALVRLHRHDLGLLMTAEQGKPLAEALGEVDYAASFIQWFAEEARRVYGEVIPASADRRIVVIRQPVGVAGAITPWNFPAAMITRKVAPALAAGCTVTLKPSELTPMTAFALAKLAREAGVPPGVFNVVCGDAPEIGSVLTSHPDVTKFTFTGSTAIGKLLTAQCAATLKRVSMELGGNAPLLVFDDADLDQAVEGAIASKFRNTGQTCVCANRILVQSGIHDRFVEALAARVSAFRVGNGLEGATDQGPLITASALAKVQGHVADAVAQGAQLVTGGKRHEAGELFFQPTVLTGARPAMRLADEETFGPVAPVFRFETEAEALALANATHSGLAAYAFTRDIDRAWRVSEGLETGMVGLNSGIVSTETAPFGGIKESGLGREGSRHGIEEFLEMKTISVGVRPESPV

SEQ ID NO: 6394 - protein, 1211 aa, delta proteobacterium MLMS-1
MAHYLKEELYQEIRQSPELFDFIQEAALDGLWFWDLEQPEHEWMSPKFWQILGYDPSTKQHLSSEWQDIINQDDLKATTENLEKHLANPDHPFDQVVRYRHLKGHTVWVRCRGLAIRDKQGRPIRMLGAHNDITEYKQQQLALEEAQATLRQSEDKYRTLVENLPVLIYRSEVDAPWAMLHASQNAEQLCGYSSDEFLSGQLTWVDVIVAEDLPLVEAAVQHAIKAREKYTVEYRIRHQKGHVIWVSETGSAQDYDQNGHPAYLDGVIADITDRVQAQKEISAQEAKFRGLFELSPVGIAMNDFATGEFLEFNAAVNEPAGYTPEEFKQLSYFDVTPMEYMEDEKRQLESMEKIGRYGPFEKEYIRKDGSRYPVLLNGFKTTTPEGKAVIWSIIQDISEIKKAQEAAEAANRSKSEFLANMSHEIRTPMNAIIGLGQLALKSQPPPPPRLHDYLEKITGSAATLLTLINDILDFSKIEAGKLAIDQVPFDLSEILNQLDHLMAGQAAEKGLELLFAVDSGAPRQLVGDPHRLGQVLINLTSNAIKFTQQGEVTISFEVADPTADPLILRVAVRDTGIGMSPEQIERIFQPFTQADGATTRKHGGTGLGLSIAGRLVKLLGGEIRVESTPGAGSTFSFTCLLGRHEPHKALCPLPPVDLRGLRVLVVDDNATARQVLRQTLASFSFRVEEADSGRRALSLLARAAEDGRPYELVILDWVMPEFDGLECAAAIAADPLIEPQPLLILLTAHGREEIREEAAGRGLRHFLTKPVLPSTLYDTIMECFGQEGISRESDRGRRSDELELTAREKLAGSRLLVAEDNALNQQVAAELLAAVGIHCDLANNGREAVEQYRRQTYDGVLMDIQMPEMDGYQATGAIRALPAGQQVPIIAMTAHALAGEREKCLAAGMDEHIPKPVEANLLYRTLLRLLPPRTATATGNETATGTTTRAETKAGSLIATEAEPPAASPAPNTANTPTPYPSSSIKAEAAVDNTSWPPLPGIDSRPALLRLNRNFGLYSRLLHEFHEQYGQGDGFQQMAATLAAGDLPRLVLLAHSLKGAATTIGAEKLAELAADLERQAKARADRQTLEELLAAIKQQAEPTLAALDKLPGGNPMTAASAPATEDVPKAPKTSGTGSPDSPASVPPDLIALKDNLAQLLAARDLGALEQFTALRRALGSQESDPRWLELERMVKKLDFANAAALLAKLKF

SEQ ID NO: 6395 - protein, 585 aa, Saccharomyces cerevisiae
MLHRHGSKQKNFENIAGKVVHDLAGLQLLSNDVQKSAVQSGHQGSNNMRDTSSQGMANKYSVPKKGLPADLSYQLIHNELTLDGNPHLNLASFVNTFTTDQARKLIDENLTKNLADNDEYPQLIELTQRCISMLAQLWHANPDEEPIGCATTGSSEAIMLGGLAMKKRWEHRMKNAGKDASKPNIIMSSACQVALEKFTRYFEVECRLVPVSHRSHHMLDPESLWDYVDENTIGCFVILGTTYTGHLENVEKVADVLSQIEAKHPDWSNTDIPIHADGASGGFIIPFGFEKEHMKAYGMERWGFNHPRVVSMNTSGHKFGLTTPGLGWVLWRDESLLADELRFKLKYLGGVEETFGLNFSRPGFQVVHQYFNFVSLGHSGYRTQFQNSLFVARAFSFELLNSSKLPGCFEIVSSIHESIENDSAPKSVKDYWEHPQAYKPGVPLVAFKLSKKFHEEYPEVPQAILSSLLRGRGWIIPNYPLPKATDGSDEKEVLRVVFRSEMKLDLAQLLIVDIESILTKLIHSYEKVCHHIELASEQTPERKSSFIYEMLLALASPQDDIPTPDEIEKKNKLKETTTRNYRGTC

SEQ ID NO: 6396 - protein, 361 aa, Chiloschista pusilla
SDSGKDAGRLSAAWQLYKAQEDLVKVAKEYGVKLTMFHGRGGTVGRGGGPTHLAILSQPPDTILGSLRVTVQGEVIEQSFGEENLCFRTLQRYTVATLEHGMQIPISPKPEWRALMDEMAIVATEEYRSFVFKEPRFVEYFRLATPELEYGRMNIGSRPSKRKPSGGIESLRAIPWIFAWTQTRFHLPVWLGFGAAFKHVIEKDPKNLLLLREMHNNWPFFRVTIDLIEMVFSKGNSGIAALYDKLLVSPELLPFGEQLRANYEETKDLLLQVAGHKSLLEGDPYLQRLRLRVPYITTLNVYQAFTLTDQRTKHRLQPHVSNQSKLNSNNTAAELVKLNPASEYAPGLEDTLILTMKGIAA

SEQ ID NO: 6397 - protein, 256 aa, Azoarcus sp. EbN1
MPVMLEISNHVAYVTLNRPEAMNSLDPESTADLTEIWARVRTDPDIRVAVLTGAGEKAFCTGTDMKKAPPPTECMAATYLRDGQPILPHMKMWKPIIAAINGYAVGGGLEMALACDLRIASSNAKFGLTEVKVASLAGLNGTQVLPRAMPQAVAMKMLLTGEMISADEALRYGLVSDVVEPSGLADLAKSYAEKIASAAPLSVQAAKQAAVLGQDMPLEHGILFSHLLWGVLRDTEDRKEGFKAFGERRAPEFRGA

SEQ ID NO: 6398 - protein, 366 aa, Bacillus caldotenax
MGNYRIAVLPGDGIGKEVTSGAVEVLKAVGIRFGHEFTFEYGLIGGAAIDEAGTPLPEETVRLCRESDAVLLGAVGGPKWDDNPPHLRPEKGLLAIRKQLDLYANLRPVVCYDSLVSRSPLKPDLVQGVDFVIVRELTGGIYFGQPSAVVENGEEKAVDTLLYKKEEIERIVRMAFELARGRRKKVTSVDKANVLSSSRLWREVAEEVANEFPDVTLEHMLVDMRMQLIRAPKQFDVIVTENMFGDILSDEASMLSGSLGMLPSASLSASGPSLYEPVHGSAPDIAGMNKANPIAAILSAAMMLRLSFGLTAEAGGRARVWQALALGSGSRLGQRRPHLSTNEMVEEIKAAVLDYTAIAQIMTVYA

SEQ ID NO: 6399 - protein, 332 aa, Saccharomyces cerevisiae
MVRVAINGFGRIGRLVMRIALSRPNVEVVALNDPFITNDYAAYMFKYDSTHGRYAGEVSHDDKHIIVDGKKIATYQERDPANLPWGSSNVDIAIDSTGVFKELDTAQKHIDAGAKKVVITAPSSTAPMFVMGVNEEKYTSDLKIVSNASCTTNCLAPLAKVINDAFGIEEGLMTTVHSLTATQKTVDGPSHKDWRGGRTASGNIIPSSTGAAKAVGKVLPELQGKLTGMAFRVPTVDVSVVDLTVKLNKETTYDEIKKVVKAAAEGKLKGVLGYTEDAVVSSDFLGGSHSSIFDASAGIQLSPKFVKLVSWYDNEYGYSTRVVDLVEHVAKA

SEQ ID NO: 6400 - protein, 286 aa, Streptococcus pyogenes MGAS10394
MSMTELIDGKALAQKMQQELAAKVNNLKQKKGIVPGLAVILVGDDPASQVYVRNKERAALTVGFKSETVRLSEFICQEELIAVIERYNADNTIHGILVQLPLPNHINDKKIILAIDPKKDVDGFHPMNTGHLWSGRPLMVPCTPSGIMELLREYNVNLEGKHAVIIGRSNIVGKPMAQLLLDKNATVTLTHSRTRQLEEVCRCADVLIVAIGQGHFITKQYIKEGAIVIDVGMNRDDNGKLIGDVAFDEVAEVAAKITPVPGGVGPMTIAMLLEQTYQSALRSTHK

SEQ ID NO: 6401 - protein, 454 aa, Arabidopsis thaliana
MVFAKSQSPPNNSTVQIKPPIRWRKGQLIGRGAFGTVYMGMNLDSGELLAVKQVLITSNCASKEKTQAHIQELEEEVKLLKNLSHPNIVRYLGTVREDETLNILLEFVPGGSISSLLEKFGAFPESVVRTYTNQLLLGLEYLHNHAIMHRDIKGANILVDNQGCIKLADFGASKQVAELATISGAKSMKGTPYWMAPEVILQTGHSFSADIWSVGCTVIEMVTGKAPWSQQYKEIAAIFHIGTTKSHPPIPDNISSDANDFLLKCLQQEPNLRPTASELLKHPFVTGKQKESASKDLTSFMDNSCSPLPSELTNITSYQTSTSDDVGDICNLGSLTCTLAFPEKSIQNNSLCLKSNNGYDDDDDNDMCLIDDENFLTYNGETGPSLDNNTDAKKSCDTMSEISDILKCKFDENSGNGETETKVSMEVDHPSYSEDENELTESKIKAFLDDKLQS

SEQ ID NO: 6402 - protein, 564 aa, Francisella tularensis subsp. tularensis SCHU S4
MMTKKYLIVGGVAAGASAAARLRRLDESAEIIMFEKGPHVSFSNCGLPYHLGGYIEPAEKLILMTPEKFDKQYNIDARTNSEVIAIDGINKLVTVINHHSGDKYSESYDKLILAVGAKPIVPPFKGLETIEHFILRNVVDVKKIHQAVFDKQKPVKDITVIGAGFIGVEVAENLKEKGFNVTIIEMANQIMRPFDYEMAKFLEKELLDNGVNLLLGEKVVGFESDKVLLESGKEIKTDLAILAIGVAPDTNFLKEVGIDLAKTGHILVNDNYQTSDENIYTAGDAILVKNALTSQDFNLPLAGPANKQGRLIADHINGYKVVNKGYIGSSIIQIFNYTGAATGLNEAWIKFHNLDIDYEVAYTAPFDRVSIMPNAVNVFTKILFEKNTGKLLGAQVIGRGIVDKRADVFTTAIKAGMTVEDLQDLELCYAPPYSTGKDIVNHTGYVANNLLKGDFKQVAFTKVEELLAQNAQIIDVREIGETRRGMLTNAKNIPLSEIRTRLAEIDKNQPVYVHCQTGQRSYNVVLMLQQHGYDAYNIAGGYIMISHYYDTIAHMTGKKISFTR

SEQ ID NO: 6403 - protein, 368 aa, Streptococcus pyogenes MGAS10394
MHYLHRRKGSVMVSVMWFRRDLRIDVQKALAHAIASQSPTLCVFQFNKEQLNLLHSRNQSSFITSVLAFRKLLKCEGIDLYLMYGDLMTCFEQLLTQLKDWTDVYFNYDESGYGRLRDQKAAQFFKKNGIAVHTYQDHYLHGSQEIINQSGQPYKVFTPYYRIWQNYPKETPIKVELSQGRWLNLETPDDVLRTVESIKDEKYQDVATFDEASKQLNRFIQDQLAAYHANRDFPAQLGTSRLSPFLRIGAIGIRTVYHAVRQAPNSLGQATFLKELAWRDFYNMVYVAYPDQKTQPIQKAFSQIEWVNNPDWFQLWKEGKTGYPIVDAAMLQLQKTGWMHNRLRMIVASFLTKDLLCDWRLGEQYFQQ

SEQ ID NO: 6404 - protein, 197 aa, Oryza sativa
LACLFFLSNLHSLTLGMASGSEAEKSPEVVLEWPKKDKKRLLHAVYRVGDLDRTIKCYTECFGMKLLRKRDVPEEKYTNAFLGFGPEDTNFALELTYNYGVDKYDIGAGFGHFAIATEDVYKLAEKIKSSCCCKITREPGPVKGGSTVIAFAQDPDGYMFELIQRGPTPEPLCQVMLRVGDLDRSIKFYEKVFSFVA

SEQ ID NO: 6405 - protein, 738 aa, Dechloromonas aromatica RCB
MGVFHSKAEMSRRVGWFGIVILIAMLAAVAVAVKAMRDQEIDDWRQQMGNMSLILAEHTSQTILSAYVVLDSVTERVRQAKVTDQASFRARLATPEMFQMLRDQIRGLPQVDVASIVAANGDNINFSRAYPIPAINLAERDYFKAHLSNPGLGDFISQPVRNKGNGKWTFYISRRLNDAKGEFLGLVLVGISVEVFTNFYQRVAHNLGEGASISLFRDDLTLLTRWPHRDEVIGTVNRSGTAYDVIAVLKQDEGVVLRDTPRFSTGKRELRVAAVRKIDRYPLVLAIVATDDLFLAGWRRSAWLIAGVSLVGAMSLLIVLLILVRNLRQREADMAEMEQLKLAAEAANLAKSSFLATMSHEIRTPMNGILGMAQLLLMSGSAEDERHEYVRTILNSGQTLLSLLNDILDISKVEAGKLELKPAVFAPQGVIEEVVGLFFAQAEAKGLSITAQWHGPAVQRYRADQIRLRQILTNLLSNAVKFTKEGAIRIEAREIEREDGWARLEFAVIDSGIGIAPEKRALLFKPFSQLDSSATRQYGGTGLGLSIVRSLAELMGGEAGVESQPGQGARFWVRIRAECLHENEESRSIERPVVAPAPVEPAISGHVLVVEDNPTNRKVIEAMLRKLHIRSDSVDNGRAAVDTLEQGMRPDLVLMDVQMPVMDGIQATMLIRQREAETGLPRLPIVALTAGAFDEDRQHCLVAGMDDFMSKPVNLNDLEKMLGKWMGLRGAPATVRPS

SEQ ID NO: 6406 - protein, 468 aa, Prochlorococcus marinus str. MIT 9313
MLRVAVVGGGPSGSCAAEVLAKAGIQTWLFERKLDNAKPCGGAIPLCMVDEFDLPESIIDRKVRNMRMISPSNREVDITLDKVYSPDDKSEYIGMCRREVMDAFMRDRAASLGTNLINGLVTKIDTGSNRQGPYTITYSDYSTGKSTGEAKSLEVDLIIGADGANSRVATAMDAGDYNVAIAFQERIKLPNEEMAYYEDLAEMYVGTDVSPDFYGWVFPKYDHVAVGTGTMQKNQTLIKSLQKGVRERAKKRLVHGEVIKVEAHPIPEHPRPRRVVGRMALVGDAAGYVTKSSGEGIYFAAKSGRMCAEQIVESSRSGELIPSEADLKKYLKKWDRKYGSTYIVLSILQAIFYSNDTAREAFVAMCDDMDVQRLTFDSYLYKKVVAMNPWQQIKLTLLTVDALARGIFRNQTSYKPVPSAVRSDEEVNAMLEIKTITGGIKVDNNKDASKQNLASEQEERDPAVSNKS

SEQ ID NO: 6407 - protein, 195 aa, Triticum aestivum
  misc_feature (92)..(92): Xaa can be any naturally occurring amino acid
RVLKPRVPPPSQAIYLHISAWPPTVRALSATSVGPFQGVKSTAGLPVSRRSNGDSLGSVSNGGRIRCMQVWPIEGIKKFETLYYLPPLSTEXLLKQVDYLIRSKWVPCLEFSKVGFIFREHNASPWYYDGRYWTMWKLPMFGCTDATQVINEVEEVKKEYPDAYVRIIGFDNMRQVQCVSFIAFKPPGCEESGKA

SEQ ID NO: 6408 - protein, 494 aa, Arabidopsis thaliana
MVLTKTATNDESVCTMFGSRYVRTTLPKYEIGENSIPKDAAYQIIKDELMLDGNPRLNLASFVTTWMEPECDKLIMDSINKNYVDMDEYPVTTELQNRCVNIIARLFNAPLEESETAVGVGTVGSSEAIMLAGLAFKRKWQNKRKAEGKPYDKPNIVTGANVQVCWEKFARYFEVELKEVNLSEGYYVMDPDKAAEMVDENTICVAAILGSTLNGEFEDVKRLNDLLVKKNEETGWNTPIHVDAASGGFIAPFIYPELEWDFRLPLVKSINVSGHKYGLVYAGIGWVVWRAAEDLPEELIFHINYLGADQPTFTLNFSKGSSQIIAQYYQLIRLGFEGYKNVMENCIENMVVLKEGIEKTERFNIVSKDQGVPVVAFSLKDHSFHNEFEISEMLRRFGWIVPAYTMPADVQHITVLRVVIREDFSRTLAERLVADISKVLHELDTLPSKISKKMGIEGIAENVKEKKMEKEILMEVIVGWRKFVKERKKMNGVC

SEQ ID NO: 6409 - protein, 195 aa, Oryza sativa
  misc_feature (120)..(120): Xaa can be any naturally occurring amino acid
MSDPYLPHQRRPAPAATTARVFLLLLGCARRSRAPASRFEGDFWRREAGRRKRGEEKRTLLPAMATTAAAYGCPAAAAAAPFAASVSRRRAPLSCVSLASSSSRRRTAEFPGLRVSCLRXTFDLNLPRRSLLVQFTCNACGERTKRLINRVAYERGTIFLQCAGCQVYHKFVDNLGLVVEYDLREENGMNTDTET

SEQ ID NO: 6410 - protein, 211 aa, Triticum aestivum
  misc_feature (127)..(127): Xaa can be any naturally occurring amino acid
  misc_feature (174)..(174): Xaa can be any naturally occurring amino acid
MARLSLAACAVVFHLCLLISSSASLRWLSDKSAAVTTAGGVRTRSAYHFQPAKNWQNDPNGPMYHNGLYHFFYQYNPDGVTWGNGNLSWGHSVSVDLVNWFALDAALQPSRSFDANGCWSGSATILXPDGSPVMLYTGINARGDQVQTVAFPKNASKPLLVEGVRPKNNPVIPXVPAEIKRGELPGTPPRARARRPNGLGGMGRGRARETR

SEQ ID NO: 6411 - protein, 281 aa, Leuconostoc mesenteroides subsp. mesenteroides ATCC 8293
MTEILDGKAVAKTINEQTKARVAKQKRPVTLAVIYDPSNDGSQLYVGMKSRQAAKLGIVTRDIPISTDATTESVIQLVEELNDDESITGILVQSPLAKGIKERQIFSAVAPHKDADGLGATVQGMLFGDSLENYTVAATPQGVMTLLAQYNISLKGKNAVVVGRSQLFGRPMFALLTNADATVTLAHRYTEPTTLKALLKNADIVVVGVGIPNFIQGEDLKKGATVIDVGMNVVDGKATGDVNFSSAQGIAGYITPVPGGVGPMTIATLLENTVTLAEQHQ

SEQ ID NO: 6412 - protein, 617 aa, Oryza sativa
MDSDYGVPRELSEVQKKRALYQPELPPCLQGTTVRVEYGDAAIAADPAGAHVISHAFPHTYGQPLAHFLRKTANVPDATVISEHPVVRVGVVFCGRQSPGGHNVIWGLHEAIKAHNPNSKLIGFLGGSDGLLAQKTLEITDEVLSSYKNQGGYDMLGRTKDQIRTTEQVNGAMASCQALKLDALVIIGGVTSNTDAAQLAETFAEAKCATKVVGVPVTLNGDLKNQFVETTVGFDTICKVNSQLISNVCTDALSAEKYYYFIRMMGRKASHVALECALQSHPNMVILGEEVAASKLTIFDITKQICDAVQARAEKDKYHGVVLIPEGLVESIPELYALLQEIHGLHGKGVSMENISSQLSPWASALFEFLPPFIRKQLLLHPESDDSAQLSQIETEKLLAQLVEDEMNRRMKEGTYKGKKFNAICHFFGYQARGSLPSKFDCDYAYVLGHVCYHILAAGLNGYMATVTNLKSPANKWRCGAAPISSMMTVKRWSRGPAATQIGKPAVHMATVDLKGKAFELLRNNSTSFLIDDIYRNPGPLQFEGAGADSKPISLCVEDQDYMGRIKKLQEYLEKVKSIVKPGCSQDVLKAALSAMSSVTETLAIMTSSSTGQGTPL

SEQ ID NO: 6413 - protein, 1002 aa, Synechococcus sp. WH 5701
MRQPLSAPSAVLAQDPQGVPTAPAPRVTRLLGERLELVEDLWQTVLLSECPPDQAERLLRLKRLSDPLEAADGTVDTTAAIVQLIREMDLSEAIAAARAFSLYFQLVNILEQHIEEDSYLASLQEASTPTSPDPFAPPLASQTDPATFRELFTRLRGLNVPPAQIENLLRELDIRLVFTAHPTEIVRHTVRHKQRRVAALIHRLQQDNPTELQDERSLRLQLEEEIRLWWRTDELHQFKPSVLDEVDYALHYFQQVLFDAMPLLRQRIINALAGSYPDVEAPRDAFCTFGSWVGSDRDGNPSVTPDITWRTACYQRQLMIERYITAVQGLRDQLSISMQWSQVSAPLLESLEMDRLRFPEIYEERAARYRLEPYRLKLSYIVERLRLTHQRNQQLAEAGWESPCENAGPAVLSTGTGPMAAAPPELHYGSVNELRQDLELLRDSLETTGLSCEPLQTLLSQVHIFAFCLASLDIRQESTRHSDALDELTRYLQLPIPYGEMEEEQRVEWLLQELQTRRPMLPPAARWSPATEETFAVFRMLQRLQQEFGPRICRSYIISMAHTVSDLLEVLLLAKEAGLVDPKAVQTQLLVVPLFETVEDLQRAPAVMQRLFSEPFYRTLLASSAEADKPLQEVMLGYSDSNKDSGFLSSNWEIHKAQIALQRLACEHDVALCIFHGRGGSVGRGGGPAYQAILAQPSGTLNGRIKITEQGEVLASKYSLPELALYNLETVTTAVLQNSLVSTNVDDTPTWNDLMGRLAARSRVHYRRLVHENPDLVAFFQQVTPIEEISKLQISSRPARRKSGAKDLSSLRAIPWVFGWTQSRFLLPSWFGVGAALQEELDDDPGQLELLRLLYQRWPFFRMLISKVEMTLSKVDLDLAHHYVQALGRPSHREAFEEIFQVIAAEFELTRDLVLKISGHARLLDGDPALQLSVDLRNQTIVPLGYLQVALLRRLRDQNRQPPMSEASSGDGQDGRTYSRSELLRGALLTINGIAAGMRNTG

SEQ ID NO: 6414 - protein, 66 aa, Flaveria trinervia
AYTLKRTRDPKYHVTLRPHISKEYAEPSKPADELIHLNPTSEYAPGLEDTLILTMKGIAAGMQNTG

SEQ ID NO: 6415 - protein, 827 aa, Haemophilus influenzae R2846
MNLSRRDFMKANAAMAAATAAGLTIPVKNVVAAESEIKWDKGVCRFCGTGCAVLVGTKDGRVVASQGDPDAEVNRGLNCIKGYFLPKIMYGKDRLTQPLLRMTNGKFDKNGDFAPVSWDFAFKTMAEKFKEAFKKNGQNAVGMFSSGQSTIWEGYAKNKLWKAGFRSNNVDPNARHCMASAAVAFMRTFGMDEPMGCYDDIEQADAFVLWGSNMAEMHPILWSRITDRRISNPDVRVTVLSTYEHRSFELADHGLIFTPQTDLAIMNYIINYLIQNNAINWDFVNKHTKFKRGETNIGYGLRPEHPLEKDTNYKTAGKMHDSSFEELKQLVSEYTVEKVSKMSGLDKVQLETLAKLYADPTKKVVSYWTMGFNQHTRGVWVNQLIYNIHLLTGKISIPGCGPFSLTGQPSACGTAREVGSFPHRLPADLVVTNPKHREIAERIWKLPKGTVSEKVGLHTIAQDRAMNDGKMNVLWQMCNNNMQAGPNINQERLPGWRKEGNFVIVSDPYPTVSALSADLILPTAMWVEKEGAYGNAERRTQFWRQQVKAPGEAKSDLWQLMEFAKYFTTDEMWTEDLLAQMPEYRGKTLYEVLFKNGQVDKFPLSELAEGQLNDESEYFGYYVHKGLFEEYAEFGRGHGHDLAPFDMYHKARGLRWPVVEGKETLWRYREGYDPYVKEGEGVAFYGYPDKKAIILAVPYEPPAESPDNEYDLWLSTGRVLEHWHTGTMTRRVPELHRAFPNNLVWMHPLDAQARGLRHGDKIKISSRRGEMISYLDTRGRNKPPRGLVFTTFFDAGQLANSLTLDATDPISKETDFKKCAVKVEKAA

SEQ ID NO: 6416 - protein, 332 aa, Campylobacter jejuni RM1221
MAVKVAINGFGRIGRCVARIILERNDIELVAINDTTDIELTKYLFKYDTVHGEFKGSVDSEGDDLVVNDKKIKVFKSRNVKDLDFAKHGAQIVLECTGAHLTMAKSQEFIDMGVQKVIMSAPAKDDTPTYVLGVNSELYKGESIISNASCTTNCLGPVCRVLQDNFGIEKGLMTTIHAYTNGQSIIDAKAKDKRRSRAAAQNIIPTSTGAAKAMKLVMPELNGKLHGQSMRVPVIDVSSVDLTAQLSRKVSKDEINEAFRKAAATNLKGILMVDDDERVSSDFITCSYGAIVVSDLTQVIADDFIKVIAWYDNEWGYSSRLVDMAVYIANKA

SEQ ID NO: 6417 - protein, 375 aa, Methanosarcina barkeri str. fusaro
MRSIVEEALARSAQEGRAGQSEYSNLDYSNVVDSDVDAELEEILRSLKTTIKVIGCGGGGSNSIQRMMGEGIQGADLVALNTDAQHLLHIRSGKKILIGKKKTRGLGAGSLPQIGEDAAIESIDEINSVVEGSDMVFITAGLGGGTGTGSAPIVAEAARDAGALTIAVVTLPFSVEGHVRRTNAEAGLERLRDVADTVIVVPNDKLIEVVPRLPLQAAFKVSDEVLMRAVKGITELITKPGLVNLDFADIRTVMQNGGVAMIGLGESDGENKAVESVQKALRSPLLDVDISGATSALVNVVGGPDMTISEAESVVQEVYNRIDANARLIWGAQVDPDLEQTVRTMIVVTGVTSAQIYGHGNDKDIAFKYGIDFVE

SEQ ID NO: 6418 - protein, 540 aa, Leuconostoc mesenteroides subsp. mesenteroides ATCC 8293
MANAHKAQGEKILKFSELGLSQDILDAITTHGYVEATPIQEKTIPLTLAGRDVIGQAQTGTGKTAAFGLPILEHIDLNNKNIQALIVSPTRELAIQTAEELKKLGRDKRVDVQVVFGGADIRRQIQNLKSHPQILVGTPGRLLDHINRKTVKIDNVRTLVLDEADEMLNMGFLDDIEAIISKTPAERQTLLFSATMPPAIKRIGVKFMTNPEHIQIEAKELTTDLVDQYFVRMRENEKFDTMTRIFDVQAPKLAIVFGRTKRRVEELSRGLEARGYHAAGLHGDLTQQMRSRVLAQFKSHEINILVATDVAARGLDVKDVSHVYNFDIPQDPESYVHRIGRTGRAGAKGVSVTFVAPNEMDYLRAVEDLTKKRMTPLEPASLKDARIGKINNAAGEVAKLIDTTEVSEIQSQVDALTAKYSAEQLAAAVLSSVADLEKQNTPVEITRERPLPRRKGGNGGSRGGSRNGGGRRNGGGGGYRGNRERRGNGDTRGNDRRRGSGAASSERRFGDYKRRDGRSTESRRNSSGGSRREFTVREKD

SEQ ID NO: 6419 - protein, 369 aa, Brassica napus
  misc_feature (158)..(158): Xaa can be any naturally occurring amino acid
MSPRSLTLLKNLARNSNASSSCIQTRSVTYMPRPGDGSPRAVTLIPGDGIGPLVTNAVEQVMEAMHAPIYFEKYDVHGEMSRVPAEVMESIRKNKVCLKGGLKTPVGGGVSSLNVQLRKELDLFASLVNCFNLPGLPTRHENVDIVVIRENTEGEYAXLEHEVVPGVVESLKVITKFCSERIAKYAFEYAYLNNRKKVTAVHKANIMKLADGLFLESCREVAKKYPGITYNEIIVDNCCMQLVAKPEQFDVMVTPNLYGNLVANTAAGIAGGTGVMPGGNVGADHAVFEQGASAGNVGKDKIVRENKANPVALLLSSAMMLRHLQFPSFADRLETAVKKVISEGKCRTKDLGGQSTTQQVVDAVIANLE

SEQ ID NO: 6420 - protein, 154 aa, Griffithsia japonica
HEARLHPRLYTPHTHHTSFLSRANQPPPHTMSGKVKKTSQSRSSKAGLQFPVGRIDRFLRKGGYADRVGAGAPVYMAAVMEYLTAEVLELAGNAARDNKKSRIIPRHIQLAVRNDEELNKLLGGVTIASGGVLPNIHQVLMPRKKSKGDASQEV

SEQ ID NO: 6421 - protein, 37 aa, Flaveria trinervia
PADEYIKLNPKSEYAPGLEDTLILTMKGIAAGMQNTG

SEQ ID NO: 6422 - protein, 495 aa, Mycobacterium tuberculosis CDC1551
MAGRRRMKSVEQSIADTDEPTTRLRKDLTWWDLVVFGVSVVIGAGIFTVTASTAGDITGPAIWISFLIAAATCALAALCYAEFASTLPVAGSAYTFSYATFGEFLAWVIGWNLVLELAMGAAVVAKGWSSYLGTVFGFGNGTGHLGSLQLDWGALVIVTLVATLIALGTKLSSRFSAVVTAIKVSVVVLVVVVGAFYIRAANYSPFIPEPEVQHHGGGLDQSVFSLLTGAQGSHYGWYGVLAGASIVFFAFIGFDIVATMAEETKRPQRDVPRGILASLGVVTLLYVAVSVVLSGMVPYTQLRTVPGRGPANLATAFQANGVYWASGIISVGALAGLTTVVMVLMLGQCRVLFAMARDGLVPRQLAKTGSRGTPVRVTVLVAVLVATTASVFPITKLEEMVNVGTLFAFILVSAGVVVLRRTRPDLQRGFTAPWVPLLPIAAVCACLWLMLNLTALTWIRFGIWLVAGTAIYVGYGRRHSAQGLRQARESATRRC

SEQ ID NO: 6423 - protein, 1005 aa, Dechloromonas aromatica RCB
MGLRQKFLLPLFLISLLVGGLLHFVWIPASIRSAEETHLRLIERHLDSVVEGLIPLLLSDQLANIYENLGALEKRNGEWHQVKLSNVKGQQLYPLKGANAGASGPVPSPAERQLRRPIRYIDIDLGQLEVTIDLRPFIADNLAHHRDLAALLLAMLLGLSGVMAALLELAVIRPTHRLAIAAHELAQGHFDTPLPHTSHDEIGNLVDSFASMRSELQVSRSELLLEIDERKKAANALQEHQEQLEQIVSERTRELVIAKDAAESASRTKSAFLANMSHEIRTPMNAIVGLTHLLRRDTTTPKDAKHLDKINLAAQHLLSIINDILDFSKIEADKLIIDEADFEFEQIFQQLNTLITPQAMDKGLEVVDRIDPEIPAVVHGDAMRLGQILANFASNAVKFTEHGSIVFRARLLEQIGNLLRIRFEITDTGIGLAPEQRDRLFLPFEQADTSTTRKFGGTGLGLAISKRLTELMNGRIGVDSTPGQGSTFWCELPLQCAHSQHERPRRNRLPETINILLIDDDPNALEAISHMLKAYDARITTADSGEAGLNCVHSALAEGRHFDLVLTDWAMPGMDGIETSRRIREILPQAPRIVLVTAYGREWPMERLREAGIVYQINKPVIPSELESALLEALLGEHTAESDHIKHHAETNLAPLSGHRVLLAEDNPINQEVALELLKDVGLRVDIAEDGRQAVELAAANDYDLILMDIQMPNMDGIEATHAIRHLPQRTATPILAMTANAFNEDRDACLGAGMNDHIAKPVDPQKLYEALLRWIRIPLPAQIAPVEPERTQNDEQFRRELAHVEGLDAEAGLHVVSGKVPLYRRLLALYITVHGSDAGKIIEALDNAQLAEARNIAHSLKGASANIGALNVQKIAAAIELPLKQQQINAPAVARPLLPYLQTTLETLTAQLEALLHKPGNGAPPPNFVADFDPAPLIETLRQQLTTAEMTSQRYFVEHRSDFEQSLGRETTGKLALLIGSFEFEKALSLLPAVDSQASPSSPP

SEQ ID NO: 6424 - protein, 140 aa, Brassica napus
MAASVMLSSVTLKPAGFTVEKMSARGLPTLTRAPSSFKIVASGVKKIKTAKPFGVNGSMDLRDGLDASGRKGKGYGVYKFVDKYGANVDGYSPIYNEDEWSASGDVYKGGVTGLAIWAVTLAGILAGGALLVYNTSALAQ

SEQ ID NO: 6425 - protein, 335 aa, Borrelia burgdorferi
MKLAINGFGRIGRNVFKIAFERGIDIVAINDLTDPKTLAHLLKYDSTFGVYNKKVESRDGAIVVDGREIKIIAERDPKNLPWAKLGIDVVIESTGVFSSATSDKGGYLDHVNHAGAKKVILTVPAKDEIKTIVLGVNDHDINSDLKAVSNASCTTNCLAPLAKVLHESFGIEQGLMTTVHAYTNDQRILDLPHSDLRRARAAALSIIPTSTGAPKAVGLVLPELKGKLNGTSMRVPVPTGSIVDLTVQLKKKDVTKEEINSVLRKASETPELKGILGYTEDPIVSSDIKGNSHPSIVDGLETMVLENGFAKILSWYDNEFGYSTRVVDLAQKLVK

SEQ ID NO: 6426 - protein, 1066 aa, Dechloromonas aromatica RCB
MNLIKGRRRVRLTADEKTVPRIHLIGTLLTVLVLTLALGGFFSWQSLSEQRAAFARVELAATQQLEARLQAEMDGVTNFIEFTRSRTEDVLRRSLTEQVDTAYQIVESIYAQEARRRPPAEVKRLIIEALRPARFYEGRGYYFIDDMQGQFILLPTAPQLEGKTILDNRDDTGHYIMRGLIEAARQPRDEGFSRYRWYRPDDATQMADKLAYVRHFAPYDWLIGTGDYTYKWEALQQKEALARLRALHFGQSGRFGVLDGSGRNLLSPSDRALDGMLIHDMAAPEKAALEKLLAAGERGGGFVRYQWLNPENGQLVNKTALVNVVKPWNWFVVATTFDDDFQSLLGEELRKHEAGHDQRLLNLLIAIVAALGLGLLSSLLFSRWSKRLFADYHQQRLAQEAALRVQADELKVLSRAIEQSPVSIVITDTGGCIRYVNPKFEQVTGYTSQQVLGQNPRILSSGEKSPDEYRELWRTIKSGQTWQGEFHNRRQDGSLFWERASISPIIDEQGQILHFLAVKEDISEHKQIEEALRVSEYKMATILDSVEAYIYIKGTDYCYQYANRRVCELFAREMNGIVGHQDTEFFDPATCANLRRNDRRVIEQGERVVEEEVNRTVDGQITSAFLSIKIPLRDQDGQIYALCGISTDITVRKQAEAELEHYRQHLETLVQSRTVELARAKDAAEAANRAKSSFLANMSHEIRTPMNAIMGLTHLLQKDVLDSRARERLGKIGESANHLLNVINDILDLSKIEAGRLALEIREFSPEAVLRQTISMLDERAAAQGLRLTSHLASDVPALLCGDAVRIGQALLNFVGNAIKFSERGEIALRARVDRRDGEQVMLRFEVQDQGIGMDAGQQARLFQSFSQADDSTTRKYGGTGLGLAINRHLARMMGGDVGVDSALGVGSTFWMTVCLAVATRQPEALAADAAAVAPESQIARLYGGRRVLLVEDEPINQEVAAELLSLAGLVVEVAVNGAEAVERVRHGTYALVLMDMQMPVMGGLEATRLIRQLPGKAVLPVLAMTANAFDEDRQACLDAGMNDHIGKPVDPDLLYASLLRWLAHG

SEQ ID NO: 6427 - protein, 107 aa, Francisella tularensis subsp. tularensis SCHU S4
MSKCIDISDSQFESEVVNSDIPVLLDFWAPWCGPCKMLAPILDQVTEHYGDKIKVCKINIDDNEETAMKFGVRGVPTLMVFKDGENKETKVGVVQKTQLISIVDKYL

SEQ ID NO: 6428 - protein, 475 aa, Prochloron didemni
MSKLILFWHRRDLRISDNMGLAAARKQSSKIVGLFCLDPNILNSNEVAPARVTYMLGCLQELKESYSKIGSQLLIVRGEPIEAIPQLAVALQVTGVFWHKDGEPYARERDGKVEQELLKQGIAVTNYWDQLLHPPEDILTQSGKPYTVYTPFWKNWSQKPKLEVAEKLDRIQGLTAEEIKIAQETGVVSLPTGKDLGYYWDGELILTPGETAAREQLEEFSERAIAQYQEQRNFPAVEGTSLLSPALRFGVIGIRTVWQATLEATKNSYSEEVRANIETWQKELAWREFYQHALYHFPQLTVEPYRQQFKDFPWDNNPEHFQAWCEGKTGYPMVDAAMRQLNETGWMHNRCRMIVASFLTKDLIINWQWGEQYFMQKLCDGDLASNNGGWQWSASCGMDPKPLRIFNPASQAKKFDPEGEYIRQWLPELSSIDTEYLVRGKIPDDERERCDYPQPIVDHNLRQREFKRRYKELSP

SEQ ID NO: 6429 - protein, 505 aa, Dactylis glomerata
MYRAASGLGALKKHGADTQMLNMAIRSASTSVAQRSSGGFLSWLTGARSSALPPPDFALAGVTIPDPLPDHVEPAKTKITTLSNGVKIASETSPGSSCSVGVYVNCGSVYEAPETLGATQLLNKLAFTTTRNRSQLRVVREIGAIGGNAKASSTRELTSYSYGALKTYMPEMVEVLVDCVRNPALLDWEVKEEITKLKAELAKASINPKSFLLDALHSAGYSGALANPLIASEASISRLNTDVLEDFLAENYTSSRIVLAASGVDHDELVSIAEPLLSDIPNATGTAKPKSVYVGGEYRRAADSSNTEIALAFELPGGWLKEKDYVTASVLQALLGGGGLFSWGRPGKGLHSRLNHLVNEFDQIKSISAFKDVHSTTGIFGIHTSTDAAFAPKAIDLAARELTSLATPGQVDQTQLDRAKALAKSAILASLESKASATEDMGRQVLAFGERKPVEQLLKIVDGVSLKDVSALAEKIISSPLTMASHGDVLNVPAYETVRGKFSSK

SEQ ID NO: 6430 - protein, 478 aa, Arabidopsis thaliana
MHKMMVVEKERSIEERLLQLKNQNDDSECRITACVILSTFIAVCGSFSFGVSLGYTSGAEIGIMKDLDLSIAQFSAFASLSTLGAAIGALFSGKMAIILGRRKTMWVSDLLCIIGWFSIAFAKDVMWLNFGRISSGIGLGLISYVVPVYIAEISPKHVRGTFTFTNQLLQNSGLAMVYFSGNFLNWRILALLGALPCFIQVIGLFFVPESPRWLAKVGSDKELENSLLRLRGGNADISREASDIEVMTKMVENDSKSSFCDLFQRKYRYTLVVGIGLMLIQQFSGSSAVLSYASTILRKAGFSVTIGSTLLGLFMIPKAMIGVILVDKWGRRPLLLTSVSGMCITSMLIGVAFTLQKMQLLPELTPVFTFICVTLYIGTYAIGLGGLPWVIMSEIFPMNIKVTAGSIVTLVSWSSSSIVTYAFNFLLEWSTQGTFYVFGAVGGLALLFIWLLVPETKGLSLEEIQASLIREPDRINQS

SEQ ID NO: 6431 - protein, 378 aa, Aspergillus fumigatus
MAEFVRAEVLGTKFEYTTRYVNPQPIGMGSFGLVCSAFDQITQQPVALKKIMKPFDSSSLAKRTYREIRLLKYLRHENLICMRDIFISPLEDIYIATELLGTDLGRLLSIKPLDSKFSQYFIYQILRGLKYIHSANVIHRDLKPTNILINENCDLKICDFGLARLQEPQMTGYVATRYYRAQEIMLTWQRYGVQVDVWSAGCILAEMLRRKPLFPGKDHVHQFHLITNILGNPPDAVIEKITSKNTVNFVKSLPSREPRDLSTVVPKDTDFDAIDLLKKMLVIDPDTRISAQDALRYPYLAPYHDPTDEPVASGPFDWSFDSADFPKETWKIMIYSEVLDYLNVDNPADPAPFDPSTPFDPSALEREFSEFLSDSGQI

SEQ ID NO: 6432 - protein, 153 aa, Brassica napus
  misc_feature (135)..(135): Xaa can be any naturally occurring amino acid
MATAFSLRAAAPATAPRAVSRSTSAARVVPMASALAGRGRLVARAAVTAKADVPSSTSDGHEVLLFEALREALMEEMELDPTVCVFGEDVGHYGGSYKVTKGLADTFGDLRVLDTPIAENSFTGMGVGAGMKGLXPVVEGMNMGFLLLAYNQI

SEQ ID NO: 6433 - protein, 110 aa, Triticum aestivum
  misc_feature (49)..(49): Xaa can be any naturally occurring amino acid
  misc_feature (70)..(70): Xaa can be any naturally occurring amino acid
  misc_feature (81)..(81): Xaa can be any naturally occurring amino acid
  misc_feature (86)..(87): Xaa can be any naturally occurring amino acid
  misc_feature (90)..(90): Xaa can be any naturally occurring amino acid
  misc_feature (92)..(92): Xaa can be any naturally occurring amino acid
LRRHFSKKRSVDVRRINPKVPKEEAVAISGRLLQILSDHGPLTVGNTWXNHAKDAGIAGLNSKTHMKILXLKWMTGRNVLXADCVXXGNXKXFLYPPNNSSNARTSSSAN

SEQ ID NO: 6434 - protein, 140 aa, Triticum aestivum
MSASVMASMVLTKPSPSPLLERAKLRGLRPSARPSLLIVASKKAKKVQTAQPYGPGGGVEFKEGVDASGRVAKGKGVYQFADKYGANVDGYSPIYTPEEWSPSGDVYVGGKTGLFLWAITLAGILLGGALLVYNTSALAS

SEQ ID NO: 6435 - protein, 261 aa, Magnetospirillum magnetotacticum MS-1
MSETILVARSGDVTTITLNRPERINAFNVEMHGALAAAIAHVAEDGTRCLVLTGAGKGFCAGQDLSDRVSKPGDPPPDLGASLDARYNPLIRSLKALSMPVVAAVNGIAAGAGANLALACDIVVAAKSAAFVQSFCKVGLIPDSGGTWTLPRLVGAARATALMMLGDKVSAEQAVQWGMIWAFVEDDQLLTTVLAMAAQLAAQPTQGLALMKKALARSGANTLDAQLDLERDLQAEAGRTQDYSEGVRAFMEKRAPKFLGR

SEQ ID NO: 6436 - protein, 460 aa, Schizosaccharomyces pombe
ILRTIEALRGAKNATVHLYNACSPLFREVVFRNSKQETLDLAIKGSKIVTAATKNALESKETNWGFEYSPETFSDTEPDFALEVCEAVKGMWKPSAAQPIIFNLPATVEMSTPNTYADLIEYFSTNISEREKVCVSLHPHNDRGTAVAAAELGQLAGGDRIEGCLFGNGERTGNVDLVTLAFNLYTQGVSPNLDFSKLDEIIRITEDCNKINVHPRHPYAGNLVFTAFSGSHQDAISKGLKAYDERKAVDPVWKVPYLPLDPHDVNSEYAAIIRVNSQSGKGGVAYLLKTNCGLDLPRALQVEFGSIVKDYSDTKGKELSIGEISDLFYTTYYLEFPGRFSVNDYTLSSNGPQSKCIKCVVDIKGEKKDTPSRVVIEGVGNGPLSALVDALRRQFNISFDIGQYSEHAIGSGNGVKAASYVEIIFNNTSFWGVGIDADVTSAGLKAVMSGVSRASRAFAK

SEQ ID NO: 6437 - protein, 130 aa, Brassica napus
ASGGTGSGAAPVVAQISKDAGYLTVGVVTYPFSFEGRKRSLQALEAIEKLQKNVDTLIVIPNDRLLDIADEQTPLQDAFLLADDVLRQGVQGISDIITIPGLVNVDFADVKAVMKDSGTAMLGVGVSSSK

SEQ ID NO: 6438 - protein, 124 aa, Griffithsia japonica
MSAKVKKASQSRSSKAGLQFPVGRIDRFLRKGGYADRVGAGAPVYMAAVMEYLTAEVLELAGNAARDNKKSRIIPRHIQLAVRNDEELNKLLGGVTIASGGVLPNIHQVLMPRKKTKGDASQEV

SEQ ID NO: 6439 - protein, 342 aa, Methanosarcina barkeri str. fusaro
MSKTAAVIKGDGVGPELVDAMLKVTEAAGTDVEFVMCEAGAGWWEKHGGNSLIPNETWDVLDSSDACFKGPTTTPGGIGSPRSVAVSIRSKYNLYANVRPIKTFPNSSAPLGDVEMICVREGTEGLYIGEEIQLTDDVSIAIRKITRTASHKIASYAFEEAKRRGYDAVVPIHKSNILKLTCGSFLEEVEKVGQNYPDIEIWPYHIDNIAQQLIKNPQIFNKKVLLSTNLFMDVISEECSALVGSIGLIYSANIGDSFAMFEPAHGSAPKYAGQDKVNPVATVLAGAWMLDYLDEKEKSEAIFKATKRVISEGKYVTYDLGGNAKLSQMAGEIAKYTAEILK

SEQ ID NO: 6440 - protein, 421 aa, Streptomyces violaceoruber
MTRRVVITGVGVRAPGGSGTKEFWDLLTAGRTATRPISFFDASPFRSRIAGEIDFDAVAEGFSPREVRRMDRATQFAVACTRDALADSGLDTGALDPSRIGVALGSAVASATSLENEYLVMSDSGREWLVDPAHLSPMMFDYLSPGVMPAEVAWAAGAEGPVTMVSDGCTSGLDSVGYAVQGTREGSADVVVAGAADTPVSPIVVACFDAIKATTPRNDDPAHASRPFDGTRNGFVLAEGAAMFVLEEYEAAQRRGAHIYAEVGGYATRSQAYHMTGLKKDGREMAESIRAALDEARLDRTAVDYVNAHGSGTKQNDRHETAAFKRSLGEHAYAVPVSSIKSMGGHSLGAIGSIEIAASVLAIEHNVVPPTANLHTPDPECDLDYVPLTAREQRVDTVLTVGSGFGGFQSAMVLHRPEEAA

SEQ ID NO: 6441 - protein, 442 aa, Methanosarcina barkeri str. fusaro
MKVYESYEDLPKLKLPYGNDVYISDSTIRDGSQMPGIVLSREHKLQIYEYLHEIGIEKLEAFVFNKRDRDAVDLMFDIGYEFPEITGWARASRADIDKILEVDGLEETGILMSVSDTHIFSKMKLSGREEAEEKYLDALQYAVDHGLRTRAHLEDMTRADNYGFVFPLVEKIIEIDPDCIIRVCDTVGYGMPFVSVDEPYGIPRIVQYLKKEIGAKNIETHIHDDYGFGSASSIAGFWHGANWTSVTFLGIGERAGNSEMEKILLFLRDRVEGFEKYNLEPVTRFARFMEKELGLRVPRNKAVVGKNIFAHESGIHAAGVLKNPFNYEPYPPELVGGKRLLLIGDSSGLEVIRYKIQETLNDLLDIETIVEKDDPRLLKIQKEIQKLYDNEERISCISDEELLDYVEKYFLYQPICSPGRTGRGKLNNEEKMADSEDEKLKE

SEQ ID NO: 6442 - protein, 597 aa, Bifidobacterium longum NCC2705
MSTMFLRTLREDPADADVDSAKLLQRAGYIRKAAPGIWTWLPLGLRVLNKIEAIIREEINGIGAQEVHFPALLPREPYEATHRWEEYGDNIFRLKDRHEADYLLAPTHEEMFTLLVKDMYSSYKDLPVTLYQIQTKYRDEFRPRAGLIRGREFVMKDAYSFTIDEEGMRKAYYDERGAYERIFQRLDLKYVPVFAMSGPMGGSASEEFLAPMPIGEDTFALAPSGKAWNVEALSTPELPEIDASTTPAASKEATPDAKTIDNMIERANADHPRTDGREWQASDILKNVVITVKHPEDEEHDEPWREVIVVGVPGDRTVDMKRLEAQFAPAELEEATEEDLKQHPELVPGYIGPMVLGPQAEAAGVKNPVRYLIDAHVVKGSAWFTGADENEVDYYNLVYGRDFKVDGVVEAVEVRHGDMSPDGSGPLSFERGVEIGQVFQLGLKYSKALDLKVLDQNGKAVPVWMGCYGIGVSRVLACIAETHHDEAGLAWPSVIAPAAVHVVATGKDAVAFEGAEKLVAELEAKGLEVIYDDRKKVSPGVKFKDAELIGVPLVAVVGRDYVNDGTIELRDRNGENKVAVPAAEAADALAERFAALS

SEQ ID NO: 6443 - protein, 604 aa, Photobacterium profundum SS9
MTYNKEPQNMQAAISQRVEQIRQWLVNNQLDALLIPHEDEYLGEYIPAHNERLLWATGFTGSAGMAVITRDKAAVFVDGRYVVQVRKQVPGDVFEYRHLIEEPPVQWAQDNLAAGSKVAIDARLHSGAWLTRTTESLAGALELVCIEQNPIETLWHDRPAATLSNAKLMGLDFVGQSSAGKRSEIAAKLTNLKAEAALLTQVDSIAWLLNVRGSDVPSLPVLLSTAIIHADESVDFYIDPARLPEEFASHVGDGVRIHQPDALKAGLQALSGKQVLIDPATSNAWAGQTLGAAGANLIEAADPCLLPKAQKNPTEMAGMKACHIRDGVAVSKYLAWVDAQVAAGNLLDEGTLSDKLWQFRIQDTSCTDVSFDTISAAGSNAAMCHYNHLNQPEPSVLEMDNVYLVDSGGQYPDGTTDITRTIAIGQPGDEVKHTFTLVLKGHIALASAHFPKGTTGSQLDALARQHLWANGFDYDHGTGHGVGHFLSVHEGPQRIAKNYNPTALLPGMVLSNEPGYYRADAFGIRIENLELIVEVETQGDMTVMGFESLTRAPIDRRLIDLSLLNDVELAWLNNYHHTVFTVISPSLEGDDLAWLAQATAPLKR

SEQ ID NO: 6444 - protein, 651 aa, Triticum aestivum
  misc_feature (405)..(405): Xaa can be any naturally occurring amino acid
MILLGSSSPSTPAIIAPRPRRLRHRTTTPSLPHSRSPHRHLVLASSSPAPTPRPLARAHRPGAVATAAEMVFSVTKKETKPYEGQKPGTSGLRKKVTVFQQPHYLANFVQSTFNALPADQVKGATIVVSGDGRYFSKDAVQIIAKMAAANGVRRVWVGQDSLLSTPAVSAIIRERISADGAKATGAFILTASHNPGGPTEDFGIKYNMGNGGPAPESVTDKIFSNTKTITEYLIAEDLPNVDISVIGVTSFTGPEGPFDVDVFDSATDYIKLMKTIFDFESIKKLLASPKFSFCFDGLHGVAGAYAKRMFVDELGASESSLLNCVPKEDFGGGHPDPNLTYAKELVDRMGLGKTSNVEPPEFGAAADGDADRNMVLGKRFFVTPSDSVAIIAANAVQSIPYFASXGLKGVARSMPTSAALDVVAKNLNLKFFEVPTGWKFFGNLMDAGMCSVCGEESFGTGSDHIREKDGIWAVLAWLSILAYKNKDNLGGDKLVTVEDIVLQHWATYGRHYYTRYDYENVDAEAAKELMANLVKMQSSLSDVNKSIKEIQPTVADVVSADEFEYKDPVDGSVSKHQGIRYLFGDGSRLVFRLSGTGSVGATIRIYIEQYEKDSSKTGRASSDALSPLVDVALKFSKIKEYTGRSAPTVIT

SEQ ID NO: 6445 - protein, 540 aa, Prochlorococcus marinus str. MIT 9211
MSLIDHPNMNLPDYSPNNSSLQWERFSELLWHNEELGLWVDISRMNVNEHELKELKPIFQKAFEAMNSLEKGSMANIDEERMVGHYWLRNPDLAPSRDISKLIANQISQIEQFTTSILSGDIRSDAGELFTDVLWIGIGGSGLGPLLLIESLQELNKGLKFHFLDNVDPIGIDKKLELLQSKLSTTLFVVVSKSGGTPEPQIAMDQARHVVETNGKNWPTRSVAITMCNSLLDNKAKQENWLKTFDLPDWVGGRTSITGAVGLLPLGLIDSDLKSFLLGASKMDELTRNNELLDNPAALMAMAWYSSGSAKGLKDMVVLPYRDSLEVFSRYLQQLVMESLGKKNDREGNIVFQGLSVYGNKGSTDQHAYVQQLRDGINNFFVTFIEVLTNNESPCLNNKLPGDYLSGFMQGTRLALSDSNRQSLTITLKTFDPLSLGALIALFERTVGLYAELININAYHQPGVEAGKKAAADILNLQLQIEDILSDYSNYSIEQISTRLSSSNSESIYFILRNLVFNNKYSAKGSWKNPSSLIFKREKL

SEQ ID NO: 6446 - protein, 493 aa, Burkholderia pseudomallei K96243
MRSIAARSSHAGAGLEQEGVMDLEEGVRQLYPYAAEFGALHEFPERGMPRERLLEELRSMAVREDRKWESGRCSGTMYCGDHEHYAFLNEAYGLFSHVNALQRDLCPSMNRMESEIVAMTVALLHGEAVQRHDGAHRACGALSLGGTESILNATLAYREKARAERGIERPRMIWPASAHPAFRKAAHLFGFDVTVAPIDPVTMQVDADFVRDAVDANTVMLVGSACNYPYGTIDPIGALSAIAVEKDVWLHVDGCLGGWMLPWGEALGYPDIPAFDFRLPGVTSISADTHKFGYGPKGGSVLAWRDASFRRHQYFLMTDWVGGVYGSPGLTGSRSGGLIAATWAALRSLGREGYLARAKAIFETAFDMQAAVRAIPELRVLGKPTFCFAFTSDAFDIYHVNDFMRQRGWRFNGLQHPDALHMCVTGPQTQPGVAERFRQDLGEAVEHARHRAHARPQSSGVYGGDAAGLDLRDDARARAFFTQVLDLFTDCPL

SEQ ID NO: 6447 - protein, 346 aa, Oryza sativa
DQLFCRGVAITQENSLLDNTARIEGWLARFPMFDWVGGRTSEMSAVGLLPAALQGIDIKEMLVGAAQMDEETRNTEIKENPAALLALCWYWASDGIGSKDMVVLPYKDSLLLLSRYLQQLVMESLGKEFDLDGNRVNQGLTVYGNKGSTDQHAYIQQLREGVHNFFVTFIEVLRDRPPGHEWELEPSVTCGDYLFGMLQGTRSALYANDRESISVTVQEVTPRAVGALVALYERAVGIYASLVNINAYHQPGVEAGKKAAGEVLALQKRVLTVLNEASCKDPAEPLTLDQIAERCHCPEDIEMIYKIIQHMAANDRALIAEGSCGSPRSIKVYLGECNVDEDMLAA

SEQ ID NO: 6448 - protein, 128 aa, Lilium longiflorum
MISSANNKGAGTSRRKLRSEKAALQFSVSRVEYSLKKGRYCRRLGATAPVYLAAVLENLVAEVLEMAANVTEKHKRIVIKPRHIMLAVRNDVEVNKLFHGVTISASGVVPKTRKELDRRKRRSTSQAD

SEQ ID NO: 6449 - protein, 557 aa, Prochlorococcus marinus str. MIT 9211
MNIVFDPIADGLAAIRNGECVVVVDDESRENEGDLICAAQFATPQQVNFMATEARGLICLAMDGERLDQLDLPLMVDRNTDSNQTAFTISIDAGPEYGVSTGISAEDRARTIQVAINPKTKPTNLRRPGHIFPLKANKGGVLKRAGHTEAAVDLSLLSGLSPAGVICEIQNSDGSMARLPELQQYARSWGLKIISIADLIRFRLENERFVYRKAITKLPSIFGEFKAIGYKNELDGTEHIALIKGSEAEFKEPVLVRMHSECLTGDAFGSLRCDCRPQLEAALSRISKEGEGIVVYLRQEGRGIGLINKLKAYSLQDGGLDTVEANEKLGFPADLRNYGVGAQILSDLGVHRLKLLTNNPRKIAGLGGYGLKVESREPLVICPTDHNAAYLAVKRTKLGHYISEEDINPEKYLGKSIIAFWDGDYDIEDISMLEKGAESAATSRKINLTSQNSSRVNALLDRPLFIWRVIFEENKYVSEENIQIKSIYSFVKEISEWANTKRVGILFSKTLEQAIHPSHNFKNIKLKLKDLNQIDINNAIEENKGNQTISLAISWIA

SEQ ID NO: 6450 - protein, 126 aa, Triticum aestivum
  misc_feature (55)..(55): Xaa can be any naturally occurring amino acid
  misc_feature (72)..(72): Xaa can be any naturally occurring amino acid
  misc_feature (114)..(114): Xaa can be any naturally occurring amino acid
  misc_feature (116)..(116): Xaa can be any naturally occurring amino acid
  misc_feature (119)..(119): Xaa can be any naturally occurring amino acid
MAGTGRSMLLSLLLFAVTLSLLEMYRGWFAASELKTIAGGFVSSLLFLLLLTFIXGNYQEASGVRTGWGAVXVVAQLVAPIVAGTVQRVCIKTCFLFSAGFFTSRQLSGMILAXSXSKXRRTDQTF

SEQ ID NO: 6451 - protein, 507 aa, Burkholderia pseudomallei K96243
MRVACFVDFMQPHPGNIRTHIGVPTDVGTAKENVMDLEEGIRRLYPYAEEFGVMRGFPEQGTPRDELLAQLRSMAEREDRNWESGHSSGAMYSGDRDHHAWLNEAYSVFSHVNALRRDMCPSMNRMESEIVGMTVAMLHGDAVAAHHPGQRACGMITLGGTESILGATLAYREKARAERGIERPRMIWPASAHPVFRKAAHLFGFDVTVAPIDPVTMQVDADFVRDAVDANTVMLVGSACNYPYGTIDPIGALSAIAVEKDVWLHVDGCLGGWMLPWGEALGYPDIPAFDFRLPGVTSISADTHKFGYGPKGGSVLAWRDASFRRHQYFLMTDWVGGVYGSPGLTGSRSGGLIAATWAALRGLGREGYLARAKAIFETAFDMQAAVRAIPELRVLGKPTFCFAFTSDAFDIYHVNDFMRQRGWRLNGLRRPDALQMCVTGPQTQPGVAEQFRCDLGAAADYARAHAQERPKTSGVYASDAAGVDLSDDARTRAFFTQVIDLFTDCPL

SEQ ID NO: 6452 - protein, 285 aa, Magnetococcus sp. MC-1
MAHVIDGKAIAQSVREELRMEVERLKLNHQLTPGLAVVLVGADPASQVYVRNKKRACETAGIASFSHELAATTSQAELLALIEQLNQDDAVHGILVQLPLPKHIDEQKVLEAISPSKDADGFHPYNVGRLVTGDPTFQPCTPWGVMEMLKVSGVDPKGKHAVVIGRSNIVGKPVALMLLAAHATVTICHSRTPDLAETVKRADIVVAAVGRANMVPGSWIKKGAVVIDVGINRGEDGKLCGDVDYASCFEHASAITPVPGGVGPMTIAMLLKNTVEGAKRAHNIA

SEQ ID NO: 6453 - protein, 360 aa, Pseudomonas aeruginosa
MSKQILVLPGDGIGPEIMAEAVKVLELANDRFQLGFELAEDVIGGAAIDKHGVPLADQTLQRARQADAVLLGAVGGPKWDRIERDIRPERGLLKFRSQLGLFANLRPAILYPQLAAASSLKPEVVAGLDILIVRELTGGIYFGQPREQRVLENGERQAYDTLPYSESEIRRIARVGFDMARVRNNRLCSVDKANVLASSQLWREVVEEVAKDYPDVELSHMYVDNAAMQLVRAPKQFDVMVTDNMFGDILSDEASMLTGSIGMLPSASLDANNKGMYEPCHGSAPDIAGQGIANPLATILSVSMMLRYSFSQATAADAIEQAVSKVLDQGLRTGDIWSEGCRKVGTREMGDAVVAALKNL

SEQ ID NO: 6454 - protein, 415 aa, Emericella nidulans
MAEFIRSDILGTTFETTSRYANLQPVGLGTAGVVCSAYDLISEQVVAIKKMMKPFHSTSVAKRTYREVKLLRHLRHDNLINMSDIFISPLEDVYLVTELLGTDLHRLLNGKPLESKFAQYFTYQILRGLKYIHSAGVIHRDLKPGNLLINENCDLKICDFGLARVQEPQMTGYVSTRYYRAPEIMLTWQRYGSKVDLWSVGCILAEMLLGRPLFPGTDHINQFWLITDLLGNPPDEVIDRITTNNTRRVVKSMAKRNPRPLKEILPAAEDAALNLLDNLLVFDPDRRISAEQGLMHPWMAPYHDPTDEPVATEQFDWSFNDADLPLDTWKIMIYSEVLDFFQLTTNAEPSGEQSQNQSQSQSQAFTSSQDLQLASMLNLGEGELLPDFAATIDPNKFGSVDYLMDGQSLDPNSFS

SEQ ID NO: 6455 - protein, 493 aa, Mesorhizobium sp. BNC1
MSTSARNRFPGVSFDPKALRSNLFIGGAWKEGATGNRIPVYDPSTGTVIAEVADAEVEDVMGAIDAAHEALPGWAATPPRHRSEVLRRCFELMIENRDMLAELISLENGKTLADAQGEVAYAAEFFRWFAEETVRLNGELYKAPSGANRILVQHQPIGVSVLVTPWNFPAAMATRKIGPALAAGCTVILKPATETPLTAYALAALCAEAGVPDGVVNVYTSSRSGKTVSAMLHDPRVRKLSFTGSTEVGRILLREAADKVISCSMELGGNAPFIVFDDADLSAALDGAMVAKMRNGGEACTAANRFYVQSGIADAFAKGLAERMKALAIGKGYETGSQCGPLINKDAVERISGLVEEAQSRGARVLAGGKALNREGYYFPPTVIDNVDPASAIMSEEIFGPVAPIIRFDSEDEVLSAANGTEYGLMAYVYTQDLSKGLRVSEKIESGMVGLNRGLVSDPAAPFGGVKQSGLGREGSHHGILEFTETKYIATNW

SEQ ID NO: 6456 - protein, 507 aa, Glycine max
MPSNDSDSPMKIVHGDAGYILEDVPHFTDYIPNLPTYPNPLRSNPAYSVVKQYFVHMDDTVPQKVVVHKDSPRGIHFRRAGPRQKVYFKSDEVHACIVTCGGLCPGLNTVIREIVCGLSYMYGVNKVLGIDGGYRGFYSKNTITLTPKVVNDIHKRGGTILGTSRGGHDTGKIVDSIQDRGINQVYIIGGDGTQRGATVIYEEVRRRGLKVAIAGIPKTIDNDIPVIDKSFGFDTAVEEAQRAINAAHVEAESIENGIGVVKLMGRYSGFIAMYATLASRDVDCCLIPESPFYLEGKGGLFEFIQKRLKENGHMVIVIAEGAGQDLLTESMQAMDQKDASGNKLLQDVGLWISHKIKDHFARKDKMPINLKYIDPTYMIRAIPSNASDNVYCTLLAQSAVHGAMAGYTGFTVGLVNGRQTYIPFIRINERQNKVVITDRMWARLLSSTNQPSFLSPKDLEEAKKAESPTQLLEENNCNDVGDAEKEQPPKDEQESGNHTDNGIKTQN

SEQ ID NO: 6457 - protein, 448 aa, Lactobacillus plantarum WCFS1
MSQATDYVQHVYQVIEHRDPNQTEFLEAINDVFKTITPVLEQHPEYIEANILERLTEPERIIQFRVPWLDDAGHARVNRGFRVQFNSAIGPYKGGLRLHPSVNLSIVKFLGFEQIFKNALTGLPIGGGKGGSDFDPKGKSDNEIMRFCQSFMTELSKYIGLDTDVPAGDIGVGGREIGFLYGQYKRLRGADRGVLTGKGLNYGGSLARTEATGYGLAYYTNEMLKANQLSFPGQRVAISGAGNVAIYAIQKVEELGGKVITCSDSNGYVIDENGIDFKIVKQIKEVERGRIKDYADRVASASYYEGSVWDAQVAYDIALPCATQNEISGDQAKNLIANGAKVVAEGANMPSSPEAIATYQAASLLYGPAKAANAGGVAVSALEMSQNSMRLSWTFEEVDNRLKQIMQDIFAHSVAAADEYHVSGDYLSGANIAGFTKVADAMLAQGLV

SEQ ID NO: 6458 - protein, 202 aa, Arabidopsis thaliana
MGGGPRTFPGGVSKWQWKRMQAKKQKQLLKARLCRERQIYEMRKRAELKAAVAELERPWEPIHKPPNLFSVCADEQVKVLADRFQKPGGFDLWTDRDGPQLFESVDDLPSARFFPKGVVHSVKPYGRLSSSSVVDDGDESEVKDEEIGKKLRGRRVRKRGDDGGKRRTENRGNGGRLRNGGSSSSQVYDMTLQNDGRYEIGS

SEQ ID NO: 6459 - protein, 448 aa, Streptococcus suis 89/1591
MSNAKAYIQASFEAVKARNPHETEFLQAVEELFSTLEPVFEAHPEYIEENILARIVEPERIISFRVPWTDKDGNVQVNRGYRVQFNSAVGPYKGGLRFHPTVNQSILKFLGFEQIFKNVLTGLPIGGGKGGSDFDPKGKTDAEIMRFCQSFMTELQKHIGPSLDVPAGDIGVGGREIGYMYGQYKRLRQFDAGVLTGKPLGFGGSLIRPEATGYGLVYFTDNMLAANGKSFKDQTVLISGSGNVAQYAVQKATELGAKVISVSDSNGYIIDETGIDFDLLVDIKEKRRARLTEYAAEKATAKYFEGSVWNYDGKADIALPCATQNEINGEQAAALVKNGVYCVAEGANMPSDLDAIKVYKENGVLYGLAKAANAGGVAVSALEMSQNSLRLSWTHEEVDGRLKDIMANIFNTAKETAEKYDLGTDYLAGANIAAFEQIADSMIAQGLV

SEQ ID NO: 6460 - protein, 641 aa, Pichia jadinii
MTISNTQAADGRRYSTTVGASGASTTRDTTIGSVNEYPDECISKEPIGEAARAAINVAKATRLSAVGPIECSLNGFQLLNSPLFNKGSAFTLEERAAFGLEGLLPAQVNDLNAQVERAYKQLCYLKTPLAKNDFCSSMRVQNKVLFYELVRRHIRELVPIIYTPTEGDAIAAYSHRFRKPEGCFLDITDPDSIDRRLANFGEDKDVDYIVVSDGEGILGIGDQGVGGVRIAISKLALMTLCGGIHPGRVIPVCLDVGTNNKKLITDDLYMGNRFPRVRGKEYDDFVDKFIQVLKRRFPSATLHFEDFGVTTGRPLLQRYRNELACFNDDIQGTGAVVMASLSAALKHTNRNLLDSQIVIYGAGSAGLGIADQIVNHMVTHGATVEEAKSKIHALDIRGLILKSMKETSTPDQHSYADEDADWEGIDTKSLYEVVKKIKPTCLIGCSTQAGAFTQQIVQEMHKHNPRPIIFPLSNPTRLHEAVPEDLMAWTNNDAMVATGSPFKPVDGWVISENNNCFAFPGIGLGSVLSRAKIISDKMISAAVDQLASLSPLSKDPKAGLLPPLEVINDTSAKVAAAVILQALDEGLARIEDEVQPGKDEYVTVPGDFDACVEWVKQQMWKPEYRPMVKVEHRHDIHTHQF

SEQ ID NO: 6461 - protein, 363 aa, Microcoelia exilis
SDSKDAGRLSAAWQLYKAQEELVKVAKEYGVKLTMFHGRGGTVGRGGGPTHLAILSQPPDTILGSLRVTVQGEVIEQSFGEELLCFQTLQRYTTATLEHGMKLPFSPKPEWRATLMDEMAIVSTNEYRSIVFQEPRFVEYLRLATPELEYGRMNIGIRPSKRKPSGGIESLRAIPWIFAWTQTRFHLPVWLGFGAAFKHVIQKDQKNLQILREMYNEWPFFRVTIDLIEMVFTKGSPGIAALYDKLLVSPELLPFGEQLRANYEETKRLLLMVAGHKELLEGDPYLKQRLRLRYPYITTLNVFQAYTLKRIRDPSYHPAQPHLPTEIVHSNNQAAELVNLNPTSEYAPGLEDTLILTMKGIAA

SEQ ID NO: 6462 - protein, 1323 aa, Sorghum bicolor
MILEASYLDSVPTAPDDAHVAPQSPAYIPVSALWWGNKQTNCTPTVQDEIVFGPGVQQQEPGGSQAGSMDEVGVISGLVTKMDIDTATERGPTAAAMTSSPAGVPPPPPENQQPPNLYTGLFCELPAPVLQAPAPGEPAPRARKMKKPTVSTRSSSRLAARPSAVPVAQRAQRKLMQELSFIDNNQQQAPDAAVTEYLDLYADDLPEQAVKAIQTAARLGNKRLVKILEAVETKLDAIDGLLAMEFLGNNYYSSFEFLPADNTRGGVLIAWDQDYIRGNLVRQDRFCLSIDITLRLTNHSFVLTTVYGPANNTEKNSFLAELIRCQPRGRPWLCLGDFNLICEAQDKNNNNINRAHMRKFRQALDASELLEIKLQNRKYTWSNGRKNPTLVHLDRAFCNLDWDEIFPSATLIALSSSLSDHCPLFLCNQQQPHRRATFKFESFWVRVPGFLQIVQTAWALPVRGSNPLTLLHNRLRNAAEALKKWSKSLFSEARLQLELANEVILRLDIAQESRPLSDAEVDLHRQLKLQLLGWAAIERSRRRQSSRIINIKEGDACTKFFHQRAKGRRKRNLITYLKNEGGLDQPFTLEELKHTVDELPAEKAPGPDGFNGLFYKKCWEIIKTDILAAMNSFHSLRAGPMRSLNGANITLIPKSDNAEDPKDFRPISLIHSFGKFVTKTLAIRLSPHIDRMISNSQSAFIKHRCIQDNFMYVRNLARAYHRKKIPALLFKLDISKAFDTISWEYLLELLEQRGFSARWREWLTLIFKTSHSTVLLNGTEGRQINHVRGLRQGDPLSPFLFILAIDTLHRILEVATANGFLSPLRGRNARLRLSLYADDAVIFINPIREEVTALFEILEQFGATTGLKLNIGKCTVAPIRCAEINLDHVLEGYRGNKTNFPITYLGLPLSLGRLKVVHLQKIVDKSRSRLAAWQGRLMNPAGRRELVRSVLSSMPVYLMTTLKAPKQLIADIDQMRRRFLWAGDNEISGGKCKVAWTAVAKPEEFGGLGIIDLDKFSRALRLRWLWFQWTKPERPWNGSELPVNADDVALFNAATTVTVRDGRKASFWHSSWIEGRAPASLWPRLYAHSRKKNRTVREALLNRRWVSDIAHNLNQDLLKEYFEFWLAIDRVRPALDEAGGDIIIWGLESSVCWPSPIPFPSLNLESLGTAKVQILLMAAVKNRLWTSARLQQRHWKNNYFCALCERNLETAHHLFFECPYSRLVWQAVSSWSSCPSLQPASWEDRSRLEDCFSQTLTTGEKKAHTLAILTLWSIWNRRNAVVFREDRKTTISLVVEIKDMARQWSLAGCKALRPLMVAHVISE

SEQ ID NO: 6463 - protein, 487 aa, Burkholderia vietnamiensis G4
MSTENLALKDPSLLRQQAYINGEWQSAANGESFEVRNPATGGLLGTVPAMGAAETRQAIDAANAAWPAWRKKTAKERAAILRKWHDLMMENADDLALILTTEQGKSLAEAKGEIGYAASFLEWFAEEGKRVYGDTIPTPASDKRIVVTKEAIGVCAAITPWNFPAAMITRKVGPALAAGCPIVVKPAEATPFSALAMAVLAERAGVPAGVFSVVTGDPKAIGGELTSNPIVRKLSFTGSTPVGRLLMSQCAATVKKVSLELGGNAPFIVFDDADLDAAVQGAIASKYRNSGQTCVCTNRFYVHEAVYDAFAQKLAAAVGQLKVGRGTEPGVTQGPLINEAAVLKVEAHIEDALAKGATVVTGGKRHALGHGFFEPTVLTGVTPAMKVAKEETFGPLAPLFKFGSDDEVIRLANDTEFGLAAYFYSRDIGRVWKVAEALEYGMVGVNTGLISNEVAPFGGVKQSGLGREGSHYGIDDYVVIKYLCLAV

SEQ ID NO: 6464 - protein, 288 aa, Thermus aquaticus
MILVNRETRVLVQGITGREGQFHTKQMLDYGTKIVAGVTPGKGGTEVLGVPVYDTVKEAVAHHEVDASIIFVPAPAAADAALEAAHAGIPLIVLITEGIPTLDMVRAVEEIKALGSRLIGGNCPGIISAEETKIGIMPGHVFKRGRVGIISRSGTLTYEAAAALSQAGLGTTTTVGIGGDPVIGTTFKDLLPLFNEDPETEAVVLIGEIGGSDEEEAAAWVKDHMKKPVVGFIGGRSAPKGKRMGHAGAIIMGNVGTPESKLRAFAEAGIPVADTIDEIVELVKKALG

SEQ ID NO: 6465 - protein, 1098 aa, Debaryomyces hansenii CBS767
MKTSDDNISFSKGGVPPTSKEISVLKDDCNKKHIIIVGFGMVGFAFLEKMLVDDTAGEYRLTIIGDEPHLAYNRVGLTEYFEHQDFDKLLLAPHSFYDQKNADTCEYRVNQKVTKIEKEHKYIETSNAKRYHYDYLVLATGSYAVLPIDLFPRSQSNEFCDLKSCRKLGCFVYRTIDDLNAMISFSETIRSTIKKPVLKRAVIVGGGLLGLEAAKALLDMECYDEVTIVHRSKWLLSQQLDEKGGNLLTERIAEMGVKLRTDTTINKLQYDHCTLSFEVQYNNGDVEICQLLCYTIGIKPQDILARSSGLKVAKKGGIEVDNFMKTSNRYIYAIGECASWNNQTFGLIAPGVMMADILSFNLIQAKYHSERQFTKPDIGTRLKLMGVNVASFGDYFADKNGPSRLPKGYKIKKVKSLVYDDPIEANYTKLLLSYDGKYLLGGILVGDTTQFTKLASITKSGKPLEKPASTFIIGQSNSENNDVDDLPDDTQVCSCHNVTKGKLIEKIKSGTCNSLGELKSCTKAGTACGGCEPTIKVILDTEMKKMGKNISKALCIHYKESRQDLFSLIMVKRYKSFKEVMSHLGVDPCALGCEICKPTIASILATLFNRHILETNLHGLQDTNDKYLGNIQRNGTYSIVPRMSAGEVTPEKLVAIGEIARKYDLYTKITGAQRVDLFGASKSDLPKIWEELGKYGFESGQAYGKSLRNVKSCVGSTWCRYGIGDSVGLALRLEERYKGIRSPHKMKGGVSGCVRDCAEFHSKDFGLCAVQNGFNLYVGGNGGMKPAHAQLLKADVPPDQVIPLLDRYLMFYFRTADRLQRTARWLENLDGGIEYLREVVVYDKLGIAMELEKQMNQLVSQYFDEWAAAVDSYKYSNIFKQFVNTDKAQETVEIIRDRGQRRPVDWPEYEVTKEVFKDTKWSSLSWVKVCQSKELPNSEAGSSANVLISDTQIAVYRLNGKLFASQNMCGHKRAFVLSQGILSMDGNKNTYISCPLHKKNYIIDKASDKAGSCTNDASQSVALFDVMESNGEVFVKLPPIEELDKVLGTSRWKVRKQESESNGSIATYKNIDEAFNIKVPIRKPIPSVGCSGGPELDW

SEQ ID NO: 6466 - protein, 509 aa, Magnetospirillum magnetotacticum MS-1
MTVSTTPARTDRPAARTTPPWNRQRPSPMPSSRYADVHARVDVPDLPDRRWPNRRLTQAPLWVPVDLRDGNQALAEPMDPARKRRFFELLVAMGYTEIEVGYPSASQTDFDFVRLLAETDLAPEHVTVVVFTAARADLIARTVESVRGLRNPVVVHVYAATAPVWRDVVLGRDREELARLITDAGTEVLRHAGDDPRVRFEFSPEVFNLTEPDYVLDVCDRMTTLWDATPERPVVLNLPATVEVATPNVYADQIEYMDRNLARREGVILSVHPHNDRGTGVACAELAVLAGAQRVEGCLFGNGERTGNVDLVTLGLNLHAQGVDPMVDFSDLDAIRDVVVACNRIDVHPRHPYVGELVHTAYSGTHQDAIRKGMARHRADAAAAGLDPAVAPWRVPYLPVDPADLGRSYEALVRVNSQSGKGGVAYVLQSVHGLDLPRGLQVDLARRVQEHADAAGAEVTPDVLLALFDTGYARTGAVGPVRGRAGAPRGTSTQLRHGTGGCNREDGGS

SEQ ID NO: 6467 - protein, 292 aa, Oryza sativa
  misc_feature (249)..(249): Xaa can be any naturally occurring amino acid
MEPCRDGHVVTEFDSVEMVCVAPLQVAWPTDQIDTHGHLTQERVRRDFEIGEEIGRGRFGVVHRCASRSTGEAYAVKSVDRSRLSDDLDRSLAALEPKLARLAAAGNPGVVQVHAVYEDDDWTHTVMDLCTRPDILDWVRLRCGKPVPEPDATAVVAQIAEALALCHRRGVAHRDVKPDNVLLDATGDGPPRRRRGSWGQPHYVAPEVVAGGEYGEKADVWSAGVVMYVLLTGGALPFGGETASDVFAXVLRGNLRFPPRLFSGVSPAAKDLMRRMMCRDVYRRFSAEQVLS

SEQ ID NO: 6468 - protein, 127 aa, Oryza sativa
MHRSMASQAVAPLLLILMLAAAAGGASAAVQCGQVMQLMAPCMPYLAGAPGMTPYGICCDSLGVLNRMAPAPADRVAVCNCVKDAAAGFPAVDFSRASALPAACGLSISFTIAPNMDCNQVTEELRI

SEQ ID NO: 6469 - protein, 139 aa, Brassica napus
ATCRVPFSKLEMVTLIVATTYDPASINPAAALLAMPGWTTGPTLPPNIKSFTNQQTRLIQHDVSIVKEDDLDSRWEEATGEVVDEVIFLSRHTAASNRPALTVHPIGVLHLKEGESPPHGGKAGWAALPSPRIGPWLRL

SEQ ID NO: 6470 - protein, 282 aa, Streptococcus pyogenes MGAS315
MTVKALLEEQLLIPRKIRHFLRTKKHVLINGHPVNWQSCVKYGDQVKLFFDHEDYPEKIIVMGQAEKVTCLYEDEHIIIVNKPEGMKTHGNDPTELALLNHVSAYTGQTCYVVHRLDKETSGAILFAKTPFILPILNRLLEKRDIHREYLALVHGSLDSPRVTYHHPIGRHRHDRRKRVVDPINGKKAITEVTLVKNFHKTASLLNCQLQTGRTHQIRVHLAHQGHVLFGDPLYSNGKKDCARLMLHAYQLRLKHPLTQEDICVQAKSATFDAVLNAQKARK

SEQ ID NO: 6471 - protein, 77 aa, Zea mays
  misc_feature (18)..(18): Xaa can be any naturally occurring amino acid
  misc_feature (42)..(42): Xaa can be any naturally occurring amino acid
TKVLQGGTVSAQLRTHFXEIRVEAPGEGACVAKVKVDYERLXGAPLAPEDKARLAQGYVPLVRMVEAYLVAHPKEFA

SEQ ID NO: 6472 - protein, 416 aa, Vibrio fischeri ES114
MFEPMMEMSDDAVIKVVGVGGGGGNAIEHMVRESIEGVEFISVNTDAQALRKTSVNTVIQIGGDITKGLGAGANPQVGRDAALEDREALKEVLAGADMVFIAAGMGGGTGTGAAPIIAEVAKELNILTVAVVTKPFSFEGRKRLAFAEQGIEELSKHVDSLITIPNEKLLKVLGRGITLLEAFAKANDVLRNAVQGIAELITRPGMINVDFADVRTVMSEMGHAMMGSGIAVGEDRAEQAAEEAISSPLLEDIDLAGARGVLVNITAGLDMRLDEFETVGNTVKAFASDNATVVIGTSLDPDMSDEIRVTVVATGIGTEKKPEITLVTNKAAAPAQSAPAAQPAVQAQVKPKVEAPVEPVVEKAAQNVQVTKPAAQPSAPSTSPAAGVQNAGAAQAKPDQKEDYLDIPAFLRRQAD

SEQ ID NO: 6473 - protein, 487 aa, Brucella melitensis 16M
MLALKDPSLLKSQCLVNGRWIDAADGTTIKVTNPADGSVIGTVPSLSVATIKEAIDASAKALSGWAAKTAKERAGILRKWFDLIIANADDIALIMTSEQGKPLAEARGEVLYAASFIEWFAEEAKRVYGDTIPAPQNGQRLTVIRQPVGVTAAITPWNFPAAMITRKAAPALAAGCTMIVRPADLTPLTALALGILAEKAGIPAGVLQIVTGKAREIGAELTSNDTVRKLSFTGSTEVGRLLMAQCAPTIKRISLELGGNAPFIVFDDADLDAAVDGAMVSKYRNAGQTCVCANRIYVQRGVYDKFAEKLAAKVKELKVGNGTEPGVVIGPMIEEKAITKVKAHIEDAVSKGAKLITGGKELGGLFFEPGILTGVTSDMLVAKEETFGPLAPLFAFDTEEEVIAQANDTIFGLAAYFYTENFSRAIRVSEALEYGMVGHNTGLISNEVAPFGGVKQSGLGREGSKYGIEEYLETKYICSAYKRGAKK

SEQ ID NO: 6474 - protein, 70 aa, Brassica napus
MADKPLPKFGEWDVNDPSSAEGFTVIFNKARNEKKGGGQSDSPGKDEQPPGFNKNGHVLGKPSKKWFCCI

SEQ ID NO: 6475 - protein, 437 aa, Zea mays
  misc_feature (325)..(325): Xaa can be any naturally occurring amino acid
MNALAATSRNFKQAAKLLGLDSKLEKSLLIPFREIKVECTIPKDDGTLASYVGFRVQHDNARGPMKGGIRYHHEVDPDEVNALAQLMTWKTAVANIPYGGAKGGIGCSPGDLSISELERLTRVFTQKIHDLIGIHTDVPAPDMGTNSQTMAWILDEYSKFHGYSPAVVTGKPVDLGGSLGRDAATGRGVLFATEALLAEHGKGIAGQRFVIQGFGNVGSWAAQLISEAGGKVIAISDVTGAVKNVDGLDIVQLVKHSAENKGIKGFKGGDAIAPDSLLTEECDVLIPAALGGVINKDNANDIKAKYIIEAANHPTDPEADEASPXLKTNRLLSAMFSDPLCIPFHPQILSKKGVLILPDILANSGGVTVSYFEWVQNIQGFMWDEEKVNAELRTYMTRAFGDVKQMCRSHSCDLRMGAFTLGVNRVARATVLRGWEA

SEQ ID NO: 6476 - protein, 411 aa, Glycine max
MNALAATNRNFKLASRLLGLDSKLEKSLLIPFREIKVECTIPKDDGTLQSYVGFRVQHDNARGPMKGGIRYHPEVDPDEVNALAQLMTWKTAVANIPYGGAKGGIGCDPAELSISELERLTRVFTQKIHDLIGTHTDVPAPDMGTGPQTMAWILDEYSKFHGYSPAVVTGKPIDLGGSLGRDAATGRGVLFATEALLNEYGKSVSGQRFVIQGFGNVGSWAAQLISNKGGKVVAVSDITGAIKNSNGLDIPSLLEHSKVHRGVKGFNGSDPIDPNSILVEDCDVLVPAALGGVINRENANEIKAKFIVEAANHPTDPEADEILKKKGVVILPDIFANSGGVTVSYFEWVQNIQGFMWDEEKVNNELKTYMTKGFKDVKEMCKTHECDLRMGAFTLAVNRVARATVLRGWEA

SEQ ID NO: 6477 - protein, 1533 aa, Arabidopsis thaliana
MGNNFSVESPSLAPFLCGKRKYLYNLERNLEALHKVMQDLNAMRNDLLKRLSKEEEIGLQGLQEVKEWISMVEEIEPKANRLLDESVSEIQRLSRYGYCSLIPASTYRYSEKVLTTMEGVETLRSKGVFEAVVHRALPPLVIKMPPIQLTVSQAKLLDTAWARLMDINVGTLGIYGRGGVGKTTLLTKLRNKLLVDAFGLVIFVVVGFEEVESIQDEIGKRLGLQWRRETKERKAAEILAVLKEKRFVLLLDGIQRELDLEEIGVPFPSRDNGCKIVFTTQSLEACDESKWVDAKVEITCLSPEEAWDLFQETVGENTLRSHQDIPKLARVVASTCRGLPLALNLIGEAMSGKRTVREWRYTIHVLASSTAEFPDMEDGTLPILKSIYDNMSDEIIRLCFLYCALFPENLDIGKEDLVNYWICEGILAKEDREEAEIQGYEIICDLVRMRLLMESGNGNCVKMHGMVREMALWIASEHFVVVGGERIHQMLNVNDWRMIRRMSVTSTQIQNISDSPQCSELTTLVFRRNRHLKWISGAFFQWMTGLVVLDLSFNRELAELPEEVSSLVLLRFLNLSWTCIKGLPLGLKELKSLIHLDLDYTSNLQEVDVIASLLNLQVLRLFHSVSMDLKLMEDIQLLKSLKELSLTVRGSSVLQRLLSIQRLASSIRRLHLTETTIVDGGILSLNAIFSLCELDILGCNILEITIDWRCTIQREIIPQFQNIRTMTIHRCEYLRDLTWLLLAPCLGELSVSECPQMEEVISKERAMAKLGNTSEQPFQNLTKLVLDGLPKLESIYWTPLPFPVLEYLEIRRCPELRRLPFNSESAIGNLVEMKIEEQLIKIVEWEDEATKQRFSHFNNRDFVQMAEDPKMDGLTSESHPIQTIDLVGTTGSGETATANNIQGKKVVQSGTHATVVTMECQTYKVFTPDCPINNMIDTPGKRKVKEMLFNLNDEARIIGISGMIGSGKTILAKELARDEEVRGHFANRVLFLTVSQSPNLEELRSLIRDFLTGHEAGFGTALPESVGHTRKLVILDDVRTRESLDQLMFNIPGTTTLVVSQSKLVDPRTTYDVELLNEHDATSLFCLSAFNQKSVPSGFSKSLVKQVVGESKGLPLSLKVLGASLNDRPETYWAIAVERLSRGEPVDETHESKVFAQIEATLENLDPKTKECFLDMGAFPEGKKIPVDVLINMLVKIHDLEDAAAFDVLVDLANRNLLTLVKDPTFVAMGTSYYDIFVTQHDVLRDVALHLTNRGKVREMTEMDWFDMDFPKAEVLIVNFSSDNYVLPPFIAKMGMLRVFVIINNGTSPAHLHDFPIPTSLTNLRSLWLERVHVPELSSSMIPLKNLHKLYLIICKINNSFDQTAIDIAQIFPKLTDITIDYCDDLAELPSTICGITSLNSISITNCPNIKELPKNISKLQALQLLRLYACPELKSLPVEICELPRLVYVDISHCLSLSSLPEKIGNVRTLEKIDMRECSLSSIPSSAVSLTSLCYVTCYREALWMWKEVEKAVPGLRIEATEKWFNMTWPDE

SEQ ID NO: 6478 - protein, 628 aa, Zea mays
MASSLLSSPAKPTTATTTKTTPAPRPAHVHVLSAARCLRLRLRAVPARASSQHPPPPPTPRSRRPDYVPNRIDDPNYVRIFDTTLRDGEQSPGATMTSAQKLVVARQLARLGVDIIEAGFPASSPDDLDAVRSIAIEVGNPAPGPAGEEDAVHVPVICGLSRCNRRDIDAAWEAVRHARRPRIHTFIATSDIHMQHKLRKTPDQVVAIAREMVAYARSLGCTDVEFSPEDAGRSNREFLYHILGEVIKAGATTLNIPDTVGYNLPYEFGKLIADIKANTPGIEKAIISTHCQNDLGLATANTLAGARAGARQLEVTINGIGERAGNASLEEVVMAIKCRRELLDGLYTGIDSRHITLTSKMVQEHSGLHVQPHKAIVGANAFAHESGIHQDGMLKYKGTYEIISPDDIGLTRANEFGIVLGKLSGRHAVRSKLVELGYEIGDKEFEDFFKRYKEVAEKKKRVTDEDLEALLSDEIFQPKVIWSLADVQATCGTLALSTATVKLIAPDGEEKIACSVGTGPVDAAYKAVDKIIQIPTVLREYSMTSVTEGIDAIATTRVVVTGDVSNNAKHALTGQSFNRSFSGSGASMDIVVSSVRAYLSALNKICSFAGAVKASSDVAETASVPSTE

SEQ ID NO: 6479 - protein, 669 aa, Psilotum nudum
  misc_feature (107)..(107): Xaa can be any naturally occurring amino acid
  misc_feature (109)..(109): Xaa can be any naturally occurring amino acid
  misc_feature (112)..(112): Xaa can be any naturally occurring amino acid
  misc_feature (216)..(216): Xaa can be any naturally occurring amino acid
  misc_feature (219)..(219): Xaa can be any naturally occurring amino acid
  misc_feature (623)..(623): Xaa can be any naturally occurring amino acid
WMGGDRDGNPRVTPEVTRDVCLLARLIASNLYFSRIEDLMFELSMWRCSDELRARVNELVFSSRKDAKYYMEFWKQIPPNEPFRVVLGHVRDRLYNTYELSRQLLAXGXSEXPEETFTSVDEILEPLELCYASLCSTGDKAIADGSLLDFMRQVSCFGLSLVKLDIRQESDRHSDVMDAITNYLGIGSYREWSEEQRQKWLLSELRGNRPLYGPGXPRXEEIRDCLETIHVISELPPDSFGAYIISMATAPSDVLAVELLQRECRVTHPLRVVPLFEKLADLESAPAALARLFSIDWYRNRINGKQEVMIGYSDSGKDAGRLSAAWQLFKAQEELINVAKQYGIKLNMFHGRGGTVGRGGGPTHLAILSQPPDTIHGSLRVTVQGEVIEQLFGEEHLSFQTLQRFTAATLEHGMHPPISPKPEWRALMDEMASIATEEYRSLVFKESRFMEYFHAATPVLEYGRMNIGSRPSKRKPNSGIESLRAIPWIFAWTQTRFHLPVWLGFGAAFKSVMERDPNNLIVLQEMYKEWPFFRVTIDLVEMVFAKGDPRITALYDKLLVNDDLQYFGDILRAKYEETKKLLLKVAGHKEILEGNPTLKQRLLLREPCITTLNVQQAFTLKRXREGNKDLPVHSKSRNSAAELITLNTTSEYAPGLEDTLILTMKGIAA

SEQ ID NO: 6480 - protein, 257 aa, Azoarcus sp. EbN1
MNLVILVETRHKVGLIRINRPEVHNALNDDVMTELGRALDAFEADRSIACVVLTGSEKAFAAGADIAAMRAMDFMDAYKSDFITRNWERLRTFRKPVIAAVNGVALGGGCELAMMCDIVFAADNARFGQPEIKIGTIPGAGGTQRLPRAIGKTKAMDMCLTGRLMDAQEAERSGLVARIFPAGTVLDEALATAAQLAEYSLPVLMMMKESVNRAYESPLSEGLLFERRTLHATFALADQKEGMNAFVEKRTPQFAHC

SEQ ID NO: 6481 - protein, 110 aa, Polaromonas sp. JS666
MASELIKHTTDATFEADVLKSSTPVLVDYWAEWCGPCKMIAPILDEVATGYDGKLQIAKMNVDENRDIPAKFGIRGIPTLMLFKDGQLAATKVGAMSKAQLTAFIDQQLA

SEQ ID NO: 6482 - protein, 848 aa, Robiginitalea biformata HTCC2501
MSQVERLKEFKKSVRNKFNIYNSLFLNLPYTEGENVGIYIPLLFQQCDRGLKSGKNPTEILDDFFENFTQATDEKERIDLMFRIIQYVERQVVLYDSVEDAAFPRLHVHTDSLSIRDYFQLAKKNKRWDKVSKKLESFSARIVLTAHPTQFYTPAVLDIIAELRTLILENKIDEIDVTLQQLGLTSLINSKKPTPLDEAKNIIYTLRHVYYQAVGDLYAYIKGSIENDAYDNPDIIKLGFWPGGDRDGNPYVTADITMDVADELRTTLMKCYYNDLKTLQKRISFRGVQEQMQQLRGKAYVAMFDTSKTLSYEEMIETLREIREILVRDYYGLYLKELDHFIDKVRLFKTHFATLDIRQDHSKHYQVVETVLRHHGLIKESLDELPEERLVELLTRESLELDPSAYDDPIVKDTLVNMAQLEEIQRKNGEDGCNRYIISNSEDIFSVLFVFGLLRWSGWKNRDLTFDIIPLFETMKGMAEAESVMQTLFDLPEYRAHVAQRRDLQTIMLGFSDGTKDGGYLKANWSIFKTKETLSRVCRRNKIKAIFFDGRGGPPARGGGKTHRFYAAQTKAIANHEIQLTVQGQTITSTFGTKELFMHNSEQLLTAGLSNTIFGKENVIDKSQRDLLETLSELSFEKYNALKQHELFLPYLENRSTLKYYSNANIGSRPGKRGNKAKLEFSDLRAISFVGSWSQLKQNVPGYYGIGTALKQLKDEGRMPELKKMYKEVAFFRALMLNSMMSLTKCYFELTSYMKEDEVYKGFWEMLYREYKLSKQMLLQLSGYKVLMENESVSRESVKIRENIVLPLLVIQQYALHRIAEGTDRKELYEKIVTRSLYGNINASRNSA

SEQ ID NO: 6483 - protein, 96 aa, Arabidopsis thaliana
MSLNILAANAKHKVWLKPTSEMSFLYGNHVLKGGLGRITDSIVPGDGVVVFSMSDVPLGFGIAAKSTQDCRKLDPNGIVVLHQADIGEYLRGEDDL

SEQ ID NO: 6484 - protein, 163 aa, Candida albicans SC5314
MSDFYEFAPNDIKGTPYSFKKLQGKVVLIVNVASKCGFTPQYKGLQDLKQKFADQPVEILGFPCNQFGHQEPGTNEEIEKYCREYFGVTFPVLSKVETNGKNAEPVYKFLKSQKPGLLGLHRIMWNFEKFLIDQDGNVVARFSSFTKPETIGLRIEEMLKHQA

SEQ ID NO: 6485 - protein, 144 aa, Pseudomonas syringae pv. syringae
MSSREIRIATRKSALALWQAEYVKARLEQAHPGLLVTLVPMVSRGDKLLDSPLSKIGGKGLFVKELETALLENNADIAVHSMKDVPMDFPQGLGLFCICEREDPRDAFVSNTFASLDQLPAGSIVGTSSLRRQAQLLARRPDLQ

SEQ ID NO: 6486 - protein, 510 aa, Streptococcus pyogenes MGAS315
MALSPDIKEQLAQYLTLLEADLVLQVSLGDNEQSQKVKDFVEEIAAMSERISIENITLDRQPSFKVAKKGHDSGVVFAGLPLGHELTSFILALLQVSGRAPKVDQDVIDRIKAIDRPLHFETYVSLTCHNCPDVVQALNIMSVLNDKISHTMVEGGMFQDEVKAKGIMSVPTVFLDGEEFTSGRATIEQLLEQVAGPLSEEAFADKGLYDVLVIGGGPAGNSAAIYAARKGLKTGLLAETFGGQVMETVGIENMISTLYTEGPKLMAEVEAHTKSYDVDIIKAQLATSIEKKENIEVTLANGAVLQAKTAILALGAKWRNINVPGEDEFRNKGVTYCPHCDGPLFEGKDVAVIGGGNSGLEAALDLAGLAKHVYVLEFLPELKADKVLQDRAAKTNNLTIIKNVATKDIVGEDHVTGLSYTERDSGEDKHLDLEGVFVQIGLVPNTAWLKDSGVNLTDRGEIIVDKHGSTNIPGIFAAGDCTDSAYKQIIISMGSGATAAIGAFDYLIRQ

SEQ ID NO: 6487 - protein, 161 aa, Candida albicans SC5314
MSQFYELAPKDAKGEPYPFEQLKGKVVLIVNVASKCGFTPQYKGLEELNKKFADQPVQILGFPCNQFGHQEPGSNEEIGSFCSLNYGVTFPVLDKIEVNGDNTDPVYKYLKSQKSGVLGLTRIKWNFEKFLIDQNGKVIERFSSLTSPESIGTKIEELLKK

SEQ ID NO: 6488 - protein, 107 aa, Haemophilus influenzae 86-028NP
MSEVLHINDADFESVVVNSDIPVLLDFWAPWCGPCKMIAPVLDELAPEFAGKVKIVKMNVDDNQATPAQFGVRSIPTLLLIKNGQVVATQVGALPKTQLANFINQHI

SEQ ID NO: 6489 - protein, 550 aa, Actinobacillus pleuropneumoniae serovar 1 str. 4074
MNGANLVIESLKAHGVTTLFGYPGGAIMPTYDAIYDSGLDHLLVRNEQGAAMAAIGYARATGKVGVCIATSGPGATNLITGLGDAALDSIPVVAITGQVASHLIGTDAFQESDVLGLSLACTKHSFIVQNIEELPEIIARAFQIAQRGRPGPVLVDIPRDIQLALTSAKPIVYEKQAVEAQNQDLLNEAKTLLANAKRPVLYVGGGVGMAGGVQAVRNFLKVTNIPSVSTLKGLGTITIDDPLYMGMIGMHGTKAANYAVQECDLLIACGARFDDRVTGKLDTFAPHAKVIHIDIDIAEINKLRKVEVALRGDLVEAVNTLAQPLDIDPWREDVKRLKADLDFQYVDNAGEGDINAKALLNTLSQRKPKNAIITTDVGQHQMWSAQHLQHFAPENFITSAGFGSMGFGLPAAVGAVKARPQDPVILVTGDGSIMMNIQELGTLKRGHLPVKIVLLDNQRLGMVRQWQSLFFHGRHSNTILDDNPDFVVLASAFGIQGERIEKASEVSDALDRLLNAKGAYLLHVCIPEEDNVWPLVPPGACNADMLDDEI

SEQ ID NO: 6490 - protein, 175 aa, Triticum aestivum
MAPAVMASSATTVAPFQGLKSTAGLPVSRRSGSAGLSSVSNGGRIRCMQVWPIEGIKKFETLSYLPPLSTEALLKQVDYLIRSKWVPCLEFSKVGFVFREHNSSPGYYDGRYWTMWKLPMFGCTDATQVLSEVEEVKKEYPDAYVRVIGFDNMRQVQCVSFIAFRPPGCEESGKA

SEQ ID NO: 6491 - protein, 83 aa, Triticum aestivum
EASRGGGLLSQAGSGSGLTWFAATAAVLSVASLVPLLKGDSAEARSGAVMSADAELWNGRFAMLGLVALAFTEYLTGAPFINA

SEQ ID NO: 6492 - protein, 813 aa, Arabidopsis thaliana
MNCNVLFLLSVLVSVTAGVTAAYHPTDVFLFNCGDTSNNVDNSGRNWTVESRQILSSNLVNASFTSEASYQKAGVSRIPYMKARIFRSEFTYSFPVTPGSIFLRLYFYPTQYKSGFDAVNSFFSVKVNGFTLLRNFNADSTVQASIPLSNSLIKEFIIPVHQTLNLTFTPSKNLLAFVNGIEIVSMPDRFYSKGGFDNVLRNVSSDVDFQIDNSTAFESVHRLNVGGQIVNEVDDSGMFRRWLSDDSFGNSGSIVNVPGVKINYTEKTPAYVAPYDVYATSRLMGNSSNLMFNLTGMFLTVDAGYNYLVRLHFCETLPQVTKAGQRVFSIFVEDKMAKKETDVIRLSGGPRIPMYLDFSVYVGFESGMIQPELRLDLVPLKDTNQTYYDAILSGVEILKLNDSDGNLARPNPELLVSTDSTPDDSNVTPPIKGKPHVLVIILIVVGSVIGLATFIVIIMLLIRQMKRKKNKKENSVIMFKLLLKQYIYAELKKITKSFSHTVGKGGFGTVYRGNLSNGRTVAVKVLKDLKGNGDDFINEVTSMSQTSHVNIVSLLGFCYEGSKRAIISEFLEHGSLDQFISRNKSLTPNVTTLYGIALGIARGLEYLHYGCKTRIVHFDIKPQNILLDDNFCPKVADFGLAKLCEKRESILSLIDTRGTIGYIAPEVVSRMYGGISHKSDVYSYGMLVLDMIGARNKVETTTCNGSTAYFPDWIYKDLENGDQTWIIGDEINEEDNKIVKKMILVSLWCIRPCPSDRPPMNKVVEMIEGSLDALELPPKPSRHISTELVLESSSLSDGQEAEKQTQTLDSTII

SEQ ID NO: 6493 - protein, 440 aa, Clostridium perfringens str. 13
MGKPKLKKEIGLFTATALVVGNMMGSGIFMLPASLASVSGPGSTIMAWLLTGLGSLVLALTFANLGSKIPKTGGTYEYSRLAYGNFMGFMTAWLYWNGSWIGNATIFIVITTYLGEVITSLTNSPIIGFLFCSSILWICTYINIRGTKLAGRVASVITVFKVLLFIFFIVVGLIYFDPSNLTPMFPDGKGVSTIPVAASLTLWAFMGLETASVAGGEIKDPEKNVKRSTILGMLISTVLYILISVVAMGAMSQSELASSTAPISDIIVKVLNLKSLNFLNIAIAISILGTAMGWLLSTARVGYAAGEDGIFPSVFAKVHPKYNTPHVALIIGSIFINIIFLMNFTKGLAGAYSFIVVLATLSYLPIYAISTIAEIILMVKEEKKPTFKKHLGLIIRCLIGFAFAIWAIYASGAEIVMYGFILILLGVPIYGYMSIKKHFR

SEQ ID NO: 6494 - protein, 284 aa, Arabidopsis thaliana
MERARRLAYRGIVKRLVNETKRHRNGESSLLPTTTVTPSRYVSSVSSFLHRRRDVSGSAFTTSGRNQHQTRSISVDALKPSDTFPRRHNSATPDEQAQMANYCGFDNLNTLIDSTVPKSIRLDSMKFSGIFDEGLTESQMIEHMSDLASKNKVFKSFIGMGYYNTHVPPVILRNIMENPAWYTQYTPYQAEISQGRLESLLNYQTVITDLTGLPMSNASLLDEGTAAAEAMAMCNNILKGKKKTFVIASNCHPQTIDVCKTRADGFDLKVVTVDIKDVDYSSGD

SEQ ID NO: 6495 - protein, 156 aa, Haemophilus influenzae
NRTNTPVLVDGKDVMPEVNAVLAKMKDFCQRIISGEWKGYTGKAITDVVNIGIGGSDLGPYMVTEALRPYKNHLNMHFVSNVDGTHIAETLKKVNPETTLFLVASKTFTTQETMTNAQSARDWLLKAAKDESAVAKHFAALSTNAKDVEKFGIDTN

SEQ ID NO: 6496 - protein, 369 aa, Ralstonia eutropha JMP134
MRVFKLPDLGEGLQEAEIVTWHVKVGDTVAADQPLLSVETAKAIVEIPSPYAGTIGKLFAQAGDLVHLGAPLASFEGAGNDADAGTVVGAVKVGSHVVAESATPLSGGAAGAGIKATPAVRALARRLGVDLAMANPSGPDGVVTAADVERVASTLAETGPGEVLRGVRRAMAQNMARAQSEVAAATVMDDADIHAWQGAHDVTIRLVRALVAGCRAEPGLNGWYEGQTGKRHVMQKIDVGIAADLPEGLFVPVLRNVGNRDAADLRHGLDRMRADIRARTIAPEEMRGNTITLSNFGMIAGRYAAPIVVPPTVAILGAGHIRDEVVAANGVPAVHRVIPLSLTFDHRVVTGGEAARFLAAVIADLALPE

SEQ ID NO: 6497 - protein, 357 aa, Solenangis aphylla
SDSGKDAGRLSAAWQLYKTQEDLVKVAKEYGVKLTMFHGRGGTVGRGGGPSHLAILSQPPDTILGSLRVTVQGEVIEQSFGEEQLCFKALQRFTAATLEHGMQVPITPKPEWRALMDEMAIIATNEYRSSVFKEPRFVEYFRLATPELEYGRMNIGSRPLKRKPCGGIESLRANPWIFAWTQTRFHLPVWLGFGAAFKHVIQKDPKNLQMLREMHNEWPFFRVTIDLLEMVFTKGNPGIAALYDKLLVSPALLPFGEQLIANYEETQNLLLQVAGHKVLLESDPYLKQRLRLRYPYITTLNVFQAYTLKRMRDPSYAEPHLSNAQKPADELVKLNPTSEYGPGLEDTLILTMKGIAA

SEQ ID NO: 6498 - protein, 570 aa, Arabidopsis thaliana
  misc_feature (218)..(218): Xaa can be any naturally occurring amino acid
MAFAVSVQSHFAIRALKRDHFKNPSPRTFCSCFKSRPDSSYLSLKERTCFVSKPGLVTTRYRHIFQVGAETGGEFADSGEVADSLASDAPESFSWSSVILPFIFPALGGLLFGYDIGATSGATLSLQSPALSGTTWFNFSPVQLGLVVSGSLYGALLGSISVYGVADFLGRRRELIIAAVLYLLGSLITGCAPDLNILLVGRLLYGFGIGLVSSGNLXIVMTCPSQIRGTLISLKELFIVLGILYDFCVNIDFLPDAWGFSVGSFQIDVVGGWRYMYGFGTPVALLMGLGMWSLPASPRWLLLRAVQGKGQLQEYKEKAMLALSKLRGRPPGDKISEKLVDDAYLSVKTAYEDEKSGGNFLEVFQGPNLKALTIGGGLVLFQQITGQPSVLYYAGSILQTAGFSAAADATRVSVIIGVFKLLMTWVAVAKVDDLGRRPLLIGGVSGIALSLFLLSAYYKFLGGFPLVAVGALLLYVGCYQISFGPISWLMVSEIFPLRTRGRGISLAVLTNFGSNAIVTFAFSPLKEFLGAENLFLLFGGIALVSLLFVILVVPETKGLSLEEIESKILK

SEQ ID NO: 6499 - protein, 753 aa, Azoarcus sp. EbN1
MLIATDLDGTFLAGHPEARLRLYQLINAHPEIKLVFVTGRGLEVVLPLLSDPSIPTPDYIVCDVGATVVDGRTLQPVQPLQAGIDALWPGERVVAAAMASFVGIERQEVPQQRRCSYFCAPGTVGSDLRGIAAELGCDMLYSAERYLDILPRGVNKGSTLDALVRLLEIDRDAVLVAGDTLNDLSMYERGFVGVCVGESEAALLDATRERAHVLHARHPGCGGILEAIAHFGFLGPAGVEAELRETDTPGRSELVMVYHRLPYEEVFENGRITRAAPSSPNGIIPTLLSYFSDGRPGAWIAWSMHDPKKAIPFEVHTTVDRERYPHLVAARVPLTKDDIDIFYKRFSKEAFWPTLHTFWERAQFREDDWHVYLKVNRLFAERAAAEAAEGAVVWLHDYNLWMVPAVLRELRPDVKIAFFHHTYFPSADVFNVLPWRREIIGSLLQCDYIGFHIPRQAENFVDVARGVAPLTVLERRNCAPRYLTYGCAVGLDEVTTAIEVHGRRIGLGAHPVGLDVERVRKILDQPSTRKRMAELRADLVDTRVILSVERLDYTKGTLEKLLAFERLLDAHPELQGKVSLMAVCVPAAKEMTIYDALQTQIEQAVGRINGRFSRVSWTPVQFFFRALPFEEVVAWYAMADVMWITPLRDGLNLVAKEYVATQGMIEGRGVLVLSEFAGAAAELHGAVLTNPHDLADLAARLYQAIAMNDAEAEARLRELFAIVEHNDIHRWGRNFLEAVTTPVGEDSLAGTGC

SEQ ID NO: 6500 - protein, 970 aa, Arabidopsis thaliana
  misc_feature (356)..(356): Xaa can be any naturally occurring amino acid
  misc_feature (411)..(411): Xaa can be any naturally occurring amino acid
  misc_feature (724)..(724): Xaa can be any naturally occurring amino acid
  misc_feature (749)..(749): Xaa can be any naturally occurring amino acid
  misc_feature (777)..(777): Xaa can be any naturally occurring amino acid
  misc_feature (786)..(786): Xaa can be any naturally occurring amino acid
  misc_feature (794)..(794): Xaa can be any naturally occurring amino acid
  misc_feature (814)..(814): Xaa can be any naturally occurring amino acid
  misc_feature (857)..(857): Xaa can be any naturally occurring amino acid
MAARNLEKMASIDAQLRLLAPGKVSEDDKLIEYDALLLDRFLDILQDLHGEDVREFVQECYEVAADYDGNRNTEKLEELGNMLTSLDPGDSIVVTKSFSNMLSLANLAEEVQIAYRRRIKKLKKGDFADEASATTESDIEETLKRLLQLNKTPEEVFDALKNQTVDLVLTAHPTQSVRRSLLQKFGRIRDCLTQLYAKDITPDDKQELDEALQREIQAAFRTDEIRRTPPTPQDEMRAGMSYFHETIWKGVPKFLRRVDTALKNIGINERVPYNAPLIQFSSWMGGDRDGHPRVTFDTSSLVPPPPPPMAANLYFSQIEDLMFEMSMWRCNEELRVRAERQRCAKRDAKHYIEFWXKQIPANEPYRAILGDVRDKLYNTRERARQLLSSGVSDVPEDAVFTSVDQFLEPLXELCYRSLWDCGDRPIADGSLLDFLRQGATFGLALGKLDIRQESERHSDVLDAITTHLGIGSYKEWSEDKRQEWLLSELSGKRPLFGPDLPKTEEVADVLDTFKVISELPSDSFGAYIISMATAPSDVLAVELLQRECGITDPLRVVPLFEKLADLEAAPAAVARLFSIEWYRNRINGKQEVMIGYSDSGKDAGRLSAAWQLYKAQEELVKVAKEYGVKLTMFHGRGGTVGRGGGPTHLAILSQPPDTIHGHLRVTVQGEVIEQSFGEEHLCFRTLQRFTAATLEHGMHPPVSPKPEWRVLMDRNGLSVCPLKXYRSGCLTREPRFLEYFRLATPEPEXGRMNIVRRPSKRKPIGGIESLRAIPRMXAWNQTRFHXPLWLDRGXGFRRVIQKDTKNFNMLKEMXNVWSSLHIEVNPVILVYHVSHPANHFLRWMSRIAQTNYRPLSXLNPDLTNKRQDASTSRLHFNKDVLEGDPYLRQRLQLRDPYITTLNVCQAYTLKQIRDPSFHVKVRPHLSKDYMESSPAAELVKLNPKSEYAPGLEDTVILTMKGIAAGMQNTG

SEQ ID NO: 6501 - protein, 676 aa, Tillandsia usneoides
WMGGDRDGNPRVTPEVTRDVCLLARMMAANLYYSQIDDLMFELSMWRCSDELRARADALLQSTRKDEKHYIEFWKQVPANEPYRVILDDVRNKLYKTRERSRHMLSNGSSDIPEETTFTNVEQFLEPLELCYRSLFLCGDLTIADGSLLDFLRQVSTFGLSLVKLDIRQESERHTDAIDAITKHLGIGSYREWSEEKRQAWLLSELRGKRPLFGPDLPRTEEIVDVLDTFHVIAELPADNFGAYIISMATAASDVLAVELLQRACQVKKPLRVVPLFEKLADLQSAPASMDRLFSIDWYSNRINGKQEVMIGYSDSGKDAGALSAAWELYKAQEDLVKVAKKYGVKLTMFHGRGGTVGRGGGPTHVAILSQPPDTINGSLRVTVQGEVIEQSFGEERLCFRTLQRFTAATLEHGMNPPISPKPEWRGNLDEIAVVATEEYRSIVFKEPRFVEYFRLATPELEYGRMNIGSRPSKRKPGGGIESLRAIPWIFAWTQTRFHLPVWLGFGAAFKHILQKDIRNLHLLKEMYNEWPFFRVTLDLLEMVFAKGDPGIAALYDKLLVSDDLKPFGEQLRANYEETKQLLLQVTGHKDLLEGDPYLRQTYACVSPYITTLNVCQAYTPKRIRDPNFQVDMRAPLSKEISDSNKPAEQLKLNLTSEYAPGLEDTLILTMKGIAA

SEQ ID NO: 6502 - protein, 229 aa, Candida albicans SC5314
MVKSNVESAWETMEDTFSEIQNKFHQIYKPIDTGKPDEDDETTKKESLDITDDSTLSVSPITQLLYLARSKFYDLTPLDNSKSPFPFKNLRGKVVLIVNVASRCGFSFQYNGLEQLNKRFANDDFVLLGVPCNQFLWQEPGTNDQIVTKCKKKYDVSFQILDKINVNGEQADPVYKFLKAQKEGLWGTNRVKWNFEKFLIDKNGRVVERYSTFTRPVAITPRIEQLLES

SEQ ID NO: 6503 - protein, 437 aa, Oryza sativa
MDDDAGDASPPPAAAGVGATAAQSRDMAASPTSSRSVTETVNGSHRFVIQGYSLAKGMGVGKHIASETFSVGGYQWAVYFYPDGKNPEDNSAYVSVFIALASEGTDVRALFELTLLDQSGKGKHKVHSHFDRSLESGPYTLKFVHLNLTEVTDTILLKYGRGYKRFFRRTALETSDFLKDDCLKINCTVGVVVSTIDYSRPHSILVPDSDIGYHFGTLLDNHEGVDVVLSVGGERFHAHKLVLAARSTVFRSKFFDDEDGEKNEPGENDDVQEIVIDDMEPKVFKAMLHFIYRDTLVDDNELGGSSSEGSIFDTLAAKLLAAADKYDLARLRLLCESYLCKAISVATVASTLALADRHHAMELKAVCLKFAAENLSAVIRTEGFDYLKDNCPSLQSEILRTLAGCEEECSSGGKSQSVWGQLSDGGDTSGRRVRPRT

SEQ ID NO: 6504 - protein, 362 aa, Vanilla aphylla
SDSGKDAGRLSAAWPVYKTQEELVQVAKQFGVKLTMFHGRGGTVGRGGGPTHLGILSQPPDTILGSLRVTVQGEVIEQCFGEERLCFRTLQRFTVATLEHGMHHHISPKPEWRSLMDEMAVIATKEYRSIVFQEPRFVEYFRLATPELEYGRMNIKSRPAKRKPSGGIESLRAIPWIFAWTHTRFHLPVWLGFGAAFKHVITKDIRNLHILREMYNGWPFFRVTIDLIEMVFTKGNPGIASLYDELLVSNDLLSFGMELRANYEETKRLLLQVAGHKDLLEGDPHLKQRLRPRDPYITTLNVCQAYTLKAIRDQVTTQWRTHVSNETESRKSAAELVKLNPTSEYAPGLEDTLILTMKGIAA

SEQ ID NO: 6505 - protein, 618 aa, Arabidopsis thaliana
MGSQTARFCLILLFLFYYLPCALSQDDLWGCGTPFRCGNITAGFPFLGGIRGEVCGHHSLKLNCNKHSNTTSLIFSGHNYTVLYIDNNNNSVTLGLSRQDFSGPFCSASFSSTLLSSGLFQNLPSYKSLTVFYACDPRRHFLGNFTCPVKGLGSIIQNSTYGILCDGSFSVPVPTSFVSEEEVLDLTHLESVLRKGFEVKLNIDEIPCPLECFSSRANCLFLAGSCCKYHDRTTTCGGDTGDLLREIIPNTRSILITIGQVVGFHVFIIVVMIIAFLFWRRKKVNDLRKQNLEALVTSRRYSYRQIKKITKSFTEVVGRGGFGTVYKGNLRDGRKVAVKILKDSNGNCEDFINEVASISQTSHVNIVSLLGFCFEKSKRAIVYEFLENGSLDQSSNLDVSTLYGIALGVARGIEYLHFGCKKRIVHFDIKPQNVLLDENLKPKVADFGLAKLCEKQESILSLLDTRGTIGYIAPELFSRVYGNVSHKSDVYSYGMLVLEMTGARNKERVQNADSNNSSAYFPDWIFKDLENGDYVKLLADGLTREEEDIAKKMILVGLWCIQFRPSDRPSMNKVVGMMEGNLDSLDPPPKPLLHMPMQNNNAESSQPSEEDSSIYSEV

SEQ ID NO: 6506 - protein, 298 aa, Azoarcus sp. EbN1
MADIYDALVIGGGPGGLAGALYLARFRRRVRVVDDGCSRATRIPRSHNMPGYPRGVPGNKLVAAIRKQAEAYGAELSVGRVETLERVAPGFAAVLADGTRLLARTVLLATGVSDVEPDLPHLVEAVRTGALRYCPVCDGYEIIDKAVGVLAASEAGIREALYLRNFTARLHVFRTSHDFRIEEHSDRLAEAGIRWAPEPVDSLRLWDAEVRVRHGAAETCCDSVYSALGTRVHAELSMGADTDEAGYLLTDRHRKTSIDGLYAAGDVAQGLNQISVAAGDAAIAAAAIHLALAPAWRK

SEQ ID NO: 6507 - protein, 236 aa, Brassica napus
MTESSLDLQESGWEELRREARKIEGDLDVKLSSYAKLGARFNQGGYGVDGGSPGGSWKSMEIEIQSSLEKLLDINDSMSRCAASAAPTTSVTQKLARHRDILHEYTQEFRRIKGNISSMREHAELLSSVRDDISEYKASGSMSPGVQVLRERASIHGSISHIDEVIGQAQATRAVLGSQRSLFSDVQGKVKILGDKFPVIRGLLGSIRRRRSRDTLILSAVIAACTLFIIIYWLSK

SEQ ID NO: 6508 - protein, 937 aa, Mesorhizobium loti MAFF303099
MMTTALTPFSARHIGPGVNDVRAMLAVIGVPSVETLISQAVPQSIRLDLPLTLPAPASEAEALAELSAIMAKNTVLKSFIGAGYHGVHVPPVIQRNLFENPAWYTAYTPYQAEISQGRLEMLFNFQTLVTELTGLPVASASLLDEATAVAEAVGIALRHHRDKRTKVAFAGTPHPQTLDVVRTRAEPLGIEIDGETIDDNTAALLVSWPDTLGVYGDHKAAIDKARAAGALVVFIADPLGLTLTDAPAKLGADIAVGPMQRFGVPMGFGGPHAAYCAVSDRLTRLMPGRLVGQSTDSKGRPGYRLALQTREQHIRRDKATSNICTAQALLANMATAYAIWHGPAGLQAIAGRIHALANRLASGLKAAGVSVLGASRFDTVTVEAKGKAAEIAEAAEKTGRLLRVLDADHVGIAFDETSTDADLDAIASLFGAKAAPSADSTVPGKPRGKEFLTQPVFNENKSETDMMRLLRRLADKDLALDRSMIPLGSCTMKLNAAAEMMPVSWPSIADLHPFAPASHSAGYRAMIGELEGWLSEITGFDAVSLQPNAGSQGEYAGLLAIRAYHRSRGEGHRTVCLIPSSAHGTNPASAAMAGMSVVVVRCLEDGNIDMDDMRAKANEHSKNLAALMFTYPSTHGVYEEGARHLCALIHEHGGQVYFDGANLNALVALARPADIGADVCHMNLHKTFCIPHGGGGPGVGPIGVKAHLKPYLPGHVTEGSAHAVSAAPFGSASILPITWMYIRMMGAAGLKQATETAIISANYVATRLAPHFPLLYKGRHDRIAHECILDTRVLKESAGISVDDIAKRLIDYGFHAPTMSFPVAGTLMVEPTESEPKRELDRFCEAMIAIAGEAAKVARGDWPLADNPLVNAPHTAAETLAGQWTHPYSRLEAAYPAGDADTAAKYWPPVSRIDNVAGDRNLVCSCPPLSDYLGAAE

SEQ ID NO: 6509 - protein, 276 aa, Debaryomyces hansenii CBS767
MAIGESRTELLHWLNSTLDLLYGKVENCGTGAAYCQLMDSIVGGIPMTKVKFNAQTEYDYIHNFKILQASFTKHKVNKTIDVERLVKCRLQDNLLLLQWFKKFWHENKDVNGVYDAASKRKVSGLYSNGSGFSVTPQERSRTSSESSLGSRRTTLPSRVPSTGRTSITPNTPTNTTNKLAQLNKELADTTHELSTVNEELLEYKILAESLETERNFYFNKLREIEILTENLKHLDESEFSKLSVNEFIEKVQSILYSTEEGFQSSNDQVDIDGESF

SEQ ID NO: 6510 - protein, 231 aa, Hordeum vulgare subsp. spontaneum
YFRLATPETEYGRMNIGSRPSKRKPSGGIESLRAIPWIFAWTQTRFHLPVWLGFGGAFKHILKKDIRNFHMLQEMYNEWPFFRVTIDLVEMVFAKGNPGIAALYDRLLVSEGLQPLGEKLRANYEETQKLLLQVAGHKDLLEGDPYLKQRLRLRDAYITTMNVCQAYTLKRIRDPDYHVALRPHLSKEVMDTSKPAAELVTLNPASEYAPGLEDTLILTMKGIAAGLQNTG

SEQ ID NO: 6511 - protein, 308 aa, Brassica napus
  misc_feature (6)..(6): Xaa can be any naturally occurring amino acid
  misc_feature (24)..(24): Xaa can be any naturally occurring amino acid
  misc_feature (31)..(31): Xaa can be any naturally occurring amino acid
  misc_feature (34)..(34): Xaa can be any naturally occurring amino acid
  misc_feature (41)..(41): Xaa can be any naturally occurring amino acid
EENLVXCLADLFFQISSQKKKTGXIAPKRFXQRXKKQNELXRSYMHQDAHEFLNYLLNEVVDILEKEAKATTKPERETSSSSSPEKIANGPKAPLANGVHKEPVVTWVHNIFQGILTNETRCLRCETVTARDETFLDLSLDIEQNSSITSCLKNFSSTETLHAEDKFFCDKCCSLQEAQKRMKIKKPPHILVIHLKRFKYMEQLGRYKKLSYRVVFPLELKLSNTVEPYTDVEYSLFAVVVHVGSGPNHGYYVSLVKSHNHWLFFDDENVEMIEESAVQTFFGSSQEYSSNTDHGYILFYESLGPTTK

SEQ ID NO: 6512 - protein, 108 aa, Brassica napus
MVVLTLMALVKPVIFLTSFVFEAEDMVFGSPGGFVVVRVACFLVFFAGLLFGLTLGLMSLGLVRLEIFQQSGSSAEKKQAVVFLPGVKKQHQLFVTLFLCNAVALEAL

SEQ ID NO: 6513 - protein, 117 aa, Triticum aestivum
MAKKRKRSSDAPAPAAVEKPDDSAPERPERTLFGFKDSADDPASKDAGQFFRNKEKVLITCSRRIIYRYRHLMQNVVSLLPHAKKDSKVESKQSKGSALNELVELRSCSSCLFFECR

SEQ ID NO: 6514 - protein, 449 aa, Salmonella enterica subsp. enterica serovar Paratyphi A str.
MTEIVVSKFGGTSVADFDAMNRSADIVLSDANVRLVVLSASAGITNLLVALAEGMEPGERFATLDAIRKIQFDILDRLRHPNVIREEIERLLENITILAEAASLATSAALTDELVSHGELMSTLLFVEILRERDVQAHWFDVRKVMRTSDRFGRAEPDVAALAELAAQQLLPRLSETLVITQGFIGSESKGRTTTLGRGGSDYTAALLAEALHAARVDIWTDVPGIYTTDPRVVPVAQRIDEIDFEEAAEMATFGAKVLHPATLLPAVRSDIPVFVGSSKDPQAGGTLVCNKTQNPPLFRALALRRNQTLLTLHSLNMLHSRGFLAEVFGILARHNISVDLITTSEVSVALTLDTTGSTSTGDTLLTQSLLMGLSALCRVEVEEGLALVALIGNNLSKACGVGKEVFGVLEPFNIRMICYGASSHNLCFLVPGDDAEKVVQKLHQNLFE

SEQ ID NO: 6515 - protein, 549 aa, Salmonella enterica subsp. enterica serovar Paratyphi A str.
MKNINPTQTSAWQALQKHYDEMKDVTIAELFANDSDRFAKFSATFDDLMLVDFSKNRITEETLAKLQDLAKETDLAGAIKSMFSGEKINRTEDRAVLHVALRNRSNTPIIVDGKDVMPEVNAVLEKMKTFSQAIISGQWKGYTGKAITDVVNIGIGGSDLGPFMVTEVLRPYKNHLTMHFVSNVDGTHIAEVLKKVNPETTLFLVASKTFTTQETMTNAHSARDWFLKTAGDEKHVAKHFAALSTNAKAVGEFGIDTANMFEFWDWVGGRYSLWSAIGLSIILSVGFDNFVELLSGAHAMDKHFSTTPAEKNLPILLALIGIWYNNFFGAETEAILPYDQYMHRFAAYFQQGNMESNGKYVDRNGNAVDYQTGPIIWGEPGTNGQHAFYQLIHQGTKMVPCDFIAPAITHNPLSDHHQKLLSNFFAQTEALAFGKSREVVEQEYRDQGKDPAQLEHVVPFKVFEGNRPTNSILLREITPFSLGALIALYEHKIFTQGVILNIFTFDQWGVELGKQLANRILPELGDDKAISSHDSSTNGLINRYKAWRA

SEQ ID NO: 6516 - protein, 241 aa, Raphanus sativus
SWIIKLLLERGYTVKGTVRNPDDPKNTHLRELEGAKERLILCKADLQDYDALKEAIDGCDGVFHTASPVTDDPEEMVEPAVNGAKFVINAAAETKVKRVVITSSIGAVYMDPNRDPEAVVDESCWSDLEFCKNTKNWYCYGKMVAEQAAWETAEEKGVDLVVLNPVLVLGPPLQPTINASLFHVLKYLTGSAKTYANLTQAYVDVRDVALAHVLVYEAPSASGRYLLAESALHRGEVVEIL

SEQ ID NO: 6517 - protein, 464 aa, Bordetella bronchiseptica RB50
MHRNTTRCTIALPGGSILKLQSLDDFLRRVAARDPQQAEFMQAVQEVMLSLWPFIEKHPHYAEHALLERLVEPERVIQFRVCWTDDQGQAQVNRAFRIQHSSAIGPFKGGMRFHPTVNLSVLKFLAFEQTLKNALTTLPMGGGKGGSDFDPKGKSDAEVMRFCQALMLELHRHLGPDTDVPAGDIGVGAREVGFMAGMMKKLSNSAASVFTGKGLCFGGSLIRPEATGYGTVYFAQEMLQRAGLSFDGMRVSVSGSGNVAQYAIEKAMALGAKVVTISDSCGTVIDEAGFTHEKLLALMHIKNDLRGRLDTYASQFGLRYEAGVRPWHVPVDVALPCATQNELDENDARTLIRNGVKCVAEGANMPATLDAAKAFIAAEVLYAPGKASNAGGVAVSGLEMSQNSARLPWTREQVDARLHAIMRDIHENCVRHGHGAGNYVNYVDGANIAGFVKVADAMRQQGLY

SEQ ID NO: 6518 - protein, 580 aa, Zea mays
MTEEAEAKAKGNAAFAAGRFEEAVQHFSDAIALAPDNHVLYSNRSAAYASLWRYAEALDDAKRTVALKPDWAKGYSRLGAAHLGLGDAPKAVEAYEKGLALEPSNEALKSGLAQARQSASAPRRPVGSGADAVGKMFQGPELWSKVAADPTTRGYLDQPDFVQMLREVQRNPGRLNSYLSDQRMVQVLTLMLNIKFQNQSSGAPDPAAAQSNPPPPKQQPEAKAREPEPDPEPEPMEVTEEDKEQKERKASAQKEKEAGNAAYKRKDFDTAIQHYTEAMELDDEDISYITNRAAVYLEMGKYDECIKDCDKAVERGRELHADFKMISRALTRKGTALAKLAKSSQDYDAAIEIFQKALTEHRNPDTLKKLNDAERAKKELEQQEYYDPRIADEEREKGNEFFKQQKYPEAVKHYTEALRRNPKDPRVYSNRAACYTKLGALPEGLKDAEKCIELDPTFSKGYTRKGAIQFFMKEYDKALETYQAGLKHDPKNQELLDGVRRCVEQINKASRGELSEEELKERQNKAMQDPEIQNILTDPIMQQVLTDLQENPRAAQAHLKNPGVMQKIQKLVSAGIVQMK

SEQ ID NO: 6519 - protein, 89 aa, Glycine max
KPHSPRHSPPPYWNGGLAAMLGLIACARLILACAYCKLSGYRQGNGESERGLEAGETEHDLKPAYRYKGRILEIIAGHEKPTFYAAPSD

SEQ ID NO: 6520 - protein, 181 aa, Triticum aestivum
  misc_feature (122)..(122): Xaa can be any naturally occurring amino acid
  misc_feature (143)..(143): Xaa can be any naturally occurring amino acid
MAPTVMASSATSVAPFQGLKSTAGLPVSRRSNGASLGSVSNGGRIRCMQVWPIEGIKKFETLSYLPPLSTEALLKQVDYLIRSKWVPCLEFSKVGFIFREHNASPGYYDGRYWTMWKLPMFXGCTDATQVINKWRSQEGVPDXYVRIIGFTTSPSECVSSCLKQRAARSARLNTHTAHIMH

SEQ ID NO: 6521 - protein, 171 aa, Raphanus sativus
GGAGVRGLEIQGRFVIFTVIGVYLDPVSVPSLSVKWEGKTTEELTESVPFFREIVTGAFGKFIKVTMKLPLTGQQYSEKVTENCVAIWKSLGIYTDSEAKAVERFLEVFKDETFPPGASILFALSPEGSLTVAFSKDDSIPETGKAAIENKLLAEAVLESIIGKNGVSPGA

SEQ ID NO: 6522 - protein, 128 aa, Raphanus sativus
ENEVIKPTVNGVLGIMKACDKAKTVRRIVFTSSAGTVNAEEHQKNVYDENDWSDLDFIMSKKMTGWMYFMSKTLAEKAAWDYAKEKGIDFISIIPTLVIGPFITTSMPPSLITALSPITRNEAHYSII

SEQ ID NO: 6523 - protein, 363 aa, Bordetella bronchiseptica RB50
MSSPRTYRIAAIAGDGIGREVMPEGLRVVRAAARRFGLDLDIVTFDWAHCDYYREHGQMMPDDWKAQLAGMDAIYFGAVGWPATVPDHVSLWGSLLKFRREFDQYINLRPVRLFEGVPCPLAGRQPGDIDYLVVRENTEGEYTSAGGVIYEGTEREIVIQESVYSRYGADRVLHYAYALADSRPRRRLTVATKSNGIAISMPWWDKRADAVGQQYPGVAVDKQHIDILSARFVLQPDRFDVVVASNLFGDILSDLGPATTGTIGLAPSANLNPEREFPSLFEPVHGSAPDIYGQNIANPVAMIWSGALMLDFLTEGAGAGRAAHDAIVAAIEQVLAHGPRTRDLGGTASTDAMGEAIAARLAA

SEQ ID NO: 6524 - protein, 471 aa, Salmonella enterica subsp. enterica serovar Typhi str. CT18
MVSINDSALTPRSLRDTRRMNMFVSVSAAVAGLLFGLDIGVIAGALPFITDHFVLTSRLQEWVVSSMMLGAAIGALFNGWLSFRLGRKYSLMAGAILFVLGSLGSAFASSVEVLIGARVILGVAVGIASYTAPLYLSEMASENVRGKMISMYQLMVTLGIVLAFLSDTAFSYSGNWRAMLGVLALPAVLLIILVVFLPNSPRWLAQKGRHIEAEEVLRMLRDTSEKARDELNEIRESLKLKQGGWALFKANRNVRRAVFLGMLLQAMQQFTGMNIIMYYAPRIFKMAGFTTTEQQMIATLVVGLTFMFATFIAVFTVDKAGRKPALKIGFSVMALGTLVLGYCLMQFDNGTASSGLSWLSVGMTMMCIAGYAMSAAPVVWILCSEIQPLKCRDFGITCSTTTNWVSNMIIGATFLTLLDSIGAAGTFWLYTALNIAFIGITFWLIPETKNVTLEHIERKLMAGEKLRNIGV

SEQ ID NO: 6525 - protein, 944 aa, Welwitschia mirabilis
  misc_feature (581)..(581): Xaa can be any naturally occurring amino acid
SIDAQLRLLVPTKVSEDDKLIEYDALLMDRFLDILQDLHGEEIRETVQECYELSGEYEGKFDTAKLEELGGVLTSLDAGDSIVVAALSHMLNLANLAEEVQIAYRRRIKHKKKGDFADENSATTESDIEETFKRLVNQLGRSPQEVFDALKNQTIDLVLTAHPTHQSVSLLQKHGRIRNCLSQLYAKDITPDEKQELDEALQREIQAAFRTDEIRRTPPTPQDEMRAGMSYFHETIWKGVPKFLRRVDTALKSIGINERLPYNAPLIQFSSWMGGDRDGNPRVTPEVTRDVCLLARMMATNLYYSQIEDLMFELSMWRCSDELRQRALQLHNSAKRDAKHYIEFWKQVPPNEPFRVILGDVRDKLYNTRERTRQLLANGFSDVPEEALTSVDQLLEPLELCYRSLCSTGDQPIADGSLLDFMRQVSTFGLTLVKLDIRQESDRHTDVIDAITRHLGLGSYKEWPEDKRQEWLLAELRGKRPLFGPDLPTTDEIREVLDTFHVVAELPPDNFGAYIISMATAPSDVLVVELLQRECRVKKPLRVVPLFEKLADLENRPAALARLFSIDWYRNRIDGKQEVMXGYSDSGKDAGRLSAAWQLYKAQEELIKVAKQFGIKLTMFHGRGGTVGRGGGPTHLAILSQPPDTIHGSLRVTVQGEVIEQCFGEEHLCFRTLQRFTAATLEHGMHPPIAPKPEWRQLMDEMAVVATQEYRSYVFHNKRFVEYFRSATPELEYGRMNIGSRPSKRKPSGGIESLRAIPWIFAWTQTRFHLPVWLGFGAAFKSVIEKDIRNLHTLQQMYNEWPFFRVTIDLVEMVFAKHPEIAALYDKLLVSSVLWAFGEQLRKNYVETKTLLLQVAGHKEVLEGDPYLKQRLRLRDSYITTLNALQAYTLKRIRDPSYHVTLRPHLSKESSTKPAAELVKLNPTSEYAPGLEDTLILTMKGIAA

SEQ ID NO: 6526 - protein, 546 aa, Pseudoalteromonas tunicata D2
MAIHPRAGQVAQQRDLVNIPKLISAYYLNEPDVEEFPEQKVAFGTSGHRGCSFNTQFNESHILAVTQAICDYRRQNGIFGPLFLGKDTHALSEAAFNSAIEVLVANEVQVIVQENDDFTPTPVISHAIVAHNQKNPHELADGIVVTPSHNPPQDGGFKYNPPNGGPADTDITKWVEDRANHLLLEDLVEVEIFPFAKAARSGFVKYQDLITPYVDDLENVINLKAIAESGISIGVDPLGGSGIHFWPVITKKYGLNLTVVNDIVDPAFGFMSLDKDGKIRMDCSSPYAMANLIAIKDKFDIGIGNDPDYDRHGIVTADGLMNPNHFLAVAIDYLLSHRKQWPASAKIGKTLVSSAMIDKVVARNNRQVEEVPVGFKWFVEGLANATLAFGGEESAGASFLRLDGTVWNTDKDGFILGLLAAEILAVTGKTPSELYRELEQEFGAPIYRRLDAAANREQKAKLGKLQASDLTATTLAGDPILAKLTHAPGNGAAIGGLKVVTENGWFAARPSGTEDIYKIYLESFKGEEHLALLEKEARALVDSVIS

SEQ ID NO: 6527 - protein, 680 aa, Anabaena variabilis ATCC 29413
MQPEPKVNILLVDDKVENLLALEAILERLGANLVRATSGEEALRCLLHQDFAVILLDVQMPGMDGFETATLIRNRGRSRQTPIIFLTAFSTSDQMLFKGYALGAVDYLLKPIDANILTSKVTVFVELFKKTQAIQRQAAQLAAINAELRQSEERFRSLSTCSPIGIFETDTAGCCKYTNPRYQAICGLDATESLDKRWLESVHPEDQERAIASWSTYIDQGGDYSDEFRFQTVDGSLRWVQVRSSPMLSGNGELLGHVGTLEDITARKQSEEIRAQVIREQTARQEAEAANRMKDEFLAVLSHELRTPLTSMLGWSKILRAKKLDEKATARALEAIERNANSQVQLIEDILDVSRIIRGQLRLNLSPVNLTTVVEAALEAVRPLADTKSMTINTALDYTLSPVSGDSARLQQIVWNLLTNAIKFTPKEGKVEIRLEGISGGLSDDLTHAQIQVIDTGIGIEREFLPKVFERFRQADSTTTRSHNGLGLGLAIVRHLVELHKGTILAESPGVGKGATFTVRFPLIQENREPRPAPTENFSGDGANSSPLAGLKVLIVDDETDTRNFLGFLFEEYGAISSTSASVETALAVIDQLKPDILISDIGMAEQDGYTLIRKLRSLPPEQGGEIPAIALTAYSREEDRQQIIEAGFQYHLCKPIDPNQLISVVASIFRLSPALSKLG

SEQ ID NO: 6528 - protein, 325 aa, Pseudoalteromonas tunicata D2
MAQMNMLQAINSALDISMAEHPNACIFGEDVGHFGGVFRATSGLQERYGRHRVFNTPLTEQGILGFANGLAAFGAPTIAEIQFADYIFPAFDQIVNETAKFRYRSGNEFNVGKLTIRTPYGGGIAGGLYHSQSPEAYFAHTPGIKIVVPRNPHQAKGLLRAAILDDNPVLFFEPKRLYRASIGEVPTEDYTIELGKAEVVKEGKDVTLLAWGAQMEIIEQAAKLAEQDGISCEIIDLRSILPWDRETVAQSVIKTGRLVVSHEAPITNGFGAEIAATIQQHCFLHLEAPILRVCGLDTPYPLALEKEYVPDALKVLSAIKQSVSF

SEQ ID NO: 6529 - protein, 511 aa, Pseudoalteromonas tunicata D2
MTQDFILPDIGEGIVECEVVEWLVAEGDTVSEDQPICDVMTDKALVQIPAVYSGVIAKLYYQKGEIAKVHAPLFAMSVADGSQVNEPEINLPDTSAVTAVQSDILEDFILPDIGEGIVECEIVDWLVTEGQQIEEDQAVCDVMTDKALVQIPAKYSGIVEKLYYQKGEIAKVHSPIFQMRLSQSKPSEIVTEITPVVVAGNPNTMAQVTKAAQGKALASPAVRRRARELDVDLSEVPGTGKNGRVFKEDIERYLSLPKPDQSVLSVETKVPAVVSSNATRVEPIRGIKAAMAKQMMASVTTIPHFTFSDEIDLTQIIDLRLQLKQQYQDQGVKLTMMPFFVKALSLAITEFPVLNSQVNDECTELTYFTDHNIGMAVDSKIGLLVPNIKQCQQKSIIDIAQEISRLTDSAREGRVAPDDLKGGTISISNIGAIGGTTATPIINKPEVAIVALGKVQHLPRFDVNGSVVSRAIMQVSWSGDHRVIDGGTIARFNNLWKEYLENPAKMLMAMR

SEQ ID NO: 6530 - protein, 74 aa, Brassica oleracea
VRGLDIHGKFVIFTVIGVYLDAVAVPSLFVKWKGKTTEELTESVPFFREIVTGSFEKFIKVTMKLPLTGQQYSE

SEQ ID NO: 6531 - protein, 340 aa, Brassica napus
  misc_feature (33)..(33): Xaa can be any naturally occurring amino acid
  misc_feature (42)..(42): Xaa can be any naturally occurring amino acid
  misc_feature (82)..(82): Xaa can be any naturally occurring amino acid
TKAAWESVKYAKRPRIVIFTSTSDIHLKYKLKXTREEVVEMXASSIRFAKSLGFEDIEFGCEDGGRSDKDYICKVFEEAIKXGATTLACPDTVGINMPHEYGKLVRYIKANTPGIDDVIFSAHCHNDLGVATANTIAGICAGARQVEVTINGIGERSGNAPLEEVVMALKCRGAFVMGGVYTRIDTRQIMATSKMVQEYTGLYVQPHKPIVGANCFVHESGIHQDGILKNRSTYEILSPEDVGVVKSQNSGIVLGKLSGRHAVKGRLKELGYGISDEKLNEVFSRFRDLTKQKKRVTDDDLRALVTCGDEIFSSEKLNGTNDNEINRNGYVPSPQISSVV

SEQ ID NO: 6532 - protein, 172 aa, Triticum aestivum
GYVERLGHGGFESSWRKDAMDWICKVHSYYNFGPLTLCLSVNYMDRFLSSFDLPHDKSWMQQLMSVACLSLAVKMEETVAPLPVDLQVCDEYYAFEPRNIKRMELIVMETLKWRMHSVTPFSFLCYFLDKFNEGKPPSYMLVSRCAELIVATVKDYRFLSFRPSEIAAAVVL

SEQ ID NO: 6533 - protein, 1035 aa, Oryza sativa
MTDTTDDIAEGISFQAFEDDCRLLGSLLHDVLLRELGPRFIHLLERITILAQSAVNMRSAGVEDTAVVVEKQLGAELAAMSLEDSLCLARAFSHHLNLMTIADTYHRVRKARNFADLSKSCDDTFAKLIQSGVSPEELYDTVCKQEVEIVLTAHPTQINRRTLQYKHLRIAHLLEFNERADLSLEDKEILIEDLVREITAIWQTDELRRHKPTPVDEARAGLHIVEQSLWKAIPHYLRRVSNALKKNTGKPLPLTCTPIKFGSWMGGDRDGNPNVTAKVTRDVSILSQWMAIDLYIRELDTLSFELSINRCSEKLANLANDILLKESASEDQKTNTWNQTGPQNNLKLQHSLALPAQLPSGADLPSCTECNDGESQIRMSKLPGNPKHKLALNITEKREDSPLPSPSHRPMGRTPSGGQLRKMFTESQIGRSSFRKLLEPSISERPGSTPYRVVLGDVKEKLMNTRRRLELLLEDLPCDRDTSEYYDTSDKLLEPLLLCYQSLQSCGSSVLADGRLADLIRRVATFGMVLMKLDVRQESGRHTETLDAITSYLDLGVYSEWDEQKKLDFLTRELKGKRPLVPPYIQVTADVQEVLDTFRVAAELGSDALGAYVISMASNASDVLAVELLQKDARLTVSGDLGRPCPGGTLRVVPLFETVNDLREAGPAIRKLLSIDWYRDHIIKNHNGHQEVMVGYSDSGKDAGRFTAAWELYKAQEDVVAACNAFGIKVTLFHGRGGSIGRGGGPTYLAIQSQPPGSVMGTLRSTEQGEMVQAKFGLPQTSVRQLEIYTTAVLLATLRPPQPPRDDKWRGVMEEISRVSCAQYRSTVYENPEFIKYFQEATPQAELGYLNIGSRPAKRRTTPGISNLRAIPWVFAWTQTRLVLPAWLGVGRGLQDACDKGHTHELRAMYEEWPFFQSTVDLIEMVVAKADAPMAKHYDDVLVHDAGRRTLGAELRQELARTENCVLAVSGHKKLSANNRSLRKLIDSRLTYLNPMNMLQVEVLRRLRQDDDNRKLRDALLITINGIAAGMRNTG

SEQ ID NO: 6534 - protein, 476 aa, Streptococcus bovis
MTKQYKNYVNGEWKLSKEEIKIYAPATGEELGSVPAMSQEEVDYVYASAKAAQKAWRALSYVERAEYLHKAADILMRDAEKIGAVLSKEIAKGYKSAVGEVIRTAEIINYAAEEGVRLEGEVLEGGSFDPASKKKIAIVRREPVGLVLAISPFNYPINLAGSKIAPALISGNVVALKPPTQGSISGLLLAEAFAEAGLPAGVFNTITGRGSVIGDYIVEHEAVNYINFTGSTPVGEHIGHLAGMRPIMLELGGKDSAIILEDADLDLAAKNIVAGAYGYSGQRCTAVKRVLVMDSIADKLVEKVSALVNNLTVGMPEDNADITPLIDTKAADYVEGLIKDAQEKGAKEVISFKREGNLISPVLFDNVTTDMRLAWEEPFGPVLPFIRVNSVEEAIEISNKSEYGLQASVFTNNFPLAFKIAEQLEVGTVHINNKTQRGTDNFPFLGAKKSGAGVQGVKYSIEAMTTVKSTVFDIAK

SEQ ID NO: 6535 - protein, 69 aa, Zea mays
MADWGPVVIATVLFVLLTPGLLFQLPAHGRIVGFGTMHTSGIAILVHAVLYFALITIFLIAIGVHIYAG

SEQ ID NO: 6536 - protein, 504 aa, Burkholderia sp. 383
MNANSKDVPTVKLLIDGAFVESATNEWRDIVNPATQQVLARVPFATVAEVDAAVQAAHTAYATWKNTPIAARMRIMLKFQDLVRTNQQRIAKTLTAEQGKTIPDAEGDIFRGLEVVEHACSIGSLQLGEFAENVAGGVDTYTLRQPLGVCAGITPFNFPAMIPLWMFPMAIVCGNTFVLKPSEQDPLSTMELVELAVEAGVPKGVLNVVHGGKEVVDAICTHPLVKAISFVGSTAVGTHVYNLGSANGKRVQSMMGAKNHAVVLPDANREQAINALVGAGFGAAGQRCMATSVAVLVGNARDWLPDIVAKAKALKVNAGAEAGTDVGPVVSKAAKERILSLIDAGVKEGAKLELDGRDVKVTGYEHGNFVGPTIFSGVKTGMSVYTHEIFGPVLVVMEADTLDEAIALVNANPFGNGVGLFTQSGAAARKFQSEIDIGQVGINIPIPVPVPFFSFTGSRGSKLGDLGPYGKQVVQFYTQTKTVTARWFDDDTTAGPVNTTIRLH

SEQ ID NO: 6537 - protein, 281 aa, Saccharomycopsis fibuligera
MEKNWHHTFYNELRVAPEEHPVLLTEAPRNPKSNREKMTQILFETFNVPAFYVSIQAVLSLYSSGRTTGIVLDSGDGVTHVVPIYAGFSLPHAILRIDLAGRDLTDYLMKILSERGYSFVTTAEREIVRDIKEKLCYVALDFDQELQTSAQSSAIEKSYELPDGQVITIGNERFRAPEALFHPSVLGLESAGIDETTYNSIIKCDVDVRKELYGNIVMSGGTTMFPGIAERMQKEITALAPSSMKVKIIAPPERKYSVWIGGSILASLSTFQQMWISNRNT

SEQ ID NO: 6538 - protein, 263 aa, Burkholderia sp. 383
MIELDYVDDGAIACATLKRPPANAFTADGLQQLQETVAELNANPRVRALVITGDGPKFFSAGADLNTFAEGDRAVARAMASRFGAAFEALHDARVVTIAAINGYAMGGGLECALACDLRIAETHAQMALPEPSVGLLPCGLGTQTLPWLVGEGWAKKIILTGARVDAATALRIGLVEDVVESGASRDAALALARNVARQSPHAVAYSKELIGLARRGVPRSAALAVERERFVDLFDTNDPREGVAAFLGKRAPQWNTDGEPQR

SEQ ID NO: 6539 - protein, 343 aa, Arabidopsis thaliana
MKGLFKSKPRTPADLVRQTRDLLLFSDRSTSLPDLRDSKRDEKMAELSRNIRDMKSILYGNSEAEPVAEACAQLTQEFFKEDTLRLLITCLPKLNLETRKDATQVVANLQRQQVNSRLIASDYLEANIDLMDVLIEGFENTDMALHYGAMFRECIRHQIVAKYVLESDHVKKFFDYIQLPNFDIAADAAATFKELLTRHKSTVAEFLTKNEDWFFADYNSKLLESSNYITRRQAIKLLGDILLDRSNSAVMTKYVSSRDNLRILMNLLRESSKSIQIEAFHVFKLFAANQNKPADIVNILVANRSKLLRLLADLKPDKEDERFEADKSQVLREIAALEPRDLA

SEQ ID NO: 6540 - protein, 420 aa, Sulfolobus solfataricus P2
MMEEVLSSSLYTQQVKKLYKVGELLGLDNETLETLSQPERIIQVKIQIRGSDGKLKTFMGWRSQHNSALGPYKGGVRYHPNVTQDEVEALSMIMTWKNSLLLLPYGGGKGGVRVDPKKLTREELEQLSRKYIQAIYKYLGSELDIPAPDVNTDSQTMAWFLDEYIKITGKVDFAVFTGKPVELGGIGVRLYSTGLGVATIAKEAANKFIGGVEEARVIIQGFGNVGYYAGKFLSEMGAKIVGVSDSKGGVINEKGIDVGKAIEIKEKTGSVINYPEGRKVTNEELLISDCDILIPAALENVINKFNAPKVKAKLIVEGANGPLTADADEIMRQRGIAVVPDILANAGGVVGSYVEWANNKMGEIISDEEAKKLIVDRMNNAFNTLYDYHQKKLEDHDLRTAAMALAVDRVVRAMKARGIL

SEQ ID NO: 6541 - protein, 696 aa, Rhodospirillum rubrum ATCC 11170
MATKATNTAEAVNTQEEGGDSPLLDSMNAAVKKLVNRGKDRGYITYDELNNALPPDDVSSEQIEDTMAMLSDMGINVVEDEEEGEASAAPPAEAGEEEPGREVAATGNVSEDDIGRTDDPVRMYLREMGSVELLSREGEIAIAKRIEAGREMMIGGICESPLTIRALLQWHDALVDGRMLLRDIIDLDATYGSGAGPDVVAEGLEDSVVPLSPLALSPARALPKEADEAEEAVTPGRDDDSEDEDEGDDAKPADGAGDEEAAPSGEDEGDGSENNVSLAAMEQELMPRVLETFEHIATTYGKLKKAQDQRIAALQKGEEPGAALERKYDKLKLELVGLMEDVHLNNARIEQLVEQLNALNKGLITQEGKLLRLAERAKIRRDEFLDHYFGREMDPSWREDVAALPGKGWRDFTTRFADEIKDIRGSIAEIAERSLLPIPEFRRIVSTVQKGEREASRAKKEMIEANLRLVISIAKKYTNRGLQFLDLIQEGNIGLMKAVDKFEYRRGYKFSTYATWWIRQAITRSIADQARTIRIPVHMIETINKLVRTSRQMLHEIGREPTPEELAEKLQMPLEKVRKVLKIAKEPISLETPIGDEEDSHLGDFIEDKNAVQPLDAAINSNLRETCTRVLASLTPREERVLRMRFGIGMNTDHTLEEVGQQFSVTRERIRQIEAKALRKLKHPSRSRKLRSFLDN

SEQ ID NO: 6542 - protein, 644 aa, Zea mays
MISARTAAASPASLWKQGGRSEGGGSCDGCRTYRNTLRRAAAAKVRALPSRAVEAVKMGSAAEMEQEEAEVAAAAAGVVVEDHYGEDSATEELPILPWAFSVASGYTLLRDPHHNKGLAFMEKERDAHHLRGLLPPAVVPQELQIKKIMHNLRQYQVPLQRYMAMMDLQERNERLFYKLLIDNVEELLPVVYTPTVGEACQKYGSIFRQPQGLYVSLRDKGKVLEVLRNWPHRNIQVICVTDGERILGLGDLGSQGMGIPVGKLALYTALGGVRPSACLPITIDVGTNNEKLLNDEFYIGLRQKRATGEEYHELMEEFMAAVKQIYGEKVLIQFEDFANHNAFNLLAKYSKSHLVFNDDIQGTASVVLAGLLAALKVVGGTLAEHTYLFLGAGEAGTGIAELIALEISKQTSAPIEECRKKIWLVDSKGLIVDSRKNSVQSFKKPWAHEHEPLTTLYDAVQSIKPTVLIGTSGVGRTFTKEVVEAMASFNERPIIFSLSNPTSHSECTAEEAYNWTQGRAIFASGSPFDPVEYDGKVFVPGQSNNAYIFPGFGLGLVISGAIRVHEDMLLAASEALAAQATQENFDKGSIFPPFTNIRKISARIAAAVAAKAYELGLATRLPPPRDLVKYAQSCMYTPVYRNYR

SEQ ID NO: 6543 - protein, 644 aa, Mycobacterium tuberculosis H37Rv
MTTSESPDAYTESFGAHTIVKPAGPPRVGQPSWNPQRASSMPVNRYRPFAEEVEPIRLRNRTWPDRVIDRAPLWCAVDLRDGNQALIDPMSPARKRRMFDLLVRMGYKEIEVGFPSASQTDFDFVREIIEQGAIPDDVTIQVLTQCRPELIERTFQACSGAPRAIVHFYNSTSILQRRVVFRANRAEVQAIATDGARKCVEQAAKYPGTQWRFEYSPESYTGTELEYAKQVCDAVGEVIAPTPERPIIFNLPATVEMTTPNVYADSIEWMSRNLANRESVILSLHPHNDRGTAVAAAELGFAAGADRIEGCLFGNGERTGNVCLVTLGLNLFSRGVDPQIDFSNIDEIRRTVEYCNQLPVHERHPYGGDLVYTAFSGSHQDAINKGLDAMKLDADAADCDVDDMLWQVPYLPIDPRDVGRTYEAVIRVNSQSGKGGVAYIMKTDHGLSLPRRLQIEFSQVIQKIAEGTAGEGGEVSPKEMWDAFAEEYLAPVRPLERIRQHVDAADDDGGTTSITATVKINGVETEISGSGNGPLAAFVHALADVGFDVAVLDYYEHAMSAGDDAQAAAYVEASVTIASPAQPGEAGRHASDPVTIASPAQPGEAGRHASDPVTSKTVWGVGIAPSITTASLRAVVSAVNRAAR

SEQ ID NO: 6544 - protein, 523 aa, Karenia brevis
SVLCLAPYRGRMVAPAAGTARAFWFRTDLRLDDQPALSTACEDALSLLPIYVFDPAKFIDLTLAGARKSSARRARFLIESLVNLRRRLEDRGSGLAVAIGDPAVVIADLCASASAIYVTQGICSEETQDEARVESKMKAPALLSRVWGGSLYFPDECGCNPTKAPLLFSNFKKKAEVFGKIREPLAELTKLPSLPGAVCEPDLSQALRFMPTLAELGFESEEINAAEFDDPRGVLPFSGGEDAALTRLQKWIWDDDHLREYWMIRNGMKGEGYSSKFSPWLALGCLSPRRVWKEVQRYEKERVKNKSTYWLVFELMWRDFFVYMALTHGDKLFRKGGITGDRKRSWPGSTTDLDRWKNGKTGDLLVDANMLELLATGWMSNRGRQNVASYLIFNMRVDWRYGAAHFEEHLLDYDPCSNWGNWVAAAGLTGQRVNKFNTLYQLDRYDPSREYVKHWLGNLDDQHSKLDAEVPECSANVSSDSEYIKEAGKNNLQDTSEGASRTKRARGKKSKKKLQSDSVAMGA

SEQ ID NO: 6545 - protein, 387 aa, Brassica napus
  misc_feature (157)..(157): Xaa can be any naturally occurring amino acid
  misc_feature (171)..(171): Xaa can be any naturally occurring amino acid
MVAHKETVCVTGASGFIGSWLVMRLLERGYFVRATVRDPGNLKKVQHLLDLPNAKTQLTLWKADLSDEGSYDDAINGCDGVFHIATPMDFESKDPENEVIKPTVNGVLGIMKACDKAKTVRRIVFTSSAGTVNVEEHQKNVYDENDWSDLDFIMSKXKMTGWMYFMSKTLXAEKAAWDYAKEKGIDFISIIPTLVIGPFITTSMPPSLITALSPITRNEAHYSIIRQGQYVHLDDLCNAHIFLYEQAAAKGRYVCSSHDATILTISEFLRQKYPEYNVPSTFEGVDENLKSIMFSSKKLIDMGFNFKYSLEDMLVESIETCRQKGFLPVTLPEHLKSEDKVPGSDDNKEIKNGSAGLTDGMVACKKTEPGMAGEKADSHMSAQQICA

SEQ ID NO: 6546 - protein, 158 aa, Glycine max
  misc_feature (121)..(121): Xaa can be any naturally occurring amino acid
  misc_feature (137)..(138): Xaa can be any naturally occurring amino acid
  misc_feature (148)..(148): Xaa can be any naturally occurring amino acid
MGGEVPWSEISGPFALSVGVALCTEFLLRWSHRALRHFSLLPTHESHRRPREGPFDLTAVFAIISPVPAFALLSYEKKCAGLVPVLFFGAGLGFSVFGLASLFVRGGLVLPRSPGGPPCRXPVSAWVASARPLPPSXXFSRFPCGLFXFSPAFFALFG

SEQ ID NO: 6547 - protein, 466 aa, Brassica napus
MATFALKSFTGLRQSPTDQITFVSHVPSSLSRSQRRTSLKVTASRASPKLANRSLRVAVIGGGPAGGAAAETLAQGGIETILIERKMDNCKPCGGAIPLCMVGEFNLPLDIIDRRVTKMKMISPSNIAVDIGRTLKEHEYIGMVRREVLDQYLRERAEKSGATVINGLFLKMDLPENWDSPYVLHYTEYDGKTGATGQKKTMEVDAVIGADGANSRVAKSIGAGDYDYAIAFQERIRIPDDKMTYYEDLAEMYVGDDVSPDFYGWVFPKCDHVAVGTGTVTHKGDIKKFQLATRNRAKDKILGGKIIRVEAHPIPEHPRPRRLSKRVALVGDAAGYVTKCSGEGIYFAAKSGRMCAEAIVEGSQNGKKMIDESDLRKYLEKWDKTYLPTYRVLDVLQKVFYRSNPAREAFVEMCGDEYVQKMTFDSYLYKRVAPGSPLEDLKLAVNTIGSVFRANALRREIEKLNV

SEQ ID NO: 6548 - protein, 155 aa, Triticum aestivum
  misc_feature (123)..(123): Xaa can be any naturally occurring amino acid
  misc_feature (128)..(128): Xaa can be any naturally occurring amino acid
  misc_feature (141)..(141): Xaa can be any naturally occurring amino acid
  misc_feature (154)..(154): Xaa can be any naturally occurring amino acid
MAPTVMASSATSVAPFQGLKSTAGLPVSRRSNGASLGSVSNGGRIRCMQVWPIEGIKKFETLSYLPPLSTEALLKQVDYLIRSKWVPCLEFSKVGFIFREHNASPGYYDGRYWTMWKLPMFGXCTDAXQVINKVEESRRSXPDAYVRIIGSTNXK

SEQ ID NO: 6549 - protein, 343 aa, Agrobacterium tumefaciens str. C58
MRFLSQGGAWNHVAMKQAIADSGLEESDISGNERTGIIMGSGGPSTRTIVEAADITLKNNSPKRIGPFAVPKAMSSTASATLATWFKIHGVNYSISSACSTSAHCIGNAAEMIQWGKQDVMFAGGHEDLDWSMSNLFDAMGAMSSKYNETPGVASRAYDVNRDGFVIAGGAGVLVLEELEHAKARGAKIYAEIVGYGATSDGYDMVAPSGEGAIRCMRQALATVKGDIDYINTHGTSTPVGDSKEIGAIREVFGDKIPHIQSTKSLTGHSLGAAGVQESIYGLLMMQERFIGESAHISELDPEFAGVPIVRSRIDDAKIDTILSNSFGFGGTNATLVFQRHNG

SEQ ID NO: 6550 - protein, 75 aa, Brassica oleracea
GVRGLDIQGKFVIFTVIGVYLDPVSVPSLSVKWKGKTTEELTESVPFFREIVTGSFEKFIKVTMKLPLTGQQYSE

SEQ ID NO: 6551 - protein, 190 aa, Triticum aestivum
  misc_feature (114)..(114): Xaa can be any naturally occurring amino acid
  misc_feature (124)..(124): Xaa can be any naturally occurring amino acid
  misc_feature (151)..(151): Xaa can be any naturally occurring amino acid
  misc_feature (161)..(161): Xaa can be any naturally occurring amino acid
MAPTVMASSATSVAPFQGLKSTAGLPVSRRSNGASLGSVSNGGRIRCMQVWPIEGIKKFETLSYLPPLSTEALLKQVDYLIRSKWVPCLEFSKVGFIFREHNASPGYYDGRYWXTMWKLPMFGXCTDATQVINEVEEVKKEYPDAYVRIIXGFDNMRQVQXASGFIPFKPTGLRRSPAKAKTAHSTRGHI

SEQ ID NO: 6552 - protein, 126 aa, Zea mays
  misc_feature (49)..(49): Xaa can be any naturally occurring amino acid
  misc_feature (64)..(64): Xaa can be any naturally occurring amino acid
KVFFGIGGGPYVSRPMGFVLKNGVWGGPLLSGYSLPMDMPLQVNVKSFXKVFGIWKPSLKVFFXATKAAFFGGEVFGPFFSKSFKGWQKNAFSCFFPGQNLRIGKPSDFLLRVSPPVLGRAGGKGF

SEQ ID NO: 6553 - protein, 115 aa, Triticum aestivum
MARGAAIPLVLVAMVATMLLVATDAAISCGQVTSALSPCISYARGNGANPTAACCSGVRSLAGAARSTADKQAACKCIKSAAGGLNAGKAAGIPSKCGVSAPYAISANVDCSKIR

SEQ ID NO: 6554 - protein, 105 aa, Clostridium perfringens str. 13
MVKHINQDEFEKEVINEEGVVVVVDFFATWCGPCKMLAPVLDEVQDEMKNVKIVKIDIDENSDKASEYGVKNIPTIKIFKNGEEITTNVGFVPKNLLKEMIEKTL

SEQ ID NO: 6555 - protein, 1226 aa, Arabidopsis thaliana
  misc_feature (227)..(227): Xaa can be any naturally occurring amino acid
  misc_feature (708)..(708): Xaa can be any naturally occurring amino acid
MAARNLEKMASIDAQLRLLAPGKVSEDDKLIEYDALLLDRFLDILQDLHGEDVREFVQECYEVAADYDGNRNTEKLEELGNMLTSLDPGDSIVVTKSFSNMLSLANLAEEVQIAYRRRIKKSLKGDFADEACATTESDLEETLKRLLQLNKTPEEVFDALKNQTVDLVLTAHPTQSVRRSLLLDLASVRECLTQLYAKDITPDDKQELDEALQREIQAAFRTDEIRXRTPPTPQDEVRAGMSYFHETIWKGVPKFLRRVDTALKNIGINERVPYNAPLIQFSSWMGGDRDGNPRVTPEVTRDVCLVPRMMAANLYFSQIEDLMFEMSMWRCNEELRVRAERQRCAKRDAKHYIEFWKQIPANEPYRAILGDVRDKLYNTRERARQLLSSGVSDVPEDAVFTSVDQFLEPLELCYRSLCDCGDRPIADGSLLDFLRQVSTFGLALVKLDIRQESERHSDVLDAITTHLGIGSYKEWSEDKRQEWLLSELSGKRPLFGPDLPKTEEVADVLDTFKVISELPSDSFGAYIISMATAPSDVLAVELLQRECGITDPLRVVPLFEKLADLESAPAAVARLFSIEWYRNRINGKQEVMIGYSDSGKDAGRLSAAWQLYKTQEELVKVAKEYGVKLTMFHGRGGTVGRGGGPTHLAILSQPPDTIHGQLRVTVQGEVIEQSFGEEHLCFRTLQRFTAATLEHGMHPPVSPKPEWXRVLMDEMAIIATEEYRSVVFKEPRFVEYFRLATPELEYGRMNIGSRPSKRKPSGGIESLRAIPWIFAWTQTRFTYPKNLNMLKEMYNQWPFFRVTIDLVEMVFAKGDPGIAALYDRLLVSEELQPFGEQLRVNYQETRRLLLQVAGHKDILEGDPYLRQRLQLRDPYITTLNVCQAYTLKQIRDPSFHVKVRPHLSKDYMESSPAAELVKLNPKSEYAPGLEDTVILTMKGIAAVMGSGKERDTFVYLAKLSEQAERYEEMVESMKSVAKLNVDLTVEERNLLSVGYKNVIGSRRASWRIFSSIEQKEAVKGNDVNVKRIKEYMEKVELELSNICIDIMSVLDEHLIPSASEGESTVFFNKMKGDYYRYLAEFKSGNERKEAADQSLKAYEIATTAAEAKLPPTHPIRLGLALNFSVFYYEIMNAPERACHLAKQAFDEAISELDTLNEESYKDSTLIMQLLRDNLTLWTSDISEEGGDDAHKTNGSAKPGAGGDDAEDTLICNSLLSSYYLSLWIQS

SEQ ID NO: 6556 - protein, 69 aa, Arabidopsis thaliana
  misc_feature (59)..(59): Xaa can be any naturally occurring amino acid
SPAQAGMVSPFNGLKTSTPFPATRKANNDITSITSNGGRVNCIQVWPPIGKKKFETFFXPPDLTDSELA

SEQ ID NO: 6557 - protein, 208 aa, Oryza sativa
  misc_feature (125)..(125): Xaa can be any naturally occurring amino acid
MTSVWKTKVLTGLNKLFDKDGKKAAAAEFLKSFNKEEIGKEIDDKKTELEPKVVEVVESSPPEIKALLKDKKTASKIKKNGPAVTKFLEELAKIDFPGAKPGERRRWPKSGPTPVFPGDRPSYLXRRVAPFRSPRREPKPEPEAEAAAETTSREVAVEEEKKEEEAAPAEPAAAAAEAAAPSTEVVEEKKEEEKPAEAAAPAAEPEKQ

SEQ ID NO: 6558 - protein, 718 aa, Ureaplasma parvum serovar 3 str. ATCC 700970
MNELVKKKLDDLYDFLKQKKYSSQTIELVHKSFDFANYYHGDQTRKSGEPYIIHPIATVRILASWDMDESTLVAGMLHDVLEDTNCPEEVMEKTFGKEVTQLVCFVTKVSLYSKNRRNKVSHTNLEEKYSIQVFMSMTQDIRAMIIKIADRYHNMQTIQYLRLEKAKRIATETLEIYANISGRLGMYRVKTDLLDMSFKILDPQNYQLVNDSINKLVENNQKKWNEILARLKNILIANNIKAEFEWRLKGIYSTYKKITSGYEVKDIHDIYAIRVILDDVYLCYQTLGLVHMNFTYIINTFKDYISTPKWNLYQSIHTTISYEGTLVEIQIRTTKMNLFANNGLAAHWKYKEQKDNKTEILLTVNNVLLRDFLLSTDKGIKTIKDVTTGTIFDVLILNSNKWITVSNGSTLLDVAYKYDINNFFNILAIYRNGERSHFDTHVETGDTIKISYSNGIETIRPNWITLANNDVVKLHINNHLKKYELNKQITKEQFLANAEFFLEGKIMSEEHAIKRLEKEFQVNSINTFLDNIANTDIDLQTKYKVFSENKQVSREAINTIKNQAWKWLADSSYFSGLENLYFTDFEISPCCSKIPGINCVAKIVRNKVEIHRNDCSKVKNSRSKTIVIEWSKEKLENRPRYFKVNLTLKGNWSESVGNVLCNTLIRMKANISKVDISKNKTARTHDTFLKIYVKNLDHLQKIILELQAKNVINEWRLI

SEQ ID NO: 6559 - protein, 573 aa, Candida albicans SC5314
MPMLKDPSVKYKKFPNVNLPNRQWPSRSLDKPPRWLSTDLRDGNQSLPDPMSISEKKEYFKKLVDIGFKEIEVAFPSASQIDFDFTRFAVETAPEDVSIQVLSPCRPELIGRTVESLKGAKRATVHIYLATSDCFRNVVFGLSKEESKALAVKCTKLVRQLTKDDPSTAGTDWDFEFSPETFSDTDLDYAVEVCEAVKEAWGPTEDKPIIFNLPATVEMATPNIYADQIEYFATHITDRETVCISLHPHNDRGCSVAAAELGQLAGADRVEGCLFGNGERTGNVDLVTLALNLYTQGVSPKLDFSDLNSVIDIVEKCNKIPVHARAPYGGSLVVCAFSGSHQDAIKKGFSAHEKKKEKAGGKEVHWQLPYLPLDPEDIGRTYEAIIRVNSQSGKGGSAWVILRNLELDLPRGLQIAFSKVVQARAEVKGQELTNEELCELFKQEYFIDYDDEAPEQYFKLVDYSISTPSKGIKEIQADIEVDGKVISIKGEGNGQLSAFNNAIAKYLNIDIDVKHYHEHSLGEDSKARAATYIEVLVDKKVARWGVGIHTDVSQASFLSLISILNGLHKNKNI

SEQ ID NO: 6560 - protein, 534 aa, Leptospira interrogans serovar Copenhageni str. Fiocruz L1-130
MRGKLGNGIGRMNEFTVGRAALGFISYLSKKNKKASIVIAYDSRRRSKEFAEVTAGIAAYLGVKVILFKEVTPTPILSYAIRYYKASGGVVITASHNPPEYNGFKAYLSDGGQLVPPDDQKIISKIESITDWKQIPILSTKDPIYKKMVKFAGKDCFTSYKKDLSKAGILSISLKPKDRTALKIVYSPLHGTGGKSMQELLNSFGYKNVFLVPEQKDPNGEFPTVKYPNPEEAEAMELSKKFAIQKNAHAFIATDPDADRLGIGVKNENGEYVLFNGNQIGSIMAAYLCEAYSAGKKKKKAVLVKTIVTTDLQENIAKKNKVKYKNVLTGFKFIAQVMAKIDKSKTDFFLFGGEESFGYLPVSFVRDKDSLSSALLLLEILTEKKDLFNYMDEIYLKYGLFQESLKSLTLEGSAGKEKIRKSLESLRTLDLLGKKIHHRKITGILDYKTQIAKGNASKSAFSGCPSSDVIQVILEGNAKLTIRPSGTEPKIKIYSSFQSLKAPKSKEEIKILTKDLLSEIKTSEEIFLQLAGLS

SEQ ID NO: 6561 - protein, 411 aa, Dehalococcoides sp. BAV1
MSPKDLRPNLADTAGAAINKKPAVGDDILLEKYTDNTEAHKYVNKPSELASEDKARMLESGVILDDLKERSGTYIQMDNHPVHFSAQQDGIEIMSTSEAAKKYDWLKDYWWKAVSVDADKYTAHVELNQADGYFIRALPGVKTEFPVQSCMYMAKNQSIQNVHNIIIAEEGSELHIITGCTSAHRTETGLHLGVTEFYIKKGAKVTFTMIHTWSPDIAVRPRTGAIVEENGVFLSNYVIMKTVKNLQSYPVAYLNGENAVARFNSVMVCPPGSKMDVGSRVFLNAKHTRTELITRALTTGGEIISRGYIEGKVPDCKGHLECRGLILGDKGIIYAIPELMGRVSGVDLSHEAAVGKIAEEEVEYLMARGLNKDEATAAIVRGFLNVDIEGLPPLLKEEMDKAIKLGDQEGM

SEQ ID NO: 6562 - protein, 292 aa, Wolbachia endosymbiont of Drosophila melanogaster
MLVKIGTRGSKLAVAQALEAKQKLLDSFPNLSIEIVKIKTSGDKYANANLAEIGGKGLFIKEIETELLENNIDMAVHSLKDMPAFFSGGLTIPCVLERLSSCDAFISHKHNSLESLPQQATIATSSIRRKVQLLNVRPDLNIVPLRGNVTTRLQNQSFDGIILAEAGLIRLEKHHLITEVLPPKVMLSAVGQGAVCIQCRRNDVKIIDLLEKINNNMSFIGVKSERSFMKTVNGSCFTPLAALAEYVSENMLHLRCMLASGKNIYFTERTSFIEDAEKMGMDAGLELKSKCL

SEQ ID NO: 6563 - protein, 358 aa, Leptospira interrogans serovar Copenhageni str. Fiocruz L1-130
MKNVAVLSGDGIGPEVMEIAISVLKKALGAKVSEFQFKEGFVGGIAIDKTGHPLPPETLKLCEESSAILFGSVGGPKWETLPPEKQPERGALLPLRKHFDLFANLRPAIIYPELKNASPVRSDIIGNGLDILILRELTGGIYFGQPKGREGSGQEEFAYDTMKYSRREIERIAKVAFQAARKRNNKVTSIDKANVLTTSVFWKEVVIELHKKEFSDVQLNHLYVDNAAMQLIVNPKQFDVVLCENMFGDILSDEASIITGSIGMLPSASLSESGFGLYEPSGGSAPDIAGKGVANPIAQVLSAALMLRYSFSMEEEANKIETAVRKTIASGKRTRDIAEVGSTIVGTKEIGQLIESFL

SEQ ID NO: 6564 - protein, 390 aa, Wolbachia endosymbiont of Drosophila melanogaster
MSKIIEIRAPKTLGGESVTEGIVKIKKGIGEAVKVDDLIFEIETDKTALELTAEASGQITEFLIKEDDVISPDQLLAKLSMGEVKEEARKEDKSESAAKKDAPSARKIMEENAISAESVKGTGMGGRITKADVIGHMNKAEQPAIKQYELPKSVVNGEQREERVKMSKIRQVIAARLKASQNTAAILTTFNEIDMKNVMDLRAKYKDAFEKKYGIKLGFMSFFIKAAVQALKEIAEINAEISGDEIIYKHYYDVGVAVGTDKGLVVPVIRGADQMSFAEIELTLVALGKKAREGKLQVSEMEGATFTISNGGVYGSLLSTPIINPPQSGILGMHSIQNRPVAVGNAVEIRPMMYIALSYDHRIVDGKGAVTFLVKIKNYIEDPNRLVLEV

SEQ ID NO: 6565 - protein, 361 aa, Thiobacillus denitrificans ATCC 25259
MSLASTLEIIEELKAGRMVVLVDEEDRENEGDLVMAAEHVTPDAINFMAKYGRGLICLTLTDARCRQLGLKQMVSDNQTPHGTAFTISIEAAEGVTTGISAADRAVTIRAAVTKDAKPSDIIQPGHIFPLRAQPGGVLVRAGHTEAGCDLAGLAGLEPASVICEILKDDGSMARLPDLVPFAQEHGLKIGAIADLIHYRNQTESLVERAADRLIQTIYGAFRLIAYRDKCAKETHIALVKGEIHADRETLVRVHEPLSVMDFLDVTGGGHSWPIMGAMERIAESQSGVLVLLHRPETADALLGRINPAPAASHKYDLRDYGIGAQILRDLGVGKMKLLASPRKMPAMDGFGLEVTGYSEKA

SEQ ID NO: 6566 - protein, 311 aa, Prochlorococcus marinus str. MIT 9211
MIWSVDSIPNQEGRIVLVTGANSGLGFDTARFLLNKGAGVILGCRTMQKAELARQKLLEQTPSANIELLEIDLGDLNQVDRAADQIAIKYKKLDLLINNAGVMAPPFTLSKQGLELQFAVNHLSHMALTLKLLPLMSKQDGARVVTVSSGAQYMGKINWNDLQGNNHYDRWASYSQSKLANVMFALELHKRLKKSNCNVASLSSHPGLARTNLQIASVAANGSWQEGFAYKLMGPMFQSSAMGSLPQLLAATDPNAKSGEQYGPRFNFRGYPKLCRVAPLALNMELREKLWELSLKLIRNFIQINSFKEIL

SEQ ID NO: 6567 - protein, 118 aa, Panax ginseng
LCAGGELFDRIIAQGHYSERAAATICRQIVNVVHVCHFMGVMHRDLKPENFLLSSKNEGAMLKATDFGLSVFIEEGKVYRDIVGSAYYVAPEVLRRSYGKEIDIWSAGVILYILLSGV

SEQ ID NO: 6568 - protein, 265 aa, Triticum aestivum
VIHRTSLYKKAGWYRSGIPGISSTHASDFGLSNVMRDGHFLKTSCGSPNYAAPEVISGKLYAGPEVDVWSCGVILYALLCGTLPFDDENIPNLFKKIKGGIYTLPSHLSGPARDLIPRMLVVDPMKRITIREIREHPWFEAQLPRYLAVPPPDTAQQVKKIDEESLVKVISLGFDKNLLVESIHNRLQNEATVAYYLFLDNKSRTTTGYLGAGYQEAMESSFSPITPSETQSPAHGNRQQPYMESPVGLRPHFPADRKWALGLQS

SEQ ID NO: 6569 - protein, 402 aa, Bacillus cereus G9241
MLSAKTIEIVKSTVPLLQEKGVEITTRFYEILFSEHPELLNIFNHTNQKKGRQQQALANAVYAAATYIDNLEAIIPVVKQIGHKHRSLGIKAEHYPIVGTCLLRAIKEVAGAPDEVLNAWGEAYGVIADAFISIEAEMYEEAAHKEGGWKDFRNFVVVKKVKESDVITSFYLKPEDGGKVSSFIPGQYVTVQINIEGETYTHNRQYSLSDAPGKEYYRISVKKEKGVDTPDGKVSNYLHDHVKEGDTLPVSAPAGDFVLNMDSTLPVVLISGGVGITPMMSMLNTLIEQNSKRNVCFVHAAINSNTHAMKEHVEAVDNEYEQVKSYTCYSAPTEKDLEMKNFDKEGFVEREWLQTIIPTTEAEFYFCGPVAFMKQINAAITDLGVKQEHIHYEFFGPAASLQ

SEQ ID NO: 6570 - protein, 177 aa, Arabidopsis thaliana
  misc_feature (44)..(44): Xaa can be any naturally occurring amino acid
PAKDPGLSTNRDEATRGYIMQQTMFRIKDPKAPLHFYSRVRGMXLLKRLDFSEMKFRLYFLGYEDTTTAPTDPTERTVWTFGQPATIELTEKWGTESDPECGGYHNGHSHPRGFGHIGVTVDHVHKACERFEELGVEFAKKPNDGKMKNIAFIKDPHRYWIEIFDLKTIGTTTVNAA

SEQ ID NO: 6571 - protein, 291 aa, Xanthomonas campestris pv. campestris str. ATCC 33913
MSVLINKNTKVIVQGFTGQQGTFHATQMIEYGTQVVGGVTPGKGGTTHIDLPVFNTVADAVQSTGADASVIYVPPPYAADAILEAAAAGIKVIVCITEGIPVLDMLRVKNVLTRSHPDTVLIGPNCPGVITPGECKIGIMPGHIHKPGKIGIVSRSGTLTYEAVKQTTEVGLGQSTCIGIGGDPINGLNFVDCLKLFNEDPQTEGIIMVGEIGGDAEEAGAEYIKQFVKKPVVGFIAGASAPAGKRMGHAGAIASGGKGTAEGKFAAMEAAGVKTVRSPGDLGAAIAALVK

SEQ ID NO: 6572 - protein, 661 aa, Ipomoea batatas [sequence omitted]

SEQ ID NO: 6573 - protein, 306 aa, Streptococcus thermophilus CNRZ1066
MYDTIVIGAGPAGMTAALYAARANLKVATLEQGAPGGQMNNTSDIENYPGFESISGPELSMKMFEPLEKLGVENLYGIVSGIEDRGNYKVVKTGDEEYQTKTVIIATGAKHRHIGVAGEEEYNSRGVSYCAVCDGAFFRNQDLLVVGGGDSAVEEGIYLTRFANSVTIVHRRDELRAQKVLQARAFANEKVKFIWDSVVEEIKGDDIKVRSVDIKNVKTGEVTNHEFGGVFVYVGLDPVSDYLTGLDITDQNGWVITDDKMATSVPGIFAIGDVRQKDLRQITTAVGEGAIAGIEAYNYVTALGDK

SEQ ID NO: 6574 - protein, 222 aa, Arabidopsis thaliana
MRVSQSLIPFAIIALVLSFVNAYDPSPLQDFCVAIDDLKGVFVNGRFCKDPERVDAKDFFFSGLNVPGNTNNQVGSNVTTVNVDQIPGLNTMGISLVRIDYAPHGQNPPHTHPRGSEILVLVEGTLYVGFVSSNQDNNRLFAKVLHPGDVFVFPIGMIHFQLNIGKIPAIAFAGLSSQNAGVITIANTVFGSNPPIYPELLARAFQLDANVVKELQAKFGSI

SEQ ID NO: 6575 - protein, 379 aa, Arabidopsis thaliana
MMSDLPLDLVEKILSRVPATSLKRLRSTCRRWNALLKDRRFTEKHFHKAPKESRVLMLKEYRVFPISVNLKVTPPSVDFKGALGYSHSNSEQVVITEVFHCDGLLLCTTNDDRLVVWNPCLGETKWIQLKVDYRRYVSIFALGYIQNNESCRSYKILWTWYSYDYNSSPPQRGLGFEIYEFSSDSSWRVLDDVNHDSVVNHNSIIRSGVSLKGNTYMLAYDIEENSKFLLMFDFTTERLKRLCLPHFQDVGEMDLSVREEQLSVLNWSRITSKMEIWITNNFDTEATLLWKRVHLDSQCNCVRIFSSLYFDEEKKVVLYCNVKDGETSKKVVYIIGEDDGHYIEIPFVKSIKIERLQLIHTTRWYSLIFNYVPSLFQIQ

SEQ ID NO: 6576 - protein, 180 aa, Nicotiana tabacum
MASSVLSSAAVATRTNVAQANMVAPFTGLKSAASFPVSRKQNLDITSIASNGGRVQCMQVWPPYGKKKYETLSYLPDLSEEQLLSEIEYLLKNGWVPCLEFETERGFVYRENNKSPGYYDGRYWTMWKLPMFGCTDATQVLAEVGEAKKAYPEAWIRIIGFDNVRQVQCISFIAYKPEGY

SEQ ID NO: 6577 - protein, 97 aa, Brassica napus
  misc_feature (51)..(51): Xaa can be any naturally occurring amino acid
  misc_feature (95)..(95): Xaa can be any naturally occurring amino acid
MEAVVECAKCECCGLVEDCTRDYILGVRAAFGGRWLCGLCSEAVRDEAARXRRPEAPPPRGLEDALRDHMAFCGKCRRSPAFRVADGMRQMLRRXSK

SEQ ID NO: 6578 - protein, 357 aa, Aspergillus nidulans FGSC A4
MPAQHRPLWWYGWNALRGGNPTFLTPDQVPVPDLSGKWIIITGSNSGIGLEAAKAFASAGANLILGCREPAAWETHPAAAAEECQTLARVNGHTESVIEWWKIDMADLSAVDAFAQRWLDTGRALDILCNNAGMGPTGSRKPILTKDGLEILHQVNFTSHVLLTLRVLDSLAKAPQPRIVCTTSCFHFRGYFDLDHFNGELGMAGDPYPNNKLYFQVWLTELHSRLLASPNYRHVTVNGINPGYVNSGIWNNPLSETKNTWIDTAYKFWKFVASILAISPQQGSLAIVYAATSAEFGPDPVTQGVGEIGGKGGGHYINRIWEGEAMPHCSDEECRKEVWEKVGKELGLEERGLGHWV

SEQ ID NO: 6579 - protein, 302 aa, Actinidia chinensis
LRFIDEHNADTNRSYKVGLNQFADLTGEEFRSTYLGFTGGSNKTKVSNRYEPRVSQVLPSYVDWRSAGAVVDIKSQGECGGCWAFSAIATVEGINKIVTGVLISLSEQELIGCGGTQNTRGCNGGYITDGFQFIINNGGINTGENYPYTAQDGECNLDLQNEKYVTIDTYGNVPYNNEWALQTAVTYQPVSVALDAAGDAFKHYSSGIFTGPCGTAIDHAVTIVGYGTEGGIDYWIVENSWDTTWGEEGYMRILRNVGGAGTCGIATMPSYPVKYNNQNYPKPYSSLINPSAFSMSKDGPVE

SEQ ID NO: 6580 - protein, 184 aa, Actinidia chinensis
TRGCNGGYITDGFQFIINNGGINTEENYPYTAQDGECNLDLQNEKYVTIDTYENVPYNNEWALQTAVTYQPVSVALDAAGDAFKHYSSGIFTGPCGTAIDHAVTIVGYGTEGGIDYWIVKNSWDTTWGEEGYMRILRNVGGAGTCGIATMPSYPVKYNNQNYPKPYSSLINPSAFSMSKDGPVE

SEQ ID NO: 6581 - protein, 393 aa, Pseudomonas fluorescens Pf-5
MLSVQDRAIIKATVPLLESGGEALITHFYRMMLSEYPQVRPLFNQAHQASGDQPRALANGVLMYARHIDQLDQLGDLVAKIINKHVALQILPEHYPIVGGCLLRAISEVLGSEIATQEVIDAWAAAYNQLADILIGAEAAIYDEKAQAPGGWRGAREFRLVQKVEESAEITSFYFEPLDQGPILAAEPGQYIGLQLFIGGEEIRRNYSLSALSNQGQYRISVKRETGGVASNYLHDQCPVGTSVMLFPPAGEFTLAASDKPLVLISGGVGITPTLPMLEAALATERPVHFIHCARNGQVHAFRNWVDELAQRYPQLKRFYCYAEDDGVSPAADKLGMLTREQLAEWLPEQRDLDAYFLGPKGFMAAIKRHLQALGIPEQQSRYEFFGPAAALE

SEQ ID NO: 6582 - protein, 581 aa, Aspergillus nidulans FGSC A4
MSLARFKHLPRATQGPIKCPYKGAALLGNANYNKGSAHSERERREFNLHGLLPPNIQTLDEQVERAYQQYKSRPDDLAKNTFMASMKSQNQVLYYRLLQTHLKEMFSVIYTPTEADAIQNYSRLFRKPEGCYLSIRDHGEKEIDECFANFSGGDDVDYIVVSDGEQWQILGIGDQGVGAILISVAKLVITTACAGIHPSRQLPVVLDCGTNNEELLNDKLYLGLRQRRAQGEEYDKFVDKFVRMARKRFPNAYIHLCSEDFGLQNAKRILDRYRSQLPCFNDDIQGTGCVTLAALMAGLHVSNVKLKDVRVVCYGSGSAGTGIADQISDAIATEAGFSKSDALKQIWCIDKQGLLLKSQGDALTASQKYFAKEDNEWPEGQDIDLYSVIKHVKPHVLIGTSTKPGSFTEETIREMAKHVDRPIIFPLSNPTRLHEAQPQDITKWTDGKALIATGSPFPPVEYNGTKTEIVSAECNNSTAFPGIGLGAVLSRASRLSEKMVVAASKALAAKAPALEDPNKPLLPDVENVRELSLNVAKAVIQTAVKEGLAQEEGIPEDEKDLEDWIRAQMWEATYRDLEKAD

SEQ ID NO: 6583 - protein, 431 aa, Arabidopsis thaliana
RRVVVTGLGMVTPLGRGVETTWRRLIDGECGIRGLTLDDLKMKSFDEETKLYTFDQLSSKVAAFVPYGSNPGEFDEALWLNSKAVANFIGYAVCAADEALRDAEWLPTEEEEKERTGVSIGGGIGSICDIVEAAQLICEKRLRRLSPFFIPKILVNMASGHVSMKYGFQGPNHAAVTACATGAHSIGDATRMIQFGDADVMVAGGTESSIDALSVAGFSRSRALSTKFNSSPQEASRPFDCDRDGFVIGEGSGVIVLEEYEHAKRRGAKIYAELCGYGMSGDAHHITQPPEDGKGAVLAMTRALRQSGLCPNQIDYVNAHATSTPIGDAVEARAIKTVFSEHATSGTLAFSSTKGATGHLLGAAGAVEAIFSILAIHHGVAPMTLNVKNPDPIFDKRFMPLTTSKKMLVRTAMSNSFGFGGTNASLLFASI

SEQ ID NO: 6584 - protein, 162 aa, Ureaplasma parvum serovar 3 str. ATCC 700970
MERLNMKLSDYPVLDIDKKLFNWSKVKNKLVLIVNVASKCGYAKQYEQLEYLYKKYKNKGFIIVAFPCRQFMFQEFDDNNKIKEFCSTKYNVTFPIMDLTNVVGSNISPLYKQLITEYPWSPKAKAVKWNFEKFFVKNDEIIGRFESKCEPNDLEEFIKNNL

SEQ ID NO: 6585 - protein, 448 aa, Mycobacterium sp. KMS
MNGLHENLQGIFEEVARRNPGETEFHQAVYEVLQSLGPVVAKHPEYADSAIIRRLCEPERQILFRVPWVDDSGAVQMNRGFRVEFNSALGPFKGGLRFHPSVYLGIIKFLGFEQIFKNSLTGMPIGGAKGGSDFDPKGRSNGEIMRFCQSFMTELYRHIGEYTDVPAGDIGVGMREIGYLFGQYKRITNRYESGVLTGKGITWGGSLVRTEATGYGTVYFIADILKSRGESFEGTRAVVSGSGNVAIYAIEKIQHLGGTVIACSDSDGYVVDPDGIDLALLKEVKEVQRGRVADYAEMRCGRARFVHGNVWDVECDIAVPSATQNEINGADAAALVKGGCRIVAEGANMPCTPEAVKLFAEAGTVFAPGKAVNAGGVATSALEMQQNASRDSWTFDETEDKLAEIMGRIHDRCLQTAEEYGQPGNYVAGANIAGFTRVADAMLALGII

SEQ ID NO: 6586 - protein, 1287 aa, Anabaena variabilis ATCC 29413
MLEFNHLRLHNMHGSLVAKIASAIATLVSSSILIGWLLDVELLKIFFWGSSGIMTPNTALCFALCGISVWLLVTKPSGTSHSSQSHKPYQKLSRAFSVSNTIIAALAICEYLCGWESGIDKLFLGDVFTTINTPHMGLNTAINFLLIGIALELLTYPRNNRSYWYAQILTLFTTVISLEVFVCYAYKVNFFYTINPNFTSMSLQTALLFIVLCIGILSGQSEKGLMKIVFSDSYGGLIARRLLLAAITVPLFLGWLILKGQRAGRYGPDFAVSVFAVILIVIFVIIIWQNAVVIELLSQQRDRAQESLKAYEEKLKSLVNANIIGIAFADIYGGIQQANEAFLMMVGYSQEDLLTGRLNWKNLTPPEYFYLDEQGIAEAQANPKGACTTYEKEYIRQDGSRIPVLIGYVLLGEEREESVAFILDLSERQQAQQKILQLNKDLQRRVVELQTLLDMIPIGIGIAEDAECQNIKINPAFAKQLQLSTDVNASLSAPPNQRPTTFKIFHEGRELLPAELPMQYSAVHGVEVLDYEVDVVHENGEIIKLLEYVAPLFDEDGKTRGCIGAFVDITQRKQAEELLRNEQKWLEDVLNLMPRPLLFIEPETARVTFANRAADELAGGKFPRGVPAEEYHTVYHFTDINGNPIPNEQMPGVRVARGERLEGLELDWHTNDEVLSLLIFADTLPAMHGYPATCVVVFQDVTQIKQAEKALSLGYQRLKLLFSTANDLLSSQEPVALIDSCFQKLAQQIGLDVYLNYLVEDNSQSIRLASYHGICPELAQKIKFLKFGEAICGTTAQERHSIALENVQQSTDPKTQLIRSMGIHAYYSYPLIAQGRLLGTLSFGSRSRTSFTENQKGMMQAVCDQIAIAMERMELINSLQRQTEQLTEANRMKDEFLAILSHELRSPLNAILGWAQLLQARRLSEAQTAKGLETIERNAKAQTQLIEDLLDISRMIRGKLRLNVRTCNLIPIIETTIENINLAAQAKEIDLTFFLENPATENLPFQVSGDPERLQQVIWNLLTNAIKFTPSGGKVEVRLTKNPGCEQNELITNSYAQIQVIDTGIGINSSFLPYVFDRFRQADSSITRSHGGLGLGLAIVRHLVELHGGTVHVHSPGEEQGSTFTVKLPLLSENKATTIEPISPRGEHFTPLPLCPSLLGVRVLVVDDESDSRDFVSTVLEQCQAQVRSVPTAKEALQIISQWKPDVLVSDIGMPEEDGYSLIRKLRSLPPEQGGNIPATALTAYARAEDRTRAIQEGFQLHLPKPIEPTELATVVASLIKRGQRRD

SEQ ID NO: 6587 - protein, 533 aa, Dehalococcoides sp. BAV1
MQVKLYDTTLRDGSQREGISFTVADKLKIAQKLDDLGIHYIEGGWPGANPKDSEFFTQAKSLKLKNAKMVAFGSTRRPKVKADADTTLKQLIDSGTEYVTLVGKSSARQVTQVLETTLEENLAMITESIEYLRSKCIKVFLDAEHFFDGYKDNPEYSIQVLQAAEKAGAEGVVLCDTNGGTLPEEITQAVKTVKEALNICVGIHAHNDTEMAVANSIAALKAGASQVQGTINGFGERCGNANLCSIIPILKLKMDIDCISDNQLKLLTETSHYISELANLVSEPFLPYVGSSAFSHKAGLHVSGLSKWSGSYQHIEPELVGNHQRLLVSELAGRSNIVQRAKAIGINLAPDSKEVKDLLQQVKKMESLGFQYENAEASFDLLVNRTQTGYIAPFELIDFMVVVEKQRRPSTMRNQDEMMAEGIVKVRVDGDIMHTVAEGNGPINALDAALRKGLCQFYPELSAVHLSDYKVRILEQTSGTDALVRVLIESSDGENTWHTVGASPNIIEASWLALSDSFEYWLITKKCKNCKKQ

SEQ ID NO: 6588 - protein, 358 aa, Rubrobacter xylanophilus DSM 9941
MLDAGTSYLAVIKVVGIGGGGTNAVNRMINSGLQGVEFIAINTDAQALQMCDADQKIHIGEKITRGLGAGADPKIGMEAAEESKAEIEEALRGADMVFVTAGKGGGTGTGAAPVVAKIAREAGALTVGVVTRPFSFEGRRRATYAEEGIKKLKENVDSLIIIPNDRLLQVAEKRTSMMEAFKMADDILRKGVQGITDLITVPGLINLDFADVRTIMQNSGSALMGIGESSSENRGAEAARLAISSPLLEASIEGATGIILNITGGPELGLFEVNEAAEIVHNAAHQDANLIFGAVIDESFGDKVSVTVIATGFDQRLANQRRIERPVAETPPRPSEEEPRPQQEDGDVLDIPAFLRRR

SEQ ID NO: 6589 - protein, 929 aa, Desulfotalea psychrophila LSv54
  misc_feature (198)..(198): Xaa can be any naturally occurring amino acid
MARSRVNKAVASTATTSKRVTLNPKVARRSFLKISAATAALTGAAMTTNLTKKASASGKKSPYEGSKTVRTICTYCAVGCGIEAEVHNGVWVRQNVAVDHPVSRGGHCCKGAGAIDMVTSPKRMKSPMKRINGKWTPISWDRAMGEITDKLKSIREKDGPDALHFNGSAKVSNEMAYQIRKFAAFWGSNNIDHQARIXHSATVAGVANTWGYGAMTNSLNDIRHAKSMIFIGSNAAEAHPVSMQHILHAKEKNNAPIIVVDPRRTKLAAKADEFVRIRPGSDAAFMMGLIHVIVKNGWEDKEFIRTRVSGYEEMIEVTKKYTPEEVEDVTGIPAAQTIKVAKMLATHRPTSLTWCMGGTQHSIGSSITRSFCLLQLVLGNMGKSGGGTNIFRGHDNVQGATDMCILSHSLPAYYGLSDGAWKHWCRVWGVDYEWMVSRFPAKEWMNKKGFTLARWYEGVLNEEKIHQPSPIKALIQWGCGANSNSQYGRVKRAYNKLDLLVIVDPFPTMAAALCETDNVYILPSASQYETQGSVSSTSRQIQWRYKVVDPIYNSRDDYDILRDFVTRLGFADKFYKNIKQEPEDITRELGSGSLTIGYNGQTPERIKAHMENWHTFDIDTLQAKGGPCDGEYYGLPWPCWTQEHPGTPILYDMSKSVAEGGLPFRNRFGVEKTYDSGRTENQLAAEGTYTPGSEVKGGYPEFKDVVPGTNWKTDLSQKTIKDAISRGMAPFGNARARCIVWTFPDQVPVHREPLHSPRPDLIERYPTYQDQTNHFRVDTRFESEQNPNLIKEFPYILTTGRQVEHMGAGAETRSNQYLAELQPEMYAEINPRLANNLGIRKDAMIWIESPEGGKIKVKAFVTERVDEKTIFLPYHFGGSWEGESLVDKYPEGHAPWVVGDSANVVVNYGYDIVTQIQATKDGLCKISLA

SEQ ID NO: 6590 - protein, 365 aa, Dehalococcoides sp. BAV1
MDFKLTVLPGDGIGPEVMDEGLKVLNAVAKKYKHTFKYQYGLIGGCCIDKEGVALSPAALAMCKKSDAVLLAAVGDPRFDDPKLPVHPEDGLLALRKGLGLFANIRPVKVAPSLVNSTPIKAEIVKGTDFIFIRELTGGVYFAKPKKRWTTPAGIRKATDSMTYSENEIERIVRVGFELAKNRKKKLVSVDKANVLLSSRLWRQIVIEVAKDYPEVKVEHVLVDACAMKLILAPTYFDVIVTENLFGDILTDEASMLAGSMGMLPSASLAGIPAKGTKTFGLYEPIHGSAPTIAKQNIANPIATILSIAMMLRYSCGLETEAVEIESAVDKVLAAGYATIDIFKEGNTKLGTAEMGNQITKMIGG

SEQ ID NO: 6591 - protein, 269 aa, Amycolatopsis balhimycina
MSGDRVRYEKKDHVAYVTLDRPGVLNAMDRRTHEELAGIWDDAEADDEVRVVVLTGAGNRAFSVGQDLKERARLNEAGARATTFGSRGQPGHPRLTDRFTLSKPVVARVHGYALGGGFELVLACDIVIASDDSVFALPEVRLGLIPGAGGVFRLPRQLPQKVAMGYLLTGRRMDAATALRYGLVNEVVPPEELDRCVAEWTDSLVRAAPLSVRAIKEAALRSLDLPLEEAFTASYTWEERRRRSEDAIEGPRAFAAKRDPVWTGEYRPG

SEQ ID NO: 6592 - protein, 829 aa, Oryza sativa
YYLSCLLPLNCSRRMTMSDDGDRTCPLCAEDMDITDQQLKPCKCGYEICVWCWHHIIDMAEKEDTEGRCPACRTRYDKDRIVKMAATCDRTVVEKNVDKKQKTQKVKSKAAVTVEAKKHLASVRVIQRNLVYIIGLPANLCNESILERREYFGQYGKVLKVSVSRPTGAPSQQAPTNNSISVLIELRTFAYADVRYITYAKEEEAIRCIQAVHNFVLEGKVLRACFGTTKYCHAWLRNMTCGNPDCLYLHDVGSQEDSFTKDEIISAYTRSRVPQMASNVSQRRAGTVLPPPAEDFSYSAVVAAKHPIKNGITNTANQSRLSPPNSSSGRSTLPPAASWGHRDLNTRTTATGVASSQSLTKSKADPQSNSFSSSSTVSSTKLPSSWNDDTSTVPKMTEGRDSLSKTLKPYKPGIAKETQAVTSLESSLDIDFSTIPSAWNDDDVTSDGMSKGSDEKQVVNDNGKFECSVSSKPAESGHLTSKSTTSPKKDIAVNSTRQSPLNCVSSPSVSKSEVKDGDGDYQVTNMASKTSTLVIRKDQSNQAAIDTATEDTRSESTDIDRLSVGVSSVTLSRKDGVQSIAENQQPDAILSTSVVVPFSQNLKLAECNDSTCQPSSDKHRDWCSDIQSSVSPQLNDIESYAVATDKSHGRVLDAADQASSSPYVHFPNTAPISLWNGKEINHTSTSDRTSTMMQPGLLSSVDSTSTMLNGHQEGLGTIYAPGKVSEHPRMKNHQPGAVGAVRIDNIGSFDKAVSVNKDESSIIADILSLEFDPWDESYSTANNFAKMLSASEKNDVLFDARSWKTKTSNSESRFSFARQDNQGSLLDHL

SEQ ID NO: 6593 - protein, 292 aa, Wolbachia endosymbiont of Drosophila melanogaster
MTIIIDGKKIANDLCERLSQKIDILKREYNIFPCLKVILIGSNPASQVYVRNKQKKAESIGISSETIVLPNNILEDELIEKINELNEDPSVHGILVQLPLPNHISASRVINTVSVEKDVDGFHDENVGKLVKGEKNCLIPCTPKGSLHLIKSIEENLSGKNAVVIGRSNIVGKPMFYLLLQENCTVTILHSQSKDLAEYCSKADIVVAAVGKPNFVQADWIKKGAIVIDVGINSVNVGKLVGDVDFEGIKGKAKAMTPVPGGVGPMTIAFLMMNTVIAACLQKGVDASDFIS

SEQ ID NO: 6594 - protein, 203 aa, Triticum aestivum
  misc_feature (27)..(27): Xaa can be any naturally occurring amino acid
  misc_feature (116)..(116): Xaa can be any naturally occurring amino acid
  misc_feature (164)..(164): Xaa can be any naturally occurring amino acid
MQRAELSTPDRLIWRWTVSGTYSAQSXYTATFHGSTGCHSWKLIWKCWAPPRVKFFHWLANQDRCWTAERQARHGLQHHPRCLLCDQQPETMRHLLLECPLARQAWHETLAWLCIXAPIPTQELSLTDWWNHAKEDTPPILRKALKSVSLLVPRMVWKHRNSRXFDNATPSLNTLLDSIHDEARSWAAAGAPGLRLVLPQTWD

SEQ ID NO: 6595 - protein, 112 aa, Polaromonas sp. JS666
MKQITAILKPFKLEEVREALAECGVTGLTVTEVKGFGRQKGHTELYRGAEYVVDFLPKVKVEVVVKTDDVERCVDAIVRAARTGKIGDGKIFITAVERTVRIRTGEEDEAAV

SEQ ID NO: 6596 - protein, 168 aa, Triticum aestivum
  misc_feature (115)..(115): Xaa can be any naturally occurring amino acid
APSPVPPSCRAARPAALGPGLCQRWADAPLSVWAQTEGPTAPPSDKPKASTSIWDALAFSGPAPERINGRLAMVGFVTALAVEAARGDGLLSQLGNGTGQAWFVYTGPVLSVASXLVPLLQGESAEGRAGAIMTAHGELWNGRLAMLGLVELPATEIISVGPFIKGVN

SEQ ID NO: 6597 - protein, 486 aa, Vibrio vulnificus CMCP6
MEVTAHYIGGKPFVGDTGESFATLNPATGEVLAHIEQADERVLGHAIESAKLGFSVWSSMSAAERSRCLLKAAQLIRDHNDELAELEVRDTGKPIQEASVVDIATGADVIEYFAGLVNGLGGEQQSLGSNQFFYTRREPLGICAGIGAWNYPIQIAMWKAAPALAAGNAMIFKPSEETPLSALKLAELFTQAGVPDGVFNVVQGDYRVGQMLTAHPEIDKVSFTGESGTGKKVMADSAATLKPVTMELGGKSPLIIFDDADLDDAVSAAMVANFYTQGEVCTHGTRVYVQRAMYDAFVEQLKERTEKLIVGDPMNMETQIGSLISKSHLEKVLGAISSAKESGATLLTGGFQVTERGLEKGCFVAPTVFVDCRDEMPHVQNEIFGPVMSVLVFDDEDEVIARANNTQYGLAAGVFTQNLSKAHRVIHQLQAGICWINTWGNSPAEMPVGGYKLSGIGRENGQETLLHYTQTKSVFVELGAFDSPYA

SEQ ID NO: 6598 - protein, 465 aa, Staphylococcus epidermidis ATCC 12228
MAKQAPDVGDYKYGFHDEDVSIFRSERGLTENIVTEISKMKEEPQWMLDFRLKALKLFYKMPMPQWGGDLSELDFDDITYYVKPSEHTERSWDEVPEEIKRTFDKLGIPEAEQKYLAGVSAQYESEVVYHNMEKELEEKGIIFKDTDSALRENEELFREYFASVVPAADNKFAALNSAVWSGGSFIYVPKNVKLDTPLQAYFRINSENMGQFERTLIIADEGASVNYVEGCTAPVYSTSSLHSAVVEIIVHKDAHVRYTTIQNWANNVYNLVTKRTFVHENGNMEWVDGNLGSKLTMKYPNCVLLGEGAKGSTLSIAFASKGQVQDAGAKMIHKAPNTSSTIVSKSISKNGGKVIYRGIVHFGRKAKGARSNIECDTLILDNESTSDTIPYNEVFNDNISLEHEAKVSKVSEEQLFYLMSRGISEEEATEMIVMGFIEPFTKELPMEYAVEMNRLIKFEMEGSIG

SEQ ID NO: 6599 - protein, 314 aa, Rhodospirillum rubrum ATCC 11170
MAEHRTKVLILGSGAAGCTAAIYAARANLAPILVAGLQPGGQLTITSDVENYPGFAEAISGPWLMEQMQAQARAVGTEMIDDLIISADLSKRPFVCQGDSGDTYIADTVVVATGASARWLGLQSEKRWSGLGVSACATCDGFFFRGKEVVVVGGGNTAVEEALYLTNHASKVTLIHRRDSLRAERIMQDRLFKNPKVGVVWNSTVEEILGGGDPPGVTGVRLRDTQTGALSELSCDGVFIAIGHTPNTALFAGQLDCDDNGYLITAPDSTATNVPGVFAAGDVQDHIFRQAVTAAGTGCMAAIEADHFLALTQE

SEQ ID NO: 6600 - protein, 476 aa, Oryza sativa
RKDYTTPSTMSLQTPRIGRLLSRQALHAPIRRRAFHRSSRLDVVKPFLLADIGEGITECQLIQWFVQPGARVEHFDKLCEVQSDKASVEITSPFDGVIKKLYYEPDDMAVTGRPLVDIDMDGDEAEAEAEKLGEAETSADKGENTKVNTASHETESRPTERRRNGNGKDDFSSLATPAVRHLMKELNVNITDVEGTGRDGRVTKEDVHRFVSQKTQQQMEVESPSTSPASTSASTSTLSTATQDQKLPLTPVQTQMFKVMTKSLSIPHFLYSCSADMTSVTATRKKLNAMKTSEKLTHLPFIIKATSLALQQHPLLNSALDTSDPKKPSLTYRSSHNFGVAVDTPSGLLVPVIRDVQNLSIAQIAQQLKALSEKARNGKLAPGDFSGASFTISNIGSVGGGVVAPIISEPQVAILGVGRSKVVPAFDENDQLVRREELVLSWSADHRVVDGAECARCAEKVKGLLEEPTAMLLEMR

SEQ ID NO: 6601 - protein, 378 aa, Rubrobacter xylanophilus DSM 9941
MMNASLLGFLEGCPPGAEIWGVLDGFRGLVEGDLARLPPGCVDRRLYLSPGAWLGAGRRPLGEGDPERCVERLAARGVRGLAMVGGNGTMWACARIEEAARRAGYGLAVVGIPKTVDNDLAGTDHAPGFPSAARYVAAVVRDIGADLEAMRGFESVRVLETMGRNAGWLALSAGYLRREPSDPPHLIYVPERPFDPDAFLGDVEAAVRAHGFVVAVVSEGLVRRPREEGLRRPVIGGVAPELARRVEEALGLPSRGELLGMGQRSFSLAASPLDREEARALGNRAARMLLEGRSGLMPALRRLPGRRYRVAVEEVPFGRVAGAERPLPPRWVVPPQEVPQGFRGWLAPLVGEDLAPHPPPLVRRLRGAAAGREGRSES

SEQ ID NO: 6602 - protein, 447 aa, Nitrosomonas europaea ATCC 19718
MKYNSIEEFKNYVSERNPGQPEFLQAVSEVIESLWPFIVDHSRYAEQGLLDRLIEPERMIIFRVAWVDDRGEVKVNRGYRIQYNSAIGPYKGGTRFHPSVNLSILKFLAFEQTFKNALTTLPMGGGKGGSDFDPKGKSPGEIMRFCQAYAAELFRHVGADTDVPAGDIGVGGREVGYMAGMVKKLTNRSDCVFTGKGLTFGGSLLRPEATGYGLVYFAEEMLNHSGCSLKGMRVSVSGSGNVAQFAIDKAMSLGAKVVTVSDSSGTVVDEAGFTPEKLAILAEVKNRLYGRVNEFAERVEAQFLPGEKPWHVPVDVALPCATQNELNENDAAILIRNGANCVAEGANMPCTAGAVERFHHAKVLFAPGKASNAGGVATSGLEMSQQAMRLSWTSGEVDMRLQEIMRAIHHSCTEYGKKPDGTVNYVDGANVAGFVKVAEAMLAQGVI

SEQ ID NO: 6603 - protein, 421 aa, Haemophilus influenzae R2846
MLYPEYPEYDNFNESGALIKVVGVGGGGGNAVNHMVMNMVKQEMGGTFVGESSLTSEEHGRIVFYAVNTDAQALRKSQVQQTVQIGGETTKGLGAGANPNIGRKAAEDDQDEIRKMLEGADMVFIAAGMGGGTGTGAAPVVAKIAKELGILTVAVVTKPFAFEGKKRMQFAELGIKDLSQYVDSMIIIPNQQIQKVLPKNAKLIDAFAAANDVLRNSVMGISDMITSPGLINVDFADVRTVMSVQGQAMIGFGSAVGEPGAGRAEEAARLAVRNDLLEKIDLSNAQGILVNITAGMDLVFEEFNIIGETIGSFASEEATVVVGTSLVPEMSDEIRVTIVATGLGEIAGNEPIQVVRQGLSTQNIEGEGRVNIVPELHRRESVEVSRAASEEYQRPLDKPITDRLEAFKKNNFFNPAQREEN

SEQ ID NO: 6604 - protein, 672 aa, Brucella suis 1330
MATKVKENEEAEVEREGAADGPLLDLSDDAVKKMIKLAKKRGYVTMDELNAVLPSEEVTSEQIEDTMSMLSDMGINVVEDDEQDNDREEGNDDEAEEGGDLVEAGGTAVATTTTKKEPTDRTDDPVRMYLREMGSVELLSREGEIAIAKRIEAGRETMIAGLCESPLSFQAIIIWRDQLNESNILLREIIDLETTYAGPEAKQAPVIERVEEEKPRDERPQRRSRDDDDITNVGGDMPVEDDDDDEDEANLSLAAMEAELRPQVMETLDFIADTYKKLRKLQDQQVEGRLAATGELSSSQERRYKELKDQLIKAVKSLSLNQNRIEQLVEQLYDINKRLVQNEGKLLRLAESFGVRREDFLKEYQGHELDPNWVERVATLPSRGWKEFAAKEADSIGRLRSEIQNLATETAISIGEFRRIVNQVQKGEREATIAKKEMVEANLRLVISIAKKYTNRGLQFLDLIQEGNIGLMKAVDKFEYRRGYKFSTYATWWIRQAITRSIADQARTIRIPVHMIETINKIVRTSRQMLHEIGREPTPEELAEKLAMPLEKVRKVLKIAKEPISLETPVGDEEDSHLGDFIEDKNALLPIDAAIQANLRDTTTRVLASLTPREERVLRMRFGIGMNTDHTLEEVGQQFSVTRERIRQIEAKALRKLKHPSRSRKLRSFLDS

SEQ ID NO: 6605 - protein, 478 aa, Rhodospirillum rubrum ATCC 11170
MTIPVLVWFRDDLRLADNPALCAALDSGAPVIPFYLLDDSTSDGHRPLGGATRWWLGRSLTSLAESIAQRGGRLVLRRGEALSAVPELAAETDAAALFANRLYGMDSLRDDDLFMVLRVAGLTVRLFDSGLLHRPEAVTTKTGRPFRVFTPFWKTLSATLDPGLPLAAPDSFPPVDDPPPASDSLADWSLEPTTPDWAGGLRDTWQPGEAGAQARLEAFFNGPVADYASGRDRPDKPLTSKLSPHLRFGEISPRQVWTAARHHPPGGGMDAFLRELGWREFCHHLLFQAPTMAEEPLKAEFLAFPWTEAKEIGPALAAWQSGETGYPIVDAGMRELWHTGWMHNRVRMIAASFLIKDLLIPWQHGERWFWDTLVDACPANNAAGWQWVAGCGADAAPFFRIFNPVTQGERFDPEGAYVRRWLPELADLPSSLIHRPWEAPPLILRQAGVTLGKTYPPPLIDHAHARVRALEALAVVNR

SEQ ID NO: 6606 - protein, 606 aa, Zea mays
MCGILAVLGCADEAKGSSKRSRVLELSRRLKHRGPDWSGLRQVGDCYLSHQRLAIIDPASGDQPLYNEDQSVVVAVNGEIYNHLDLRSRLAGAGHSFRTGSDCEVIAHLYEEHGEEFVDMLDGVFSFVLLDTRHGDRAGSSFFMAARDAIGVTPLYIGWGVDGSVWISSEMKALHDECEHFEIFPPGHLYSSNTGGFSRWYNPPWYDDDDDEEAVVTPSVPYDPLALRKAFEKAVVKRLMTDVPFGVLLSGGLDSSLVATVAVRHLARTEAARRWGTKLHSFCVGLEGSPDLKAAREVAEYLGTLHHEFHFTVQDGIDAIEDVIYHTETYDVTTIRASTPMFLMSRKIKSLGVKMVISGEGSDELFGGYLYFHKAPNKEELHRETCRKVKALHQYDCLRANKATSAWGLEARVPFLDKEFINAAMSIDPEWKMVQPDLGRIEKWVLRKAFDDEEQPFLPKHILYRQKEQFSDGVGYSWIDGLKAHATSNVTDKMLSNAKFIFPHNTPTTKEAYYYRMVFERFFPQKSAILTVPGGPSVACSTAKAIEWDAQWSGNLDPSGRAALGVHLAAYEHQHDPEHVPAAIAAGSGKKPRTIRVAPPGVAIEG

SEQ ID NO: 6607 - protein, 610 aa, Wolinella succinogenes
MCGIAGTLNSSCFSSKKLLAALAHRGPSGHGEFSHQGVNLFHARLSIQDLSPAGAQPMHRHHLSIVFNGEIYNHLELRAKVADYPFSTRSDTETILALFERFGERSLEWMDGMFALAILDQRTHKLFLARDRMGKKPLFYYQEGEEFLFASELNALLTLKPLQIDHAKLSAFLRCGFFPHDGAPYQGVQSLPQGSYAFIDLHHPRPLSPQRYFDLLSLYQAPKIEGFEASKEAVELALKESVKNRLESSDLEVGSFLSGGIDSSLITALASFFTPKLKTFTVAFEGAYDESSLAELVAKRYKTDHTTLHLNPSKLKEEVKGILACYGRPFMDSSAIPSYYVSQEAKKHLTVILNGDGADELFGGYRRYVPMSHGWLKLARPLSLLLPLLPLPKEKKSLYNYLHRLLAMSRKRGLDFYLSATIDSFEDAYAFSPNPHTQTLDQEITQILEDSSLSSLSKMLYLDSQNLLLSDLLPKMDIATMAHSLEGRSPFLGKSLLEVAPRIKDEYKIFGKSTKFILRELAKKYLPHALLEQPKRGFEVPLRAWVEGELKELIFDSLSKNCLSRELIESRFVDALLDKPQDFAPEKRAKMLWSLFSLEVWHEHYQKACE

SEQ ID NO: 6608 - protein, 258 aa, Clostridium perfringens str. 13
MENIIFNESNGIAEVIINRPKALNALNNQTITELGEVINEISKRKDIKTVIITGAGEKAFVAGADIVEMKDLNSMEARDFSRLAQKVFSDIENMPQIVIAAVNGYALGGGCELSMACDIRLASKKAKFGQPEVNLGILPGFAGTQRLPRLVGKGIAKELIFSTDMIDAEEAHRIGLANKVYEPEELMDKARELANKIMSKSPVGVRLAKAAINNGLNMDTESAYNYEADLFALCFSTEDQLEGMNAFVDKRKADFKDK

SEQ ID NO: 6609 - protein, 105 aa, Haemophilus ducreyi 35000HP
MTINISSKQMEVTPAIRTHIEERLAKLEKWQTQLINPHFMIHKLPNSYEVEASIGTPVGELFAKANEADLYKAINEVETKLESQLNKLVHKNEARRTDNTLKSVQ

SEQ ID NO: 6610 - protein, 491 aa, Zymomonas mobilis
MLSLPIWFSCDYRKSGKGRVSKMPEKSPKLSKTLSSFHLWGIAVGLVISGEYFGWSYGWATAGTMGFLIATVIVAAIYTSFIFSFTELTCSIPQAGGPFAYSFRALGKWGGAIAGMATLVEFLFAPPAIALAIGSYLNVQFPSLSPKMAAACAYIVFMALNIVGVRIAATFELFITVAAIFELLVFMGVVAPAFSWEQFLHDGWGVASHFDIQAIGGIFAAVPFAIWFFLAIEGVAMAAEEAKNPRRSIPIAYTAGILTLVSLAFGVMVFAGGSMDWHQLANLNDPLPQAMKHVVGAHSGWLHMLVFLGLFGLVSSLHGIIMGYGRQIFALARAGFLPATLGKLHIKLQTPYAATIAGGLVGIAAIFADDVLSFGGHSLTAILVTMSVLGSLTMYVLSMVSLFRLRQTMPDLPRPYKAPLYPFLPALALIGAFFLLAAVIYYNAGISFIYALLMCIACPLCLYSYKRSQNKKTEENDITTSAILAAEGAEE

SEQ ID NO: 6611 - protein, 618 aa, Wolinella succinogenes
MCGIVGYSQNHPQAIQEMLQSIRHRGPDDLGIYCDEGFSLGHTRLSILDLSHAGHQPMEFEHLVIVFNGEVYNFRAIQKELLGLGYTFFSDSDTEVILKAMHCWGEKAVDKFIGMFAFALWDKRKEELLLYRDRVGVKPLYYYFEGGELLFASELRAITAIKPNLALSQAGLYEYFQFGYISSNLSIHQAIHKLPAGHYLRFKAGKIEVKPYWSIHTFLEMPPFEKSEEELIDELEELLVDAFKLRMVADVPVGVFLSGGIDSSLVAAILQKHHGHIHTFTIGFENPRYNEALYAKGVAEHLGTEHTERILSAEEAREILYRFPEVYDEPFGDSSGIPTLLVSKVAKESGVKVVLSADGGDEIFCGYERYPIAHSLSRKILSLPYPLRAFAGRAMESFGAKRAGYLFKVRNLEHKFNQLSEMLRAKDLEEFYELLVHNSKNYEIKELLGETFPPKSRAFKVGERIHPMQGMMSWDYERYMVDDILVKVDRATMFHSIEGREPLLDHRIAEFAARLPFNMKFREGKTKYILRKVLERYLPKEMIERPKMGFGIPMFEWFSQDLRSLFETHFTPERLKSSGVLNPSYVLRELGKLQRGEPVNVNKLWLILVFLMWQEKAR

SEQ ID NO: 6612 - protein, 70 aa, Oryza sativa
  misc_feature (18)..(18): Xaa can be any naturally occurring amino acid
  misc_feature (20)..(20): Xaa can be any naturally occurring amino acid
  misc_feature (23)..(23): Xaa can be any naturally occurring amino acid
  misc_feature (26)..(27): Xaa can be any naturally occurring amino acid
  misc_feature (52)..(52): Xaa can be any naturally occurring amino acid
  misc_feature (54)..(54): Xaa can be any naturally occurring amino acid
  misc_feature (56)..(56): Xaa can be any naturally occurring amino acid
  misc_feature (61)..(61): Xaa can be any naturally occurring amino acid
MVVLVVATTSDAASATPXAXFLXMPXXTPGPSIPDGVESFANGAGVRLLRHXRXIXEEDDXDLRWEAATG

SEQ ID NO: 6613 - protein, 291 aa, Arabidopsis thaliana
  misc_feature (259)..(259): Xaa can be any naturally occurring amino acid
MGSTGNPNPWGTTYDSYRDCSQGVCSVYCPQWCYVIFPPPPSFYLDDEDDSSSSDFSPLLIALIGILASAFILVSYYTLISKYCHRRRHNSSSTSAAAINRISSDYTWQGTNNNNNNGATNPNQTIGGGGGDGLDESLIKSITVYKYRKMDGFVESSDCSVCLSEFQENESLRLLPKCNHAFHVPCIDTWLKSHSNCPLCRAFIVTSSAVEIVDLTNQQIVTENNSISTGDDSVVVVNLDLENSRSRNETVNEGSTPTXGDAGFKRRRRAEIGVVKLRRRCGIDRRYTKGD

SEQ ID NO: 6614 - protein, 113 aa, Geobacter sulfurreducens PCA
MKEIKAIIRPGKLRDVAEELHAIDGMPGVTVSEIKGFGKGKARNATDKILYEMVEFIPRVKLEVVVADDMVDDVVNVIQKYAHTGNTGDGKIFISTIDDVVKIRTNERGSSAI

SEQ ID NO: 6615 - protein, 419 aa, Thermococcus litoralis
MVEQDPFEIAVKQLERAAQYMDISEEALEFLKRPQRIVEVSIPVEMDDGSVKVFTGFRVQYNWARGPTKGGIRWHPEETLSTVKALAAWMTWKTAVMDLPYGGGKGGVICNPKEMSDREKERLARGYVRAIYDVISPYTDIPAPDVYTNPQIMAWMMDEYETISRRKDPSFGVITGKPPSVGGIVARMDATARGASYTVREAAKALGMDLKGKTIAIQGYGNAGYYMAKIMSEEYGMKVVAVSDTKGGIYNPDGLNADEVLAWKKKTGSVKDFPGATNITNEELLELEVDVLAPSAIEEVITKKNADNIKAKIVAELANGPTTPEADEILYEKGILIIPDFLCNAGGVTVSYFEWVQNITGDYWTVEETRAKLDKKMTKAFWDVYNTHKEKNINMRDAAYVVAVSRVYQAMKDRGWIKK

SEQ ID NO: 6616 - protein, 528 aa, Aquifex aeolicus VF5
MAEKVYIYDTTLRDGSQMEGVSFSLEDKIRIAEKLDDFGIHYIEGGWPYANPKDNLFFQKAKKMNFKNAKLTAFGSTRRPNKKVSEDPQVESLIKAETPVVTIFGKSWDLHVTDALKTTLEENLNMIYETVEYLKRYVDEVIFDAEHFFDGYKSNPEYALQVLEAALKGGADWVVLCDTNGGTLPHEIYEITKKVKERFKDANVGIHAHNDSETAVANSLMAVLAGARQVHGTINGIGERTGNANLCSIIPNLQLKLGFDVIPQENLKKLTELANFVAEIINMPLPRNMPYVGESAFAHKGGVHASAVLKNAKTYEHINPELVGNKRKITVSDLAGRSNLVHKLKEFGIEIDPKSPELKKLIDKIKELEKEGYHFEAAEASLELLIKRHFGLVKDYFDFDAYRVLIAKRRDDSLPTSEATVRLSVEGVEEHTASLGNGPISALDRALRKALEEFYPNLKELQLIDYKVRIINESAGTSAKVRVLIESTDGKRKWGTVGVSENVIEASWIALRDSIVYKLMKDEEEGIL

SEQ ID NO: 6617 - protein, 406 aa, Aquifex aeolicus VF5
MSEREEFKFNTVEEAIEDIRQGKMVIVVDDPDRENEGDLVMAAEKVTPEAINFMAKYGRGLICLSLTPERCEQLDLHPMTPMNTDPKGTYFCVSIDAHPKHGTTTGISAYDRALTIKLAISPDAKPSDFVRPGHVFPLKARPGGVLERAGHTEASVDLARLAGLYPAGVICEIMKDDGTMARVPDLMEFAKKHNLKIITIADLIKYRLRRETLVEKVASAHLPTPWGVFKIHAYRHKLTGEEQVALTMGEWKEDEPVLVRVHSECLTGDVFRSFRCDCRPQLEKALEMIAKEGKGVLVYILGHEGRGIGIANKIKAYELQEKGYDTVEANEKLGYPPDLRDYGIGAQILRDLGVRKMKLMTNNPRKIVALEGFGLEVVERVPIKIEPNPYNKIYLQVKKDKLGHMF

SEQ ID NO: 6618 - protein, 515 aa, Candida albicans
MLEEISFESWYLYLIICGVLYFCTNYLYIQYLNKKLGAKSPGSCKSDGCFGFRSGFEMLKAKKIGRQVDLLHERFNDLSNPEVNDTFTSYNFGFPMIITKDPENIKALLATQFNDFSLGRRYDFFKPLLGKGIFTLDGEGWKHSRSMLRPQFAREQIAHVKALEPHFQLLKKHITKNKGQFFDIQELFFRFTVDSATEFLFGESVSSLKDESIGYNQDEFDFAGRKDFPEAFNKSQIYLSTRSLLQNLYWLVNPKDFQNCNAIVHKFSDYYVNKALNATPEELEKNSGYVFLYELVKQTRDPQVLRDQALNILLAGRDTTAGLLSFAVFELARNPQVWKKLREEIIERYADGVTEISFETLKQCEYLKAVINETLRLYPSVPRNGRFANKNTTLPRGGGPDGMSTILIKQGQAVMYSIYSTQRDPKYYGKDADVFRPERWFEPETRKLGWAFLPFNGGPRICLGQQFALTEASYVLVRLAQCCENLQLTEGIEYPPAKLTHLTMCMFDGVPIKVD

SEQ ID NO: 6619 - protein, 397 aa, Pseudomonas fluorescens Pf-5
MFELVDNIPQSPVIKVIGVGGGGGNAVNHMVKSNIEGVEFICANTDAQALKNIGARTILQLGTGVTKGLGAGANPEVGRQAALEDRERIAEVLAGTNMVFITTGMGGGTGTGAAPIIAEVAKEMGILTVAVVTRPFPFEGRKRMQIADEGIRALSESVDSLITIPNEKLLTILGKDASLLSAFAKADDVLAGAVRGISDIIKRPGMINVDFADVRTVMSEMGMAMMGTGCASGPNRAREATEAAIRNPLLEDVNLEGARGILVNITAGPDLSLGEYSDVGSIIEAFASEHAMVKVGTVIDPDMRDELHVTVVATGLGAKIEKPVKVIDNTVQTSMSAQSQAPAPARQELPSVNYRDLDRPTVMRNQAQSNAATAAKLNPQDDLDYLDIPAFLRRQAD

SEQ ID NO: 6620 - protein, 151 aa, Solanum brevidens
  misc_feature (7)..(7): Xaa can be any naturally occurring amino acid
RKSFYYXAENNVVFEGILLNPSMVTPGAEHKEKATPDTIAKYTLTMLKRRVPPAVPGIMFLSGGQSEVEATLNLHAMNQSPNPWHVSFSYARALQNTVLKTWQGRPENVDAAQRALLIRAKANSLAQLGKYSAEGESEEAKKGMFVKGYTY

SEQ ID NO: 6621 - protein, 76 aa, Arabidopsis thaliana
  misc_feature (26)..(28): Xaa can be any naturally occurring amino acid
  misc_feature (31)..(31): Xaa can be any naturally occurring amino acid
  misc_feature (59)..(59): Xaa can be any naturally occurring amino acid
MASSMFSSTAVFTCGGQSTIVAPFTXXXSSXSFPVTRKANNYITWITSNLLIVICIKKXPPIRNNNFHTLSYLPDL

SEQ ID NO: 6622 - protein, 741 aa, Fragaria x ananassa
MEACNCIEPQWPADELLIKYQYISDFFIALAYFSIPLELIYFVKKSAVFPYRWVLVQFGAFIVLCGATHLINLWTFNMHSRTVAIVMTTAKVLTAVVSCATALMLVHIIPDLLSVKTRELFLKNKAAELDREMGLIRTQEETGRHVRMLTHEIRSTLDRHTILKTTLVELGRTLALEECALWMPTRTALELQLSYTLRQQNPVGHTVPIHLPVINQVFSSNRAVKISPNSPVARLRPLVGKHMPGEVVAVRVPLLHLSNFQINDWPELSTKRYALMVLMLPCDSARQWHVHELELVEVVADQVAVALSHAAILEESRRARDLLMEQNIALDLARREAETAIRARNDFLAVMNHEMRTPMHAIIALSSLLQETELTPEQRLMVETILKSSNLLATLINDVLDLSRLEDGSLQLDIATFNLHSVFIEVHNLVKPVASVKKLSVTLNLAADLPVYAIGDERRLLQIILNVVGNAVKFSKEGSISITAFVAKSESLRDFRAADFFPVQSDNHFYLRVQVKDSGSGINPQDLPKLFTKFAQNQSLATRNSGGSGLGLAICKRFVNLMEGHIWIESDGLGKGCTTTFIVKLGYPERSNESKLPFVPKMHTTHVQTNFPGLKVLVMDDNGVSRSVTKGLLEHLGCDVTTVSSSDEFLQVISQEHKVVFMDVCMPGIDGFELAVQIHEKFTKRHERPVLVALTGNINKMTKESCMRVGMEGVILKPVSVDKMRSVLSELLEHRVLFEAM

SEQ ID NO: 6623 - protein, 287 aa, Haemophilus ducreyi 35000HP
MAAKIISGINIAKQIKQNIAQKIAQYIVNGYRRPGLAVILVGADPASQVYVNSKRKSCAEIGIESKYYDLPATITEVELLSIIQRLNSDEMIDGILVQLPLPEHINPIHITEAISSDKDVDGFHPYNVGRLCQKIPTLRSCTSYGVMKLLESTHIDLSGLHAVIVGASNIVGRPMAMELLLAGCTVTITHSRTKNLVDHLSSADIVIVGIGHPNFVKGEWLKQGAIVIDVGINRDTYSKKLVGDVDFLTAEAKASFITPVPGGVGPMTVAMLMQNTLQAYEHHLQAV

SEQ ID NO: 6624 - protein, 259 aa, Debaryomyces hansenii CBS767
MVSNIVIPGDGILNDTNTTKTTIGPGIYKNPQTQEIIPASAGILNVKTNKQNTNTVIFTDSNSKRYIPQTNDFVIGIIVGVFGESYKVQLQDFSTSVQLSMMAFPNASKKNRPNLKIGQAVYARVSQAIPEIDTELECIDPITGKEGGFGLLDESGYIFNINLNFARELLFNQSSVFLEKLSTKCKFEIAIGINGKVWLKCGDGIKKQTNDAEDDDKEKSSSSARDLRATLAACRFLTKCQHINPSQIDIELKEAFKHF

SEQ ID NO: 6625 - protein, 150 aa, Brassica napus
  misc_feature (65)..(65): Xaa can be any naturally occurring amino acid
DLSLIPGAASKSAKKQNRDNTNTELWFEDLAQLSLPIFRTVILSMRSEDLSSDVIESCLISYAKXHIPGILRSNRKPSSSSSTAASENEQREILETITSNLPLDKSSISATTRFLFGLLRTAIILNASETCRDLLERKIGSQLERASLDD

SEQ ID NO: 6626 - protein, 158 aa, Triticum aestivum
MHPTRWELSHMVDLQAAALVISVGPAEGPIVSGGKKVTPSKRAPPHALSPAEPPPPPPLHSPRVNNPWTMEMNAATSLEPRAKATLVLGGESFTVSSESGALSEQLAAMREKSMVILKEYITKHNVPNDVPDESIEGPSDEEGEALAKNPPKKSKKQK

SEQ ID NO: 6627 - protein, 311 aa, Citrus unshiu
MAVGLLAAIVPKPFCLLTTKLQPSSLLTTKPAPLFAPLGTHHGFFNGKNRRKLNSFTVCFVLEEKKQSTQIETFTDEEEEESGTQISTAARVAEKLARKRSERFTYLVAAVMSSFGITSMAVMAVYYRFWWQMEGGEVPLAEMFGTFALSVGAAVGMEFWARWAHKALWHASLWHMHESHHRPREGPFELNDVFAIINAVPAIALLSFGFFHKGLVPGLCFGAGLGITVFGMAYMFVHDGLVHKRFPVGPIADVPYFRRVAAAHQLHHSDKFHGVPYGLFLGPKELEEVGGLEELEKEISKRIKSYNRVPK

SEQ ID NO: 6628 - protein, 218 aa, Zea mays
MLDINLFRTDKGGNPELIRESQRRRFASVELVDEVIALDKAWRERQFELDKIRQELNATSKKIGKLKASKQEEEAKKLMESTDEIKKRLAAKEVEVQEAKSTLDAKLTTIGNIVHESVPVSNDEFDRICPVVDLLSVGTFSLLIDFSFPGKCKGGVWVGHLLSGYSLPMDMPSQVNVKSSEEVAGMWKHSIKVSYEATKAAFPGGEVIAHLDHKNLET

SEQ ID NO: 6629 - protein, 177 aa, Echinochloa crus-galli var. formosensis
YYEAGARLAKWRAVLNIGPNEPSQLAIDQNAQGLARYAIICQENGLVPIVEPEILVDGPHDIERCAYVTEKVLAACYKALNEHHVLLEGSLLKPNMVTPGSDAKKVANEVIAEYTVRALQRTVPAAVPAIVFLSGGQSEEEATLNLNAMNKLNTKKPWSLSFSFGRALQASTLKAWS

SEQ ID NO: 6630 - protein, 394 aa, Nicotiana tabacum
MSCAVAISNSPAFSPASRVPVTKSLCKSASFSSSSPNSSKTLTKFPSFTSSSSSSSSSSSSSPSSPSLQFQILRLQKPLQASASTNRIRNSTECSTSAPVLKRKRPAKLDIPVVSTTFGNFPATPAAATADFVEVEGDGYYVCCKRGRRGPMEDRYSALVDLQGDSKEGIFGIFDGHGGAKAAEFAAENLNKNIMDELVNRKDDDVVEALKNGYLKTDSEFLNQEFRGGSCCVTALVRNGDLVVSNAGDCRAVVSRGGIAETLTSDHKPSRKDEKDRIKTSGGYVDCCNGVWRIQGSLAVSRGIGDRYLKQWIIAEPETKVVGLHPELEFLVLASDGLWDKVSNQEAVDAARPLCTGISKPQPLSASKSLIDLAVSRGSVDDISVMIIQLQRFC

SEQ ID NO: 6631 - protein, 221 aa, Arabidopsis thaliana
MKVSMSLILITLSALVTIAKAYDPSPLQDFCVAIDDPKNGVFVNGKFCKDPKQAKAEDFFSSGLNQAGITNNKVQSNVTTVNVDQIPGLNTLGISLVRIDYAPYGQNPPHTHPRATEILVLVEGTLYVGFVSSNQDNNRLFAKVLNPGDVFVFPIGMIHFQVNIGKTPAVAFAGLSSQNAGVITIADIVFGSTPPINPDILAQAFQLDVNVVKDLEAKFKN

SEQ ID NO: 6632 - protein, 128 aa, Triticum aestivum
  misc_feature (67)..(67): Xaa can be any naturally occurring amino acid
MAASMITSPIVAPTSLPSLSRRGSSFAVVCSGGKKIKVDKPLGLGGGLTVDIDANGRKVGKKGVYQXFVDKYGANVDGYSPIYTPEEWSESGDRYAGGTTGLLIWAVTLAGLLGGGVLLVYNTSALAG

SEQ ID NO: 6633 - protein, 369 aa, Archaeoglobus fulgidus
MFGEMSGEYGELGVDKERLKEVGIELDKSKRSGVYLQEDQDAKTFSSFFEGVEVMSIKQAMEKYDWVKDYFWKILRKDQDEFTRMADTEDVNGYFIRSLPGAKVEIPVEACLYLKKVEKQRVHNIVIAEEGSELNIISGCTSHPGVAGMHIGISEFFVKKNAKLSFTMIHSWDTTIEVRPRTAIKVEEGGTFISNYILLNPVKLVQTYPTAYVEKDATAIFNSVIVALEGSVVDSGSRAVLMGENSRAEIISRTISKGGKIIARGHIIGDAPEVKGHLECKGLMLSESGLIDAIPELEARYPNVELSHEAAIGKIAEEGIFYLMSRGLSRDEAISAIVRGFMEIEIKGLPEALQEAIRRTIEMAERDLL

SEQ ID NO: 6634 - protein, 484 aa, Synechococcus elongatus PCC 7942
MSAVHLTVTPPGPIRFGTDGWRGVIAADFTFERLFRAAGAAAKVLARTYGDNGSRRILVGYDRRFLSEEFASITAQAIQAVGLEAQLASNYATTPALSWAVHEQAALGALVITASHNPGQYSGLKIKGAFGGSVPGSVTAEVEALLDQGFTPDLPDSSSAIARFDPWQSYRQMLRQKVDLAAIQAAIAGGRLSVFVDVMHGAAAGALAQILEAPVTELRSDRDPLFGGGAPEPLAANVVGLCQRLSDGVTTPLAVGFVFDGDGDRIAAVDRSGEFLSSQVLIPVLIEHLAARRSCPGELVKTVSGSDLMPKVAALFNIPVTELPVGYKYIADRMLSQTVLLGGEESGGIGYGSHIPERDGLLSALYLLEAIVQSDRNLGDLYADLQARTQFQSTYDRIDLPLADMSARDRVLQALQTQTPQAIAGLEVISYQTIDGFKFRLSDGRWLMVRFSGTEPLLRLYCEASSPEAVQETLNWAKDWAQRC

SEQ ID NO: 6635 - protein, 552 aa, Ustilago maydis 521
MSVVTVQTKPFEGQKPGTSGLRKRVKVFSQQHYTENFVQAILSAIPTGAPNSTLVVGGDGRYFSKPAIQAIIRLAAGNGVSKLIIGQDGILSTPAASHVIRSYKATGGILLTASHNPGGPENDFGIKYNMDNGGPAPESITNKIFDITKTITEYKIVEGPPVDLSKIGETTFGKLEIQIIDNVKDYVDYLSQIFDFALIKHFLKTSGFTVRFDALHGVTGPYGRALFVEQFGLDESSIQNCIPSEDFGGGHPDPNLTYAKSLVDAVEKENISFGAASDGDGDRNMIIGKGAFVNPSDSVAIIADWAQKAIPYFKSGIKGLARSMPTSGAIDRVAAKNGYECFEVPTGWKFFGNLMDAGRLSICGEESFGTGSDHIREKDGLWAVVAWLSILAAANKEKPGTSVSDVLLAFYKQYGRNFFSRYDYEEVDSDGANKLMAHLRDQFESASFKGSKLGDFQVAESGDFSYTDPIDGSVSKNQGLYIKFVDGSRIIFRLSGTGSAGATIRLYVEKYSNDDNEFGADAQVGLKPLIEQALAVSKLQEFTGRSKPTVIT

SEQ ID NO: 6636 - protein, 448 aa, Psychrobacter sp. TAD1
MSISKAIEKVEARYAHQPEFIQAVKEVAITIKPLYDAHPEYDKLKVFERLVEPDRVFGFRVNWEDDNGEIQINRGWRVQFSNALGPYKGGLRFHPTVNQSVLKFLGFEQIFKNALTGLPIGGGKGGSDFDPKGKTDSEIRRFCYAFMRELHHYVNKDMDVPAGDIGVGGREVSYMFAMYKNLTRESTGVITGKGVGFGGSLMRTEATGYGAVYFLQNMLAAQNESIEGKKVLVSGAGNVSLHAAEKATLIGAIVLTVSDSKGTIYDAKGLNQEKIDWLKVQKDQHKPLADYVEVFGGEWMADQKPWSIKADIAIPSATQNEINEEDAKLLVDNGVKYIVEGANMPLTAEAIDYIRLHRVHYAPGKAANAGGVAVSALEMSQNSVRQYQTFEQVDERLQGIMKDIHDSSAQASEMYGQTDEGYIDYMSGANMVGFKRVADALVAFGILN

SEQ ID NO: 6637 - protein, 566 aa, Polaromonas sp. JS666
MNMLKTPSSKYKSFPPIRLADRTWPDAVLTRAPIWCSVDLRDGNQALIEPMDIPRKLKMFETLVKIGFKEIEVGFPSASQIEFDFLRHLIDDKLIPDDVTIQVLTQAREPLIRRTFEALKGTKKAIVHLYNATAPVMRRVVLGMDEDQIVKLATDNARLFMQLAAEQTGTHWTFQYSPEMWSGTELEFSRRVVDAVTEVWQPTPGHKCIINLPSTVEHSTPNIFADMMEWMHRHLARRDAIVLSVHPHNDRGTGTAAGEFALMAGADRIEGCLFGNGERTGNLDLVNVALNLYTQGVSPGLDFSEIDEIRRTVEYCNQLPVHPRHPYAGDLVYTSFSGSHQDAIKKAFAARKEGDIWDMPYLPIDPKDLGRSYEAVIRVNSQSGKGGIAYLLESEFGLELPRRLQIEFSQVVQGVMDATGKELTAQDIFALLEKEYGVQTVAAPQHLVIEETGNADGKSFNIKAHVRIAGRNHQVEGKGTGPIDAFVAGLNAATGHAVRVLDYHEHAIGSGASAQAVAYLELRINDQTLFGIGMDGNIVSASLKAIVSGLQRSRAGQGAATATIAH

SEQ ID NO: 6638 - protein, 513 aa, Polaromonas sp. JS666
MTDKLIIFDTTLRDGEQSPGASMTKDEKLRIARQLERLKVDVIEAGFAASSNGDFEAVQAIANTIRDSTICSLSRANDRDISRAAEALKGANNARIHTFIATSALHMEKKLRMTPEQVLEQARLSVRFARNLVADVEFSPEDGYRSDVDYLCRVLEAVIDEGATTINVPDTVGYAVPELYGHFIKTLRERVPNSDKAIWSVHCHNDLGMAVANSLAGVMIGGARQVECTINGLGERAGNCSLEEIVMAVKTRKDYFNLEMNIDPLHIVAASRMVSQTTGFVVQPNKAVVGANAFAHASGIHQDGMLKARETYEIMRAEDVGWSASKMVLGKLSGRNAFKQRLQDLGVALESEADINTAFARFKELADRKSEIFDEDILALVSDESITHHDQEQYGFVSLAQHSETGERPHAVVVFTVAGKEIRGESDGNGPVDASLKAIETHVKSGAEMVLYSVNAISGSTESQGEVTVRLQNNGRVVNGVGADPDIVVASAKAYLSALNKLQSKADRVAAQG

SEQ ID NO: 6639 - protein, 570 aa, Aquifex aeolicus VF5
MRWSRYFLYTEKEEPKEAEAPSHRLLLKAGFIKQVSAGIYELLPPAYKVLKKVESIIRKEMDRSGAQELLLTVLNPKELWEETGRWETYGEELFKLKDRNGREYCLGPTHEEEITDLVRRVVRSYRQLPVILYQIQVKFRDEKRPRFGLIRAREFIMKDAYSFDTDDMSAMISYEAMKFAYQRIFNKLRLNVIMAEADVGQIGGKMSHEFIAFTDYGEAKVAYCENCGYAANAEIVPLPKPEEEKEEEKPMEKVHTPNVHTIEELSKFLDVHPSKIMKAVLYIVNEKEPVLVLIRGDREIDENKLEKVLGTDNFRLATDEEVQELLGTKKGFIGIFNLPENIKVLWDNSLYGVKNLVVALNEPDWHYINVNPGRDFQYGEFVDVAEVREGDPCPKCGSPLKVRRGLELGHIFLLGTRYSEPMKAYFTDRDGKEKPIIMGCYGIGVSRILAALVEQYHDDKGIKWPTPVAPFELDIILLNTKDEEMKNVAEKLYLEAEEKGIDVIFDDREESPGFKFADADLVGFPYRIVVGKKVKEGKVEVQSRHTGEKWDVEIEKAIDFVKEKIEEDKK

SEQ ID NO: 6640 - protein, 255 aa, Streptomyces coelicolor A3(2)
MTVHLEVAEGVGTLRLDRPPMNALDVATQDRLKELAEEITRREDVRAVVIHGGEKVFAAGADIKEMQVMDHAAMIARSCALQDSFTAVARIPKPVVAAVTGYALGGGCELALCADFRIAGENAKLGQPEILLGLIPGAGGTQRLSRLIGPSKAKDLIFTGRQVKADEALALGLVDRVVPAAEVYEQAHAWAARLAKGPAIALRAAKEAIDTGLETDIETGLAVERNWFAGLFATEDRERGMRSFVEEGPGKATFL

SEQ ID NO: 6641 - protein, 316 aa, Oryza sativa
MMSSWLFRRSGPSGFSWASTADQVTAGLSAAGLTAIVTGASSGIGAETARVLAIRGAHVVMAVRNLAAAQPVRDAILADAPAASLDLMELDLASMDSVRAFASDFAAKGLPLNILINNAGVMATPFSLSKDGIELQFATNHVGHFLLTHLLLETMKKTSRESNVEGRIVNVSSEGHRFAYREGIRFAKINDESEYNSIGAYGQSKLANILHANELARRFKDEGVNITANSLHPGSIITNLLRHHSILDVLHRTLGKLVLKNAQQGAATTCYVALHPQVKGVSGKYFSDSNVNEASEKGNDMELAKRLWEYSIELIT

SEQ ID NO: 6642 - protein, 254 aa, Zea mays
  misc_feature (93)..(93): Xaa can be any naturally occurring amino acid
  misc_feature (159)..(159): Xaa can be any naturally occurring amino acid
MVVCSTRKSFKDSLKVVEGDIQHANTLGADFSRDYDGACLQMRMSYSPAAHFFLFLVEWTDWSLAGALGLVRILIYKVYVDGSTTMSTHERKXSIREFYGGIFPSLMQLAKGIRRRGRPEGRGRRATERYPEEGTRTRGKEAGFRRADIQRGREEGGHXGWGMERQGWVVPSCSHAMCIKCYRQWRSRSQSCPFCRDSLKRVNSGDLWMLTDCRDVVDMATVTRENIRRLFMYVEKLPLVAPDNIFYAYDSHVK

SEQ ID NO: 6643 - protein, 112 aa, Arabidopsis thaliana
  misc_feature (54)..(54): Xaa can be any naturally occurring amino acid
MAFAVRGFTCFDLTVTIVASLDAAITCGTLASSWSPCLGYLSKGEVEPPSCCAXVKKFNGVAQTTPERQQACICLPPILYGVNPRLASGLHEKCCFSIPYAIYTSTNCATLK

SEQ ID NO: 6644 - protein, 349 aa, Kluyveromyces lactis NRRL Y-1140
MLLVRNSTLGRLSSLRGFFRNINESNIFYRMVHHKVTIIGSGPAAHTAAIYLARAEIKPTLYEGFMANGIAAGGQLTTTTEIENFPGFPDGLTGSELMDRMKAQSIKFGTDVITETVSKVDLSSRPFKFWTEFNEDQEPETTDAIILSTGASAKRLHLPGEETYWQQGISACAVCDGAVPIFRNKPLAVIGGGDSACEEAQFLTKYGSKVYMLVRKDHLRASQIMQRRAEQNEKIEILYNHVTLEAKGDGKYLNALKVKNVKTNEEYDLPVNGLFYAIGHTPATNIVAGQVDLDEAGYVKTVPGSTLTNVPGVFAAGDVQDARYRQAITSAGSGCMAALDAEKYITELE

SEQ ID NO: 6645 - protein, 233 aa, Wolbachia pipientis
LEELQKYVDTLIVIPNQNLFRIANEKTTFSDAFKLADNVLHIGIRGVTDLMVMPGLINLDFADIETVMSEMGKAMIGTGEAEGEDRAISAAEAAISNPLLDNVSMKGAQGILINITGGGDMTLFEVDAAANRVREEVDENANIIFGATFDQAMEGRVRVSVLATGIDGRNNKSETSPISQSEDSEKEKFKWPYSQSESTQDKTLETKPAEQVSEGAKWGSNIYDIPAYLRRKK

SEQ ID NO: 6646 - protein, 652 aa, Mycobacterium tuberculosis CDC1551
MCGLLAFVAAPAGAAGPEGADAASAIARASHLMRHRGPDESGTWHAVDGASGGVVFGFNRLSIIDIAHSHQPLRWGPPEAPDRYVLVFNGEIYNYLELRDELRTQHGAVFATDGDGEAILAGYHHWGTEVLQRLRGMFAFALWDTVTRELFCARDPFGIKPLFIATGAGGTAVASEKKCLLDLVELVGFDTEIDHRALQHYTVLQYVPEPETLHRGVRRLESGCFARIRADQLAPVITRYFVPRFAASPITNDNDQARYDEITAVLEDSVAKHMRADVTVGAFLSGGIDSTAIAALAIRHNPRLITFTTGFEREGFSEIDVAVASAEAIGARHIAKVVSADEFVAALPEIVWYLDEPVADPALVPLFFVAREARKHVKVVLSGEGADELFGGYTIYREPLSLRPFDYLPKPLRRSMGKVSKPLPEGMRGKSLLHRGSLTLEERYYGNARSFSGAQLREVLPGFRPDWTHTDVTAPVYAESAGWDPVARMQHIDLFTWLRGDILVKADKITMANSLELRVPFLDPEVFAVASRLPAGAKITRTTTKYALRRALEPIVPAHVLHRPKLGFPVPIRHWLRAGELLEWAYATVGSSQAGHLVDIAAVYRMLDEHRCGSSDHSRRLWTMLIFMLWHAIFVEHSVVPQISEPQYPVQL

SEQ ID NO: 6647 - protein, 479 aa, Bacillus subtilis subsp. subtilis str. 168
MSHFKNYQISHDILRALEGLGYTEPTKVQQSVIPAALERKDLVVKSQTGSGKTASFGIPLCELANWDENKPQALILTPTRELAVQVKEDITNIGRFKRIKATAVFGKSSFDKQKAELKQKSHIVVGTPGRVLDHIEKGTLPLDRLSYLVIDEADEMLNMGFIEQVEAIIKHLPTERTTMLFSATLPQDIEKLSRQYMQNPEHIEVKAAGLTTRNIEHAVIQVREENKFSLLKDVLMTENPDSCIIFCRTKEHVNQLTDELDDLGYPCDKIHGGMIQEDRFDVMNEFKRGEYRYLVATDVAARGIDIENISLVINYDLPLEKESYVHRTGRTGRAGNKGKAISFVTAFEKRFLADIEEYIGFEIPKIEAPSQEEVARKKPEFLAKLNDRPESKKDKSEELNKDIMKLYFNGGKKKKIRAVDFVGTIAKIDGVSADDIGIITIMDNASYVEILNGKGPHVLKVMKNTTVKGKQLKVNKANK

SEQ ID NO: 6648 - protein, 144 aa, Glycine max
MEAPPKGAAGRRGDRKKSVSKSIKAGLQFPVSRVARYLKKGRYSRRLGTGAPIYLAAVLEYLAAEVLELAGNAARDNKKNRINPRHVLLAVRNDDELGKLLQGVTIASGGVLPNINPVLLPKKSTTAPSEKSSTPKSPKSPKKK

SEQ ID NO: 6649 - protein, 815 aa, Haemophilus influenzae 86-028NP
MRVLKFGGTSLANPERFSQAAKLIEQAHLEEQAAGVLSAPAKITNHLVALSEKAALNQSTDTHFNEAIEIFYNIINGLHAENNQFDLNGTKALIDAEFAQIKGLLEEIRQAGKVEDAVKATIDCRGEKLSIAMMKAWFEARGYSVHIVDPVKQLLAKGGYLESSVEIEESTKRVDAANIAKDKVVLMAGFTAGNEKGELVLLGRNGSDYSAACLAACLGASVCEIWTDVDGVYTCDPRLVPDARLLPTLSYREAMELSYFGAKVIHPRTIGPLLPQNIPCVIKNTGNPSAPGSIIDGNVKSESLQVKGITNLDNLAMFNVSGPGMQGMVGMASRVFSAMSGAGISVILITQSSSEYSISFCVPVKSAEVAKTVLETEFANELNEHQLESIEVIKDLSIISVVGDGMKQAKGIAARFFSALAQANISIVAIAQGSSERSISAVVPQNKAIEAVKATHQALFNNKKVVDMFLVGVGGVGGELIEQVKRQKEYLAKKNVEIRVCAIANSNRMLLDENGLNLEDWKNDLENATQPSDFDVLLSFIKLHHVVNPVFVDCTSAESVAGLYARALKEGFHVVTPNKKANTRELVYYNELRQNAQASQHKFLYETNVGAGLPVIENLQNLLAAGDELEYFEGILSGSLSFIFGKLEEGLSLSEVTALAREKGFTEPDPRDDLSGQDVARKLLILAREAGIELELSDVEVEGVLPKGFSEGKSADEFMAMLPQLDKEFKTRVATAKAEGKVLRYVGKISEGKCKVSIVAVDLNNPLYKVKDGENALAFYTRYYQPIPLLLRGYGAGNAVTAAGIFADILRTLQH

SEQ ID NO: 6650 - protein, 339 aa, Armillariella tabescens
MVKVGINGFGRIGRIVLRNALQFSEIEVVAVNDPFIDLDYMVYMFKYDSVHGRFKGTVEAKDGKLYIEGKPITVYGERDPSAIPWGSVGAEYVVESTGVFTTIDKASAHLKGGAKKVVISAPSADAPMFVVGVNLDAYDPSYKVISNASCTTNCLAPLAKVIHDKFGIVEGLMSTIHATTATQKTVDGPSNKDWRGGRGVNNNIIPSSTGAAKAVGKVIPSLNGKLTGLSFRVPTSDVSVVDLVARLQKDASYDDIKAAVKEAAASGPLKGVIEYTEDAVVSTDFVGHSASSIFDAKAGIQLNKNFVKLIAWYDNEWGYSRRVCDLLVYAAAQDKKAGL

SEQ ID NO: 6651 - protein, 103 aa, Zea mays
MATDSEASKAAEVVVDWHKQDKKRMLHAVYRVGDLDRTIKYYTECFGMKLLRKRDVPDEKYTNAFLGFGPENTNFAVELTNFAEVSRPTCVAPLPGSVLAVPL

SEQ ID NO: 6652 - protein, 380 aa, Actinidia deliciosa
MGLPKSFVSMSLLFFSTLLILSLAFNAKNLTQRTNDEVKAMYESWLIKYGKSYNSLGEWERRFEIFKETLRFIDEHNADTNRSYKVGLNQFADLTDEEFRSTYLGFTSGSNKTKVSNRYEPRFGQVLPSYVDWRSAGAVVDIKSQGECGGCWAFSAIATVEGINKIVTGVLISLSEQELIDCGRTQNTRGCNGGYITDGFQFIINNGGINTEENYPYTAQDGECNLDLQNEKYVTIDTYENVPYNNEWALQTAVTYQPVSVALDAAGDAFKHYSSGIFTGPCGTAIDHAVTIVGYGTEGGIDYWIVKNSWDTTWGEEGYMRILRNVGGAGTCGIATMPSYPVKYNNQNHPKPYSSLINPPAFSMSKDGPVGVDDGQRYSA

SEQ ID NO: 6653 - protein, 208 aa, Oryza sativa
  misc_feature (160)..(160): Xaa can be any naturally occurring amino acid
  misc_feature (190)..(190): Xaa can be any naturally occurring amino acid
  misc_feature (197)..(197): Xaa can be any naturally occurring amino acid
MGKKRKHSETTQAVAQPKKEEAAPERPARTLLGWKDKNQVEDDSPIFRNKEKLLVTCSRRINYRYRHLMLNLVTLLPHCKKDNKVESKETKGATLNELVELKNCSSCLFFECRKHKDLYLWMAKCPNGPSVKFLVSAVHTMEELKLTGNHLQGSRPILTXSANFEKDAHWKLLKEMLLQIFETPKDHRKXKPFHDHXVFVFSISDDHI

SEQ ID NO: 6654 - protein, 180 aa, Arabidopsis thaliana
MYPIERLIYLLSSNQCLFLGRFNTSSALEISASKEIHDYLKTICPDLHIVRGEFDEDARYPENKTLTIGQFKLGLCHGHQVIPWGDLDSLAMLQRQLGVDILVTGHTHQFTAYKHEGGVVINPGSATGAYSSINQDVNPSFVLMDIDGFRAVVYVYELIDGEVKVDKIEFKKPPTTSSGP

SEQ ID NO: 6655 - protein, 124 aa, Zea mays
MARTQQLAVVAAAVVALVLLAAATSEAAISCGQVASAIAPCISYARGQGSGPSAGCCSGVRSLNNAARTTADRSAACNCLKNAAAGVSGLNAGNAASIPSKCGVSIPYTISTSTDCSRYIHLYI

SEQ ID NO: 6656 - protein, 146 aa, Glycine max
  misc_feature (110)..(110): Xaa can be any naturally occurring amino acid
  misc_feature (133)..(133): Xaa can be any naturally occurring amino acid
MAQTMLLTSGVSANQFLRNKNPLAQPKVHHFFLSGNSHVVLPSRRPSLVPLAIFKPKTKAAPKKVEKVKPKVEDGIFGTSGGIGFTKQNELFVGRVAMIGFAASLLGEAXTGKGILAQLNLETGIPIYEAEPXLLFFILFTLLGAI

SEQ ID NO: 6657 - protein, 451 aa, Solibacter usitatus Ellin6076
MDGGGPAGFRPAHGDAASGSYAAPRSHAAWRQPARWRSHGSSGRAGQDAGSRRSAPGRQKEMKRVAILGGGPAGAFAAETLASAGLGVILMDEKLAWEKPCGGGLTHKAYSQYPFLIENSTPKRLVTETVLAAPKAGEVTLQLGDPLLIYSRLDLNRMLLERAERAGAQIEKTRVMEMNRKGSGWQLRTAAGNLDADFCIVATGARNPLRDVGTQLTPPDTMAALGYYVQGDQARIDIQFLPDLEGYIWIFPRCGHLSIGICGKGEPASSLRKRLEAYMAGRGINWKGAAFYSHLLPSLDTKSWKQNRVSGEGWMAVGDAAGLVDPITGEGLYYAIRSADLAAQSLLADAGQEENALQYRRLLRRDFAADLEFGSRLAKRVFMGRFMLGTVPQRMVEFTRRSPRFANVMQDLFAGKQPYLGLKRRLLRNLNGSLYEIAMSFGFSRVVPKAG

SEQ ID NO: 6658 - protein, 316 aa, Pisum sativum
MWPFSSKKGVSGFSGSSTAEQVTHGIDATGLTAIVTGASSGIGAETTRVLALRGAHVIMGVRNMVAAKDVKDTILKDIPSAKVDAIELDLSSLDSVKKFASEFNSSGRPLNILINNAGIMACPFKLSKDNIELQFATNHIGHFLLTNLLLDTMKKTTRESKKEGRIVNVASEAHRFAYPEGIRFDKINDQSSYNNWRAYGQSKLANVLHANQLTKHLKEDGVNITANSLHPGTIVTNLFRHNSAVNGLINVIGKLVLKNVQQGAATTCYVALHPQVKGVSGEYFSDSNVYKTTPHGKDVDLAKKLWDFSINLVKQK

SEQ ID NO: 6659 - protein, 230 aa, Triticum aestivum
  misc_feature (168)..(168): Xaa can be any naturally occurring amino acid
  misc_feature (217)..(217): Xaa can be any naturally occurring amino acid
GTSKERDADMIMVEGTSQLCNDLLVDPQDVVMLVISWHMKAATMCEFTRQEFIDGLQSIGVDSIEKLREKLPSLRAEIKDDNKFREIYNFAFAWAREKVILESKLFVPIFSIVIVFIGTSVFQPVLSMKLSYNIPLILQGQKSLPLETAIGMWRLLFAERHWPLIDHXWCQFLQVRHNKAISRDTWSQLLEFVKTIDPQLSNYDEEGAAWPYLIDEXFVEYLTEDGMRSA

SEQ ID NO: 6660 - protein, 238 aa, Moraxella catarrhalis
MLNSSNRYQERIRLARQILADEGVDALIIPSADPHMSEYLPKYWQGRAWVSGFTGSVGTLVVTQTFAGLWTDSRYWVQAPIQLAGTGIEFQKMQIGQPTFTQYLADTLPAGSKVAIDGNVLSVNEHDNLKTAFLDKDIQLVTDLDLLSKIWTDRPQLPDVAIYEHPAEFVDTTVAEKLAQVRAQIQQKQADVHLISSLDDIAWLLNLRGSDVEFNPVFLSHLLLDDTKATLFVDINKL

SEQ ID NO: 6661 - protein, 481 aa, Thermococcus kodakarensis KOD1
MAVERKKWSENFSEWYNELIETAGIQDKRYPVKGMNVWLPYGLKIMRNIERFIHAEMERTGHDEVLFPALIPETEFQKEAEHIKGFEGEVYWVTHAGLEPLDVRLILRPTSETAMYSMFSLWIRSHADLPFKIYQIVNVYRYETKHTRPLIRVREISRFFEAHTAHDSYEDAERQIKEDLEIFDNLARFLALPYIISKRPEWDKFPGAYYSLGAEVMMPDGRTLQIGTMHNYRQNFAKAYNIQYETETGDHEYVHQTTFGMSERLLAAVIAIHGDDRGMVLPPTIAPIQVVIVPIPKKDSEADVFAYAREIAEELRTAGIRVHVDERDIRPGRKYYDWELKGVPLRIEVGPRDVEGKKAVLARRDTLEKITVERDNIVEEVRKTLDAIHENLYQRAKEFLESHIKRVDTIEEAKAVFEDRRGIVEIPWCGEEECGLRMEEELDAKMLGIPYPEEKAKAPEGKKCPVCGREAKFIARFARTY

SEQ ID NO: 6662 - protein, 432 aa, Streptomyces spiramyceticus
MSATDSAVGAQRRVVITGIGVVAPGGTGTKAFWDLITSGRTATGRISYFDPAPFRSQVAAECTFDPALQGLTPREIRRMDRAAQFAVVSAREAVQDSGLDFGSPDPARIGVTIGSAVGATMGLEEEYVVLSDSGRKWLVDNSYGVPHLYGHFVPSSMAAEVAWAVGAEGPAAVVSAGCTSGIDSVGYARELIAEGSVDIMVAGATDAPISPIAVACFDAIKATTPRNEDAEHASRPFDKSRNGFVLGEGSAVFVLEEYGHARRRGAHIYAEIAGFGSRCNAFHMTGLRPDGREMAVAIDTALAEARMNAEEVSYINAHGSGTKQNDRHETAAFKRSLGHHAYDVPVSSIKSMVGHSLGAIGSIEIAACALAIEHGVVPPTANLHTPDPECDLDYVPLVAREQRVDTALTVGSGFGGFQSAMVLTRPEERTGA

SEQ ID NO: 6663 - protein, 580 aa, Streptomyces coelicolor A3(2)
MAKQNVAEQFVDILTRAGVERLYGVVGDSLNPVVDAVRRHSGIEWVHVRHEETAAFAAGAEAQITGKLTACAGSCGPGNLHLINGLYDAHRSMAPVLALASQIPSSEIGLGFFQETHPDQLFRECSHYSELISSPKQMPRLLQTAIQHAVGQGGVSVVSLPGDIADEPAPQGAAETALVTSRPTVRPGDEEIDRLVRMIDDADKVTLFCGSGTAGAHAEVMEFAGKLKAPVGHALRGKEFIQYDNPYDVGMSGLLGYGAAYEATHECDLLLLIGTDFPYNAFLPDDVKIAQIDVRPEHLGRRSKLDLAVWGDARETLRCLIPRVKEKKNRRFLDRMLKKHADALEGVVKAYTRKVDKHVPIHPEYVAALLDEMADDDAVFTVDTGMCNVWAARYISPNGRRRIIGSFSHGSMANALPMAIGAQFTDRRRQVVSMSGDGGFTMLMGDFLTLVQHDLPVKIVLFNNSSLGMVELEMLVAGLPSHGVANKNPDFAAVAEACGAFGVRVEKPKDLAGALKAAFKHKGPALVDVVTDPNALSIPPKISADMVTGFALSASKIVLDGGVGRMLQMARSNLRNVPRP

SEQ ID NO: 6664 - protein, 366 aa, Saccharomyces cerevisiae
MFSRLPTSLARNVARRAPTSFVRPSAAAAALRFSSTKTMTVREALNSAMAEELDRDDDVFLIGEEVAQYNGAYKVSKGLLDRFGERRVVDTPITEYGFTGLAVGAALKGLKPIVEFMSFNFSMQAIDHVVNSAAKTHYMSGGTQKCQMVFRGPNGAAVGLGAQHSQDFSPWYGSIPGLKVLVPYSAEDARGLLKAAIRDPNPVVFLENELLYGESFEISEEALSPEFTLPYKAKIEREGTDISIVTYTRNVQFSLEAAEILQKKYGVSAEVINLRSIRPLDTEAIIKTVKKTNHLITVESTFPSFGVGAEIVAQVMESEAFDYLDAPIQRVTGADVPTPYAKELEDFAFPDTPTIVKAVKEVLSIE

SEQ ID NO: 6665 - protein, 238 aa, Moraxella catarrhalis
MLNSSNRYQERIGLARQILADEGVDALIIPSADPHMSEYLPKYWQGRAWVSGFTGSVGTLVVTQTFAGLWTDSRYWVQAPIQLAGTGIEFQKMQIGQPTFTQYLADTLPAGSKVAIDGNVLSVNEHDNLKTAFLDKDIQLVTDLDLLSKIWTDRPQLPDAAIYEHPAEFVDTTVAEKLAQVRAQIQQKQADVHLISSLDDIAWLLNLRGSDVEFNPVFLSHLLLDDTKATLFVDINKL

SEQ ID NO: 6666 - protein, 324 aa, Brucella suis 1330
MTQRHAPVIVIGSGPAGYTAAIYAARAMLKPVVIAGLQQGGQLMITTDVENYPGYAEPVQGPWMMEQMARQAENVGAQIVHDIITEVETTVRPFRLKGDSGTIYTCDALIIATGAQAKWLGLESEQTFMGGGVSACATCDGFFYRGKDVVVVGGGNTAVEEALYLSHIAKSVTIVHRRDGFRAEKIMQDRLLSRENVSVVWNSVIDEILGTEARPPMGATVTGVRLKNIVTGETQERATHGVFIAIGHAPAVSLFEGKLKQKPNGYLWTAPDSTATDVPGIFAAGDVTDDIYRQAVTAAGMGCMAALEAERWLAAQEPLHEAAE

SEQ ID NO: 6667 - protein, 265 aa, Arabidopsis thaliana
MYQDSGLMLRYMQNCPPDIQQFEDLFKSYKLSDEMNNTFVESSNISEYDIGEESDLFRAPDPILEEPILTVDPLSAALTMISCGEDTSQGLCELPDLGSLQSGQQLLDKAFYECEQDLMMKSAMESPFSDVLDIKNISVVTTINENQDMQKSVSSGNLSSMDWSHAQQETVMIQNFPDFDFGYGMRRAFSEGDIQQKLGAGLVQSPLDRIIVSCTSEDRREKLSRYKNKKSRRNFGRKIKYACRKALADSQPRVRGRFAKTEERK

SEQ ID NO: 6668 - protein, 518 aa, Aspergillus awamori
FNYDQPYRGQYHFSPQKNWMNDPNGLLYHNGTYHLFFQYNPGGIEWGNISWGHAISEDLTHWEEKPVALLARGFGSDVTEMYFSGSAVADVNNTSGFGKDGKTPLVAMYTSYYPVAQTLPSGQTVQEDQQSQSIAYSLDDGLTWTTYDAANPVIPNPPSPYEAEYQNFRDPFVFWHDESQKWVVVTSIAELHKLAIYTSDNLKDWKLVSEFGPYNAQGGVWECPGLVKLPLDSGNSTKWVITSGLNPGGPPGTVGSGTQYFVGEFDGTTFTPDADTVYPGNSTANWMDWGPDFYAAAGYNGLSLNDHVHIGWMNNWQYGANIPTYPWRSAMAIPRHMALKTIGSKATLVQQPQEAWSSISNKRPIYSRTFKTLSEGSTNTTTTGETFKVDLSFSAKSKASTFAIALRASANFTEQTLVGYDFAKQQIFLDRTHSGDVSFDETFASVYHGPLTPDSTGVVKLSIFVDRSSVEVFGGQGETTLTAQIFPSSDAVHARLASTGGTTEDVRADIYKIASTWN

SEQ ID NO: 6669 - protein, 123 aa, Escherichia coli
MSDKIIHLTDDSFDTDVLKADGAILVDFWAEWCGPIEESDDRRYDLVGPCKMIAPILDEIADEYQGKLTVAKLNIDQNPGTAPKYGIRGIPTLLLFKNGEVAATKVGALSKGQLKEFLDANLA

SEQ ID NO: 6670 - protein, 321 aa, Bradyrhizobium japonicum USDA 110
MSAPVHAKVVIIGSGPAGYTAAIYAARAMLEPILIQGIQPGGQLTITTDVENYPGFADVIQGPWLMEQMEKQAVHVGTKIVTDLVTKLETGRRPFRLTCDSGDVYLAETVILATGAQARWLGLPSEGKFQGGGVSACATCDGFFYRGKEVIVVGGGNTAVEEALFLTNHASQVTIVHRRDHFRAERILQERLFKHPKIKVVWDSAVDEICGTENPNKVTHVRLKNVKTGKLTELKADGIFIAIGHAPATELVKDQVKLKPSGYVEVAPNSTATSVPGLFAAGDVADETYRQAVTAAGLGCMAALEAERFLALRASERAAAE

SEQ ID NO: 6671 - protein, 392 aa, Rhodospirillum rubrum ATCC 11170
MDWSSVIVNDTTLRDGEQTAGVIFTLGEKVAIAKALERAGVPEMEVGIPAMGPEEQESIRAVVAQCEASRPIAWCRMHMTDLDAAAACGVDMVNLSIPVSDQQIKGKLGRDRGWVLAHLETMIKTALEKGLEVALGGEDSSRADPEFLLRVIERAEASGARRFRFADTLGIMDPFTTLQMFKRLRAASGLELEIHAHDDLGLATANSLGAVLGGATHVSTTVNGLGERAGNAPLEEVVMACRNLYGRHTGIAPMALAAVSKLVAEASGRPVPANKPIVGEAIFTHESGIHVSGLLRDPKNYEALSPADLGRCHRLVLGKHSGVASIVHACNALGLAPGEAQARAMLARVRLHAGATKRPPTDADLRRFFDETRSVAEAIETLDFSRPPQAAS

SEQ ID NO: 6672 - protein, 419 aa, Bradyrhizobium japonicum USDA 110
MASNTDIHEMKARIVVFGVGGAGGNAVNNMITAGLQGVEFVVANTDAQALAMSKATRLIQLGTTVTAGLGAGSQPELGRAAAEEVIDTIREHLTGAHMVFVTAGMGGGTGTGAAPIIARTARELGILTIGVVTKPFYFEGQRRMRFAEAGVEELLKTVDTLLIIPNQNLFRVASEKTTFADAFALADQVLYSGVACISDLIVKEGLINLDFADVLSVMKEKGKAMMGRGEASGEKRVLAAAVAAISNPLIENPSIKRASGLIISITGGRDLMLYEVDEAATRIRDEADPDANIIVGASFDESLEGIVRVSVVATGIDNLDPAQQALPVETALTQLAGRLRNDGRRIADRIERSAPLPQAASPPLRPQPHHPVGPPARPGLDYAPQAALQPLDPYGRAPARNLPDEAALDIPAFLRRAAN

SEQ ID NO: 6673 - protein, 117 aa, Prunus persica
MAYSAMTKLALVVALCMVVSVPIAQAITCGQASSSLAPCIPYVRGGGAVPPACCNGIRNVNNLARTTPDRQAACNCLKQLSASVPGVNPNNAAALPGKCGVSIPYKISASTNCATVK

SEQ ID NO: 6674 - protein, 390 aa, Zea mays
  misc_feature (274)..(274): Xaa can be any naturally occurring amino acid
MLGVARRRLGSGCVLAQLAQALRPAAAPARTYSAAAKEITVREALNTALDEEMSADPSVFLMGEEVGEYQGAYKISKGLLDKYGPDRVLDTPITEAGFTGIGVGAAYHGLRPIVEFMTFNFSMQAIDHIINSAAKSNYMSAGQISVPIVFRGPNGAAAGVGAQHSQIGILLYYDGITNCLSMQCYAAWYAHVPGLKVLAPYSAEDARGLLKAAIRDPDPVVFLENELLYGESFPVSAEVLDSSFCLPIGKAKIERQGKDVTITAFSKMVGYALXAADILAKEGISAEVINLRSIRPLDRATINASVRKTNRLVTVEEGFPQHGIGAEICMSVVEDSFEYLDAPVERIAGADVPMPYAANLERMAVPQVDDIVRAAKRACYRAAVPMAATA

SEQ ID NO: 6675 - protein, 1116 aa, Schizosaccharomyces pombe
MAADIGSQSSGSLEERFEQSLHLQNVDKQDWSLNSVLQFLKLYKFNKEWEDVFIKSRIEMDLFINLADQSKAEEFAFKNKLSKESAIQLSSCIRKTLLAPSSTRVPSKNSSYETLTYSAKDSSDDVFTETNSGFRSSNQNSSLKSFQSVPDSNVNVFGGFGGSVVDNNELLSTGKNSHQTTSLNLEGSPINLHAYKGTVTSIINDDSRNINKKTLSKQPVSEHKEKQTSFLRRFRVPGFSRDKDKTKDCPSSNSNPFHLASSNVKTLDASLDQGEWVPRIHRLESQIGLISKKKSFVLATMDDMKFTVVDITNVQNATQLRKLIAKSMYLDISIDQFDLFLTEVGGAQYIEILDDRKLDIARLYSDEFGTIKFFVKPSQNEESGMDSDTYLSFGTKSSSTYKADDDSIYHRKEDFKKQPSYPVLTSDFEITDAGPNLSLSGHQPDNKYYKGFSSAPNLAVVPELPSRRFRGFEKIRGAKGEMATKILDATEAQSEKNKFTVCRPHKKVTLKMPLNSGSSAPQSPSSNTSASVLTRNFVAHRDPPPPPTETSSLRRKNTLTRRPSIRHARSSPYIDTGHNEASKFSHTSFDPKASSKSSNSLKESVEALSEIPFEDAPALDESDLSGDPFWAIQPKQSSSQVPKENHHNIQSKLSINTEAATDLKANELSSPKTPEYCRGDDRSISLSPLSYRLRKSKHIRESPPSSKVINSGNWEVRPSADDLYEDVDRFFPRYDLDKVLVVDQSRMVSSPSKVSIRPKMKSVRLLAREASEARKEIRHNARRNKSGNLLRRSSTKLWGSRIVELKPDTTITSGSVVSQNATFKWMKGELIGNGTYGKVFLAMNINTGELIAVKQVEIPQTINGRHDQLRKDIVDSINAEISMIADLDHLNIVQYLGFEKTETDISIFLEYVSGGSIGRCLRNYGPFEEQLVRFVSRQVLYGLSYLHSKGIIHRDLKADNLLIDFDGVCKISDFGISKHSDNVYDNDANLSMQGSIFWMAPEVIHNDHQGYSAKVDVWSLGCVVLEMLAGRRPWSTDEAIQAMFKLGTEKKAPPIPSELVSQVSPEAIQFLNACFTVNADVRPTAEELLNHPFMKCDEEFNFKDTNLYDMLCKRKS

SEQ ID NO: 6676 - protein, 193 aa, Cyanophora paradoxa
GNAVNNMIDAGLEGVEFVVANTDAQHLSFAKTDRRIQLGETITQGLGAGAHPEVGMNAAEESAEEIYGHLEGAHMVFITAGMGGGTGTGAAPVIAKCARDRGILTVGVVTKPFTFEGRHRMRLADAGIAELQRYVDTLIVIPNQNLFRVANERTTFADAFGMADQVLHSGVRSITDLMILPGLINLDFADVIT

SEQ ID NO: 6677 - protein, 586 aa, Rhodospirillum rubrum ATCC 11170
MCGIAGMVTKLGRSVPEGLADRFAQKLAHRGPDGKGVFEAPGVLLVQARLAIIDLLTGDQPLHGPDGLVLVANGEVYNYRELRAELGEGVFLTRSDCEPPLHLYARRGLAGFDVLRGMYAIALWDPPRRRLVLCRDPFGIKPLYYVETNDGVAFASEPQALIGAGLLPAREDAAAVDELLQLQFTCGARTIFQGIRRVLPGETLVFEDAQLVERHRRPALPAVRERVSPADPLALLDHVLEDSLDLHQRADVPYGLFLSGGIDSSSVLAMMARLNERPVLAFTAGFPGTEVADERADARAATRAVGARHVEVAVSEGDFLEHLPAIAAAVDDPVADYAIVPTWLLAREAAKSVKVVLCGEGGDELLGGYGRYRSAMRPWPLARPLRRKGLLDGLGLLRGGGGRNWRAGIARAEVEARAQGGSRLIRAQRVDCADWLPHDLLNKLDRCLMAHGLEGRVPFVDVDVARFCLPLADGLKVRDGMGKWILRSWLERTLPEARPFAPKRGFSVPVGEWMSRHGDRLGPLVAASPAVAARCHGEAVRALFTHPRKETALAAWILLYYALWHRRHIVGLAPEGDVFHCLSTAA

SEQ ID NO: 6678 - protein, 207 aa, Streptococcus suis 89/1591
DLLDLIERYNQDDEWHGILVQLPLPAHISEEKVLLAIDPDKDVDGFHPTNMGKFWSGHPVMIPSTPAGIMEMFKEYQIELEGKSALVIGRSNIVGKPMAQLLLDANATVTIAHSRTKNLPELARQADILVVAIGRGHFVTKEFVKPGAVVIDVGMNRDENGKLIGDVKYDEVSEVASYITPVPGGVGPMTITMLMEQTYEACVRSAK

SEQ ID NO: 6679 - protein, 227 aa, Coccidioides immitis RS
MSSSTGNGWAQLRQQARSLETQTESLFHTYAQYASAAQIPAQPSEEEQRIEVQLKDLLERREYLISQLARLLDSESGLTASALKQNNLSRHRAVLQEHQHELRRLHNAISETRDRVNLLSNIRSDISAYRASNPPIAEADYMLEERAHLDNSHNMMDSVLSQAYAVNNNFVLQRETLASINRRIIGAASQVPGVNSLINQIGAKRRRDGLLLGIFIGICFLMLLYFR

SEQ ID NO: 6680 - protein, 350 aa, Oryza sativa (japonica cultivar-group)
MALSTFVLAVLVMSGAAALGRELAGDGAAAAAAADVAMASRHEKWMAKHGKTYKDEEEKARRLEVFRANAKLIDSFNAAAEKDGGGGHRLATNRFADLTDDEFRAARTGYQRPPAAVAGAGGGFLYENFSLAAAPQSMDWRAMGAVTGVKDQGSCGCCWAFSAVAAVEGLAKIRTGQLVSLSEQELVDCDVRGEDQGCEGGLMDTAFQYIARRGGLAAESSYPYRGVDGACRAAAGRAAASIRGFQDVPSNDEGALMAAVARQPVSVAINGAGYVFRFYDRGVLGGAGCGTELNHAVTAVGYGTASDGTGYWLMKNSWGASWGEGGYVRIRRGVGREGACGIAQMASYPV

SEQ ID NO: 6681 - protein, 215 aa, Capsicum annuum
MNIFRSYYSDPLTESSSSFSDSSIYSPNRAIFSDEEVILASNNPKKPAGRKKFRETRHPVYRGVRKRNSGKWVCEVREPNKKSRIWLGTFPTAEMAARAHDVAAIALRGRSACLNFADSAWRLPVPASSDTKDIQKAAAEAAEAFRPLKLEGISKESSSSTPESMFFMDEEALFCMPGLLTNMAEGLMLPPPQCAEIGDHVETADADTPLWSYSI

SEQ ID NO: 6682 - protein, 114 aa, Actinobacillus pleuropneumoniae serovar 1 str. 4074
MARQPFLIAPSILSADLARLGEDVAEVLKAGGDIIHFDVMDNHFVPNLTFGPAICKALRDYGITAEIDVHLMVKPVERLIPDFAKAGANYITFHPEATDHIDRTLQMYRVSGCK

SEQ ID NO: 6683 - protein, 237 aa, Coccidioides immitis RS
MGSMSNFSGPPQVHAFDGLLFDFDGTIIDSTEAIVKHWHRIGQEIGVDPAMILVTSHGRRSIDVLKIHAPERANWEYVSSVEGRIPKEYGSDAVEIPGARDILNALDEAGAPWAVVTSGTHALINGWLDVLKLARPKNLVVAEDVKIGKPNPQCYQLGRSRLGFDENSSMLVIEDAPSGVTAGKAAGFKVLALATTHDPTRLKQAGADWIIRDLRSFKLIKHNGQVQVEIRNCLQWQ

SEQ ID NO: 6684 - protein, 712 aa, Arabidopsis thaliana
MVVATTIALYASPASTVCSTAHQINAHISCDLDLNSRSSSASSSTSSPTIGGLSLLFSGASVKSSSSSSSSHPSVGEELASIRHDRSEDRTLSGSFCYSPSKFIGSSYLKRDHQSPVSVLHGPISSGNSPPMRISRDRNLDGGSALRVGSSRLFNGFVRKAIGSCVDYDTDSVLVDEQLPFTMDDGFEGERRQPYARDLLRRAQLKHKIFEDESVIKAFYEAEKAHRGQMRATGDPYLQHCVETAMLLADIGANSTVVVAGILHDTLDDSFMSYDYILRTFGSGVADLVEGVSQLSKLARENNTACKTVEADRLHTMFLAMADARAVLIKLADRLHNMMTLYALPPVKRQRFAKETLEIFAPLANRLGISSWKVKLENLCFKHLHPDQHHEMSDMLEDSFDEAMITSAIEKLEQALKKEGISYHVVSGRHKSLYSIYCKMLKKKLTMDEIHDIHGLRLIVDNEKDCYKALGVVHKLWSEVPGKLKDYISHPKFNGYQSLHTVVMGDGTIPLEVQIRTKEMHLQAEFGFAAHWRYKEGDCKHSSFVLQMVEWARWVVTWHFETMSKDGSSICSSEPLCSFPSHAEDCPFSYKPSGNQEGPVYVIVIENEKMSVQEFPENSTVSDLLRRAGPGSSRWSMYSIPAKEELRPRLNQTPVSDLKCKLKMGDVVELTPAIPDKSLTEYREEIQRMYDRGLAFSRPHRAATGTMVGWGS

SEQ ID NO: 6685 - protein, 465 aa, Glycine max
DAWAQQLASRQCVRASSSQIGVLLMGLCFLTIGSAGVRPCSIPFGVDQFDPTTDEGRKGINSYFNWYCTTFTMVLLVTHCELVYIQDSVSWRIGFGIPTVCMLCSIIMFFVGTRVYVHVKPEGSIFSGIAQVLVTAYKKRKLNLPMSEEKPDGVFYDPPLIGITVVSKLPLTKEFRALNKAALIMEGELNPDGTRVNQWRLVSIQQVEEVKCLARIIPIWAAGILSLISMTQQGTFTVSQAMKMNRHLGAKFQIPAGSVSVISLITIALWLPFYDRILVPKLRKMTKHEGGITLLLRIGIGMVFSILSMVVAGYVEKVRRDSANSNPTPLGIAPMSVLWLAPHLILMGLCEAFNIIGQIEFFNRQFPEHMRSIGNSFFSCSFGVSSYVSSIIVNIVHHSTRTHSHPDWLTDDINAGRLDYFYYLIAGLTSLNLVFFIYVARRYQYKGNVDLLDETHQVELGSHKA

SEQ ID NO: 6686 - protein, 257 aa, Mycobacterium leprae
MKYDTILVDGYQRVGIITLNRPQALNALNSQMMNEITNAAKELDIDPDVGAILITGSPKVFAAGADIKEMASLTFTDAFDADFFSAWGKLAAVRTPMIAAVAGYALGGGCELAMMCDLLIAADTAKFGQPEIKLGVLPGMGGSQRLTRAIGKAKAMDLILTGRTIDAAEAERSGLVSRVVLADDLLPEAKAVATTISQMSRSATRMAKEAVNRSFESTLAEGLLHERRLFHSTFVTDDQSEGMAAFIEKRAPQFTHR

SEQ ID NO: 6687 - protein, 351 aa, Pyrococcus abyssi GE5
MNIMDEKIKRIIEFMNENSIDAVLITKNPNIYYLSGASPLAGGYILVNNDGATLYVPELEYEMAKEESKIPVEKFKRRDDFYKVFEGVKVLGIEGSLSYSFVEDLKEKGKISEFKKVDDVIKEMRIVKSDEEIKIIEKACEIADKAVMAAIEEVTEGKKEREIAAKVEYLMKMNGAEKPAFDTIIASGYRSALPHGVASDKRIEKGDLVVIDLGALYNHYNSDITRTVVVGSPNEKQREIYEIVLEAQKKAVEAARPGITTKELDSIARNIIKEYGYGDYFIHSLGHGVGLEIHEWPGVSQYDETVLKEGMVITIEPGIYIPKFGGVRIEDTIVITKTGARRLTKTERELI

SEQ ID NO: 6688 - protein, 583 aa, Azoarcus sp. EbN1
MRASQYFISTLKEAPSDAEVVSQKLMLRAGFIRKVAAGIYSYLPIGLRVIRKVEDIVRDEMNRAGALELTMPLVQPAELWDETGRWEQMGAEMLRFKDRHQRDFALQPTSEEVVTDIARQELKSYRQLPKNFYQIQTKFRDERRPRFGVMRGREFTMKDAYSFDRDVAAAGRSYDAMYAAYCRIFDRLGLTYRAVAADTGAIGGDRSHEFQVIADTGEDAIVYCPGSDYAANIELAEALPLLATRAAPAQALEKTPTPGRTTCEEVAKLLGVPLETTVKSLVLATDDVDDTNKPAGVTVWLLLVRGDHELNEVKAGKIPGLKAGFRFATETEIAERFGCQPGYLGPVGVNKAVKIVADRTVANMADFICGANEADFHLTGTNWGRDLPEPDLVADLRNIIEGDPSPDGRGRLAIQRGIEVGHVFYLGTKYSQSMNATFLDENGKPKHFEMGCYGIGVTRILGAAIEQNHDARGIIWPDAIAPFRVVVCPVGWGKSDAVRTEATKLYETLCAGGIDVILDDRDERPGVMFADWELIGVPHRVVIGDRGLKDGMAEYQGRRDAEAAKIPLAELAAFVGSKLRPTA

SEQ ID NO: 6689 - protein, 406 aa, Desulfotalea psychrophila LSv54
MNEVYFAILCFVAIQFILVALIVLAKKTLLPSGEVQITINETKECRVPAGGKLLTSLADNGIILSSACGGAGSCGQCRCIVTEGGGSIFLTERSLINNRDANRGMRLSCQVPVKRSMRILVPPEMLEAKKWRCRVASNRNVATFIKEMVLQLPEGESVDFKAGGYIQIEIPAHSLAYKDFDIDERFLSDWTKFKMFQYKSLVATPVTRAYSMANYPGEKGIIKLNVRIATPPPGEVAAPPGKSSSYIFNLQEGDEVTISGPFGDFFMDDSDSEVLLIGGGAGMAPLRSHVFDLFQGKHTGRKVSFWYGGRSLQEVFYQTELNALANEYDNFTYHLGLSDPQEEDNWTGEVGYIHLILYENYLKDHPAPEDINYYLCGPPVMNRSVQEMLDNLGVERTNIHFDDFGG

SEQ ID NO: 6690 - protein, 104 aa, Arabidopsis thaliana
  misc_feature (30)..(30): Xaa can be any naturally occurring amino acid
  misc_feature (71)..(71): Xaa can be any naturally occurring amino acid
  misc_feature (79)..(79): Xaa can be any naturally occurring amino acid
IYRLGASSHHLQAQRKFCTHETSSLSLTQXGTSLRVTAARATHKLSNRTLRVAVSCGGPPGGAAAETLAQXGIETILNXRKMDNCKPCCGAIPLCMVGEFNLPL

SEQ ID NO: 6691 - protein, 286 aa, Yarrowia lipolytica CLIB122
MLVLAIGDLHIPDRAIDVPTKFKKLLVAGKISQVLCLGNLTDKQTLDWLGSISPDLQLIRGDQDSQPSSLIYNSLPRSLDLEVPGGTNASKIYAGLSLFKTVQHGELKIGITAAHNTLSLHDPDTQLIIARQLDVDILICGGAHRVEAFELDGKFFVSPGSATGAFSVEKYTDDGVEEDEEEEVNGKEENDNENEDGKNDEDGKNKEKEESKGDKDDKDKDEDGKDESENKEESETNGEETKITEPSEAIPSFCLLDIQGSVCVLYVYMYIDGDVKVDKISYRKLQ

SEQ ID NO: 6692 - protein, 317 aa, Methanosarcina barkeri str. fusaro
MDCNTPNKKLSTPIKAAKINPNMSVDDLVREYRGCAFGAGRLAEAVEIYYEMLASKKTTKFFGLAGAMTPAGMRNVVADLIRDGYIDVLVTTGANMVHDTVEALGLHHYKGTDCTNDIQLRNECIDRIYDVYLPDQHFANLEEFLQGVYAGLPQEKLSIRQVLTEIGKNLDDDSSILKTAAEMGVPVYCPALQDSVIGLQAWLYKEGNPLHVDAFADMHEFIEICYAAESAGALLIGGGVPKNYILQSMLVTPKSFDYAIQLTMDHPETGGLSGATLDEAQSWGKVGENAKAVTVYADATITLPLMVAAVRTRLSKK

SEQ ID NO: 6693 - protein, 349 aa, Yarrowia lipolytica CLIB122
MTETSVGKTENTISADEVALYDRQIRLWGMESQARMRNSKILLINIGAVANEIVKDLVLAGIGSLTIVDAHVTSDADFGAQFFVQEGDENKNRGESALPRISQLNRHVTVETVDKVILDLDKEFVGKFDLVVITQATLKEIVHITTLCEETDTTNICVGISGLFSYAFIDFREYTYKIETPNKPSTMSIPEQATLVGTVELETGNYSASLKQSFKPFKQVLEAVQTPKPFAHMRPKHKSRIPGYVPLLFTGWEYEQTNPGKSWGDLSAKEFHELGVEQCSKLQLPLGIISEELAQQVLTSKDAEIATTASIMGGGIAQEVLNYLARSQIPIDNFYVFDGINGESPIYRL

SEQ ID NO: 6694 - protein, 553 aa, Mycobacterium tuberculosis CDC1551
MAFSVQMPALGESVTEGTVTRWLKQEGDTVELDEPLVEVSTDKVDTEIPSPAAGVLTKIIAQEDDTVEVGGELAVIGDAKDAGEAAAPAPEKVPAAQPESKPAPEPPPVQPTSGAPAGGDAKPVLMPELGESVTEGTVIRWLKKIGDSVQVDEPLVEVSTDKVDTEIPSPVAGVLVSISADEDATVPVGGELARIGVAADIGAAPAPKPAPKPVPEPAPTPKAEPAPSPPAAQPAGAAEGAPYVTPLVRKLASENNIDLAGVTGTGVGGRIRKQDVLAAAEQKKRAKAPAPAAQAAAAPAPKAPPAPAPALAHLRGTTQKASRIRQITANKTRESLQATAQLTQTHEVDMTKIVGLRARAKAAFAEREGVNLTFLPFFAKAVIDALKIHPNINASYNEDTKEITYYDAEHLGFAVDTEQGLLSPVIHDAGDLSLAGLARAIADIAARARSGNLKPDELSGGTFTITNIGSQGALFDTPILVPPQAAMLGTGAIVKRPRVVVDASGNESIGVRSVCYLPLTYDHRLIDGADAGRFLTTIKHRLEEGAFEADLGL

SEQ ID NO: 6695 - protein, 158 aa, Bradyrhizobium japonicum USDA 110
MSAIYDFKANSLLGEEVPMRRFEGQVLLIVNTASKCGFTPQYRGLEDLYRDLSPRGFAVLGFPCNQFGAQEPGQASEIQEFCSTNYDVTFPLFEKIDVNGANAHPLYEYLKRQQSGLLGASIKWNFTKFLVDRAGRVIARYAPTARPEGLRQQIETLL

SEQ ID NO: 6696 - protein, 184 aa, Hordeum vulgare
MAPRRRTLLKVIVLGDSGVGKTSLMNQYVNKKFSQQYKATIGADFLTKEVLIEDRLVTLQIWDTAGQERFQSLGVAFYRGADCCVLVYDVNAKRTFNTLGTWHDEFINQAGPSDPKQFPFILVGNKVDLDSGSRRVVPEKKAKDWCVAKGDIPYFETSAKDDCNVDTAFLCIAKLALEHEHDQD

SEQ ID NO: 6697 - protein, 348 aa, Arabidopsis thaliana
MGVDYYKVLQVDRSANDDDLKKAYRKLAMKWHPDKNPNNKKDAEAKFKQISEAYDVLSDPQKRAVYDQYGEEGLKGNVPPPNAATSGASYFSTGDGSSSFRFNPRSADDIFAEFFGFSTPFGGGGGGTGGQRFASRMFGDDMYASFGEGAGGGGAMHHHHHHHHHAAARKVAPIENKLPCSLEDLYKGTTKKMKISREIVDVSGKAMQVEEILTIGVKPGWKKGTKITFPEKGNEHPGVIPADLVFIIDEKPHPVFTREGNDLIVTQKVSLADALTGYTANIATLDGRTLTIPITNVIHPEYEEVVPKEGMPLQKDQTKKGNLRIKFNIKFPARLTAEQKAGFKKLIG

SEQ ID NO: 6698 - protein, 500 aa, Pseudomonas syringae pv. phaseolicola 1448A
MNESPVIGHYINGHLNDGDGERYSDVFNPAIGTVQARVALASVKTVDEAVASAKAAFPGWADQSSLRRARVMFKFKELLDRHHDELAQIICREHGKVLSDARGEVVRGIEIVEFACGAPSLLKSDFSDNIGGGIDNWNLRQPLGVCAGVTPFNFPVMVPLWMIPMALVTGNCFILKPSERDPSASLLMARLLKEAGLPDGVFNVVQGDKVAVDALLQHPDIEAISFVGSTPIAEYIHQQGTAHGKRVQALGGAKNHMIVMPDADLDQAADALIGAAYGSAGERCMAISIAVVVGDVGQQLIDKLLPRIDQLKVGNGMQADSDMGPLVTAVHKAKVEGFIDQGVKEGAKLIVDGRHFKVPGAEQGFFVGATLFDHVTPQMQIYKEEIFGPVLGIVHVADFASAVELINAHEFGNGVSCFTSDGGVARAFARTIKVGMVGINVPIPVPMAWHSFGGWKRSLFGDHHAYGEEGLRFYSRYKSVMQRWPDSIAKGPEFSMPTAK

SEQ ID NO: 6699 - protein, 422 aa, Saccharopolyspora hirsuta
MTRRVVITGVGVRAPGGLGAKNFWELLTSGRTATRRISFFDPTPNRSQIAAECDFDPEHEGLSPREIRRMDRAAQFAVVCTRDAVADSGLEFEQVPPERIGVSLGSAVAAATSLEQEYLVLSDGGREWQVDPAYLSAHMFDYLSPGVMPAEVAWTVGAEGPVAMVSDGCTSGLDSLSHACSLIAEGTTDVMVAGAADTPITPIVVSCFDAIKATTPRNDDPEHASRPFDNSRNGFVLAEGAALFVLEELEHARARGAHVYAEISGCATRLNAYHMTGLKTDGREMAEAIRVALDLARIDPTDIDYINAHGSGTKQNDRHETAAFKRSLGEHAYRTPVSSIKSMVGHSLGAIGSIEVAACALAIEHGVVPPTANLHEPDPECDLDYVPLTAREQRVDTVLSVGSGFGGFQSAMVLRRLGGANS

SEQ ID NO: 6700 - protein, 366 aa, Propionibacterium acnes KPA171202
MPLWCRRPAELSVNLSDCRLESASVLSATIGNMSAIRLGTRASTLATTQSEMVAGLLRSEGLDVNLTTITTHGDTSTASLAAMGGIGVFASAIRAALLEGEADIAVHSFKDLPTGRPLGLAIGAVPARADPRDALVARDGLTLHDLPQEASVGTGSPRRAAQLLAVRPDLTIVDIRGNVDTRLGRVKGLGRYAKNGGKEDLDAVVLAASGLARLGHSGAVTEFLDPSVVLPAPAQGALAVECRTADSRHGKLAKALARIDDRRTRLAATAERAVLSHLEAGCAAPIGALAQLKPVSGKSLQVLTLDVVVAAVDGSRTVREQVSVELPAEVEPALAAAHTLGVTAAEELLDDGAADVADLKASGSTR

SEQ ID NO: 6701 - protein, 140 aa, Hyacinthus orientalis
LKDLQKDPPTSCSAGPVAEDMFHWQATIMGPPALVLMLEDSFELQSTFLRDYPFKPPKVAFRTKVFHPNINSNGSICLDILKEQWSPALTISKVLLSICSLLTDPNPDDPLVPEIAHMYKTDRNKYETTSRSWTQKYAMG

SEQ ID NO: 6702 - protein, 384 aa, Arabidopsis thaliana
MDLVDKRDVLIGDFRPSLGFYGGVRVGVYLDTTEPKHAKIKGFAMETLKRSSKVWLQELRSNLNIFWGTIESEISKNGAASYIFPLQRCIFSFLCASLAGVDASVSPDIAENGWKTINTWLALQVIPTAKLGVVPQPLEEILLHTWPYPSLLIAGNYKKLYNFIDENAGDCLRLGQEEFGLTRDEAIQNLLFVLGFNAYGGFSVFLPSLIGRITGDNSGLQERIRTEVRRVCGSGSDLNFKTVNEMELVKSVVYETLRFSPPVPLQFARARKDFQISSHDAVFEVKKGELLCGYQPLVMRDANVFDEPEEFKPDRYVGETGSELLNYLYWSNGPQTGTPSASNKQCAAKDIVTLTASLLVADLFLRYDTITGDSGSIKAVVKAK

SEQ ID NO: 6703 - protein, 547 aa, Rhodospirillum rubrum ATCC 11170
MPDPTTLSAWAALAAHAPTLSDQPLRVLFDADPDRFARFHLRFEDLVLDYSKNRITGETMALLADLARQSGVEARRDAMFAGEPINTTEGRAVLHVALRDPTPTPVLVDGADVKPAIAAVLAHMEAFSEAVRSGAWTGATGKAITDVVNIGIGGSDLGPVMVVEALKAYAKPGLRVHFVSNVDGTHIAETLKGLSPETTLFLVASKTFTTQETLTNAHTARDWLVGALGEPAVARHFAALSTNAKAVSAFGIDTANMFEFWDWVGGRYSLWSAIGLPIAISVGFANFRALLDGAHAMDTHFREAPIERNLPVILGLLGVWYGDFLGARAQAVLPYDQYLHRLAAYLQQADMESNGKRTTLDGKTVAYATGAVLFGEPGTNGQHSFYQLIHQGTSLIPCDFIAPAISHNPLGRHHAILLSNFLAQTEALMRGKTEAEARAELAAQGLAGEALEALLPHKVFPGNRPTNAILVKRLDPRTLGMLIALYEHKIHVQATVWNINAYDQWGVELGKQLAKAILPELEDATISPAHDSSTNGLIALYREFSAG

SEQ ID NO: 6704 - protein, 671 aa, Zea mays
  misc_feature (173)..(173): Xaa can be any naturally occurring amino acid
  misc_feature (344)..(344): Xaa can be any naturally occurring amino acid
  misc_feature (429)..(429): Xaa can be any naturally occurring amino acid
  misc_feature (596)..(596): Xaa can be any naturally occurring amino acid
MIPAVAGPTTFHPQDPATGQLPETDPPPLAGGGREQKGPRATWRLLTAVVSAVLVLVLVAVTVLASQHVDGQGGGVPAGEDAVVVEVAASRGVAEGVSEKSTAPLLGAGALQDFSWTNAMLAWQRTAFHSQPPKNWMNDPNGPLYHKGWYHLFYQWNPDSAVWGNITWGHAVXRDLLHWLHLPLAMVPDHPYDANGVWSGSATRLPDGRIVMLYTGSTAESSAQVQNLAEPADASDPLLREWVKSDANPVLVPPPGIGPTDFCDPTTVWRTPVGNDTAWRVAIGSKDRDHAGLALVYRTEDFVRYDPAPALMHAVPGTGMWECVDFYPVAAGSGAAADSGDDGXETSTAPGPGVKHVLKASLDDDKHDYYAIGTYDPATDTWTPDSAEDDVGIGLRYDYGKYYASKTFYDPVLRPRVLWGWVGETDSEXADILKGWASVQSIPRTVLLDTKTGSNLLQWPVVEVENLRMSGKSFDGVALDRGSVVPLDVGKATQLDIEAVFEVDASDAAAVTEADVTFNCSTSAGAAGQGLLGPFGLLVLADDDLSEQTAVYFYLLKGTDGSLQTFFCQDELRASKANDLVKRVYGSLVPVLDGEXLSVRILVDHSIVESFAQGGRTCITSRVYPTRAIYDSARVFLSNNATHAHVKAKSVKIWQLNSAYIRPYPATTTSL

SEQ ID NO: 6705 - protein, 683 aa, Propionibacterium acnes KPA171202
MTANPYAAPTDPLAPYSAVLVVSFGGPRSPEEVMPFLRRVSHGRIPEERLADVARHYDRFGGVSPINDATDVFVNAIGNELRRHGVRVPVLLGNRNGTPFLEEALTDMHAHGVRRVLAVVTSAYASYSGCRQYREEIATALAHAGITDMQVDKVPPFNEAPGFIRANAEALMQAFMRIPPTPLEATRVVFVTHSIPDSMQDASGAGQPGTDYISQHKAVCERVAGQVRQVFGNMPQWDLAYCSRSGRPSDPWLEPDIIDHLRSLPEQGVQSVVVAPIGFVADHMEVVNDLDYEAAEAAKESGLAFTRAATAGTHSAFIADLAGLILSQAAAARGEGGNLTSWPAPCVAGCCRRYPDAQDIPAVSGGDVESVAAGADVVDAEPGGVDFVPSGSASAVDRPGPEAVELETPPSPYNPLTKETPMSDHSSADSVIEGPRDDEVPAGSYTAPTDPRDTPVIPEEVNASSKWAMYSVFRVATALPAEDDERRRLVEGSDEWAGQSGVDTRGWYDLSGLRANADLLVWWVSDDPAVLQDAYHRFRASGLGRHLEPVWSNVGVHRPAEFNKSHLPSCFAGIAPRRWAAFYPFIRSKEWYLLPAADRSRMLREHGIVGAASSDVKASTLAAFALGDYEWILALEGDDLARIVDVMKDLRYVEARRYVDVDTPFFTGERVSPVVWADRQMRA

SEQ ID NO: 6706 - protein, 354 aa, Thermotoga maritima
MKIAVLPGDGIGPEVVREALKVLEVVEKKTGKTFEKVFGHIGGDAIDRFGEPLPEETKKICLEADAIFLGSVGGPKWDDLPPEKRPEIGGLLALRKMLNLYANIRPIKVYRSLVHVSPLKEKVIGSGVDLVTVRELSYGVYYGQPRGLDEEKGFDTMIYDRKTVERIARTAFEIAKNRRKKVTSVDKANVLYSSMLWRKVVNEVAREYPDVELTHIYVDNAAMQLILKPSQFDVILTTNMFGDILSDESAALPGSLGLLPSASFGDKNLYEPAGGSAPDIAGKNIANPIAQILSLAMMLEHSFGMVEEARKIERAVELVIEEGYRTRDIAEDPEKAVSTSQMGDLICKKLEEIW

SEQ ID NO: 6707 - protein, 333 aa, Oryza sativa (japonica cultivar-group)
MVINLEFIRAIVTADEILLLDPLTIDVIPFVEQLTHHLPLKNLVCGNGQPGGDDHGEKHDDSHGDQVPRLNEATGAEHELPFEFQVLELALETVCSSFDVNVSGLERRATPVLEELTKNVSTRNLDRVRTLKSDLTRLLAHVQKVRDEIEHLLDDNEDMAHLYLTRKQLQNQQVEALISSAASNSIVPGGTSLSRLNNSFRRSVSIATSMHLDNDVEDLEMLLEAYFMQLDGIRNRILSVREYIDDTEDYVNIQLDNQRNELIQLQLTLTIASFGIAVNTFIAGAFAMNIQSKLYSIDDGSFFWPFVGGTSSGCFMICIVLLWYARWKKLLGP

SEQ ID NO: 6708 - protein, 522 aa, Oryza sativa
MPSAHPLPASSQATTAWATRTLTSTRSVGRTPTLSTPHAPGPYTSSTNAEAIATQPYPLTDKWATNLHPGPITSHRIATPNPNNNLIPDTRAEAEEEVGDRSIAIDRLSDWLIDRHAASAADEAGGGGGAAAADDAAGAAHAAAAGCGGGGGGAAAAGALVPPAPPAPGPPRGAAGGPISLPLSLLPFRSAIEPIVSGNLPPGFDSSTCRSVYVGNIHLQVTDSLLHEVFQSIGPVEGCKLIRKEKSSFGFVDYYDRRSAAIAIVSLNGRQLDARVMWDQKTGRSRGFGFVSFRNQQDAQNAINELNGKWLGNRQVRCNWATKGANAGEEKQNTDSKGMIELTNGSSEGGKDNANEDGPENNPQYTTVYVGNLPHDVNSNDVHRFFHSLGVGSIEEVRVTRDKGFGFVRYSTHEEAALAIQTGNGQLIGGRQIKCSWGSKPTPPGTASAPLPPPAPAPFNPGMSATDLLAYERTLALSKMAANPALMSQHAALKQAAAMGMGAGASQAIYDGGYQSANAVFY

SEQ ID NO: 6709 - protein, 122 aa, Triticum aestivum
  misc_feature (63)..(63): Xaa can be any naturally occurring amino acid
  misc_feature (78)..(78): Xaa can be any naturally occurring amino acid
  misc_feature (84)..(84): Xaa can be any naturally occurring amino acid
  misc_feature (110)..(110): Xaa can be any naturally occurring amino acid
MARLNSKAVVAAVVLAAVVLMMAGREASAALSCGQVDSKLAPCVAYVTGRASSISKECCSGVXGLNGMARSNSDRKIXCKCLKXLANNIKSINMGKVSGVPRNSGSMVPXPINISTNCDTVN

SEQ ID NO: 6710 - protein, 232 aa, Zea mays
  misc_feature (26)..(26): Xaa can be any naturally occurring amino acid
  misc_feature (88)..(88): Xaa can be any naturally occurring amino acid
MYKLGRGNRDKVQQFMTITGASEKVXLQALKASDWHLEGAFDFFYSQPQVSVVNTRHLEDIFNRYKEPDADMIMVEGISQFCNDLQVXPQDIVMEFIGGLQSIGVDSIEKFRGKLPSLRAELKDDNKFRDIYNFAFTWAREKGQKSLSLETAIGMWQLLFAERNWPLLEHWCQFLQVRHNKAISRDTWAQLLEFVKTIDPQLSNYDDEGAWPYLIDEFVEYLTENGLVQRKR

SEQ ID NO: 6711 - protein, 435 aa, Arabidopsis thaliana
MDFASVPIYIVTMERLISHPPLMIVSDLDHTMVDHQDHENLSLLRFNSLWEYAYRRDSLLVFSTARSPVLYKELRKEKPLLTPDIIITSIGTEIAFGNSMVPDHAWVESLNSCKWNREIVLEETSKFPELTLQPKTEQRLHKVSFYIDEGKGEALTKELSQLLEKRGLDVKIIYSWGKNVDVIPRGAGKGEALEYLLKKLQAEGIFPVNTLACGDSEHDAELFSIPDVHGVMVSNSQEELLKWRSENALNNLKVIHSTERCADGIIQAIGHFNLGPDLSPRDVSEFLDRKMDNVNPGHEVVRFYLFYERLRRGEIKNYETYIASFKDSCLHAAVLFHPSGAEKSLRDTIDELKKCYGDKRGKKFWVWVDQVLVTDTIPGKWIVKFDKWEQCEDESQCCKTTVEFTSKGGDLVWEKVKQIWSEESKVKDDNSSWIL

SEQ ID NO: 6712 - protein, 168 aa, Zea mays
MAASSTATSVHDFIVKDASGKDVDLSTYKGKVLLIVNVASQCGLTNSNYTELAQLYEKYKDQGFEILAFPCNQFGGQEPGTNEEIVQFACTRFKAEYPIFDKVDVNGSNAAPIYKFLKSSKGGLFGDSIKWNFSKFLVDKEGRVVDRYAPTTSPLSIEKDIKKLLGSS

SEQ ID NO: 6713 - protein, 303 aa, Arabidopsis thaliana
  misc_feature (277)..(277): Xaa can be any naturally occurring amino acid
PDKSQEEHKVSFFVGREDAVEIMKVLPGILEERGVDVKLVYSNGYAFDVLPRGAGKQGALTYLLDKLDIEGKQPSNTLVCGDSGNDAELFNISDVYGVMVSNSHEELLQWYEENAKDNPKIFHASERCGAGMIEAIQRFNLGPNVSPRDVMDTENFHGESLNPAHEVVQFYLFYERWRCGEVEKSDKYLQNLKSLSSPLGIFVHPSGVEKPIHEWIDEMENLYGDGKEKKFRIWLDNVTSSHISSDTWLAKFVKHELSEGKVRSCSTKVLLSYKEEXQRLTWMHIHQSWLDESSSDDQEKWIF

SEQ ID NO: 6714 - protein, 566 aa, Bordetella pertussis Tohama I
MMLANPATKYVPFQPFARDFAERTWPSRRITQPPIWMSTDLRDGNQSLIEPMSVERKVRFFEQLVKIGFKEIEVGFPSASQTDFDFVRKLIDEKRIPDDVTIIVLTQSREDLISRTVEAAAGARQAMIHLYNACAPAFRKIVFNMSRDEIKNIAVTGTRMVKQYMAKYPQTQWRYEYSPEVFSTTEPEFALDVSNAVADEWDATPQRKMVLNLPATIEATSPNMYADQIEWMHKNLARRDSIVLSVHPHNDRGTAVAAAEFAVMAGADRIEGCLFGSGERTGNVDLVTLALNLYTQGVHPGLDFSDIDEVRRCAEYCNQLPVHPRHPYAGDLVFTAFSGSHQDAIKKGFAQQQADAPWEVPYLPIDPADLGRSYDAVIRVNSQSGKGGVSYLLEQEHGLVLPRRLQIEFSRAIQRVTDETGREVSSDDVYTIFDSEYLAQQQPWQLVRHRIDGDPSAGEGKHFSIEAELSFNGERRIVKGSGDGAISAFVAALDVPVRIMDYHEHAIGTDTRAACYVEVRVGDSPTGFGVGIDRDIVTASFKAVLGAVNRHHVAATQATETEAVAA

SEQ ID NO: 6715 - protein, 618 aa, Mycobacterium tuberculosis H37Rv
MSAPTKPHSPTFKPEPHSAANEPKHPAARPKHVALQQLTGAQAVIRSLEELGVDVIFGIPGGAVLPVYDPLFDSKKLRHVLVRHEQGAGHAASGYAHVTGRVGVCMATSGPGATNLVTPLADAQMDSIPVVAITGQVGRGLIGTDAFQEADISGITMPITKHNFLVRSGDDIPRVLAEAFHIAASGRPGAVLVDIPKDVLQGQCTFSWPPRMELPGYKPNTKPHSRQVREAAKLIAAARKPVLYVGGGVIRGEATEQLRELAELTGIPVVTTLMARGAFPDSHRQNLGMPGMHGTVAAVAALQRSDLLIALGTRFDDRVTGKLDSFAPEAKVIHADIDPAEIGKNRHADVPIVGDVKAVITELIAMLRHHHIPGTIEMADWWAYLNGVRKTYPLSYGPQSDGSLSPEYVIEKLGEIAGPDAVFVAGVGQHQMWAAQFIRYEKPRSWLNSGGLGTMGFAIPAAMGAKIALPGTEVWAIDGDGCFQMTNQELATCAVEGIPVKVALINNGNLGMVRQWQSLFYAERYSQTDLATHSHRIPDFVKLAEALGCVGLRCEREEDVVDVINQARAINDCPVVIDFIVGADAQVWPMVAAGTSNDEIQAARGIRPLFDDITEGHA

SEQ ID NO: 6716 - protein, 357 aa, Arabidopsis thaliana
MMSDISQDLLEEILSRVPITSLRAVKSTCKRWKDLLNDPSFSKKYGGKRDNEFLAIMTSGSRASLMSVNLHGPRDNKDLEDPFIKQIGELNQDQIFKVFHCDGLLLCITNEDNTRLVVWNPYLAQTRCIQPIDKFYIYDWYCLGYDKDKNHKILVVYSPMFGRIEYEIYSFLSKSWIVLSFPTDWQISRDECLSLKGNTYFIAYKKMEVEEVGFQEFLLCFDFTNERFGPLLPLPFQCYNQTSLVLSTVQEEQLAVLCKRCDAYETKIWITTKIEPNAVSWSYFLKFDFKVDISGGSFFVDVEEKVAVLFCINREKEKGINNKTYMIGEDGYYKEVDLGESNWCPSMCSYVPSCVQV

SEQ ID NO: 6717 - protein, 315 aa, Oryza sativa (japonica cultivar-group)
VGKRLRYLTKHPHSDIQSMATDLLGYWKKVVIEEGKKNGTTENVGSTNSAARAEKAQPMKVDKSSASGSVKPEKREVNVRGQKPESIKVEKITNNDSKNQQVKVERAPKEATRTPDTKKPSSVPNGPPKLTSLVKCNDPTRDKIRELLADAFSRVHGETSKDDREEVRNILDEVDARDPFRVAVTVESALFERLGRSTGAHKAKYRSIMFNLRADNNTDFRRRVLLGQVRPERLVDISPEEMASDARKLENKQIKEKALFDCERGGAPKATTDQFKCGRCGQRKTTYYQLQTRSADEPMTTFVTCVNCNNHWKFC

SEQ ID NO: 6718 - protein, 397 aa, Debaryomyces hansenii CBS767
MASEGITEIDSGLIETNYDNVVYTFDDLNLKPNIVRGIFGYGYESPSAIQQRAILPITEGRDVLAQAQSGTGKTATFTISALQRIDENEKSTQALILAPTRELALQIQNVITHIGLYLNVTVHASIGGTSMKDDIEAFKSGVQIVVGTPGRVFDMIERRFFKTDKVKMFILDEADEMLSSGFKEQIYNIFRLLPETTQVVLLSATMPQDVLEVTTKFMNNPVRILVKKDELTLEGIKQFYINVEQEDYKFDCLCDLYDSISVTQAVIFCNTRSKVEFLTTKLKGENFTVSAIHADLPQADRDTIMNEFRSGSSRILISTDLLARGIDVQQVSLVINYDLPANKENYIHRIGRGGRFGRKGVAINFVTDQDVGMMREIEKFYSTQIEEMPADIGALFN

SEQ ID NO: 6719 - protein, 332 aa, Sulfolobus solfataricus P2
MKIRGIAQAIAEGIRQEMERNDRIVVLGEDVTYWGAVFGFTMGLFDKFGRKRVIDTPITEQTFMGISVGAASSGLHPVVSLMFVDFLGAGFDQMFNHMAKNYYMSGGQYPMPITVITAIGGGYGDSSQHSQVLYSLFAHLPGFKVIVPSTPYDAKGLTIKALRDNNPVIIFGHKLLTGLPFLPFEGNEEEVPEEPYEIEFGKAAIRKEGTDLTIISAGLMVHRSLKAAEMLQKEGISAEVIDVRTFVPLDEETIIKSARKTGRVLIVDEDYMSYGVTGEIAFRIQSKALKDLKVPISRLAVPDVPIPFSEPLENAVIPNVNTIYSEAKKLIQ

SEQ ID NO: 6720 - protein, 502 aa, Pyrococcus abyssi GE5
MYRQAKWDEPLIFELSRPGRVGYTLPKPIEDVDVEIPEKLKRKSPLNLPEVSEPEVVKHYTRLSEMNYGVDSGIYPLGSCTMKYNPKINEELAGHPKVAYIHPYQDERTVQGALRIMWELEQWLKEITGMDRFTLQPAAGANGEFTGVMIIKAYHLDRGETQRNEMLVPDSAHGTNPASAAMAGFKVIEIPSNENGTVDLEALENAVSERTAGLMLTNPNTLGIFEDEIEEIAKIVHKAGGLLYYDGANLNGILGKVRPGDMGFDIVHLNLHKTFSTPHGGGGPGAGPVGVKEFLKDYLPVPLVSYDEENDRYYLDYDVPKSIGKVKELFGNFAVLVRALTYLKVMGKDGLREVSEVAVLNANYLARKLKGTRGYELPHKELRKHEVVFSAEPMKRETGVRTLDVAKRLLDFGMHAPTIYFPLIVHEALMIEPTETVSKEELDAYVEAMKKISEEAYTNPEVVKSAPHNTAVRRVDDVLASKKPIITWKMYKELKEKGEVDY

SEQ ID NO: 6721 - protein, 449 aa, Pyrococcus abyssi GE5
MAKHYIPNSAHKEEMLKEIGLSSIDELFADIPGKFIRDELNLPEGKSEYEVFLEMNEILGKNKTVLEMPTFLGAGTYFHYIPAHVKYLIERSEFLTAYTPYQPEISQGMLQALFEYQSLIAELVGLPVVNASMYDWGTAMAEAALMTVRLHRGKRKKFIVPRHTHPERLQVLETYAKGPGVEIETVKWNERGQVDIEDLKEKVKDAAGVYVEIPNFFGLLEEEVREIGEIAHEAGAYFVVGVDPTILGIVEAPGELGADIVVGEASYFGNPMNFGGPRAGIFAVRNDMKLIRQMPGRLIGMTKDAEGKRAFVMTLQTREQHIRRAKATSNICSNEALVAVAAAIHIASLGPRGIRELGEVILKNTAYLKKRLSEVAEIPFDGVNFKDVLVRFEKPYKEIHEELLKRNIHGGYYVGKHFPELGESALFAATETTRKEWVDALISALREVI

SEQ ID NO: 6722 - protein, 606 aa, Delphinium 'MagicFountains dark blue'
MDSCACIETQWPADELLVKYQYISDFFIALAYFSIPLELIYFVQKSAFFPYRWVLMQFGAFIVLCGATHLINLWTFSMHSKTVAMVMTIAKISTAVVSCATALMLVHIIPDLLSVKTRELFLKNKAEELDREMGLIRTQEETGRHVRMLTHEIRSTLDRHTILKTTLVELGRTLGLEECALWMPSRTGMNLQLSHTLRHQIPVGSTVSTNLPIVTQVFNSNQAIKIPHTCPLARIGPTAGRYVPPEVVAVRVPLLHLSNFQINDWPELSAKSYAVMVLMLPTDSARKWHDHELDLIEVVADQVAVALSHAAILEESMRARDMLMEQNIALDMARREAEMAIRARNDFLAVMNHEMRTPMKAVIALSSLLLEIELTPEQRVMIETVLKNSNLLAALINDVLELSRLEDGSLELDIRTFNLHGIFREVLNMIKPITAVKKLSLTLMLSPDLPVVAVGDEKRLMQIMLNVVGNAVKFTKEGYVSVIASVAKAESLREWQAPEIFMVSSDSHFHLCVQVKDSGCGISPQEIPHLFTKFTQLRSGQNRSNDGAGLGLALCKRFLNLMEGHIWVDSDGTDKGCTVTIIVKLGICEGQPEPSNLQVVSRPRLS

SEQ ID NO: 6723 - protein, 374 aa, Streptomyces noursei ATCC 11455
MRRDIGAPRRRFNGDPDGTRLSSATKGTEVMSTVHTGVTQSGLTAELASLHAELVRRNPGEAEFHQAALEVLETLAPVLTARPEFADAKVLERIVEPERQIMFRVPWQDDSGTIRVNRGFRVEFNSALGPYKGGLRFHASVNLGIVKFLGFEQIFKNALTGLNIGGGKGGSDFDPHGRSDAEVMRFCQSFMTELHRHLGEHTDVPAGDIGVGGREIGYLFGQYRRITNRWEAGVLTGKGLAWGGSKARTEATGYGNVLFTEEMLKQRGEELDGQQVVVSGSGNVAIYTIEKAQALGANVLTVSDSGGYVVDEKGIDLALLKQVKEVERGRVGDYAQRRGSSAKYVAGGSVWDVACDVALPSATQNELDADAARI

SEQ ID NO: 6724 - protein, 107 aa, Haemophilus influenzae Rd KW20
MSEVLHINDADFESVVVNSDIPILLDFWAPWCGPCKMIAPVLDELAPEFAGKVKIVKMNVDDNQATPAQFGVRSIPTLLLIKNGQVVATQVGALPKTQLANFINQHI

SEQ ID NO: 6725 - protein, 186 aa, Mannheimia succiniciproducens MBEL55E
MSYTGNRFILEKSNLYKGNFMRIDTSELCDVYLDQVDVVEPIFSSFGGVNEFFGKVTTIKCFENNGLIAEILEEQGEGRVLLVDGGGAVRRALIDAELAQLAADNGWEGIIVYGAVRQLSRLENINIGIHALAPIPVGADEDTQGESDIPVNFGGVTFFPEDYVYADLTGIILSQEPLELEELGEE

SEQ ID NO: 6726 - protein, 401 aa, Haemophilus ducreyi 35000HP
MFQFSTVDEALAAIAAGKIILVSDDENRENEGDFICALEFATPENINFMATYGKGLICTPISQALADKLSFHPMVTNNTDNHETAFTVSVDHINTGTGISAFERSLTALKMLEQNAQAADFRRPGHMFPLIAKEGGVLVRNGHTEATVDLARLAGLKPAGLCCEIMADDGTMMTMPQLQALAVKHNMPFITIAQLQEYRRKYDSLVKLVSVVKMPTKYGEFMAHSFVEVISGKEHIALVKGEIGDGQAVLARIHSECLTGDAFGSQRCDCGQQFAAAMTQIEKEGRGVVLYLRQEGRGIGLINKLRAYELQDKGMDTVEANLALGFKEDEREYYIGAQIFQALGVKSTRLLTNNPAKISGLKQQGLNIIAREPIIVEPNQNDIDYLKVKQIKMGHMFNFEQ

SEQ ID NO: 6727 - protein, 709 aa, Gibberella zeae PH-1
MASPFRLMRPISQVARSGVVSFAARPFSSTAARFAVQDIKTTKEFKDLVSATDKAVLVDCFATWCGPCKAISPILSKLSEQPALSDNIEFVKFDVDELPDLTAELGVRAMPTFFVFKGGKKVDELLDFAIENCKAAKIGARDIDSGRSIKSGDIFTIVRDTEHIDKCQKMFDIQWAIICAIAISGGALTPDEFGDLDKSIFPWLWKKTKKKKKKKKKKKKKKKKKKKKKKKKKKKKKKKKKKKKKKKKKKKKKKYRKLYYVVSVRSGSANQLALIRPSTSSIDENKRRWKAVMYGITEDHTVSVICARETSKSWQGVSQSIRLVKYNLEIQTEPQSAADQASFVTTINMANTIIVVGAGVSGLTSAYLLSKNKGNKITVVAKHMPGDYDIEYASPFAGANVCPMATQENSRWERRTWVEFKRLCEQVPEAGIHFQKCHIARRKKDVEEAKSSTFPDALFQEEPWYKELFEDFREQNPNEVTRGYDSGCEFTSVCINTAIYLPWLAGQCLKNGVVLKRTSLTDISEAKKLSHTGKVPNIIVNATGLGSLKLGGVKDETMAPARGQIVVVRNESTPMLITSGVEDGGSDVMYLMQRAAGGGTILGGTYDVGNWESQPDPNIAQRIMQRIVEARPEVADGKGVKGLSIIRHAVGLRPWRKGGLRLEEEKLDDETWIVHNYGHSGWGYQGSYGCAEGVVELVDKVGKGAKAKL

SEQ ID NO: 6728 - protein, 485 aa, Xylella fastidiosa Temecula1
MATDIATPQNAEILERLDRRYEAGFVTQIESDSLPPGLNETIIRALSAKKHEPEWMTEWRLAAYRHWLNMPMPEWAKLHIAPIDFQALSYYSAPKGPKYASLDEVPKELLDTYDKLGVPLHERARLAGVAVDAVFDSVSLGTTFRKELAEKGIIFCSISEAIQEHPDLIRQYLGSVVPVRDNYFAALNSAVFSDGSFVFIPKGVRCPMELSTYFRINAGHTGQFERTLIVCEEQAYVSYLEGCTAPIRDENQLHAAVVELVAQEDAEIKYSTVQNWYPGDEAGRGGIYNFVTKRAECRGARSKVIWTQVETGSAITWKYPSCVLLGDDSTGEFHSVALTRHHQQADTGTKMIHIGKRTKSKIVSKGISAGHGQNTYRGLVKIDRNAEGARNHTQCDSLLIGKQCGAHTFPYIEVKHPNATVEHEATTSKISDDQLFYCRARGIAEEDAVSIIVDGFCKQVFRELPMEFAVEAKKLLDISLEGSVG

SEQ ID NO: 6729 - protein, 269 aa, Medicago truncatula
MDPHDHDRLAFIFGILGNIISSMVYLAPLPTFYRIWKKKSTEGFQSLPYLVALFSSMLWLYYGFVKKHAFLLITINSAGCVIETIYIVTYLIYATKDARILTIKLFMAMNVACSVLIVLTTQLAMHGKLRVHVLGWICTSFAICVFAAPLTIMAKVIRTKSVEFMPINLSFFLTLSAIVWFFYGLLLHDICIAIPNVLGFILGLLQMLLYAIYNKSVKEEYALEPMTNIVIVNPLGIPCEVFSLPVIDNVNKIEKEGAEEMEKSVENLT

SEQ ID NO: 6730 - protein, 452 aa, Streptococcus suis 89/1591
MKTVVEANQFIQTEKGNVNPIFKPQAHLTPETGWINDPNGFIYFRGEYHLFYQFNPYESVWGPMHWGHAKSKDLVNWEQLPVALAPDKAYDKDGCFSGSAIVKDDVLWLMYTGHINNEDGTVSQVQNMAFSTDGIHFEKIEQNPVATADGLPEEVIANDFRDPKIFEKDGHYYSVVATKHKDNVGCIVLLSSPNLTDWKFESIFLKGEANQGFVWECPDYFEVDGQEYLIISPMRYQKDGNDFININSNIFVTGHVDWDKKVFVAESFKEIDHGHDFYAAQTTEGPEGERVMIAWMHTWGRPLVTNDLGHKWYGQMTLPRLLKQGENGLRQVLPAGILNSFDDIEIGQVIQGPSKLSLKLGDSLDLKLGTDQDYLQFGYDKAKQEVYIDRSSLKIQQVGEEEWSTVRRAVTVQATELEVLVDTNCLEIFINDGQETLTSTFYVEGQIILNAL

SEQ ID NO: 6731 - protein, 490 aa, Nocardioides sp. JS614
MQTVMPSGGRVSGLLVGAGWETGRGAQLLEVRAPYGGELLARIAESTPDEVDAAVTLAARTFARNELTPHERADILRRTSQLIAQRAEEFAHSVVAEAGKPLRDARAEVARAVLTFELCAQEATRLAGEVVPVEGTPGSENRRAFTIRRPAGVVCAITPFNGPVNQLSHKVPTAIAAGCTVVVKPAEVTPLSAIKVVQAMLDAGLPPGHVTVVQGRGETVGQQLLEDPRFAVYSFTGSTAVGAHIRRTVGLRKTLLELGNNSANIVHADADLGLAAKVLAKSSTAYAGQVCISAQRILVHEDVFEEFSALLADQVSALSVGDPSDEGTDVGPMISLDAARRAEQWVAQAIDDGAKLVCGGSRDGQFFVPTVVARPAAHSALACQEAFAPVAVLIAYRTLREAIDIANSTEYGLQAAVFTEGLDVAMAVARRLDVGGVIVNDASSYRVDSMPYGGVKHSGTGREGVRYAVEEMTESQLVVLNLRDPVGEGL

SEQ ID NO: 6732 - protein, 111 aa, Glycine max
  misc_feature (90)..(90): Xaa can be any naturally occurring amino acid
SATLSYSLPPLTTPTKTTHLSLSVGLKPSRSSLRSKSRFAVSCSQWTPPAPDASLSRRRPAFIPILIPDPDYVRICDTTLRDGEQSPGAXMTSKEKLDVARTLGRAGRRHD

SEQ ID NO: 6733 - protein, 339 aa, Ralstonia eutropha JMP134
MEHTIALQFEDGVTRFITCGENETLSDAAYRQKINIPLDCRDGACGTCRGLCESGSYDLPESSYIEDALTSEEAAQGYVLACQTRPRSDCVIRIAASSTACKTGVTKFEGAIASVDKLSDSTIGFSIDLDDAGALDFLPGQYVNVEIPGSGLTRSYSFSSAPGAGHTGFVVRNVPDGRMSSYLTNDAQPGQRIAFSGPYGSFYLRPVQRPVLLLAGGTGIAPFLSMLDVLASNGNPHPVRMVYGVTNDIDLVELPRIDGAAQQLTGFEYRTCVASAESGHDRKGYVTQHVEPEWLNGGDVDIYLCGPVAMVDAVRNWLKESGVEPAGFYYEKFSASSVA

SEQ ID NO: 6734 - protein, 104 aa, Arabidopsis thaliana
MEIESVTCECCGLMEDCTQHYISKVKANFAGKWLCGLCSEAVSDEFSRSSKTVEEAVNAHMSFCGKFNANPAELVADGMRQMLRRRSGELSPKMSKKFGRSNTT

SEQ ID NO: 6735 - protein, 297 aa, Pyrobaculum aerophilum str. IM2
MRLKVATRGSRLSLLQTEEFLAQIKAVEPRVDFEIKIVKTTGDLVQDKPLFQIGVKGIFEKEVNLAVLKGEADIAIHSLKDLPSEISPGLVLAGFSKRTLPYDAVVSAVGYDLESLPKGALVGTSSVRRAEFIKSLRPDVRIEPLRGNVDTRVQKILQGKYDAAVMAAAGILRLYGESPPVKLSLLRPELLPPPPGQGIVAAVVREGEGWLIDLLKKASDPRATVEALAEREFLKNVGAGCHVAVGGTAFSRNGYIEFIAGYAASGKRFVVKLFGEDPVEVGRRAAEEIKRVAASVR

SEQ ID NO: 6736 - protein, 183 aa, Pseudomonas fluorescens Pf-5
MAMRWFAVPALLATLAGSAWAADCPPLLQGSLPKLHAKESIDLCQRFAGKPLVVVNTASFCGFAPQFKGLEALYQRYKDQGLEVVGVPSNDFKQEAKDGAKTAKVCYVNYGVTFTMTEPQKVRGADAVHLFKVLAQQSSAPKWNFYKYVVDRQGNVIASFSSLTKPDNPEFIEAVEKALASKS

SEQ ID NO: 6737 - protein, 537 aa, Zea mays
MEFDEYEYLEKAVEPAPPQANGSGSGSGEKDRGSRRREGGEDRISKRSRSGEDRDRDRHRSGREHRDRDKDDVKEERSRESRGKDRDREGREREKERGDRHRLREREVERERRSRSRSERRRAEEEEMVRELERERERSERHHYRDRDVRRRKDDGAEPEVDPERDQRTVFAFQLSLKADERDVYEFFSRAGKVRDVRLIMDRNSRRSKGVGYIEFYDVMSVPMAIALSGQPLLGQAVMVKPSEAEKNLVQSNATSGGAASGGARKLYVGNLHSNITEDQLRQVFEPFGQVELVQLPVDPMTGLCKGYGFIQFARLEDAKAAQSLNGQLDIAGRVIKVSAVTDHVGMQASGATTGDLDDDEGGGLALNASSRAALMLKLDRSGTATSLTRGIGAAGVAVPATSVIGAPGAASLLPPTVAAVGSVPGAPVLPVTTQNVTMSTPTEFLLLKNMFDPALETDPDFDLDIRDDVQDECSKFGAVKHIFVDKNTAGFVYLQFDSVTAAAKAQNALHGRWFAGKMITATFMSALEYSTKFPNL

SEQ ID NO: 6738 - protein, 497 aa, Mesorhizobium loti
MKGDDGLTVTQSLTRRLKNPELFDDLAGVPGRKAEQSTRRFSVFNPSTGELLAELPDMDVRDVSKAIDKAEAAQEHWAALTARERSDILWEWHQLILDHSEDLAAILTAEMGKPLAEAKSEIAHAAAYLQWYAEEANRIYGETISPPSNDRRMLVIKQPIGVVGAITPWNFPASMVARKISPALAAGCAIVLKPAEQTPLVAGAMFTLARMAGFPDGVLNLIYASEGDAVGRELCSNPKVRKISFTGSTEVGRLLMRECSDQIKRTSFELGGNAPFIVFDDADVDAAVDGALQAKFRNAGQTCVSANRLYVQSSVYNEFCDKFTKRVSALRVGDGFEPEVAIGPLIDKCALAKIEDHIRDAVRQGGKIRCGGNRIGESGTFFEPTVITDVERTMRVAQEETFGPLAPIIRFNDPDQVVREANDTIYGLAAYFYASNLKRVWRVAETLEYGMVGINTGRMSSEAAPFGGMKQSGIGREGSRHGLEDYLEMKYLCMGGL

SEQ ID NO: 6739 - protein, 446 aa, Triticum aestivum
  misc_feature (332)..(332): Xaa can be any naturally occurring amino acid
  misc_feature (385)..(385): Xaa can be any naturally occurring amino acid
MDDDDAGGGGDASPQHEGGGGAVVIERGAGAATGPARDAAAASPTSSRSVTETVNGSHRFVIQGYSLAKGMGVGKHIASETFAVGGYQWAIYFYPDGKNPEDNSAYVSVFIALASEGTDVRALFELTLQDQSGRGKHKVHSHFDRALDAGPYTLKYRGSMWGYKRFFRRTALETSDFLKDDCLKINCTVGVVTSTMEYSRPHSLEVPDSDIGHHFGTLLESQEGADVIFSVAGEKFHAHKLVLAARSSFFRSEFLDPESDEENSEVDTSNEIKEIVIDDMEPKVFQAVLHFMYRDNLVGDDELSASSSDCPIFDTLAGKLLAVADKYELPRXLRVLCESYLCKQISVKSVATTLALADRHHATELKSVCLKFAAENLSDALMYLXAVIRTDGFDYLKDNCPALQSEILRTVAGCEEECSSGGKSQSVWGQISDGGDTSGRRVRPRV

SEQ ID NO: 6740 - protein, 520 aa, Debaryomyces hansenii CBS767
MLRNSASNIVKATYTRRLYSTYDSSSKVLSSLKNKDLIRTQGYINGQWVASSDNSTFEVNNPALASGAGTKIADVSSMTTKDYVRAINSAQDAFSDFKKTTGRYRSDLLMNLYRLMQENQDDLAKLIVLENGKPYADAFGEVAYASSFFQWFAEEAPRVYGDIIPSALADSKILVMRQPIGVCGILTPWNFPAAMITRKLGAAAATGCTTVIKPASETPLSALALAYLAEQAGFPKGSVNVLPSSDAAGVGKLMCENPTIKKVSFTGSTNVGKLLMSQSSSTLKKLSMELGGNSPFIVFNDADIDKAVDGAIGSKFRSSGQTCICTNRLFVHESIYDEFASKLTKKLSETVKLGNGLADGTTHGPLIHGKSMNKVRSHIEDATSKGAKVLLGGNKREDLGVNFHELTVLGGVTQEMDIFNEETFGPVAPLIKFKSDEEVISLANDTDVGLAGYFYSSNINRVFKVAEELQVGMIGANTGAISESALPFGGVKESGFGREGSKYGIDDYTVVKSVVLGGLD

SEQ ID NO: 6741 - protein, 456 aa, Photobacterium sp. SKA34
MDKATTHLDSLTVAKFGGTSVADYSAMSRSAAIVTANPETKIVLISACSGVTNILVELANGVSDSTTRQQRIQTLTQTHQDVLEQLQHPENIQDAIYGLLDNIATLAEHAASATSAQLTDQIVSHGELLSTHLFSQILVELNAPAVRVDIRPIMRTDDQFGKAIPQPDTIKQLATEQLLPLLDNNIVVSQGFIGSNSQGVTTTLGRGGSDYSAALIAEAVNASTLEIWTDVPGLYTTDPRITSAAKPIKEISFSEASEMANFGAKILHPSTLVPAVRQQIPVFVGSSKAPAQGGTWIRQSVEDAPLFRALALRANQTMVTLTSLNMFHAYGFLAEVFRILAEHKISVDLITTSEVSVSLTLDQTDTGGGAPTLPLQVVEELSQLCVVDVEQGLSLVALIGNQMSDTKGSAKDIFGALEDHNLRMICYGASPHNLCFLINEDEAKDVVRTLHASLLE

SEQ ID NO: 6742 - protein, 249 aa, Mycobacterium sp. KMS
MLIITINRPEARNAVNASVSIGVGDALQAAQEDPEIRAVILTGAGDKSFCAGADLKAISRGENLFHPEHSEWGFAGYVRHFIDKPTIAAVNGTALGGGTELALASDLVVAEERAKFGLPEVKRGLIAGAGGVFRIVEQLPRKVALELIYTGEPISAADALRWGLINDVVPDGTVVDAALKLAERITCNAPLAVQASKRVSYGAVDGVVGSDEPFWKQTFSEFSTLLKTEDAMEGPLAFAQKREPVWKAK

SEQ ID NO: 6743 - protein, 315 aa, Magnaporthe grisea 70-15
MTAFGSETTAEEVVSAFSSNVKGRTFLITGASANGLGAYMATSLARASPQALILIARSEVKVAPVIEEIASIDPAIRAIFVPVDLTDQESVRAAAATILDDRDMTKIDVVINCAGIMYVEEFTTDAKGNELQFSANHVGHFLLTNLLMPKILAAGEGARIVNITSHGHQLSDVWWSDPTFNKGKDYHGWSGYGQSKTANILFSVELARRLKDRGVVSLAGTGLFQHVPMERLDEGDMISRKNTGLPFGLDLPWKTSSQGSSSGLAAALDPELAAHSGSYIQNCQVGTPRQYALDGEKAKKLWIMTEELVGQKFDL

SEQ ID NO: 6744 - protein, 432 aa, Bacillus cereus G9241
MSAAMQIVRNDENANVVTLEKGEIYSYAQCGLPYVISGAIASTEKLIARNVKTFRDKYGIDAKVRHEVTKVDTEKKIVYAEHTKTKDVFEFSYDRLLIATGVRPVMPEWEGRDLQGVHLLKTIPDAERILKTLETNKVEDVTIIGGGAIGLEMAETFVELGKKVRMIERNDHIGTIYDADMAEYIHKEADKHHIEILTNENVKAFKGNERVEAVETDKGTYKADFVLVSVGVQPNTDFLEGTNIRTNHKGAIEVNAYMQTNVQDVYAAGDCATHYHVIKEIHDHIPIGTTANKQGRLAGLNMLDKRRAFKGTLGTGIIKFMDLTLARTGLNEKEANGLHIPYKTVKVDSTNMAGYYPNAKPLYLKLLYRSDTKQLLGGQVIGEEGVDKRIDVIAMALFNKMSIHDLEDVDLSYAPPYNSVWDPIQQAARRAE

SEQ ID NO: 6745 - protein, 395 aa, Geobacillus stearothermophilus
MTLKNRSILMASIIITIYITGVIQKATAQNGAITSQTIWCTWTDEGVAIPKYTNPDGDIWTGSVVVDKENTAGFGKNALVAIVTQPSAKDKKQEQYLWYSTDKGKSFKFYSGNPVMPNPGTDDFRDPKVIWDDQDNKWVMVMAEGSKIGFYESDNLKDWHYTSGFFPEQTGMVECPDLYMMRASDGTNKWVLGASANGKPWGKPNTYAYWTGSFDGKEFKADQTEAQWLDYGFDWYGGVTFEDSKSTDPLEKRYALAWMNNWDYANNTPTMKNGFNGTDSVIREIRLKEQDGTYSLVSQPIEALEQLTVSTDEIEDQDVNGSKTLSITGDTYQLDTDLSWSELKNAGVRLRDQKTKNAILMSVFSLKTAMLMSIEQPQISLTKAIPMSKAKLLMM

SEQ ID NO: 6746 - protein, 227 aa, Mesoplasma florum L1
MNNKKVAVSIYVFNFLEIGKKIDELIEAGMEWIHVDIMDGNFVNNYALCQKFCKDIKDKYPKIKVDAHMMCSNSEKYIESFAEAGCDYFIFHYETLTDKNPITVNNIINKIKSYNMKPIIALNPETSFEHIKTYCDDLYAVMCMNILPGFNGQKIIESSYSKINIINKYRKENNKVFKIMTDGGLREDTYKEILDAGADIVVVGAFVNVENNKLKGQFEKIKNYEIK

SEQ ID NO: 6747 - protein, 335 aa, Chlamydophila caviae GPIC
MKVVINGFGRIGRLVLRQVLKRNSSVDVVAVNDLVPGEALTYLFKYDSTHGRFPADVSYDNGYLVVDGRRIQLLDQRDVQKLPWKDLGVDVVIESTGLFTKKEDAAKHLDSGAKRVLITAPAKGDVPTFVMGVNENAFDPEKDTIISNASCTTNCLAPLAKVLLDNFGIEEGLMTTVHAATATQSVVDGPSKKDWRGGRGAFQNIVPASTGAAKAVALCLPELKNKLTGMAFRVPVADVSVVDLTVRLQKSTTYEEICKAIKNASETNLRGILGYTDQEVVSSDFIGCEYSSIFDAGAGIALTDRFFKLVAWYDNEIGYATRIVDLLEYVAKNSK

SEQ ID NO: 6748 - protein, 277 aa, Brassica napus
  misc_feature (7)..(7): Xaa can be any naturally occurring amino acid
  misc_feature (39)..(40): Xaa can be any naturally occurring amino acid
  misc_feature (42)..(42): Xaa can be any naturally occurring amino acid
  misc_feature (72)..(72): Xaa can be any naturally occurring amino acid
MRREDDXEKVKDKSEPLLLPENGSDVSEEEGASWMVCLXXFXAVCGSYEFGTCVGYSAPTQFGIMEELNLSXSQFSVFGSILNVGAVLGAITSGKISDFIGRNGAMRLSSVISAIGWMIIYFSKGDIPLDFGRFLTGYGCGTLSYVVPVFIAEISPRKLRGALATLNQLFLVIGLASMFLIGAVVNWRALALTGVVPCVILFFGTWFIPESPRWLEMVGRHRDFEIALQKLRGPNANIAREADEIKEYLATIAHLPKTTLLDLIDKKNIRFVLVGVG

SEQ ID NO: 6749 - protein, 121 aa, Mannheimia succiniciproducens MBEL55E
MIVGASNIVGRPMAMELLLAGCTVTVTHRFTTNLEGYVRQADILVVAVGKAEFIPGNWVKEGAVVIDVGINRCEDGKLRGDVEFAAAAEKAGFITPVPGGVGPMTVAMLMFNTLTAYENNG

SEQ ID NO: 6750 - protein, 150 aa, Mannheimia succiniciproducens MBEL55E
MTAQVISGSALAKKVKTEVGQKIEQYVAQGKRAPGLAVILVGADPASQVYVGSKRKSCAEIGINSKSYDLEESTSEAALLTLIDELNNDADIDGILVQLPLPKHIDSTKVIERIAPHKDVDGFHPYNVGRLCQRIPTLRACTPYGIMKLL

SEQ ID NO: 6751 - protein, 231 aa, Zea mays
MAPAPAALSAANALSLLAPARVSSGRWNSLSVSISARRVVSVAPPAAATAQRRLVAPAAATEMAPAASGEEGSKPFVEEMRAVAMKLHTKDQAREGEKEPQAPPVAKWEPSVEGYLRFLVDSKLVFQTLEAIVERAAVPWYAEFRNTGLERSEALKNDLEWFRQQGHTVPEPSAPGTTYASLLEELSEEDPQAFICHFYNVYFAHTAGGRMIGKKVSEKILNIEELEFYKW

SEQ ID NO: 6752 - protein, 275 aa, Oryza sativa
MVVLVVATASDPASIGPAAAFLAMPGWSPGPPIPEGMESFTNGDVRLLKHERSIIAEDDLDNRWKAATGEAVSEVIFLSKHTAVSNRPALTVHPIGVPHLREDETPPQGGRPGWAALPNPRIGPWLRLMQKIAVDQGLVPEFEITLEATHHGPVTNTPTMFVEIGSTEEYWCRHYAAQAIALVLWKGLGLDEGNTVGSWQGNSEKVLLGIGGGHYAPRHMDIVIKDGIWVGHLLSGYSLPMEVSPQGNGKSYSDVGGMWKHSIKRASRAGKRMLS

SEQ ID NO: 6753 - protein, 290 aa, Zea mays
MATGSEASKAAETVVDWHKQDSKRMLHAVYRVGDLDRTIKYYTECFGMKLLRKRDVPDEKYTNAFLGFGPENTNFAVELTYNYGVDKYDIGTGFGHFAIANDDVYKLAENIKSKGGKITREPGPVKGGSTVIAFAQDPDGYMFELIQRADTPEPLCQVMLRVGDLERSIKFYEKALGMKLLRKKDVPDYKYTIAMLGYADEDKTTVLELTYNYGVTEYSKGNAYAQVAIGTNDVYKSAEAVDLATKELGGKILRQPGPLPGINTKIASFVDPDGWKVVLVDNTDFLKELQ

SEQ ID NO: 6754 - protein, 569 aa, Arabidopsis thaliana
MANSKKQAWFFYTTGLPSDIEIEVDDITFHLHKFPLMSKSKKLHQLITEQEQSKVYSHIKLENFPGGSEIFEMVIKISYGFKVDISVSTAVPLRCAAEYLEMTEEYSPENLISKTEKFLSEFVFTNVQESIKALKACESVSSLAESLCITEQCIDSIVFQASSTDPSSFYGWPINNGGIFTVDRKKQSKDSKTELWFEDLTELSFPIFRRVILSMKSSVLSPEIVERSLLTYAKKHIPGISRSSSASSSSSSSSTTIASENQQRELLETITSDLPLTATTTRSLFGLLRAAIILNASENCRKFLEKKIGSNLEKATLDDLLIPSYSYLNETLYDIDLVERLLRRFLENVAVSSSSLTVVGRLIDGVLGEIASDANLKPEQFYNLAVLLPVQARVYDDGLYRAVDIYFKTHSWILEEEKEKICSVMDCRKLTVEGCTHAAQNERLPLRAVVQVLFLEQLQLRQVITGTLLTEEDGDKTVVDLGRWKEAVKENQVLRLDMDTMRTRVNQLEKECLYLKKVIAKIDKESLLKAKHGAGKWSIGKKFGCKFSAQVCGSQEATMVDRRSRRFLS

SEQ ID NO: 6755 - protein, 121 aa, Triticum aestivum
MGGAEEELTAQETALYDRQIRVWGVDAQKRLSKAHVLVCGVNGTTIEFCKNIVLAGVGSLSLMDDHMVTEDDLNSNFLIPHDESVYGGKSRAEVCCESLKDFNPMVRVAVAKGNPSLIDGT

SEQ ID NO: 6756 - protein, 483 aa, Bacillus thuringiensis serovar konkukian str. 97-27
MDKKATFVNVEKKAMYINGEWITLQEQIEVNNPATKEIFATVPKGGVTEAKQAVDAAHEAFKSWSKLTAADRAAKLKKWFTLIDENKEEIAAIMTKEQGKPFAEALGEVNYANSFVEWYAEEGKRVYGEMIPASHPNKRILVMKQPVGVMAAITPWNFPAAMITRKVAPALAAGCTAVVKPASQTPLTALKLAELAHEADIPKGVINIVTGSAKAIADTWMEDGRVRKVSFTGSTEIGKELMASAAQTMKKVSLELGGHAPFIVMNDADLDKAVEAVIGSKFRNAGQTCICTNRVFVQEEVYEAFVEKFEKAVGQLKVGDGFGDGTTVGPLIDENAVSKVQEHIEDAIQKGGTVLYGGQKVAELDGHFMQPTVIGLANDTMLCMNEETFGPVAPVAKFKTVEEVIERANHTPYGLAAYIFTKDISQAFQISEALEYGIIGLNDGLPSVAQAPFGGFKESGIGREGGHFGIEEYLEIKYISLGL

SEQ ID NO: 6757 - protein, 865 aa, Burkholderia sp. 383
MKLIVIGHGMVGHKLLECVAAEAGAAGALQVTVLGEEPRPAYDRVHLSEFFAGKSADDLSLVEPGFFERHPQFDLRLNAQVASIDRAAHTVTLASGETLAYDKLVLATGSRPFVPPMPGHDRDGCFVYRTIEDLEAMQACGTHAKRGVVIGGGLLGLECAKALRDMGLDTHVVEFAPRLMAVQVDDGGGRMLRAKIEALGVTVHTGKNTLEIVDGEEGTHRMAFADGSHLDADMIVFSAGIRARDELARACGLDLGPRGGVAIDDACRTSDADIYAIGECAAWNGMVYGLVAPGYDMARVVAKQLGGDAGSAAEAAFAGADMSTKLKLMGVDVASIGDAHGTTAGSRTYQYADERRQVYKKLVVSDCGKFLHGAVMVGDAAEYGTLLQMMLNRIELPESPEFLILPSSDGVAKPAIGVEALPAAAQICSCNNVSKSQICTAVADGATSLGALKTCTGAGTSCGGCVPLVTQIMKAEMKKQGLAVNNHLCEHFPHSRQELFHLIRVERITTFDELLAKHGHGLGCDVCKPAVAGILASCFNEFVLKKEHAGLQDSNDYYLANIQRDGTYSVVPRMPGGEVTPEGLIAVGQVAQKYGLYTKITGGQRVDLFGARVEQLPSIWEELIAAGFESGHAYGKALRTVKSCVGSTWCRYGVDDSVGLAIDLENRYKGLRAPHKIKFGVSGCTRECAEAQGKDVGIIATEKGWNLYVCGNGGMKPRHAELLASDLDRPTLIRYIDRLLMFYVRTADRLQRTSVWRDNLEGGLDYLIDVVVHDKLAIGAELEADMQHVVDTYECEWKKAVTDPETRKRFRHFVNSDAPDTTIEFVETRGQIRPATPGERAGGKPVSIPVVAEGVTQAATEPATV

SEQ ID NO: 6758 - protein, 298 aa, Mesorhizobium sp. BNC1
MVQIIDGKAVAATILEKVTRETQDLKANGVTPGLAVVIVGEDPASQVYVASKGRKATECGFHSVQHSLPENTSEEELVSLVEALNRDPAIHGILVQLPLPKQIDSERIIHTIAPEKDVDGFHILNVGMLGTGAVTKALVPCTPAGAMLLIEGVRGKDLSGLSAVVIGRSNIVGKPMANLLLAANATVTIAHSRTADLPAACRGADILVAAVGRPEMVKGDWIKPGATVIDVGVSRIPAPEKGEGKMKLVGDVAYAEAEKVAGAITPVPGGVGPMTIAMLMANTLAAASKASGRDLPAF

SEQ ID NO: 6759 - protein, 593 aa, Gluconobacter oxydans 621H
MTLSSIPLNERPALVRKACKALGVDGFIIPRGDEYLGEYVAPCAERLAWLTGFTGSAGLAAILPDAAAVFSDGRYTVQMEEQVPHDLWERRHVALEPLSEWLAEHAKGLKIGYDPRLVSRSMLASWQASGVELVPLPRNPIDQAWTDRPAAPAGPVLPQRLEFSGESSADKRRRLGDALRKAGQDAAVIADCTSLAWLLNIRGSDVPLTPVAHGYAILHANGTAEWFVSSDRLSEGVLEVCGLGVTVCSPADLAKRLEALKGRTVRVDPVTTAVWFDTTLAAAGATVVDGTDPCTLPKAIKNTTEQDGARKAHALDGVATARFLHSLTVSGIGQHETDLVTRLDGLRARSGDYREQSFDAISAVGPNGAFPHYRAQVGHDRVLEAGSVYLIDSGGQYPFGTTDITRTLWVGDQEPPAHVREAFTRVLKGNIALSRIRFPPGTTGHRLDVLARAALWQVGMDYDHGTGHGIGSYLSVHEGPQNISPAPRPVALEAGMIVSNEPGYYEPGQYGIRIENLMLVRPSSFKGSKGTFLEFEILSYTPIDYRLIDVALLNDAELNWLNAYHAEVQARVSPHVEPDVAAWLSEVCKPLVR

SEQ ID NO: 6760 - protein, 474 aa, Enterococcus faecalis V583
MKELFEFNNVSFSYKDVKEQALVDLNFSIKKGSLTLITGSSGSGKSTLLKLMNGLIPRLYDGKLVGEILFENNSLQSLTQESISKNIGYVSQDPRGQFFTTNTTSELVFSMENFGFTKEHMDKRINELAELLDLSNILDKNIFSLSSGERQKISIGCSLSLNSKLIILDEPSSNLDFQATKKLADLLCDLKNKGFTIVIAEHRFYYLKELIDQVLFVKNRTVKTTTIQLLKTENNNALRKFDIFNSSIEVPYIEKASADVLKVEEITYENILKDINFDVKVGDVIGLVGKNGVGKTTLLRILMKIIRPTKGKIIENKKNLSSPFLVMQEMDYQFFTESVRSELALGNEIVSKDQQEKILKKMELYKMKDQLPFDLSGGEKQRLLVSIASLSKTNLFLFDEPTSGLDYINMERIADLIKDLKEKGAVVIATHDPEFLYKICNRIIYLKNGGIKKDIKLRVEDSTLIEQIFNDITK

SEQ ID NO: 6761 - protein, 237 aa, Hordeum vulgare subsp. vulgare
MPSRPAPFIHRLRLLRSAVVSPSSAPLPCSRPRLAVPFAQPPIRAPAFAAAGSPLLRPVGARFSLSSNMAAAASSASSVHDFTVEDASGKDVDLSTYKGKVLLIVNVASQCGLTNSNYTELAQLYEKYKDQGFEILAFPCNQFGGQEPGTNEEIVQFACTRFKAEYPIFDKVDVNGDNVAPVYKFLKSSKGSLFGDNIKWNFSKFLVDKDGNVVDRYAPTTSPLSIEKDIKKLLASS

SEQ ID NO: 6762 - protein, 185 aa, Ustilago maydis 521
MSLLRQSTQAFRVATSASSSTRWMNTSSVLRNTAQPNTSPAPAQRTDNQGRDLAAEQLKRHEQAVTADLVSSAPEELHQRSVRIFRPTKTANSSGKAGTKVWRVDFDILQGSARWENPLMGWASSGDYMQGTSLKFRSKEDAIHFCEKQGWDYHVTEPKVARIPPKSYAANYNHIPGKLRIHHTK

SEQ ID NO: 6763 - protein, 300 aa, Bacillus thuringiensis serovar konkukian str. 97-27
MSVLVNKDTKVIVQGITGSQGLFHTKQMIEYGTKIVGGVTPGKGGTDIEGVPVFDTVEDAVKATGANASVVYVPPAFAADAIMEAVDAEIDLVVCITEGIPVLDMVNVKRYMAGKHTRLLGPNCPGVITPDECKIGIMPGYIHKKGHVGIVSRSGTLTYEAVHQLTQEGIGQSTAVGIGGDPVNGTDFIDALKAFNEDEETHAVIMIGEIGGTAEEEAAEWVKANMTKPVVGFIGGQTAPAGKRMGHAGAIISGGKGTAAEKIKTMEACGIKVAETPAVMGETLISVLKEKGLFETCKNY

SEQ ID NO: 6764 - protein, 481 aa, Xanthomonas axonopodis pv. citri str. 306
MFPGEPMSSVSIDGAPDAGENTRFIILISCVATIGGFLFGFDSGVINGTVDGLKQTFQSTAAETGFEVASMLLGCAIGAFFAGRLADRWGRRAVLIISAALFLLSAIGAGASHSSAFFIFARVMGGFAVGAASVISPAYIAEVASARYRGRLATMQQIAIISGLFCAFLSNYLLANAAGASTEPLWAGQAAWRWMFWMQAVPSILFLLLLLVIPESPRYLVVKGRREQALVVLKRLYGNAAAQTKLGEISASMAADQHKPKFSDLINKATGKIRPIVWIGIGLAVFQQLVGINVVFYYGAVLWQAVGFSEQDALLINVLSGGLSIGACLVTVMLVDKIGRKPLLWIGSAGMAVSLALVTYAFATASLDPNGKLAMSDAMGMLALVAANVYVVFFNASWGPVMWVMLGEMFPNQIRGSGLAIAGAAQWTSNFAITVSFPILLGSIGLAGAYGIYTVAAFISVFFVLKYVYETKGKELEQMEG

SEQ ID NO: 6765 - protein, 171 aa, Hordeum vulgare subsp. vulgare
MGAAESSSKLGGSVHDFVVKDVRGNDVELSRYKGKVLLIVNVASRCGLANSNYTEMGQLYEKYREKGLEILAFPCNQFAGQEPDSDEKIVEFACDRFQAQFPIFRKVDVNGNNAAPLYKFLKSERGGLFGERIKWNFTKFLVDKEGHVMNRYAPTWSPLGIENDIKKLLEV

SEQ ID NO: 6766 - protein, 165 aa, Hordeum vulgare subsp. vulgare
MAAASSATSVHDFTVKDASGKDVDLSVYKGKVLLIVNVASQCGLTNSNYTELSQLYPKYKDQGFEILAFPCNQFGGQEPGTNDEIVQFACTRFKAEYPIFDKVDVNGNNVSPLYKFLKSSKGGFFGDSIKWNFSKFLVDKEGHVVDRYAPTTSPMSIEKDIKKLL

SEQ ID NO: 6767 - protein, 380 aa, Synechococcus elongatus PCC 7942
MTIRVAINGFGRIGRNFLRCWFGRQNTDLEVVAINNTSDARTAAHLLEYDSVLGRFNADISYDENSITVNGKTMKIVCDRNPLNLPWKEWDIDLVIESTGVFVTAEGASKHIQAGAKKVLITAPGKAEGVGTYVIGVNDSEYRHEDFAVISNASCTTNCLAPVAKVLHDNFGIIKGTMTTTHSYTLDQRILDASHRDLRRARAAAVNIVPTTTGAAKAVALVIPELKGKLNGIALRVPTPNVSVVDLVVQVEKPTITEQVNEVLQKASQTTMKGIIKYSDLPLVSSDFRGTDESSIVDSSLTLVMDGDLVKVIAWYDNEWGYSQRVVDLAELAARKSGRLGLVQTLLISSQDSLPLTGGFFVAKREHPRSQDSINPSGPD

SEQ ID NO: 6768 - protein, 108 aa, Bacillus cereus ATCC 10987
MLKEINLTELEQQISVISKPILLKFTAEWCPGCRQLAPVVESVSEQFGNQIVFFDVNVDKEIDLAKKFGVMSIPTLVLLKNGKEVDRVTAPAPNEDVIVSFIKNNYNA

SEQ ID NO: 6769 - protein, 291 aa, Streptomyces echinatus
MSPTNRTVVVTGIGATTPLGGDAASFWEALVAGTPGVSLLEQEWAADLPVRIAAQIAVEPGEVLPRPQARKLDRSAQFALIAAQEAWKDAGFTAKAGEDASVNPDRLGAVIASGIGGVTTLLDQYDVLKEKGVRRVSPHTVPMLMPNSPAANVGIELGARAGVHTPVSACASGAEAIGYAIEMIRTGRADVVVAGGTEAAIHPLPIAAFGNMMAMSKNNDDPQGASRPYDADRNGFVLGEGAGVIVLESEEHAKARGARVYAEAVGQGISADGHHITQPEPSGNGIAHALQ

SEQ ID NO: 6770 - protein, 418 aa, Yarrowia lipolytica CLIB122
MILEHHVNHQVAVDLDSAEAFEGPEKLLEVWFAPNQESLEGTNKSLRNVSTAQWEQLLNIVQCKVLSSVHTSVLDAFVLSESSMFVFPHKLVLKTCGTTTLLVGIPKMLEIARTIAGFGANATPYRVFYSHKTFNCPEKQAPPHKSWKDEVSYLDSQFDNGKAYLVGDTTSDHHWYCYVTGHDDHEEVAAHKDHVISSHDETMEILMTDLLPSRAQQFFTDRLPGDANNAGFQHKQELLVGVEHVVKAETDSATSSDSEGATPACSGTCKADPGHVLGAYVSTQSGIADIYPRNKASVAVDSFCFTPCGYSANAIVDSGYYYTIHVTPEQHCSYASFETNVPAKEYGMSNIDVIEKVLNVFRPGKLSVTLFEAENNSLQDCHQFARHLDGYKRTDKVLYEFDGYQMVYVCFEAIKGRK

SEQ ID NO: 6771 - protein, 479 aa, Pyrococcus abyssi GE5
MCLIAGGFNVSREDAIKIINLGKHRGPDSFGFWSERQMLKSDNFSDVSEIEGGEIALIQCRLAMTGSKSYTQPFYNEIILVHNGEIYNHESLRKYLIERGVAFETDVDSEVILRLLEYLVFDRKLKVEEAIKLSMKMLRGDYAVAFFFNGKFYLFRDPLGVRPLYYSSRGHFASEKKVLWGLGEDAEPVLPGEIVSISKHGITRVRGFNVFSIRTQGKDYFNGLQNLLIDSVKVRASKKVGVLFSGGVDSSLIALIASRYSDVILYTSGTEDSKDVEWARRVAEELGLKLRESLFSREDIENEIERIMFAIEEPNPMNLAIAIPLYFSTKRAREDGVKVLLSGQGADELFGGYAKYLQNPGLMLKDVEELGERNLARDDKVAMLNGVETRYPYLDLPFAILALNVPLELKIRDGKRKFILREIAKSLGLPEWVAEREKKAAQYGSNAQKILEKIAKSRGVKLKGLADILFSKVFHGIQN

SEQ ID NO: 6772 - protein, 419 aa, Bacillus cereus G9241
MIEIKVPELAESITEGTISQWLINVGDKVEKGGSVVELETDKVNVEIIAEDSGIVSKLLGEPGDTVEVGATIAILDANGAPVAVSTPAPAAEQPKQETAEAPKAAAPSAEQAATLQGLPNTNRPIASPAARKMARELGIDLNDVRSTDPLGRVRPHDVQAHAAAPKEAPAAPKSPAPASVAKTEFEKPVERVKMSRRRQTIAKRLVEVQQTSAMLTTFNEVDMTAIMELRKERKDAFEKKHDVRLGFMSFFTKAVVAALKQFPLLNAEIQGDELIIKKFYDIGIAVAAPDGLVVPVVRDANQLNFAEIESEIRELGKKARDNKLSLKELQGGTFTITNGGVFGSLMSTPILNSPQVGILGMHKIQVRPVAIDNERMENRPMMYIALSYDHRIVDGKEAVSFLVAVKDMLEDPKSLLLEG

SEQ ID NO: 6773 - protein, 554 aa, Rhodospirillum rubrum ATCC 11170
MEQMSILVIGGVAAGASFAARARRLSETARITVLERGPDVSFANCGLPYHIGGEIPDRGALAVQSAASLKGLLNLDVRVQTEAVAIDPKGKRVEVRDLASGQSAWLPYDKLMLAPGASPLRPPLPGIDDPRIFTLRNLQDMDRIIAATAPGQRAVVIGAGFIGLEMAEQLHRKGLGVDLVELQSQVLPPLDPPMAALVESELRRHDIGLHLGDAIARFESLGARLRCHLASDKTLDADIVILSIGVKPESDLARAAGLELGAKGHIVVDSFQRTSDPDIYAAGDGVETVDRILGGKTAVPMGGPANRQGRVAADHIFLADKARPYPGSVGTGIVRAFDAVVGITGWSEKRLAAAGHPYETVTVNDSHHASYYPGAKPMTLKILWEPDSGRLLGAQVSGSEGVDKRLDILSTAIIAGMTVEDLCHLELAYAPPFGSAKDLVNLAGFAACNRRDGLVSHTTELPTDPQVQVIDVRGKPLAEAYPAPGTTINIPFPTLRAHLDTLDKTRPVVTLCAFGKMSYFAARVLSQHGFTVKSFSGGLKANVDPRTPGKLPGA

SEQ ID NO: 6774 - protein, 416 aa, Mycobacterium tuberculosis CDC1551
MSQPSTANGGFPSVVVTAVTATTSISPDIESTWKGLLAGESGIHALEDEFVTKWDLAVKIGGHLKDPVDSHMGRLDMRRMSYVQRMGKLLGGQLWESAGSPEVDPDRFAVVVGTGLGGAERIVESYDLMNAGGPRKVSPLAVQMIMPNGAAAVIGLQLGARAGVMTPVSACSSGSEAIAHAWRQIVMGDADVAVCGGVEGPIEALPIAAFSMMRAMSTRNDEPERASRPFDKDRDGFVFGEAGALMLIETEEHAKARGAKPLARLLGAGITSDAFHMVAPAADGVRAGRAMTRSLELAGLSPADIDHVNAHGTATPIGDAAEANAIRVAGCDQAAVYAPKSALGHSIGAVGALESVLTVLTLRDGVIPPTLNYETPDPEIDLDVVAGEPRYGDYRYAVNNSFGFGGHNVALAFGRY

SEQ ID NO: 6775 - protein, 266 aa, Burkholderia sp. 383
MTSSGSFSSLTGDDAPSILRNDDNGIAWLTIHRPHVANALSAEAIRRLCDELVTLDDNPSIRVIVIRGAGDRAFSAGVDLGDPEMRGMQPMRGLARNVHELILELRKPTIAAINGYAIGGGFEIALACDLRIAADHATFALPEARVGMGANFASVLLPRMLPRAIAMELLFTGRRFDADEAQRAGLLNRVVPGAALDDTVRDLAQTIAGNAPLTIRRIKETAARSQGLPVAAALRLDVGPDVYASEDRIEGARAFLEKRKPVFKGR

SEQ ID NO: 6776 - protein, 417 aa, Mycobacterium tuberculosis CDC1551
MTELVTGKAFPYVVVTGIAMTTALATDAETTWKLLLDRQSGIRTLDDPFVEEFDLPVRIGGHLLEEFDHQLTRIELRRMGYLQRMSTVLSRRLWENAGSPEVDTNRLMVSIGTGLGSAEELVFSYDDMRARGMKAVSPLTVQKYMPNGAAAAVGLERHAKAGVMTPVSACASGAEAIARAWQQIVLGEADAAICGGVETRIEAVPIAGFAQMRIVMSTNNDDPAGACRPFDRDRDGFVFGEGGALLLIETEEHAKARGANILARIMGASITSDGFHMVAPDPNGERAGHAITRAIQLAGLAPGDIDHVNAHATGTQVGDLAEGRAINNALGGNRPAVYAPKSALGHSVGAVGAVESILTVLALRDQVIPPTLNLVNLDPEIDLDVVAGEPRPGNYRYAINNSFGFGGHNVAIAFGRY

SEQ ID NO: 6777 - protein, 116 aa, Triticum aestivum
  misc_feature (9)..(9): Xaa can be any naturally occurring amino acid
MARGAATQXLVLVAMVAAMLLVACDAAISCGQVTSALSPCISYARGNGANPPAACCSGVRSLAGAAQSTADKQAACKCIKSAAGGLNAGKAAGIPSKCGVSVPYAISSSVDCSKIR

SEQ ID NO: 6778 - protein, 442 aa, Mesoplasma florum L1
MKTVIIGGSATGMGVAAKLKRLNEQNEIVVIQDKDYVSLGACGIPYYIGHNFENPETLIARKIEKFEESQISVISNSKVNKIDFENKKVIFEESQISYDNLVIAVGAKPITPEIKNIDAKNIFTVNSKEDAIEIRKTINDDSNVLIIGSGLIGLEMVENIKHSTAAKISIIEKADRVLKNLFDEEFSELVEKEILNQEIELFKNNEVIEFVKDNNGKVTGAKTINGEIIKCDVVILSIGVIPNTSFLRDTDLELENNGAIKINEYCETNIPNVYAGGDCCSSLSYLYKNTRTFYLATVANKQAKIIANNVNKNKSSKFVGALGTTIIRFFDLELARTGENRMFIDMNSIETKEVLIKDKDHTNYVTGQEDIWLKVIIDVKTKEIINVQMIGKNKSVLRIYGLVGLIWSRSKVDETLEQIDLPYSPPFSRTTDIIHIALSKLI

SEQ ID NO: 6779 - protein, 928 aa, Staphylococcus aureus subsp. aureus MSSA476
MNMKKKEKHAIRKKSIGVASVLVGTLIGFGLLSSKEADASENSVTQSDSASNESKSNDSSSVSAAPKTDDTNVSDTKTSSNTNNGETSVAQNPAQQETTQSALTNATTEETPVTGEATTATNQANTPATTQSSNTNAEELVNQTSNETTSNDTNTVSSVNSPQNSTNAENVSTTQDTSTEATPSNNESAPQSTDASNKDVVNQAVNTSAPRMRAFSLSAVAADAPAAGKDITNQLTNVTVGIDSGDTVYPHQAGYVKLNYGFSVPNSAVKGDTFKITVPKELNLNGVTSTAKVPPIMAGDQVLANGVIDSDGNVIYTFTDYVDTKENVTANITMPAYIDPENVTKTGNVTLTTGIGSTTANKTVLVDYEKYGKFYNLSIKGTIDQIDKTNNTYRQTIYVNPSGDNVIAPVLTGNLKPNTDSNALIDQQNTSIKVYKVDNAADLSESYFVNPENFEDVTNSVNITFPNPNQYKVEFNTPDDQITTPYIVVVNGHIDPNSKGDLALRSTLYGYDSRFVWRSMSWDNEVAFNNGSGSGDGIDKPVVPEQPDEPGEIEPIPEDSDSDPGSDSGSDSNSDSGSDSGSDSTSDSGSDSASDSDSASDSDSASDSDSASDSDSASDSDSASDSDSASDSDSASDSDSASDSDSDNDSDSDSDSDSDSDSDSDSDSDSDSDSDSDSDSDSDSDSDSDSDSDSDSDSDSDSDSDSDSDSDSDSDSDSDSDSDSDSDSDSNSDSDSDSDSDSDSDSDSDSDSDSDSDSDSDSDSDSASDSDSDSDSDSDSDSDSDSDSDSDSDSDSDSDSDSDSDSESDSDSESDSDSDSDSDSDSDSDSDSASDSDSGSDSDSSSDSDSESDSNSDSESGSNNNVVPPNSPKNGTNASNKNEAKDSKEPLPDTGSEDEANTSLIWGLLASIGSLLLFRRKKENKDKK

SEQ ID NO: 6780 - protein, 586 aa, Dendrocalamopsis oldhamii
MRVLGRVAWAWLVLLLLQLAGASHVVYQNLETEAAAVETVPPSIVDSQLRTGYHFQPLKNWINDPNAPMYYKGWYHLFYQYNPKGAVWGNIVWAHSVSRDLINWVSLKPAIEPSIKSDKYGCWSGSATMTLDGTPAIMYTGVNRPDVNYQVQNVAFPKNKSDPLLQEWDKPGHNPVIVPEGGINATQFRDPTTAWHADGHWRLLVGSVVTGGSRGVAYVYRSRDFRLWTRVRRPLHSAPTGMWECPDFYPVTADGRQHGLDTSVMANDKRPVKHVLKNSLDLRRYDYYTVGTYDREAERFVPDDPAGDEHHLRYDYGNFYASKTFYDPAKRRRILWGWANESDTAVDDVAKGWAGIQAIPRKVWLDPSGKQLVQWPIEEVESLRGKRPVSLKDRVVRPGEHVEVTGLQTAQADVEVSFEVPSLEGAEALDEALAYDAQKLCSVRGADVKGGVGPFGLWVLASAKLEERTAVFFRVFRAARGSNKPVVLMCTDPTKSSRNPNLYQPTFAGFVDTDITNGKISLRSLIDRSVVESFGAGGKTCILSRVYPSLAIGKNAHLYVFNNGKADIKVTQLTAWEMKKPLMNGA

SEQ ID NO: 6781 - protein, 135 aa, Yersinia pseudotuberculosis IP 32953
MRLLHTMLRVGDLQRSIDFYTKVLGMRLLRTSENTEYKYSLAFVGYSDESKGSVIELTYNWGVDQYDMGTAFGHLALGVDDVAATCDQIRQAGGKVTREAGPVKGGNTIIAFVEDPDGYKIELIENKSAGDGLGN

SEQ ID NO: 6782 - protein, 576 aa, Dendrocalamopsis oldhamii
MGAQQWALGPWALLLLVQLAGASHVVHRSLEAAAAPASVPASIVSPLLRTGYHFQPPMNWINDPNGPMYYKGWYHLFYQYNPKGAVWGNIVWAHSVSRDLINWIALEAAIKPDIPSDQYGCWSGSATILPDGTPAIVYTGIDRPDINYQVQNIAFPKDKSDPLLREWVKPGYNPIIVPEPGMNVTQFRDPTTAWFADGHWRMLIGGLRDTRGMAYVYRSRDFRHWVRAKHPLHSALTGMWECPDFFPVPKSGQNGLDTSEFGDKVKYVLKSSLDLTRYDYYTIGTYNNKTERYVPDDPNGDYHRLRYDYGNFYASKTFFDPAKRRRVLLGWANESDSVPDDKAKGWAGIHAIPRKIWLDPSGKQLLQWPIEEVEQLRGKPVSVGDKVVKSGEHFEVTGLGSYQADVEVSFEVSSLDKAEPFDPAFSNDAQKLCGIKGADEKGGVGPFGLWVLASANLEEKTAVFFRVFKDGYGKHVVLMCTDPTKSSLSPDLYKPTFAGFVDTDISSGKISLRSLIDRSVVESFGARGKTCILSRVYPSIAIGQNAHLYVFNNGEADIKVSHLTAWEMKKPLMNGA

SEQ ID NO: 6783 - protein, 351 aa, Aspergillus nidulans FGSC A4
MHKIASIPGDGIGPEVVSATIQVVNKLASKLGFQIEFTHLPWGTKYYKEHGQFMSDDALDILRKFDAGLFGAVGDPDVPDHISLWGLLLKIRSPLQLYANVRPVRTFPGTKSPLTTAKNGIDWVLVRENSEGEYCGQGGRSHIGHPWEAATEVAVFTRVAIERIMRFAFETARSRPRKKLTVVTKSNAMRHGMVLWDEVAAEVAKDFPDVDWDKMLVDAITIRMVAEPDSLDTIVGTNLHMDILSDLAAGLAGSIGVAPSSNLDPTRKNPSLFEPVHGSAFDITGKGVANPVATFWSSAEMLSWLGEKDAADKLMGCVERVCEAGILTADLGGNAKTQDVVDAVCAEIDRL

SEQ ID NO: 6784 - protein, 357 aa, Xylella fastidiosa Temecula1
MSKKILILPGDGIGHEIVAEAVKVLEHVNVRHTLNMRLSFDALGGAAYEKYGSPLADETLARAREADAVLLGAVGGPQWDTIDPALRPERGLLKIRAQLGLFANLRPALLYPQLADASTLKPEVVAGLDILIVRELTGGLYFGQPRGSRISKNGEREAFDTLPYCESEIRRILKVGFEMARLRGKKLCSVDKANVLASSQLWRTVAGEMAKDYPDVTLSHMYVDNAAMQLVRYPKQFDVIVTENMFGDILSDQASMLTGSIGMLPSASLDANNKGMYEPCHGSAPDIAGQGVANPLATILSVAMLLRYGMGYIKTADAIEYAVGVVLDSGLRTADIWSEGMTKVGTVAMGDAVVAAL

SEQ ID NO: 6785 - protein, 462 aa, Lotus japonicus
MNSIALKSFVGLRQSSPEAPHFSVQLKPNAPRRNFKVLAGKFSPKLQGRNLRVAVVGGGPAGGAAAETLSKAGIETFLIERKMDNCKPCGGAIPLCMVGEFDLPLDIIDRRVTKMKMISPSNVAVDIGRTLKPHEYIGMVRREVLDAYLRDRAKQNGAEIINGLFLKMDVPVDKVTPYVLHYTAYDGKTGGLGEKRTLEVDAVIGADGANSRVAKSIDAGDYEYAIAFQERIKIPDDKMAYYEDLAEMYVGDDVSPDFYGWVFPKCDHVAVGTGTVTHKGDIKKFQLATRKRAEDKILGGKIIRVEAHPIPEHPRPRRLKGRVALVGDAAGYVTKCSGEGIYFAAKSGRMCAEAIVEGSENGKRLVEEGDLRKYLEKWDKTYWPTYKVLDVLQKVFYRSDPAREAFVEMCADEYVQKMTFDSYLYKTVAPGNPLQDIKLAINTIGSLVRANALKREMEKLNV

SEQ ID NO: 6786 - protein, 544 aa, Nitrosomonas europaea ATCC 19718
MSTLTRSPAWLALSAHQTEIANRPLRTLFDEDPQRFDKFSLQFKDLLLDYSKQPVDATTIRLLLALAEQQKLVDWLGRMANGEKINFTESRAALHIALRANSPVFMDGVDVTQEVRRVLRQIEQFVQKIHNQSHRGYSGLPITDVVNIGIGGSDLGPVMVTEALKPYHLPQLRTHFVSNLDGAHLSDTLQHINPATTLFVIASKTFTTQETLANAHSARKWFLAGGGSKQDIAAHFVAVSTNREAVSQFGIDPDNMFEFWDWVGGRYSLWSAIGLPIALAVGMEHFHSLLAGAQAMDDHFLTAPFEQNLPVILGLIGIWQINFFHITSQAILPYDQSMHRFPAYLQQLEMESNGKRVTRNGEAVDYSTGIIIWGEPGTNGQHAFYQLLHQGTQKFTADFLAPCRCHHPLSEHHPMLLANFFAQTEALMRGKTEQEVRSELANQNLSADLVEHLLPHRVFPGNHATTSILFKKLDPATLGMLIALYEHKVFVQSVIWEINPFDQWGVELGKQLAGKILAELALDKPVTGHDASTNGLINFYRAQQ

SEQ ID NO: 6787 - protein, 439 aa, Coccidioides immitis RS
MSNISRSLNVLLRTSRISLQRPRAVNPVQHVFARDRLVARGMATAFERTKPHVNVGTIGHVDHGKTTLTAAITKRQAEKGMASFLEYGAIDRAPEERKRGITISSSHIEYQTDNRHYAHVDCPGHADYIKNMITGAANMDGAVVVVAASDGQMPQTREHLLLARQIGIQKIVVFVNKVDAIEDKEMLELVELEMRELLTSYGFEGEETPIIFGSALCALEGRQPEIGVTKIDELLQAVDTWIPTPQRETDKPFLMSIEEVFSISGRGTVVSGRVERGILKKDSEVEIVGGSPEPIKTKVTDIETFKKSCDESRAGDNSGLLLRGVKREDISRGMVVAVPGSVKAHTEFLVSLYVLTEAEGGRKSGFSSKYRPQMFIRTADEAAQLSWPGEDQDKMAMPGDNIEMICTTLHPVAAEAGQRFNIREGGRTVATGLVTRVIK

SEQ ID NO: 6788 - protein, 483 aa, Sulfolobus tokodaii str. 7
MKVSKEKWEKNFSEWLDWVLREAEIYDYGRYPVKGMGVWMPYGFKIRQNVLQLIRKLLDETGHEEVLFPLLIPEDLLKKESEHIRGFEEEVYWVTKGGSQDLDVKLALRPTSETSITFMESFWVKSYKQLPKKYYQIVSVFRYETKATRPMMRLREITTFKEAHTLHETYEDAARQVDEAINIYKAFFDELGIPYMISKRPEWDKFAGAEYTIAFDTILPDSRVLQIGTVHHLGQHFTKAFDFKIQRKDGSLDYPHQTSYGISDRVIAVLIAINGDDHGPVLNPVIAPIKVVIVPIPAKDEETTAKIINYAKEVGENLKNRGITVVIDDDKEKTPGEKFYIWELKGVPLRIEIGPKELNNNTVYIKRRDTFEGKSVPKDKAVEEVNTLLEKIKNDLHEKALKFLKERIIYTEDLNEAKKILEERAGVVEVPWCGDNNCGLQLQDVTNARVLGIPLDEDKDVSNAKCVMCKKPAKSLLRLAKTY

SEQ ID NO: 6789 - protein, 214 aa, Triticum aestivum
  misc_feature (63)..(63): Xaa can be any naturally occurring amino acid
  misc_feature (76)..(76): Xaa can be any naturally occurring amino acid
  misc_feature (112)..(112): Xaa can be any naturally occurring amino acid
MESPPEPQCPGKTMRRESLGVNKLIRALFYFIWGGPLWEKNIGLFEPMPRGPLPEGIANKDFXPRRSKSLLRNIRXGQGIGQREYADFPLPIALAENSGRCKTYENGAKILXPDGTPWIPNLMKEITIVVSNGSQSIHVDQKLIDGPNPNNRWKKYIPLILAVQYFFVVKGIRRAIHSDISNGKLDDWEQRYRDLVGSGNPVDQKVSSSRNPKA

SEQ ID NO: 6790 - protein, 481 aa, Ralstonia eutropha JMP134
MNVFLNHIDGEWTACQSGRTFDNVNPADTGDIVGRFQASSAVDAQAAVAAAAAAFAGWKKTPVGKRAAVLNRAADHLEANADSIAAELTREEGKALTLARDEVLRSAQTLRFYAVEGQTFTGEVFPNDDPDQLVFSQREPLGVVTVIAPWNFPVSIPARKIAPALVTGNTVVFKPSSEAPLSGYRLAEALIKAGLPKGVLNFITGSAAEIGAAITEAPVVRAISFTGSSRAGEQIHRAVPLTTRTQMELGGKNPLIVMEDADLDRAVDLTIKGGFSLSGQACTGTSRVLVAESVKAAYTERLLAKVATLKVGSGMTAGMDLGPLASQKQMETVLRYIDIGKSEATLLCGGERLTGGEFDKGYYVAPTVFTDVTQQMRIAREEIFGPVIAILGFTDYADAIAKANDTEYGLAAAIVTSNPRYIHHFANDIEAGTVKINRTTTGNLVNAPFGGLKRSSTSTFRESGRTGLEFYTQIKTVYRGA

SEQ ID NO: 6791 - protein, 331 aa, Glycine max
  misc_feature (151)..(151): Xaa can be any naturally occurring amino acid
MVSWNRLRLGMDGDGEELTAQETALYDRQIRVWGADAQRRLSKSHVLVYGMKGTVAEFCKNIVLAGVGSLTLVDDRVATEEVLSSNFLIPPDENAYSGKTLGELCCNSLKDFNPMVRVSIEKGDLSSFDVEFFSKFDVVVVSCCSLSAKKXANDKCRKLSKRVAFYAVDCRDSCGEIFVDLQDYKYSKKKQDETVKCDLKYPSFEDALSVPWRALHRRMSKLYYAMRVIEKFEEAEGRSAGEVSIADLSGVLKLKKEICTAQSLNESHVPDTLLERLVTNAIEFPPVCAIIGGILGQEVIKAISGKGDPLKNFFFFDAFDGKGIIEDLSPK

SEQ ID NO: 6792 - protein, 155 aa, Glycine max
  misc_feature (148)..(149): Xaa can be any naturally occurring amino acid
MASQITREWSGINTFAPATQTKLLELLGKLKQENVNSLTILVMGKGGVGKSSTVNSIIGDRVVSINPFQSEGPRPVIVSRSRAGFTLNIIDTPGLIEGGYINDMALDIIKRFLLNKTIDVLLYVDRLDVYRVDNLDKVVAKAITDSFXXGIWSKT

SEQ ID NO: 6793 - protein, 95 aa, Yersinia pseudotuberculosis IP 32953
MQLNITGHHVEITEALREFVTTKFAKLEQYFDRINQVYVVLSVEKVKQIAEATVHVNGGELHASSEQEDMYAAIDILVDKLARQLNKHKDKLKQH

SEQ ID NO: 6794 - protein, 112 aa, Tolypothrix sp. PCC 7601
MKKVEAIIRPFKLDEVKIALVNAGIVGMTVSEVRGFGRQKGQTERYRGSEYTVEFLQKLKVEIVVEDNQVDMVVDKIIAAARTGEIGDGKIFISPVEQVVRIRTGEKNTEAV

SEQ ID NO: 6795 - protein, 347 aa, Streptomyces coelicolor A3(2)
MSRSLNLAVIPGDGIGQEVVAEGLKVLSAVLPQDVKLETKEFDFGARRYHATGETLTDADLDALKAHDAILLGAIGDPSVPSGVLERGFLLKLRFAFDHHVNLRPSKLLPGVATPLAGQPEIDFVVVREGTEGPYTGNGGTIRKGTEHEVATEVSVNTAYGVERVVRDAFARAQARPRKKLTLVHKNNVLTFAGHLWTNIFNKVAAEYPEVTTDYLHVDAATIFLVTDPARFDVIVTDNLFGDIITDLAAAVSGGIGVAASGNINPSGDFPSMFEPVHGSAPDIAGQGKADPTATVLSVALLLRHLGYEDEAARIEDAVSADLGERGDLPARSTSEIGDTLAARVAG

SEQ ID NO: 6796 - protein, 359 aa, Thermotoga maritima MSB8
MDRSERLIQLISEEGIDAFLIMNIENSARASSVYFSGFTGSFSIILISENTRLLITDSRYTVQAKQETDFEVREVKGGDFIDVLKKTVNDLKIKTIALEEERVSLSLFRRISSAFGDRKFIGIDDEVKQMRMVKDEGEIEKIKQAIEISERAFLETVQQIRAGMTEKEIAALLEYTMRKEGAEGVAFDTIVASGCRSALPHGKASDKVVERGDVIVIDFGATYENYCADITRVVSIGEPSDEVKEVHSIVLEAQERALKIAKAGVTGKLLDSVAREFIREKGYGEFFGHSLGHGIGLEVHEGPAISFRNDSPLPENVVFTVEPGIYLEGKFGIRIEEDVVLKEQGCEILTTLPRSIFVV

SEQ ID NO: 6797 - protein, 184 aa, Blastopirellula marina DSM 3645
MMRVLFSGGVFAAVFALASFASAADTLLEGEVNSLSGEKVDLSKYKGKVVLVVNVASKCGKTPQYKPLQALYEKYHDEGLEVVGFPCNQFGGQEPGTALEIQEFCTDKYNVSFDMMEKINVNGPETAAVYKKLKSFQQDPGDVKWNFEKFLIDRDGKVVARFRTKIEPDSPEVVQAIESQLKKD

SEQ ID NO: 6798 - protein, 275 aa, Oryza sativa (japonica cultivar-group)
MVVLVVATASDPASIGPAAAFLAMPGWSPGPPIPEGMESFTNGDVRLLKHERSIIAEDDLDNRWQAATGEAVSEVIFLSKHTAVSNRPALTVHPIGVPHLREDETPPQGGRPGWAALPNPRIGPWLRLMQKIAVDQGLVPEFEITLEATHHGPVTNTPTMFVEIGSTEEYWCRQDAAQAIALVLWKGLGLDEGNTVGSWQGNSEKVLLGIGGGHYAPRHMDIVIKDGIWVGHLLSGYSLPMEVSPQGNGKSYSDVGGMWKHSIKGASRAGKRMLS

SEQ ID NO: 6799 - protein, 121 aa, Zea mays
  misc_feature (57)..(57): Xaa can be any naturally occurring amino acid
MPHTHSDAEDDEQAAVLLLAAAATTSEAAITCRKVSSDIAPCLSYARDTGSAPSASXCSDVRNLKSDDSTAADRRDACNCLKNAARPASGLNAGNAASIPSECGVSIPYTISTSTDCSRAN

SEQ ID NO: 6800 - protein, 547 aa, Haemophilus ducreyi 35000HP
MRNINPTDTMAWQALVQHKAEHLSIPQLFAENEDRFATYNLSFEDQILVDYSKNAINQKTLTLLRQLAKECDVDGARQAMFSGEKINRTENRAVLHIALRNRANKAIFVDGKDVMPAVNAVLAKMKAFSEKVIKGDWKGYTGKAITDVINIGIGGSDLGPYMVTEALRPYKNHLNMHFVSNVDGTHIAEVLRKVNPETTLVLVASKTFTTQETMTNAFSAREWLLADAKDQSAVAKHFVALSTNSETVAKFGIDTENMFEFWDWVGGRYSLWSAIGLSIVLSIGFANFEQLLEGAYAMDKHFYHTADEQNIPLTLALVSIWNNNFLGAQTEAILPYDQYLHRFAAYFQQGNMESNGKYIGRDGKAVNYQTGPIIWGEPGTNGQHAFYQLIHQGTTLIPCDFIAPAQTHNPLSDHHNKLLSNFFAQTEALAFGKSKAQVELEFTQQGKSLDEVKDIVPFKVFTGNKPTNSILLKKVTPYSLGALIAMYEHKIFVQGVLFNIYSFDQWGVELGKQLANRILPELEDDQPVVSHDSSTNGLINQFKAWRE

SEQ ID NO: 6801 - protein, 157 aa, Kluyveromyces lactis NRRL Y-1140
MAEEEHTFETAGAGASLTFPMQCSALRKNGFVVIKGRPCKIVDMSTSKTGKHGHAKVHLVAIDIFTNKKLEDLSPSTHNMEVPVVKRTEFQLLDIDDGFLSLMTMDGETKDDVRAPEGELGDNIQAAFDEGKDLMVTIIAAMGEEAAISFKEAPRSE

SEQ ID NO: 6802 - protein, 176 aa, Oryza sativa (japonica cultivar-group)
MVVLVVATASDPASIGPAAAFLAMPGWSPGPPIPEGMESFTNGDVRLLKHERSIIAEDDLDNRWQAATGEAVSEVIFLSKHTAVSNRPALTVHPIGVPHLREDETPPQGGRPGWAALPNPRIGPWLRLMQKIAVDQGLVPEFEITLEATHHGPVTNTPTMFVEIGIDLLPCLYSLY

SEQ ID NO: 6803 - protein, 507 aa, Brucella suis 1330
MPAVQETIDQVRGLDVDQYKYGFETTIEADKAPKGLNEDIIRFISAKKNEPEWMLEWRLKAYERWLTMEEPTWARVDYPKIDFQDAYYYSAPKNQSGPKSLDEVDPELLKTYEKLGIPLREQEILAGVRKQGEPSEIDGNPADNVYASGRVAVDAVFDSVSVVATFKEELSKAGVIFCSISEAIREHPELVQKYLASVVPVSDNYYATLNSAVFTDGSFVYVPKGVRCPMELSTYFRINEKNTGQFERTLIIADEGAYVSYLEGCTAPQRDENQLHAAVVELVAMENAEIKYSTVQNWFPGDKDGKGGIYNFVTKRGDCRGDNSKISWTQVETGSAITWKYPSCILRGDNSRGEFYSIAVSNGHQQIDSGTKMLHLGKNTSSRIISKGISAGKSNNTYRGQVSAHRKAENARNFTQCDSLLIGNDCGAHTVPYIEAKNATAQFEHEATTSKISEDQLFYVMQRGIPEEEAIALIVNGFVKEVIQELPMEFAVEAQKLIGISLEGSVG

SEQ ID NO: 6804 - protein, 593 aa, Nocardia farcinica IFM 10152
MATQVADQVLARLREWGVDQVFGYPGDGINGLVAAFGRAGNTPRFVQTRHEEMAAFAAVAYAKFGDRVGVCTATSGPGAIHLLNGLYDAKLDHVPVVAIVGQTARSAMGGSYQQEVDLQALFKDVASDYLVEVNVASQLPNALDRAMRTALTRRAPTALIIPADLQEEDYEPPAHAFKQVPSSPPHDLTSTAVPPAEHLRRAAEVVNAGDKVAILIGQGARGAAAEVEQLAELTGAGVAKALLGKDVLSDELPYVTGSIGLLGTKASWELMQDCDTLVIVGSNFPYSQFLPEFGQARAVQIDRDATLIGMRYPTEVDLVGDAKATLRELLPLVERKTDRAWRESITEQVRRSWEITEAQAMVDAEPVNPMRVVWELSRVLPENAVVTADSGSSTNWYARCLRMRGQMRGSLSGTLATMGCGVPYALGAKFAHPDRPVVALVGDGAMQMNGQAELLTIARYRELWSDPRLVVCVFHNNDLNQVTWELRAMGGSPKFEESQALPDVSYAELARVMGLQAVEIRDPAELAPAWERALTADGPVLLDVHCDPEVPPIPPHAEYDMVKDLGKSILQGDPNAWHLLVQGVKSKAKEFRR

SEQ ID NO: 6805 - protein, 358 aa, Haemophilus influenzae R2846
MQSYNIAVLAGDGIGPEVMAEAIKVLNKVQEKFGFKLNFNEFFVGGAAIDHCGYPLPAETLKGCDEADAILFGSVGGPKWTNLPPDQQPERGALLPLRKHFKLFCNLRLATLYKGLEKFCPLRADIAAKGFDMVVVRELTGGIYFGQPKGREGESSQTKAFDTEVYYKYEIERIARAAFEAAMKRNKKVTSVDKANVLQSSILWRETVTEIAKDYPEVTLEHIYIDNATMQLIKAPESFDVLLCSNIFGDIISDEAAMITGSMGMLPSASLNEEGFGLYEPAGGSAPDIAGKGIANPIAQILSAAMMLRYSFNLNEAADAIESAVQKVLANGHRTADLADDSTPVSTSEMGTLIAQAI

SEQ ID NO: 6806 - protein, 515 aa, Haemophilus influenzae R2846
MTDRVIIFDTTLRDGEQALKASLTVKEKLQIALALERLGVDVMEVGFPVSSQGDFESVQTIARHIKNARVAALSRAVDKDIDAAYQALKVAEAFRIHTFIASSALHVEAKLKRSFDDVVGMAVAAVKRARNYTDDVEFSCEDAGRTGIDNICRIVEAAINAGATTVNIPDTVGFCLPNEYGNIIAQVRNRVPNIDKAVISVHCHNDLGMATANSLTAVQNGARQIECTINGIGERAGNTSLEEVVMAMKVRQDFMGVDTRINTQEIHRVSQMVSQLCNMPIQPNKAIVGSNAFAHSSGIHQDGMLKNKNTYEIMSPETIGLKKEKLNLTARSGRAAVKGHMTDMGYNEQDYDLDKLYDTFLKLADKKGQVFDYDLEALAFIDMQQGDEDRLVLDKLSAHSTKEYPATAFVQLKLDGEKLSTSSIGGNGPVDAVYNAILNLTGLEIKMSHYNLTAKGEGAEALGQVDIVVEHKGRKFHGVGLATDIVESSALALVHAINAIYRAHKVADIKNHKQH

SEQ ID NO: 6807 - protein, 658 aa, Dendrocalamopsis oldhamii
METRDSSSPPLPYSYSPLPAGDAASAEVSGAGRARRRPLCVAAVLLAVAALAGLALAGLRLAGRPMDALSAEVDAVARSRGPESGVSEKTSGVRSDGRLGASGGDAGNAFPWSNAMLQWQRTGFHFQPQKNWMNDPNGPVYYKGWYHLFYQYNPEGAVWGNKIAWGHAASRDLLHWRHLPIAMLPDRWYDINGVWTGSATTLPDGRLAVLYTGSTNTSVQVQCLALPTNPEDPLLTNWIKYEGNPVLYPPPAIGAKDFRDPTTAWLDPSDKTWRVVIGSKDAHHAGIAMTYKTKDFVHYELVPGLLHRVPATGMWECIDFYPVGTRGDNGIDMSEAMAKSNNAEDVVHVMKASMDDDRHDYYALGRYDAAANTWAPMDPDADVGIGLRYDWGKFYASKTFYDPAKRRRVLWGWVGETDSERADVAKGWASLQSIPRTVVLDTKTGSNLLQWPVEEVETLRTNSTDLSGITIDHGSVFPLNLHRATQLDILAEFQLDPLAVDAVVEADVGYNCSTSGGAAGRGALGPFGLLVLTDRRLREQTAVYFYVSRGLDGSLRTHFCQDETRSSYANDIVKRVVGNVVPVLDGETLSVRVLVDHSIVESFAQGGRSTATSRVYPTEAIYANAGVYLFNNATNARVTAKSLVVHEMDSSYNQAYMA

SEQ ID NO: 6808 - protein, 368 aa, Gibberella zeae PH-1
MSPSAVAAKKTYNIASIPADGIGPEVISAGIEALTALASTLQTFNLDFTHYDWSSDTYKKTGKYIPDGGLDQLKKHDAILFGAVGAPDVPDHISLWGLRLAICQPFQQYANVRPTRIMRGTQSPLRNCKTGDLDWVIIRENSEGEYAGQGGRSHRGHPWEVATEVSIFTRHAVNRLIRFAFEIAQKRPRKHLTVVTKSNAQRNGMVLWDEVAAEVAKDFPDVTVEKMLVDAMTTKMVLKPESIDTIVASNLHADILSDLAAALAGSIGIAPTSNLDPTRENPSMFEPIHGSAFDITGKGIANPVATFWTAAEMLSWLGEEDASAKLMECVENVTASGVLTQDLGGNATTKQVTDAVVAEIEKLGNGSD

SEQ ID NO: 6809 - protein, 318 aa, Chlamydophila caviae GPIC
MVSAYLLANFGGPRHSNDIEVFLTSLLTDRDVTGGFLPSFIHKRLFSFIAKKRALKVLPQYNCIGGFSPIYQDTELLAETLSSHLDAPVITFHRYLPDTHPHTIQQLKTLGDFPIVGVPLFPHFTYAVTGSIVRFIHNQLPLLNISWVSHFGNHPEFISCMMDHILKFLQSHDISTHDCCLLFSAHGLPMRHVNKGDPYNMQCEKSFRAISERLPNIETHLCYQSKFGPGKWLSPSTKDLCATLKTDKKHVLIVPFGFTSDHIETLYEIEKEYIAVLIDKGYQALRVPAIYQSSQWVESLATIIQSTPHVEKKSLIKS

SEQ ID NO: 6810 - protein, 205 aa, Glycine max
FYTECLGMKLLRQRDIPEEKYANAFLGFGPEESHFVVELTYNYGVTSYDIGDGFGHFAIATQDIYKLVEHIRAKGGNITREPGPVQGGTTVIAFVKDPDGYTFGLIQRPTVHDPFCQVMLRVGDLERSIKFYEKYTIAMLGYGEEHETTVLELTYNYGVTEYSKGNAYAQIAIGTDDVYKSAEVVNQVIKEVGGKITSRPRAIPG

SEQ ID NO: 6811 - protein, 519 aa, Schizosaccharomyces pombe 972h-
MSIAKNIENDPSKGWVVQKFGGTSVGKFPIKIAVDVAKEYLSTKRVALVCSARSTDTKAEGTTTRLIRATEAALRPAVGSVHDLVRIIETDHVQAARDFIQDVGIQDELIDAFHADCVELEQYLNAIRVLSEVSPRTRDLVIGMGERLSCRFMAAVLKDQGIDSEFIDMSHIIDEQREWRNLDASFYAYLASQLASKVTAVGNKVPVVTGFFGMVPGGLLSQIGRGYTDFCAALLAVGLNADELQIWKEVDGIFTADPRKVPTARLLPLITPEEAAELTYYGSEVIHPFTMSQVVHARIPIRIKNVGNPRGKGTVIFPDTISRHGSATPPHPPKIMPDDISASLANKGATAVTIKDTIMVINIQSNRKISAHGFLASIFAILDKYKLAVDLITTSEVHVSMALYEESDDGNMHEAFVELRRLGTLDILHGLAILSLVGKHMRNTTGYAGRMFCKLAEAQINIEMISQGASEINISCVIDEKMAVKALNVIHKELLEPLALHEVPSQASMLVEKPWLYSA

SEQ ID NO: 6812 - protein, 139 aa, Glycine max
METPNVTIPKVGPKPSRKVKLPTPKELISHYESKGMDSQDASLKVIEDLQKALFRVISSGKGKHDKLLTESSRKIDAINNRLTVLDMKLDSKPAYVETFAIGLASGAALKGIGAVVPHIIAPLTQIWNSVSSAIKSSPQ

SEQ ID NO: 6813 - protein, 474 aa, Pelargonium graveolens
MALPAISAKLLCPHASPSPLSTLSLPSTSFSTKPSILTPTNLSSTSLNPSTAAISTRRRRAFTVRAARGKFERKKPHVNIGTIGHVDHGKTTLTAALTMALASLGNSAPKKYDEIDAAPEERARGITINTATVEYETENRHYAHVDCPGHADYVKNMITGAAQMDGAILVVSGADGPMPQTKEHILLAKQVGVPNMVVFLNKQDQVDDEELLELVELEVRELLSAYEFPGDEVPIISGSALLALEALMANPAIKRGENQWVDKIFSLMDSVDSYIPLPQRQTDLPFLLAVEDVFSITGRGTVATGRVERGTVRIGETVEIVGLRDTRSVTVTGVEMFQKILDEALAGDNVGLLLRGVQKEDITRGMVLAKPGTITPHTKFSAIVYVLKKEEGGRHSPFFAGYRPQFFVRTTDVTGKVATIMNDKDEESKMVMPGDRVKMVVELILPIACEQGMRFAIREGGKTVGAGVISSIIE

SEQ ID NO: 6814 - protein, 346 aa, Sinorhizobium meliloti
MTEYKKPIITEMRPKITVIGVGGGGGNAINNMIAENLQGVDFIAANTDAQALATSKAERRIQLGAAITEGLGAGSVPDIGNAAAQESIDEIMDHLGGTHMCFVTAGMGGGTGTGAAPVIAEAARRAGILTVAVVTKPFSFEGQRRMQTAELGVERLRESADTVIVIPNQNLFRIADAKTTFADAFMIADRVLYSGVSCITDLIVKEGLMNLDFADVKTVMKGMGRAMMGTGEATGENRAMLAAEAAIANPLLDEVSMRGAKGVLVSISGGMDMTLFEVDEAATRIREEVYDEADIVVGAIFDRSLDGTFRVSVVATGLDSNRSAQPTAPEAMNGQTAAAVPSRTLQ

SEQ ID NO: 6815 - protein, 335 aa, Xanthomonas axonopodis pv. citri str. 306
MTQTITVIRGDGIGPEIMDATLFVLDALQAGLTYEYADAGLVALEKHGDLLPESTLASITKNKVALKSPLTTPVGEGFSSINVAMRRKFDLYANVRPAKSFPNTKSRFADGVDLITVRENTEGAYLSEGQTVSEDGETAFSGTRITRKGSERIVRYAFELAKSTGRKKVTAVHKANIIKSTSGLFLKVARDVAAQYPEIEFQEMIVDNTCMQLVMRPEQFDIIVTTNLFGDIISDLCAGLVGGLGLAPGANIGLDAAIFEAVHGSAPDIAGQGKANPCALLLGAAQMLDHIGQPQNAERLREAIVATLEAKDSLTPDLGGTGNTMGFAKAIASRL

SEQ ID NO: 6816 - protein, 482 aa, Triticum aestivum
  misc_feature (448)..(448): Xaa can be any naturally occurring amino acid
MNQSAVGSLVPRQAPGSYGLPFVSAIRDRLDFYYFQGEAKYFESRVEKHGSTVLRINVPPGPFMARDPRVVAVLDAKSFPVLFDVDKVEKKNLFTGTYMPSTSLTGGFRVCSYLDPSEPTHTKVKQLLFSLLASRKDAVIPAFRSHFSSLLATVESQLVLAGKSNFNTLNDFTSFEFIADAYFGVLPSASDLGTTGPTKAAKWLIFQLHPLVTFGLPLILEEPLLHTVLLPPIFVSGDYKALYKYLYAAATKALDMAESLGLNRDEACHNLLFATVFNSYGGLKVMLPGILGRIAEAGEKFHQRLAAEVRTAVADAGGKVTIEALEKMELTKSAVWEALRLEPPVKFQYGRAKADMNIESHDAVFAVNKGEMLFGYQPCATKDPRVFGSTAREFVGDRFVGERSKLLQYAYWSNGRETESPSVDNKQCPGKNLVVLVGRLLVVELFLXRYDTFTADVGVDLLGTKVEFTGVTKATSGPESAV

SEQ ID NO: 6817 - protein, 727 aa, Physcomitrella patens
MAACTIVWFRRDLRLEDNPALIAAARAGTVVPVFVWSPAEDGQFHPGRVSRWWLKQSLTHLELSLKKLGSPLILRKSPDMLSVLLEIAEATGATQVFYNHLYDPVSLVRDHRVKQGLSQRGIVVHTFNGDLLYEPWEVYDEEGQAFTVYEAFWKKCMSMPFEPEAPLLPPRRLTGPIGKIVGCNAEELGLEDEFEKSSNALLARAWCPGWGFANKSLDSFLRSPLIDYARDRQKADGASGTPTSLLSPHLHFGELSVRKIFHEVRKRQITWAREGNAGGEASVNMFLRALGFREYSRYLSFHFPFTHERSLLANLKSFPWRADEGYFKAWRQGRTGYPLVDAGMRELWATGWAHNRIRVVVASFSVKFLQLPWRWGMKYFWDVLLDADLECDVLGWQYISGSLPDGHELDRIENPEVEGYRFDPDGDYVRRWIPELARLPNEWVHHPWDAPPSALRAAGVELGTNYPRPIVEIGAARERLQASLAEMWERDAAMKAALANGLEEGLGETVEVAGTGGPEHERMDVPRVMVHMQRDADMSCNSSRRDQLVPEIVPNQFHIRAHESIMNRSAAMVEDGEEAGRAAVPMVFASVRRGMGGNYGGHHVEGNGGEVAQASAPIQWPTVTAVDYELDSTAESASVTGRGGSEGGTVPVWSQSVSARTPIQVREGLVPEVRRGPGLSRRQLQASVQRVNLEGMTSNKQAEEEDFYVPKLVKWTQPRKRRVKQDG

SEQ ID NO: 6818 - protein, 572 aa, Sulfolobus tokodaii str. 7
MPTGARITIDALKREGVKVIFGIPGLSNMQLYDAFIEDLQNGELRHVLMRHEQAAAHAADGYARASGIPGVCTATSGPGATNLVTGLITAYWDSSPVIAITGQVPRNSIGKMAFQEADAMGIFEHITKYVVEVKKLEEIPIWIKNAFYIATTGRPGPVVVDIPRDIFYEKVEEVKWPEKPMVKGYKEFPTIIDRQKLKKAAEILVNAERPIILVGTGVVWSNATQEVLELAEYLHIPIVSTFPGKSAIPHDHPLYFGAMGYYGRAEASMAALESDAMLVIGARFSDRTFTSYDEMIETRKKFIMINIDPSDGERAIKVDVNLVGNAKILLRELMKAIYEVGKKNDHSAWIKRVKEYKEYYSQFYYYDEPNKLKPWKILKTIRNTIPRDAIVTTGVGQHQMWAEVFWEVLEPRTFLSSTGMGTMGFGLPAAMGAKLAKPDKVVVDLDGDGSFLMTGNNLATAVDEHIPIISVVFDNRTLGLVRQVQDLFFGNRIVGVDYGPSPDFVKLAEAFGALGFNATSYEEIEKSLKTAMKENIPAVIRIPVDKEELALPTLPPGGRLKQVIVRDPRKSS

SEQ ID NO: 6819 - protein, 86 aa, Nanoarchaeum equitans Kin4-M
MAFSHTKKVGPTGRFGPRYGLGIRKRVLTVEIKQRKKHVCPFCRSKAVIREAYGIYRCKKCGKQFTGLAYYPYEHLHEYYKIRGGQ

SEQ ID NO: 6820 - protein, 281 aa, Triticum aestivum
  misc_feature (255)..(255): Xaa can be any naturally occurring amino acid
  misc_feature (264)..(264): Xaa can be any naturally occurring amino acid
REREREREREREREREREREREDVAIKLLEKPENDLERAQLMEQQFVQEVMMLSTLRHPNIVRFIGACKKSIVWCIITEYAKGGSVRQFLAREQTKSVPLRLAVKQALDVARGMAYVHALRFIHRDLKSDNLLISADKSIKIAHFGVARIEVKTEGMTPETGTYRWMAPEMIQHRPYDHKVDVYSFGIVLWELMTGMLPFTNMTAVQAAFAVVNKNARPAIPQDCLPALSHIMTRCWDANPEVRPSFNEVVTMLXAAETDVVSXCPLGTVRCCISEPMTTD

SEQ ID NO: 6821 - protein, 503 aa, Yersinia pseudotuberculosis IP 32953
MTRSNVEIPDDVQAWVSDGRYKEGFFTHLATDELAKGINEEVVRAISAKRNEPEWMLEFRLGAYRSWLEMEEPHWLKAHYQGLDYQDYSYYSAPSCGRCDDNCDSQPGAVQQSSADGSAPSNANEYLTAEVESAFAQLGIPVREGAEVAVDAIFDSVSVATTYREKLAGQGIIFCSFGEAIQEYPDLVQKYLGSVVPAKDNFFAALNAAVASDGTFVYVPKGVRCPMELSTYFRINAAKTGQFERTILIADEGSYVSYIEGCSAPVRDSYQLHAAVVEVILHKNAEVKYSTVQNWFAGSDSTGGILNFVTKRALCEGEGSKMSWTQSETGSAITWKYPSVILQGDNSVGEFFSVALTNGYQQADTGTKMIHIGKNTKSTIIAKGISAGHSQNTYRGLVKILPGADNARNFTQCDSMLIGPDSGAHTFPYVEVRNNTAQLEHEATTSKIGDDQLFYCLQRGISEDDAISMIVNGFCKDVFSELPLEFAVEAQKLLAISLEHSVG

SEQ ID NO: 6822 - protein, 144 aa, Nostoc punctiforme PCC 73102
MRLLHTMLRVANLEESLKFYCELLGMKLLRRKDYPGGEFTLAFVGYGDESDNAVIELTYNWGVEKYELGNAYGHIALGVDDIYATCEEIRNQGGKVVREPGPMKHGSTVIAFVEDPDGYKIELIQLGSQGSAAKEESQEQLVSQ

SEQ ID NO: 6823 - protein, 917 aa, Pseudomonas fluorescens Pf-5
MLKKLGIKGRVLLLTLLPTSLMALVLGGYFTWMQLSDLQTQLLQRGEMIAEQLASLVAPAMGNHNTQMLERIATQALEQQDVRAVSLLAPDRSLLAHAGPSMLNPPPAGNSSHMMQRSGSDATRYQLPVFGRHRNLAGDLIPDESDRLLGWVELELSHSGMLLRGYRSLFASLLLIAAGLAGTALLAVRMGRTINNPLTQIKQAVAQLKDGNLETRLPPLGSQELDELASGINRMASTLQNAQEELQHSIDQATEDVRQNLETIEIQNIELDLARKEALEASRIKSEFLANMSHEIRTPLNGILGFTHLLQKSELTPRQLDYLGTIEKSADSLLGIINEILDFSKIEAGKLVLDSIPFNLRDLLQDTLTILAPAAHAKQLELVSLVYRDTPLSLVGDPLRLKQILTNLVSNAIKFTREGTIVARAMLEEEHEDSVQLRISIQDTGIGLSNQDVRALFQAFSQADNSLSRQPGGTGLGLVISKRLIEQMGGEIGVDSTPGEGSEFWISLNLPKTRDDAEDLPGPPLLGRRVAVLENHELARQALQHQLEDCGLEVTPFNTLEALTNGITGVHQSEQAIDLAVLGITTNDMSPERLSQHIWDLEHLGCKVLVLCPTTEQTLFHLSVPNPHSQLQAKPACTRKLRRALSDLVTPRRARSEPEETLSSRAPRVLCVDDNPANLLLIQTLLEDMGAKVLAVDNGYAALNAIQTEPFDLVMMDVQMPGMDGRQSTEAIRQWESERHGTPLPIVALTAHAMANEKRALLQSGMDDYLTKPISERQLAQVVLKWTGLALRNQGPERASERPELGLELQVLDQDEGLRLAAGKADLAADMLAMLLASLDADREAIKAARAANDQNALIERVHRLHGATRYCGVPQLRAACQRSETLLKQEDAKAFAALDELDHAIGRLAAEARTNA

SEQ ID NO: 6824 - protein, 557 aa, Nostoc punctiforme PCC 73102
MSQPNPTQAFKFDSIDAALADLKAGRVIVVVDDENRENEGDLICAAQFATPDTINFMAVEARGLICLAMTGDRLDELDLPLMVSNITDTNQTAFTVSIDAGPELGVTTGISAEDRARTIQVTLNPATKPTDLRRPGHIFPIRAKAGGVLKRAGHTEAAVDLSRLAGLYPAGVICEIQNPDGSMARLQQLFEYAKRHNLKIISIADLISYRLQHDRLVYREVITKLPSQFGQFEIYAYRHTLDNTEHVAIVKGDPDNFKDEPVMVRMHSECLTGDALGSLRCDCRMQLEAALKMIEAAGQGVVVYLRQEGRGIGLINKLKAYSLQDMGLDTVEANERLGFPADLRDYGMGAQMLMDLGIKKIRLITNNPRKIAGVKGYGLEVVDRLPLLIEATDYNSYYLATKAKKLGHMLLQTYLVTVAIHWQDDPEAVTERYERLEKLRHLAKSNDLLLQEEARPLAIAIFDEPSLTVHLGFDQAKVAGCDWYQQSGHPYIQAIFQILDNLATLPYIQKLEFLISSGCDPLSNLQVQLDRQTFADGTLPSSISDRLEKQQIYSFSK

SEQ ID NO: 6825 - protein, 534 aa, Streptomyces coelicolor A3(2)
MTATSELDDSFHVFDTTLRDGAQREGINLTVADKLAIARHLDDFGVGFIEGGWPGANPRDTEFFARARQEIDFKHAQLVAFGSTRRAGANAAEDHQVKALLDSGAQVITLVAKSHDRHVELALRTTLDENLAMVADTVSHLKAQGRRVFVDCEHFFDGYRANPEYAKSVVRTASEAGADVVVLCDTNGGMLPAQIQAVVATVLADTGARLGIHAQDDTGCAVANTLAAVDAGATHVQCTANGYGERVGNANLFPVVAALELKYGKQVLPEGRLREMTRISHAIAEVVNLTPSTHQPYVGVSAFAHKAGLHASAIKVDPDLYQHIDPELVGNTMRMLVSDMAGRASIELKGKELGIDLGGDRELVGRVVERVKERELAGYTYEAADASFELLLRAEAEGRPLKYFEVESWRAITEDRPDGSHANEATVKLWAKGERIVATAEGNGPVNALDRSLRVALEKIYPELAKLDLVDYKVRILEGVHGTQSTTRVLISTSDGTGEWATVGVAENVIAASWQALEDAYTYGLLRAGVAPAE

SEQ ID NO: 6826 - protein, 653 aa, Yarrowia lipolytica CLIB122
MTTMETTPTVNASDVDVKRPGDDVEKDDIKRPRVEDTDAMDTEEPKPTDSKDATESKPDEAPKSDESEVKDSDDKPTEETKPEVKTEDTKGQQDESAHSEAASLPTPSSSIVESDKPVVEMPKHQVKYAASSLKAVKRLKDAAPFIHPVDPVKLNIPTYFEVIKHPMDLGTMEKKLNNGEYGTKEDMIADVQRIVDNCLTFNGADSFISSMAKSLFTSFERHMFNFPSADAPTEPQKKKKSLGGGSSTRTPRGSMTAGSEETYALQPSGVPTIRRESAIDGRPKREIHPPKPKDLPYTNIKPRKKKHAIELRFCNQVLKELTSKKHEEYSFPFLLPVDPVALNCPSYFKIIKEPMDLSTVQEKMNNNAYETADEFESDVRLIFKNCYRFNPDGTPVNKMGKRLEAIFDKKWAEKPIPPPSPPPTMDDSSDYDEYSSDEDLASSITNPAIAFLEEQIERMKQELTKMKKDAAREMKRSRRRGSSKRSKSSSKRKGSRSSDSGGVVVSYEMKKELSERIPQLKEKQLQHVINLIHESMPQLKSEGQDEIELDMDQLDPHTLMKLYNYVVKDDSKKKSSSGGKSTSSSRPSSSVYPGQRKKSKPMSESEQAQQIEQIQKKLRQFDEAEGGSATPPPTNGHFDDSSDDDSGSSSEEE

SEQ ID NO: 6827 - protein, 260 aa, Acidobacteria bacterium Ellin345
MTFENILYEVRNQIAYVTINRPKVLNALSIATIGEIGQAMQAAKDDANAHVVILTGSGEKAFVAGADINELKTATSEVGKQYALRGQAVLSLLENLGKPVIAAVNGFALGGGCELALGCTMRFASDNAKLGQPEVKLGIMAGFGGSQRLPRLVGRGMGMQLLLTGETITAQEALRIGLVNAVVPQAELMAYVEGVAAKIIANAPLAIQYTMEAVNHGADMTLAEGLYLEATLFSITCATEDKNEGTSAFLEKRGATFKGR

SEQ ID NO: 6828 - protein, 400 aa, Hordeum vulgare subsp. vulgare
MDCCFPCPGARRKRKPPAPAEKPQIPPAPDKAKPGCSSSSAAARQDSLLEAKKEFVLSNGSEHRHIAAQTFTFRELAAATNGFRADCLLGEGGFGRVYKGYLESINQVVAIKQLDRNGLQGNREFLVEVLMLSLLHHPHLVNLIGYCADGDQRLLVYEYMPLGSLEDHLHDPSPDKPRLDWNTRMKIAAGAAKGLEHLHDKTNPPVIYRDLKCSNILLGEGYHPKLSDFGLAKLGPVGDKTHVSTRVMGTYGYCAPEYAMTGQLTLKSDVYSYGVVLLEIITGRRAIDNTRATGEQNLVAWARPLFKDRRKFPQMADPALEGRYPARGLYQALAVAAMCVQEQPTLRPLIGDVVTALSYLASQPYDPEVHGVHRPSRLTASGTPPRSRNHGADRQRGGSE

SEQ ID NO: 6829 - protein, 327 aa, Xanthomonas axonopodis pv. citri str. 306
MSSPITLIEAITQALAWELEHDPAVLVLGEDVGVNGGVFRATAGLQQRFGSDRVLDTPLDETTIAGLSVGLAAQGMKPVAEAQFDGFVYPMVDHLICHAARLRNRTRGRLHCPMVLRVPWGGGIRAPEHHSEANEAIFTNVPGLRVVLPSSPQRAYGLLLAAIRDPDPVIYMEPKRIYRQYKEVVANDGEALPLDVCFVLRDGTDVTLVTWGAQVKEALEAADKLAGEGISAEVIDVATLRPLDFDTIAESVAKTGRCVIVQEAPRTAGFGAEIAARLAEQSMYDLVAPVERVTGYDTHIPLFRLEMKFLPSVERIVSAARRAVAAG

SEQ ID NO: 6830 - protein, 545 aa, Pseudomonas syringae pv. phaseolicola 1448A
MSELIRVPDIGNGEGEVIELMVKVGDRIEADQSILTLESDKASMEIPAPKAGVIKAMKVKLGDRLKEGDELFELEVEGEAAAAPAPAAESAAAPAAAEKPAEAAPAPAAAAPAPAASASVQDIHVPDIGSSGKAKIIELMVKVGDSIQADQSLITLESDKASMEIPSPAAGVVESIEVKLDQEVGTGDLILKLKVEGAAPAAAPAPAASAPAAAPAKAEAAAPAAAPAPKAEAAPAPAKDGAKVHAGPAVRQLAREFGVELSAVSATGPHGRVLKEDVQVYVKTMMQKAKEAPAGGASGGSGIPPIPEVDFSRFGEIEEVPMTRLMQLGASGLHRSWLNIPHVTQFDQADITDLEAFRVAQKGAAEKAGVKLTVLPLLLKSCAHLLKELPDFNASLAPSGKAVIRKKYVHIGFAVDTPDGLLVPVIRDVDQKSLLQLAAEAAALAEKARNKKLTANDMQGACFTISSLGHIGGTGFTPIVNAPEVAILGVSKATIQPVWDGKAFQPKLMLPLSLSYDHRVINGAAAARFTKRLSELLADIRTILL

SEQ ID NO: 6831 - protein, 645 aa, Lolium perenne
MESSAVVVQGTTAPLLPYAYAPLPSSADDARENQSSGGGVRWRACAASALVVLLVVVGFFAGGRVDLGQDGEVSATSSVPGSSRGKDSGVSEKESPADGGFPWSNAMLQWQHTGFHFQPLKHYMNDPNGPVYYGGWYHLFYQHNPYGDSWGNVSWGHAVSKDLVNWRHLPVALVPDQWYDINGVLTGSITVLPDGRVILLYTGNTDTFSQVQCLAVPADPSDPLLRSWIKHPANPILFPPPGIGLKDFRDPLTAWFEHSDNTWRTIIGSKDDDGHAGIVLSYKTTDFVNYELMPGNMHRGPDGTGMYECLDIYPVGGNSSEMLGGDSSPEVLFVLKESANDEWHDYYALGWFDAAANTWTPQDPEADLGIGLRYDWGKYYASKSFYDPIKNRRVVWAFVGETDSEQADKAKGWASLMSIPRTVELDKKTRTNLIQWPVEEIETLRRNVTDLGGITVEAGSVIHLPLQQGGQLDIEASFRLNSSDIDALNEADVGFNCSSSDGAAVRGALGPFGLLVFADGRHEQTAAYFYVSKGLDGSLLTHYCHDESRSTRAKDVVSRVVGGTVPVLDGETFSVRVLVDHSIVQSFVMGGRTTVTSRAYPTEAIYAAAGVYLFNNATSATITAEGLVVYEMASAESRAFLADDM

SEQ ID NO: 6832 - protein, 489 aa, Yersinia pseudotuberculosis IP 32953
MPAQNPLQHQRQHDGIYHIGYFVGGKWSQAQEQFDVCNPATGELVARVAKSGKQETEAAIKAASEAFPAWRKTPAKQRAEILQRWYLLIMEHQQSLAELMVSEQGKPLKEALVEVAYAASFIQWFSEQAKRANGEIIPSAKEGARILATREPIGVVAAITPWNFPLAMLTRKLGPALAAGCTGLIKPANNTPLSAFALLALAEQAGVPAGVLNGVVGDTHAISDAIMASSDVRKISFTGSTNVGKTLMRNAAATMKRISMELGGNAPYIVFDDADLEAAVAGAMACKFRNAGQVCVCVNRFYIQDAIYDEFVNRLAAEVKKLKVGNGMDKDVNMGPLINLAGLEKVEEHVKDALEKGGRLLAGGHRHALGGNFFQPTVIADANEQMKVASEETFGPLAACFRFSTEAEVIQRANNTPFGLAAYFYTQNLQRVFRVSEALESGMIGVNECSVSTELAPFGGVKESGLGREGSVLGLDEFMEVKTLHLGNL

SEQ ID NO: 6833 - protein, 229 aa, Gibberella zeae PH-1
MSQHALSDQQVNNELSKMTAFIKQEAMEKAREIEIKANEEFEIEKSKLVRQETDAIDSQYEKKFKQATMSQQITRSTVSNKTRLKVLGSRQEMLDNIFEEAQKKLAEGAKDKAKYQKALKGLLLEGFFALNEPELQVRARKKDYDVVKKAIEEAAKDFKKELGKDITAKIQEDDPLPEGIAGGVFIISGSGKIDIDNTFEARLKLLEESAAPAVREALFGKNPNRKFND

SEQ ID NO: 6834 - protein, 313 aa, Magnaporthe grisea 70-15
MSVPSFITAPEFEGGPPQGLSIPFRLRWSKTHPPKEPIVTFKGRTVLVTGANTGLGFEAAVKYAAFGADKIILAVRSIEKGEEAKKRIVERTGRDATDISVLKLDLGEYSSVKDFVSALHEVTPTLDVALLNAGLGNPTYEKSSAGWEMAVQVNVLSTALLAMLLLPLLRSSAAASGAKSHLTFVNSFAHTLVPRDFPLIEGSILKTATDESSWNASSSYNIVKLLAMASVQGFARMEAGEDQQRVIVNSVCPDLCETDLGRKFTGFISSIGKAIFYYLFALSAEEGARCLIGATALGPESHGRFWHHDFLYP

SEQ ID NO: 6835 - protein, 296 aa, Dehalococcoides ethenogenes 195
MSAHIINGTEIAAAIREEIRSEVTALKAKHGIVPGLATVLVGDDPASHSYVDSKIKMCQNLGIYSEHHPLPQSATNEDLLTLIARLNADPKISGILVQVPLPVQISENLVLNAINPDKDVDGFHPVNVGRMCLGEPCFLPCTPHGVQELLIRSGIKIEGTHVVIVGRSNLVGKPLANILLQKAPGANATVTICHSGTKNLPLITSQADILVSAMGKPKFITADMVRQGAVVIDVGTTCIGYTPEGKRILSGDVDFEAVKEKAFAITPVPKGVGPMTIIMLMLNTLTAAKRAAGLVK

SEQ ID NO: 6836 - protein, 155 aa, Zea mays
  misc_feature (59)..(59): Xaa can be any naturally occurring amino acid
MRNCDILAGVQAVRQDNKQRFSLLEEDGELLIRANQGHTVTTVTSESLLKPILSPDEVXRKNLDSILQFGLKRMARLHIHFSSGLPSDGEVTSGVRQNVNILIHLDVSKALKGGMKLYISDNKVILTEGFDGVVPVKYFERVETWPGRAPIPFQR

SEQ ID NO: 6837 - protein, 611 aa, Pyrococcus abyssi GE5
MCGINGFSWGDEELVKRMNDAIRHRGPDDEGVYVDDNVSLGHVRLAIIDLSPKGHQPMKYEKDGKEVWIVYNGEIYNFMEIRKELEEKGYTFTSNTDTEVILAAYLEWGFDCVERFNGMWAFVIYDKSKNILFLSRDRFGIKPLYYYYDGKNIIFSSEIKGILQHNIPRKPNDAVIFDFLYYNLLDHTEDTFFEGIKRLMPGYNAVFDLNTRKFEAWKYYDLRERIEKRKEISDPQGFKDLFLRAVKMRLVADVPVGSCLSGGLDSSSIVCAMRHLLPDGEIKVFSLVFPGKEIDESKYQRIVVDECRVSWYRTTFNVEDVLADIIDLIRTQEEPFSTLSIYGQYRVMKLARENGMKVLLDGQGSDEILAGYHYFFGYYFVELLRKFKWGKLLREILAYKRIHGSLVPLKNMVLYILPVWVTKRLWRRRFPYLREEFIEKFKKRPSKELIWKIKTLNEALLLAETYYSLPHLLRFEDKNAMRWSIESRVPFCDHELVEYVLSLPPESKVSAGITKVLLRKGLKGILPDEIRNRASKVGFATPDKDILKTNEGQKFALAVIDSESFKKRPYWDYRKVLRMFEEHVSGKKNWSQELWKVIIMELWLREWMDNG

SEQ ID NO: 6838 - protein, 355 aa, Alkaliphilus metalliredigenes QYMF
MESRIQKIRETLKDKNLDCMLLYKPENRRYVSGFTGTTGYVVVTHDEAKFMTDFRYIEQAKTQCQGFEIIEISKEKPLTYVLNQFQISKLGIEEDHVTYGQYKDYSMKLDQIELIALDGALTKLRVIKDEDEINNITQAARIADKAFIHILKYVKPGIMEIEVALEIESFMKQKGASKLSFDMIVASGERSALPHGVASNKTLSLGDTITLDFGCVYNGYCSDMTRTFILGQATEKQKEIYAIVLEAQNKALQSVRPGITGAELDEIARDVISKKGYGAYFGHGLGHGVGLEIHELPHINQLGKEPLAPGMVITIEPGIYVPGFSGVRIEDLVVVTHDGYEVLSKSTKEFIELNR

SEQ ID NO: 6839 - protein, 525 aa, Pyrobaculum aerophilum str. IM2
MLDTTLRDGAQGANVSFALQDKIRIALKLDELGVDYIEGGWPYSNPKDYQFFKAMKEYPLARAKLAAFGSTRRKNTRPSQDESLNSIVKADVPVAVIFGKSWTLHVDKVLEATREENLAMISESVEYLREHGMEVIYDAEHFYQGYQEDPEYALATLEAAWRAGARVIVLADTNGGTPPHEVYRITAEVRRRFPNMPLGAHMHNDIGCAVANTLMAVAAGARHVQGTINGIGERTGNADLVQILPSLELKMGLRVLREEAPPVKFAKLREVSRFVYEALGLQPNPYQPYVGEFAFAHKGGVHADAVMKVPRAYEHIDPQLVGNRRVFVVSEMAGGASVVLKAAEVLGLALNKRDEAVRRALEEIKMLEKEGYSFDVAPASAMLILLRHLGLYRERFRILEWRVVTGPAEASYAVVKVLVEGRTMLEAGEGVGPVHAIDVALRKALVGAFPELSDVQLRDYKVILPTAVKSTESVVRVVSEFTDGERIWRTTGVSSNIVMASLMALRDGYDFVLQTNSLNKNNIGR

SEQ ID NO: 6840 - protein, 212 aa, Carica papaya
IPEYVDWRQKGAVTPVKNQGSCGSCWAFSAVVTIEGIIKIRTGNLNQYSEQELLDCDRRSYGCNGGYPWSALQLVAQYGIHYRNTYPYEGVQRYCRSREKGPYAAKTDGVRQVQPYNQGALLYSIANQPVSVVLQAAGKDFQLYRGGIFVGPCGNKVDHAVAAVGYGPNYILIKNSWGTGWGENGYIRIKRGTGNSYGVCGLYTSSFYPVKN

SEQ ID NO: 6841 - protein, 502 aa, Bacillus cereus ATCC 14579
MFMDTTLRDGEQSPGVNLNEQEKLQIARQLERLGIHVMEAGFAAASEGDFQSVKRIANTIQNATVMSLARAKESDIRRAYEAVKGAVSPRLHVFLATSDIHMKYKLCMSKEDVLNSIHRSVTLGKSLFPTVQFSAEDATRTSRAFLAEAVEIAIRAGANVINIPDTVGYTNPEEYYSLFEYLQESVPSYEKAIFSCHCHDDLGMAVANSLAAVEGGALQVEGTINGIGERAGNAALEEVAVALHIRKDFYKAEPSMTLKEIKATSILVSRLTGMVVPKNKAIVGANAFAHESGIHQDGVLKEVTTYEIIEPALIGESQNLFVLGKHSGRHAFTEKMKELGYEFTNEERDAAFEAFKKLADRKKEITEEDLRALMLGEAAFAAQQYNITQLQVHFVSNSTQCATVVLKDEEGNVYEDAATGSGSIEAIYNAIQRILGLECELADYRIQSITQGQDALAHVHVELKEGSHQISGFGVAQDVLEASARAYVHAAGKLKSLIALVK

SEQ ID NO: 6842 - protein, 421 aa, Bacillus halodurans C-125
MEDKDKRSGKTTDVLASTQTVIKKALDKLGYPDEMYELMKEPIRMLTVRIPVRMDDGSTKIFTGYRAQHNDAVGPTKGGVRFHPNVTEKEVKALSIWMSLKAGIVDLPYGGGKGGIVCDPRDMSFRELERLSRGYVRAISQIVGPTKDIPAPDVFTNSQIMAWMLDEYSRIREFDSPGFITGKPIVLGGSHGRESATAKGVTICIREAAKKKGIDLQDARVVIQGFGNAGSFLAKFMHDAGAKVIGISDAYGALHDPDGLDIDYLLDRRDSFGTVTKLFKNTISNEELLELDCDILVPAAIENQITEKNAHNIKAQIVVEAANGPTTIEATEILTNRDILLVPDVLASAGGVTVSYFEWVQNNQGYYWTEEEVEGKLEAVMVHAFDNIYKLAKGRKVDMRLAAYMVGVRKMAEASRFRGWV

SEQ ID NO: 6843 - protein, 361 aa, Aspergillus nidulans FGSC A4
MVQQMPPQGGSRKISFNVSDQYEIQDVIGEGAYGVVCSAIHKPSGQKVAIKKITPFDHSMFCLRTLREMKLLRYFNHENIISILDIQRPRNYESFNEVYLIQELMETDMHRVIRTQDLSDDHCQYFIYQTLRALKAMHSANVLHRDLKPSNLLLNANCDLKVCDFGLARSAASTDDNSGFMTEYVATRWYRAPEIMLTFKEYTKAIDVWSVGCILAEMLSGKPLFPGKDYHHQLTLILDVLGTPTMEDYYGIKSRRAREYIRSLPFKKKIPFKALFPKSNDLALDLLEKLLAFNPTKRITVEEALRHPYLEPYHDPDDEPTAPPIPEGFFDFDKNKDALSKEQLKSKYLAPIDSISYATIN

SEQ ID NO: 6844 - protein, 513 aa, Magnaporthe grisea 70-15
MFNLISSLKVGAALVAAVWIWQRIMLYNHRRKIKRDSGCLPAAKFPDWDPLFGIGFTYHMVTEDILDFQIMKNTADCLEKYGNTFTSKAMGFNFIWTCEPENIKAVLSTQFDQFNNQGRSVGAEDFLGKGIFVSDGEHWQKSRALVRPNFARDQITDLVSVEERFQTLISLLPKDGSTVDLLPFMFDFTMDTSTHFLFGDSVKSLEANAHERSIGHHGQENLDEFSAAWDYAQNDMLSRFVLGPLRYVYKEKKAARCIKLVQDHVEKYVDEAIRYNSQVRAAGGDEKKEPEERYIFLRALAKQTQDRRMLRDELLNILVAGRDTTASLLSNMLHTMANRPDIWTKLKNEVAFLQGRIPTYEDIRNMKYMRWCINESLRLHTVLALVGKEASIDTTLPRGGGPDHKAPIFVAKGTFIAYSFLALHRRKDLFGEDAHEFKPERWETLRPGWNYLPFNGGPRICVGQQYALTEAQYVLIRFLQTFSAIESRDPEPWSIGNRMTTCPKNGVQVSLRC

SEQ ID NO: 6845 - protein, 513 aa, Mycoplasma mobile 163K
MKELEFGTAGLRGILGKTKEHLNIFHVARVIEGFAKYLKSETFNWKNKIVIIGRDNRRKSREFSRLAASILAFHKINVLISREIIATPIISYATKYHKALGAINITASHNPKEYNGIKLYDKNGSQILPDVVDKIKSNFLNYEDYTKKQALNQFIFSIKNKYINYIPKQTLQSYEEKVLKVGGSQKNLSNINLSFSPQHGTGAKIVKSIFKKLNVNAFFEEAQMKNDPDFTHTKSPNPEDKSSYENVIKLGLIHKSDAVLITDPDADRVGIGILRNNEYILLNGNETATLIFNYLIEINENKLQDKYLIYSFVSSSLPKKMAIENNIKWYEVATGFKYIGNLIEQIKNESKTSKLLFAFEESYGSLINDSLAYDKDAIQSCVILAKMISFYKKKSKTLLDVLEDIYKKYGYIKSESFSINLDEKNPLHLENIQSKFINLKFNEDFKIENFIKGKENIAPSNMIRISFQNLNWIALRPSGTEAKIKFYLYVVDKDKILVEKNWNILKEKILSII

SEQ ID NO: 6846 - protein, 512 aa, Triticum aestivum
NPDSAIWGNKIAWGHAASRDLVRWRHLPVATSPDQWYDINGVWSGSATVLPDGRIVMLYTGSTNASVQVQCLAFPTDPSDPLLINWTKYENNPVMYPPPGVGEKDFRDPTTAWFDGSDDTWRLVIGSKDDRHAGMVMTYKTNDFINYELVPGLLHRLPGTGMWECIDLYPVGGKRGIDMTEVVAAASTNGGDDVLHVMKESSDDDRHDYYALGRYDAAKNTWTPLDADADVGIGLRYDWGKFYASKTFFDPAKKRRVLWGWVGETDSEHADVAKGWASLQSIPRTVVLDTKTGSNLLQWPVEEVETLRTNSTNLGGVTVDHGSVFPLSLHRATQLDIEASFRLDQLDVAASKEADVGYNCSTSGGTTGRGTLGPFGLLVLADARRHGGDMERTGVYFYVARSLDGGLRTHFCHDEMRSSHANDIVKRVVGNIVPVLNGEEFTMRVLVDHSIVESFAMGGRLTATSRVYPTEAIYANAGVYLFNNATSARVNVTRLVVHEMDSSYNQAYMASL

SEQ ID NO: 6847 - protein, 242 aa, Ralstonia solanacearum
MPAAIDPSGFRIAPSILSADFARLGEEVRRVIEGGADWIHFDVMDNHYVPNLTVGPLVCEAIRPHAQRDGKPVPIDVHLMVRPVDRIIPDFAKAGADLITFHPEASEHIDRSLALIRDQGCKAGLVFNPATPLHYLDHVMDRLDMVLIMSVNPGFGGQSFIPEALTKLRAVRQKLDAYADRTGRRILLEIDGGVKADNIAEIARAGADTFVAGSAVFGKPDADGGYRGTVGALRSALEGITA

SEQ ID NO: 6848 - protein, 485 aa, Coccidioides immitis RS
MADNAPPATSSSLPPPPQAPAGAPGQQQLDKAQGNGQGNPSHMPPPPLPPVVIPQNTNPIPTAITSPMSGNMMSPTSAGGYVRRAAPEPNKRALYVGGLDPRVTEDILRQIFETTGHVQSVKIIPDKNFQSKGLNYGFVEYDDPGAAERAMQTLNGRRVHQSEIRVNWAYQSNNANKEDTSNHFHIFVGDLSNEVNDEVLLQAFSAFGSVSEARVMWDMKTGRSRGYGFVAFRERADAEKALSSMDGEWLGSRAIRCNWANQKGQPSISQQQAMAAMGMTPTTPFGHHHFPTHGVQSYDMVVQQTPQWQTTCYVGNLTPYTTQNDLVPLFQNFGYVVETRFQADRGFAFVKMDTHENAAMAICQLNGYNVNGRPLKCSWGKDRPPTGQFDYSPQQGANPAFNSGTSPYFPQYGGPGGPMTPQGPNPAGRGWDQSGANFGPGMPGQGYGQVPGGAAGYGRGQNNPGSGWAQPNAGNFGNGFGGYQA

SEQ ID NO: 6849 - protein, 137 aa, Brassica napus
PDLTLGTSQHSDSSFITILLQDQIGGLQILRKNSWVDVTPLPGALVINIGDYLQLITNDKFISVEHRVLANRAGPRISVAGFFSTNMLPNSTVYGPIKELLSEENPPKYKDITLEEYNRGYFEKGLDGTSHLSRFKI

SEQ ID NO: 6850 - protein, 345 aa, Arabidopsis thaliana
MGYEPDPDALRWGLHDLEVCTLTNAGSCSSVTRYESGGGGTQGYVREGYNQPVTGYVDNDAVIAQFYQDELSRVARAEASGINSLSPTSVVAQDWPHPHQGQENQGEAIDITQESDILHNHNGNMEDKNVARIRFEGGQSSPSRDDDSVCSVEIEEESWSEVGKRLNQMIPIAHVPKINGELPSEDEQISDHERLFQRLQLYGLVENKIEGDGNCQFRSLSDQLYRSPEHHNFVREQVVNQLAYNREIYEGYVPMAYNDYLKAMKRNGEWGDHVTLQAAADLFGVRMFVITSFKDTCYIEILPHFQKSNRLICLSFWAEVHYNSIYPEGELPIPEGKKKKKYWVF

SEQ ID NO: 6851 - protein, 86 aa, Thermococcus kodakarensis KOD1
MGRTTKVGSAGRFGPRYGLKIRRRVAAVEARMKQKHVCPVCGRKAVRRISTGIWQCQKCGATFAGGAYLPTTPAGKVAKRVTASKA

SEQ ID NO: 6852 - protein, 507 aa, Lolium rigidum
MNLEVAFLHEYASPRALVVAVVLVLVAVHLARSTSRAERLRRKLPCPRFTLPVIGHLHLIGSLPHVGLRDLARKHGPDVMLLRLGAVPTLIVSSPSAARAVLRTHDHVFASRPDTVVGDILFVGSTNVGHSPYGEYWRQVRKIITTHVLTAKKIRANLPYREQEARLALASVREAAAAGTAVDLTHLFSHFAHDMVSQAVAGRIHREDRWGKLFHDLFVGNGQLLGGFNLDDCFPSLARLGIGSANIAKQRKRWDDLLDEVIDRHTSTPMEKGDEPDFIDVMLSVQDEYKLTRNNIKSILMDMFQAGTDTTFIWLDYAMAELARAPQVMAKLQAEVRRCSTTNQLLTQEDLSSMSYLKAVMKETMRLHPPGPLLLPHASIADCEVEGYVVPAGTRVIINVWAIGRHASSWERAEEFVPERFLEGSVDANSDFYGNDFRLLPFGSGRRMCPGINFATLTFEIILANLIYHFDWELPEGSPGVDMTEAFGMDVHRKENLLLVPRVAKIV

SEQ ID NO: 6853 - protein, 326 aa, Pasteurella multocida subsp. multocida str. Pm70
MNKAKTGVLLVNLGTPESPTPKAISRYLWQFLTDPRVVDLPRYKWFPLLKGIILPLRAKRVAKNYASIWTEQGSPLLTITREQQHALQTYFKQQEKNIVVEVAMTYGEPSIKSAMQRLSTQQVDNLIVFPLYPQYSSSTTGAVFDAFAQVLKTQRGVLPFDFIHSYHTNEDYIAALVTTIQEHFQPDEFLLFSFHGIPVRYENMGDYYREHCKQTVLAVIDRLGLTENQWGLSFQSRFGKEEWLQPYTDQFLAQAPSQNIQKMAVICPGFAADCLETLEEIEEENKEIFLANGGISYRYIPALNARPEHIQMMANLILNKLNQTSK

SEQ ID NO: 6854 - protein, 246 aa, Brassica napus
MNIAHTIFGVFGNATALFLFLAPSITFKRIIKNKSTEQFSGIPYPMTLLNCLLSAWYGLPFVSKDNTLVSTINGTGALIERVYVLIFLFYAPKKEKAKIFGVFTAVLAVFATVALVSLFALHGNARKLFCGIAATVFSIIMYASPLSIMRLVIKTKSVEYMPFFLSLFVFLCGTSWFIYGLIGRDPFVAIPNGFGCALGTLQLILSIIYCGNKGEKSAEKDAKSLEMKGEEKKQNVVNGKQQEQQV

SEQ ID NO: 6855 - protein, 99 aa, Zea mays
VQYTIAMMGYGPEDKNAVLELTYNYGVKEYDKGNAYAQIAISTDDVYKTAEAIRVNGGQITREPGPLPGITTKITACTDPDGWKTVFVDNIDFLKELEE

SEQ ID NO: 6856 - protein, 238 aa, Arabidopsis thaliana
  misc_feature (120)..(120): Xaa can be any naturally occurring amino acid
  misc_feature (135)..(135): Xaa can be any naturally occurring amino acid
MASSMLSSATMVASPAQATMVAPFNGLKSSAAFPATRKANNDITSITSNGGRVNCMQVWPPIGKKKLETLSYLPDLTDSELAKEVDYLIRNKRIPCVESELEHGFAYREHGNSPGYYDGXRYWTMRKLPLFGCTXDSAQVLKEAEECTKEYPTASIRHHRFRQHPAKSQCISFHSPTRSPTPTRSIPPLLLAANPKTHPPIESIPRIFRSLLPPLASISGLKVCSPPAPISPSFLPPA

SEQ ID NO: 6857 - protein, 285 aa, Buchnera aphidicola str. Sg (Schizaphis graminum)
MSAIIIDGIKIAKKIELNLLKKIEEREKNKKRIPGLAVILIGKNPASEIYVKRKISVCKKVGFISKYWSFPINVDEKDILNLIEKLNNNINIDGILVQLPIPKQINYYKIFSSIRPDKDVDGFHPYNTGSLCQRNPTLRACTPKGIITMLNYTKIKTHGLNAVMVGASNIVGRPMSMELLLAGCTTTVTHRFTKNLRHHIKNADLLVVAIGKPNFLHGDWIKEGAIVIDVGINKLKDGSIVGDVDFKSASLKAAYITPVPGGVGPITVITLLENTLEACEKYHEF

SEQ ID NO: 6858 - protein, 650 aa, Oryza sativa
MRANSSAIYLLLAFLSHGTCSYMATTASGWDDHDFFRHCPPSRCSKDGPEIRFPHRLESSNTSSACRASCARLACSGQDTILHHPILGPCKVTSIDYKEAVINIIHLLPFPCPLQKLMVDKRIPAKIVSCSKEFTPSGTSPVPYELDHLQNAAENIFGPISCLSGTGQYFSYLVHAQLYMYLLPLDCRIVSRGSIPIPGSDSCSGPTFKEKAEKFINFAETTVSWGSFQDGVLDNCMACERQKQLCAFSSRRNQTFCTSHGNHHGTNYPNCTNMIPQLSILMQCANFPFSVNSATSSVAAFVVFSFIMATALYLSLKSRYDEEVHLKVEMFLRTYGTSKPTRYSFSDVKKITRRFKEQLGQGGFGSVYKGRLPNGVPVAVKMIEHSTGNGEEFINEVATIGQIHHINIARLLGFCSEGTRHILIYEFMPNESLEKCIFLHDPNTSQELLAPKKMLDVALGIARGMEYLHQGCNQRILHFDIKPNNILLDYNFNPKISDFGLAKLCARDQSIVTLTKARGTMGYIAPELYSRNFGEISYKSDVYSFGMLVLEMVSGRRNSDPSIENQNEVYFPEWIYEKVITEQDFVLSMGNDRRSRLKVRQMALVALWCIQWNPRNRPTMTKVVNMLTGRLQNIEVPPKPFVSYESHVVP

SEQ ID NO: 6859 - protein, 677 aa, Synechococcus elongatus PCC 7942
MIAAAPSPTAFPLPAVVGQGPIKLALILAAVDPGLGGVAIAGRRGTAKSVMARALHALLPPIEILENSFNADPNRAGDWDALTQQRQANGEELPTRVIPAPFCQVPLGITEDRLLGSVDVAQSIKRGETVFQPGLLAEAHRGVLYVDEINLLDDQIANLLLTAISEGRNRIEREGISIEHACRPLLIATYNPEEGPLRLHLLDRIAMPLSADAILEIEERVQAVDQALRYANDPAKVLEAYAEETESLRTQILLAREWLPDVTITPEQIGYLVREAIRGQVQGHRAELFAVRVARAAAALEGRTEVNADDLRLAVQLVIVPRATVLDSPPPPEEPPAAPPPPPPSQEQQGEDEQNEQEPDEPDEPENDSDDQQPDTPPPIPKEFVFDAEGVVLDPSVLVFAQQFSRQGKSGSRSLIFSEDRGRYIKPMLPRGPVRRIAVDATLRASAPYQKARRQRQPDRKVIVEDADIRSKQLVRKAGALVIFLVDASGSMALNRMQSAKGAVIRLLTEAYENRDQVALIPFRGEQAEVLLPPTRSITAARKRLEKMPCGGGLPLAHGLTQAVRVGTNAAQSGDIGQVVIVAITDGRGNIPLARSLGQPMEEGEKPDLKEELLDIAKRIRGLSMQLLVIDTERKFVGAGFGKELANAAGGQYYHLPKVSDQAIAAMAQSALRATLN

SEQ ID NO: 6860 - protein, 293 aa, Oceanicola granulosus HTCC2516
MAVLIDETTKVICQGLTGSQGTFHSEQAIAYGTKMVGGVTPGKGGQTHLDLPVFNSVHEARAATEANASVIYVPPPFAADSILEAIDAQMELIVCITEGIPVLDMMRVKRALEGSASVLIGPNCPGVITPDACKIGIMPGHIHKRGTVGVVSRSGTLTYEAVKQTTDVGLGQSTCVGIGGDPIKGTEHIDVLEWFLADDETESIIMIGEIGGSAEEEAAQFLKDEAKRGRTKPVAGFIAGRTAPPGRRMGHAGAIVAGGKGGAEDKIEAMKSAGIVVADSPATLGEAVLEAIG

SEQ ID NO: 6861 - protein, 296 aa, Neisseria gonorrhoeae FA 1090
MSVLINKDTKVLVQGFTGKNGTFHSEQALAYGTKVVGGVTPGKGGQTHLDLPVFNTMKEAVKETGADASVIYVPAPFVLDSIVEAVDSGVGLVVVITEGVPTLDMLKAKRYLETNGNGTRLVGPNCPGVITPGECKIGIMPGHIHTPGRIGIISRSGTLTYEAVAQTTNLGLGQSTCIGIGGDPIPGMNQIDALKLFQEDPDTDAIIMIGEIGGTAEEEAAEYIQSNVTKPVVGYIAGVTAPKGKRMGHAGAIISGGKGTAEEKFAAFEKAGIAYTRSPAELGTTMLEVLKAKGLA

SEQ ID NO: 6862 - protein, 360 aa, Nicotiana benthamiana
MSRFSLLLALVVAGGLFAAALAGPATFADENPIRQIVSDGLHELENGILQVVGKTRHALLFARFAHRYGKRYETVEEIKQRFEVFLDNLKMIRSHNKKGLSYKLGVNEFTDITWDEFRRDRLGAAQNCSATTKGNLKLTNVVLPETKDWREAGIVSPVKNQGKCGSCWTFSTTGALEAAYGQAFGKGISLSEQQLVDCAGAFNNFGCNGGLPSQAFEYIKSNGGLDTEEAYPYTGKNGLCKFSSENVGVKVIDSVNITLGAEDELKYAVALVRPVSIAFEVIKGFKQYKSGVYTSTECGNTPMDVNHAVLAVGYGVENGVPYWLIKNSWGADWGDNGYFKMEMGKNMCGIATCASYPVVA

SEQ ID NO: 6863 - protein, 540 aa, Oceanicola granulosus HTCC2516
MSVEVRVPALGESVTEATVATWFKKPGDAVEADEMLCELETDKVTVEVPSPAAGKLDEIVAAEGETVGVDALLANIAEAGHAGSSTDIKPREGKSANPEPAEPDAGTEGKSGADGSGDGGGGGEEIEITVPALGESVTEATVSTWFKKPGDSFEADEMLCELETDKVSVEVPAPAAGTLSKLLAEEGATVEAGGKLALMTTGKAAASAKAEGTPATTTSQTPEGDRGGYGDRGTPDTPPTTESRGDIEDAPSAKKMMAEKNLSADAVTGTGKGGRIMKEDVLNALNKPQQAEAPKPQAARAPSTPADADREERVKMTRLRQTIARRLKEAQNNAAMLTTYNEVDMGGIMDLRNEYKDLFLKKHGVKLGFMSFFVKACCHALNEVPDVNAEIDGTDVVYKNYVNMGIAVGTPNGLVVPVVRDAHEKGFAQIEKEIAELGAKGRDGKLSMADMQGGSFTISNGGVYGSLMSSPILNPPQSGILGMHKIQERPMVVKGQIVARPMMYLALSYDHRIVDGKGAVTFLVRVKEALEDPRRLLMDL

SEQ ID NO: 6864 - protein, 157 aa, Glycine max
  misc_feature (147)..(147): Xaa can be any naturally occurring amino acid
MQFLRGVGGGGGGAGSTAWEAFRRHFSRKRAVDIRRINPKVPKEEAVAISGRLLQILADHGPLTVGNTWNHAKDAAIDGLNSKTHMKILLKWMWGRRIIKLSCTQAGNTKKVLYSPFTADDAEAAEEPSPAEEQPKKKGWKGKHPKXQTKKQPAAAA

SEQ ID NO: 6865 - protein, 679 aa, Orobanche minor
MGTSGGGCSIVWFRRDLRVEDNPALAAGVRAGAVLPLFIWAPEEEGHYYPGRVSRWWLKQSLSHLDISLRSLGTSLVTRRSTDSVSSLLEVIKLTGAKQIFFNHLYDPISLVRDHRAKEVLTAEGVAVRSFNADLLYEPWEVHDQEGQPFTTFAGFWERCLSMPYDPEAPLLPPKRIISGDLSRCTSDTLVFEDESEKGSNALLARAWSPGWSNADKALTVFTNGPLLEYSKNRRKADSATTSFLSPHLHFGEVSVRKIFHLARIKQVLWANEGNKAGEESINLFLKSIGLREYSRYMSFNHPYSHERPLLGHLKYFPWVIDEGYFKAWRQGRTGYPLVDAGMRELWATGWLHDRIRVVVSSFFVKVLQLPWRWGMKYFWDTLLDADLESDALGWQYISGSLPDGCELDRIDNPQFDGYKCDPNGEYVRRWLPELARLPTEWIHHPWNTPESVLQAAGIELGSNYPLPIVGIDTAKARLQEALSQMWQHETASRAAIENGVEEGLGESSEFTPIAFPPNTQIDMDNEPVRNNPINAITRRYEDQMVPTMTSSLIRVVDEETSIGLDISDNDGRAEVPSNIVNFMEEPRGGPHDDNGVIVDGNDNNGFLQYEFLRGRRHSEDSTAESSSSGRRERDGGVVPVWSPSNSTYPNQFPGEDSGIGTSSSFLPRHPQSASLTSW

SEQ ID NO: 6866 - protein, 435 aa, Escherichia coli
SLMAGLPNSSNALQQWHHLFEAEGTKRSPQAQQHLQQLLRTGLPTRKHENWKYTPLEGLINSQFVSIAGEISPQQRDALALTLDSVRLVFVDGRYVPALSDATEGSGYEVSINDDRQGLPDAIQAEVFLHLTESLAQSVTHIAVKRGQRPAKPLLLMHITQGVAGEEVNTAHYRHHLDLAEGAEATVIEHFVSLNDARHFTGARFTINVAANAHLQHIKLAFENPLSHHFAHNDLLLAEDATAFSHSFLLGGAVLRHNTSTQLNGENSTLRINSLAMPVKNEVCDTRTWLEHNKGFCNSRQLHKTIVSDKGRAVFNGLINVAQHAIKTDGQMTNNNLLMGKLAEVDTKPQLEIYADDVKCSHGATVGRIDDEQIFYLRSRGINQQDAQQMIIYAFAAELTEALRDEGLKQQVLARIGQRLPGGAREGGSHHHHHH

SEQ ID NO: 6867 - protein, 174 aa, Brassica napus
MASINLSSSSPSTISLSRSRLSQTSTTTTLLHRITLPSHHPSSSFSIKTTSKVKASVISREDDLLSSYTNGSLVDEDSSSPAPANGFVAEDDDYELDLPTPGFSSIPEAIEDIRQGKLVVVVDDEDRENEGDLVMAAQLATPEAMAFIVKHGTGIVCVSMKDDDLQRLNLPPMV

SEQ ID NO: 6868 - protein, 616 aa, Cryptococcus neoformans var. grubii
MASSSTLANDDWKQGLAAPPKDLRPQTEDVTATQGSRFEDFGLRRELLMGIYTAGFERPSPIQEQAIPMALTGRDILARAKNGTGKTASFIIPTLNRINTSLSHIQALILVPTRELALQTSQVCKTLGAHIPNLQVMITTGGTTLRDDILRLQQPVHILVGTPGRILDLGSKGIAGLNKCGIFVMDEADKLLSEDFMPVIEQTLALCPQERQVMLFSATFPWTVKEFKDQHMVQPYEINLMDELTLKGVTQYYAYVEESQKVHCLNTLFSKLQINQSIIFCNSTNRVELLAKKVTELGYSCFYSHAKMQQAHRNRVFHDFRNGMTRNLVCSDLLTRGIDIQAVNVVINFDFPRTAESYLHRIGRSGRFGHLGLAISLLTLEDRHNLYRIESELGTEIAPIPAVIDPVLYVAPAMVEEERESPPPKPAAIAAPPAQQQPQQRQRQHPPVPSHQVAHHSPAAAPIQQQQQQQQQQQQPQYQLAYGQGPPQPQVPFQQANSSPAPAPLPSYPQQAPTQAQGPAQMQSPPSEPATQPQASAQIPVQGQTPPIQPRAQQQGQQQPSQPGQAEGQSQPNRRPNTGGFRGNGRGQGHRGRGRGRGGQPGHPGAGASQSQQAQA

SEQ ID NO: 6869 - protein, 364 aa, Photobacterium leiognathi
MALSSAKEIIDDIRQGRMVILMDDESRENEGDLIIASEMVTPEAINFMATHGRGLICLTLSKARCKTLNLPLMVQGNNDNFSTPFTISIEAAKYVTTGISASDRAKTVLAAVAPNAKSTDIVMPGHIFPLMAQDGGVLIRAGHTEAGCDVARLAGLEPSSVIVEILNEDGSMARRPQLEIFAEKHGLKLGTIADLIEYRTQQESHIERISEYELNTEYGIFTLVTYRDTIDNQAHFALCKGEIQAKAATLVRVHVKDTLKDILQVGLSQWSLEAAMQRIQTEDGVLVIISQQESPKTLFEKLDMYAKEQPNSPHSGIVQSRNIGLGSQILADLGVKKIRLLSNSNQGYRALSGFGLEVVEYIYD

SEQ ID NO: 6870 - protein, 462 aa, Streptococcus thermophilus CNRZ1066
MAFEIIMPKLGVDMQEGEIIEWKKQEGDVVNEGDILLEIMSDKTNMELEAEDSGVLLKITRQAGEIVPVTEVIGYIGAEGEVVADNAAIAPAAEAAPQVEKVADVETPAAKPQPQVAIVHEGGKIRATPKARKVAREMGIDLAQVLGTGAKGRIHADDVENFKGAQPKATPLARKIAADLGIDLATVSGTGFGGKITKEDILAISAPAQVKVAAAAPAVEAKPEKVLPEGVEVIPMSAMRKAISKGMTHSYLTAPTFTLNYDVDMTNLIALRKQVLDPIMNKTGMKVTFTDLIGLAVVRTLMKEEHRYLNASLINDAQNIELHKFVNLGIAVGLDDGLVVPVIHGADKMSLSDFVGASKDVIKKAQAGKLKAAEMSGSTFSITNLGMFGTKSFNPIINQPNSAILGVSATIQTPVVVDGEVVVRPIMGLCLTIDHRIVDGMNGAKFMVDLKHLLENPMELLI

SEQ ID NO: 6871 - protein, 337 aa, Streptococcus thermophilus CNRZ1066
MSNTSMSETKLMALREAVNLAMSEEMRKDPDIFLMGEDVGIYGGDFGTSVGMLAEFGEKRVKDTPISEAAIAGAAVGAAITGLRPIVDLTFMDFITIALDAIVNNGAKNNYMFGGGLKTPVTFRVASGSGIGSAAQHSQSLESWLTHIPGIKVVAPGNANDAKGLLKSSIQDNNIVIFMEPKALYGKKEEVTQDPDFYIPLGKGEIKREGTDLTIVTYGRMLERVLKAAEEVAEQGINVEVVDPRTLVPLDKELIFESVKKTGKLMLVNDAYKTGGFIGEIAAMVTESEAFDYLDHPIVRLASEDVPVPYARVLEQAVLPDVEKIKAAIIKMANKGN

SEQ ID NO: 6872 - protein, 486 aa, Phaeodactylum tricornutum
MVNKSNKVLNKNITNLVNQTYQYGFSTTIEKDIIEKGLNEKTIHLISQKKKETKFLLNFRLKAYKKWKQMPEPEWAYIKFPQIDYQDVIYYSAPKSQKKLKDLSEVDPELLKTFEKLGISLTEQKRLANVAVDVVFDSASIGTTFKEELNKSGVIFSSISEAVTEYPELVEKYLGSVVPIGDNYFAALNSAVFTDGSFCYIPEDTICPLDLSTYFRINDEKSGQFERTLIISEKNSQVNYLEGCTAPQYDSNQLHAAVVELIALENANIKYSTVQNWYAGNEFGKGGVYNFVTKRGLCAGSSSKISWTQVETGSSITWKYPSCVLIGDNSQGEFYSVALTNNYQQADTGTKMMHIGRNTRSRIISKGISAGKSKNSYRGLVNVTSKALGARNYSQCDSLLIGDLSNANTFPFISVQNSTTKIEHEASTSKIGEEQIFYFLQRGICLEKAVELMISGFCREIFTELPLEFAAEADRLLTLKLEGSVG

SEQ ID NO: 6873 - protein, 502 aa, Arabidopsis thaliana
MVLSHAVSESDVSVHSTFASRYVRTSLPRFKMPENSIPKEAAYQIINDELMLDGNPRLNLASFVTTWMEPECDKLIMSSINKNYVDMDEYPVTTELQNRCVNMIAHLFNAPLEEAETAVGVGTVGSSEAIMLAGLAFKRKWQNKRKAEGKPVDKPNIVTGANVQVCWEKFARYFEVELKEVKLSEGYYVMDPQQAVDMVDENTICVAAILGSTLNGEFEDVKLLNDLLVEKNKETGWDTPIHVDAASGGFIAPFLYPELEWDFRLPLVKSINVSGHKYGLVYAGIGWVIWRNKEDLPEELIFHINYLGADQPTFTLNFSKGSSQVIAQYYQLIRLGHEGYRNVMENCRENMIVLREGLEKTERFNIVSKDEGVPLVAFSLKDSSCHTEFEISDMLRRYGWIVPAYTMPPNAQHITVLRVVIREDFSRTLAERLVIDIEKVMRELDELPSRVIHKISLGQEKSESNSDNLMVTVKKSDIDKQRDIITGWKKFVADRKKTSGIC

SEQ ID NO: 6874 - protein, 216 aa, Medicago sativa
GSWLVMRLMEPGYMVRATVRDPENLKKVSPLLELPGAKSKLSIWKADLGEEGSFDEAIKGCTGVFHVATPMDFESKDPENEMIKPTIKGVLDIMKACLKAKTVRRLIYTSSAGTLNVTEDQKPLWDESCWSDVEFCRRVKMTGWMYFVSKTLAEQEAWKFAKEHKMDVITIIPPLVVGPFLIPTMPPSLITALSPITGNEAHYSIIKQGQYVHLDD

SEQ ID NO: 6875 - protein, 531 aa, Xylella fastidiosa Temecula1
MFDESLKAQLKAYLDRVIRSIHIHASVDESHKSREMLDLLENIVLLSGKKVVLEVHRDDDKRKPSFGLSTPGESISIRFAGLPMGHEFASLVLGLLQVGGHPPKVADDLIERVRNLDGHYRFETYFSVSCQSCPDVVQALNMAAVLNPQIEHVAIDGALFQDEVEARQIMSVPTVYLNGELFGQGRMTLEQIVAKLDSGAAKRTAESIQAKAVFDVLVVGAGPAGVAAAVYAARKGVRTGLVAERFGGQVLDTMTIENFISVPETDGPRMAAALEQHVRQYEVDIMNLQRVETLVPAGENGFIEVRLASGASLSSRTVILSTGARWRQMNVPGEDEYRNKGVAYCPHCDGPLFKGKRVAVIGGGNSGVEAAIDLAGIASYVTLLEFDTKLRADEVLQRKLRSMSNVEVIMGAQTTEVRGDGKKVTGLVYVDRSTGGSFILALEGVFVQIGLLPNTEWLKGRVELSPRGEIVVDERGHTSLPGVFAAGDATTVPYKQIVIAMGEGSKAALSAFDYLIRNVVEITGIAQAQAA

SEQ ID NO: 6876 - protein, 435 aa, Staphylococcus aureus subsp. aureus MSSA476
MTTDILNISEEQLVDYSKAHNEPSWMTELRKKALKLTETLEMPKPDKTKLRKWDFDSFKQHDVKGDVYQSLSQLPESVREIIDVDHSKNLVIQHNNTIAYTQVDDNASKDGVIVEGLADALMNHSDLVQKYFMKDAVTVDEHRITALHTALVNGGVFVYVPKNVVVEHPVQYVVLHDDENASFYNHVIIVTEESAEVTYVENYLSNASGEGNQLNIISEVIAGANSNITYGSVDYMDKGFTGHIIRRGITEADASINWALGLMNEGSQIIDNTTNLFGDRSTSSLKSVVIGTGEQKINLTSKIVQYGKETDGYILKHGVMKEHASSVFNGIGYIKHGGTKSIANQESRVLMLSEHARGDANPILLIDEDDVQAGHAASVGRVDPDQLYYLMSRGISQREAERLVIHGFLDPVVRELPIEDVKRQLREVIERKVSK

SEQ ID NO: 6877 - protein, 161 aa, Triticum aestivum
MAVSELEVDGVVFPPLARPPGSEHAHFLAGAGVRGMEIGGNFIKFTAIGVYLQADAAVSALAAKWAGKPAADLASDAAFFRDVVTGEFEKFTRVTMILPLTGAQYSDKVTENCVAYWKATGVYTDAQAAAVHKFKEAFGAPKVSPPEASILLYPFPPAGLP

SEQ ID NO: 6878 - protein, 714 aa, Oryza sativa (japonica cultivar-group)
MTPTVLMEFGQQRQIKRGYDEMAFRGMASAAPRGYAETVGESEGAAGSPVRVDSEDSSAPKRKCISLNSDGFDVKREIFVPAKMSSSERRHLRKRFRTELDSVRNLLKKPEFAVPVPVNRAPALSSSAAPRGKKGQRGNHVVRGAKGRFLPTKPRPEASTVLTEDAIFKQCDAILKKLMTQKCSNIFDSPVDAVKLNIPDYFQIIKKPMDLGTIRNKLDSGSYTSPSEFAADVRLTFSNAMTYNPRGHVVHDYAIQLNKMFESRWRTIEKKLASIATEAHVEVDRADSKRRKTPPVDCSEVSTECVRPTESVRPTESVKPKMTFEEKESFGNCLASLSEDPEVPSHIIDLLQQCIDNNTDQLGDGEIEIDIHAVSDDLLFELKKHVDKYLQEREQSQQAKSEPSENEAANVSGLSHSSTNPCKGGDPVEEDVDICGNASPILIEKDAHNNPNKCGSPSSSSSDSGSSSSDSESGSDSESEQEKGGSPGKPKGSKRSEQLVEQEKSDVISPVDAIRPADDVELREQDNESKPAPEGENSKPDRQVSPDKLLRAALLRSRYADVIVKAQGILSQGGDKQEELEKLQKEEKARLLAEGNAAMEARRAEAEAEAKRKRDLEREKARQALQEMERTVEINDNLHLKDLEMLGTATTEHIVSSVDETSPEHSQDGMPSFLPGSGNPLEQLGLFMKADEEEEEEDPSSVPSTKDAEEGEIN

SEQ ID NO: 6879 - protein, 465 aa, Staphylococcus aureus subsp. aureus MSSA476
MAKKAPDVGDYKYGFHDDDVSIFRSERGLTENIVREISNMKNEPEWMLDFRLKSLKLFYKMPMPQWGGDLSELNFDDITYYVKPSEQAERSWDEVPEEIKRTFDKLGIPEAEQKYLAGVSAQYESEVVYHNMEKELEEKGIIFKDTDSALQENEELFKKYFASVVPAADNKFAALNSAVWSGGSFIYVPKNIKLDTPLQAYFRINSENMGQFERTLIIADEGASVHYVEGCTAPVYTTSSLHSAVVEIIVHKDAHVRYTTIQNWANNVYNLVTKRTFVYENGNMEWVDGNLGSKLTMKYPNCVLLGEGAKGSTLSIAFAGKGQVQDAGAKMIHKAPNTSSTIVSKSISKNGGKVIYRGIVHFGRKAKGARSNIECDTLILDNESTSDTIPYNEVFNDQISLEHEAKVSKVSEEQLFYLMSRGISEEEATEMIVMGFIEPFTKELPMEYAVEMNRLIKFEMEGSIG

SEQ ID NO: 6880 - protein, 374 aa, Zea mays
MAPTTATKDDSGYGDERRRELQAFDDTKLGVKGLVDSGVKSIPSIFHHPPEALSDIISPAPLPSSPPSGAAIPVVDLSVTRREDLVEQVRHAAGTVGFFWLVNHGVAEELMGGMLRGVRQFNEGPVEAKQALYSRDLARNLRFASNFDLFKAAAADWRDTLFCEVAPNPPPREELPEPLRNVMLEYGAAVTKLARFVFELLSESLGMPSDHLYEMECMQNLNVVCQYYPPCPEPHRTVGVKRHTDPGFFTILLQDGMGGLQVRLGNNGQSGGCWVDIAPRPGALMVNIGDLLQLVTNDRFRSVEHRVPANKSSDTARVSVASFFNTDVRRSERMYGPIPDPSKPPLYRSVRARDFIAKFNTIGLDGRALDHFRL

SEQ ID NO: 6881 - protein, 377 aa, Zea mays
MARRSAPLLRRLVSASSPPALQSLTDHVGVLARRTVTYMPRPGDGAPRAVTLIPGDGIGPLVTGAVRQVMEAMHAPVYFETYDVHGDMPTVPPAVIESIRRNKVCIKGGLATPVGGGVSSLNMQLRKELDLYASLVHCSNLPGLPTRHEGVDIVVIRENTEGEYSGLEHEVVPGVVESLKVITKFCSERIAKYAFEYAYLNNRKKVTAVHKANIMKLADGLFLESCREVASKYPGIQYNEMIVDNCSMQLVSKPEQFDVMVTPNLYGNLVANTAAGIVGGTGIMPGGNVGQDYAIFEQGASAGNVGNENLVEQKKANPVALLLSSAMMLRHLQFPSFADRLETAVKRVVAEGTYRTKDLGGSSTTQEVTDAVVANLD

SEQ ID NO: 6882 - protein, 148 aa, Yersinia pestis biovar Medievalis str. 91001
MPERRAKCKQREIMRLLHTMLRVGDLQRSIDFYTKVLGMRLLRTSENTEYKYSLAFVGYSDESKGSVIELTYNWGVDQYDMGTAFGHLALGVDDVAATCDQIRQAGGKVTREAGPVKGGNTIIAFVEDPDGYKIELIENKSAGDCLGN

SEQ ID NO: 6883 - protein, 159 aa, Aspergillus nidulans FGSC A4
MADEAHEVTFESADAGASATYPMQCSALRKNGFVVIKNRPCKIVDMSTSKTGKHGHAKVHLVAIDIFTGKKYEDLSPSTHNMDVPNVSRKEYQLLDVTDDGFLSLMDDSGDTKDDVKVPEGEVGERINKMFKEEEKDCNVVILTSMGEQMCMEVKEAPK

SEQ ID NO: 6884 - protein, 152 aa, Brassica napus
MTKEVCSNIGLWLLFTLLLTSKYVVDLEASHHVYNRLTQSSNIKSPSVNQPYRTGFHFQPPKNWMNDPNGPMIYKGIYHLFYQWNPKGAVWGNIVWAHSTSTDLINWDPHPPAIFPSEPFDINGCWSGSATILPDGKPVILYTGIDPKNQQV

SEQ ID NO: 6885 - protein, 968 aa, Phaseolus vulgaris
MANRNLEKMASIDAQLRQLAPSKVSEDDKLIEYDALLLDRFLDILQNLHGEDLKETVQEVYELSAEYEGKHDPKKLEELGNVITSLDAGDSIVVAKSFSHMLNLANLAEEVQISRRRRNKLKKGDFADENNATTESDIEETLKKLVFELKKSPQEVFDALKNQTVDLVLTAHPTQSVRRSLLQKHARIRNCLSKLYAKDITPDDKQELDEALQREIQAAFRTDEIRRTPPTPQDEMRAGMSYFHETIWNGVPSFLRRVDTALNNIGIKERVPYNAPLIQFSSWMGGDRDGNPRVTPEVTRDVCLLARMMAANMYYSQIEDLMFELSMWRCNDELRVHADEVHRSSNKDEVAKHYIEFWKKVPTNEPYRVVLGEVRDRLYQTRERSRHLLSNGYSDIPEENTFTSVEEFLQPLELCYRSLCACGDRAIADGSLLDFLRQVSTFGLSIVRLDIRQESDRHTDVLDAITKHLEIGSYQEWSEEKRQEWLLSELSGKRPLFGPDLPQTEEIRDVLDTFHVIAELPPDNFGAYIISMATAPSDVLAVELLQRECHVKHPLRVVPLFEKLADLEAAPAALARLFSVDWYKNRIDGKQEVMIGYSDSGKDAGRFSAAWQLYKAQEELVKVAKKFGIKLTMFHGRGGTVGRGGGPTHLAILSQPPDTIHGSLRVTVQGEVIEQCFGEQHLCFRTLQRFTAATLEHGMNPPISPKPEWRAMMDQMAVIATEEYRSIVFKEPRFVEYFRLATPELEYGRMNIGSRPAKRRPSGGIETLRAIPWIFAWTQTRFHLPVWLGFGAAFKQVLDKNAKKNLSMLQEMYNQWPFFRVTLDLVEMVFAKGDPKIGALNDRLLVSKDLWPFGDQLRNKYEETKKLLLQVAGHKEILEGDPYLKQRLRLRHSPITTLNVFQAYTLKRIRDPNYKVKARPRISKESAEASKSADELIKLNPTSEYAPGLEDTLILTMKGIAAGMQNTG

SEQ ID NO: 6886 - protein, 853 aa, Vibrio vulnificus CMCP6
MSKLKLVIVGNGMVGHRYIEDLVDKTDVSQYDITVFCEEPRVAYDRVHLSSYFSHHTADELSLVKTGFYEKHAIKVLLGERAININREKQTVYSSSGREIQYDKLILATGSYPFVPPIKGNESKDCFVYRTIEDLKAIEACAKKSKSGVVIGGGLLGLEAAGALKALGMETHVVEFAPKLMAEQLDQAGGDQLRQKIERMGVKVHTSKNTLEIAAEGEQARNVMRFADGTELETDFIVFSAGIRPQDKLARQMGLGIAPRGGIEINDHCQTTDSNIYAIGECASWNKMFYGLVAPGYKMATVAVDHLLGNVDSKFEGADMSAKLKLLGVKVGSIGDANGRTPGCKSYVYQNEELEVYKRLIVSADNKKLLGAVMVGDTSDYGDLLQLMLNEIELPQHPDTLILPAHAGAEKPKLGADSLPDSAVICSCFDVTKGKIAQAVADGHHTIGDIKAVTGAGTGCGGCIPLVTSVLNAELAKAGVEVKSDICEHFAYSRQELFHLIRIEEIKTFDELLAKHGKGYGCEVCKPAVGSILASCWGEHILKPQLVKLHDTNDNFLGNMQKDGTYSVIPRMAGGEVTPQALKVLAEVAAEYNLYTKVTGAQRIGLFGAQKDDLPAIWKKLIAAGYETGQAYAKALRMAKTCVGSTWCRYGVQDSVGLGVFIENRYKGIRTPHKMKFGVSGCTRECAEAQGKDLGIIATDAGWNMYVCGNGGMKPRHADLLASDLDQETLIKYIDRFMMFYIRTSAPLQRTSVWLGNMEGGVDYLRQVIVEDKLGINEQLEADIAKLVEAYRCEWNETINDEAQLTRFAHFINSDKRDENVVFVSERQQHRPATFAEKHPELKGDILHVAVTE

SEQ ID NO: 6887 - protein, 175 aa, Oryza sativa
MAPSVMASSATSVAPFQGLKSTAGLPVNRRSSSSSFGNVSNGGRIRCMQVWPIEGIKKFETLSYLPPLTVEDLLKQIEYLLRSKWVPCLEFSKVGFVYRENHRSPGYYDGRYWTMWKLPMFGCTDATQVLKELEEAKKAYPDAFVRIIGFDNVRQVQLISFIAYKPPGCEESGGN

SEQ ID NO: 6888 - protein, 587 aa, Treponema denticola ATCC 35405
MDKNEILNRAKKYVSEEKEVKFAEEVKALIEKNDEKELYDRFYRDLEFGTAGLRGIIGGGTNRMNPLVIKNATQGLADYLIEAKSEKAKAGSLSAVIAYDSRRFSDVFAKTAALIFAANNIRCYLFSSLRPTPELSYAIRELGCDTGIVVTASHNPPEYNGYKAYWSDGAQITPPHDLGIIKKVGEVSSIKMMSEEEALKNGKLVIIDKEIDEKYWAMLKKKISRQEIIKNMASKVKIVYTPLHGTGAMHVEKVLGEMGFNVISVPEQREPDGNFPTVSYPNPEDPKALKMAMDLAIKEGADILMATDPDADRFACAVKNDAGEMQLISGNQMGALFADYICLTLKEQNKLPQNAAIVRSIVTSPLSDLIAASYNVQSEECLTGFKWICGVAERMVSTGSHSYLYGYEESFGYNFGTEVRDKDGIASSAICAEMTLYWRSKGKSLLDRLNEIFSQFGFYGEKTINMVYPGAEGLKIMQDMMVRVRERNLSEIAGVKVKTIRDIQESTEYSPLEPAKKTKVTLPKSNVLQYYLEDGSIICIRPSGTEPKIKIYIIHSEKVVSSVEEAKKQSDKKIAEFEKEFNGVLNA

SEQ ID NO: 6889 - protein, 954 aa, Bordetella pertussis Tohama I
MSRAPDTHSDFIPRHIGPSDEDQATMLVAIGAASLDALIDEVVPPRIRSRAPLALPAARSETDVLQDLKRIAARNQIYRNYIGQGYYGTHTPNVVLRNVLENPAWYTAYTPYQPEISQGRLEALLNYQTMVADLTGLDISNASLLDEGTAAAEAMTLARRGSRSSSPVFFVSQHCHPQTLEVVRTRAEGLGIELVIGDESRGLPECFGVLLQYPHSLGGVADYRELAQAAHAQGAVVACVTDLLALALIEPPGQWGADIAVGSAQRFGVPFGFGGPHAGFMACRDAYKRNMPGRLVGVSKDAQGNPALRLALQTREQHIRREKATSNICTAQVLLAVMAGLYAVWHGPRGVRRIAERVQSLTGALRAALAGLGVKVANDTWFDTLSLETGAATPAILAAADCARINLRQVDGARLAVSLDETVTLADLQALVNVFAAGLGKDEVALAPPQASLDGIPAAVRRQGPILSHPVFSSVQSETDMLRYLRKLADKDLALDRTMIPLGSCTMKLNATAEMIPITWPEFALIHPFAPASQTPGYRELIEGLSAQLCEITGYDGISLQPNSGAQGEYAGLLAIRAYHQANGQPQRNVCLIPASAHGTNPASAQLAGMDVVVVASDANGNVDLADLRARIAQVGERLAALMITYPSTHGVFEEAVTEICDAVHEAGGQVYLDGANMNAMVGVAQPGKFGSDVSHLNLHKTFCIPHGGGGPGVGPVAVRAHLAPYLPGVLDARGRLDPEAKVGPVSAAPYGSAGILPIPYVYIALMGAEGLRRATEVAILNANYIATRLRGHYPVLYAGRNGRVAHECILDVRPLKETSGISAEDIAKRLMDYGFHAPTMSFPVAGTLMVEPTESEGLAELERFIEAMIAIRAEIAQVESGERDRDDNVLRNAPHTAQMLLAEEWHHDYPRQQAAYPVASLRENKYWPPVARVDNAYGDRNLVCACLPVEAYA

SEQ ID NO: 6890 - protein, 216 aa, Gossypium hirsutum
MDFVVQDYDMVDFGSVSESGTDRPVNFSDDYMMLASSYPKRRAGRKKFRETRHPVYRGVRRRNPGKWVSEVREPNKKSRIWLGTFPKADMAARAHDVAAIALRGKSACLNFADSAWKLPVPASSDPKDIQKTVAEVAETFRTAEHSSGNSRNDAKRSENTEMQKGFYLDEEALFGTQRFWANMAAGMMMSPPRSGHDGGWEEHEVDDYVPLWSYSI

SEQ ID NO: 6891 - protein, 393 aa, Neisseria gonorrhoeae FA 1090
MIIDVKVPMLSESVSEGTLLEWKKKVGEAVARDEILIDIETDKVVLEVPSPQAGVLVEIVAQDGETVVADQVLARIDTAATVAAEAPAAAPAEAAPAAVPAAAQNNAAMPAAAKLAAETGVDVNVLQGSGRDGRVLKEDVQNAAAKPAAAVAPAVALPAGARPEERVPMSRLRARVAERLLASQQENAILTTFNEVNMKPIMDLRAKYKEKFEKEHGVKLGFMSFFVKAAVTALKKYPVVNASVDGKDIVYHGYFDIGIAIGSPRGLVVPILRDADQMSIADIEQAIVDYAKKAKDGKIAIEDLTGGTFSITNGGTFGSMMSTPIINPPQSAILGMHATKERAVVENGQVVVRPMMYLALSYDHRIIDGREAVLTLVAIKDALEDPVRLLLDL

SEQ ID NO: 6892 - protein, 475 aa, Prunus armeniaca
MSTLKARSVQARASDGDLENLVPSKPQGKSSGTVFPFVGVACLGAILFGYHLGVVNGALEYLSKDLGIAENAVLQGWVVSALLAGATVGSFTGGALADKFGRTRTFQLDVIPLAIGAFLCATSQSVQTMIVGRYLLAVGIGITSAIVPLYISEISPTEIRGALGSVNQLFICIGILGALVAGLPLAANPLWWRTMFGVAIVPSVLLALGMAASPESPRWLFQQGKISEAEKAIKTLYGKERVSEVMHDLTSATQGSVEPEAGWFDLFSSRYWKVVSVGAALFLFQQLAGINAVVYYSTSVFRSAGITSDVAASALVGAANVFGTAVASSLMDRQGRESLLLISFGGMAASMLLLSLSFTWKVLAPYSGPLAVAGTVLYVLSFSLGAGPVPALLLPEIFASRIRAKAVSLSLGMHWISNFVIGLYFLSFVTKFGISSVYLGFAGVCLLAVLYISGNVVETKGRSLEEIERALSVST

SEQ ID NO: 6893 - protein, 107 aa, Dehalococcoides ethenogenes 195
MVMEITDQSFAAEVLKSDKPVLVDFWAPWCGPCRMVAPIIDKLSTKYEGKFKFCKLNVDENKTTAAQYRVMSIPTLLFFKSGQVADMVVGAVPESALSQKIDQLLQK

SEQ ID NO: 6894 - protein, 411 aa, Glycine max
MNALAATNRNFKLASRLLGLDSKLEKSLLIPFREIKVECTIPKDDGTLQSYVGFRVQHDNARGPMKGGIRYHPEVDPDEVNALAQLMTWKTAVANIPYGGAKGGIGCDPAELSISELERLTRVFTQKIHDLIGIHTDVPAPDMGTGPQTMAWILDEYSKFHGYSPAVVTGKPIDLGGSLGRDAATGRGVLFATEALLNEYGKSVSGQRFVIQGFGNVGSWAAQLISNKGGKVVAVSDITGAIKNSNGLDIPSLLEHSKVHRGVKGFNGSDPIDPNSILVEDCDVLVPAALGGVINRENANEIKAKFIVEAANHPTDPEADEILKKKGVVILPDIFANSGGVTVSYFEWVQNIQGFMWDEEKVNNELKTYMTKGFKDVKEMCKTHECDLRMGAFTLAVNRVARATVLRGWEA

SEQ ID NO: 6895 - protein, 539 aa, Oceanicola granulosus HTCC2516
MGFRPSLPDSLPVIGQAPGAPQVLLAFGHGHLGLTQSPATARLIADLVDGRSPEIHLAPYRVDRFRGAVKTRTADTPAPRAPATPAPAGDDPRPLVHFTPRTGWINDPNGLIHADGQWHAFYQYNPAGITHGPMHWGHAVSDDLLNWSELDVALAPDPDEGEAFSGSAVAASEGPFAPALGDAAYALVYTGHQPLDAPPPGDARERQCLALAGPGLDGIRRFERNPVLEDAEYRHFRDPKVIFHAESGRWIMVITLGQEIGFYSSPDLVEWRAESRFGAGHGAHSEHPWECPDLFPLDAPDGARRWVLVVGVATGGVTGGSATQYFVGDFDGTTFTCADSPETVLWLDHGPDFYAAQTFSGAPQRTMLAWMNNWAYAQQTLDGADWRGSLSLARVLRLEDSPDGPRLCHAFTDLGPVARVGLGERRQTDGLWRIDETLELADGAARHLRLAPDAPTLELRRAGDMVSARLLRDGRLDGADVPAFAVDSTARIPCPGPVRLEAVMDRTRIEILIADGRASFSALSYAHEPGAAAPVLDDL

SEQ ID NO: 6896 - protein, 266 aa, Ralstonia solanacearum
MIALDWLHDGTVALLTLSRPPANAFTPEGLRQLQATVETLDADPRVRALVITGDGPKFFSAGADLNTFASGDRDVAREAAARFGAAFEALQNARPVVIAAINGYAMGGGLECALACDIRIAERHAQLAVPETAVGLLCCGCGTQTLPWLVGEGWAKRMILTGERIDAQTALRIGLVEEVVDTGAAREAALAMARRVTTLSPRAVTFSKALIHQARHGVPRTAALAVERERFVDLFGHPDQREGVNAFLEKRPPRWHTAARPEEALP

SEQ ID NO: 6897 - protein, 112 aa, Shewanella sp. MR-7
MKLVSAIIKPFKLDDVREAIAGIGIEGMTVTEVKGFGRQKGHTELYRGAEYQVDFLPKVKLEIATKAENLDMLIEAITSAAHTGKIGDGKIFVIDLEHAIRIRTGELDTEAL

SEQ ID NO: 6898 - protein, 416 aa, Shewanella sp. MR-7
MEELTKLGVTVSELRFALDTFYFLISGALVMWMAAGFAMLEAGLVRSKNTTEILTKNVVLYAIACVMYLLVGYNIMYVDNAEGGWLPSLGTLIGSQAEDANHALESDFFFQVVFVATAMSIVSGAVAERMKLWAFLFFSVVMTGIIYPVEGYWTWGKGFISSLGFVDFAGSGIVHMTGAAAAIAGVLLLGARKGKYGPNGQVNPIPGSNLPMATLGMFILWMGWFGFNGGSQLMVSDAANASSVAKVFVNTNTAAAFGAISALVVCKMIWGKADLTMILNGILAGLVAITADPLSPSLLMAGVIGVVAGGLVVFSIVGLDRIKIDDPVGAISVHGVAGFLGLMCVPLSNADATITAQLTGAAIIFAWVFSASFAVWFVLKMTMGIRVSEEEEYNGMDASDCGIDAYPEFVTVKSAG

SEQ ID NO: 6899 - protein, 929 aa, Gloeobacter violaceus PCC 7421
MIRLCFTDPPAANGEHREIGRHLSSGLRAMATMQTIPWFWCVLLVLWAAAPALAAEVQQTILPNGLRVLTKEIRTSPAVTVQVWYGVGSRDEAPGGTGLAHQLEHLMFKGTKARPVQFGRLFNALGADANAFTSFDQTAYYATAGSDKLEALLQLEADRMRGAVIDAPSLAGEKTVVLSELDGRQNNPRSVLNEMVLAKAFNRHPYRITPIGERKDVEAFTVDQVRDFYRRHYGPNNATLIVVGDFETARLLEKVRRHFGPIEPIAGFKPLVPPVEPPQSAEQRVELRRPGRVPALQVLYRTPAANDPDVPAIDVLDTILTNGRSGRLFKALVETGLATGAGGSQSTQRDPGWYSFSITPRQDPETVLKALDATLAEVRSQGVTAAELARAREQVRVSLLLGKDSIEAQANLLGSFQTTFGDYRKLDTYLQQIDRVTSKDIQRVLQKYFEPTNRTVGVFIPTDGAAAAPQGTPETTQVTSYASGQPVDFDAVSRYLPALGKSGPVREPRPVEATLPNGIRVQVLRNPSAPTVSVLGRFQAGSAFENPERAGIAGMVSALLDEGTRTRSADELAMLLEDQGIRLGFQARRENTLMQAAALAEDLDLLMALGADVVRNPVFPEKEFERVRAQYLTSLANTLDSPAGVAQRTFYSLLYPPAHPFHTQITEASLKAITRADLLDFHRRFYRPQDFILTVVGDVDPQRVIEQVRTHFGDWKVEGPAPELKAAPVTPALRREAVVLPGKREAQVILGGVGIARTDPDYYAVLVMNDILGGNTLSSRLGARVRDQLGLTYGVYSRYAPGELAGPFTIQMQTNPANVERAVAAVNEELASFRKDGPTGAELERARRSLIDRFPLALTDNAGVANLLLEEAIYGLGRDYPTRFVRSLEALKVEDIRRVANRLLQPEAFTTVVVSPNPAPVAKPAARGP

SEQ ID NO: 6900 - protein, 441 aa, Alkalilimnicola ehrlichei MLHE-1
MSDFLMPSLGADMASGELVEWRVRPGDRVEKGQVIAVVETNKGAIEVEVFESGVVEALYEEPGTRLPVGAPMARIGDGRGLEAGEGSPKPEPKPEPKPKPEPKPKPKPKPKPKPKPKPKPEPEPEPEPEPEPEPEPEPEPEPEPEPAVSGPEPPAGTPGRAPVRLSPAARRRARELGVDPAGLRGSGPGGAVLAGDVEHAAGARPAAAPAEPPPTRPAGFDRDEMRRAIAAAMTRSKREIPHYYLNTTVDLKAAHDWLTAYNRERPPESRLVMAALFAKAAARALRKYPDLNGHYHEQGFQPADSVHLGVAIHLRGGGLIAPALLDADRLNVPDLMVRLRDLIDRARGGGLRSSEVTAPTATITALGERGVDTVYGVIHPPQVAMIGFGRVRRRPVVVGDGLAARPAVDVSLAADHRVCDGHLGARFLNRIEQDLQQPEAL

SEQ ID NO: 6901 - protein, 669 aa, Alkalilimnicola ehrlichei MLHE-1
MTTDSEGKPRLSRTHLLALLRQMLRMRRFEERCVELYTQEKIRGFLHVYIGEEAVGAGAMFGLDPNDGVVATYREHGHALLNRIAMNPVMAEMYGKAAGCSLGRGGSMHLFDAEHRFYGGNAIVGGGLPLAVGLALADKLAGRQRVTACFFGDGAVAEGVFHESLNLAALWQLPVFFVCENNQYAMGTALHLAHAQTELYRKAEALGVPAERVDGMDVVAVEAASGRALASVRAGEGPRFLECETYRFRAHSMFDPQLYRDKAEVEAWQARDPIRRLSDWMSRSGALHEGELEAMDGEIGEEIDAAVAFAEQAEWESPDTLLDHVCAPVSEAPPPPPDVATEPERLSFREAFRRGLIEALTHEPRSFMMGEDIGHYGGCYAVSRGLLEQFGPERMRDTPLSENGFTGAGVGAALGGARPIVEIMTVNFSLLALDQIVNNAATLLHMSGGQFPVPLVIRMATGAGRQVAAQHSHSLENWYAHVPGLKVLAPGTLEDARHMLWAALHDPNPVVIFEHVLLYNQEGELTPCPQGVDIRQAAIRRPGQHLTLITYGGSLGKTLEAAEALAEEGIEAEVLDLRVLRPLDTEALVASVTRTQRAVIVDEGWKTGSLAAEISAILAEQALWYLDAPIARVCSAEIPIPYARHLETAALPQVEDIVGAARQVMEGAE

SEQ ID NO: 6902 - protein, 452 aa, Mesoplasma florum L1
MKVIVLGTNHAGTTAVRTLKRLNPEIEVTTYDRNDVISFLGCGIALWVKGEVKDPNGLFYATPEILESEGINVKMKHEWVSIDADKKTVLIKNLETGETFEDNYDKVIVATGTWPLLPPIPGLDLKGVQICKNYDHAKKIQQANLDDSIKKVTVVGAGYIGVELVDAFVAHGKEVTLVDFADRIMPVYYDAEFTKHVEERMEKAGVKLALSQGVKEFKGANGKVTHVVTDKEEIPTDYVIFSVGVVAQTKQLEGVVELNDRKAILTNEYCQSSNPDIYAIGDCSTVFNKALNMEMPIQLATTAVRTGILAAANIVNGNKLASPGFTGANGIEVFGFKMASAGVSETSAKKMGLDYEAILLSDSDRPEFMSTYKEAWIKLVWDKKTRKIIGAQVASENNHTEIMYMLSLGIQKELTIDELPLVDIFFLPHFNKPYNFVTLAGLEVLGLNYFKK

SEQ ID NO: 6903 - protein, 94 aa, Triticum aestivum
MGPQQDRSASKALANGTAVAPERKDGKVVHYKECQRNHAAGIGGYAVDGCREFMASAPAGAEALLCAACGCHRSFHKREVEAVECDCSSDTSGR

SEQ ID NO: 6904 - protein, 136 aa, Shewanella sp. MR-7
MSQLLHTMLRVGNLERSIAFYTQVLGMKLLRTSENPEYKYSLAFVGYGEESTGQAVIELTYNWGTEKYDLGTAFGHIAIGDEDIYARCEAIAAAGGKVTRAPGPVAGGTTEIAFVEDPDGYKIEFIQMKSATQGLG

SEQ ID NO: 6905 - protein, 583 aa, Arabidopsis thaliana
MASQLDLIGGDYIAGISINPPTNSRVTSVYSEVQASRIDHTLPLPSVFKTPFKIIDGPPSSSAGHPEEIEKLFPNLFGQPSALLVPNQSNEVSSDQKLKIGVVLSGGQAPGGHNVICGIFGFKNLICDCIFVVGLIDYLQEYARGSSLFGFRGGPAGIMKGKYIELTSEFVYPYRNQGGFDMICSGRDKIETPEQFKQAEETVTKMDLDGLVVIGGDDSNTNACLLAEHFRAKNMKTLVIGCPKTIDGDLKSKEVPTSFGFDTACKVKMIGNVMIDARSTGKYYHFVRLMGRAASHITLECALQTHPNITIIGEEVFEKKLTLKNVTDNIVDVIYKRAENGYNYGVILVPEGLIDFIPEVQQLISELNEVLAEGNVDEEGQWKKNLKKETLEIFEFLPQTIQEQLMLERDPHGNVQVAKIETEKMLIQMVETELEKKKTEGTYEREFMGKSHFFGYEGRCGLPTNFDATYCYALGYGAGSLLQSGKTGLISSVGNLAAPVEEWTVGGTALTSLMDVERRHGKFKPVIKKAMVELEGAPFKKFASQREEWALKNRYISPGPIQFKGPGSDARNHTLMLELGAQA

SEQ ID NO: 6906 - protein, 568 aa, Oryza sativa
  misc_feature (87)..(87): Xaa can be any naturally occurring amino acid
AAEAFGCAPTPAKALEKKLLDLELPPFPAPAKKAAAKVVAAAPKKKLAGGAGGYVLEDVPHLTDYLPNLPSFPNPLQNHPAYSVVKXASLPSSSSPTPAIFFPFSDYSRFVTVRSFCRQYFVNADDTVAKKIVVHKGSARGTHFRRAGPRQRVFFQPDEVSAAIVTCGGLCPGLNTVIRELVCGLHDMYGVTSVVGIEGGYRGFYARNTVDLTPRSVNGIHKRGGTVLGTSRGGQDTGNIVHSIHDRGINHVYIIGGDGTQKGAATIHAEVHTRGLKCAVVGVPKTIDNDIAVIDRSFGFDTAVEEAQRAINAAHVEAESAENGVGVVKLMGRNSGFIAMYATLASRDVDLCLIPESPFYLEGKGGLLEFAEKRLRENGHMVIVVAEGAGQDVIARSMRLADAHDASGNKVLLDVGLWLCAKIKDHFKKKANFPITLKYIDPTYMIRAVPSNASDNVYCSLLAHSAIHGAMAGYTGFTVAPVNGRHAYIPFYRITEKQNKVVITDRMWARVLCSTNQPCFLSTEDVEKAGQDDEEPIVPLVEGENSLVKAPPLLANAGDGAALCNGAA

SEQ ID NO: 6907 - protein, 279 aa, Nocardioides sp. JS614
MPEPTTASATAPTPTPPDLTDLRLERPSDGVAVLTLDNPDQRNAMSDAMTSSWVRAIDALAADSSVRVVVVTGGGSAFCSGGNTSWIASEPDATVDELRTRMVAFYRAWLSIRRLEVPTIAAVNGPAIGAGLCLALACDVRYAAAGARLGAPFVKLGMHAGMAGTYLLPNVVGEAHARDLLLTGRVVDADEALRLGLVSRVIEPESFRDEVLATAAGIAATAPIASRLTKLALADGGHADFESCLQWEALAQPVTLATADLQEGIRAAQEKRAAVFTGR

SEQ ID NO: 6908 - protein, 118 aa, Oryza sativa
MARAQLVLVALVAAALLLAGPHTTMAAISCGQVNSAVSPCLSYARGGSGPSAACCSGVRSLNSAASTTADRRTACNCLKNVAGSISGLNAGNAASIPSKCGVTIPYTISPSIDCSSVN

SEQ ID NO: 6909 - protein, 184 aa, Zea mays
  misc_feature (97)..(97): Xaa can be any naturally occurring amino acid
  misc_feature (110)..(110): Xaa can be any naturally occurring amino acid
MAASMISSSALAVAPQGLPPLGRRASSFAVVCSKKKIKTDKPYGIGGGLTVDVDANGRKGKGKGVYQFVDKYGANVDGYSPIYNEDDWSPTGDVYVXGTTGLLIWAVTLXGILGGGALLRYKHQRPLRLRISNGCASCDSACEITLTAYNLSSMDAQPSSWNKNQCYSSIHSCAAIYIYPIPSR

SEQ ID NO: 6910 - protein, 391 aa, Xylella fastidiosa Temecula1
MSTEVKVPVLPESVSDATIASWHKKAGEIVKRDENIVDLETDKVVLEVPSPVDGVLKEIKFDAGSTVTSNQVLAIIEEGSIVTAPSPAPSQVIDQKPVAVSAPAAKSNVDSLPPGARFTATTEGIDPAQIEGSGRRGAVTKEDIINFAKQNGAARASGTRLEERIPMTRIRQRIAERLMQSKNSTAMLTTFNEINLAKVSNIRKELQEEFQKAHGIKLGFMSFFVKAAANALQRFPLVNASIDGTDIIYHGYSDISIAVSTDKGLVTPVLRNVERMSFADIEHRIADYAKKARDGKLSLEELQGGTFTVTNGGTFGSLLSTPIVNPPQSAILGMHTIKERPIAENGNIVIAPMMYVALSYDHRIIDGKDSVQFLVDIKNQLEDPGRMLFGL

SEQ ID NO: 6911 - protein, 493 aa, Agrobacterium tumefaciens str. C58
MTIATPLKAQPKASHFIDGDYVEDNTGTPFESIFPATGEMIAKLHAATPAIVERAIASAKRAQKEWAAMSPMARGRILKRAADIMRERNDALSTLETLDTGKPIQETIVADPTSGADAFEFFGGIAPSALNGDYIPLGGDFAYTKRVPLGVCVGIGAWNYPQQIACWKAAPALVAGNAMVFKPSENTPLGALKIAEILIEAGLPKGLFNVIQGDRDTGPLLVNHPDVAKVSLTGSVPTGRKVAAAAAGHLKHVTMELGGKSPMIVFDDADIESAVGGAMLGNFYSSGQVCSNGTRVFVQKKAKARFLENLKRRTEAMILGDPLDYATHLGPLVSKAQQEKVLSYIEKGKAEGATLITGGGIPNNVAGEGAYVQPTVFADVTDDMTIAREEIFGPVMCVLDFDDEDEVLARANATEFGLAGGVFTADLARAHRVVDGLEAGTLWINTYNLCPVEIPFGGSKQSGFGRENSAAALEHYSELKTVYVSTGKVDAPY

SEQ ID NO: 6912 - protein, 730 aa, Roseovarius nubinhibens ISM
MDRAEIVHQNFLTRVGGNDLPEGRAPAGPLTPEAAVGIFRAGCLSRALDRQSRAMQKAGQGFYTIGSSGHEGMAAVAAALRPSDMAFLHYRDAAFQIARADQVPGQTILWDMALSFAASSEDPISGGRHKVLGSKALNIPPQTSTIASHLPKALGVAYSLGMARRRAPEHQALPEDSIVYCSFGDASANHSTAQGAFNTAGWTSYQSVPLPLLFVCEDNGIGISVKTPKGWIAASFAQRPGIKYFHCDGLDMFETYRVAQEAAEYVRTRRKPAFLHIRTVRLYGHAGADVPTTYMPKSEVEADEANDPLLHSVRLLRDAGAMAPDEALRVYVESCDRVVRVADEAVTRPRLQDAKGVMASLVPPKRACRPSNGPDSAAREAAFGSDLRAMSEPQIMSRLINWAMTDLMLEHPEIALMGEDVGRKGGVYGVTQKLQSRFGPDRVIDTLLDEQSILGLGIGMAHNGFLPIPEIQFLAYLHNAEDQLRGEAATLPFFSNGQYTNPMVVRIAGLGYQKGFGGHFHNDNSLAVLRDIPGLILAIPSNGLDAAKMLRECVRLAREEQRVVVFLEPIALYPMRDLHEAGDGGWMCRYPDPSERIALGEVGQHGEGRDLAIVTFGNGTYLSTKAAQQLEREGISTRVIDLRWISPLPEEALRAALEGVKNVLIVDETRHSGGVAEALMAFCAENLDVPFARETAEDSFIATGPAYAVTMPSDVGIASVAKSLVKGGAK

SEQ ID NO: 6913 - protein, 418 aa, Geobacter sulfurreducens PCA
MVNKTILDNGVRIISEYMPHVHSVSIGIWVANGSRHERREHNGVAHFVEHLMFKGTERRNALDIAREIDSVGGVLNAFTSREYVCYYAKVLDKFLPKTIDLLADIFLNSIFDSEEIEKERKVVLQEINMLEDTPDDYVHDLFHRSFWRGHPLGMSILGSVESIEGLSREAIITHLKEKYRSDDIIIAVAGNVRHDELLSLVDGLFGRVPEGSGRDICHLPAYEKQVEVVEKDLEQVHICLGTKAFPQNHPRRFEVYLVNTLLGGSMSSRLFQEIRERLGLAYSVYSYVVSHTDAGSLVVYVGTSPEKLDDVLDITVAELKRLKTELVPLPELESAKEQIKGSIYLSLESSDNRMTKLAKNEIYFGRYIPIHELADGFDSVTSRGILELAGEIFDERYLTLALMGKIDSAAFDVSRLAL

SEQ ID NO: 6914 - protein, 325 aa, Mycobacterium sp. JLS
MIVTVTPNPSIDRTVALPAPLTRGAVQRVTSVTSEPGGKGVNVARALTLARLDAVALLPAADGDPMVTALRAIGVPFRCVPIAEPVRTNLAITESDGTTTKLNERGAALDAAARDALTRGIIDAAEQASWVVLSGSLPPGLPDDWYAEVVARLVPLRCRVAVDTSERPLAALAAAFEHAAPDVIKPNAEELAGLVGASADELESAAAQGDPEPVAAAARQLVDRGVGAVLATLGAAGAVLVDRTGAWMATPPPIVPRSTVGAGDASLAGYVRAAVAGAEPPRRLRMAVAYGSAAAALPGSALPSPAQLDLDGVAVSTIAPTPASS

SEQ ID NO: 6915 - protein, 476 aa, Bordetella pertussis Tohama I
MHANFIDGAWLDGVDARPNINPSNLADVVGDYAQADAAQAGMAIAAASAAAHAWARSTGQRRADVLDAVGTELLARKEELGRLLSREEGKTLPEGVSEVTRAGHIFKFFAGEALRIQGEKLPMTRPGIEVDVTREPVGVVGIIAPWNFPIAIPAWKIAPALAYGNTVVFKPADLVPGSAWALAEILSRAGLPAGVFNLVMGRGSVVGQAILDDRRVNAISFTGSVATGRRVAEAAIGRMAKVQLEMGGKNPLVVLNDADLKVAVDCAVNGAFFSTGQRCTASSRLIVQKGIYPRFVEAVRERLQGLKVDDALAPGTDIGPVVDRSQFDQNLAYIAIGREEGAQLAWGGEPLKRANEGYYLAPALFVDCDNSLRIAREEIFGPVAAVIPVDSYEQALEVANDTEFGLSSGIVTTSLRHATHFKRESQAGMVMVNCPTAGVDYHVPFGGRKGSSYGPREQGRHAAEFYTSVKTAYTAA

SEQ ID NO: 6916 - protein, 344 aa, Helicobacter pylori 26695
MILKRVTEALEAYKNGEMLIVMDDEDRENEGDLVLAGIFSTPEKINFMATHARGLICVSLTKDLAKKFELPPMVSVNDSNHETAFTVSIDAKEARTGISAFERHLTIELLCKDTTKPSDFVRPGHIFPLIAKDGGVLARTGHTEASVDLCKLAGLKPVSVICEIMKEDGSMARRGDKFLSDFALKHNLKTLYVSDLISYRLENESLLKMFCQEEREFLKHQTQCYTFLDHQQKNHYAFKFKGAKTHDLAPLVRFHPIKEDFDFLTTDAFEVFFKALEYLKHEGGYLIFMNTHSKENNVVKDFGIGALVLKNLGIKDFRLLSSCEDRQYKALSGFGLKLVETISL

SEQ ID NO: 6917 - protein, 409 aa, Polaromonas sp. JS666
MSIEMIEIEEFNQGTQIKVIGVGGGGGNAVGHMIDCNVQGVEFICANTDAQALSRGSAHKTIQLGSSGLGAGSKPDKGRDAAEVAVDDIRSAIAGAHMLFITAGMGGGTGTGAAPVIARIAKEMGILTVGVVTKPFEFEGGRRMTNADLGLAELEANVDSLIVVLNEKLLEVLGDDVTQDEAFAHANDVLKNAVGGIAEIINVPGHVNVDFEDVRTVMGEPGKAMMGTAKANGPDRARIAAEQAVACPLLEGIDLSGAKGVLVLITAAKGSLKLSESKLAMNTIRAYASPDAHVIYGTAYDDELGDEIRVTVVATGLSRQGVRRHAPPLQVLRTGTDNVPFNVPTLNTVAGGAGVPQTAMGSMQPDYGNMTVPSVWRTNRTQAAAKVDALASGGMDDFEIPAFLRKQAD

SEQ ID NO: 6918 - protein, 143 aa, Brassica napus
VDPRVRAADAMVRSVTLKPAGFTVEKMSARGLPSLTRTSFKIVASGVKKIKTDKPFGVNGSMDLRDGVDASGRKGKGYGVYKFVDKYGANVDGYSPIYNEEEWSPGGDVYKGGVTGLAIWAVTLAGILAGGALLVYNTSALAQ

SEQ ID NO: 6919 - protein, 515 aa, Ralstonia solanacearum
MSAVASLSPVSTAGHPRTQPTVKLLIGGEFVESRSAEWREVVNPATQEVLARVPFATRDEVDAAIRSAHAAFATWKHTPVGARMRIMLKYQALIREHLPRIARTLTAEQGKTLPDAEGDIFRGLEVVEHACSVGSLQQGEFLENVAGAVDTYTLRQPLGVCAGITPFNFPAMIPLWMFPMAIVCGNTFVLKPSEQDPLSTMLLVELALEAGVPPGVLNVVHGGKEVVDALCTHELVKAVSFVGSTAVGTHVYRLAGEHGKRVQSMMGAKNHAVVLPDANREQTLNALVGAAFGAAGQRCMATSVAVLVGAAQQWVPELVEKARALKVNAGVEPGTDVGPVVSRAARQRILDLIESGVRQGATLALDGRGVRVAGYEDGNFIGPTVFTGVKTDMDIYRNEIFGPVLLVLTAPTLDEAIALVNRNPFGNGVGLFTQSGAAARRFQSEIDVGQVGINIPIPVPVPYFSFTGSRGSKLGDLGPYGKQVVQFYTQTKTVTARWFDDAIEAGGVNTTISLR

SEQ ID NO: 6920 - protein, 827 aa, Vibrio vulnificus CMCP6
MESIVIIGNGMVGHQLVEQLVASGSHLEKRIIVIGEERFVAYDRVHLSAMFSGQSHQDLLLSSEEWYQKHGIELILGVAVVGIDRQSKRVTLEDESQLSYDQLVFATGSYPFVPPMAGSERSKVFVYRTLDDLSQIKQACLGAKKGAVVGGGLLGLEAANALRLLGLETHVVEFAPRLMPVQLDEGAGAVLKSKIEQLGLTVHTSTATEKIIDGETAYHRMVFKDAPPLEVDVIVFSAGIRPRDQLARDCGLELGERGGIVINNACQTSDTAIYAIGECALWQGKIFGLVAPGYAMARVVAQQLRGGSEAEFSGADMSTKLKLLGVDVASIGDAHKATPKATEMVLHDAAAGIYKKLVVDQSGTTLLGAILIGDNQDYDVLLQSYLNKTPLPQPAVSLLFDTSALKGDVSDNTVICSCHNVTKGDLISAIQAGAHELGELKALTKAGSGCGGCSAMVKSVLDQQLSVMGLEVNTQLCEHFSQTRQALYHICQVEKIRDFGSLLAKHGKGHGCDICKPTAGSIFSSLWNEHIMEPEHSPLQDSNDAFMANLQKDGSYSIVPRIPGGEITPEKLIVLGEVARQYDLYTKITGGQRVDLFGAQVEQLPEIWQTLIDAGFETGHAYGKSVRTVKSCVGSTWCRYGVDDSVGLAIELENRYKGLRAPHKLKFAVSGCTRECAEAQSKDIGVIATEKGWNLYVCGNGGMRPRHADLLAADLSKAELIRLIDRVLMFYVRTADRLQRTSVWLENLDGGLDYLKSVVLDDSLHLCEQLEQQMAHVVDTYHCEWKQTLTNPEKLMRFRPFINSTQQSTLLGYQRTRGQRIPVKLED

SEQ ID NO: 6921 - protein, 500 aa, Xanthobacter autotrophicus Py2
MKAARLPTSQLPTSESRASGSPASPSLLWFRDDLRLSDNPALAALAEARTPLAALYVLDEDSPGVRPLGGAARWWLAQSLRALAADLKDRGVPLILRRGPANRVVPEVAALLGAATVAFNDRAGAAETRVDHAVAARLLSEDRRVLSFCAHLLHPPGSVEGASGGMPRTFSSFHRAALKARRLDTPLPAPKHLDGVAHPPEGETLESFDLEPTHPDWAGGLRSAWTAGEAAAQARLAAFMDAGLAGYAEGRDRPDLNHVSRLSPHLRFGEISPRQILSAVRHAAEAGAVPLVDADKFEAELYWREFSYHLLAEMPDLARSNIQHGFDAFPWRECPGELKAWHKGLTGYPLVDAGLRQLWQTGWMHNRVRMVVASFLTKHLLIDWRSGEDWFWDTLVDADGANNAASWQWVAGSGLDAAPYFRIFNPVTQGEKFDPDGTYVRTFVPELGKLPAPLIHKPWTADAHTLAHAGIRLGHTYPRPLVDHGAARERALRAFESTRK

SEQ ID NO: 6922 - protein, 484 aa, Rhodococcus erythropolis
MQALTSSVPLVIGDQLTPSSTGATFDSINPADGSHLASVAEATAADVARAVEAAKAAARTWQRMRPAQRTRLMFRYAALIEEHKTELAQLQSRDMGKPIRESLGIDLPIMIETLEYFAGLVTKIEGRTTPAPGRFLNYTLREPIGVVGAITPWNFPAVQAVWKIAPALAMGNAIVLKPAQLAPLVPVALGELALEAGLPPGLVNVLPGRGSVAGNALVQHPSVGKVTFTGSTEVGQQIGRMAADRLITASLELGGKSALVAFGDSSPKAVAAVVFQAMYSNQGETCTAPSRLLVERPIYDEVVELVQARVEAARVGDPLDPDTEIGPLISAEQRESVHSYVVSGTEEGATLISGGDQSPTGAPEQGFYYRPTLFSGVTADMRIAREEIFGPVLSVLPFEGEEEAITLANDTVFGLAAGVFTRDVGRALRFAQTLDAGNVWINSWGVLNPASPYRGFGQSGYGSDLGQAAIESFTKEKSIWARLD

SEQ ID NO: 6923 - protein, 489 aa, Blastopirellula marina DSM 3645
MVVAAPLRAQDGAATEEAAEGAPAAEMAAEEEVEEAEAPPTIESLSADLAAFQGDVDTLWTCLAAFLVFFMQAGFALVECGFTRAKNACNIIMKNLMDFSVGSLVFWLVGFGLMFGATNGFCGTTLFIFDGASDAALETNSNVGFNWAFLIFQTVFAATAATIVSGAMAERTKFVSYLCYSFLITLIVYPIFGSWCWGGLYAGGGWLEGMGFLDFAGSTVVHSVGGWAALAGAIVIGPRIGKYTADGKIKPIPGHNIPLAALGVFILWLGWFGFNPGSTTAVGGGSFAYIAVTTNLSAAAGAISALAVSWIMFKKPDTSFALNGALAGLVGITAGCDIMSPMFAAVTGLVAGVLVVFSCVFFDKIKVDDPVGAVSVHGVCGAWGTLAIGLWAGDVGILTGGGSAQLITQAIGVAAGFGWAFGTSLVIFLLLKFTIGLRVPAEEEIKGLDITEHGMYAYPPHLVSESLGGTPGGSPAMSTSTSGAVTHGA

SEQ ID NO: 6924 - protein, 1239 aa, Ustilago maydis 521
MSSSQRPVVQPIPPFKGAPLQATDVQNRRPTAAEAYVALANRKAGANVVSTRATGCENHRPSQHQPTSHHASQRQQPAPAADRRVQQSQPSERPKPASRLEREKKRHHNDPKNIGHWRLDKLIGQGASGRVRLAIHDQTGQKAAVKIIPRTLINASRMSLRDADVKANKMILGIEREIVIMKLIEHPNLLGLWDVYETSKDLFLIMEYVAGGELFDHLVAQGKLSPRDARGYFRQIIFGMDYCHRFNICHRDLKPENLLLDETKKIVKVADFGMAALQPTEKMLETSCGSPHYASPEIVSGKRYKGTASDIWSCGIILFALLCGRLPFDDPNIQQLLGKVRAGKFIMPEWLEPASKDLIWRMLEVDPEKRIKMADIMRHPWFTNNGTESSVNPVSTSLDSLQMEELTLDTIDIDILGNLKTLWFELSEQDIIKELLAPGPSWQKTFYTLLVAHRENHSADDEDDMNDDILDEQIVTASAVPAHALLSTTSAAKTLEKPRPRRTSDAAGATSAPASPRLESVEMDRRHSTPEKGSVYHTTSRRPDNVTPPKVASPHVRPANPSPRLRPSPLDSPASTLDSAFVSASKLKVASPTKPRALGSSHGADKSGYVLPQISLQTASPQRNERPAVDLQRRNTSPTKPNTVGVTAPLSARIALANMYDAPTLSHTATASCGSTSSTASSTVSVSAARNRANRGSGSEMMPPLALPGRASSRPVSPTKSTFGAQATLPPQTAPQPAPPRPSTSRAYTTQPTPCIQVPQVGDATMQRFFQEIADELASIRATGEKPDALQSKLDQLKNSMAWQQQQQQQQLQSQPMAVTASAPSARTRNSEMNQFEDAEDDVSEGESMRSVSQASSHQQTYTPSTPMTPLSPVELIAPLALTDKSGAGARSSVASSSASASARNSVRSARSGTEASSSGTTSRPTSVFSNISTGSTGLGRKRSLLGLRRADKHAQQQHATATEANTIRSIAYESTPTPTALASVFAAPASGRFVPNGGATTASSVRMQRLNPGLGLDIGASSAAGIISPPSTPQSPNTATLSPAPAASASAIASASAPGKKDSWFAGLFNWKPATFTLMSSENFSETLTECIRRLQSYGVRVAMDDSSDVHHTTLKCSINEYRESNGVVTAAKPLRFRVDVHILAVGSPATNSAYMGGGLGLSLHGGAVGTNVNATSIMTHGLPSPALSTYSRASTPGGVTFATSVLVVQEKGALSTFKLIHARLRREWMLDLGSAII

SEQ ID NO: 6925 - protein, 1184 aa, Cryptococcus neoformans var. neoformans
MFVTRPPFSPLDHRGSPLEDDHTNTSGSSRDDVPSSHSTNTAFHEFKSSTPFPPHYLNVPSGLAFKTYLEKWGPEQIMGFLAIHGCEHHSGIFIKNSIDGKLLLDLDMSVLTSLGITKVGERVRLMAGIKCLRQRIAHEAEKDNVRSAHLCNGSLGMDRVKVMIHPKMSASLYVCRQGPFDSDPSTARRSRLTPSSSADRERNPSPMQRSQEVMKHSFITRSSGGQVIPPLWSGQIHNHGIDNSPTPGLYQPPMQRSVPLRSSVSYSDIAAKGMPLLVTQSINSAADHTFAVTDSHDTTSSLGGHLPRPDYFHSTNDAFQTCTKGEDNTISELPQRNQESSPSKWKKSGVICEDEAMLDSSPFAPTSPKHPFAINVTGNNVMEYPPNLPIKNCLSLRSFQSPDKSAGEDRLNMNPRAPSLDDLRRKLVKFVNAEDGTTRTVNVMKATSGAEVLERALRKFGKTGTGSAPFLDEENHNGGKYEGSLCIDGWGVFAEDLLGEEIGPMTEGDLFDICASLQNGAAIQRDALILRQTSESQKRKDMRFYLGNMPVLPTPVNLPISFYSPHSGQFERNSALQHTAQHQPLLSKNRSRASMMSIMSGLGVSHPDIKQPTHDSVQSPTSVTRSSSKKKSMYNFFGHRPPSELISSHLADYFPSAKKRDVAKVRGSMLRLNIAHTAEHDPRSVKSLGMIETDDMPFSSTEQSLTEQGGHYFDPSTCQPADTSSRGHVDHIITDHAGNSKGYYRLPCDEKASPTVKTQELHSANSANSILRACPPNLPPTYQSARLTDLHSDSTFSQLQLLRHSSSLSFKQPSSSHRRTVDEITAEMQHRQTSLSSNRPTSTIDSDISGPPCDSETSPDHTSDVSDVSESSSEYWDDQSSVSSKDSDHNTVEHTRAFTSNGSKRNIKWIKGALIGAGSFGSVFLGMDAQSGLLMAVKQVELPRGIAKMEARRRDMLSALEREIELLKDLQHENIVQYLDSSADANHLNIFLEYVPGGSVAALLNSYGAFEEALVGNFVRQILTGLNYLHERDIVHRDIKGANILVDNKGGIKISDFGISKKVENSLLNGLHPNRPSLQGSVFWMAPEVVKQTSYTSKADIWSVGCLVVEMLTGTHPWARLTQMQAIFQIGSMGQPDIPSDISAHAADFLSRAFALDYRMRPSATSLLQHAFIIHDGSGGNDEV

SEQ ID NO: 6926 - protein, 329 aa, Mesoplasma florum L1
MAVINNIKAVTEALDVAMDRDKNVIVFGEDVGLEGGVFRATQGLQQKYGIERSFNAPISEAMFAGVGLGMAMNGMKPVVELQFQGLGLPALQNVIANISRMRNRSRGKWTAPMVIRMPMGGGIRALEHHSEALEAIFAHIPGIKTVMPSTPYDTKGLLLAAIESPDPVIVLEPTKLYRAFKQEVPDGYYTVPIGEGYKIQEGNDLTIVTYGAQTVDCMKAVEMIKSTHPTASIELIDLRSIQPWDKKMVIESVKKTGRLLVVSEAVRSFGVPAEIIATVNENCFDSLKAPLARCTGYDVVIPYDRGEGFHQVNPQKVVEAIKKVLDYKF

SEQ ID NO: 6927 - protein, 170 aa, Saccharomyces cerevisiae
MPSDVASRTGLPTPYTVRYSKSKKREYFFNPETKHSQWEEPEGTNKDQLHKHLRDHPVRVRCLHILIKHKDSRRPASHRSENITISKQDATDELKTLITRLDDDSKTNSFEALAKERSDCSSYKRGGDLGWFGRGEMQPSFEDAAFQLKVGEVSDIVESGSGVHVIKRVG

SEQ ID NO: 6928 - protein, 248 aa, Arabidopsis thaliana
  misc_feature (228)..(228): Xaa can be any naturally occurring amino acid
TPPQTTMATTATLKSFTGLRQSSTEQTNFVSHGPSSRALPRRRTPLRVTAARATPKRANRKPRVAVIGGGPAGGAAAETLAQGGIETILIERKRDNCKPCGGAIPLCMVGEFNLPLDIIDRRVTKMKMISPSNIAVDIGRTLKEHEYIGMVRREVLDAYLRERAEKSGATVINGLFLKMDHPENWDSPYTLHYTEYDGKTGATGTKKTMEGDAGNGADGATSRGAKSXDAGDYDYPMLFREDRIPDEK

SEQ ID NO: 6929 - protein, 169 aa, Clarkia similis
SFYQLIHQGRVIPCDFIGVVKSQQPVYLKGEVVNNHDELMSNFFAQPDALAYGKTPEELKKENVSEHLIPHKTFTGNRPSLSILLPTLDAYRIGQLLAIYEHRVAVQGFVWGINSFDQWGVELGKSLATQVRKQLHASRVKGEPVEEGFNFSTKTLLTRYLQATSDVPA

SEQ ID NO: 6930 - protein, 422 aa, Mesoplasma florum L1
MFKVKFADIGEGLTEGKVAEVLVKLGQEIKEGDALFFVETDKVNSEIPAPVGGKIANILISQGQEIKVGDVVIEIDDGSSAAEVTPVAEIKTKNEPIEENASVVGSTPVSNDVIASRATTNAAAEISNSGVKATPLARKIAADKKIDLSTIKGTGPHGRILVSDLDSAPVAVPNTNSATKTVVKSVDVDAPLSWDSIPMNGIRKATVKAMVKSQSENAAFTGMKNINITPTYDMRAMLKDGCESKGIKLTYLAFIVKAAAKVLEEMPNINVRIDAENNAILQVHNINIGIAVDTEKGLMVPVIKGANHLTIFEIANKIGELAKKARDGKLAMTEMKDATFTVSNFGSVGLDYATPIINSPESAILGVGTMTKTPIFVKDEIKAGWIMPFSMTCDHRIIDGGDAGRFLMKIENYLSNPALLLM

SEQ ID NO: 6931 - protein, 569 aa, Leuconostoc mesenteroides subsp. mesenteroides ATCC 8293
MTEPHIYDTIIIGGGPAGLSAGIYAGRSTMDTLIIEGDQIGGQVTTTSTVANYPAVETIDGTALVNRMQQQAKSFGVQFVFDTVTDYNFSDEVIKTVTGKKDTYHARSIIIATGAEPHQVGFQGEQDFRGRGVAYCSTCDGELFSGLEVFVIGGGYAAAEEADYLTRFARHVTIVMRSNDFTCPPLTADRARLNPNITIWPNTEIQTVAGQNYLTDATFINNKTNEQTTYHVADGDNTFGIFVYVGTDPQTKMFQHDIMLDEHKYIVTDSQGQTNIPGVFAAGDVISKPLRQIVTAASDGANAATNAELFVSEQKHRLNIPVNRSAVSSPKTDVTKGPTSTIDATDHSALPTHTGQWFAKEIIQALQPIFDKLTQDVTLHQLTDDSSKSHELSSFLEEFSQLSSHLKFKMEPTSTELESKYHVHHMPNFRLLTDNNEDTGIQFSGIPTGHELNSLVLALYNIAGPGQTIDTELVQRIQRLPKTDLNIGVSLTCHFCPDVVAACQHIAAINDNVTAEMIDLQLFPELRESHHIMSVPAMIINNSDNVIFGSQSLEEIVSAIETSSPLPVH

SEQ ID NO: 6932 - protein, 371 aa, Thermococcus kodakarensis KOD1
MKYDVLIIGGGPVGNYLASLLARDFNVAVVERKTSFGGKACTGIIGAENYERLGLPEKAVLNQLRGAVFYSRIQSFEIQRKSPQAYVVDRKTLEKELAKSAVKKGADYFMGTTFQGFKNGKAVLSHMNERLEVEASFYVGADGVASTVAKNIGASTKAEFLTGYEIEVVGEFERTDFTEVWVNKEITPKFFAWVTPVEDDLARVGTFGTLDELNRFLRVRMLKPTSSIEFKAGSVGLGWRKPWIRENVALIGDAALQIKPTTAGGIAYGMLCAHALRKALIEGAPERYWNYCSWVRKQISFGLKFRKLFLGLDQEAIEKIFEVLKSEEAREVIESQADFDDHWRTAKAILRKPSLLARLIKVSPSIIRALL

SEQ ID NO: 6933 - protein, 178 aa, Clarkia similis
SFYQLIHQGRVIPCDFIGVVKSQQPVYLKGEVVNNHDELMSNFFAQPDALAYGKTPEELKKENVSEHLIPHKTFTGNRPSLSILLPTLDAYRIGQLLAIYEHRVAVQGFVWGINSFDQWGVELGKSLATQVRKQLHASRVKGEPVEEGFNFSTKTLLTRYLQATSDVPADPSTLLPNI

SEQ ID NO: 6934 - protein, 70 aa, Arabidopsis thaliana
LRYRSYEEAIISVPLLTKKVVKNRSAKFIIPQSDRIITVKESWRRPKGFDSKVDKKVLSFVFDSSCLFLF

SEQ ID NO: 6935 - protein, 466 aa, Synechococcus sp. WH 5701
MASKPDLQSERHSSDDDIYASGDLSTGMPKRTFPAKEKDPRAVYAAIHDELMLDGNSRQNLATFCQTWLEPEVHQLMNECINKNMEDKDEYPQTAEIESRCARMLADLWNAPSIDGAIGCTTLGSSEAAMLGGMAMKRRWEASRRQQGKPTDRPNLVTGPVQICWHKFTRYWDIEHREIPMESGCLMMTPEQVLKHCDENTIGVVPTLGVTFTGQYEPVQQVAEALDAYEQQTGLDIPIHVDGASGGFLAPFCSPDLIWDFRLPRVKSINASGHKFGLAPLGVGWVLWREAKDLPEEMVFWVNYLGGNMRDITLNFSKPGGQVVCQYYNFIRLGKEGYRKVHNACYATAQHLAKEIETLGPFEIIYGGDPDTGIPALCWRIKDGVDPGFNLFDLADRLRVRGWQVPAYTLPAHCSDQAIQRILVRHGVSRDLADLLLEDIRSAIDHLQLHPVSTSLSSREASGFHH

SEQ ID NO: 6936 - protein, 1560 aa, Rhodospirillum rubrum ATCC 11170
MTGTTGLGRRIVWWWIVGAVLAGIGLSGFAVWWVTQRNAELAETAASLELTRLSDAIAERITLYQYGLRGARGVIVTFGERGITREVFRGYSKTRDIGAEFPGARGFGFIRRVPADREERFLAEARADGWPDFAIAQFTPHEGERFVIQYIEPAQRNLKAVGLDIASEKNRREAALAAIDTGQVRLTGPITLVQASGDKSQSFLILLPIYRTLSTPETLAERRAQAFGWSYAPLNMPEVLSGLVPNQDRLALTLRDVTNPAEAETVFTSNTDCAAAECVTKTLTRSIFGRVWEISVTVSPAYGHAVQRIAPWVVVSLGIGASILAAGFAAVIGLNQARRREIAQAQARLSTIVENSGDAIIGEALDGTIVGWNRAAEALFGYKAPEVIGKALAPLLIPADRMAENQSIVLSALSGEAVMAFDTQRIHADGHLFDVSMTACPVHDRLGHVVGVANLIRDIRKRKAAEQSLLEFNAQLEKQVASRTAELEKARRALQTVLDSVPSMIGYWDRDLHCHIANRAYCSWFNVDPSGLIGKSMRSLLGEALFTANRPFIEAVLRGQPQTFERMIPRPNGQGVRHSLAHYIPDVVDGEVLGFYALVHDVSELVEGRQKLDAALRENEALLRTIDEQLLCSITDRNGNIISINDNFCKLMGYTKDELLGLDHRIMNSGLHDKTFWADVWATISAGGSWRGEVCNKAKDGALYWLDSVLTPFFGEDGSIDRYVALRIDITDRKKAEAERNRSNTLLRSVLASAREFSIIATDPDGVITIFNSGAEKLLGYSAEEMVGKQTPALIHLADQVAERGRSLSDEFGVPIEGFRVFVHRSERDGVEAQEWTYVRKDGGHLEVLLVVTAIREDDGRIAGYLGVAQDVSRRKEFERALVLAKQAAEEASVVKGQFLANMSHEIRTPMNAILGMLTLVQRTALTPHQADYVCKAHSAAGSLLGLLNDILDFSKIEAGKLHLEPHPFRLETVLRDLAVVLSGSYGDKGVEVLFDIAPHLPDSFIGDDLRLRQVLLNLAGNALKFTDQGQVIVSVGVLAREDDRLTMRMAVSDTGIGIAADQLASIFGAFEQAETSTTRRFGGSGLGLTITRHLVERMGGVLRVESQPGRGSRFWFDITLPVSGEGSESAESGRPLRVLVVEDNPVAGGILAQTVQGLGYDCDLVQESAETKARIVAADAAGRPYDAVLLDWRMPEVDGLTTARILREMGVTLCPQSIIMVTAYGRDVLSLAEQTGDAPFDAVLTKPVTPGQLRDALLRRDRATSEGEATALAPRGLPTPLAGRRLLVVEDNAINRQVAAELLAGAGAEIDLAEGGERGVMMVLRGEIAYDAVLMDIQMPDIDGFEATRRIRADARFKALPIVAMTANASRADREACLAAGMTEHVGKPIDITATIDVLVSLMTEGMTEGEPIAPPSPMGGTGREVPSDEPLLEDLDSIAERLGGQVDLLRRLLPTFAERTGELLDEIEDLIGRGDWSALSMAFHTIKGSAASMGAVALASHAALWEERLREDGPGTLDALRRDQALCDQMRALLAASLEALSSHLDAMAGPYAKEPAG

SEQ ID NO: 6937 - protein, 282 aa, Medicago truncatula
MFAETGLLFPYLQNYSHEFQQLEEYCMTHKSNASMSDLVQSSAMSEFDLFVEGDLFKAPETIIEEPEMDLDQMQAAMSMMSGGEDMSSQGLKSSDIDDVLQSEQLLSEVYYDCKKDLLEKATIESPLSEILEIKIPALNIDENSIQENKPIPDVLLSKSVSSGNLSSMDWMHGPAMKPAFLDFPGIDFNAVYGMRRAFSEGDIKTLGNGNMSVGQSTLERPFLLSNCTSEQRQEKLSRYRNKKTRRNFGRKIKYACRKALADSQPRIRGRFAKTEELDVKKQ

SEQ ID NO: 6938 - protein, 463 aa, Leuconostoc mesenteroides subsp. mesenteroides ATCC 8293
LFGYDTGVISGAMLFIGKELEIQTGSFEDGFITASVLLGAILGAAIIGPMSDKLGRKKLLLSAAIIFFVGALGSGIGFNYTLLVTSRVLLGIAVGAASALIPTYLAELSPADKRGGIGTLFQLMIMTGIFLAYVSNEWLSPSGWLGLNQNVGWHWMLGLAAVPAALLFIGGLSLPESPRFLVKQGKMSEAQKVLSTMNPNAKLVEEELYDIKLQANTPSGGFKELFGPMARPVLIMALGLAIFQQVMGCNTVLYYAPKIFISAGFSEHFALQSHIVIGLFNVIVTAIAVKIMDKIDRKKMLTYGAIGMGASLLTMSTAMLVLRAGNGNVGSWICVIALTLYIAFFSATWGPVMWVMIGEAFPLNIRGLGNSFGAVINWTANFAVSQSFPMLLIAFTPDHAINAEGQGIAKLFIIYGVLCFVAIWFIAKFTIETRNRSLESIESDLRSKAHAKGYLESDYVGIK

SEQ ID NO: 6939 - protein, 395 aa, Bacillus halodurans C-125
MPKVGGEHEYVHRAMGGKAAFLASWAITLGYVSVVAFEAVALPTVIEYIFPNYQVGYMWTIAGWDVYASWVLVGVAGSIFVIAINYFGLKPAAKIQVILTLSIILIGLMLVFGSAVGGEAANFEPLFVNGATGIMAVLIMVPFLFIGFDVIPQTAEEANIPARDIGKLLIFSVFCAIVFYILIAIGVVSALDANALEVTQLATADAMSALFGSTFFGHLLVVGGVAGIMTSWNAFIIGGSRVMFAMAQSGMLPKWFGRLHPKYRTPSNAILFIGGLAVLSPLLGRPALVWFVDSGGPAIVIAYLMVAIAFLLLRKNEPAMERPYQSGRSSIVGWIALVLSIGFLIIYLPGMPAALTGPEWVIFVGWFLIGLYFFVQMSKGKYKENENEKTSDQAM

SEQ ID NO: 6940 - protein, 251 aa, Glycine max
MSSSNCPSPLPTVTKLQVDSVTFPPSVISPASSNPLFLGGAGVRGLDIQGKFVIFTVIGVYLDPVSVPSLSVKWKGKTTEELTESVPFFREIVTGSFEKFIKVTMKLPLTGQQYSEKVTENCVAIWKSLGIYTDSEAKAVERFLEVFKDETFPPGASILFALASKGSLTVAFSKDDSIPETGKAVIENKLLAEAVLESIIGKNGVSPGARLSVAERLAQLMNSDKVEEDATKTDQEEANNLPLGDKLAKEN

SEQ ID NO: 6941 - protein, 396 aa, Wolbachia endosymbiont of Dirofilaria immitis
  misc_feature (140)..(140): Xaa can be any naturally occurring amino acid
MSINLSFSELPVLYPRITVIGVGGAGGNAVNNMIQSNLQGVNFVVANTDAQALEKSLCDKKIQLGIDLTKGLGAGALPDIGKGAAEESIKEIMEHIKDSHMLFITAGMGGGTGTGAAPVIAKAAREARTAVKDKMLREKXILTVGVVTKPFGFEGVRRMRIAELGLEELQKYVDTLIVIPNQNLFRIANEKTTFADAFKLADNVLHIGIRGVTDLMIMPGLINLDFADIGTVMSEMGKAMIGTGEAGGENRAINAAEAAMSNPLLDNVSMKGAQGILINITGSGDMTLFEVDAAANRVREEVDENANIIFGATFDQAMEGKVRVSILATGIDSSAIRDDRVETSSVSQTRALKEEKFKWPYSQTSVPETKTTEQVSEKVRWNNNIYDIPAYLRRKK

SEQ ID NO: 6942 - protein, 422 aa, Alkalilimnicola ehrlichei MLHE-1
MSIEVKVPPLPESVSEATVVAWHKQPGDAVSRDENLVDLETDKVVLEVPAPADGVMGERFKNEGDTVTADEVLGKLEEGAAPAKAESKPAEAAPAPKQEAASAPAPKPAEAPAAASAPAEDLADLPPAARRLVEENNLDPKQIPGTGRAGRITKEDVVRFMKGETQPVQQPAAGQPAAAAAPQVSADAADRPEKRVPMTRLRQRIAERLVEAQQTAAMLTTFNEVNMQPVMNTRGQYKDKFEKTHGIKLGFMSFFVKAAVEALQRFPAVNASIDGKDIMYHGYYDVGIAVSSPRGLVVPVLRDADQMSFAEIEAKIAEFGQKAREGKLSMEELTGGTFTITNGGIFGSLLSTPILNPPQSGILGMHKIQERPMAENGQVVIRPMMYLAHSYDHRIIDGREAVQFLVTIKECLEDPTRLLLEV

SEQ ID NO: 6943 - protein, 488 aa, Mycoplasma mobile 163K
MSEKNASDFKSIINALKKDLERINKKNGIEKKNLSQQEVFDFLISKNIDVDEADTDDLFNALIEAKVLSNVADDGDLEEIDMDDFLGEVNGTKKAKIVKDLDEIDDDDIDLSSLEQDEDDEEDNDDDSWLDEDLDKTEDYDSAELSSDDENFSLDEISDDEIVLDDLDEFIDLEYSANAKKGAKSKVKKSGNREIVIREIVKWYMSWVGKHGKVLDKEEEIKYSKQIEEDRNGRKGKKAFNALIHHNLRLVINNAKKYKNRGLSFIDLISEGNAGLIKAATKYDYRRGFKFSTYATWWVRQAITRAVADQARIVRVPVHMVETINKIIKIERELHQELGVPPTDKQIAEKYGNNFTAEKVQYIRKINIDPISLDKSIGKDDDSSFSDFVKDESVVSPLEFASQNELSGILTDILEKHLDEAERDLIKKRFGIGVDKDGNRISSHSLEELAAELQISKEKVRSLESKILRKLKHPQKRKKLKEFYKNNV

SEQ ID NO: 6944 - protein, 467 aa, Pseudomonas putida KT2440
MQQAQGLKRGLSARHIRFMALGSAIGTGLFYGSASAIQMAGPAVLLAYLIGGAAVFMVMRALGEMAVHNPVAGSFGHYATTYLGPMAGFILGWTYAFEMVIVAIADVTAFGIYMGFWFPEVARWIWVLGIVFLIGGLNLCNVKVFGEMEFWLSLLKVGAIVAMILAGLGIMAFGFSQVGTGHAVGMSNLFDHGGFMPNGVGGLIASFAVVMFAFGGIEIIGVTAGEAKDPQRVIPKAINAVPLRILLFYVLTLFVLMCLYPWPQIGSQGSPFVQIFSNLGIGSAAAVLNVVVISAAISAINSDIFGAGRMMYGLAQQGHAPRGFSKLSKHGVPWMTVVVMGAALLIGVLLNYLIPENVFLLIASIATFATVWVWLMILLTQVAMRRSMSREQVAQLKFPVPFWPYGPAMAIAFMVFIFGVLGYFPDTQAALIVGVIWVVFLVASYLLWCKPRAGQGQPVAEPAELHR

SEQ ID NO: 6945 - protein, 350 aa, Dechloromonas aromatica RCB
MKICVLPGDGIGPEITAQAVRVLNSLDLKFEMEEALLGGGAVDATGNPYPEATQKLARAADAVLLGAVGGPKWDSLPREQRPERGLLGIRKDLNLFANLRPAILYPELANASTLKPEVVAGLDILIIRELTGDIYFGQPRGVREENGERVGFNTMVYSESEIRRIGHVAFQAAQKRDKRLCSVDKMNVLECTQLWRDVMIEISRDYPDVELSHMLVDNAAMQLVKAPKQFDVMVTGNMFGDILSDEASMLTGSIGMLPSASLDDKNKGLYEPSHGSAPDIAGKGVANPLATILSAAMMLRYTFGLEEQALRVENAVKKVLAQGYRTGDIYERGTNKVGTREMGDAVLAAL

SEQ ID NO: 6946 - protein, 291 aa, Geobacter sulfurreducens PCA
MSILINSDSKIVVQGITGRSGLFHTQQCRDYGTRIVAGVTPGKGGIHIEGIPVFNSVEEAVRYTGANVSMIFVPPPAAADAILEAADAGLELAVCITEGIPVRDMVPVKRILQESRTRLVGPNCPGVITPGECKVGIMPGYIHKPGKIGVVSRSGTLTYEAVKQITEAGLGQSTCVGIGGDPIIGMNFIDVLKLFNEDKNTEAVFMIGEIGGTAEEEAAYWIKENMKKPVASFIAGVTAPPGKRMGHAGAIITGGKGKAEDKIRTLSECGVVVATSPTKMGVAMLEALGKG

SEQ ID NO: 6947 - protein, 647 aa, Flaveria bidentis
MISLNSSFLERSSVAGGSRTQSQSLRLSVRRPVVASMLNSNSLPERNVNVSVDSAVRDVNAPVAVEVDRSVGEKPFAVVGGGVEDMYGEDTATEDQYITPWSVSVASGYSLLRDPHHNKGLAFTEKERDAHFLRGLLPPVVVNHDLQVKKMMHNIRQYQVPLQRYQAMMDLQQRNERLFYKLLIENVEELLPIVYTPTVGEACQKYGSIFENSQGLFISLKDKGRILEILKIWPHKKIQVIVVTDGERILGLGDLGCQGMGIPVGKLALYTALGGVRPSACLPITIDVGTNNEKLLNDEFYIGLKQKRAAGQEYAELMNEFMSAVKQNYGEKVLIQFEDFANHNAFDLLEKYRTTHLVFNDDIQGTASVVLGGLISALKLVGGSLADQKFLFLGAGEAGTGIAELIALEISKQTNIPLEESRKKVWLADSKGLIVKSRLDSLQHFKKPWAHDHEPVNEFLDAIKTIKPTVLIGSSGTGQTFTKEVVETMSSLNEKPIILALSNPTSQSECTAEQAYTWSESRAIFASGSPFKPVEYNGKLYVSGQANNAYIFPGFGLGLIISGAIRVHDDMLLAASEALAEQVTQEHFDKGLIFPPFTSIRKISAHIAAKVAAKAYELGLASRLPQPENLVAYTESCMYSPKYRIYR

SEQ ID NO: 6948 - protein, 222 aa, Glycine max
KTIQKRKRYRKLYPGETTGITEEMRFVAMRLRTNDTVSQQEHQSHSDAWQASMEGFLSYLVDSHLIFATLQRIVDESDNVSYAYMRKTGLERSEGLLKDLKWLEEEGNMIPTPGSPGLTYAKYLEELAEISAPLFLSHFYNIYFSHIAAGQVIGKKVSEELLEGKELEFYKWEGDVPDLLKDVRDKLNMLSEHWSRDEKNRCLKETTKAFRYMGQIVRLIVS

SEQ ID NO: 6949 - protein, 246 aa, Zea mays
MHKLGRGSRDKVQQFMAITGASEKAALQALKASDWHLEGAFDVFYSQPQIAVANTRHLEELYNRYKEPDADMIMVEGISQICNDLQVDPQDIVMLVISWHMKASTMCEFTRQEFIGGLQSIGVDSIEKLQAKLPSLRAELKDDQKFHEIYNFAFAWAREKGQKSLALETAIGMWQLLFAERSWPLIDYWCQFLQVRHNKAISRDTWAQLLEFVKTIDPQLTNYDEEGAWPYLIDEFVDYLKENGLA

SEQ ID NO: 6950 - protein, 398 aa, Rhodopirellula baltica SH 1
MAKDKFERTKPHVNVGTIGHIDHGKTTTTGAILAVQAAKGLAKAKGYSDIAKGGTVRDATKTVTIAVAHVEYESENRHYAHIDCPGHADFVKNMITGAAQMDGAILVVSAADGPMPQTKEHVLLGRQVGVPYIVVYLNKCDLVDDEELLELVELEVRELLSKYDYPGDDVPVVRGSSLPAYNNPSDPEASKCITELMEALDSHIPEPTREDDKPFLMAIEDVFSIEGRGTVATGRIERGVVKVGEEVEIIGLGPNSTKTTCTGVEMFRKEMNEGRSGDNVGCLLRGVKREDIQRGQVLAKPGSITPHTKFEAEVYCLSKDEGGRHTPFFSGYRPQFYFRTTDVTGTANLVGADMCMPGDNVKVEVELHKPIAMDDGVRFAIREGGRTVGSGVVTKILE

SEQ ID NO: 6951 - protein, 191 aa, Zea mays
AQRAAAAMSSSSSFPNSRFPFAAGAGASGGSGSSVRPWGSSGGTSVSSSGKRIQKELLDLNASDCSAGPKGDNLYHWLSTIIGPQGSPYEGGIFFLDIVFPPDYPFKPPMVTFKTRIYHCNIDSTGKVHLDILKDGWSPAFTISKVLLAIKDIINNPDPYTPLVMSISRQYLTDRAKHDETAAEWTMRFAR

SEQ ID NO: 6952 - protein, 404 aa, Nanoarchaeum equitans Kin4-M
MNPKEEALKVLKEADEVANIDVYEYLKEPERVVETYFPARTKNGIEYFKGYRVQYNTALGPAKGGIRFSPTVTKEEVEALALWMVIKNALLGLPFGGGKGGVVVNPKEYEEWELENIARGFVRSIAEFIGEDKDIPAPDVYTNERIMAYMMDEYEKIVRHKAFGVITGKPIILGGNPVRNIATSLGGYYVLNEAVKLKKVENTVAIQGFGNAGQGIAKLLDGQYKIVAVSDSKGGIYCKDGIDIEKLIEVKKKTGSVINYEGCEKITNEQLLELDVGILIPAAIEGVITKQNADKIKAKIILELANGPTTREADKILYEKGVLVLPDVLANAGGVTVSYIEWVGNKRGMPFNEKETKELLKEKMVHAFLDVLEVSNKYNIDMRLASYIIALERVKQAMRYRGLI

SEQ ID NO: 6953 - protein, 410 aa, Geobacter sulfurreducens PCA
MRRVVVTGVGAVSPLGVGNAANWDALVSGTSGIGHITRFDASDLPVRIAGEVKGFDPEQYIDKKEVKKMDLFIQYAMAAAHYAMEDSGLQITEENAERTGVLVGAGLGGLPTIEKYHAAMLEGGHKKISPFFIPMLIINLAPGHISIKYGAKGPNLSSVSACATGTHSIGDAYHMIKRGDADAMIAGGTESTVTPLGIGGFAVMKALSTRNDDPTAASRPFEKNRDGFVLAEGAGIVVLEEYEAAKKRGAKIYAEIVGYGLTGDAYHLTAPAPEGEGAARCMKMALNNAGVRPEEVDYINAHGTSTPFNDYYETLAVKSVFGDYAKKVMVSSTKSMTGHLLGAAGGVEAVFTLMAMDKGVIPPTINYQEQDPECDLDYVPNAAREKSITYALSNNFGFGGTNATLLFKKV

SEQ ID NO: 6954 - protein, 503 aa, Yersinia pestis biovar Medievalis str. 91001
MTRSNVEIPDDVQAWVSDGRYKEGFFTHLATDELAKGINEEVVRAISAKRNEPEWMLEFRLGAYRSWLEMEEPHWLKAHYQGLDYQDYSYYSAPSCGSCDDNCDSQPGAVQQSSADGSAPSNANEYLTAEVESAFAQLGIPVREGAEVAVDAIFDSVSVATTYREKLAGQGILFCSFGEAIQEYPDLVQKYLGSVVPAKDNFFAALNAAVASDGTFVYVPKGVRCPMELSTYFRINAAKTGQFERTILIADEGSYVSYIEGCSAPVRDSYQLHAAVVEVILHKNAEVKYSTVQNWFAGSDSTGGILNFVTKRALCEGEGSKMSWTQSETGSAITWKYPSVILQGDNSVGEFFSVALTNGYQQADTGTKMIHIGKNTKSTIIAKGISAGHSQNTYRGLVKILPGADNARNFTQCDSMLIGPDSGAHTFPYVEVRNNTAQLEHEATTSKIGDDQLFYCLQRGISEDDAISMIVNGFCKDVFSELPLEFAVEAQKLLAISLEHSVG

SEQ ID NO: 6955 - protein, 112 aa, Herbaspirillum seropedicae
MKLITAIIKPFKLDEVREALSAIGVQGITVTEVKGFGRQKGHTELYRGAEYVVDFLPKTKIEAAVDDAIVERALEAIETAARTGKIGDGKIFVQDLLDVIRIRTGETGKDAL

SEQ ID NO: 6956 - protein, 294 aa, Roseovarius nubinhibens ISM
MAILIDKNSKVLVTGLTGRIGSFHAQEMRDYGTNVVGGVTPGKGGMVHNGLPVFNTVKGAVAETGADMVIAFVPPPFAADSIMEAADAGIRTCICIADGIPTQDMIRVKRYMRRYKAENRMRLIGPNCAGIITPGQGFAGLMPPHIYLPGRVGIIGRSGTLGYEAASQMKARGIGVSSSIGIGGDPINGSSFRDILELFENDPETDAVVLVGEIGGPQEAEAAEYIRDHMTKPVAAYIAGLSAPKGRRMGHAGAIVSAFGESAQEKVEILKDCGVTIVPTPSAFGEAVETMLAA

SEQ ID NO: 6957 - protein, 125 aa, Aspergillus oryzae
MSSAKVYVGNLSWNTNDESLRQTFSEFGNVLDAIVMKDRETGRSRGFGFVTFSAQTEADAAIGGLNEQELDGRRIRVNLANARPAGGSRNYGGGNGYGGGYGGGYSQGGYQGGGYQGGNYGQGDY

SEQ ID NO: 6958 - protein, 450 aa, Triticum aestivum
  misc_feature (335)..(335): Xaa can be any naturally occurring amino acid
MQQRMKQAAAVAAQQQQQMMQQALLMHHHQQQAAAAAAAVPPMFPPHHAHPGLLAAPHIEPIVSGNLPPGFDSSTCRSVYVGNIHLQVTDSLLHEVFQSIGPVEGCKLIRKEKSSFGFVDYYDRRYAALAIVSLNGRQLFGQPIKVNWAYASTQREDTSGHFNIFVGDLCPEVTDAALFAFFSAYSTCSDARVMWDQQTGRSRGFGFVSFRNQQDAQTSINELNGKWLGNRQIRCNWATKGANAGEEKQSTDSKGVVELINGSSEAGKENANEDGPENNPQYTTVYVGNLPHDINSNDVHRFFHLLGAGSIEEVRVTRDKGFGFVRYSTHEEAAXAIQTGNGQLIGGRQIKCSWGSKPTPPGTASAPLPPPALAPYTPGVSAVDLISYERSLALSKMAANPALMGQHAALRQAAMDMGAGASKAIFDGGFQSVNPQQQQQQQQQQQLMYY

SEQ ID NO: 6959 - protein, 265 aa, Brassica oleracea
MKISIFRYKKNLKDEGSMRLLKFRRKDATQVVANLQRQQVNSRLIASDYLESNIDLMDFLVDGFENTDMALHYGTMFRECIRHQIVAKYVLDSQHVKKFFYYIQLPNFDIAADAAATFKELLTRHKSTVAEFLTKNEDWFFADYNSKLLESSNYITRRQAIKLLGDILLDRSNSVVMTKYVSSMDHLRILMNLLRESSKTIQIDAFHVFKLFVANQRKPSDIINILVANKNKLLRLLADVKPDKEDESFEADKAQVVREIVSLKP

SEQ ID NO: 6960 - protein, 526 aa, Yarrowia lipolytica CLIB122
MIQSVFLALAILIAYLGFAEWFSRFQHRRISKKKGCGMPPMANGGFLGWYGLYKTYQITSERTYPHSMRMGLEAFGHTFVYPVPGTDMLQTIHPDNIKAILATQFKDFSLGTRHKIMLPTLGDGIFTLDGEGWTHSRALLRPQFARDQVSHVASLERHIQVLFKTIKKENKECDPAKGFDIQELFFMLTLDTATEFLCGDSVDSLTDYLADPTAPQLDHSGIDENVRRAFPEAFNTAQWFCSIRAKLMKLYFFAGTVFYRKKYADANKIVHDFTDFYVSKALAARKEKFQELDQEGKYIFLYELAKETRNPKVLRDQMLNILLAGRDTTASLLSWVMFRMARQPETWKKLRQAVINDFGDTPDELSFESLKRCEYLRYVLNEGLRLYPSVPMNFRVATRDTTLPKGGGPDLDQPIFIPKGGIVVYSVYHTHRAEEYWGKDTEEFIPERWDPAEGYQIARGWEYLPFNGGPRICLGQQFALTEAGYVLARLAQEFETVTSCDDKPLPPKYNTHLTMSHDDGVWLKME

SEQ ID NO: 6961 - protein, 129 aa, Oceanobacter sp. RED65
MRILHTMLRVGNLDKSIEFYTDVLGMKLLRKHDNEQYKYTLAFVGYDTEDKTAVLELTYNWDTSEYDLGEGYGHIAIGCEDIYKTCDLIRERGGIISREPGPVKGGTTEIAFVKDPDGYAIELIQTDKA

SEQ ID NO: 6962 - protein, 406 aa, Arabidopsis thaliana
MSAILQGAGAATALSPFNSIDSNKLVAPSRSSLSVRSKRYIVAGSDSKSFGSSLVARRSEPLIPNAVTTKADTAASSTSSKPGHELLLFEALQEGLEEEMDRDPHVCAMGEDVGHYGGSYKVTKGLADKFGDLRVLDTPICENAFTGMGIGAAMTGLRPVIEGMNMGFLLLAFNQISNNCGMLHYTSGGQFTIPVVIRGPGGVGRQLGAEHSQRLESYFQSIPGIQMVACSTPYNAKGLMKAAIRSENPVILFEHVLLYNLKESIPDEEYICNLEEAEMVRPGEHITILTYSRMRYHVMQAAKTLVNKGYDPEVIDIRSLKPFDLYTIGNSVKKTHRVLIVEECMRTGGIGASLTAAINENFHDYLDAPVMCLSSQDVPTPYAGTLEEWTVVQPAQIVTAVEQLCQ

SEQ ID NO: 6963 - protein, 468 aa, Bacillus halodurans C-125
MDLYINGEWMRSGKTLDVTNPATGEVIDTVPFAGKKEAELAVSAAYEAFPQWSSQTASERSRYLMRWFQLIDEQQDEIGEIMTKEQGKPLREAIGEVQYANSFIQWYAEEAKRIYGDTIPASAINKRILVQKQPVGVIAAITPWNFPAAMITRKVAPALAAGCTAIVKPAEQTPLTALKLAQLAEEAGIPAGVLNVITGNAQDIGEAWLEDSRVRKITFTGSTEVGKLLMRGAAQTVKKISLELGGHAPFIIMDDANLEEAVDQVIASKFRNAGQTCVCANRIYVAREIAEAFTEKFAAKVNELKVGNGLEEGVTIGPLIDKAAVEKVEAHIHDALKKGGQVTVGGRWTNHFFEPTIITGATDEMLCMNEETFGPLAPVATFDTEEEVIERANHTPYGLAAYVFTENIGRAIRLSEKLEYGIVGVNDGMPSVAQAPFGGWKESGLGREGGKYGIEEYLEVKYVSVAFK

SEQ ID NO: 6964 - protein, 317 aa, Gibberella zeae PH-1
MSFHPDNLPSLNGKVFIVTGGNAGMGYYTVLHLAAHGAHVYMCCRSLEKGNAAIAEIKKEHPSANIDLLQMDLMDFSSTVAAAKHFLTRETSLHGLINNAGIMATPFDMTKDGHEAQWQTNYLSHWVFTEHLIPVMQRTAKTLPPGSVRIVNLTSSGHLGAPKTGINFDDLTLKDQGVWERYGQGKLANILHTKSLHNKYGPGSENKDGEIWVTAVHPGLVETNLATTVDPTEKGMLTLVSALRCFRMLWTADKGSWNSLYCAASQDMKAEQSGQYMEIFHRFGEPWWASSAAKDEELAKKLDVWTRETMGKEGWVQ

SEQ ID NO: 6965 - protein, 706 aa, Fusarium oxysporum
MAPRGFEDEELTISLSSSHVRRPQQQQQQQSQQQQQHASSDAPTPGSRPADAPLKERIKTEQRIGAYKVLRTLGEGSFGKVKLAIHNGTGQQVALKIIARKKLISRDMAGRVEREIEYLQLLRHPHIIKLYTPNEIIMVLEYAGGELFDYIVQHGRMKEPEARRFFQQMLCAVEYCHRHKIVHRDLKPENLLLDENLNVKIADFGLSNIMTDGNFLKTSCGSPNYAAPEVIGGKLYAGPEVDVWSCGVILYVLLVGRLPFDDEHIPSLFAKIAKGTYSIPQWMPAGAANLIKKMLVVNPVHRATIEDIRADPWFTTDLPAYLQLPVEEFFNTGVDPNKAIKKNDIAPNASEKVQERLHNEVTEKISKTMGYGKSDVEEALQAAEPAAIKDAYMIVRENKMMQVNHNPEALLAEPEGSSPMLSMSSARSTTSQATTTPRPYVSKVGILPSSLPAYHKDYMEREKAGSVENSPPKVLINDEPPSNRTDAEKEETARRLRPHSRSQLRMDEANTRPQGMTPINPPKKNKPVRWQFGIRSRNSPWEALLCIHKALHKLGATYIPDEDYESRTAEERAEASGEGSFADSHDNNRGSSSSIDPKKRYNLPADPWHINVRWDTSAIKKKAASVPGTPSSPSTPEGQHHPKEPFVALHMDIQIYEMEHGVYLVDFKCSGYETAHGRLLEEKDVTSPFPFLDMAAKLIMQLAEAD

SEQ ID NO: 6966 - protein, 204 aa, Yarrowia lipolytica CLIB122
MSQFSAIPEALEAFKNGEFLVVMDDESRENEGDLIIAAAQTTTEKMAFLIRHSSGFVCVPLSNELANKYELPYMVENRTDRHGTAYTVTCDAIEGTTTGISAHDRALTARCLADKNTTAASFMRPGHVVPLRAVDGGVLARRGHTEAAVDLCKLTGQPAAGVICEIVRDEDGLMARTDDCLEFAKTHGIKAITIDALVKYIEQQ

SEQ ID NO: 6967 - protein, 168 aa, Clarkia similis
SFYQLIHQGRVIPCDFIGVVKSQQPVYLKGEVVNNHDELMSNFFAQPDALAYGKTPEQLKKENVSEHLIPHKTFTGNRPSISILLPTLDAYRIGQLLAIYEHRVAVQGFVWGINSFDQWGVELGKSLATQVRKQLHASRVKGEPVEGFNFSTKTLLTRYLEATSDVPT

SEQ ID NO: 6968 - protein, 388 aa, Sordaria macrospora
MGITCLQHGHYRNHFHSPNNNFLTLSTFLSQTTLRAPRIWTGDNAHPTEIFALAPTPTTLISASGSSHILIHSTTTSPTFPLVQTLSNAHRLGCHHVTTARGLGSLGNTFVSVGFGGETKVWRRNNNPSSSETSESDKWSLYWTLPTPANKKEKGDVWAVALSADEGYLAATTSDGRIHVWDLEGKQKVQTYETGASAGGGGGGQQDGSNGVGSGSFAMAVDLSRDGKFTASGHENGGVYVFNNDAGRMVYSLSGLAKPIRAIAFSPGCKRLAAAGNAGIIAIYDMQHGEHVANLSATGSRPAWITSIDWNDTGEYLLSGSLDGKVRVWDVARGVCVATHSETESALWCVRWLPKSEKALAPGMGKGEMFAAAGANRSLTFYREATGS

SEQ ID NO: 6969 - protein, 320 aa, Escherichia coli
GTTKHSKLLILGSGPAGYTAAVYAARANLQPVLITGMEKGGQLTTTTEVENWPGDPNDLTGPLLMERMHEHATKFETEIIFDHINKVDLQNRPFRLNGDNGEYTCDALIIATGASARYLGLPSEEAFKGRGVSASATCDGFFYRNQKVAVIGGGNTAVEEALYLSNIASEVHLIHRRDGFRAEKILIKRLMDKVENGNIILHTNRTLEEVTGDQMGVTGVRLRDTQNSDNIESLDVAGLFVAIGHSPNTAIFEGQLELENGYIKVQSGIHGNATQTSIPGVFAAGDVMDHIYRQAITSAGTGCMAALDAERYLDGLADAK

SEQ ID NO: 6970 - protein, 498 aa, Zea mays
MALAGTGVFAEILGSEVYRYYADGEWRSSASGKSVAIVNPTTRKTQYRVQACTQEEVNKAMDAAKVAQKAWARTPLWKRAELLHKAAAILKEHKAPIAECLVKEIAKPAKDAVSEVVRSGDLVSYTAEEGVRILGEGKLLVSDSFPGNERNKYCLSSKIPLGVVLAIPPFNYPVNLAVSKIGPALIAGNALVLKPPTQGAVAALHMVHCFHLAGFPKGLISCVTGKGSEIGDFLTMHPGVNCISFTGGDTGIAISKKAGMVPLQMELGGKDACIVLEDADLDLVSANIVKGGFSYSGQRCTAVKVVLIMESIADAVVQKVNAKLAKLKVGPPEDDSDITPVVTESSANFIEGLVMDAKEKGATFCQEYRREGNLIWPLLLDHVRPDMRIAWEEPFGPVLPVIRINSVEEGIHHCNASNFGLQGCIFTRDINKAILISDAMETGTVQINSAPARGPDHFPFQGLKDSGIGSQGITNSINMMTKVKSTVINLPSPSYTMG

SEQ ID NO: 6971 - protein, 169 aa, Clarkia similis
SFYQLIHQGRVIPCDFIGVVKSQQPVYLKGEVVNNHDELMSNFFAQPDALAYGKTPEQLKKENVSEHLIPHKTFTGNRPSLSILLPTLDAYRIGQLLGIYEHRVAVQGFVWGINSFDQWGVELGKSLATQVRKQLHASRVKGEPVEEGFNFSTKTLLTRYLQATSDVPA

SEQ ID NO: 6972 - protein, 144 aa, Glycine max
  misc_feature (62)..(62): Xaa can be any naturally occurring amino acid
  misc_feature (94)..(94): Xaa can be any naturally occurring amino acid
  misc_feature (107)..(107): Xaa can be any naturally occurring amino acid
FAFLISYDNPGILAGLGCSASSQAKRGRGLELSRIQAHRGPDWSQLHQYGDHYLAHHRLAIXDPAHGEHPLFNADYTESVPVNGEIYNHEELMXQLPNDTFQTGCDXDVIAHLHEEHGDYYMDMLDGIFSAALLDSRDSMHIVA

SEQ ID NO: 6973 - protein, 108 aa, Escherichia coli
SDKIIHLTDDSFDTDVLKADGAILVDFWAEWCGPSKMIAPILDEIADEYQGKLTVAKLNIDQNPGTAPKYGIRGIPTLLLFKNGEVAATKVGALSKGQLKEFLDANLA

SEQ ID NO: 6974 - protein, 843 aa, Arabidopsis thaliana
MRSVPNYHHSFFIFLILILFLAFSVSPNTLSATESLTISSNKTIISPSQIFELGFFNPASSSRWYLGIWYKIIPIRTYVWVANRDNPLSSSNGTLKISGNNLVIFDQSDRPVWSTNITGGDVRSPVAAELLDNGNFLLRDSNNRLLWQSFDFPTDTLLAEMKLGWDQKTGFNRILRSWKTTDDPSSGEFSTKLETSEFPEFYICSKESILYRSGPWNGMRFSSVPGTIQVDYMVYNFTASKEEVTYSYRINKTNLYSRLYLNSAGLLQRLTWFETTQSWKQLWYSPKDLCDNYKVCGNFGYCDSNSLPNCYCIKGFKPVNEQAWDLRDGSAGCMRKTRLSCDGRDGFTRLKRMKLPDTTATIVDREIGLKVCKERCLEDCNCTAFANADIRNGGSGCVIWTREILDMRNYAKGGQDLYVRLAAAELEDKRIKNEKIIGSSIGVSILLLLSFVIFHFWKRKQKRSITIQTPNVDQVRSQDSLINDVVVSRRGYTSKEKKSEYLELPLLELEALATATNNFSNDNKLGQGGFGIVYKGRLLDGKEIAVKRLSKMSSQGTDEFMNEVRLIAKLQHINLVRLLGCCVDKGEKMLIYEYLENLSLDSHLFDQTRSSNLNWQKRFDIINGIARGLLYLHQDSRCRIIHRDLKASNVLLDKNMTPKISDFGMARIFGREETEANTRRVVGTYGYMSPEYAMDGIFSMKSDVFSFGVLLLEIISGKRNKGFYNSNRDLNLLGFVWRHWKEGNELEIVDPINIDSLSSKFPTHEILRCIQIGLLCVQERAEDRPVMSSVMVMLGSETTAIPQPKRPGFCIGRSPLEADSSSSTQRDDECTVNQITLSVIDAR

SEQ ID NO: 6975 - protein, 285 aa, Xanthomonas campestris pv. campestris str. ATCC 33913
MSDKAHVFDVTTDTFETEVLQKSLTTPVLVDFWATWCGPCKSLTPILEKLAADYNGAFELAKVDVDKEQQIAAAFQIRSVPTVFLVKGGELVDGFPGAMPEGQIREFLTQHGVLPAEPQVAEEVPLAPLDPQAQVAALREAIAAEPDKDELKLDLALALLKTGDTLEAEQLIDALPANLATDDRAVRAKARLGFANVLKDAPDAAALQTTVAADGSDLHARHLLGVRHLLDGDDEAALEQFLEMLRQNRGFEDNLPRRSLIDAFRVIEDEDLVGRYRRKMSALLF

SEQ ID NO: 6976 - protein, 287 aa, Streptomyces avermitilis MA-4680
MSATQTAQLMDGTGHARRIVEEAAAKAAEISQRTGTAPCLATVLVGDDPASVTYVRMKRARCAKAGIRSRHIALPATTTTAELIDSLSGLSGDPEVHGILLQHPCGPHIDERAAFEAIAPAKDVDGVTMHSFAAMSFGLPGFVSCTPGGIMRLLEAYDVDLAGKHAVVVGRSAILGKPVGMLLLAKDATVTYCHSRTADLSAMVREADVVVAAVGRPRLIRGEDIKPGAVVIDAGYNPGNVGDVDFDAVLTRARLITPVPGGVGPMTIAVLLEQTVDAAANQLGVQQ

SEQ ID NO: 6977 - protein, 352 aa, Dendrobium hybrid cultivar
MENEKKGPVVVTGASGYVGSWLVMKLLKKGYVVRATVRDPTNLTKVKPLLDLPRSNELLSIWKADLDDVEGSFDEVIRGSIGVFHVATPMNFQSKDPENEVIKPAINGLLGILRSCKKAGSVQRVIFTSSAGTVNVEEHQAAVYDESCWSDLDFVNRVKMTGWMYFLSKTLAEKAAWEFVKDNDIHLITIIPTLVVGSFITSEMPPSMITALSLITGNDAHYSILKQVQFVHLDDVCDAHIFLFEHPKANGRYICSSYDSTIYGLAEMLKNRYPTYVIPQKFKEIDPDIKCVSFSSKKLLELGFKYKYSMEEMFDDAINTCRDKKLIPLNTDQEIVLAAEKFEEVKEQIAVK

SEQ ID NO: 6978 - protein, 432 aa, Sulfolobus tokodaii str. 7
MDCIFIFRRDLRLEDNTGLNYALSECDRVIPVFIADPRQLINNPYKSEFAVSFMINSLLELDDELRKKGSRLNVFFGEAEKVVSRFFNKVDAIYVNEDYTPFSISRDEKIRKVCEENGIEFKAYEDYLLTPKSLFHHRNFTSFYNEVSKVKVREPETMEGSFDVTDSSMNVDFLLTFKKIESPLFRGGRREGLYLLHRNVDFRRRDYPAENNNYRLSPHLKFGTISMREAYYTQKGKEEFVRELYWRDFFTLLAYYNPHVFGHCYRREYDNISWENNESYFEAWKEGRTGYPIIDAGMRMLNSTGYINGRVRMLVAFFLVKVLFVDWRWGERYFATKLVDYDPAINNGNWQWIASTGVDYMFRVFNPWKQQEKFDPEAKFIKEWVEELKDVPPSIIHSIYKTKVPGYPSPIVNWLERVNYVKSEYKNVKAVL

SEQ ID NO: 6979 - protein, 491 aa, Bacillus cereus ATCC 14579
MSKYKTILQSNKDELHSLYEIANQDSWKPIYHIHPPFGLMNDPNGVSYYNDEYHVFYQWYPFGPIHGMKHWGHVRSKDLINWERMPVAIIPTESYESHGAYSGSAIVKDGLLHLLYTGNIKKPDDSRDAKQCMASMDSQYTMTKYSNNPVIDIIPDGYTKHVRDPKVWKHNDMYYMLLGAQRENKTGTLLLYKSQDLYNWHFQGEITTNLKEFGFMWECPDYFQLSGKDVLLFSPQGIEKDGENFHNVYNVVYAIGHFDIKNLYFHVDSYYEADKGFDFYAPQTLEDSTSRRLLFAWAGSSEITYPSDDYMWAHCLTLPRELTLEDNILKQKPVSELTKLRTTKKDISGDITAGLNVLSTLDDEDSYELIVTLKTEDAKRFGLSLFHNEEECFPITFNREQGTISIDRGNFYHQFGGEYGFERCKKIDIQDTIELQIFVDKSIVEIFLYDGSTVFTSRVFPRKDMKHHIAIFSDAKLNFTITQYKLKRGIV

SEQ ID NO: 6980 - protein, 478 aa, Colwellia psychrerythraea 34H
MTSSEPDNSIQKLHDTEEVQTSFLYVLFISSVAAIGGFLFGFDSGVINGTVTALGNAFNASDVASGFNVASVLLGCAVGALMAGPISDRFGRKPIMIITAIIFAISAFGSGISSSSAEFIFYRLIGGLGIGAASVLAPAYIAEVAPAALRGRLATLQQLAIVLGLFAAFLSNFLIASVSGGAEAMLMLDIAAWRWMFWVELLPAVLFLVGVIFIPESPRYLVAQGKIEEARTIFKRIATGVENEQIEEVKKSLHGDKKPSIRDLFIDGKKKIHPIIWIGIGLSVFQQFVGINVVFYYGAELWQAAGFDESQSLFINLIAGTTNIISTFIAIALVDKIGRKPLLLVGSVGMFISLGALTFIFGTGGLDEAGKLALSDTTGTVALIMANLFVVFFGLSWGPIVWVLLGEMFNNRIRGAALAIAASAQWLANFAITMTFPILLGSFGLAGAYGLYTVSALLSIFFVIKYIKETRGIRLEEM

SEQ ID NO: 6981 - protein, 461 aa, Mycoplasma pulmonis
MKKNKKSWKEWFCKEGVKMTKNSSSSYNQIINDISKIMKKRKVKTLSQSEIFELLDSEGLFIDEDSSDEFLDVLKEKKILLDEVDPDDLVEVSGDTIENELDDEVDIKKLKSIKKEMLNDDLFNDDDLNDDGDEDFESNIFDDDEIKEYSSKSLQDKNISKLSGEKLKSKLIETNDIVKWYMRWIGKYGTLLTAAEEKQLAIDMKKGGLKGKIAKDKLINRNLRLVINNAKKYKNRGLSFIDLISEGNAGIIKAVQKFDESKGFKFSTYATWWIRQSITRAVADQARTIRIPVHMVETINKIIKIERELQQELGVNPTDEQIAERYGNDYDAKKVRYIRKMNIDPISLDKTVGKENDSFFSDFVKDESVISPIDHAAKEDLNEHLLELLNEQLTEEERVLIMKRYGIGEDENGVPYQVHTFDQLATEKNTSKEKIRQWENKILRRLKATKKRKILKEYLVK

SEQ ID NO: 6982 - protein, 596 aa, Oryza sativa
  misc_feature (512)..(512): Xaa can be any naturally occurring amino acid
  misc_feature (522)..(522): Xaa can be any naturally occurring amino acid
  misc_feature (557)..(557): Xaa can be any naturally occurring amino acid
MAVGDGGGGGVRRRGCGCSKEDFFPEESFSSWEAYGRALRSTGARLADRLTARSLDATELHEVRARSGADMKRDLTWWDLAWFGVGAVIGAGIFVLTGQEARNAVGPAVVISYVVSGVSAMLSVFCYTEFAVEIPVAGGSFAYLRVELGDFMAFVAAGNILLEYCIGGAAVARAWTSYFATLLNHHPNDFRIHAASLAADYSRLDPIAVAVIAIICLLSVLSTKASSRFNYVLSVLHVAVIAFIIVAGLTKADAANLTRDFMPYGPRGVFAASAVLFFAYIGFDAVSTMAEETRDPARDIPVGLVGAMALTTALYCALAVTLCLMVPYGEIDPDAPFSVAFADRGMGWAKYVVAFGALKGMTTVLLVSAVGQARYLTHIARTHMMPPWLARVHPGTGTPVNATVAMLLATAVIAFFTDLNVLSNLLSISTLFIFMLVAVALLVRRYYVSGETSRADRNRLAACIAAILASSVATATCWGLDRGGWVPYAVTVPAWLAATASLWALVPQARAXPKLWGVPMVXPWLPSASIAINVFLLGSIDSKSFMRFGIWTAARAXSYYLFVGLHASYDTAKALAADAVAGKVEDGDAKTSAPPM

SEQ ID NO: 6983 - protein, 317 aa, Prochlorococcus marinus str. MIT 9313
METIEADVVIVGGGPAGCSCALYTSRADLKTVILDKNPDVGALAITHQIANYPGVSSEMSGEALLALMREQAVSFGSDYRRAQVFGVDVNGEWKTVYTPEGTFKARALVVATGALGRPASFKGEAEYLGRGVSYCATCDGAFYKGREVAVVGANKEAVEEGQVLTKFASRVHWLTTSDPKEDDAHAQALMTQPNVQHWSRTRLMLIEGDDAGVTGIKLKNRTQETEQDLAVEGVFVYMSGSKPITDFLGDQVAFKEDGGVVVDDFMATTVDGVWAIGDIRNTPFKQAVVAASDGCIAAMAIDRFLNSRKGIRVDWVH

SEQ ID NO: 6984 - protein, 528 aa, Crocosphaera watsonii WH 8501
MDKQQLWQRYQDWLYYHEGLGVYVDVSRMRFDHGLVTQLTPKFEKAFADMETLESGAIANPDEGRMVGHYWLRAPELAPNDDVRKEITEPLANIGEFVQKVHAGTIKPPTADKFTHVLSVGIGGSALGPQFVAEALSDVDPPMVIHFIDNNDPAGIDRVIEQIGDHLKNTLVLITSKSGGTPETRNGMLEVKNAYESKGLAFEPNAVAVTMPGSKMDKVAVDDKWLARFPMQDWVGGRTSELSAVGLLPAALQGINIDEMLVGAKEMDEATRVKDLKTNPAALLALAWYHSGNGKGEKDMVVLPYKDSLLLFSRYLQQLVMESLGKEKDLDGNTVYQGIAVYGNKGSTDQHAYVQQLREGVPNFFATFIEVLEDGRDTLFEIEPGVTSGDFLSGFLQGTRQALFENNRDSITITIPQVNPRIVGALIALYERTVSFYASLVNINAYHQPGVEAGKKMAASILDLQTKVQTVIKETSEVLDMATLAEKAGSPDEVESVYKIVRHLAANGRGVSLEGELTDLKTLKVSAS

SEQ ID NO: 6985 - protein, 247 aa, Geobacter sulfurreducens PCA
MRTLVLIRHGESVWNRENRFTGWTDVGLTDKGAAEALRAGRTLKNEGFAFDEAFTSVLKRAIKTLWIVLEEMDQMWIPEHRHWRLNERHYGALQGLNKAETAERHGMEQVHVWRRSYDIPPPPLAAGDPRNPARDPRYAELDPADIPLTESLKDTVARFLPYWHETIAPRILAGRRLLIAAHGNSLRALVKYLDGIGDDAIAGLNIPTGIPLVYELEDDLHPIRSYYLGDPDEVARATQSVADQVKR

SEQ ID NO: 6986 - protein, 476 aa, Mycobacterium avium subsp. paratuberculosis K-10
MRDDDSANRWSGVREAPTAPSRQLTGAVVIIALVAAISGMLYGYDTGVISWALLQLTQDFNITEGWQQVIAASILLGAVAGALTCSWLSDLRGRRGTLLMLAVVFIVGALWCADAADSVMLSLGRLVLGFAVGGATQTAPMYVAELAPPAYRGRLVLCFQIAIGVGILTATLVGAGGSISWRGPIGLACVPAAIMLWLLLRLPESPRWLVKKDNRDAARAVLEHVRPEGYDVAAELDEATELARVERTAATRGWRGLRDAWVRPALVLGCGIAVFTQLSGIEMIIYYSPTILTDDGVYRSVALQVSVCLGAAYLIAQLVGLAIIDRVGRRRLTLIMVPGAAVSLFALGLLFITSDSGRDVIPYIMICLIAFMLFNGGGLQLMGWLTGSETYPLAVRPAATALQSATLWGTNLVITLTMLSLIKAIGVGPLMWLYALFNVAAWIFVFFRMPDLTGKTLEEIEYQLSEGKFRPSDFGR

SEQ ID NO: 6987 - protein, 515 aa, Escherichia coli CFT073
MEYPSHNDMSQQFNPYLCYFRPDTCVSCSRIFSLCLTLCWQEKMVTINTESALTPRPLRDTRRMNMFVSVAAAVAGLLFGLDIGVIAGALPFITDHFVLTSRLQEWVVSSMMLGAAIGALFNGWLSFRLGRKYSLMAGAILFVLGSIGSAFATSVEMLIAARVVLGIAVGIASYTAPLYLSEMASENVRGKMISMYQLMVTLGIVLAFLSDTAFSYSGNWRAMLGVLALPAVLLIILVVFLPNSPRWLAEKGRHIEAEEVLRMLRDTSEKAREELNEIRESLKLKQGGWALFKINRNVRRAVFLGMLLQAMQQFTGMNIIMYYAPRIFKMAGFTTTEQQMIATLVVGLTFMFATFIAVFTVDKAGRKPALKIGFSVMALGTLVLGYCLMQFDNGTASSGLSWLSVGMTMMCIAGYAMSAAPVVWILCSEIQPLKCRDFGITCSTTTNWVSNMIIGATFLTLLDSIGAAGTFWLYTALNIAFVGITFWLIPETKNVTLEHIERKLMAGEKLRNIGV

SEQ ID NO: 6988 - protein, 334 aa, Burkholderia xenovorans LB400
MARKITFSQAINEALSQEMARDETVIVMGEDNAGGAGSPGEQDAWGGVLGVTKGLFHKYPGRVLDTPLSEGGYIGAAVGAAACGMRPVAELMFIDFMGVCFDQIFNQAAKFRYMFGGKAVTPVVIRAMQGAGLRAAAQHSQMLTSLFTHIPGLKVVCPSTPYDAKGLLIQAIRDNDPVIFCEHKLLYSREGDVPEESYAIPFGEANVVRDGDDATIVTYGRMVHYATEAAEKLAKDGIEVEVIDLRTTSPLDEDTILESANRTGRVVVVDEANPRCSMATDISALIAQRAFRSLKAPIEMVTAPHTPTPFAGVLEDMYIPSARQIADAVLKVRG

SEQ ID NO: 6989 - protein, 177 aa, Arabidopsis thaliana
  misc_feature (153)..(153): Xaa can be any naturally occurring amino acid
  misc_feature (169)..(169): Xaa can be any naturally occurring amino acid
  misc_feature (171)..(171): Xaa can be any naturally occurring amino acid
MASSMLSSAAVVTSPAQATMVAPFTGLKSSASFPVTRKANNDITSITSNGGRVSCMKVWPPIGKKKFETLSYLPDLTDVELAKEVDYLLRNKWIPCVEFELEHGFVYREHGNTPGYYDGRYWTMWKLPLFGCTDSAQVLKEVEECKKEYPGAXIRIIGFTTPASPVHQXIXYKPPAY

SEQ ID NO: 6990 - protein, 259 aa, Azoarcus sp. CIB
MSKAQFQFITYGVADGLATLTINRPPFNVLDIPTMEEMNVALDLCQADNSVKLLMITGAGEKAFSAGVEVADHTPDKVDRMIEVFHGIFRRMQQLPIPTLAAVNGVALGGGMEVAIACDMLVAASNAKFGQPEIKLAVFPPIAAVLLPRLVPPARALELLLGGENIGADEAKAIGLVNRVFAKESFAADVQAFVAPFLGLSRAALASTRKTIRAVADKPFGAALDTAENIYLKELMNTDDAKEGLAAFLEKRKPVWKNT

SEQ ID NO: 6991 - protein, 305 aa, Oryza sativa
MAMATTSVTSLAMAMAAAASADATQAPHKLSALPFHHLLFSRAPPLLRASRRLPLAPLVASSDAAAAAEAGVEWSETEEADEGSQEEEEEEVVEEQAEAEEEVVASVEEEEEEAVEEEFAAEPPEEAKVYVGNLPYDVDSEGLAQLFEQAGVVEVAEVIYNRETGQSRGFGFVTMSTIEEADKAIEMLNRYDINGRLLNVNRAAPRGSRVERPPRQFAPAFRAYVGNLPWQVDDSRLLQLFSEHGEVVNASVVYDRESGRSRGFGFVSMASKEELDDAISALDGQELDGRPLRVNVAAERPQRGF

SEQ ID NO: 6992 - protein, 412 aa, Aeropyrum pernix K1
MGRIVQVKLPDIGEGIAEGEIVEWLVEEGAVVKQFSPLVRVLTAKATVEIPSPYTGRVVRLLAKPGDVVRVGDPIIEIEVEEGEAPKAPEAAEKPSATVEPPKAEEAAAPPPQAAPAILVRAPPRVRRLARQLGVDLARVRGTGPRGAITEDDVRRAAAMLATAPKPEAPPPVAEEAEERIPVRGIKRSMAQSMSLSKSKIPHAYIAEEVDFTELSKLREALKRDAEEKGVRLTYLPFVFKAVAKAIRKYPLVNSEFDEEKMEIVVKKAVNIGFAVDTPHGLVVPVVKNVEKKGLFAIAREIADLTAKAREMRLSLEEVSGATFTITNVGSIGSVIGFPVIYPPNVAILGVHRLVERPVYVDGELKPRKIGFVSLSFDHRALEGAYATRFLMEVKRLLENPALLFAEDYEFR

SEQ ID NO: 6993 - protein, 172 aa, Glycine max
MKIIPELLLFVIVPFLLNSGNGIETSTHSINNGTPEKQPYRTSYHFQPRQNWMNDPNGPMYYKGVYHLFYQHNPEAATFGDRIVWGHSVSYDLINWIHLNNAIEPSGPYDNNSCWSGSATIIPGKEQPVILYTGIDDKKHQVQNLAMPRNLSDPFLREWIKHPQNPVMSPPS

SEQ ID NO: 6994 - protein, 647 aa, Thiobacillus denitrificans ATCC 25259
MRENSPDPISGVETVLEAIRKHAKGWLAKVILGLIAVTFALFGIDSYMSGDRSGGVVAEVGKVGITREELTREIQAQSDRLRESLGPAFDPSMTETAAFRKQVLDSLIERKALLLEAEKLKFLAPDSYVAAAIGQIPAFQQDGKFSPQRYEAILRQNGRTPASFENELRQAFMLEGVTSPVTLAAFNATTTLEQVARLVAQQREISWVDLPVASVADEVKVTPADVERHYAANKPAFTEPEQIRAEYVVLDAAALVAGISVSEQAVRDYYAANAAQFGQPEQRSASHILIAADKDSDAATRAKAKAKATALMETLRKQPERFGELARSTSQDPGSAEQDGSLGSFGRGMMVKPFEDAVFAMKPKEIRGPVESDFGYHIIRLDSIEPGKAAPLAEVRAAIVDELRKQQAQKTFADLADNFSNLVYENAESLQPAAAAAKLTVQQSGWMNAKAAPPPFDNPALSAALFSPESIKSRQNTEAIEIKPGTLVAARVVEHRAARLRPLSEVSAEIERTMRAEQTAQLLAKKAEATIKSLQDGKESGLDWTAFQVVGRQPGASLDAAGVKAVFRANAEKTPAYTGFARPDGSYRIVRVTRVVEPASLDPMLMESIGSGVMQAQQRADMKALIALVTAGHKVKIQPNAIEGRED

SEQ ID NO: 6995 - protein, 285 aa, Saccharomyces cerevisiae
NVTTGEMMAVKQVEVPKYSSQNEAILSTVEALRSEVSTLKDLDHLNIVQYLGFENKNNIYSLFLEYVAGGSVGSLIRMYGRFDEPLIKHLTTQVLKGLAYLHSKGILHRDMKADNLLLDQDGICKISDFGISRKSKDIYSNSDMTMRGTVFWMAPEMVDTKQGYSAKVDIWSLGCIVLEMFAGKRPWSNLEVVAAMFKIGKSKSAPPIPEDTLPLISQIGRNFLDACFEINPEKRPTANELLSHPFSEVNETFNFKSTRLAKFIKSNDKLNSSKLRITSQENKTE

SEQ ID NO: 6996 - protein, 508 aa, Burkholderia xenovorans LB400
MNAVTRESSGNIGTARLLIAGEFVESKTTEWRDIVNPATQEVLARVPFATAEEVDAAIRSAHAAFATWKNTPIGARMRIMLKYQALIREHMPRIAKTLSAEQGKTIPDAEGDIFRGLEVVEHAASIGTLQQGEFAENVAGGVDTYTLRQPIGVCVGITPFNFPAMIPLWMFPMAIVCGNTFVLKPSEQDPLSTMQLVELALEAGVPKGVLNVVHGGKDVVDALCTHELVKAISFVGSTAVGTHVYRLGSEHGKRVQSMMGAKNHAVVLPDANREQTLNALAGAGFGAAGQRCMATSVVVLVGAAQQWLPDLVAKAKTLKVNAGNEPNTDIGPVVSRAAKQRILDLIETGVKEGATLALDGRDVKVAGYEQGNFIGPTVFTDVTTDMEIYRQEIFGPVLVVLNAATLDDAIALVNRNPFGNGVGLFTQSGAAARKFQSEIDIGQVGINIPIPVPVPFFSFTGSRGSKLGDLGPYGKQVVQFYTQTKTVTARWFDDDTVNDGVNTTISLR

SEQ ID NO: 6997 - protein, 311 aa, Helicobacter pylori 26695
MIDCAIIGGGPAGLSAGLYATRGGVKNAVLFEKGMPGGQITGSSEIENYPGVKEVVSGLDFMQPWQEQCFRFGLKHEMTAVQRVSKKDSHFVILAEDGKTFEAKSVIIATGGSPKRTGIKGESEYWGKGVSTCATCDGFFYKNKEVAVLGGGDTAVEEAIYLANICKKVYLIHRRDGFRCAPITLEHAKNNDKIEFLTPYVVEEIKGDASGVSSLSIKNTATNEKRELVVPGFFIFVGYDVNNAVLKQEDNSMLCKCDEYGSIVVDFSMKTNVQGLFAAGDIRIFAPKQVVCAASDGATAALSVISYLEHH

SEQ ID NO: 6998 - protein, 221 aa, Oryza sativa (japonica cultivar-group)
MAASGELRRTVGDPGRGRPQIGAQREHVRSLPAASTATSSGGHNGKGLPPPPRLRPAIASSRVSFRRGFLEARGGKKEEGRGEANPPPGDGDDGCGVRLPGGGGGGAVRGQRLPPPRAPFLRLARFLLLPQAHGGVSRVEGFVSPSTFDLNLPRRSLLVQFTCNACGERTKRLINRVAYERGTIFLQCAGCQVYHKFVDNLGLVVEYDLREENGMNTDTET

SEQ ID NO: 6999 - protein, 262 aa, Burkholderia xenovorans LB400
MSAEMIDVDRLDDGRVAVLTLRRPPANAFTPEGLSQLQRTVESLDEDERVRAVVITGEGPKFFSAGADLNAFADGNRDVARVAAQRFGAAFEALQNARPVVIAAINGYAMGGGLECALACDIRIAEEQAQLALPETAVGLLPCGCGTQTLPWLVGEGWAKRMILTGERVDAATALRIGLVEEVVGRGAARDAAVAMAQRVTTLSPQAVTFSKGLIHHARNGVPRTAALALERERFVDLFDGADQQEGVRAFLEKRAPRWHNT

SEQ ID NO: 7000 - protein, 405 aa, Neisseria gonorrhoeae FA 1090
MALIVHKYGGTSVGSPERIKNVAKRVAKARAEGHDIVVVVSAMSGETNRLVALAHEMQEHPDPRELDVVLATGEQVTIGLLAMALKDIGVDAKSYTGWQVSLKTDTAHTKARIESIDDEKMRADLAAGKVVIVAGFQGISSEGNISTLGRGGSDTSAVALAAALKADECQIYTDVDGVYTTDPRVVPEARRMDTVTFEEMIELASLGSKVLQIRSVEFAGKYKVRLRVLSSLQDGGNGTLITFEEDDNMERAAVTGIAFDKNQARINVRGVPDKPGVAYQILGAVADANIEVDMIIQNVGSEGTTDFSFTVPRGDYKQTLEILSERKDSIGAASIDGDDTVCKVSAVGLGMRSHVGVAAKIFRTLAEEGINIQMISTSEIKVSVLIDEKYMELATRVLHKAFDLG

SEQ ID NO: 7001 - protein, 662 aa, Pyrobaculum aerophilum str. IM2
MPKVAVIGAGTMGHGIAELFAIAGYEVALVDVAEDFLKRALQNIEWSLKKLAEKGQIKEDVGVILGRIKPIVNDVCKAVEGAELMVEAVVEDIEIKRKVFAEADRCAPPSAILATNTSSLPITEIAEAVKPERRPLVVGMHFFNPPVLMPLVEIIKGAYTSDETVKKTAEYASKLGKQTVVVNKDVPGFIVNRILARLNEAACWMVARGEATIQEVDSALIYKAGLPMGAFILMDYTGIDVVCFIGDAMVKRGFKTHPCPVIAEKCKEKKYGVKSGEGFYKYPAPGKFQWPEVPKAAGDKVDVTYLLAPAINEAAYLLRESIASREDIDKAIRLGLNWPKGPLEYADELGIDTVVKALEEWKNKTGFEEYEPDPLLRDMAAKGKLGKKSGEGFYTYVKAEEKKLETLIVRYEPGIAWIILNRPERLNAINPKMIEELWKVLDEIEQMDYDKVRVVVITGSGRAFSAGADVTGFMGATPVTIFKVSRKLQMLYERLELLDRPVICGLNGYTLGGGLELAMACDFRIAAETAELGQPEINLGFIPGAGGTQRLARLIGRDKAKELIFTGDRIPAREAERLGLVHKVVPPDRLEQELRAFANKLAEKPPLALAMAKYAINFGLEAPQWVGMMLEASNFGLLFSTEDVIEGVSAFLQKRKPQFKGK

SEQ ID NO: 7002 - protein, 369 aa, Persea americana
MAPTIVPFLPTTTEEKTLRQNFVRDEDERPKVAYNQFSNDIPIISLAGIDSEDGRAEVCKKIVEACEDWGVFQVVDHGVEAGLISEMTRLAREFFTLPAEEKLRYDMSGGKKGGFVVSSHLKGEAVQDWREIVTFFSYPIRSRDYSRWPDKPEGWKEVAQVYSDKLMGLACKLLEVFSEAMGLEKEALTKACVDMDQKMVVNFYPKCPQPDLTLGLKRHTDPGTITLLLQDQVGGLQATKDGRQTWITVQPVEGAFVVNLGDHGHFLSNGRFKNADHQAVVNSNFSRMSIATFQNPAPEAIVYPLAIREGEKPILDEPMTFAEMYRKKMSRDLELANLKKQAKEQQHQQEAEKASLVTIQAKALDDILA

SEQ ID NO: 7003 - protein, 220 aa, Dehalococcoides ethenogenes 195
MKDVKIVPAVLTDDPAAFECMLNQLESFAPSAQIDIMDGQFVPSLSIPPEVLGRYKPRFASEIHLMTLNPEEYLTYCKQHGAFRVIFHFEATTRPEYVISRIKELGFQAGLAVNPETPVSDFAYLVPQLDMVLFMSVIPGFYGAPFIPEVLLKVKEFKRRFPETEIGLDGGAKEGNIPEIVAAGVNDICVGSAIFRQTDPKSSYLYLDKLAKNASKEAGI

SEQ ID NO: 7004 - protein, 334 aa, Dehalococcoides ethenogenes 195
MVTRIGINGFGRIGRITLRTINQYHRGELEVVAVNDLADNKSNAHLLKWDSTYGKYPGTVESDDCSIIVDGKPIKVFSERDPMQIPWETAGVDLVIESTGLFTDAAKASSHLRGSVKTVVISAPAKGEDITVVMGVNEEKYNCNTHRVISNASCTTNCVAPLIKVLHDKFGVKKGFMTTCHAYTNDQKIQDMFHKDIRRARAAAVNVIPTTTGAAKAVALVLPELKGKLDGISFRIPSASVSLVDFVGELARNVTVEEVNAAFKEAAQGKLAGILEYCEEELVSSDFKGNPASSIIDAPSTMVLDGNMVKVLSWYDNEWGYSTRLGDLIAYISK

SEQ ID NO: 7005 - protein, 119 aa, Vitis aestivalis
MGSSGAVKLACVMVICMVMAAPAAVEAAITCGQVASALSPCISYLQKGGAVPPACCSGIKSLNSSAKTTADRQAACKCLKNFSSTVSGINLSLASGLPGKCGVSVPYKISPSTDCTKVT

SEQ ID NO: 7006 - protein, 488 aa, Candida glabrata CBS 138
MDVERQTFKVFNQDFTIDKRFELIKEIGHGAYGIVCSARFTEASEETTVAIKKVTNIFSKTLLCKRSLRELKLLRHFRGHKNITCLYDMDIVFYPDGSINGLYLYEELMECDMHQIIKSGQALTDAHYQSFTYQILCGLKYIHSADVLHRDLKPGNLLVNADCQLKICDFGLARGYSENPEENNQFLTEYVATRWYRAPEIMLSYQGYTKAIDIWSTGCILAEFLGGKPLFKGKDYVDQLNRILQVLGTPPDETLRRVGSKNVQDYIHQLGYIQKIPFSELFPNANEDALDLLEGMLAFDPQKRITVDKALEHPYLTIWHDPADEPECNEKFEFSFESVNEMEDLKRMVVDEVQSFREFVRQPLMDDKSQEDEQQQGSPENYQQTSPTNISPQRLHNNGSHDLLQEPEFLTQTPNQNSTIPDQLQESFVGIHSDNLPEHDTDFPPRPQENILASPMGLPSASDRNSMNNDSFLDLERELEFGLDRRYL

SEQ ID NO: 7007 - protein, 362 aa, Leuconostoc mesenteroides subsp. mesenteroides ATCC 8293
KVLAEKQGVDATDFAEIDNAPEEKERGITINTSHIEYETEKRHYAHIDAPGHADYVKNMITGAAQMDGAILVVAATDGPMPQTREHILLARQVGVDYLVVFLNKTDLVDDEELVELVEMEVRELLSEYDFPGDDIPVLKGSALKALEGDPEQVKVIEELMDTVDSYIPEPARETDKPFLMPVEDVFTITGRGTVASGRVDRGVLTTGTEIEIVGLKDEVQKTTVTGIEMFRKTLEEAQAGDNIGALLRGVDRSNIERGQVLAKPGSIKTHKKFKAEVYVLTKEEGGRHTPFFTNYRPQFYFHTTDVTGVVELPAGVEMVMPGDQVTFEIELISPVAIEQGLKFTVREGGHTVGAGTVTDIED

SEQ ID NO: 7008 - protein, 292 aa, Colwellia psychrerythraea 34H
MSDDTPHSSNGSASKSFLDKVMQVLTPEPKNKDQLIDILNDAQDRELINPETKQMIKGVLDVSEMRVREIMIPRSQMVTIDINHSLDEFLPIILESGHSRFPVVNEDIDHVDGILLAKDLLAFGFNSQSDNFSLSDVIRPAIIVPESKKVEPLLKEFRSNRYHMAIVVDEYGGVSGVITIEDILEQIVGEIEDETDDEIEEEIKHLAGNVYLVKALTELGDFNDYFNCNFNDTNADTIGGIVLRQFNHMPQKGELFRLGNFEFKVLVADSRRMQMLQVSVDKGHEINGKVSD

SEQ ID NO: 7009 - protein, 516 aa, Leptospira interrogans serovar Lai str. 56601
MTKVETRLEILDVTLRDGEQTRGVSFSTSEKLNIAKFLLQKLNVDRVEIASARVSKGELETVQKIMEWAATEQLTERIEILGFVDGNKTVDWIKDSGAKVLNLLTKGSLHHLEKQLGKTPKEFFTDVSFVIEYAIKSGLKINVYLEDWSNGFRNSPDYVKSLVEHLSKEHIERIFLPDTLGVLSPEETFQGVDSLIQKYPDIHFEFHGHNDYDLSVANSLQAIRAGVKGLHASINGLGERAGNTPLEALVTTIHDKSNSKTNINEIAITEASRLVEVFSGKRISANRPIVGEDVFTQTAGVHADGDKKGNLYANPILPERFGRKRSYALGKLAGKASISENVKQLGMVLSEVVLQKVLERVIELGDQNKLVTPEDLPFIIADVSGRTGEKVLTIKSCNIHSGIGIRPHAQIELEYQGKIHKEISEGDGGYDAFMNALTKITNRLGISIPKLIDYEVRIPPGGKTDALVETRITWNKSLDLEEDQTFKTMGVHPDQTVAAVHATEKMLNQILQPWQI

SEQ ID NO: 7010 - protein, 311 aa, Mesoplasma florum L1
MKKHINENLKDILIIGGGPAGLTAGVYAARAGMKTIILEKEAPGGKMVKTDTIENYPGFDSIKGPDLALKMYMQVMNLGAEFVYDEVIKIEKMDNYFIVTTLNGQIIEALSVIVATGTLENKLGIPGEDNLYGKGVSYCAVCDGAFHKGNPVAIVGGGYSAVEEGIYLSKFVSKLYVVVRKDHFRVDPVTLSKLEQLENVEFLMNSVVKKVNGIDKVESVEIENVITKEIKTVPVTGLFPYIGATPVTEFLENLNLDKNEGYLTGDAKLKSNIKGLFIAGDVRDVPLRQIAIAAGDGALAGQMAVNYVQEL

SEQ ID NO: 7011 - protein, 196 aa, Arabidopsis thaliana
MASEARESPANNPGLSTNRDEATKGYIMQQTMFRIKDPKASLDFYSRVLGMSVMGSYILRYSRLLKRLDFSEMKFSLYFLGYEDTTTAPTDPTERTVWTFGQPATIELTHNWGTESDPEFKGYHNGNSEPRGFGHIGVTVDDVHKACERFEELGVEFAKKPNDGKMKNIAFIKDPDGYWIEIFDLKTIGTTTVNAA

SEQ ID NO: 7012 - protein, 847 aa, Escherichia coli K12; identical to SEQ ID NO: 710

SEQ ID NO: 7013 - protein, 252 aa, Cryptococcus neoformans var. neoformans B-3501A
MSVYVGESRGELLAWLNDLLAPTVVTKLEQCGTGSVYCQIIDSIYGDLPMSRVKFNARMEYEYLDNFKILQKAFTRHKIEKPIPVDRLIKCKMQDNLEFLQWMKKYWDMHSRGEGYDAQARAGGHIAGVRASTSRPTAARTRPAPAMAGSRTVSSASQQANSAQVAAMQARVAEIEAHSEGLLKERDFYFDKLRNIELIVQERLAVEGITPEESDVMTKIQDILYATIEGFEVPQEEDFIEEQPVEGEEETF

SEQ ID NO: 7014 - protein, 367 aa, Glycine max
MEKELVELYEAAKKAADAAISGDVEHEESRCIDALEQLKKFPVNYKILVNTQVGKHLKVLTKHPRQKIKSFAIDLIEIWKGIIIKETSKNKNGGSDSKDESANREKSKAGKMQKSPSVKIEKGETVKVEKIERNGTSKSSFENMKKVQNDVKNERTDRAASVKMEKIAEEKPISGAKKMSSSSTAPPKLKTMIKSNDATRDKIREILHEALSKVTREADEDLVAVVNDSDPIRVAVTVESVLFEKWGPSNGAQKVKYRSLMFNLKDSNNPDFRRKVLLGVVEPEQLINMSTAEMASEQRKQEYQKITEKALFECERGGQPKATTDQFKCGRCGQRKTTYYQMQTRSADEPMTTYVTCCVCNNRWKFC

SEQ ID NO: 7015 - protein, 503 aa, Triticum aestivum
METGGKDGNPLKNYRIGKTLGIGSFGKVKIAEHIKTGHKVAVKILNRRKIKNMEMEEKVKREIKILRLFMHPHIIRLYEVIEAPADIYVVMEYVKSGELFDYIVEKGRLQEEEARRFFQQIISGVQYCHRNMVVHRDLKPENLLLDNNCDVKIADFGLSNVMRDGHFLKTSCGSPNYAAPEVISGKLYAGPEVDVWSCGVILYALLCGTLPFDDENIPNLFKKIKGGIYTLPSHLSGPARDLIPRMLVVDPMKRITIREIREHPWFEAQLPRYLAVPPPDTAQQVKKIDEESLVKVISLGFDKNLLVESIHNRLQNEATVAYYLFLDNKSRTTTGYLGAGYQEAMESSFSPITPSETQSPAHGNRQQPYMESPVGLRPHFPADRKWALGLQSRAHPREVMTEVLKALQELNVYWKKIGHYNMKCRWSPPGFPGQENMNHTNYNFSAEPIETDDLGDKLNLIKFELQLYKTRDEKYLLDLQRASGPHLLFLDLCAAFLAQLRVF

SEQ ID NO: 7016 - protein, 119 aa, Brassica rapa subsp. pekinensis
LMWYFLNVIFNILNKKIYNYFPYPYFVSVIHLFVGVVYCLVSWSVGLPKRAPINSDILKVLIPVAVCHAIGHVTSNVSFAAVAVSFTHTIKALEPFFNASASQFLLGQPIPITLWVSLA

SEQ ID NO: 7017 - protein, 288 aa, Nocardioides sp. JS614
MFPMTAQCRGATIEIGDRFGNQDREAGHGMGEFVRLEVADGVGTIRLDRPKMNALNVQVQEEIRAAAVEATERDDVKAVVVYGGERVFAAGADIKEMADMSYTDMVKRSGPLQSALGAVARIPKPVVAAITGYALGGGCELALCADVRFAAEDAVLGQPEVLLGIIPGAGGTQRLTRLVGPSKAKDIVFTGRFVKADEALAIGLVDRVFPAASVYDEALAWAGRFAGAASYALRAAKESIDRGIEVDLETGLEIERQQFAALFATEDRSIGMRSFVENGPGKAQFEGR

SEQ ID NO: 7018 - protein, 297 aa, Petunia x hybrida
MSNIVSLYFYLTTKSITTCQFCPSINQLCYYSFAPVCSLYLYSCNLRTNTSKSRAKMSPPVSVTKMQVENYAFAPTVNPAGSTNTLFLAGAGHRGLEIEGKFVKFTAIGVYLEESAIPFLAEKWKGKTPQELTDSVEFFRDVVTGPFEKFTRVTMILPLTGKQYSEKVAENCVAHWKGIGTYTDDEGRAIEKFLDVFRSETFPPGASIMFTQSPLGLLTISFAKDDSVTGTANAVIENKQLSEAVLESIIGKHGVSPAAKCSVAERVAELLKKSYAEEASVFGKPETEKSTIPVIGV

SEQ ID NO: 7019 - protein, 411 aa, Zea mays
MNALAATTRNFRRASKLLGLDSKLEQSLLIPFREIKVECTIPKDDGSLATFVGFRVQHDNARGPMKGGIRYHNEVDPDEVNALAQLMTWKTAVAAVPYGGAKGGIGCSPGELSRSELERLTRVFTQKIHDLIGTHTDVPAPDMGTNAQTMAWMLDEYSKFHGHSPAVVTGKPIDLGGSLGRDAATGRGVMYATEALLAEYGKCISGSTFVIQGFGNVGSWAARLIHEKGGKIIAIGDVTGSIRNTAGIDIPALVKHRNEGHAMKDFDGAEVLGSTELLVHDCDVLVPCALGGVLNKDNAPDVKAKFIIEAANHPTDPEADEILAKKGVVVLPDIYANSGGVVVSYFEWVQNIQGFMWAEEKVNDELEKYMSSAFQHMKAMCKSLDCDLRMGAFTLGVNRVARATLLRGWEA

SEQ ID NO: 7020 - protein, 858 aa, Brassica rapa
MQGVRYIYHHFYTSLLVFVVMILFRSALSIYINTLSSTESLTISNNRTLVSPGDVFELGFFTPGSSSRWYLGIWYKKLPYITYVWVANRDNPLSNSTGTLKISGNNLFLLGDSNKSIWSTNLTRGNERSPVVAELLANGNFVMRDSNNNDASGFLWQSFDYPTDTLLPEMKLGYDLKTGLNRFLTSSRNFDDPSSGDYSYKLEPRRLPEFYLLLGDVREHRSGPWNGIQFSGIPEDQKLSYMVYNFTKNSEEVAYTFRMTNNSFYSRLTINSEGYLERLTWAPSSVVWNVFWSSPNHQCDMYRMCGPYSYCDVNTSPSCNCIQGFNPGNVQQWALRNQISGCKRRTRLSCNGDGFTRMKNIKLPDTRMAIVDRSIGLKECEKRCLSDCNCTAFANADIRNRVTGCVIWTGELEDMRNYAEGGQDLYVRLAAADLVKKRNGNWKIISLIVGVSVVLLLLLLLLIMFCLWKRKQNRAKAMATSIVNQQRNQNVLMNTMTQSNKRQLSRENKADEFELPLIELEAVVKATENFSNCNELGRGGFGIVYKGMLDGQEVAVKRLSKTSLQGIDEFMNEVRLIARLQHINLVRILGCCIEAGEKILIYEYLENSSLDYFLFGKKRSSNLNWKDRFAITNGVARGLLYLHQDSRFRIIHRDLKPGNILLDKYMIPKISDFGMARIFARDETQVRTDNAVGTYGYMSPEYAMYGVISEKTDVFSFGVIVLEIVIGKRNRGFYQVNPENNLPSYAWTHWAEGRALEIVDPVILDSLSSLPSTFKPKEVLKCIQIGLLCIQERAEHRPTMSSVVWMLGSEATEIPQPKPPVYCLIASYYANNPSSSRQFDDDEPWTVNKYTCSVIDAR

SEQ ID NO: 7021 - protein, 262 aa, Bacillus thuringiensis serovar konkukian str. 97-27
MLQLQNISVDYVTPHVVKISLNRERQANSLSLALLEELQNILTQINEEANTRVVILTGAGEKAFCAGADLKERAGMNEEQVRHAVSMIRTTMEMVEQLPQPVIAAINGIALGGGTELCLACDFRIAAESASLGLTETTLAIIPGAGGTQRLPRLIGVGRAKELIYTGRRISAQEAKEYGLVEFVVPAHLLEEKAIEIAEKIASNGPIAVRLAKEAISNGIQVDLHTGLQMEKQAYEGVIHTKDRLEGLQAFKEKRTPMYKGE

SEQ ID NO: 7022 - protein, 237 aa, Callistephus chinensis
EFPTPLTTGLQVESIVFPSSVKPPGSTNSLFLGGAGVRGMEIQGNFVKFTGIGVYLEDKAIPLLAAKRKGKTVAELLDSVEFFRDIVTGPFEKFTQVTMILPLTGKQYSEKVSEMCVGVWKALGTYTDADGTTIEKFLEVFKDENFLPGSSILFTTSPLGSLTISFSKDGTIPEAANVVLENEKLAQAVIESVIGKNGVSPATKQSLASRLSDLMKQFDEESNGSVEVEDLSKNSCK

SEQ ID NO: 7023 - protein, 630 aa, Oryza sativa
MAVAGAFRRSTSTALQALTALSVLAALLQVEGQMYGPEEAAQTAQCPPFSWGHLKNVSPPFRRHGDPPDCGYKSHELVCSDTKATIRINNATYYVTRIIHWSLFVVVDTDLLNSHNSSCPLPRRQHQPPHERISMAPTSDGVQVIELAPFTNRWAAFVNCSKEITRNVRYKPVACLSTSHSFVYVLTGSESETVYVESLEPSCGYLGMTPLDDRGASINASLSYADVLKYMRKGFAIGISSSSGTYHFDFRACLAESVRFLLAPLVVLTFLSHKYWKARITIDAVEKFLRMQEMLSPMRYGYTDIIAITSHFRDRLGQGSYGTVYKGVLLPGNIHVAVKMLNGNSNCNGEEFISEVSTIGRIHHVNVVRLVGFCSEEMRRALVYEYMPRGSLDKYIFSSDKSFSRDKLNEIALGIARGINYLHQGCDLQILHFDIKPHNILLDKNFVPKVADFGLARLYPRDKSFVPVSAARGTVGYIAPEMISRSFGVISSKSDVYSFGMLLLEMAGGRRNADPNAENSSQAYYPSRVYRQLTRQETGEITAAADMHELEKKLCIVGLWCIQMRSCDRPMMSEVIEMLEGGVDCLQIPPRPFFCDDDYIPAMESLYLSSELELAAISEEKDEESITELN

SEQ ID NO: 7024 - protein, 184 aa, Yersinia pestis biovar Medievalis str. 91001
MSHPIYAISVQTIDHQLVKLAKYKGSVLLVVNVASQCGLTQQYEGLESLYKTYQKQGFEVLGFPSNEFAGQEPGSDEEIHAFCRGTFGVDFPMFSKIEVNGPHRHPLYQHLVTAKPVAVKPEGSEFYQRLASKGREPKQPGDILWNFEKFLISRDGTVLARFAPDMAPEAPILINAINQALASH

SEQ ID NO: 7025 - protein, 487 aa, Yersinia pseudotuberculosis IP 32953
MSTHLVWFRNDLRVTDNLALHAACQDPQASVIAVFIATPVQWAAHGMAPRQAAFLRQNLQHLQAALAARGIPLHYHQCDDFQASNTWLVDFCQQQQVDSLFYSQQYELNERLRDDALAVQLSGRAITCQSFHDSVLLAPGTVLTGNNEMYKVFTPFRRAFIQRLLMSDNHCVPAPKARHAPPVLLSPLPFDYPQQSVDSQLFPAGEDAALQRLRRFCREQVQDYRQYRDLPAVPGTSCLSPYLVLGVLSPRQCFNRLWAESPEMLENADSGAFTWLNELIWREFYRHLLVAYPRLCQHHPFIGWTDGLVWNRSESQLKAWQQGQTGYPIVDAAMRQMNETGWMHNRLRMISASFLVKDLLIDWRQGERYFMSQLVDGDLAANNGGWQWAASTGTDAAPYFRIFNPTTQGERFDKDGVFIRRWLPELAAVPDSDIHQPWRWAERQQQHLDYPVPLVDHKQARLATLAAFEAAKRDSTRIPNRKEPSCY

SEQ ID NO: 7026 - protein, 616 aa, Zea mays
MDSDYGVPRELSEVQKKRALYQPEVPPCLQGTTVRVEYGDAAIAADQAGAHVISHAFPHTYGQPLAHFLRKTAVVLDAKVISEHPVVRVGIVFCGRQSPGGHNVVWGLYEAIKAHNQNSKLIGFLGGSDGLLAQRTLEITNEVLASYKNQGGYDMLGRTKDQIRTTEQVNGAMASCQALKLDALVIIGGVTSNTDAAQLAETFAEAKCATKVVGVPVTLNGDLKNQFVETTVGFDTICKVNAQLISNVCTDALSAEKYYYFIRLMGRKASHVALECALQSHPNMVILGEEVAASKLTIFDITKQICDAVQARAEKDKNHGVVLIPEGLVESIPELYALLQEIHGLHGKGVSVENISSQLSPWASALFEFLPPFIRKQLLLHPESDDSAQLSQIETEKLLAQLVETEMNRRLKEGTYKGKKFNAICHFFGYQARGALPSKFDCDYAYVLGHVCYHIIAAGLNGYMATVTNVKSPVNKWRCGAAPISSMMTVQRWSRGPSATQIGKPAVHMASVDLKGKAYDVLRQNSSRFLLEDVYRNPGPLQFEGPGADSKPISLCVEDQDYMGRIKKLQEYLEKVKSIVKPGCSQDVLKAALSAMSSVTETLNIMTSSSTGQTAL

SEQ ID NO: 7027 - protein, 228 aa, Buchnera aphidicola str. Sg (Schizaphis graminum)
MKKFFLASSILSADFARLGEDTKKAIDAGSDWIHFDVMDNHYVPNLTMGPMILKALRNYNITVPIDVHLMVKPVDNLIPQFAEAGADFITFHPESTDHIDRTLNLIKECGCKAGLALNPATSLNFLDYVMEKLDLILLMSVNPGFGNQSFLPTSFNKLREVRKKIELNSSNILLEVDGGVKLENISEVAFSGANVFVIGSGIFGYTDYNVIIKKIRKKLKNVYSTSIH

SEQ ID NO: 7028 - protein, 387 aa, Petroselinum crispum
MDGSTQPSDTVMSDAAPASQTAGIENIPASLSHGGRFIQYNIFGNIFEVTAKYKPPILPIGKGAYGIVCSALNLETNEHVAIKKIANAFDNKVDAKRTLREIKLLRHMDHENVVAIRDIIPPPQRGSFNDVYIAYELMDTDLHQIIRSNQGLSEEHCQYFLYQILRGLKYIHSANVLHRDLKPSNLLLNANCDLKICDFGLARVTSETDFMTEYVVTRWYRAPELLLNSSDYTAAIDVWSVGCIFMELMDRKPLFPGRDHVHQLRLLMELIGTPSEAELEFLNENAKRYIRQLPLYRRQSLTEKFPNVHPSAIDLVEKMLTFDPRRRLTVEDALAHPYLTSLHDISDEPVCAAPFSFDFEQHALTEEQMRELIYREALAFNPEHQQM

SEQ ID NO: 7029 - protein, 563 aa, Lactobacillus plantarum WCFS1
MEVKKVVIVGGVGGGASAAARVRRLDEFAQITIFEKGPDVSFSNCALPYTFSDVIDQPDDVILKTPMQFEQQYNIDVQVNTTVVAIDAQAKTVMIKRQGQVATTIVPYDTLILSPGARPILPAVIAGIDRPNVKTVRNVQDVRTIQAYLTEQHVHDVTIVGGGFIGLEMAENLQQAGYQITIIEAAEHVLGTLDDEFAQLVHKELYDHGVQVILQEQVTAIGATQVQLASGRAVTSQLVIVAIGVTPVTELAVQAGCALGVTGGIKVDHRYQTSVADIYAVGDAIEVTNRLTRQSTRLALAFPAQMQARHMVDHLYGRTPQYQGVIGSQVLHVFTLNVASTGLNATECEHQQLDYRFATVAPQNRVSVMPGTTAVFLKLIFSYPTGEILGAQAIGQSDVDKPIDIIASLITMHGRVSDLTDVELCYSPWVSTAKNVVNMVGLVAENVLNDEFKQVAVTQVRQLVLAGAFIIDAREPQEYADGHIKGAHNIPLSQFRQRLVEIPTNQPVYIHCQTGQRSYNMVRALLQRGYTNVVNIAGSYAELVQYEYFNDQTTGRTSILTRT

SEQ ID NO: 7030 - protein, 376 aa, Vitis aestivalis
MGCFPCAGKSNKKGKKNQEKNSKDQIPSTSERLKVNSSVDGRKDASKDGGSDHIAAHTFTFRELAAATKNFRAECLLGEGGFGRVYKGRLESTNKIVAIKQLDRNGLQGNREFLVEVLMLSLLHHPNLVNLIGYCADGDQRLLVYEYMALGSLEDHLHDLPPDKKRLDWNTRMKIAAGAAKGLEYLHDKASPPVIYRDLKCSNILLGEGYHPKLSDFGLAKLGPVGDKTHVSTRVMGTYGYCAPEYAMTGQLTLKSDVYSFGVVLLEIITGRKAIDNSKAAGEHNLVAWARPLFKDRRKFSQMADPMLHGQYPLRGLYQALAVAAMCVQEQPNMRPLIADVVTALTYLASQKYDPETQPVQSSRMGSSTPRSRREL

SEQ ID NO: 7031 - protein, 401 aa, Frankia sp.
MTVRETRFPSSSATATQPDAVVRFCDTTLRDGEQAPGVAFTAAEKLAIAGALDAIGVHQIEAGIPGMGVTERDVLREILATDPKAEIVGWCRADHRDVEAAASCGLVTAHLTIPVSDLHLKSKLERDRAWARRRVRDCVVDGTDRGMRVSVGFEDASRADDAFVTDLAGELRDVGVTRLRWADTVGLLDPVSAYDRLGRLVRAVPGPWEIHAHDDFGLATANTIAAVQAGFTWVSTTVLGLGERAGNAPIEEVAMALRHLLKLPIDLDTTSFRTLAQLVVGWPLPAGKKAVVGESVFAHESGIHVHGILRHPATYEPFDPEVGGRRRLTVGKHSGRASLRHALEQCGITAEESELEPLVEQVRLAATRHKRGLDSRDLPGTSRAGRDAGPRAGTPTREEPV

SEQ ID NO: 7032 - protein, 954 aa, Sinorhizobium meliloti
MSMPKDFTFTDYKPYDFANRRHIGPSPAEMDEMLKVVGYPSLDALIDDTVPPSIRQRTPLAWGAPMTEREALDKLRETANRNRKLVSLIGQGYYGTITPPVIQRNILENPAWYTAYTPYQPEISQGRLEALLNYQTMVCDLTGLDVANASLLDEATAAAEAMAIAERVAKSKAKAFFIDENCHPQTIALLKTRAEPLGWQIVLGDPFEDLDAAGVFGAIFQYPGTYGHVRDFSGLIAKLHGQGAIAAVAADPLALALLKSPGEMGADIAIGSTQRFGVPVGYGGPHAAYMAVKDAYKRSMPGRLVGVSVDARGNRAYRLSLQTREQHIRREKATSNICTAQVLLAVMASMYAVFHGPDGIKAIAQSVHQKTVRLAMGLEKLGYTVEPDVFFDTITVEVGKLQGIILKAAVAEEVNLRKIGTTRIGISLDERSRPVTLEAVWRAFGGDFKVEEFEPDYRLPQELLRTSAYLTHPIFHMNRAESEMTRYMRRLADRDLALDRAMIPLGSCTMKLNATAEMLPITWPEFSEIHPFVPADQALGYQHLIEDLSQKLCAITGYDAISMQPNSGAQGEYAGLLAIRAYHIANGNEHRDVCLIPTSAHGTNPASAQMAGMKVVVVKVSDAGEIDMDDFRAKAEQYADTLSCCMITYPSTHGVFEENVREVCEVVHKHGGQVYLDGANMNAMVGLSRPGDIGSDVSHLNLHKTFCIPHGGGGPGMGPIGVKSHLAPFLPGHPQTDGHEGAVSAAPFGSASILPISWSYCLMMGGEGLTQATKVAILNANYVAARLKGAYDVLYKSAKGRVAHECIIDTRPLAESAGVTVDDVAKRLIDCGFHAPTMSWPVAGTLMIEPTESETKAELDRFCDAMLAIREEARAIEDGRMDKVNNPLKNAPHTVEDLVGDWDRPYSREQACFPPGAFRVDKYWSPVNRVDNVYGDRNLVCTCPPIESYAEAAE

SEQ ID NO: 7033 - protein, 849 aa, Photobacterium profundum SS9
MSKVRLAIIGNGMVGHRYIEELVDKADMENFEVTVFCEEPRIAYDRVHLSSYFSHHTADELSLVKEGFYEKHGINVLIGERAITINRAQKVIHSNTGREIRYDKLIMATGSYPWVPPIKGNEGKDCFVYRTIEDLKTIEATAKRSKSGVVVGGGLLGLEAAGALKALGVETHVIEFAPVLMAEQLDRQGGEQLRNKIEKLGVKVHTGKNTKEILAEGTEARNTMNFADGTSLEVDFIVFSTGIRPQDKLAMQCGLATGRRGGIAINNTCLTSDEDVYAIGECASWNEIFYGLVAPGYKMAQVAVSHLIGEDKTFEGADMSAKLKLLGVKVGSIGDANGRTPNCKSYVYLDENEEVYKRIIVSEDGKKLLGAVLVGDTSDYGNLLQLKLNDMDLPKHPDTLILPAHAGAEKPSMGADSLPETAVICSCFDVTKGKIATAVADGHTTLGEIKAVTGAGTGCGGCIPLITQVLNAELAKAGIEVKNHLCEHFEYSRQELFHLIRVEEIKSFDELLKKYGKGYGCEVCKPTVGSILASSWNDYVLTKDNTQLQDTNDIFLGNMQKDGTYSVIPRMAGGEVTPVALLAIAQVANDYNLYTKITGAQRIGLFGAHKDDLPAIWEKLIAAGFETGQAYAKALRMAKTCVGSTWCRFGVQDSTALGVALENRYKGIRTPHKMKFGVSGCTRECAEAQGKDLGIIATDAGWNMYVGGNGGMKPRHADLLAADLDKDTLIKYIDRYMMFYIRTADKVQRTSVWLDNLEGGIEYLRDVIINDKLGINAQLENDVEKLIASFQCEWTTTLEDDNQLKRFNHFINSSERDSNVTFVPEREQHRPATENEKAPIYTISLEEKV

SEQ ID NO: 7034 - protein, 526 aa, Clarkia similis
VEFDNIFLDYSRQQASPDTISKLYKLADAAHLKQKIDRMYNGDHINTTENRSVLHVALRAPRNSAICSDGKNVVPDVWNVLDKIKDFSDRVRNGSWIGATGKKLKDVIAVGIGGSFLGPLFVHTALQTDPESSKNARGRELRFLANVDPIDVARNISGLNPETTLVVVVSKTFTTAETMLNARTLREWISSALGPSAVAKHMVAVSTNLPLVEKFGIDPNNAFAFWDWVGGRYSVCSAVGVLPLSLQYGFAVVEKFLQGAHSIDQHFSSAPFEKNVPVLLGLLSVWNVSFLGYPARAILPYSQALEKLAPHIQQVSMESNGKGVSIDGLPLPFESGEIDFGEPGTNGQHSFYQLIHQGRVIPCDFIGVVKSQQPVYLKGEVVNNHDELMSNFFAQPDALAYGKTPEQLKKENVSEHLIPHKTFTGNRPSISILLPTLDAYRIGQLLAIYEHRVAVQGFVWGINSFDQWGVELGKSLATQVRKQLHASRVKGEPVEGFNFSTKTLLTRYLEATSDVPTDPSTLLPNI

SEQ ID NO: 7035 - protein, 554 aa, Bacillus cereus ATCC 14579
MSRKIVVVGGVAGGASVAARLRRLSEEDEIIMVERGEYISFANCGLPYYIGGVITERQKLLVQTVERMSKRFNLDIRVLSEVVKINKEEKTITIKNVTTDETYNEEYDVLILSPGAKPIVPPIPGIEEAKALFTLRNVPDTDRIKAYIDEKKPRHATVIGGGFIGVEMVENLRERGIEVTLVEMANQVMPPIDYEMAAYVHEHMKVHNVELVFEDGVDALEENGTVVRLKSGSVIKTDMIILAIGVQPESSLAKDAGLALGVRGTIKVNEKFQTSDPYVYAIGDAIEVKDFVTETETMIPLAWPANRQGRMLADIIHGHTDSLYKGTMGTSVAKVFDLTVASTGVNEKILKRLNIPYEVVHVQANSHAGYYPNATPVLIKLIFNKDSGKIYGAQALGRDGVDKRIDVIATAMKANLTVIDLPDLELSYAPPYSSAKDPVNMVGYAASNIVDGFVDTVQWHEIDHIVENGGYLIDVREPNELKQGMIKGSINIPLDELRDRLDEVPMDKEIYITCQLGMRGYVAARMLMEKGYKVKNVDGGFKLYGTVLPERVVY

SEQ ID NO: 7036 - protein, 481 aa, Candida glabrata CBS 138
MLRNSLRVAQRRGYFQVSRLKNGLRVATSDTPGHFSALGMYVSSGSRYETGSLKGCTHIVDRLAFKSTKNIDARSMMETLELLGGNYQCTSSRESMMYQASVFNRDVEKMLNLLAETIRFPKITEEELQEQKFTAQYEIDNIWTKPDLILPELLHNTAYSGETLGSPLICPREILPSITKKSLLNYREKFYNPENTVAAFVGQPHEKSIELAEKYLGDWTTTGEPLDKTAAHYTGGETCIPSAPVFGTMPELMHIQIGFEGLPIDHPDIYALATLQTLLGGGGSFSAGGPGKGMYSRLYTHVLNQYYFVENCVSFNHAYSDSGIFGISLSCIPQAAPQAAEVIAQQFYNCFANGALRLTDAEVSRAKNQLKSSLLMNLESKLVELEDMGRQVLMHGKKIPVSEMVSKIESLTTKDISRVAEMVFTGKAHNKGNGTGRATIVMQGDRAAFGDVQEVLGHYGLGSSSFSTDQSKSSTTKLKWF

SEQ ID NO: 7037 - protein, 526 aa, Clarkia similis
VEFDNIFLDYSRQQASPDTISKLYKLADAAHLKQKIDRMYNGDHINTTENRSVLHVALRAPRNSAICSDGKNVVPDVWNVLDKIKDFSDRVRNGSWIGATGKKLKDVIAVGIGGSFLGPLFVHTALQTDPESSKNARGRVLRFLANVDPIDVARNISGLNPETTLVVVVSKTFTTAETMLNARTLREWISSALGPSAVAKHMVAVSTNLPLVEKFGIDPNNAFAFWDWVGGRYSVCSAVGVLPLSLQYGFAVVEKFLQGAHSIDQHFSSAPFEKNVPVLLGLLSVWNVSFLGYPARAILPYSQALEKLAPHIQQVSMESNGKGVSIDGLPLPFESGEIDFGEPGTNGQHSFYQLIHQGRVIPCDFIGVVKSQQPVYLKGEVVNNHDELMSNFFAQPDALAYGKTPEQLKKENVSEHLIPHKTFTGNRPSISILLPTLDAYRIGQLLAIYEHRVAVQGFVWGINSFDQWGVELGKSLATQVRKQLHASRVKGEPVEGFNFSTKTLLTRYLEATSDVPTDPSTLLPNI

SEQ ID NO: 7038 - protein, 341 aa, Streptomyces avermitilis MA-4680
MRIGVLTSGGDCPGLNAVIRSVVHRAVVDHGDEVIGFRDGWKGLLECDYLKLDLDAVSGILARGGTILGSSRVQPAHLRDGVERARGHVAELGLDAIIPIGGEGTLKAARLLSDAGLPIVGVPKTIDNDIAVTDVTFGFDTAVGVATEALDRLKTTAESHQRVLIVEVMGRHTGWIALHSGMAAGAHAIVVPERPFDIEELAAKVGERFEAGKRFAIVVAAEGAKPRAGSMDFDEGKKDVYGHERFAGIARQLSLELEERLGKEARPVILGHVQRGGTPTAYDRVLATRFGWHAVEAVHRGEFGKMTALRGTDIVMVSLAEAVETLKTVPEERYAEAECVL

SEQ ID NO: 7039 - protein, 115 aa, Malus x domestica
MASSAVTNLALVVALCMAVSVAHAITCGQVTSSLAPCIGYVRSGGAVPPACCNGIRTINGLARTTADRQTACNCLKNLAGSISGVNPNNAAGLPGKCGVNVPYKISTSTNCATVK

SEQ ID NO: 7040 - protein, 992 aa, Kluyveromyces lactis NRRL Y-1140
MNNSVYGVAFRSLSTGDEKLYKEATRFYHSLGFQTVKLYDNFKNHDDSNLIVGTSKNSVKECWLESFKLSELDSQGFRVPQQEASNQLQTDGVMIKLRLVDTEPLNQTADTVVYYTVSLDEVSKIGERVDDHNVKLVDPLGNVVLVTDSHDGKELNASEFIAPKDSSVEQKITVELVDKDSKKKKIAVMTSGGDSQGMNAAVRAVVRSSIYYGCDVYAVYEGYEGLVKGGDYLRKMEWKDVRGWLSEGGTLIGTARSKEFRERWGRKQACSNLIDQGIDALVVIGGDGSLTGADLFRSEWPSLVEELVKDGKFTEDEVALYQNLTIVGMVGSIDNDMSGTDSTIGAYSALERICEMVDYIDATAKSHSRAFVVEVMGRHCGWLGLMSGIATAADYIFIPERAAPHGKWQDELKRVCQRHREKGRRNNTVIVAEGALDDQLNPITAEQVKDVLVELGLDTKITTLGHVQRGGTAVAHDRWLATLQGVDAVKAILNMTPETPSPLIGILENKVIRMPLVESVKLTKQVAAAIEAKDFDKAISLRDTEFIELYSNFMSTTVNDDGSQLLPEADRLNIAIVHVGAPSAALNAATRAATLYCLAHGHRPYAITNGFSGLIQTGQVKELSWIDVEDWHNLGGSEIGTNRSVAAEDMGTIAYHFQKNKFDGVIILGGFEGFKSLKQLRDGRDQYPIFNIPMCLIPATVSNNVPGTEYSLGSDTCLNALVKYTDAIKQSASSTRRRVFVVEVQGGHSGYVASFTGLVTGAVSVYTPENAINLKTIQEDLALLKESFKHEQGETRNGKLVIRNEMASDVYTTELLADIITEQSNDRFGVRTAIPGHVQQGGVPSSKDRVIASRFAVKCVKFIEQWNKKNTAADNEDFKILRFNYVNGVKQYTVLDEDLSAAVICVNGSKISFKPIAHIWENETNIELRKGQEIHWEEYNEIGDILSGRSMLRRKIQKEQQEESSLPSVADTPLSSVTVSTSAAKEDSALYV

SEQ ID NO: 7041 - protein, 476 aa, Sulfolobus tokodaii str. 7
MSSYEDLLKVLDSRKVTRLYWIITILAAIGGFLFGYDTAVIGTAAEFAPYHYSGFLLGYEIASASLGAAIGAIIAYFYTDRYGRKSLLILDAGIYTAAAVLSALTINGIMLLVMRTIIGIAIGADSAVATAYITEYAPKDKRGSLAIMQQWMITIGILGSYLVGSAILYFLPSLAYVFDWRLILGLAAVPALIGLIFRFMMPESPRWLIYTGQFDKLKRELAKFGISVSDDVLERTRTEIQSEMSIKLDTAAKKALLLVGLWLVFQQITGINVPFYYGPILLSKLHIFSSTTNPVYSAIDGVLESTILAVINVAATYIAFRYIDKIGRRTLGISAYIGMAIFDLIGGISTLFGFDIGLLISFAGFIIFFAYGVGGTGWLIQAEYFDTRIRGRMAAIGALIDWLANFALIEVFPVMLSTVGLGGSMFIFFILDLVALVFVYFFIPETKGMSLEDVVKMFSSVPISKIKNGREIVLSK

SEQ ID NO: 7042 - protein, 516 aa, Magnetospirillum magnetotacticum MS-1
MDKNRVIIFDTTLRDGEQSPGASMNLEEKVRIALALEEMGVDVIEAGFPIASNGDFEAVEAVARAVKTSVICGLARATKGDIERCAEAVKPAGRGRIHTFLSTSPLHMKYKLQMEPEKVLEKISESVAYARNLTDDVEWSAEDGSRTEHDFLCTCVEAAIKAGARTINIPDTVGYAIPDEYAALIAMLFNRVPNIDKAIISVHCHNDLGLAVANSLAAVGKGARQIECTINGLGERAGNAAMEEIVMALRTRPDLLPYKSGVKTENITRASRLVSTITGFVVQPNKAIVGKNAFAHESGIHQDGVLKHAQTYEIMTPESVGLNRSSLVMGKHSGRAAFKAKLKDLGYELGDNAVEDAFTRFKDLADRKKDVFDEDIVALVDDAVVRGNDRLKLVSLEVLCGTKHQPPSAELELSVDGVVKSVRATGDGPVDATFNAIKALFPHEVKLQLYQVSAVTQGTDAQAEVTVRLEEDGKSVNGQGRRNRYFGGLGAGLCQRVEQTSGQTAKNRPRCRRSVI

SEQ ID NO: 7043 - protein, 325 aa, Mycoplasma mobile 163K
MAKKIAILTSGGDSPGMNNAIRTIVKTSKIHGIEVFLVYNGYKGLVEKTIKNANEINVDQYIGSGGTFIGSARYLEFKKLEVRQKAVQNLKEMGIDSLVVIGGDGSYAGAQLLHELGVKTIGLPGTIDNDIASTEYTIGLDTALNTIVENVDRLRDTMNSMNMVALVEVMGHGAGDLAMLSGLATGAEIIVTNAHRKSIDEMIEIVKDQMIAKTKRSVIGIVSEFIYDDLKKVAKEIEDKTGIRTRAIILAHTQRGGNPKAYERINASFLGIAAVESLLKNESGVALGFKGNKIISTPIPEALKAQNSAKNENELVTKINKINQS

SEQ ID NO: 7044 - protein, 433 aa, Oryza sativa
MPRTSVVESPGCPPLRALTTDILGLIKVVEARTKPAGVAKGVETWGAPDAPRAVLADSLADRAVDPVLAVARKNGVVELLNPLNGETLAGVNAAAGRAAPADSSAEEDPLATLHLFRRHALDSSMLGTFLACTEKGKAYVKSVAKENASSDMAVGPSSSWDVSNSGTVQFSSVDAGESYAMFGGKGIEVNLWDITSCSKIWSAKSPRGNSLQIFTAPWFTAGTFLCKDDHRKIVACTNNHQVRLYDTASQRRPVISVDFRESPIKAVAEDPNGHAVYIGTGRGDLASFDMRTGKLLGCFAGKCSGSIRSIVRHPELPLIASCGLDSYLRIWDTNTRQLLSAVFLKQHLTAVVIDSHFSTEELEETKSKQPDPVGAEVRKERKEKKNRTSEMDEDETRMLDHDDSDSEMHTSKRKKSGEKSKGMKKKSKKQQVA

SEQ ID NO: 7045 - protein, 544 aa, Oryza sativa
MVLPTILPKIAAHWLFTFYRAARKLRGHAFQYCRSSSATTTKPPPPSPVSPAAKCTVVFPDAADKAVVFGFDGALMRSAALFPYFMLVACEGGSLLRALLLLCAFPLVWALGERSDAGVRVMAFVTFFGLRPRDMDLVARAVLPKFYMEGLNAQVYSRLWLPARRKVVVTGAPRVMVGWFLKEYMAADVVVGGELHVVRVGRGRYFTGMLCGPGGSAAPALKHKALQAEALGTDNAMADVAVVGNASQLDHPCFPYCKEVYVVNRESTKTARLPRDRYPKPLIFHDGRLAFLPTPSAALAFFLFLPLGVILSVIRISIGILLPYKISFGAGALFGVRYRTSGLRAPEPGVKRRGVLYVCTHRTLVDPIMLTAALQKPVPAVTYSLSRLSEVIAPIKTVRLTRDRERDAETMSRLLEHGDLAVCPEGTTCREPYLLRFSPLFAELADDMEPVALDAQVTTLYGTTASGHKWLDPVVFFANPQPAYRVDFLGAVPREWTRAGGRAGAEVANWVQRRLGEALGYECTGLTRRDKYMMLAGNDGVVAK

SEQ ID NO: 7046 - protein, 932 aa, Vibrio sp. Ex25
MTRYGLRARVITLTLAPTLIIGLLLSGFFSFNRYQDLEKQVITTGNSIIEPLAIASETHLLSESREAVRRLISYAHRKNSKLVRSIAVFDEHHELFVTSNFHPNFEALMFPKDKPIPQLGNSEIYENSLILRVPILSEGHYLAELSNESQGTKAIGYIAVELDLSSLRLQQYQEVFSAFLVLILGLGLASVFASRLMHDVTQPITHMKNVVDRIRRGHLDVRIEGKMHGELDQLKNGINAMAVSLSEYHVEMQHSIDQATSDLRETLEQLEIQNVELDIAKKRAQEAARVKSEFLANMSHELRTPLNGVIGFTRQMLKTQLSNSQTDYLQTIEKSANNLLNIINDILDFSKLEAGKLALENIPFDFRESLEEVINLQATSAHEKGLEITLKVDPKIPPGLVGDPLRIQQILTNLVGNSIKFTERGNIDVSVEMRSQSGDSVELQFMVRDTGIGISERQQAQLFQAFSQADASISRRYGGTGLGLVITQKLVSQMGGEISLTSRLHQGSTFWFTVRLHSTEMPMSELIEVELLTGKQLLLIEPNMQAASVTQQILSQEGILVTYRSSLPKNEEQYDYVLLNLAANQTHDADVITPWIEQAKRMAPSVILGTPSTELALADQIMTEHHVQCLTKPLSRRKLLQSLISEHVESPPTLSAPITPSEGERLPLTVLAVDDNPANLKLISALLRERVETVTACSNGQQAVNLATEKKYDLIFMDIQMPQMDGVTACQHIKELELNKDTPVIAVTAHAMAGERDRLLSAGMDDYLTKPIEEHVLQQVLVHWNPNACTESIGKVAPSYVDEPEGSAPQSVSSPQQDVIIDWQAALKQSANKEDLAKDMLRMLIEFIPEVEAVVDQALEQEDISRDDLIHVIHKLHGSSSYCGVPRLKSLCATLEQALRSGISLEEVEPEMFELQDEMIKVTTTAKLYLEQ

SEQ ID NO: 7047 - protein, 116 aa, uncultured epsilon proteobacterium
WTMVAGGGASVVYADTIADMAGGVEDSANYGEYSGGPTTDETRFYTETVLDLMTREKDPKGRDKILIIGGAIANFTDVAKTFTGIIQAFEKYADKMKDVGTRIYVRRGGPNYKGEF

SEQ ID NO: 7048 - protein, 490 aa, Pseudomonas putida KT2440
MARFGTQKLYIDGAYVDAGSDATFEAINPATGEVLAHVQRATEADVEKAVESAERGQKVWAAMTAMQRSRILRRAVDILRERNDELAMLETLDTGKSYSETRYVDIVTGADVLEYYAGLVPAIEGEQIPLRESSFVYTRREPLGVTVGIGAWNYPIQIALWKSAPALAAGNAMIFKPSEVTSLTTLKLAEIYTEAGLPNGVFNVLTGSGREVGTWLTEHPRIEKVSFTGGTTTGKKVMASASSSSLKEVTMELGGKSPLIICADADLDKAADIAMMANFYSSGQVCTNGTRVFIPAEMKAAFEAKIAERVARIRVGNPEDENTNFGPLVSFQHMESVLGYIAKGKEEGARVLCGGERLTAGDFAKGAFVAPTVFTDCTDDMTIVKEEIFGPVMSILTYETEEEVIRRANDTDYGLAAGVCTNDITRAHRIIHKLEAGICWINAWGESPAEMPVGGYKQSGVGRENGVSSLAQYTRIKSVQVELGGYNSVF

SEQ ID NO: 7049 - protein, 364 aa, Callistephus chinensis
MKEDSPPTVCVTGAAGFIGSWLVMRLLERGYIVRATVRNPGDMKKVKHLLELPKAETNLTLWKADLTQEGSFDEAIEGCHGVFHVATPMDFESKDPENEIIKPTIEGILSIIRSCAKAKTVKKLVYTSSAGTVNVQETQLPVYDESHWSDLDFIYSKKMTAWMYFVSKTLAEKAAMEAAKENNIDFVSIIPPLVVGPFINPTFPPSLITALSLINGAESHYSIIKQGQYVHLDDLCECHIFLYENPEAKGRYICSKQDATIHQLARMIKQKWPEYHVPTQFAGIDEELPTVSFSSKKLIDMGFKFKYDLEDMFKGAIDSCKEKGFLPYSTNEVKKGLFESSINGNVHGQKGNQKIGDEGVKLVN

SEQ ID NO: 7050 - protein, 509 aa, Sulfitobacter sp. EE-36
MTSEVRVPTLGESVTEATVATWFKKPGDSVAVDEMLCELETDKVTVEVPSPVAGTLADIVAAEGETVGVDALLANISEGDAAPAKSEAPKAVDAGAEDVKPRDAADDVDVMVPTLGESVSEATVSTWFKTVGDHVEADEMLCELETDKVSVEVPAPTSGTLTQIIAEEGSTVEANGKLAVISQGEGGSASKPADDTAEPKAGGQVPAPGNAPSGDVEDAPSAKKAMAEAGISRDQVTGTGRDGRVMKEDVAKAVAAGKNAAKPAAAAPRAPSAPQDAAREERVKMTRLRQTIAKRLKDSQNTAAMLTTYNEVDMTEIMALRNEYKDLFLKKHGVKLGFMSFFTKACIHALNEVPEVNAEIDGTDVVYKNYVNMGIAAGTPTGLVVPVVKDAQAMSFADIEKEIGELGAKARDGKLSMAEMQGGTFTISNGGVYGSLMSSPILNPPQSGILGMHKIQDRPMAINGQVVIRPMMYLALSYDHRIVDGKGAVTFLVRVKEALEDPRRLLMDL

SEQ ID NO: 7051 - protein, 819 aa, Mycobacterium sp. JLS
MTRRRLVVIGNGMAGVRAIEEILARGGADMFEITVFGDEPYGNYNRILLSNVLSGSDDTSEIYLNPLDWYTGNGIDLRAGVRVVRIDRYARLVHADDGTALHYDELIVATGSRSFFPPITGLWADDKTLADGVFGFRTLDDCLGMIHEAEHRTKAVVIGGGLLGLEAARGLQNRGLTVDVVHAGATLMNAQLDDTAGAILRRSVERLGITVHMDKRTTEALLGEDGKLRGIGFSDGSTVDCDMLVVAAGIRPNVGLAQRAGLTVERAIVVDDHMRSIDDDHIHVVGECAQHRGQVYGLVAPLWEQAGVLAAHLTGTDPTAAYHGSRTATKLKVAGVDVAAMGLKAPELPDDEFVQYSEPRHGVYKTIVIRDGKLVGATLLGDVSKVSFLTQAFDTGLPLPEERVSLMFDIGTPDVEVGVAELADDAQVCNCNGVSKGTLVGCVRDGESSVAGVMAKTKAGKGCGSCKELVGQIVEWAAGGAVTEDPSASWYVPGVPYDKPTLMRHIRELRLHSVSSVFAALAPDGREDAGSKMALASLLEMMWADEFVDERDARFINDRVHANIQRDGTFSVVPQMKGGVANPWQLRRIADVADKYSIPMIKLTGGQRIDLLGVRKEDLPAVWADLDMPSGYAYGKSFRTVKTCVGSDFCRFGVGDSTALGIAIEDRYKGLASPAKMKLAVTGCPRNCAESLCKDLGVVAIDGGRWEIYVGGAAGAHIRKGDLLATVDSPDEVMTLTGRFLQYYRENANWLERTYAFVPRVGIEKIRDAIAEDAEGLDQRMQKSVDAYRDPWHDGRAPATEGQFRSSLPLLPLPQVPVR

SEQ ID NO: 7052 - protein, 213 aa, Brassica napus
RPTRPGTLQSPGGSILWNGINTGARMRSSGSDWWYEDVSYLSVDLFRRLIKTMETKGIRAESLVGAMVYYARKYLPGLGRWQSRTSGSNNNKSRTSVVSFSLAAASSSSSSMSPVDQIALLETILSLLPEKRGRSFCKFLLCLLRVAFILGVDGSCVKQLERRIGMQLELATLENLLILNYSDSDTLYNVDCVERMIRHFVSSSSSSELSDFS

SEQ ID NO: 7053 - protein, 269 aa, Sulfolobus tokodaii str. 7
MFIFKLNLYEDLMETIVIKKETPIGWIYLNRPDRLNAINQQMIKELRQGIDEMVYDSDIKVIIITGNGKAFSAGADISRFKELNGYTAWQFAKSGRELMDYIENISKPTIAMVNGYALGGGLELAMACDIRIAAEEAQLGLPEINLGIYPGFGGTQRLVRLIGKGKALELMLTGDRISAKEAEKIGLVNKVVPLSNLEQETRNFALKLAEKPPISIALIKLLVNQGIDLPILAGLNMESLGWGVVFSTEDEKEGVSAFLEKRKAQFKGK

SEQ ID NO: 7054 - protein, 295 aa, Sulfitobacter sp. EE-36
MAVLVNENTKVICQGLTGSQGTFHTEQAIAYGTKMVGGVTPGKGGQTHLDLPVFNSVHEARHVTEANATVIYVPPPFAADSILEAIDAEMELIICITEGIPVLDMMRVKRALEGSKSRLIGPNCPGVITPDACKIGIMPGHIHKRGTCGVVSRSGTLTYEAVKQTSDLGLGQSSAVGIGGDPIKGSEHIDILEMFLADPETESIIMIGEIGGSAEEEAAQFLADEKKKGRWKPTAGFIAGRTAPPGRRMGHAGAIVAGGKGDAESKIAAMKEAGIVVADSPATLGEAVQEAINKG

SEQ ID NO: 7055 - protein, 116 aa, uncultured epsilon proteobacterium
WTMVAGGGASVVYADTIADMAGGVEDLANYGEYSGGPTTDETRFYTETVLDLMTREKDPKGRDKILIIGGAIANFTDVAKTFTGIIQAFEKFAVKMKDVGTRIYVRRGGPNYKGEF

SEQ ID NO: 7056 - protein, 267 aa, Aster yellows phytoplasma
ITIKTSHVEYETEKRHYAHVDCPGHADYVKNMITGAAQMDAAILVVSGADSVMPQTREHILLARQVGVPKIVVFLNKCDLSPDEQILELVEMEVRELLSQYDFPGDDIPVIRGSALKALEGDAHYVAQVNELIETLDTYIEDPVREVDKPFLMPVEDVFTITGRGTVVTGRVERGQVKAGDEVEIVGLKETKKTIVTAVEMFKKDLDFAQAGDNVGALLRGINREDVQRGQVLAKPGSVKPHSKFVAQVYVLTKEEGGRHTAFFSQY

SEQ ID NO: 7057 - protein, 215 aa, Brassica napus
MTSFSAFSELLGSEHESPVTLGEEYCPKLAASCPKKPAGRKKFRETRHPVYRGVRLRNSGKWVCEVREPNKKSRIWLGTFLTAEIAARAHDVAAIALRGKSACLNFADSAWRLRIPETTCPKDIQKAAAEAAVAFQAEINDTTTDHGLDVEETIVEAIFTEENNDGFYMDEEESMFGMPSLVASMAEGMLLPPPSVRFEHNYDFDGDADVSLWSY

SEQ ID NO: 7058 - protein, 543 aa, Candida tropicalis
MSSSPSIAQEFLATITPYVEYCQENYTKWYYFIPLVILSLNLISMLHTKYLERKFKAKPLAVYVQDYTFGLITPLVLIYYKSKGTVMQFACDLWDKKLIVSDPKAKTIGLKILGIPLIETKDPENVKAILATQFNDFSLGTRHDFLYSLLGDGIFTLDGAGWKHSRTMLRPQFAREQVSHVKLLEPHMQVLFKHIRKHHGQTFDIQELFFRLTVDSATEFLLGESAESLRDESVGLTPTTKDFDGRNEFADAFNYSQTNQAYRFLLQQMYWILNGSEFRKSIAIVHKFADHYVQKALELTDEDLEKKEGYVFLFELAKQTRDPKVLRDQLLNILVAGRDTTAGLLSFLFFELSRNPEIFAKLREEIENKFGLGQDARVEEISFETLKSCEYLKAVINETLRIYPSVPHNFRVATRNTTLPRGGGEGGLSPIAIKKGQVVMYTILATHRDKDIYGEDAYVFRPERWFEPETRKLGWAYVPFNGGPRICLGQQFALTEASYVTVRLLQEFGNLKQDPNTEYPPKLQNTLTLSLFEGAEVQMYLIL

SEQ ID NO: 7059 - protein, 116 aa, uncultured epsilon proteobacterium
WTMVAGGGASVVYADTIADMAGGVEDLANYGEYSGGPTTDETRFYTETVLDLMTREKDPKGRDKILIIGGAIANFTDVAKTFTGIIQAFEKYAVKMKDVGARIYVRRGGPNYKGEF

SEQ ID NO: 7060 - protein, 267 aa, Aster yellows phytoplasma
ITIKTSHVEYETEKRHYAHVDCPGHADYVKNMITGAAQMDAAILVVSGADSVMPQTREHILLARQVGVPKIVVFLNKCDLSPDEQILELVEMEVRELLSQYDFPGDDIPVIRGSALKALEGDAHYVAQVNELIETLDTYIEDPVREVDKPFLMPVEDVFTITGRGTVVTGRVERGQVKAGDEVEIVGLKETKKTIVTAVEMFQKDLDVAQAGDNVGALLRGINREDVQRGQVLAKPGSVKPHSKFVAQVYVLTKEEGGRHTAFFSQY

SEQ ID NO: 7061 - protein, 267 aa, Paulownia witches'-broom phytoplasma
ITIKTSHVEYETEKRHYAHVDCPGHADYVKNMITGAAQMDAAILVVSGADSVMPQTREHILLARQVGVPKIVVFLNKCDLSPDEQILELVEMEVRELLSQYDFPGDDIPVIRGSALKALEGDAHYVAQVNELIETLDTYIEDPVREVNKPFLMPVEDVFTITGRGTVVTGRVERGQVKAGDEVEIVGLKETRKTIVTAVEMFKKDLDFAQAGDNVGALLRGINREDVQRGQVLAKPGSVKPHSKFVAQVYVLTKEEGGRHTAFFSQY

SEQ ID NO: 7062 - protein, 130 aa, Zea mays
MDKLSGSARLMIVSDLDHTMVNVVQLISWSALSYLFGALWESVYCEDSLLVFSTGRSPTLYKELRKEKPMLTPDITIMSVGTEITYGEAMVPDDGWEEYLNNKWDRNIVVAETVSFSELKLQPETEQRPH

SEQ ID NO: 7063 - protein, 561 aa, Yersinia pseudotuberculosis IP 32953
MATPLLRTCIGVVTVANHPRAGQPAQQSDLINVAQLTSQYYVLQPDPEDPAHAVKFGTSGHRGSSVRHSFNEAHILAIAQAIAEVRHQHGISGPCYVGKDTHALSEPAFISVLEVLTANGVDVVVQQDNGFTPTPAISHVILCHNAQGKALADGIVITPSHNPPEDGGIKYNPPNGGPADTNLTSVIEKRANQLLSQNLKGVKRQTLDKAWQSNHLREQDLLQSYVEGLVDVVDIPAIQQAGLKLGVDPLGGSGIAYWQRIAEYYKLDLTLVNNAIDQTFRFMHLDHDGVIRMDCSSESAMAGLLALRDKFDLAFANDPDYDRHGIVTPAGLMNPNHYLAVSINYLFQHRPQWGAGGAVGKTLVSSAMIDRVVADLGRKLVEVPVGFKWFVDGLHDGSFGFGGEESAGASFLRFNGTPWSTDKDGIIMCLLAAEITAVTGKDPQRHYDDLAQRFGAPSYNRIQAPATQAQKNALSRLSPEMVKANTLAGDPITARLTNAPGNGASIGGLKVMTENGWFAARPSGTEEAYKIYCESFLGAEHREKIEQEAVKIVSEVLAEAK

SEQ ID NO: 7064 - protein, 267 aa, Tsuwabuki witches'-broom phytoplasma
ITISTSHVEYETEKRHYAHVDCPGHADYIKNMITGAAQMDAGILVISAVDGIMPQTEEHILLAKQVGVPKLLVFINKCDVVADEELLELVEIEIRELLNKHGFLGDEVPIVRGSALKAVEGDPKYLEKIQELLDFLDTYVEDPVREINKPFLMPIEDVFTITGRGTVTTGRVERGMVKVGEEVEIVGIRETKKAVVTGLEMFRKSLDTAQAGDHVGVLLRGVSREDVERGQVLVKPGSVKPHSKFLAQIYVLTAKENGRTTPFGTNY

SEQ ID NO: 7065 - protein, 261 aa, Clostridium tetani E88
MKNFIDERVEKGLKVPCVSSILIGNDKGSLFYIKNQRRICKEIGIEFKNIVLEENIEEDKIIEVIEDLNKDENVHGIILQMPLPKTLDEEKIVNKICPSKDIDGLTDINAGRFYKGEKCFIPCTAQGIIEIIKSTKESISGKKAVVLGRSVIVGKPVAQLLVNEDATVTICHSKTKDIKSLCKEADIIVSAMGIPKFVKEDFIKDGAIVIDVGFSVLDGKMVGDIDYDNVFKKAGFITPVPGGVGSVTPTMLIKNLCEVFK

SEQ ID NO: 7066 - protein, 259 aa, Oryza sativa (japonica cultivar-group)
MISPDAARNVVGIIGNVISFGLFLAPVPTFWRICKRKDVEEFKADPYLATLLNCMLWVFYGIPVVHPNSILVVTINGIGLLVEGTYLLIFFLYSPNKKRLRMCAVLGVELVFMLAVILGVLLGAHTHEKRSMIVGILCVFFGSIMYFSPLTIMGKVIKTKSVEYMPFFLSLVCFLNGVCWTAYALIRFDIYVTIPNGLGALFGAIQLILYACYYRTTPKKTKAAKDVEMPSVVVSGTGAAAAAGGGNTGGGSVSVTVER

SEQ ID NO: 7067 - protein, 376 aa, Zea mays
MASSSLPAPAAGRAELLKAFDDARTGVRGLVESGVSSVPELFRHADPYASIPLAPPGVSIPVVDLSLPPHLAAAAAAAAARTWGFFHLVNHLHALPAAAAAADDDYPERAFAAVRAFNELPAHERAPHYSRAVDGGVNYSSNVDLYNSPAASWRDTIQILLGPNRHPDLADRIPAACRAEVLEWEVRATAVARALLRLLSQGLGLRPEALEDASCADGKLMVCHYYPHCPEPERTMGIVPHTDPGVLTVLAQDGVGGLQVKHQDEDGKISWVDVKPVPGALVINVGDLLQIMSNDEYTSVEHRVVMNTREEPRVSIGIFFSPGKRGDSVFYGPLPELVSSENPPKYRNFTMSEFYGTFFSRDLASKALLDNFKLSP

SEQ ID NO: 7068 - protein, 507 aa, delta proteobacterium MLMS-1
MAGLATTFGSGAMTNSVNEIEAADVILLSGSNTTEAHPQVARRIISAQDRGARLIVIDPRRTEMAARADVHLGLKPGSDIPLLNAIQRIILDENLADELFIEMRTENFATLRDQLFRLELSATIASCGLEPAAVRQAALLYGRARKAVICYCLGVTQHVCGTANVEALANLAMLTGNVEKQECGVDPLRGQNNVQGACDMGGLPAMLPGYQPVADEECRRRFEQAWGVEIPTRPGKTLLEMTHGRLPPDHRRPAAGRQQPATPLRGLFIMGENPLLSNPDLTRVRKNLAGLELLAVSDIFLTETAARAHVVLPAACFAEKDGTFTNTERRVQLIRQAVAPPGQARPDGEIIAALARRLGYEMAGSPAHEIMEEIALLTPIYGGIYHDRLASGTGLQWPCWDRRHPGTPYLHKYYFTRGKGRFVVAAQEEPAEAPDADYPLLLNSGRLYHHYHTGAMTRKSPLLEREARVARLQVNPADAESRGIRDGERVRLRSRRGQVELAAELTT

SEQ ID NO: 7069 - protein, 257 aa, Burkholderia xenovorans LB400
MSIDLRTEGHVCVITINRPERMNALDAAHYDDLSAAWCQVRDDTRIRAAVITGAGEKAFCAGADLKSFVSSAPELEEIMLTQKSQLLNRGLEVWKPVVAAVNGYCLGGGMTLLLASDIRIASRHVKFGLSEVKRGIFPGNGGTQRIAQQLPHAIAMEVLLVGDTFSAEMAERWGLVNQVTAPEDLMETALVYAEKLAANAPLAVQAAKELAIRSRDVDLATGLRMEQVMLRLLQTSSDVKEGVKAFAEKRAPVFEGR

SEQ ID NO: 7070 - protein, 365 aa, Oceanicola granulosus HTCC2516
MANPSLLILPGDGIGPEVMAEVRKVIDWFGSQGTPFDVSEDLVGGAAYDAHGTPLTDATMAKAQEVDAVLLGAVGGPKYDDLDFSVKPERGLLRLRKEMDLFANLRPAQCFDALADFSSLKKDVVAGLDIMIVRELTSGVYFGEPRGIVTENNERVGINTQRYTESEIERVARSAFELARKRGNKLCSMEKANVMESGILWREVVQRVGDEEYPDVELSHMYADAGAMQLTRWPKQFDVIVTDNLFGDLLSDLAAMLTGSLGMLPSASLGLPMANGRPKAMYEPVHGSAPDIAGQGKANPIACILSFAMALRYSFDMGEAADRVEAAVEKVLADGLRTADLLGEEGRAPVSTSDMGDAIVAALAD

SEQ ID NO: 7071 - protein, 551 aa, Coxiella burnetii RSA 493
MLTHRRSIKRISWSVVSLPPRYGQKGYMLTGQVISKSVNASQIFLENILYNIPQYILWKDRNFVYLGCNHNFAKLVGFETPESIIGKTDFDLWRSQGANSIRPTDVEVLEGKQLVDVEQSLSLPNGKEGVFLISKVPLRDERNEIIGILVVGTDITERKQNEQKLIEAKLQAELSDRAKSEFIANISHDLRTPINGILGIAQIFNMHEHTKKQEPLINDLSASANLLLGLVEDILDFARLEVGKLELKYSTFNLRQLVTFLVKTFSFQTQQKQIKINVYYDASLPDSIVSEPNYIRRIFLNLIGNAVKFTEKGQIDVTVNLEGNKPAMLKILVKDTGIGIPKDKLNTIFDRFSRATPVYSSRYEGLGLGLSIIKRLLDNLGGEVHVSSIENEGSTFTLTIPCEIASLQSPREKEETQALDEGQRLKILKERKVRVLLIEDDKLSQNIEKIFLEEFGCKVDTASNAEEALVKFNESYELICTDIGLPDKDGYALVREIRQMANSHKPVPILAMTAHVFDREKNKCLEAGMNGFINKPVTVEEIRRALLDYLF

SEQ ID NO: 7072 - protein, 516 aa, Clarkia similis
RQQASPDTINKLYKLAEAAHLKQKIDRMNNGDHINSTENRSVLHVALRAPRNSVICSDGKNVVPDVWNVLDKIKDFSERVRNGSWVGATGKELKDVIAVGIGGSFLGPLFVHTALQTDPEASKNARGRELRFLANVDPIDAARNISGLNPETTLVVVVSKTFTTAETMLNARTLREWISSALGVSAVAKHMVAVSTNLPLVEKFGIDPNNAFAFWDWVGGRYSVCSAVGVLPLSLQYSFAVVEKFLQGAHSIDQHFSSAPFEKNIPVLLGLLSVWNVSFLGCPARAILPYSQALEKLAPHIQQVSMESNGKGVSIDGLPLPFESGEIDFGEPGTNGQHSFYQLIHQGRVIPCDFIGVVKSQQPVYLKGEVVNNHDELMSNFFAQPDALAYGKTPEQLKKENVSEHLIPHKTFTGNRPSLSILLPTLDAYRIGQLLGIYEHRVAVQGFVWGINSFDQWGVELGKSLATQVRKQLHASRVKGEPVEEGFNFSTKTLLTRYLQATSDVPADPSTLLPNI

SEQ ID NO: 7073 - protein, 190 aa, Arabidopsis thaliana
  misc_feature (37)..(37): Xaa can be any naturally occurring amino acid
  misc_feature (99)..(99): Xaa can be any naturally occurring amino acid
MVLVLALGDLHVPHRAADLPPKFKSMLVPGKIQHIIXTGNFCIKEIHDYLKTICPDLHIVRGEFDEDARYPENKTLTIGQFKLGLCHGHQVIPWGDLDXLAMLQRQLGVDILVTGHTHQFTAYKHEGGVVINPGSATGAYSSINQDVNPSFVLMDIDGFRAVVYVYELIDGEVKVDKIEFKKPPTTSSGP

SEQ ID NO: 7074 - protein, 527 aa, Clarkia similis
VEFDNIFLDYSRQQASPDTINKLYKLAEAAHLKQKIDRMNNGDHINSTENRSVLHVALRAPRNSVICSDGKNVVPDVWNVLDKIKDFSERVRNGSWVGATGKELKDVIAVGIGGSFLGPLFVHTALQTDPEASKNARGRELRFLANVDPIDAARNISGLNPETTLVVVVSKTFTTAETMLNARTLREWISSALGVSAVAKHMVAVSTNLPLVEKFGIDPNNAFAFWDWVGGRYSVCSAVGVLPLSLQYSFAVVEKFLQGAHSIDQHFSSAPFEKNIPVLLGLLSVWNVSFLGCPARAILPYSQALEKLAPHIQQVSMESNGKGVSIDGLPLPFESGEIDFGEPGTNGQHSFYQLIHQGRVIPCDFIGVVKSQQPVYLKGEVVNNHDELMSNFFAQPDALAYGKTPEQLKKENVSEHLIPHKTFTGNRPSLSILLPTLDAYRIGQLLGIYEHRVAVQGFVWGINSFDQWGVELGKSLATQVRKQLHASRVKGEPVEEGFNFSTKTLLTRYLQATSDVPADPSTLLPNI

SEQ ID NO: 7075 - protein, 366 aa, Sinorhizobium meliloti
MSYDQKRVVEAIRAFEAGEIVVVTDDGGRENEGDLIVAAVHCTPEKMAFIVRHTSGIVCTPMPREEAKRLNLNAMVAENDSAHTTAFTVSVDFKHGTTTGISADDRTLTVRNLANPNVGPTDFVRPGHIFPLVAREGGVLMRSGHTEAAVDLCRLASLPPIGVICELVNDDGTVMRGPQVEAFAETHGLKQVSVADLIAYRQRKETLIEQGHSFEMDTPYGKAKGHTYSLPWDTMQHLAVVFGDIRDGVDIPVRLHLENVGADVFGRGRQIDEIMKRIAAEGRGVIVYLREGSVGVGISQTARKGKHEREVHSEAQERESEWLEIGLGAQILKDLGITSIRLLSSRERHYVGLEGFGIKIAATEIL

SEQ ID NO: 7076 - protein, 636 aa, Arabidopsis thaliana
  misc_feature (607)..(607): Xaa can be any naturally occurring amino acid
MGFLVDTQKEGGGHSWGYVRSLVRRKQVDSANGQSHGHQLARALTVPHLVAIGVGATIGAGVYILVGTVAREHSGPSLALSFLIAGIAAGLSAFCYAELSSRCPSAGSAYHYSYICVGEGVAWIIGWALILEYTIGGSAVARGISPNLALIFGGEDGLPAILARHQIPGLDIVVDPCAAILVFVVTGLLCMGIKESTFAQGIVTAVNVCVLLFVIVAGSYLGFKTGWPGYELPTGFFPFGVDGMFAGSATVFFAFIGFDSVASTAEEVRNPQRDLPIGIGLALLLCCSLYMMVSIVIVGLIPYYAMDPDTPISSAFASHDMQWAVYLITLGAVMALCSALMGALLPQPRILMAMARDGLLPSIFSDINKRTQVPVKATVATGLCAATLAFFMDVSQLAGMVSVGTLLAFTMVAISVLILRYVPPDEQPLPSSLQERIDSVSFICGETTSSGHVGTSDSSHQPLIVNNDALVDVPLIKNQEALGCLVLSEETRRIVAGWSIMFTCVGAFLLSYAASSLSFPGLIRYPLCGVGGCLLLAGLIALSSIDQDDARHTFGHSGGYMCPFVPLLPIICILINMYLLVNLGSATWARVSVWLLIGVIVYVFYGXRKNRSLAHAVYVTTAHAEEIYREHEGSLA

SEQ ID NO: 7077 - protein, 501 aa, Clarkia unguiculata
MASPALISETEAWKDLKAHLEGIKMTHLRELMGDTERCQSMMVEFDNIFLDYSRQQASPDTISKLYKLADAAYLKQKIDRMYNGDHINSTENRSVLHVALRAPRNSAICSDGKNVVPDVWNVLDKIKDFSDRVRNGSWIGATGKELKDVIAVGIGGSFLGPLFVHTALQTDPEASKNARGRELRFLANVDPIDVARNISGLNPETTLVVVVSKTFTTAETMLNARTLREWISSALGPSAVAKHMVAVSTNLPLVEKFGIDPNNAFAFWDWVGGRYSVCSAVGVLPLSLQYGFAVVEKFLQGAHSIDQHFSSAPFEKNIPVLLGLLSVWNVSFLGYPARAILPYSQALEKLAPHIQQVSMESNGKGVSIDGLPLPFESGEIDFGEPGTNGQHSFYQLIHQGRVIPCDFIGVMKSQQPVYLKGEVVNNHDELMSNFFAQPDALTYGKTPEQLKKENVSEHLIPHKTFTGNRPSISILLPTLDAYRIGQLLAIYEHRVAVQGFV

SEQ ID NO: 7078 - protein, 815 aa, Medicago truncatula
MESFKVLVYCFLVFHFIPTSNTLETIVPGQSLKHNETLISTNETFEAGFFNFGDSNIQYFGIWYKDISPKTPVWIANRDVPLGNSSGVLNLTDKGTLVIVDSKEVMIWSSNTSTTAVKPSLQLLETGNLVVKDEIDPDKILWQSFDLPSDTLIPGMRIRSNLLTGNYTSLVSWRDTQDPATGLYSYHIDINGYPQVVIKKRNTLLFRVGSWNGNFLSGISSTTLYKSFNISFVITEKEVSYGYELLDKSIVSRYMLTPIGQVSRYMLSDQTKSWQLVFVGPSDQCDNYALCGANSNCDIDNSPICECFKGFIPKSQEKWSSQNWTDGCVRRVQLDCDNRDRFLKRMGMKLPDTSKSWFNKSMNLEECERFCIRNCSCTAYANLDVRDGGSGCLLWFNNILDVRKLPSGGQDLYIRVAASELDHSTGLNKKKLAGILVGCILFIAIMVILGVAIHRNQRRKLENPEQNQVFSLSNHTDNKKNEDIDIPIFELSTIAIATNNFSIDNKLGQGGFGPVYKGKLENGQDIAVKRLCNTSGQGPKEFINEVKLIANLQHRNLVKLLGCCVQNDEKLLIYEFMINRSLDYFIFDQTRKSLLNWTRRFQVICGIARGLLYLHEDSRLRIIHRDLKTSNILLDENMNPKISDFGLARTLWGDEAEGETRRIVGTYGYMSPEFATRGFFSVKSDVFSFGVIILETISGNKNREYCDYDDLDLLGYAWRLWSETTPLELIEESLRDSTVGAEAEILRCIQIGLLCVQEKADDRPDMSAAVLMLNGEKALPNPKEPAFYPRQCDSSSGTSNLHSNNDVSMTLLQGR

SEQ ID NO: 7079 - protein, 380 aa, Clarkia unguiculata
MATPSLISETETWKDLKAHLEGIKKTHLRELMGDTERCQSMMVEFDNIFLDYSRQQASPDTINKLYKLADEAHLKQKIDRMYNGDHINSTENRSVLHVALRAPRNSAICSDGKNVVPDVWNVLDKIKDFSERVRSGSWVGATGKELKDVIAVGIGGSFLGPLFVHTALQTDPEASKNARGRELRFLANVDPIDAARNISGLNPETTLVVVVSKTFTTAETMLNARTLREWISSALGVSAVAKHMVAVSTNLPLVEKFGIDPNNAFAFWDWVGGRYSVCSAVGVLPLSLQYGFAVVEKFLQGAHSIDQHFSSAPFEKNIPVLLGLLSVWNVSFLGYPARAILPYSQALEKLAPHIQQVSMESNGKGVSIDGLPLPFESGEI

SEQ ID NO: 7080 - protein, 817 aa, Medicago truncatula
MLLMEIFKVLVLCFLVFNFIPCFNTLETLVPGQSIKDNETLISKDGTFEAGFFNLGDSNNQYFGVWYKDISPITVVWIANRDSPLGNSLGVFNVTDKGNLVIVDSKGAMIWSSNTSTTDAKPTVQVLDSGNLVVKDETNQDKFLWQSFDKPGDTLLPGMKIRSNLVNGDIKGLVSWRDTHDPSTGLYSYIIDTNGLPQVVITKGNSFYVRIGSWNGNMLTGIPSTTLYSNFNFTFFFTETEVSYGYELLESSIVSRYMLTSTGQMTRYIFSDQKKSFELFFLGPADSCDNYLICGANSNCDPNNTPACECLKGFIPKSKEKWNSQIWSDGCVRRVQLDCDNRDRFSKRMGMKLPDTSKSWFNKSMSLEECEKSCLGNCNCTAYASLDVRDGGSGCILWFNNILDAKKLRAGGQDLYIRVAASELDNNTGINKKLAGILVGCIMFTLIMIILGVAIYRNRRKKPEKRVMNPVFSFKNHTDSNESEDIDIPIFDLSTIANATNNFSIDNKLGQGGFGPVYKGKLENGQDIAVKRLCNTSSQGPKEFINEVKLIANLQHRNLVKLLGCCIHLDERLLIYEFMINRSLDYFIFDQTRRSSLHWTRRFQIIRGIARGLLYLHEDSRLRIIHRDLKTSNILLDKNMNPKISDFGLARTLWGDEAEVETIRVVGTHGYISPEYAARGFFSVKSDVFSFGVIILETITGKKNREYSDHHDLDLLGYAWRMWCDSTPLMLIDESLSDSIAVAEPEILRCIQIGLLCVQERPDDRPDMSAAVLMLNGEKALPKPKEPAFFPHQFGSSSGTTKLYSNNEVSITMLEAR

SEQ ID NO: 7081 - protein, 176 aa, Schizosaccharomyces pombe
EFPLTVTHSNNSLRIGLIHGHQSLPLGSLDALSAIARQMDVDFLVSGATHAVQAVEYDGRFFLNPGTATGAWTGAWNSSKPGFAVSSNEGVKAAGPHGDPIPSFALLDIQGTVVVTYVYQFIDGDVKVEKVEWRKPDGYGVDERVGAKTPITPGVGSVMPQSIPSPTPMSPQNAGW

SEQ ID NO: 7082 - protein, 144 aa, Pseudomonas putida KT2440
MTDPLVIPCPHCNGLNRLPAERLGDAPKCGRCKKDVLLSTPFELTEASYASQIKGDLPLLVDIWADWCGPCKSFAPTFEEAARKLAGRCRLAKLDSEANRNLAGQLGIRSIPSLLLFKNGREISRQAGAFPLQSLLEWLRSQGV

SEQ ID NO: 7083 - protein, 753 aa, Aspergillus nidulans FGSC A4
MSQERDETRSVAGSVPDADAPTKQSHRSFKRKFAKLKIQFELKMKESESLIREQLRIEDLSKRIQEQNDQLLEVLLEFNDALHIPPKLRYDLHVPGDEVILPPPDGELSAAYNDHALATSVLRNAKDDLAAGNITLESYQQLEGGLKRGRAFAPLLRYTDLLKVPHSAPTTESQDPVNPTDDSSLNQNLGFLTPEHETEYCLATDARLGDMAAAVQLSRVPEKPSLLEREREYALRSPVSVHHWLRKNHPNIFLQDNENASEKSASRPSNLRASKRSAPLSRKDEDTHDEDSVMADSGPATGGSKAKRKRDEEATPRSKAVTGRSNRKKKEEICIKNLHALHSAPFSHRYMFQSVAPDLIRQEMAITILAPVADDVDATYAESDFDDMSVDSDGGVELTPAKSSRPTKRPRLIEGVDIGTGIITPGEVVTNDPQWMRLTSSLSSRGHGTYTNPLSTSIIATVAGTVQKTNKLLSVQPLRARYTPEIGDLVVGRIVEVQSRRWKVDVAAPLLAQLPLSAINLPGGILRRRTSADELQIRTFFSEGDLLVAEVQTVHSDGAASLHTRSLKYGKLRNGVFLAVAGTGGSGASSSSTKGGLGSGSATGVVRSRRQMFTITTSNGGGDVDLVLGVNGYIWISKHVEGTAAASSATEHVSITRMEEMVSNSVYSSQNDEISPATRREIARLTQCIRVLVQGGLRVDEETVTAAYDASLQVDLEQGDDYDEDGRQREGREYLEGTQAKRIIQLVTAQQSR

SEQ ID NO: 7084 - protein, 851 aa, Brassica napus
  misc_feature (304)..(304): Xaa can be any naturally occurring amino acid
  misc_feature (837)..(837): Xaa can be any naturally occurring amino acid
MKGVRNIYDHHSYTFLLVFVVMILFHPALSIYINTLSSTESLTISNNRTLVSPGDVFELGFFKTTSSSRWYLGIWYKQLPEKTYVWVANRDNPLPNSIGTLKISNMNLVLLDHSNKSVWSTNLTRRNERTPVMAELLANGNFVMRDSNNNDASEFLWQSFDYPTDTLLPEMKLGYNLKKGLNRFLISWRSSDDPSSGDYSYKLEPRRLPEFYLLQGDVREHRSGPWNGIRFSGILEDQKLSYMEYNFTETSEEVAYTFRMTNNSFYSRLTLSSTGYFERLTWAPSSVIWNVFWSSPANPQCDMXQMCGPYSYCDVNTSPSCNCIQGFDPRNLQQWALRISLRGCKRRTLLSCNGDGFTRMKNMELPETTMAIVDRSIGEKECKKRCLTDCNCTAFANADIRNGGTGCVIWTGNLADMRNYVADGQDLYVRLAAADLVKKSNANGKIISLIVGVSVLLLLIMFCLWKRKQNREKSSAASIANRQRNQNLPMNGIVRSSKRQLSGENKIEELELPLIELEAIVKATENFSNSNKIGQGGFGIVYKGILLDGQEIAVKRLSKTSVQGVDEFMNEVTLIARLQHVNLVQILGCCIDADEKMLIYEYLENLSLDSYLFGKTRRSKLNWKERFDITNGVARGLLYLHQDSRFRIIHRDLKVSNILLDRNMVPKISDFGMARIFERDETEANTMKVVGTYGYMSPEYAMGGIFSEKSDVFSFGVMVLEIITGKRNRGFDEDNLLSCAWRNWKEGRALEIVDPVIVNSFSPLSSPFQLQEVLKCIQIGLLCVQELAENRPTMSSVVWMLGNEATEIPQPKSPGCVRRSPYELDPSSSRQRDDDEXWTVNQYTCSVIDAR

SEQ ID NO: 7085 - protein, 447 aa, Magnaporthe grisea 70-15
MSLRRVVVTGIGAVTPLGVGAQRSWQRLIAGASGITSVTHLEPLDRWQELPSTVAGLVPTSAAADANANAAKSHGGAGDVDGGKASGLWRPSDWLDATDQRRMSRFAQYALASADMALEDARWMPETPHDLEATGVCLGSGIGNLEEIYNTALAHHKHILINLAAGHIAMHHGFRGPNHAATTACTTGAHSIGDAARFIAFGDADVMVAGGSESCIHPLTFAGFARSRSLSTAFNDNPTASCRPFDESRDGFVVAEGAAVVVLEELEHALRRGARILAELRGYGCSGDAHHMTAPREDGSGALAAMKKALKHAGVRPAEVDYINAHATGTRSGDAAEALAIRSLMLGEEGLEREDQVTVSSTKGSTGHLLGAAGAVEAVFTALAVAENRVPPTKNLFNPGVGPNFNFVANQTQERTVNVAVSNSFGFGGTNASLVFSKLERGMQGSI

SEQ ID NO: 7086 - protein, 454 aa, Listeria innocua
MKYVIVGTSHAGFEAVQTLLKKDSDAEIVVFEAGSTASFLSCGIQSYLEDISKSLDELHYANEASYKEQGVDIRMNTSVIAINPETKEITTRTTDGVEATESYDKLLLSPGGVPGTIPNVDDQHENIFYLRGRNWADKVKNRMSSAKKAVVVGAGYIGIEAAIAYAQAGIDVTVVDFVDSILPTYLDSEFTSLLTKHMEEKGMKIKTGEGVKEFKVNENNEVTAVVTDKGTYEADTVIISVGVRPNTQWLKDTLTLDGRGFVEVNEHMETSVKDVYAAGDATAIPFAPTNDKAYIALATNARRQGVIMARHASGDADAKIGRVNGTSGLAVFDYKFATTGIKDANANSYQGNVKSVYKEDLIRPSFMHDEEKVLMKLHYDADNGRILGAQLMSTYDILQAINAVSVAIEAEWTVDQLAQADFFFQPEFSRPWNFLNVLAQEAQGQPYGADTMLF

SEQ ID NO: 7087 - protein, 133 aa, Brassica napus
MVVPLLTKNVVNKRSAIFIRPHSDRRITVKESWRRPKGIDSSVRRKCKGVTLMPNVGYGSDKKTRHYLPNGFKKFVVHNSADLELLMMHNRTYCAEIAHNVPTGTRKPIVERASQLDIVVTNRLATLRSQEDD

SEQ ID NO: 7088 - protein, 167 aa, Triticum aestivum
  misc_feature (133)..(133): Xaa can be any naturally occurring amino acid
APDSLLTEECDVLIPAALGGVINKDNANDIKAKYIIEAANHPTDPEADEILSKKGVLILPDILANSGGVTVSYFEWVQNIQGFMWDEEKVNAELRTYMTRAFGDVKQMCRSHSCDLRMGAFTLGVNRVARATXLKGWEHDSSVSPCALLLYLWPGPCFVICITSRKR

SEQ ID NO: 7089 - protein, 116 aa, uncultured epsilon proteobacterium
WTMVAGGGASVVYADTIADMAGGVEDLANYGEYSGGPTTDETRFYTETVLDLMTREKDPKGRDKILIIGGAIANFTDVAKTFTGIIQAFEKYAAKMKDVGTRIYVRRGGPNYKGEF

SEQ ID NO: 7090 - protein, 439 aa, Schizosaccharomyces pombe
MNSAKATSLLFQGFRKNCLRLNRISFASGLINRFTVPARTYADEKVFVRKKPHVNIGTIGHVDHGKTTLTAAITKCLSDLGQASFMDYSQIDKAPEEKARGITISSAHVEYETANRHYAHVDCPGHADYIKNMITGAATMDGAIIVVSATDGQMPQTREHLLLARQVGVKQIVVYINKVDMVEPDMIELVEMEMRELLSEYGFDGDNTPIVSGSALCALEGREPEIGLNSITKLMEAVDSYITLPERKTDVPFLMAIEDVFSISGRGTVVTGRVERGTLKKGAEIEIVGYGSHLKTTVTGIEMFKKQLDAAVAGDNCGLLLRSIKREQLKRGMIVAQPGTVAPHQKFKASFYILTKEEGGRRTGFVDKYRPQLYSRTSDVTVELTHPDPNDSDKMVMPGDNVEMICTLIHPIVIEKGQRFTVREGGSTVGTALVTELLD

SEQ ID NO: 7091 - protein, 267 aa, Western X phytoplasma
ITISTSHVEYETEKRHYAHVDCPGHADYIKNMITGAAQMDAGILVISAVDGIMPQTEEHILLAKQVGVPKLLVFINKCDVVADEELLELVEIEIRELLNKHGFLGDEVPIVRGSALKAVEGDPKYLEKIQELLDFLDTYVEDPVREINKPFLMPIEDVFTITGRGTVTTGRVERGMVKVGEEVEIVGIRETKKAVVTGLEMFRKSLDTAQAGDNVGVLLRGVSREDVERGQVLVKPGSVKPHSKFLAQIYVLTAKENGRTTPFGTNY

SEQ ID NO: 7092 - protein, 511 aa, Manihot esculenta
MSVAILTSLPPQWLSILAVFLLPILTLLLFRGKDDNQKKGLKLPPGPRQLPLIGNLHQLGGQPYVDFWKMAKKYGPVMYLQLGRCPTVVLSSTETSKELMKDRDVECCSRPLSVGPGQLSYNFLDVAFSPYSDYWREMRKLFIFELLSMRRVQTFWYAREEQMDKMIEILDGAYPNPVNLTEKVFNMMDGIIGTIAFGRTTYAQQEFRDGFVKVLAATMDMLDNFHAENFFPVVGRFIDSLTGALAKRQRTFTDVDRYFEKVIEQHLDPNRPKPETEDIVDVLIGLMKDESTSFKITKDHVKAILMNVFVGGIDTSAVTITWAFSELLKNPKLMKKAQEEVRRAVGPNKRRVEGKEVEKIKYIDCIVKETFRKHPPVPLLVPHFSMKHCKIGGYDILPGTTIYVNAWAMGKDPTIWENPEEYNPDRFMNSEVDFRGSDFELVPFGAGRRICPGLAMGTTAVKYILSNLLYGWDYEMPRGKKFEDFPLIEEGGLTVHNKQDIMVIPKKHKWD

SEQ ID NO: 7093 - protein, 310 aa, Escherichia coli
AYDVLIVGSGPAGAAAAIYSARKGIRTGLMGERFGGQILDTVDIENYISVPKTEGQKLAGALKVHVDEYDVDVIDSQSASKLIPAAVEGGLHQIETASGAVLKARSIIVATGAKWRNMNVPGEDQYRTKGVTYCPHCDGPLFKGKRVAVIGGGNSGVEAAIDLAGIVEHVTLLEFAPEMKADQVLQDKLRSLKNVDIILNAQTTEVKGDGSKVVGLEYRDRVSGDIHNIELAGIFVQIGLLPNTNWLEGAVERNRMGEIIIDAKCETNVKGVFAAGDCTTVPYKQIIIATGEGAKASLSAFDYLIRTKTA

SEQ ID NO: 7094 - protein, 129 aa, Gluconobacter oxydans 621H
MSTFLHTMVRIRDIDRSLAFYKLLGMKELRRKEVREGRYTLVFIGFDDNEHGQAEIELTYNWDQETDYEVGTGFGHFAIGVPDVAALVETVRSGGGKVTREAGPLKFGTIIIAFVEDPDGYKIELIEKK

SEQ ID NO: 7095 - protein, 831 aa, Ralstonia metallidurans CH34
MPLTRRDFIKQTAIAATASVAGVSLPTDAANFVTDSEVTKLKWSKAPCRFCGTGCGVTVAVKDNKVVATQGDPLCEVNKGLNCVKGYFLSKIMYGQDRLTKPLLRMKNGKYDKNGEFAPVSWDRAFDEMEAQFKRVLKEKGPTAVGMFGSGQWTVWEGYAASKLYKAGFRSNNIDPNARHCMASAVTGFMRTFGMDEPMGCYDDIEAADVFVLWGSNMAEMHPILWTRITDRRLSHPKTRVAVLSTFTHRSFDLADIPVIFKPQTDLAMLNFIANYIIRNNKVNKDFVNKYTVFKEGVTDIGYGLRPDNPLQKAAKNAGNPNDSKLITFDDFAKFVSKYDADYVSKLSGVPKKQLEQLAELYADPNLKVMSLWTMGFNQHTRGTWVNNMAYNVHLLTGKIATPGNSPFSLTGQPSACGTAREVGTFSHRLPADMVVTNPKHREEAERIWKLPPGTIPDKPGYHAVLQNRMLRDGKLNAYWVQVNNNMQAAANMMEETLPGYRNPTNFIVVSDAYPTVTALSADLILPTAMWVEKEGAYGNAERRTQFWHQLVDAPGEARSDLWQLMEFSKRFKVEDVWPAELIAKKPEYKGKTLFDVLYRNGQVDKFPLKETASDYNNYESKAFGFYVQKGLFEEYATFGRGHGHDLAPFDMYHEARGLRWPVVNGKETRWRYREGSDPYVKAGTGFQFYGNPDGKAVIYALPYEPPAESPDKEYPFWLATGRVLEHWHSGSMTRRVPELYRAFPNAVCFMHPEDAKALGLRRGVEVEVVSRRGRMRTRIETRGRDAPPRGLVFVPWFDASQLINKVTLDATCPISLQTDFKKCAVKIVKV

SEQ ID NO: 7096 - protein, 188 aa, Vitis vinifera
DPKDGVFVNGKFCKDLKLASADDFFYYGLHIPGNITNPVGSMVTPVNVEQIPGLNTLGISMVRIDYAPYGQNPPHTHPRATEILVVLEGTLLVGFVTSNNENRLISKVLYKGDVFVFPIGLIHFQFNVGKAKAVAFAGLSSQNPGVITIANAVFGSDPPIDPDVLTRAFQLDEDVVKDLQSRFWWDNN

SEQ ID NO: 7097 - protein, 155 aa, Zea mays
MQASTRDSVRESNTHAASYRAAEAEGAMACSMISSTALAEEPHGLPPLDRRASSFADCCCKNNIKTDKPYRIEGGLTVDVYANGRKGKGKGVYQFVDKYGANVDGYRPIYNEDDWSPTGDVYFGGTTALLIWAVTLADILGDDALLVYNTRALSG

SEQ ID NO: 7098 - protein, 359 aa, Clostridium tetani E88
MNLSMYLKRLEKLREKMQENLIDGILLVGDSNRNYITGFTGEESFALITKKEAIFITDSRYVSQAKTEVENFEIMEYKIDIHEFVANLAEKLCVKMLGFEEDIITYGEYEKYRKKFKGELKPLNGIVEELRSIKDEFEIKCIKEAASIADKAFENILKIIKPKITEKDIALELEYFMKKMGASDLSFDTIVASGKRSSLPHGRASSKVIEEGEFVTLDFGCIYNGYCSDMTRTIAVGSISEEMKKVYDIVLTAQKMAIEKIKPGAVASHIDKYARNYIIEMGYGRYFGHGLGHGVGRDIHEEPRLSPKGNKTLKPGMVVTDEPGIYIENSFGVRIEDLILVTENSCEIISKSPKDLIII

SEQ ID NO: 7099 - protein, 219 aa, Brassica napus
LNRLHDRNETMYYKVLIANIEEYAPIVYTPTVGLVCQNYSGLFRRPRGMYFSSEDRGEMMSMVYNWPAEQVDMIVVTDGSRILGLGDLGIHGIGISVGKLDLYVAAAGINPQRVLPVMIDVGTNNEKLLKDPLYLGLQQHRLENDEYIEVIDEFMEAVFTRWPHVIVQFEDFQSKWAFKLLQRYRSRYRMFNDDVQGTAGVAIAGLLGAVRAQGRPMLD

SEQ ID NO: 7100 - protein, 182 aa, Magnaporthe grisea 70-15
MLTVWVGSGLAWHTEEGTLRQKFEEYGVVEEAVVVKDRDTGRSRGFGFVRYTNEDDAQKAITAMNNVEFDGRTIRVDKASDTGPRGGGGGFRGGYGGRGGYASPQMHPMPYGMHPQQQYGAPQMYPQPYGRGGYPQQMPGYGAPPAQTWQAAAGHPGYYPDPSGQIPPQQQMPPQNPQGGPY

SEQ ID NO: 7101 - protein, 291 aa, Triticum aestivum
MATGSEAGKPAEVVLEWPKQDKKRMLHAVYRVGDLDRTIKCYTECFGMKLLRKRDVPEEKYTNAFLGFGPEDSNFALELTYNYGVDKYDIGAGFGHFAITHEDVYKLAETIKSSSCCKITREPGPVKGGSTVIAFAPDPDGYMFELIQRGPTPEPLCQVMLRVGDLDRSIMFYEKALGMKLLRKKDVPQYKYTIAMMGYAEEDKTTVLELTYNYGVTEYNKGNAYAQVAIGTDDVYKSAEAVELVTKELGGKILRQPGPLPGLNTKITSFLDPDGWKVVLVDHADFLKELH

SEQ ID NO: 7102 - protein, 368 aa, Yarrowia lipolytica CLIB122
MVKETKLYDDLGVSSGASEADIKKAYRKAALKYHPDKPGGNEEKFKQISEAYDILSDKEKRELYDQYGLEAARKGGVPMPEPGQGGGFPGGGGFPGGAGGFPGGGFSSGGGGGGPQTFHFSSGGGGPGGFGGFSSGDAFNIFNSFGQQGGFDDEGDDYGGFANLFGGRAGRRAGGMGGGMGGMGGMPRQRARSPERTQVTVKMPVSLEDLCTGATKKMKITRKGPSGQPEEKVLTVNIKPGWKAGTKLTFAGEGDSQPNGGQQDVVFVIEQKPNPVFTRDGDDLKMSIKLSLKEALCGFTKIIETLEGKKLKIEQRLPINPGHIITYPNYGMPISKKPGERGQLIITIKVDFPSSLTDAQRKAIEDNF

SEQ ID NO: 7103 - protein, 406 aa, Coxiella burnetii RSA 493
MQKPFDNIETAIVALRQGKMIILVDDESRENEGDLIIAAEHATPEHINFMTLYGRGLICLPMCSSDFERLNIPMMTSRNGSRYETPFGVSIEAAYDVTTGISAHDRARTIQIAIDEKSTPEDIIMPGHMFPLKANDAGVLARAGHTEGSVDLCRLAGLKPAAVLCEILNKDGSMARLPDLQLLAKQFRLPLVSIQDLITYRINHETLIDEVSESLLPIKNRGRFTIKTFRSRVDHLEHVALVNQKIEEDKPCLVRVHSECLTGDVFGSARCDCGGQLEAALDEIATQGGVLLYLRQEGRGIGLANKIKAYALQEAGLDTVEANHHLGFGADLRDYGLAAQMLRVLGIREIRLLTNNPNKVESLTRYGISVAERVALETAPTCDNIRYLKAKREKLGHLLNLIGEAK

SEQ ID NO: 7104 - protein, 246 aa, Arabidopsis thaliana
MSSSNACASPSPFPAVTKLHVDSVTFVPSVKSPASSNPLFLGGAGVRGLDIQGKFVIFTVIGVYLEGNAVPSLSVKWKGKTTEELTESIPFFREIVTGAFEKFIKVTMKLPLTGQQYSEKVTENCVAIWKQLGLYTDCEAKAVEKFLEIFKEETFPPGSSILFALSPTGSLTVAFSKDDSIPETGIAVIENKLLAEAVLESIIGKNGVSPGTRLSVAERLSQLMMKNKDEKEVSDHSLEEKLAKEN

SEQ ID NO: 7105 - protein, 415 aa, Zea mays
MMAEGPNFAGMIGGHDNGGDFCDMAYYRKLGEGSNMSVDNLNSMQTSTHGGSIAMSVDNSSVGSCDSHTRMLNHPGLKGPVVGNYSVGGHSIFRHGRVSHALSDDALAQALMDPRYPTETLKDYEEWTIDLAKLHMGMPFAQGAFGKLYRGTYNGEDVAIKLLERPEADPERAGLMEQQFVQEVMMLATLRHQNIVKFIGACRKPVVWCIVTEYAKGGSVRQFLAKRQNRSVPLKLAVKQALDVARGMAYVHGLGFIHRDLKSDNLLISGDKSIKIADFGVARIEVKTEGMTPETGTYRWMAPEMIQHRPYDQKVDVYSFGIVLWELITGMLPFANMTAVQAAFAVVNKGVRPAIPQDCLPTLAEIMTRCWDPNPDVRPPFTEVVRMLEHAEMEILSTVRKARFRCCMSQPMTTD

SEQ ID NO: 7106 - protein, 501 aa, Zea mays
  misc_feature (106)..(106): Xaa can be any naturally occurring amino acid
MSDSELSQGTLVFGLHLWELVGIGVGAAFVLLLVLLSLLCLLASRRRRRRRAAPVLHLPAVVPNAQPKHPTKPPKDIQEVPSRGTAAPAAPAKAPLAQVLQAPPPXSIQIETGKEHRITFPEQPPPPHHQRSGGPSSRGASGESRGGGGEPGVPEVSHLGWGHWYTLKELEDATCMFADEKVIGEGGYGIVYHGVLEGGVQVAVKNLLNNRGQAEREFKVEVEAIGRVRHKNLVRLLGYCAEGNQRMLVYEYVNNGNLEQWLHGDVGPVSPLTWDIRMKIILGTAKGLMYLHEGLEPKVVHRDVKSSNILLDKHWNAKLSDFGLAKLLGSERSYVTTRVMGTFGYVAPEYAGTGMLNETSDVYSFGILIMEIISGRVPVDYNRPPGEINLVEWLKTMVSNRNSEGVLDPKMTEKPTSRALKKALLVALRCVDPEARKRPKIGHVIHMLEVDDFPYRDERRGGKAPAQARSVETPPASEPGDSSGNNTPKDAPNGEPFKWRN

SEQ ID NO: 7107 - protein, 112 aa, Photobacterium profundum SS9
MKKIEAVIKPFKLDDVREALAEVGITGMTVSEVKGFGRQKGHTELYRGAEYMVDFLPKVKLEIVVTDEVAEQCIETIIETAQTGKIGDGKIFMFDVERVVRIRTGEEDEDAI

SEQ ID NO: 7108 - protein, 393 aa, Candida albicans SC5314
MEVKKKKIPFSILCSIQVNIQTRNPHYNMAKTRSKSAATAAATSPKASPTAAKVTKNKVTKPSTASPSKTIKTKAVKKTTTKKATPKKEEEEEKEVHVETVTKDSSLIPEEITEKAISELKKYISRQSQQQQETENDESKKSKLFDEDEDDEDNKQNESFYLTIDSKKFWSSKPQFKPKSFKLTKPLYDNNQTTTTTSNSNNDINVDNNICLIIRDELVKSIDELNELENNQSLSQITQIIPLNSIKTEYKSFEKKRELYHQFKIFLVDEAILNIMPNTLGKVFYSKGSSNDKIPIPIKVTSTTTGPQTNGKQLSIVTLTNQLNKVLNNTYYLPQIGNNITIKSGKLKFDNNDLIANINDVVKNLDLDTIKSIHVKTSTSPAIPLFYTKSLSQ

SEQ ID NO: 7109 - protein, 224 aa, Haemophilus influenzae
MKPYLIAPSILSADLARLGDDVQNVLNAGADVIHFDVMDNHYVPNLTFGPAVCQALRDYGITAPIDVHLMVKPVDRIIPDFAKAGANYITFHPESSEHIDRSLQLIRDCGCKSGLVFNPAMPLSYLDYVLDKVDVVLLMSVNPGFGGQSFIPATLKKLQQARKIIDESGYDIRLEVDGGVKVDNIAEIAAAGADMFVAGSAIFGKPDYKQVIDQIRTQLASVSA

SEQ ID NO: 7110 - protein, 396 aa, Kluyveromyces lactis NRRL Y-1140
MSDGITDIDENQIQSTYDKVVYSFDDLKLKEELLRGIFGYGFVEPSAIQQRAILPIIEGKDVLAQAQSGTGKTGTFSIAALQNIDEKIKAPQGLILAPTRELALQIQKVVMALAIHMDVKVHACIGGTSLQEDSEALRGGAQIIVGTPGRVFDMIDRRIFKTDNIKMFILDEADEMLSTGFKEQIYNIFTMLPPTSQVVLLSATMPGDVLEVTSKFMKDPVRILVKKDELTLEGIGQYYVNVEEEQYKYDCLTDLYDSISVTQAVIFCNTRRKVEELTERLRENNFTVSAIYSDLQQQERDTIMKEFRSGSSRILISTDLLARGIDVQQVSLVINYDLPSNKENYIHRIGRGGRFGRKGIAINFVTNKDIGAMRELERFYSTQIEELPSSISELFD

SEQ ID NO: 7111 - protein, 324 aa, Mesorhizobium loti MAFF303099
MTTKHAPVLIIGSGPAGYTAAVYAARAMLKPMLVAGLQQGGQLMITTDVENYPGFADPIQGPWLMEQMMKQAEHVGTDIINDIITEVDLNVRPFRAKGDSGTTYTADALIIATGAQAKWLGIPTEQDFMGFGVSACATCDGFFYRGKDVAVVGGGNSAVEEALYLSNLAKSVTVIHRRSDFRAERILRERLLQKDNVRVIWDTVVDEITGRPGKAPLPPSVEGLKLKHAVTGAETHLKVDGVFVAIGHAPAVELFVGKLKQKPNGYLWTAPNSTRTDVPGVFAAGDVTDDVYRQAVTAAGLGCMAALEAEKYLAGIEVHREAAE

SEQ ID NO: 7112 - protein, 313 aa, Photorhabdus luminescens subsp. laumondii TTO1
MSTKTIRIATRQSPLAMWQALYVQQKLQQCHPDLEVQLVPMVTQGDVILDTPLAKIGGKGLFVKELELALLEGRADIAVHSMKDVPISFPEGLGLVTICERDDPRDAFVSVKYHSLDELPTGSIVGTSSLRRQCQLRELRPDLIVRDLRGNVGTRLNKLDNGHYDAIILAVAGLKRLKLHERIRTPLTAEQSLPAVGQGAVGIECRLDDQQTQTLLAPLNHYDTEVCVLAERAMNTRLEGGCQVPIGSYAIWQDGKIWLRALVGAPDGSVIIRGERTALPKDACQAGVELAEELLERGAREILTQVYRGNPST

SEQ ID NO: 7113 - protein, 214 aa, Oryza sativa (japonica cultivar-group)
MHERKKLESHCICFFFHLSARRGAGGERVVVDRVEVERGGGMAAAARSSTKGVRRTKSLISRTLERCKSGLSSGGGGRSAAAPVAGCFSVYVGPERERFVVRTEYANHPLFRRLLDDAEREYGYAAQGPLALPCAVDAFLDVLWQMERDGCGGGGDDDDDLSIGGGGAASPICGLPSCGSKGRAAAAGYRMLSPARMTSILSRSSPMATPSRKR

SEQ ID NO: 7114 - protein, 545 aa, Oryza sativa
MEAGTWAVVVAAVAAYMAWFWRMSRGLSGPRVWPVVGSLPGLVRHAEDMHEWIAANLRRTRGTYQTCIFAVPGLARRGGLVTVTCDPRNLEHVLKSRFDNYPKGPFWHGVFGDLLGDGIFNSDGETWVAQRKTAALEFTTRTLRTAMSRWVSRSIHSRLLPILSDAAAAGGGGGGATVDLQDLLLRLTFDNICGLAFGKDPETLARGLPENDFASAFDRATEATLNRFIFPECVWRFKKWMGLGMETTLARSVQHVDRYLSAVIKARKLELAAGNGKGDASSATPHDDLLSRFMRKGTYSDESLQHVALNFILAGRDTSSVALSWFFWLVSTHPAVERKVVHELCAVLAASRGAHDPALWLAAPFTFEELDSLVYLKAALSETLRLYPSVPEDSKHVVADDVLPDGTFVPAGSSVTYSIYSAGRMKTVWGDDCLEFRPERWLSADGTKFEPHDSFRFVAFNAGPRICLGKDLAYLQMRNIAGSVLLRHRLAVAPGHRVEQKMSLTLFMKHGLRMEVRPRDLAPIVDELRGAGEYAAAARATAACA

SEQ ID NO: 7115 - protein, 248 aa, Prototheca wickerhamii
ICQVMSALCFGLQNRIPLRSPTERRSPRTVVAHPPQRRVSLTLRGSVVSAKRAVATASAMPAALIDGKKIAETIRGELKVEVDELRAQYNTVPGLAVVLVGERKDSQTYVRSKKKACDEVGINSFGADLPETATEEEVLAVVAKFNDDPNVHGILVQLPLPEHINEKRVLDAISLEKDVDGFHPNNIGELAMRGRSPTYVSCTPKGCLELLKRAGVTLAGKRAAVVGRSNIVGLPAALLLQQEDATVT

SEQ ID NO: 7116 - protein, 343 aa, Aeropyrum pernix K1
MIRCVIMPLRLSAVRAPKIPRGEEYDTVIVGAGPAGLSAAIYTTRFLMSTLIVSMDVGGQLNLTNWIDDYPGMGGLEASKLVESFKSHAEMFGAKIVTGVQVKTVDRLDDGWFLVRGSRGLEVKARTVILAVGSRRRKLGVPGEAELAGRGVSYCSVCDAPLFKGKDAVVVVGGGDSALEGALLLSGYVGKVYLVHRRQGFRAKPFYVEEARKKPNIEFILDSIVTEIRGRDRVESVVVKNKVTGEEKELRVDGIFIEIGSEPPKELFEAIGLETDSMGNVVVDEWMRTSIPGIFAAGDCTSMWPGFRQVVTAAAMGAVAAYSAYTYLQEKGLYKPKPLTGLK

SEQ ID NO: 7117 - protein, 166 aa, Arabidopsis thaliana
MAFVTTAEVCDANQEMIRSGQLRALQPVFQIYGRRQIFSGPVVTVKVFEDNGLIRHFLEEKGNGRVLVVDGGGSLRCAILGGNPVVQAQNNGWAGIIVNGCIRDVDEINGCDIGVRALASHPIKASKKGLGEQRVSLNIAGTRICDGEWLYADTDGILVSQIELSV

SEQ ID NO: 7118 - protein, 116 aa, uncultured epsilon proteobacterium
WTMVAGGGASVVYADTIADMAGGVEDLANYGEYSGGPTTDETRFYTETVLDLMTREKDPKGRDKILIIGGAIANFTDVAKTFTGIIQAFEKYADKMKDVGTRIYVRRGGPDYKGEF

SEQ ID NO: 7119 - protein, 496 aa, Mentha spicata
MELQISSAIIILVATFVASLLIKQWRKSESRQNLPPGPPKLPLVGHLHLLWGKLPQHAMADMAKKYGPVTHVQLGEVFSVVLSSREATKEAMKLLDPACADRFESIGTRIMWYDNDDIIFSPYSDHWRQMRKICVSELLSARNVRSFGFIRQDEMSRLLRHLQSSAGETVDMTERIATLTCSIICRAAFGAIINDHEELVELVKDSLSMASGFELADLFPSSKLLNLLCWNKSKLWRMRRRVDTILEAIVDEHKLKKSGEFGGEDIIDVLFRMQKDSQIKVPITTNAIKAFIFDTFSAGTETSSTTTLWVMAELMRNPAVMAKAQAEVRAALKGKTSVDVDDVQELKYMKSVVKETMRMHPPIPLIPRSCREECEVNGYKIPNKARIMINVWSMGRNPLYWEKPETFWPERFDQVSRDFMGSDFEFIPFGAGRRICPGLNFGLANVEVPLAQLLYHFDWKLAEGMKPSDMDMSEAEGLTGIRKNNLLLVPTLYKSP

SEQ ID NO: 7120 - protein, 283 aa, Nocardioides sp. JS614
MTAQKLDGTATAAAIKGELTTRVAALHERGIRPGLGTILVGDDPGSRWYVNGKHKDCAEVGIESIRIDLPATATQDEIEDAVRVLNDDPACTGYIVQLPLPKGRDENRVLGLIDPAKDADGLHPTNLGWLVLGKAAPLPCTPNGIVELLRRHGVEIAGAEVTVVGRGVTVGRPLGLLLTRRSENATVTLCHTGTRDLAAHVRGADIVVAAAGVPGIVTGAMVKPGAAVLDVGVSRVDGKLAGDVAPEVWDVARWVSPNPGGVGPMTRAMLLSNIVAMAEQTDS

SEQ ID NO: 7121 - protein, 280 aa, Glycine max
MADLLEWSKQDKKRMLHVVYRVGDLDRTIKFYTECLGMKLLRQRDIPEEKYANAFLGFGPEESHFVVELTYNYGVTSYDIGDGFGHFAIATQDIYKLVEHIRAKGGNITREPGPVQGGTTVIAFVKDPDGYTFGLIQRPTVHDPFCQVMLRVGDLERSIKFYEKALGMKVVRKVDKPEYKYTIAMLGYGEEHETTVLELTYNYGVTEYSKGNAYAQIAIGTDDVYKSAEVVNQVIKEVGGKITRQPGPIPGLNTKTTSFLDPDGWKTVLVDNVDFLEELK

SEQ ID NO: 7122 - protein, 476 aa, Aeropyrum pernix K1
MGEMVELKKELLRDVDLAERLLGRERPVKSEIEIRGKITRSTIEEISRIKKEPEWMKRLRLRSLELFYKLPTPKWLVGIDVIDLDEMIVYSKPETERASSWEELPKEIREFYERLGLPEIEARFLSGLSAVFDSETVYARVKKYLEEKGVIVMPIEEAVQKYPDLVKRYFMRVFPPSDHKFAALHGALWSGGTFIYVPRGVKIREPIESFFLIGKSGEGQFEHSLIVADEGAYVEWIEGCSAPRLTKFSFHDGMVEAYAHRNATIKIITVQNWSKDVINLNNKRAIAEEGARVDWVEGSIGSKMTFVYPSTILKGDNSSSRSAVVTIAKGPYLKDSGSKMIHVGRNTRSQVINKTISADGGINVYRGIIRIVKGARNAVANVECESLILDDKSKAHTYPHNQVDEPTASVNHEATTGRLTEPQLFYLTSRGLTEEEAKSLIVLGFLEDVLKELPFEYANVLTKVVRLEFSEYGAFG

SEQ ID NO: 7123 - protein, 475 aa, Geobacter sulfurreducens PCA
MAKRYKVLVGGEWTGDDRPGIEVVNPYDDSVIGVVPEATNEDVDHAIRAAQAGFAEMSALPAYRRSDILDRTSELIKRDREEIAEIIAREAGKSWKFALAEADRSAETFRFASLEARNAHGEIVPMDASPVSAGRFGFYLRTPIGVIGAIAPFNFPLNLVAHKVAPAIAAGNAIVLKPATKTPLSSIKLAELMVEAGLPAGALNLVIGSGRTVGNRLVEDDRLAMVTFTGSPPVGVQIKERSGLKRVTLELGSNSPTIIEDDGDVDAAVARCVVGSFANSGQVCISVQRIFVHQRRYREFVDKFVAATQKLKVGDPMDRDCDIGPMISREELQRAVEWLGEATSLGARLETGGTVAGNCLTPAILSGVTPDMKVVCSEVFAPIVSVIPYETFDQALDMADDSIYGLQAGVYTSDINKAFKAIRRLDVGGVIINDIPTFRVDHMPYGGNKQSGLGREGIRYAMEEMTNIKFVCLNL

SEQ ID NO: 7124 - protein, 377 aa, Vigna radiata
MADAEDIQPLVCDNGTGMVKAGFAGDDAPRAVFPSIVGRPRHTGVMVGMGQKDAYVGDEAQSKRGILTLKYPIEHGIVSNWDDMEKIWHHTFYNELRVAPEEHPVLLTEAPLNPKANREKMTQIMFETFNTPAMYVAIQAVLSLYASGRTTGIVLDSGDGVSHAVPIYEGYALPHAILRLDLAGRDLTDALMKILTERGYSFTTSAEREIVRDMKEKLAYIALDYEQELETAKTSSAVEKSYELPDGQVITIGAERFRCPEVLFQPSMIGMESPGIHETTYNSIMKCDVDIRKDLYGNIVLSGGSTMFPGIADRMSKEITALAPSSMKIKVVAPPERKYSVWIGGSILASLSTFQQMWIAKAEYDESGPSIVHRKCF

SEQ ID NO: 7125 - protein, 493 aa, Pseudomonas fluorescens PfO-1
MTLARFQMCIGGEWVDALSGKTFESLNPALAEPWAELPDADEADVERAVQAAQTAFDSPAWRGLTATARGKLLRRLGDLIAENKEQLAQLESRDNGKLIRETRGQVGYLPEFFHYTAGLADKLEGGTLPLDKPDLFAYTVHEAMGVVAAIIPWNSPLYLTAIKLAPALAAGNTIVIKPSEHASATILELARLALEAGIPPGVVNVVTGYGPSTGAALTRHPLVRKIAFTGGAATARHVVRSSAENFAKLSLELGGKSPNIIFADADLDSAINGAIAGIYAASGQSCVSGSRLLVQDDIYDEFVSRLVERAQRIRIGNPQDDSSEMGPMATAQQLAVVEGLVADAIAEGARLRLGGKRPSGVGDGWFYEPTLFECDRNSMKIMQEEVFGPVASVIRFKDEAEALAIANDSQFGLAAGIWTRDLGRAHRLARDVRSGIIWVNTYRAVSAMAPIGGFKNSGYGRESGIDSVLAYTELKTVWINLSQAPMPDPFVMR

SEQ ID NO: 7126 - protein, 121 aa, Zea mays
MAGTGRSMLLSLLLFAVTLSLLEMYRGWFAASELKTIAGGFVSSLLFLLLLTFIGNYQEASGVRTGWGAVVVAQLVALIVAGTVHRVCITTCFLFSAGILYEVDKLSGMILARSESKARRY

SEQ ID NO: 7127 - protein, 361 aa, Oceanobacter sp. RED65
MSKNVLILPGDGIGPEIVTEAVKVLNVINDKLSLDLDFVDGLVGGAAYDVHGTPLPDETMEKAHAADAILLGAVGGPKWDNLENRDHRPEKGLLGLRSGLELFGNLRPAILYPQLADASSLKPEVVSGLDILIVRELTGGIYFGQPRGIRMLENGEREGYNTYVYSESEIRRIAKVAFESAQKRNKKLCSVDKANVLEVTVLWREILEEMSKDYPDVELSHMYVDNAAMQLVRAPKQFDVMVTGNMFGDILSDAAAMLTGSIGMLPSASLNQSNKGMYEPCHGSAPDIAGKGLANPLATILSAAMMLRYSLEESKAADEIEAAVSRVLDQGLRTADIMSEGMQQVSTAEMGDAVVAQLTEA

SEQ ID NO: 7128 - protein, 104 aa, Helicobacter hepaticus ATCC 51449
MIENIDSKRFYEVIKQGCVVVDFSAPWCPDCRAIDPMLEVLAQEFAGKITIFKVSFDTQTHLKDELNIRKIPTLIFYKDGKEVGERLIEPHSIESIRSAFNTLL

SEQ ID NO: 7129 - protein, 515 aa, Glycine max
MDRSTGRGGGGSVDMFLRNYKLGKTLGIGSFGKVKIAEHVRTGHKVAIKILNRHKIKNMEMEEKVRREIKILRLFMHHHIIRLYEVVETPTDIYVVMEYVKSGELFDYIVEKGRLQEDEARHFFQQIISGVEYCHRNMVVHRDLKPENLLLDSKFNIKIADFGLSNIMRDGHFLKTSCGSPNYAAPEVISGKLYAGPEVDVWSCGVILYALLCGTLPFDDENIPNLFKKIKGGIYTLPSHLSPGARDLIPRMLVVDPMKRMTIPEIRQHPWFQVHLPRYLAVPPPDTLQQAKKIDEEILQEVVNMGFDRNQLVESLSNRIQNEGTVTYYLLLDNRFRVSSGYLGAEFQETMDSGFNRMHSGEVASPVVGHHSTGYMDYQGVGMRQQFPVERKWALGLQSRAQPREIMTEVLKALQELNVCLEEDWTLYHECRWVAGTAGHHEGMINNSLHSNHYFGNDSGIIENEAVSKSNVVKFEVQLYKTREEKYLLDLQRVQGPQFLFLDLCAAFLSQLRVL

SEQ ID NO: 7130 - protein, 400 aa, Oryza sativa
DALLLLLLLPPPPPPRDEEEEAARIQETAMPARAAAAAAAVALLLAVCAQAAALPRFAEAPEYRNGEGCPAAATAAAGVCDAGLVHISMTLDAHYLRGSMAAVYSLLKHASCPESLFFHFLAEEEEVGGGGDRRRAVAASFPSLRFEIYAFRAEAVAGLISASVRAALESPLNYARNHLADLLPRCVPRAIYLDSDVLAVDDVRRLWETRLPAAAVVAAPEYCHANFSRYFTPAFWSDPGLGRRVFAGRRRPPCYFNTGVMVIDLRRWRAGNYRHRIERWMEIQKEKRIYELGSLPPFLLVFAGEVEAVDHRWNQHGLGGDNVRGSCRPLHDGPVSLMHWSGKGKPWDRLDAGNPCPLDHTWKSYDLYVAGDDGAAASSPASGPALSSTSTTWPALVFSW

SEQ ID NO: 7131 - protein, 348 aa, Malus x domestica
MGSESESVCVTGASGFIGSWLVMRLLEHGYTVRATVRDPTNQKKVKHLLDLPKAETHLTLWKADLADEGSFDEAIQGCSGVFHVATPMDFESKDPENEVIKPTINGLLDILKACQKAKTVRKLVFTSSAGTVNVEEHQKPVYDESNWSDVEFCRSVKMTGWMYFVSKTLAEQAAWKYAKENNIDFITIIPTLVIGPFLMPSMPPSLITGLSPILRNESHYGIIKQGQYVHLDDLCLSHIYLYEHPKAEGRYICSSHDATIHELVKMLREKYPEYNIPTKFKGIDDNLEPVHFSSKKLREIGFEFKYSLEDMFVGAVDACRAKGLIPIPIPAEKTEAAEESNLVDVKAG

SEQ ID NO: 7132 - protein, 642 aa, Neisseria gonorrhoeae FA 1090
MSKNQNHEEYQDDARPLTIEEQRARLRQLIIMGKERGYITYSEINDALPDDMSDADQIDNIVSMISGLGIQVTEHAPDAEDILLSDNAAVTDDDAVEEAEAALSSADSEFGRTTDPVRMYMREMGQVDLLTREDEIIIAKKIENALKNMVQAISACPGSIAEILELIEKICKDEIRVDEVVEAIIDPNEVLLNELGLGHLETTAPEKPSNDNSDENEDDEESEEDADEISAANLAELKQKVIGHFAQIEKDYKKMIGCLEKHHSRHKDYLAYRDAIANKLLEVRFATRQIDSLSSSLRGKVENIRKLEREIRDICLDRVHMERDYFIQNFLPEITNLQWIEEEIAKGRVWSNALDRFRHAILEKQTELADMEKETRISIEELKEINKNMVSSEKETAAAKQEMIQANLRLVISIAKKYTNRGLQFLDLIQEGNIGLMKAVDKFEYRRGYKFSTYATWWIRQAITRSIADQARTIRIPVHMIETINKMNRISRQHLQETGEEPDSAKLAELMQMPEDKIRKIMKIAKEPISMETPIGDDDDSHLGDFIEDANNVAPADAAMYTSLHEVTKEILESLTPREAKVLRMRFGIDMNTDHTLEEVGRQFDVTRERIRQIEAKALRKLRHPTRSDRLRSFLDSEDSKL

SEQ ID NO: 7133 - protein, 348 aa, Malus x domestica
MGSESESVCVTGASGFIGSWLVMRLLEHGYTVRATVRDPTNQKKVKHLLDLPKAETHLTLWKADLADEGSFDEAIQGCSGVFHVATPMDFESKDPENEVIKPTINGLLDILKACQKAKTVRKLVFTSSAGTVNVEEHQKPVYDESNWSDVEFCRSVKMTGWMYFVSKTLAEQAAWKYAKENNIDFITIIPTLVIGPFLMPSMPPSLITGLSPILRNESHYGIIKQGQYVHLDDLCLSHIYLYEHPKAEGRYICSSHDATIHELVKMLREKYPEYNIPTKFKGIDDNLEPVHFSSKKLREIGFEFKYSLEDMFVGAVDACRAKGLIPIPIPAEKTEAAEESNLVDVKVG

SEQ ID NO: 7134 - protein, 569 aa, Sinorhizobium meliloti
MILKSHSIKTGMPEAAVKYQPYPQIVLPDRTWPSKAITEAPIWCSVDLRDGNQALVDPMGHDRKARMFHLLLDMGFKEIEIGFPSASQTDYDFARWCVEEGNVSEDVSLQVLVQCRPELIARTFEALEGAHRPIVHFYNSTSELQRRVVFGKDVAGIKQIATDAAKMITDMAAKAGGGYRFEYSPESFTGTELEVALEICNAVIEIVRPTADNKLIINLPSTVEMATPNIYADQIEWMCRNLDNRENLIVSLHPHNDRGTGIAATDLGLMAGADRVEGTLFGNGERTGNVDVVTLALNMFTQGVDPKLDCSDIERIKEVYEYSNQMVIPERHPYVGELVYTAFSGSHQDAINKGMKAIKQANKPTWEVPYLPIDPRDVGRSYEAIIRINSQSGKGGIAYILQEDYGINLPRNLQIEFREEVQRITDEEGKELPSKRIHQRFIESYVEQPGARIKFVDHHTYPAGEHKGLRVVAAEITDGGETRQIEGKGTGPIDGFINALSIYLGIELSVADYSEHSLQHGSNAAAIAYVEVEYPGGKLFGVGINTNIVAASLEAIVSAANRVLDVVGK

SEQ ID NO: 7135 - protein, 559 aa, Oceanobacter sp. RED65
MNHQKYRRFPTINRPHRQWPNNQIEKAPLWCAVDLRDGNQALMEPMNLGQKQILWQLLVDMGFKHIEVGFPSASQPDYDFVRWLIEENQIPSDVTIQVLTQARDHLIERTYESLKGAPRAIVHVYNSTSPVQREKVFNLDKQGIIDIAIAGAKKVANEALKHPETDWQFQYSPESFSSTEVEFAINVCNAVINVWQPTPNKPVIINLPATVECATPNVFADQIETFCEHVNQRESIIVSVHTHNDRGCAVAAAELAVMAGADRVEGTLMGNGERTGNMDLVTMAMNLYSQGIDPEVDLTDAHRITQTVEQCTAIPTHARHPWVGDLVYTAFSGSHQDAIRKCLNQQADDEYWDVAYLPIDPKDIGRDYQSVIRVNSQSGKGGVAYILESQYGIRLPRWMQIELSQAVQKHCEENNKEVNGENIHSIFNQHFLAETAGVQLRSVKFEHSDHSNNANQQDAIYCTVKHDNIDTIIQGLGNGSIDAFCHAVKTEWGHTIDVQYYDMVTLGEHSDASALAMMQLNIDGQKVVACATDTDSSHAPLKAIIQGLNRFNLRNQQAA

SEQ ID NO: 7136 - protein, 160 aa, Brassica napus
  misc_feature (159)..(159): Xaa can be any naturally occurring amino acid
MASTASRFLRKLPRSLKLPQTLVRSNLTRVLSSSTHQTTEPSDSLRRIGSRLLRHDSIATRSFSSQEGPAPIDYSSILQEDEFHKLANVTMNHLLEKIEDYGDNVQIDGFDIDYGNEVLTLKLGSLGTYVLNKQTPNRQIWMSSPVSGPSRFDWDREAXA

SEQ ID NO: 7137 - protein, 311 aa, Citrus maxima
MAVGLLAAIVPKPFCLLTTKLQPSSLLTTKPAPLYAPLGTHHGFFNGKNRRKLNSFTVCFVLEEKKQSTQIETFTEEEEEESGTQISTAARVAEKLARKRSERFTYLVAAVMSSFGITSMAVMAVYYRFWWQMEGGEVPLAEMFGTFALSVGAAVGMEFWARWAHKALWHASLWHMHESHHRPREGPFELNDVFAIINAVPAIALLSVGFFHKGLVPGLCFGAGLGITVFGMAYMFVHDGLVHKRFPVGPIAGVPYFRRVAAAHQLHHSDKFHGVPYGLFLGPKELEEVEGLEELEKEISKRIKSYNRVPK

SEQ ID NO: 7138 - protein, 347 aa, Pyrus communis
MGSESESVCVTGASGFIGSWLVMRLLEHGYTVRATVRDPTNQKKVKHLLDLPKAETHLTLWKADLADEGSFDEAIQGCSGVFHVATPMDFESKDPENEVIKPTINGLLDILKACQKAKTVRKLVFTSSAGTVNVEEHQKPVYDESNWSDVEFCRSVKMTGWMYFVSKTLAEQAAWKYAKENNIDFITIIPTLVIGPFLMPSMPPSLITGLSPILRNESHYGIIKQGQYVHLDDLCLSHIYLYKHPKAEGRYICSSHDATIHELVKMLREKYPEYNIPTKFKGIDDNLEPVHFSSKKLREIGFEFKYSLEDMFVGAVDACRAKGLIPIPAEKTEAAEESNLVDVKVGG

SEQ ID NO: 7139 - protein, 414 aa, Sinorhizobium meliloti
MPHLESVALGVWIKSGSRNETVNEHGIAHLLEHMAFKGTRRRSARQIAEEIENVGGEVNAATSTETTSYYARVLKDHLPLAVDILADILTESTFEADELRREKQVILQEIGAADDTPDDVVFDRFAETAYRGQTVGRPILGTPETVMSFSADQIRQYLGRNYTTDRTFIVAAGAVDHDTIVRQVEERFASLPAEPVCAPVIETARYTGGDSRESRDLMDAQVLLGFEGKAYHARDFYCSQILANILGGGMSSRLFQEVREHRGLCYSVYAFHWGFSDTGIFGVHAATGGENLPELMPVIVDELRKSSLSIDQQEIERARAQIRAQLLMGQESPAARAGQIARQMMLYGRPIPNEELMERLSGITIERLTDLAGRLFFDTVPTLSAIGPLGQLAPLNDILSSLTTKADAIHAAAS

SEQ ID NO: 7140 - protein, 367 aa, Photobacterium profundum SS9
MGLSTAKEIIDDIRHGKMVILMDDEDRENEGDLIIAAEKITPEAVNFMAMFGRGLICLTLTHARCKQLSLPLMVQDNTEQFSTNFTVSIEAAVGVTTGISAADRATTVQAAVAPNASFSDIVMPGHIFPLMAQEGGVLSRAGHTEAGCDIARLAGLEPSSVIVEILNEDGTMARRPQLEVFAEKHGLKLGTIADLIEYRNNNETTIERIAECRLPTEFGEFDMITYRDTIDNEIHYALRSGDVKENAETLVRVHLQDTFKDVLHSGASQWTLPTAMQRIASEGGVLVVLSKQENHDTIITKVKNLAANDNGQPKVKLNPKDQSRQVGVGSQILSDLGVSKMRLLASSTQRYHSLSGFGLEVVEYICE

SEQ ID NO: 7141 - protein, 464 aa, Pseudomonas aeruginosa UCBPP-PA14
MASQRNNGILIGGKRPEYVHSAQGTGLRRILGLPALVFFGLVYMVPLTMFTTYGVVTEITGGRTASAYLITLAAMLFTAFSYSFMVKKYPIAGSAYSYTSLSFGPCVGFLAGWSLLLDYLFLPMINYLLIGLFLNIAFPMVPAWVFVLTAIGLVTVLNVIGISSVAGMSNVIVGAQFVFAVVFVAMAVKHLAGIPSLDLSLPFVGDGSQPGFAPLMAGAAVLCLSFLGFDAVSTLAEETRDPQRDIPRAIVITTVGAGLLFTVLAVFSQLVFPGSVFQDAESAANEVMLAAGGKFLASFFTAAYVAGAAGSALASQASVSRILYSMGRDGILPRRVFGSLSERFKTPVIAILVVSVISLLAVVIDLTTLASMISFGALVAFSAVNLAVIRSYLLLDGRRAPRDLLRYGLVPAIGLGLTLWLWTSLSALTLVIGLTWFAAGLAYLALHTGGFRRKAPTVTFSEQN

SEQ ID NO: 7142 - protein, 146 aa, Alexandrium tamarense
SAAGKQKGSSSKKAGKPVQGEKKKHQSLSSKAGLVFPVQRFAKALRKGGYCKRLAAGGSIYLTAVIEYITAEILELAGNSAKEARKQRIIPRHIQLAIRNDEELNKYLSRVTITGGGVLPNIHTVLLPPKVMPAKEGASGSFSQEF

SEQ ID NO: 7143 - protein, 321 aa, Stellaria longipes
MENFPIINMENIERKNTRDMIKDACENWGFFELVNHGIPHSLLDKMEKLTKDHVRKCLEERFKEMVASKGLEAVEAEVTDLDWESIFFLKHLPVSSISELPDLDEEYREVMIDFSKRKEKKAETKKDKKCENKGKEKSYLKNTFYGSKGPNFGTSVSNYPPLPKPDLIKGLSAHTDAGGIILLSEDDKVSGLELLKDGDWIDVPPMRHSIVVNLGDELEVITNGKYWSVEHRVQIDTNITRMSTASFYVPGNDRVIAPAEALPKEFKKDEVYPKFVFKSYMKAYAKLIRQSGLKFEAKEPRFEAMKAHRIGSSCNSHLEHD

SEQ ID NO: 7144 - protein, 347 aa, Pyrus communis
MGSESESVCVTGASGFIGSWLVMRLLEHGYTVRATVRDPTNQKKVKHLLDLPKAETHLTLWKADLADEGSFDEAIQGCSGVFHVATPMDFESRDPENEVIKPTINGLLDILKACQKAKTVRKLVFTSSAGTVNVEEHQKPVYDESNWSDVEFCRSVKMTGWMYFVSKTLAEQAAWKYAKENNIDFITIIPTLVIGPFLMPSMPPSLITGLSPILRNESHYGIIKQGQYVHLDDLCLSHIYLYKHPKAEGRYICSSHDATIHELVKMLREKYPEYNIPTKFKGIDDNLEPVHFSSKKLREIGFEFKYSLEDMFVGAVDACRAKGLIPIPAEKTEAAEESNLVDVKVGS

SEQ ID NO: 7145 - protein, 396 aa, Ashbya gossypii ATCC 10895
MSDSITNPENSEIQTNYDKIVHKFDELKLKEVLLRGIYGYGFVDPSAIQQRAILPIIEGHDVLAQAQSGTGKTGTFSIAALQRIDESIKAPQALILAPTRELALQIQKVVMALALHMDVKVHACIGGTDPREDAEALRAGAQIVVGTPGRVFDMIERRNFKTDHIKMFILDEADEMLSSGFKEQIYKIFTMLPPTTQVVLLSATMPKEVLDVTDKFMNKPVRILVKKDALTLEGIQQYYINVESEEYKYDCLSDLYDSISVTQAVIFCNTRRKVEELTKRLTDDSFTVSAIYSDLPQAQRDTIMKEFRTGSSRILISTDLLARGIDVQQVSLVINYDLPNNKENYIHRIGRGGRFGRKGVAINLVTDRDVGDMRELERFYSTQIEELPANIADLFD

SEQ ID NO: 7146 - protein, 333 aa, Thermus thermophilus
AYRICLIEGDGIGHEVIPAARRVLEATGLPLEFVEAEAGWETFERRGTSVPEETVEKILSCHATLFGAATSPTRKVPGFFGAIRYLRRRLDLYANVRPAKSRPVPGSRPGVDLVIVRENTEGLYVEQERRYLDVAIADAVISKKASERIGRAALRIAEGRPRKTLHIAHKANVLPLTQGLFLDTVKEVAKDFPLVNVQDIIVDNCAMQLVMRPERFDVIVTTNLLGDILSDLAAGLVGGLGLAPSGNIGDTTAVFEPVHGSAPDIAGKGIANPTAAILSAAMMLDYLGEKEAAKRVEKAVDLVLERGPRTPDLGGDATTEAFTEAVVEALKSL

SEQ ID NO: 7147 - protein, 165 aa, Colwellia psychrerythraea 34H
MQYNTSELCDFYADLIDVVDPIFCNYGGRSSFAGKVVTLKCFEHLGLINELVATYGTGKVLVIDGGGSTRRALIDLGIAQCAANNGWEGIVCYGSVRDVDALDGVDIGIQALGAIPVGASEQNIGETDMAINFAGVTLLPDDYIYADNTGIILSPEALEIASSMA

SEQ ID NO: 7148 - protein, 624 aa, Vibrio vulnificus CMCP6
MDHNPQSQLKLLVIRGKEQGYLTYAEVNDHLPAEIVDSEQVEDIIQMINDMGIKVVETAPDADDLALSDETNITDEDAAEAAAAALSSVESEIGRTTDPVRMYMREMGTVELLTREGEIDIAKRIEDGINQVQSSVAEYPGTIPYILEQFDKVQAEELRLTDLISGFVDPNADETAAPTATHIGSELAESDLEDEDNTDIDDEDEDEDEDGDSSSDSEEDVGIDPEMALEKFTQLRNSYQNLQLAVNEHGRESAQTAQAHELMLDVFKEFRLTPKQFDHLVNELRTAMDRVRTQERLIMKSAVEIAKMPKKSFIALFTGNESNEEWLDQILASDKPYVEKIKLHEEDIRRSIAKLRAIEEETSLSVNNIKDISRRMSIGEAKARRAKKEMVEANLRLVISIAKKYTNRGLQFLDLIQEGNIGLMKAVDKFEYRRGYKFSTYATWWIRQAITRSIADQARTIRIPVHMIETINKLNRISRQMLQEMGREPLPEELAERMQMPEDKIRKVLKIAKEPISMETPIGDDEDSHLGDFIEDTTLELPLDSATATSLKAATKDVLAGLTPREAKVLRMRFGIDMNTDHTLEEVGKQFDVTRERIRQIEAKALRKLRHPSRSETLRSFLDE

SEQ ID NO: 7149 - protein, 500 aa, Mentha x piperita
MELQISSAIIILVVTYTISLLIIKQWRKPKPQENLPPGPPKLPLIGHLHLLWGKLPQHALASVAKQYGPVAHVQLGEVFSVVLSSREATKEAMKLVDPACADRFESIGTKIMWYDNDDIIFSPYSVHWRQMRKICVSELLSARNVRSFGFIRQDEVSRLLGHLRSSAAAGEAVDLTERIATLTCSIICRAAFGSVIRDHEELVELVKDALSMASGFELADMFPSSKLLNLLCWNKSKLWRMRRRVDAILEAIVEEHKLKKSGEFGGEDIIDVLFRMQKDSQIKVPITTNAIKAFIFDTFSAGTETSSTTTLWVMAELMRNPEVMAKAQAEVRAALKGKTDWDVDDVQELKYMKSVVKETMRMHPPIPLIPRSCREECEVNGYTIPNKARIMINVWSMGRNPLYWEKPETFWPERFDQVSRDFMGNDFEFIPFGAGRRICPGLNFGLANVEVPLAQLLYHFDWKLAEGMNPSDMDMSEAEGLTGIRKNNLLLVPTPYDPSS

SEQ ID NO: 7150 - protein, 180 aa, Triticum aestivum
  misc_feature (69)..(69): Xaa can be any naturally occurring amino acid
  misc_feature (126)..(126): Xaa can be any naturally occurring amino acid
  misc_feature (137)..(137): Xaa can be any naturally occurring amino acid
  misc_feature (146)..(146): Xaa can be any naturally occurring amino acid
  misc_feature (150)..(150): Xaa can be any naturally occurring amino acid
MAPTVMASSATSVAPFQGLKSTAGLPVSRRSNGASLGSVSNGGRIRCMQVWPIEGIKKFETLSYLPPLXSTEALLKQVDYLIRSKWVPCLEFSKVGFIFREHNASPWGTNEWAGTGTMWKLPMFGXATDATQVINEXVEEVKKEYXDAYXRIIRFDNMRQVHASAHRLKQRAARSGKAKH

SEQ ID NO: 7151 - protein, 498 aa, Mentha x piperita
MELLQLWSALIILVVTYTISLLINQWRKPKPQGKFPPGPPKLPLIGHLHLLWGKLPQHALASVAKEYGPVAHVQLGEVFSVVLSSREATKEAMKLVDPACANRFESIGTRIMWYDNEDIIFSPYSEHWRQMRKICVSELLSSRNVRSFGFIRQDEVSRLLRHLRSSAGAAVDMTERIETLTCSIICRAAFGSVIRDNAELVGLVKDALSMASGFELADMFPSSKLLNLLCWNKSKLWRMRRRVDTILEAIVDEHKFKKSGEFGGEDIIDVLFRMQKDTQIKVPITTNSIKAFIFDTFSAGTETSSTTTLWVLAELMRNPAVMAKAQAEVRAALKEKTNWDVDDVQELKYMKSVVKETMRMHPPIPLIPRSCREECVVNGYTIPNKARIMINVWSMGRNPLYWEKPDTFWPERFDQVSKDFMGNDFEFVPFGAGRRICPGLNFGLANVEVPLAQLLYHFDWKLAEGMKPSDMDMSEAEGLTGILKNNLLLVPTPYDPSS

SEQ ID NO: 7152 - protein, 215 aa, Leptospira interrogans serovar Lai str. 56601
MKISASILATKLTELVKTVPNYDPTAIDLMHMDVMDGNFVPQISFGEALTKEVKSLTSIPLDVHLMVAKPENHVFKYYEFNPYCITFHIETTDFPIRLAQEIKSHGTKVGVSLNPGTPVSSLENVLPYVDLILLMTVEPGFYGQKFIINGMDKIRKVKELIGSRPIEIEVDGGVNDTNIQELRKNGVDIVVVGAGLYKTGNPVENAKNLKYLARV

SEQ ID NO: 7153 - protein, 416 aa, Burkholderia mallei ATCC 23344
MALIVHKYGGTSMGSVERIKNVAKRVAKWHQAGHQMVVVPSAMSGETNRLLGLAKEISSQPSPRELDMIASTGEQVSVGLLSIALQDIGVEAVSYAGWQVPIKTDSAYTKARIHSIDDERVRRDLDAGKVVIITGFQGVDPDGHITTLGRGGSDTSAVAVAAALEADECLIYTDVDGVYTTDPRVVEEARRLDSVTFEEMLEMASLGSKVLQIRSVEFAGKYRVKTRVLSSLTDPQIPLDEEMRSGTLITFEEDETMEKAVISGIAFQRDEARIAVMGVPDKPGIAYQILGPVADANIDVDMIIQNQSVEGKTDFTFTVGRGDYQKAMDILTNQVKGHVNAEQVLGDPKVSKVSVVGVGMRSHVGVASTMFRTLSEEGINIQMISTSEIKISVLIDEKYMELAVRALHKAFELDQA

SEQ ID NO: 7154 - protein, 245 aa, Bradyrhizobium japonicum
MTSEILIAPSILAADFARLGEEIAAIDAAGADWIHCDVMDGHFVPNISFGADVIKAIRPVTKKVFDVHLMIAPVDPYLDAFAKAGADVITVHAEAGPHLDRTLQAVRALGKKAGVSLCPATSEGAIEYVLDRIDLVLVMTVNPGFGGQSFLESQLEKIKRIRTVIGDRPIRLEVDGGITRENAVAVAAAGADTLVAGSAVFRGKSSADYAGNIAAIRVAAEAGRVSKLQDISVQPMRAGESARLR

SEQ ID NO: 7155 - protein, 382 aa, Pseudomonas fluorescens PfO-1
MVYHKFHPHRESSMAFNSIEEIIEDYRLGKMVLLVDDEDRENEGDLLLAADRCTPEAISFMAREARGLICLTLTDDHCQRLGLEQMVPSNGSVFSTAFTVSIEAAVGVTTGISAADRACTVAAAVAPNARAEDLVQPGHIFPLRAKEGGVLTRAGHTEAGCDLARLVGFTPASVIVEVMNDDGTMARRPDLEVFAHKHGIKIGTIADLIHYRLSTEHTIERIGERELPTVHGTFRLITFEDRIEGGVHMAMVMGELRREEPTLVRVHVIDPLRDLVGAEYSGPTNWTLWAALQRVAAEGHGVVVVLANHESSQALLERIPQLTQPPRQFSRSQSRIYSEVGTGAQILQNLGVGKLRHLGPPLKYAGLTGYDLEVVESIPFTE

SEQ ID NO: 7156 - protein, 333 aa, Clostridium magnum
MKTMTYMEALREAMRIKMKEDEKVLILGEDVGAFGGCFGLTAGLFDEFGDKRVKDTPISEGAIVGCAIGAAATGLKPIAEIMMGDFVTVAMDMLVNQAAKLRYMFGGKISLPMVVRLPGGAGLSAAAQHSQSLEAWLTHVPGIKVVYPSTPADAAGLLLTAIDDDNPVAFIEHKAMYGLKGEVPDDIKPIPFGVADIKPIPFGVADIKREGNDVTIIATGKMVHEALKAAEQLSKDGIEVEVVDPRTLFPLDKETIFNSVNKTGKVVVVTEENKRGGYGGEISAMISEEIFDSLDAPVVRIGALNTPIPFAPNLESYVIPASKDIVNWVKGLF

SEQ ID NO: 7157 - protein, 282 aa, Haemophilus influenzae R2866
MAAKIISGTELSKQIKANLADKITHYIEQGKRAPGLAVILVGADPASQIYVGNKRKSCEEVGILSKSYDLPETTTQNELLAIIDQLNADKNIDGILVQLPLPKQINAEAIIERIDPKKDVDGFHPYNVGRLCQRIPTLRACTPYGVMKLLETTGIDLHSKHAVIVGASNIVGRPMSLELLLAGATVTVTHRFTKNLENHVRQADILVVAVGKPNLISGDWIKESAVVIDVGINRVDGKLVGDVEFDKAAEKAAYITPVPGGVGPMTVAMLMSNTLYAYEHNK

SEQ ID NO: 7158 - protein, 283 aa, Chromobacterium violaceum ATCC 12472
MSAQLIDGKAVAEKLLEKVSAGVGERLAQGKRAPALAVILVGDNPASAVYVGSKKKACEKAGIRSVAYDLPASTSQQQLLEIIDGLNADDAVDGILVQLPLPEQIDPQAVIERIDPKKDVDGFHPYNVGRLAIKMPLMRPCTPRGVMTLLEEYGIDPKGKKAVIVGASNIVGRPQALEMLLARATVTVCHSATRNLAEEVAAADILVVGVGIPNFVKGEWVKPGAVVIDVGINRLDTGKLCGDVEFDAARERAGFITPVPGGVGPMTVATLLQNTLDSANLNA

SEQ ID NO: 7159 - protein, 443 aa, Clostridium magnum
MAKIVVMPKLGLTMTEGTLVTWKKAEGDQVKVGEIFFEVSTDKLTNEVEASDEGIVRKLLVNEGDTVECLKPVAIIGSADEDISSLLNGSSEGSESAEQNDTKAPKKEAEAPKGAVEKQQGKVKASPAAKKLAAENNIDITLVEGTGPQGRITTEDVEKYIEDSKNASKASPMASKVAAELNVDLSTIEKDGRIMKEDVLSLCKGNAPEECKVNPSEDKYTEKIVPMTQIRKIISARMHESWITSPTVTYDIKVDMTSLKRFKDALKDVCKVTYTDLIVKIVSKVLLQFPLLNCSINGNELITRNYVNMGVAVAIDGGLVVPVVKYANEKGLKEISTEVKDLAKKAKSNQLKPENMTGGTFTITNLGMFGIEYFSPIINQPEVAILGVNKITETPVVQNGEIVIKPLMNLSLTANHRAVDGSVAAQFLSKVKEYMEKPELLML

SEQ ID NO: 7160 - protein, 202 aa, Oryza sativa (japonica cultivar-group)
MAAATMALSSSFAVAAAAAGGAPWRGVVSAGRAAPRRRVALVVRAQSEPEVEPTKEETATSSSSPSPATTPTPSPAAAAPKAKPAASTKLWDVLAFSGPAPERINGRLAMVGFVSALAVEASRGGGLLDQAGSWSGLAWFAATAAVLSAASLVPLLRGETAEARSGGVMSADAELWNGRFAMLGLVALAFTEFLTGSPLVNV

SEQ ID NO: 7161 - protein, 147 aa, Dechloromonas aromatica RCB
MSENLHLVCPHCAAVNRIPAAKLGDAPNCGQCKQPLFTGEPLELNAANFDRHLSRNDLPVVVDFWAPWCGPCRTMAPTFHQAAIDLEPYARLVKVNTEAEQQLAARFNIRSIPTLAVFLNGREIARQSGALDLGSLKRWLQPHLYKS

SEQ ID NO: 7162 - protein, 116 aa, uncultured epsilon proteobacterium
WTMVAGGGASVVYADTIADMAGGVEDLANYGEYSGGPTTDETRFYTETVLDLMTREKDPKGRDKILIIGGAIANFTDVAKTFTGIIQAFEKYSVKMKDVGTRIYVRRGGPNYKGEF

SEQ ID NO: 7163 - protein, 480 aa, Prochlorococcus marinus str. MIT 9313
MTSQSHVGQLVSEPYKYGFVTDIETEKIPKGLDEDVVRLISEKKNEPQFLLDFRIRAYRHWLKLQTPDWAGLGYPPIDYQDIVYYAAPKQKEKKNSLEEVDPTLLETFDKLGIPLSEQKRLSNVAVDAVFDSVSIATTYKEKLAEHGVVFCSITDAVNEHPELVRRYLGTVVPSNDNYFAALNSAVFSDGSFVFIPRGVECPMELSSYFRINSGDIGQFERTLIVAEEGASVSYLEGCTAPMFDTNTLHAAVVELVALDDASIKYSTVQNWYAGDENGVGGIYNFVTKRGHCCGARSKISWSQVETGSAITWKYPSCILQGADSVGEFYSVALTNHRQQADTGTKMIHLGPRTRSTIVSKGISAGHSANSYRGLVQMGPKAVNAKNYSQCDSMLIGDQAGANTYPYIRSQQPDASIEHEASTCRISEDQLFYLQSRGIDFEAAISMIVSGFCRDVFSQLPMEFAAEADKLLALKLEGSVG

SEQ ID NO: 7164 - protein, 367 aa, Dechloromonas aromatica RCB
MPRFLPEPPHRHGNPATTAVVLVNLGTPDAPTAPALKRYLKEFLSDPRVVEIPKPVWWLILNGIILNIRPKKSAAKYASVWMPEGSPLRVHTERQAKLLKGLLGQRGHHLTVTSAMRYGSPSIPEVLAHLKAEGAKRILLVPMYPQYAASTTATVVDEAANWLTKIRNQPEMRFVRNFHDHEGYLAALEKSVRQHWQTNGSLGDNDRLLISFHGLPKRSLDLGDPYFCECHKTGRLLAERLNLKPEQFQICFQSRFGKAEWLQPYTAPTLHEWGSKGVRRVDVICPGFVADCLETLEEIAQEGRDDFLKAGGKEYHYIPALNEDDAWIKALADIAEQHLGGWSTKTAFDPHALETSAREAFKFGARA

SEQ ID NO: 7165 - protein, 183 aa, Arabidopsis thaliana
MGYRRSYAITFVALVAALWSVTKAQPSSSCVSTLTTLSPCLSYITGNSTTPSQPCCSRLDSVIKSSPQCICSAVNSPIPNIGLNINRTQALQLPNACNIQTPPLTQCNAATGPTAQPPAPSPTEKTPDVTLTPTSLPGARSGVGGGSKTVPSVGNGSSSRNVDPLPLHFLMFAVLVVCTSSFL

SEQ ID NO: 7166 - protein, 499 aa, Triticum aestivum
  misc_feature (82)..(82): Xaa can be any naturally occurring amino acid
  misc_feature (163)..(163): Xaa can be any naturally occurring amino acid
  misc_feature (452)..(452): Xaa can be any naturally occurring amino acid
MAGTGVFADVLDGEVYKYYADGEWRASASGKTVAIVNPTTRQTQYRVQACTQEEVNKVMDAAKVAQKAWARTPLWKRAELLXHKAAAILKEHKTPIAECLVKEIAKPAKDAVSEVVRSGDLVSYTAEEGVRILGEGKLLVSDSFPGNERNKYCLSSKIPLGSXFWAIPPFNYPANLAGSKIGPALIAGNALVLKPPTQGAVAALHMVHCFHLAGFPKGLISCVTGKGSEIGDFLTMHPGVNCISFTGGDTGIAISKKAGMVPLQMELGGKDACIVLEDADLDLVAANIVKGGFSYSGQRCNAVKVVLIMEAVADTVVEKVNAKLAKLKVGPPEDDCDITPVVTESSANFIEGLVMDAKEKGATFCQEYRREGNLIWPLLLDHVRPDMRIAWEEPFGPVLPVIRINSVEEGIHHCNASNFGLQGCVFTRDINKAIMISDAMESGTVQINSAPXARGPDHFPFQGLKDSGIGSQGITNSINMMTKVKSTVINLPSPSYTMG

SEQ ID NO: 7167 - protein, 218 aa, Nostoc punctiforme PCC 73102
MPHRTINQETTAMMKAEDIMTKDVVTIRGSATVAEAVVLMKEKKLRALVVDIRHENDAYGIVTETDIVYKVTAYGKDPKQVWVYEIMSKPCIVVNPDLGVEYVARLFANTGIHRAPVIQGKLLGIISITDILTKSDFVEAPKALLLEERIQKAIEQSRAICTEQGAYSKACAAAWDEVEELQAEAAHQKAEGMVSAKVSFEEYCKENPNAPECRNYHP

SEQ ID NO: 7168 - protein, 530 aa, Triticum aestivum
MPLSGMAIAFKASTSACTAQQLWGHPTRDQCQHGFTHLNERKSRKGSAALHARAIPGNLDLDFGDPSWKQKYQEDWDRRFSLPHITDVFDLEPCRSAFPRSTHASPRGASDASSPDKWNGYVNKDDRALLKVSDYASNTSAGAECIDPDCSWVEHWVHRAGPRKEIYYEPEEVKAAIVTCGGLCPGLNDVIRQIVFTLEIYGVKNIVGIQFGYRGFFEKGLKEMPLSREVVENINLAGGSFLGVSRGGAKTSEIVDSIQARRIDMLFVIGGNGSHAGANAIHEECRKRKLKVSVVAVPKTIDNDILFMDKTFGFDTAVEEAQRAINSAYIEARSAYHGVGLVKLMGRSTGFIAMHASLSSGQIDVCLIPEVSFTLDGEHGVLAHLEHLLETKGFCVVCVAEGAGQDLLQKSNATDASGNVILSDFGVHMQQKIKKHFKDIGVLADVKYIDPTYMVRACRANASDAILCTVLGQNAVHGAFAGFSGITSGICNTHYAFLPITEVITTPKHVNPNSRMWHRCLTSTGQPDFH

SEQ ID NO: 7169 - protein, 406 aa, Haemophilus influenzae 86-028NP
MRRAVITGFGIISSIGNNKEEVLASLKEGKSGIEVVPEFVEMNMRSHVAGTIKLNPSEHIDRKVFRFMGDAAAYAYLSMREAIEDAGLTEDQVSNDRTGLVIGAGTGSAHNQLVACDAVRGPRGVKAIGPYAVTKTMASSVSACLATPYKIRGVNYSMSSACATSAHCIGHAVELIQLGKQDIVFAGGAEELSWECATEFDAMGAVSTKYNETPEKASRAYDANRDGFVIAGGGAVVVVEELEHALARGAKIYAEIVGYGATSDGYDMVAPSGEGAERCMKQAMATVDTPIDYINVHGTSTPVGDVKELGAIKNVFGDKIPAISSTKSMTGHSLGAAGAHEAIYTLLMLDNDFIAPSINIETLDEAAEGCNIVTETKENAGLQTVMSNSFGFGGTNATLIFKRYNG

SEQ ID NO: 7170 - protein, 382 aa, Ralstonia solanacearum
MMRDAGQLDLMDSRVTQLAFWSALPERWTSDAEETLVCCHVRQETHDVKSFFFRSPAGRTFLFEPGQFITLELDIEGETINRCYTLSSSPARPHTISITVKRVPGGKVSNWLHDNLQPGAAIRVLGPAGEFTCARHPARKYLFLSAGSGVTPLMSMSRAHHDLAEDRDIVFVHSARTPDDIIFARELELIASNHTNFRTSFVVERLGARTNWPGITGFLSLPLLKLIAPDFMEREIFTCGPAPYMKAVRGLLEEAGFDPARYHEESFSFESLTTGAAAEAIAPDAAPTANPDAAAPQFSISFAKTGREIACGAAQHVLDAARQAGVRLPASCTQGMCGTCKVKLVSGQVDMKHNGGIRQREIDQGMVLLCCSKPLSDLVIDK

SEQ ID NO: 7171 - protein, 655 aa, Burkholderia vietnamiensis G4
MCGIDGFLNSVAFDEETARGTLARMTASLAHRGPDGQGMWVDPEAGIALGHRRLAIVDLSVQGRQPMASACGRYVLVFNGEIYNHRELRAELERTGRAPAWRGRSDSEVLVAAIAAWGVDATLRRATGMFAFALWNRASRVLTLARDRIGEKPLYYGRIGDALVFASELKALRGYPGFDGAVDRDALCLYLRQSSVPAPHTIYRGISKLPPGTFIQFEHARDTPRVRAYWALEQAIEAGRERPFDGNADDAVGQLDAVLRQAVARQMEADVPLGAFLSGGIDSSAIVALMQAQSAKPVDTFTIGFHEAGYDEAGYAKAVARHLGTRHTELYVTADHALAVVPKLPSIYDEPFSDASQIPTFLVSDLTRRHVKVSLSGDGGDELFGGYTRYFLTPRLWRKLHRVPAAVRARIAAALHALRPDHADQLAAVAQGAWGGVDARDGASRIGDRLHKLGHVMTAESRIGLYRLLMSSVHHPERLALAGQEPPTPLDTVSAWPAHLSFAEQAMAIDTLTYLPTDILAKVDRAAMAVGLETRMPFLDHHVVEFAWRLPAAVRLPQGQPKALLRRLLDQYVPRALIDRPKQGFCAPVDHWLRGALRDWAEALLEPSRLRAEGFFDAAAVERLWRQHLTGRMNWQHQLWTVLMFQAWLEGQRAA

SEQ ID NO: 7172 - protein, 557 aa, Arabidopsis thaliana
MASLLANGISSFSPQPTSDSSKSPKGFHPKPESLKFPSPKSLNPTRPIFKLRADVGIDSRPIGASESSSSGTSTVSSTDKLQQYFQNLDYDKKYGFVEDIDSFTIPKGLSEETIRLISKLKEEPDWMLEFRFKAYAKFLKLEEPKWSDNRYPSINFQDMCYYSAPKKKPTLNSLDEVDPQLLEYFDKLGVPLTEQKRLANVAVDAVIDSVSIATTHRKTLEKSGVIFCSISEAIREYPDLIKKYLGRVVPSDDNYYAALNSAVFSDGSFCYIPKNTRCPMPISTYFRINAMETGQFERTLIVAEEGSFVEYLEGCTAPSYDTNQLHAAVVELYCGKGAEIKYSTVQNWYAGDEQGKGGIYNFVTKRGLCAGDRSKISWTQVETGSAITWKYPSVVLEGDDSVGEFYSVALTNNYQQADTGTKMIHKGKNTKSRIISKGISAGHSRNCYRGLVQVQSKAEGAKNTSTCDSMLIGDKAAANTYPYIQVKNPSAKVEHEASTSKIGEDQLFYFQQRGIDHERALAAMISGFCRDVFNKLPDEFGAEVNQLMSIKLEGSVG

SEQ ID NO: 7173 - protein, 589 aa, Saccharomyces cerevisiae
MSLTADEYKQQGNAAFTAKDYDKAIELFTKAIEVSETPNHVLYSNRSACYTSLKKFSDALNDANECVKINPSWSKGYNRLGAAHLGLGDLDEAESNYKKALELDASNKAAKEGLDQVHRTQQARQAQPDLGLTQLFADPNLIENLKKNPKTSEMMKDPQLVAKLIGYKQNPQAIGQDLFTDPRLMTIMATLMGVDLNMDDINQSNSMPKEPETSKSTEQKKDAEPQSDSTTSKENSSKAPQKEESKESEPMEVDEDDSKIEADKEKAEGNKFYKARQFDEAIEHYNKAWELHKDITYLNNRAAAEYEKGEYETAISTLNDAVEQGREMRADYKVISKSFARIGNAYHKLGDLKKTIEYYQKSLTEHRTADILTKLRNAEKELKKAEAEAYVNPEKAEEARLEGKEYFTKSDWPNAVKAYTEMIKRAPEDARGYSNRAAALAKLMSFPEAIADCNKAIEKDPNFVRAYIRKATAQIAVKEYASALETLDAARTKDAEVNNGSSAREIDQLYYKASQQRFQPGTSNETPEETYQRAMKDPEVAAIMQDPVMQSILQQAQQNPAALQEHMKNPEVFKKIQTLIAAGIIRTGR

SEQ ID NO: 7174 - protein, 486 aa, Burkholderia xenovorans LB400
MRYSIKLNDQALLRQHAYINGEWQTADNGSTFTITDPSSGDLLAQVPMMGAAEARRAIHAACIAWSVWRKKTAKDRAIVMRRWFNLVLENADDLATILTAEQGKPLAEAKGEIAYAASFIEWFAEEGKRVSGDTPATPDADKRIIVTKEPIGVCAAITPWNFPAAMITRKVAPALAAGCTIVVKPAEATPLTALALAVLAERAGIPSGVLNVITGDPRAIGAELTANPGVRKLSFTGSTAIGRMLMAQSAPTIKKVTLELGGNAPFIVFDDADIDNAVEGAVVSKYRNSGQTCVCPNRFYVHDAVYDAFVEKLSKAVFELKVGSGRDPGVSIGPLISEAAVKKVEAHIADALQKGAKLEVGGARHELGHSFFQPTVLSDVTPDMMLSREETFGPLAAVSRFSSEDEVVRLANDTEYGLAAYFYSRNIARVWRLAEALEYGMVGINTGLISNEVAPFGGVKESGIGREGSRYGIEDYLVIKYLCLAS

SEQ ID NO: 7175 - protein, 443 aa, Acidobacteria bacterium Ellin345
MAINRHVVKSTFVSALGGLLFGFDTAVIAGTTHQLTEVFKLTPNALGITVSSALLGTVLGAITAGYPGQRIGRRDSLRIMAIFYMLSALGCALAWNWSSLLVFRVIGGLGIGGSSVLAPMYIAELSPPKWRGRLVGFFQVNIVIGILVAYLSNFVIGRMNFGAMEWRWMLGIAAAPAVLFFVMLFFIPRSPRWLAMKGRTAEALRVMRLTGTDNPEEELNGIVRSIHLERSTKSESLLQRKYLLPIFLAVSAGAFNQLTGINACLYYLNDIFAAAGASKYSAGMQSVLIGCTNLFFTLVAMTMIDKLGRKKLLLVGTTGVCIFLAIIGQIFHSGGHGGSLIWLLIGFMGFFAISQGAVIWVYISEVFPTRVRAQGQALGTSTLWITNALISWMFPVLAAKSSATPFFFFAAMMFIDVLIIAMIYPETSGVSLEQLEQKLGVVE

SEQ ID NO: 7176 - protein, 411 aa, Bacillus halodurans C-125
MSTATLSQETKQIVKATVPILAEHGEAITKHFYKRMFSHHPELLNIFNQTHQKQGRQPQALANSIYAAAEHIDNLEAILPVVSRIAHKHRSLNIKPEQYPIVGENLLAAMREVLGDAASDDVLEAWREAYELIADVFIQVEKKMYEEASQAPGGWREFRSFVVEKKQRESATITSFYLKPEDGKALASYKPGQYITVKVTIPGHEHTHMRQYSLSDAPEKGYYRITVKREEGDGDLPPGIVSNYLHQHIHEGDVLEITAPAGDFTLQEEGERPIVFISGGVGITPLMSMFNTLMQRGVKREVIFIHAAINGFYHAMHDHLAQTASQQENVHYAVCYERPTPGDRMNPFMKKEGFIDESFLRSILHDREADFYFCGPVPFMKTIAQILKDWDVPEQQVHYEFFGPAGTLASS

SEQ ID NO: 7177 - protein, 601 aa, Synechococcus sp. WH 5701
MALLVQKFGGTSVGSVERIQAVAQRIAASRERGHDLVIVVSAMGHTTDELTALARALCPEPPQREMDMLLATGEQVSIALLAMALHSIGVPAVSMTGPQVGIVTESAHGRARILEVRTERLRKRLEEGQVVVVAGFQGTSSGSAGTPEITTLGRGGSDTSAVALAAALGADACEIYTDVPGVLTTDPRQVSDAQLMEEVSCNEMLELASLGAAVLHPRAVEIARNYGVPLVVRSSWSDAPGTRLTSGRPRPIGSEGLELGRPVDGADLENQQAVLALTRVPDHPGVAALLFEALSAAGLNVDLIVQATHVGASNDIAFTLSESQLEGAREVCRSLLQELAVEESALSTQAGLAKLSISGAGIMGRPGIAARLFDTLARYGINLRMIATSEVKVSCLVEGSQGARALRAAAEVFELQEHQLRQNPLPCDVSDPAVRGVALDRNQAQVVVRQVPDRPGTAAAVCRALADAGISLDTIVQSERTHGSGPQLSRDMSFTLRRDDLNRARGALQPVLAPWPEARFEEGLAIARVSAVGSGMPCTPGTAARMFRALAEAGVNIEMIATSEIRTSCVVAEADGVKALQAVHACFQLGDSTSYTLEATA

SEQ ID NO: 7178 - protein, 423 aa, Geobacillus kaustophilus HTA426
MAADKHTEEKEQQYDVLASTQIVIHRALEKLGYPEEVYELLKEPIRVLTVRIPVRMDDGSVKIFTGYRAQHNDAVGPTKGGVRFHPDVTEREVKALSIWMSLKCGIVDLPYGGGKGGIVCDPRTMSFRELERLSRGYVRAISQIVGPTKDIPAPDVFTNSQIMAWMMDEYSRIREFDSPGFITGKPLVLGGSHGRETATAKGVTICIREAAKKRGLSLKGARVVVQGFGNAGSYLAKFMHDAGAKVVGISDVYGALYDPNGLDIDYLLERRDSFGTVTKLFKNTISNQELLELDCDILVPAAIENQITAENAPRIKASIVVEAANGPTTLEATEILTQRGILLVPDVLASAGGVTVSYFEWVQNNQGYYWTEEEVEQRLEKVMVKAFNNVYEMAQTRRVDMRLAAYMVGVRKMAEACRFRGWV

SEQ ID NO: 7179 - protein, 396 aa, Burkholderia vietnamiensis G4
MAKEKFERTKPHVNVGTIGHVDHGKTTLTAAITTVLTKKFGGEAKAYDQIDAAPEEKARGITINTAHVEYETANRHYAHVDCPGHADYVKNMITGAAQMDGAILVCSAADGPMPQTREHILLARQVGVPYIIVFLNKCDMVDDAELLELVEMEVRELLSKYDFPGDDTPIVKGSAKLALEGDTGELGEVAIMNLADALDTYIPTPERAVDGAFLMPVEDVFSISGRGTVVTGRVERGIVKVGEEIEIVGIKPTVKTTCTGVEMFRKLLDQGQAGDNVGILLRGTKREDVERGQVLAKPGSITPHTHFTAEVYVLSKDEGGRHTPFFNNYRPQFYFRTTDVTGSIELPKDKEMVMPGDNVSITVKLIAPIAMEEGLRFAIREGGRTVGAGVVAKIIE

SEQ ID NO: 7180 - protein, 381 aa, Staphylococcus aureus subsp. aureus MSSA476
MLTEQEKDIIKQTVPLLKEKGTEITSIFYPKMFKAHPELLNMFNQTNQKRGMQSSALAQAVMAAAVNIDNLSVIKPVIMPVAYKHCALQVYAEHYPIVGENLLKAIQDVTGLEENDPVIQAWAKAYGVIADVFIQIEKEIYDQMMWIGFKPFKITNIKQESEDIKSFTVETEEYDFSEFTPGQYITVDVSSEKLPYRAKRHYSIVSGEKNHLTFGVKRDVTTEHEGEVSTILHDEIKEGDMINLAAPVGGFVLENTTEPQLFLGSGIGVTPLVAMYEAASAKGLDTQMVQVAENEQHLPFKDNFNSIASHHDNAKLYTHLKDKQGYIGAEELQAFLANKPEIYICGGTKFLQSMIEALKSLNYDMDRVHYETFIPRLSVAV

SEQ ID NO: 7181 - protein, 270 aa, Pyrococcus furiosus DSM 3638
MKVIMTTKIDKASMNIREKLIENFGFTESNLTFDGNRVYEKEDILILTTNEEMIYYDYLDKEIEKQTKIKPEVIVFASRHSSAKKLPSLTTHVTGNWGKAMYGGKDESFAIAFPSAMKLALLKMHELNDLGWTVCYEATHHGPSELEVPSLFIEIGSSEEEWVNDRAGEIIAETIMYVLKKREKFKVALGIGGGHYAPKQTKVALESDLAFSHILPKYAQPVKKEVILRALSRSTEEVEAIYVDWKGSRGETRQLAKELANELGLEFIKD

SEQ ID NO: 7182 - protein, 217 aa, Azoarcus sp. EbN1
MHTADTRNAGPVASTDETDQRNTRLVASCRLPTPWAIFRMHGFEEPATGREHVALTLGAVADGKPVLTRVHSECLTGDALFSRRCDCGPQLEAALAAIAAEGRGVLLYLRQEGRGIGLLNKVRAYALQDEGADTVEANHLLGFDADTRDYAVAASMLGELGIASLRLMTNNPRKVAALEQYGITVAERVPHIIEPNPHNANYLRTKAQRLGHLLAGH

SEQ ID NO: 7183 - protein, 273 aa, Oryza sativa
MGRSFRDSLKVLEADIQHANSLAAEFRREYDGACLQMRMSYCPAAHFFLFLVQWTDCNLAGALGLLRILIYKVYADGTTTMSAHERKASIREFYAVIFPSLMQLHEGINEVEDKKQKAICIERYRRRDEDQKMVISEIDDNIEEECGICMEINGKVVLPTCSHAMCIKCYRDWRSRSQSCPFCRDSLKRVNSADLWIYTDNRDIVDIATVRKENLRRLFMYIDKLPTVIPETVFDVYDSHVKWPCTHAQILCWCVTTSAVEIVEPLVFMLPRL

SEQ ID NO: 7184 - protein, 258 aa, Xanthobacter autotrophicus Py2
MTYETILVAIDGPVGIITLNRPDVLNALNHQITSELSHAAAALDAAGSIGAIVVTGSDKAFAAGADIKEIKDKTFAEVYEAQLITATWEGLARVRKPTVAAVSGHAIGGGCELALMCDIIVASQTARFALPETTIGIIPGAGGTQRLTRIVGKATAMDMILTGRALSAVEAQAMGLVSRVAAEGQHLAEAVAIAARIASSSRPVVALAKEAVNKAYETHLQEGLYVERRLLYATFALEDRREGMNAFAEKRKPVFRNR

SEQ ID NO: 7185 - protein, 161 aa, Oryza sativa
GIWPYWPKIRRPSEPIIRQVGTITSNIPSSLVAPGGAKGLLCISRVGSSFTMVPKRCKKIKTDNPYSIVGGMSVDIHASGSSSMGKGVNLLVSKYGARVSGVSPICLGEGWFPPGDAVEGGTTVFMCWAVTLAGLVVVGALLVSNPSALAGYISPGSGVRM

SEQ ID NO: 7186 - protein, 401 aa, Magnetospirillum magnetotacticum MS-1
MKFGGTSVADIERIKNVANRVKREFDAGNEVAVVVSAMSGATNQLVAWCNQVAPLHDAREYDAVVATGEQVTIGLLAIALQELGVNARSWCGWQLPIRTDGVHGKARIMSIETDEMIARMGKGEVAVVAGFQGLGPDGRISTLGRGGSDTSAVALAAALHADRCDIYTDVDGVYTTDPRIVSVARKLDKITYEEMLELASVGAKVLQTRSVEMAMKHRVRVQVLSSFEDKPGTLVCDEDEIVEKELVSGIAYSRDEAKITLVRVADRPGVAASIFGPLADAAVNVDMIVQNVSEDGKSTDLTFTVGNADLERAKKVLEDAKANLGFEKLLADPNVVKVSVIGVGMRSHAGIAQKMFQTLASEGINIQVISTSEIKISVLIEEKYTELALRALHTAYGLDAA

SEQ ID NO: 7187 - protein, 533 aa, Pichia pastoris
MYRFLGLGTHPNDDQNKIHVLGRQYDPIKTQETEGKDLDLNSRFQQVLDSIKDGNKKSTTYSQSFIDDVYSKIWLTYRAGFPPIARDKDSPTFTLGALLRGQFDFNEIGFTSDAGWGCMIRTSQSLLANALLFLHLGRDWVFKAKDPANVEHDRIISWFVDIPDEPFSIHNFVQQGIKCCDKKPGEWFGPSAASRAIKNLCKEYPPCGLRVYFSSDCGDVYDTEVRELAYGDSDTFTPILVLLGIRLGVEKVNLYIGDLLRECLSLKQSVGISGRKTSFLALLSIGFQGDYLFYLIPTFPKKALTFGKHGEPVHRLQTKKTDENAAGQYPVFKYWIQIMKQTMMTAMKASKTTASTLKFFRVLMSNQSTHQKVTKLHLSHMDPSMLIGFLITSEDDFNDWKENIGKKDPSHKIVHITETKVSESTSNFQFNSLRSNSIADYDNCSGEDCDSAAIASDSDDFVDLAADFAVTGLEPRTHTGVDDETSSDYVQHFPIRRFSQPVIVSREDVVPTLSEDNGVIALDDKMSGISVGR

SEQ ID NO: 7188 - protein, 327 aa, Prochlorococcus marinus str. MIT 9313
MSGTLLFNALRDAIDEEMARDSHVCVMGEDVGQYGGSYKVTKDLYEKYGELRVLDTPIAENSFTGMAVGAAMTGLRPIVEGMNMGFLLLAFNQISNNMGMLRYTSGGNFTIPTVVRGPGGVGRQLGAEHSQRLEAYFHAVPGIKIVACSTPTNAKGLMKAAIRDNNPVLFFEHVLLYNLIEELPDGDYVCALDQADLVREGKDVTILTYSRMRHHCLKAVEQLEADGIDVELIDLISLKPFDMETIVRSIRKTHRVIVVEECMKTGGIGAELIALITEQCFDELDARPIRLSSQDIPTPYNGKLENFTIIQPHQIVEAAKQIVLKGL

SEQ ID NO: 7189 - protein, 852 aa, Dechloromonas aromatica RCB
MKSKLLAKQLQEIFGGEGAPQFLMLLEQARAAQQHALADGTEKLLGTVDSTYRAYAGLNLSGWHTKLSGDALTDWNIGSGTIDSGRQWKEMLGYADGDLDNSIAQWQRMVHPDDLRLLQTRIEAHIQNQDSHFQAECRFKARDGQWRWFLLRGAVAARNAEGKPARVLVLQRDISDVKAAESALISAKEVAESANKARGAFLANMSHEIRTPMNGIIGMTELALDTQLDAEQRHYLKTVKSSAEALLTIVNDILDFSKIEAGKMEFESLVFSMQDTVLEAVRVLAVSAHKKGLELVADVRPEVPARIVGDPTRLRQVIINLIGNAIKFTERGEVALKVEVDQSTERSVYLRFSIRDTGIGVPADKQQAIFEAFSQADVSTTRRFGGTGLGLAISARLVQLMDGKIWLESTPGQGSVFSFTGRFGVQEATSVRPFEARFGGRRVLVIEDNATVGQYLVELLEQLGVQVSLVADGAAAVAAMERSRAMDFPYDYVLADANMDAPAGFALAEAWGRSGRVEKLIVMLTTENQRHDLSRLREIGVSAHLVKPIGGADLIDALALADGPGNQELSEFALSEINFDGVAKEDSSGLNILLVEDNPVNQELATRLLERQSHRVSLANNGAEAVDLFDSGHFDVILMDMQMPVMGGIEATEAIRSREMRRSWVVSHELKPVYIIAMTANVMATDRDRCLEAGMNDYVAKPLRSEELYAALERARGGLATDDFIVNDAPLVDASSQLDLGAALGDIGEPELFATMAGMLLAEWDAHLGRVRTAIDATDAHEARMHAHTLKSLLAMFHAERARRRAMEIEQATMTVENVDWANCRRLYAALMEEMALIKPSLIRYVETRVIP

SEQ ID NO: 7190 - protein, 566 aa, Prochlorococcus marinus str. MIT 9313
MRLIRFDEELPSSLMTSSAQTGPTQRQVHLNTPFNDQKPGTSGLRKSSKQFEQTNYLESFIEAIFQTLPGVEGGTLILGGDGRYGNHRAIDVILRMGAAHGLSRVITTTNGILSTPAASHLIRANKAIGGIILSASHNQGGPDGDFGVKVNGANGGPAAESLTNAIYACSQALEKYSLVDADVIPLETPGHHAIGGMTVDVIDGVEDYVELMQKLFDFGRIKDLIKTDFPVVFDAMHAVTGPYAKRLLEGLLGAPTGTVRNGVPLEDFGGGHPDPNLTYAAELADLLLNGKAYSFGAACDGDGDRNMILGRGCFVNPSDSLAILAANANVAPAYADGLAGVARSMPTSAAVDVVAKQLNIDCFETPTGWKFFGNLLDAGRITLCGEESFGTGSNHVREKDGLWAVLFWLQILAERRCSVADVMTQHWSRFGRHYYSRHDYEAIASENAHGLYNRLESMLPRLIGQPFAGRQVSQADNFSYSDPVDGSETQSQGLRILLEDGSRVVVRLSGTGTKGATLRVYLECYEPSHGNLNQDPQHALADLINGIDALAEIQKRTGMQRPTVIT

SEQ ID NO: 7191 - protein, 116 aa, uncultured epsilon proteobacterium
WTMVAGGGASVVYADTIADMAGGVEDLANYGEYSGGPTTDETRFYTETVLDLMTREKDPKGRDKILIIGGAIANFTDVAKTFTGIIQAFEKYAGKMKDVGTRIYVRRGGPNYKGEF

SEQ ID NO: 7192 - protein, 586 aa, Lotus japonicus
MCGILAVLGCSDFTQAKRVRVLELSRRLKHRGPDWSGLHQHGDCYLAHQRLAIVDPASGDQPLFNEDKSIIVTVNGEIYNHEELRKQLPNHQFRTGSDCDVIAHLYEEHGENFMDMLDGIFSFVLLDTRDNTFIVARDAIGVTSLYIGWGLDGSVWISSEMKGLNDDCEHFEVFPPGHLYSSRERAFRRWYNPTWFSESIPSAPYDPLAVRHAFEKAVIKRLMTDVPFGVLLSGGLDSSLVASITSRYLATTKAAEQWGSKLHSFCVGLEGSPDLKAAKEVADYLGTVHHEFTFTVQDGIDAIEEVIYHVETYDVTTIRASTPMFLMSRKIKSLGVKWVISGEGSDEIFGGYLYFHKAPNKEEFHTETCRKIKALHQYDCLRANKSTFAWGLEARVPFLDKEFINVAMNIDPEYKMIKRDEGRIEKYILRRAFDDEEKPYLPKHILYRQKEQFSDGVGYSWIDGLKDHAAKHVTDKMILNAGNIFRHNTPLTKEAYYYRMIFERFFPQNSARLTVPGGPTVACSTAKAVEWDAAWSNNLDPSGRAALGVHLSAYDDKQNNLINNKPVEFEKLIPMEAPSLGVAIHS

SEQ ID NO: 7193 - protein, 586 aa, Lotus japonicus
MCGILAVLGCSDDSQAKRVRVLELSRRLKHRGPDWSGLHQHGDNFLAHQRLAIVDPASGDQPLFNEDQSIIVTVNGEIFNHEELRKQLPNHKFRTGCDCDVIAHLYEEHGENFVDMLDGIFSFVLLDTRDNSFLVARDAIGVTSLYIGYGLDGSVWIASELKGLNDDCEHFELFPPGHLYSSKEKEFRRWYNPPWFSEAIPSAPYDPLALRQAFEKAIIKRLMTDVPFGVLLSGGLDSSLVASVTARYLADTKAAKQWGSKLHSFCVGLEGAPDLKAAREVADYIGTVHHEFQYTIQDGIDAIEDVIYHVETYDVTTIRAGTPMFLMSRKIKSLGVKMVLSGEGSDEIFAGYLYFHKAPNKEELHQETCSKIKALHKYDCLRANKSTYAWGLEARVPFLDKKFIDVAMGIDPENKMIKRDEGRIEKWVLRKAFDDEENPYLPKHILYRQKEQFSDGVGYGWIDGLKDHAAKHVTDKMMLNASNIYPFNTPNTKEAYYYRMIFERFFPQNSARLSVPGGASIACSTEKAIEWDAAWSNNLDPSGRAALGVHDSAYDDQLNKSVSKGVEPEKIIPKMEVSPLGVAILS

SEQ ID NO: 7194 - protein, 421 aa, Peptoniphilus asaccharolyticus
MTDTLNPLVAAQEKVRIACEKLGCDPAVYELLKEPQRVIEISIPVKMDDGTVKVFKGWRSAHSSAVGPSKGGVRFHPNVNMDEVKALSLWMTFKGGALGLPYGGGKGGICVDPAELSERELEQLSRGWVRGLYKYLGDRIDIPAPDVNTNGQIMSWFVDEYVKLNGERMDIGTFTGKPVAFGGSEGRNEATGFGVAVVVRESAKRFGIKMEDAKIAVQGFGNVGTFTVKNIERQGGKVCAIAEWDRNEGNYALYNENGIDFKELLAYKEANKTLIGFPGAERITDEEFWTKEYDIIVPAALENVITGERAKTINAKLVCEAANGPTTPEGDKVLTERGINLTPDILTNSGGVLVSYYEWVQNQYGYYWTEAEVEEKQEADMMKAIKGVFAVADEYNVTLREAVYMYAIKSIDVAMKLRGWY

SEQ ID NO: 7195 - protein, 189 aa, Zea mays
  misc_feature (16)..(16): Xaa can be any naturally occurring amino acid
  misc_feature (57)..(57): Xaa can be any naturally occurring amino acid
MRPLDEKETTQVFEKXLFKFTGPNLKHLLERPAVEGPDAEPGRYCLRLHRNRVYYAXEALVRRATAVSRPRLAGVGTPIGKFTHHGAFHLTVHALDLLAAHARRRVWLKPDTERSFLFGNSVPKSSLARITENTKAGDGVVVMSMADVPLGFGIAARSAQDCRKADTNAVVVLHQSDAGEYLRKEEELM

SEQ ID NO: 7196 - protein, 336 aa, Neisseria gonorrhoeae FA 1090
MLPFLPEPSLSYTQQNRTAVLLLNLGTPDAPTAQAVRPYLKSFLTDRRIVELPKWLWYPILHGLVLTFRPKKSAHAYEKIWFKEGSPLEVYTARQAAALAERMPDLIVRHAMTYGNPSIADVLAELKSQGVGRLLAIPLYPQYAASSSGAAVDKVCEQLLLQRNQMSVRTISRFYDDAGYIDAMKNHILRYWAEHGRGKKLMLSFHGVPQKHYDLGDPYPDECRHTAKLLAEALELTEDEYTVSFQSQFGRAKWVTPSTQDLFGKLPKQGVTELDVFCPGFLADCLETMEEIALMGREQFYEAGGKNYRYIPCLNDNPDWIDALVALAEENLGGWR

SEQ ID NO: 7197 - protein, 257 aa, Pseudomonas putida
MQLKDAQLFRQQAYINGEWLDADNGQTIKVTNPATGEVIGTVPKMGTAETRRAIEAADKALPAWRALTAKERSAKLRRWFELMIENQDDLARLMTTEQGKPLAEAKGEIAYAASFIEWFAEEAKRVYGDTIPGHQPDKRLIVIKQPIGVTAAITPWNFPAAMITRKAGPALAAGCTMVLKPASQTPYSALALVELAHRAGIPAGVLSVVTGSAGEVGGELTGNSLVRKLSFTGSTEIGRQLMEECAKDIKKVSLELG

SEQ ID NO: 7198 - protein, 247 aa, Yarrowia lipolytica CLIB122
MPKLILLRHGQSDWNEKNLFTGWVDVKLSELGHTEAKRAGTLLKESGLKPQILYTSELSRAIQTANIALDEADRLWIPTKRSWRLNERHYGALQGKDKAATLAEYGPEQFQLWRRSFDVPPPPIADDDKWSQYNDERYQDIPKDILPKTESLKLVIDRLLPYYNSDIVPDLKAGKTVLIAAHGNSLRALVKHLDGISDDDIAALNIPTGIPLVYDLDDNLKPTKAAEYLDPEAAAAGAAAVANQGKK

SEQ ID NO: 7199 - protein, 448 aa, Streptococcus suis
MSNAKAYIQASFEAVKARNPHETEFLQAVEELFSTLEPVFEAHPEYIEENILARIVEPERIISFRVPWTDKDGNVQVNRGYRVQFNSAVGPYKGGLRFHPTVNQSILKFLGFEQIFKNVLTGLPIGGGKGGSDFDPKGKTDAEIMRFCQSFMTELQKHIGPSLDVPAGDIGVGGREIGYMYGQYKRLRQFDAGVLTGKPLGFGGSLIRPEATGYGLVYFTDNMLAANGKSFKDQTVLISGSGNVAQYAVQKATELGAKVISVSDSNGYIIDETGIDFDLLVDIKEKRRARLTEYAAEKSTAKYFKGSVWNYDGKADIALPCATQNEINGKQAAALVKNGVYCVAEGANMPSDLDAIKVYKENGVLYGLAKAANAGGVAVSALEMSQNSLRLSWTREEVDGRLKDIMANIFNTAKETAEKYDLGTDYLAGANIAAFEQIADSMIAQGLV

SEQ ID NO: 7200 - protein, 496 aa, Pastinaca sativa
MIGVWCMLLAYTLVSIGRIRAKATRKLPPGPFPLPIIGNIHKLGKHPHKSLANLAQVYGPIMRLKLGHMTTVVISSSTTARQVLRKQDIAFSNRALPNAVRALDHNKYSAVWLPVGSQWRGLRKIMSMNLFTANKLDANQHLRSQKVHDLIRYCEKCSQSGEAVDIGGAAFLTSLNLMSNTIFSKDMIDSYENSEAKVFRDLVWNIMVEIGKPNLVDYFPLLQWMDPQGIKRRLAYNFDTLIKLFDVMVDERLELNGPQNSRDVLDELLKLVNTDEIDKSHIQHMFLDLFGAGTDTSSSTVEWAMSEILRKPATVLVKAKAELDQVIGNGKIVEEADISKLDYLRCIVKETLRLHPPAPLLVPRQVQEEVELCGYTVPKNSQVLVNAWAIGRDPMLWENPLSFQPERFVDSEIDINGHGYELIPFGAGRRICPGMPLAMRMVPIMLGSLLNCFDWKLQGGIAPEDLNMEDKFGLTLAKLHPLRVVPTSRPTHLFAF

SEQ ID NO: 7201 - protein, 105 aa, Mycoplasma gallisepticum R
MNLRIMKHITNKAELDQLLSTNKKVVVDFYANWCGPCKILGPIFEEVAQDKKDWTFVKVDVDQANEISSEYEIRSIPTVIFFQDGKMADKRIGFIPKNELKELLK

SEQ ID NO: 7202 - protein, 112 aa, Synechococcus sp. WH 7805
MKKVEAIIRPFKLEDVKLALVNAGIVGMTVSEVRGFGRQKGQVERYRGSEFTVEFLQKLKVEVVVDDARVDTVVTAIAEAAKTGEIGDGKIFISSVETVVRIRTGDRDGAAL

SEQ ID NO: 7203 - protein, 487 aa, Oceanobacter sp. RED65
MSQPVYQSFVNGEFLGNANGETFDVIYPATGEVIYKVEQADDNVMAKAVESAIAGQKQWAAMTGIERSRILLKAVQLLRERNDELAEFEVKDTGKPWQEAVEVDVVTGADAIEFFAGLAPSIEGNQQDLGGDFYYTRREPLGVCAGIGAWNYPIQIACWKSAPALAAGNSMIFKPSEETPMGAIQLAKIFIEAGVPKGVFNVIQGDYRVGQMLTSHPDIAKVSFTGEVGTGKKVMADSASSLKEVTMELGGKSPLIVFDDADIEQAVSAAMLGNFYTQGEICTNGTRVFVHRSILNEFLEQLAERTKNNIVAGDPMNPETNFGALISEKHHKLVLDYIEKGKAENATLLAGGEAMKIEGFENGYFVAPTIFTDCTDDMTIVKEEIFGPVMSVLVFDDEEEVIKRANDTHLGLAAGVFTQNIQRAHRVIHQIEAGICWINAYGASPAEMPVGGYKQSGIGRENGTITLNHYTQVKSVYMGMNKIESPF

SEQ ID NO: 7204 - protein, 590 aa, Pseudomonas syringae pv. tagetis
MCGLAGELRFDHQPADLAAVERITHELAPRGPDAWGFHSQGPVALGHRRLKIMDLSDGSAQPMIDSHLGLSMAFNGAIYNFPELRAELESLGYQFHSGGDTEVLLKGYHAWGADMLPKLNGMFAFAIWERDSKQLFIARDRLGVKPLYLSKTDKRLRFASSLPALLKGGDISGMLDPVALNHYLNFHAVVPAPRTLLAGVEKLPPASWMRIDASGKVEQKVWWTLPYGPHDDEKNLTLEDWRDRVLDSTREAVAIRQRAAVDVGVLLSGGVDSSMLVGLLREVGVEDLSTFSIGFQDAGGERGDEFQYSDLIAKHYGTRHHQLRIQESEIIEQLPAAFRAMSEPMVSHDCIAFYLLSREVSKHCKVVQSGQGADELFAGYHWYPQVDGASDPVAAYRDAFVDRSYAEYAETVQPKWRTPNDAAGDFVRDHFAQPGASAAVDKALRLDSTVMLVDDPVKRVDNMTMAWGLEARTPFLDYRLVELSARIPGKFKLPDGGKQVLKEAARLVIPSEVIDRKKGYFPVPGLKHLQGDTLNWVRELLTDSSQDRGLFNPAMVDKLLTNPEGQLTPLRGSKLWQLAALNLWLSEQGL

SEQ ID NO: 7205 - protein, 216 aa, Mycoplasma gallisepticum R
MMSDLLFSILPMLNDYDQNKLASYKQLGLNKIHYDVMDEFVNNKAFDERYVDNLKNLGYQINVHLMVNKVANHILVYAKTRCDQISFHVEPLANNKQLINKYLAYIKTNNKKAGLAFKFNTDVNDYLDQIKLVDYVTLMSVEPGAGGQAFNPLVYRNIAKLIKFNPKLEIEIDGGINLEKAIELKGLVSGFVSGSYFYQLSDQSKLEMLEKIRAFS

SEQ ID NO: 7206 - protein, 300 aa, Mycobacterium sp. KMS
MTKWTTADIPSQSGRTAVVTGANTGLGLETAKALAARGAHVVLAVRDTEKGKRAADEITAAHPEAAVGVQSLDLGSLRSVRTAAEALKADFPRIDLLINNAGVMYPPKQTTEDGFELTFGTNHLGHFALTGLLLENVLAAPNSRVVTVSSQGHRIRAAIHFDDLQWERSYSRVGAYGQSKLSNLLFTYELQRRLDTRDAIAVAAHPGVSNTELMRHLHLPPVFNPLVGVLTQSPTMGALPTLRAATDPTVRGGQYFGPSGLGEIRGYPELVTSSAQSRDVDLARRLWTVSEELTGVAFPL

SEQ ID NO: 7207 - protein, 411 aa, Coxiella burnetii RSA 493
MSFEVLGLSAELLRAIREQGYVEPTPVQRQAIPVILQARDVMVTAQTGTGKTAGFTLPLLQRLFVSRPPLQRSAKPVIRALILTPTRELAVQVFECVRAYGKYLPLKATVVHGGVSIKPQINHLRRGVDILVATPGRLLDLVNQGVLNLSRVEFFVLDEADRMLDMGFLPDIRRILKLLPESRQNLLFSATFSKEIKELTDKLLHSPALIEVARRNTAAARITHVVHPVDRQRKRELLSFMIGSKNWRQVLVFTRTKHGANRLSQQLESDGLSSAAIHGNKSQAARMRALTQFKQGKIRVLVATDVAARGLDIDKLPHVINFELPDAAKDYVHRVGRTGRASNDGVAISLVSGDEVRLLRDIEKLLQSKMPQEVIPGYEPSPFTKAAPVQAVRRARSNQRGKNNGKRARWG

SEQ ID NO: 7208 - protein, 205 aa, Oryza sativa
  misc_feature (191)..(191): Xaa can be any naturally occurring amino acid
LNVAIRHNKSISRLSSLSFHTSSLVNSAAANTQQQQQSGPGHFGFYRQVELFYDRAAKILEEKLVADMTKTRLPDEEKLKKVRGILKIIKPCNHVLEIRFPIRRDNGELHMIEAYRAQHSQHRTPCKGGIRYSLDVNLDEVKALAALMTYKCACVDVPFGGGKAGVKINPKDWSEAELERITRRLTVELAXKGFIGPGIDVPAPD

SEQ ID NO: 7209 - protein, 388 aa, Oryza sativa
  misc_feature (173)..(173): Xaa can be any naturally occurring amino acid
MLPQQQQQQKQQAAALMPPSMYAMPPPPPLHHHHHPLLAAAPPQQQGKPILTGNLPPGFDTSTCRSVYVGNVHVQVTEALLREVFQSTGLVEGCKLIRKEKSSYGFVDYYDRRSAALSILTLNGKQIPEVTDSALFAFFSGYSSCSDARVMWDQKTGRSRGYGFVSFRNQQVXGQWLGSRQIRCNWATKGASNGEQQTSDSKNVADLTNNLTEDGKEKANEDAPENNPQYRTVYVGNLAHEVTQDVLHRLFHALGAGAIEEVRIQLGKGFGFVRYSNHAEAALAIQMGNGRILGGKPIKCSWGNKPTPPGTTSAPLPPPAAPSVTAADLLEYQRSLALSKMVSSQALMQAQAQQHLKQAMGMGAGVSQAMYDASFPNVGPSQQQLMYY

SEQ ID NO: 7210 - protein, 365 aa, Daucus carota
MALTIKHQCTPLALLFTIGVLASLAAARSLNEASMTETHDQWMARYGRVYKTANEKNRRSTIFQENLKYIQTFNKANNKPYKLGVNEFADLTNEEFTTSRNKFKSHVCATVTNVFRYENVTAVPATMDWRKKGAVTPIKNQGQCGCCWAFSAVAAMEGITQLKTGKLISLSEQELVDCDTNGEDQGCEGGLMDYAFDFIQQNHGLSTETNYPYSGTDGTCNANKEANHAATITGHEDVPANSESALLKAVANQPISVAIDASGSDFQFYSSGVFTGECGTELDHGVTAVGYGTAADGTKYWLVKNSWGTSWGEEGYIQMQRGVAAAEGLCGIAMQASYPTAFFPRSCGLWGGSPVKCSHDTTMAP

SEQ ID NO: 7211 - protein, 415 aa, Coleochaete orbicularis
MERLLHMTFRNKKIHLNVGTIGHFSHGKTTLTAAITAVLAGIGYTQPKQNDAIDSTSEEKARNMSIYVHHVEYETAARHYSHLDCPGHVNYINNMITGVSQMDGAILVVSAVDGPMAQTKEHILLAKLLGISSILVFINKEDELDDQEVLPMLIQNMRQILIYYGFPGHTSPILCGSALLALEAMNENPNFNRGKNKWVDKISSLIDHLDLYLPTPRRKLNKPFLMPIERVILIPSFGLVGTGTIEKGHINIGESVEIVGFKDTQHSKVISLKMFNKTLEQAIAGDDIGIFLEGTNKNNFQKGMVIAKPNTIQSWNHFEAQIYILRREEGGRRSPFFQGYCPQFYFRTIQITGRMESFEYEIGGKTWMVMPGEKIKAIIQLIFPIALKKKMRFVIREGGFTIGVGIILELIKIKN

SEQ ID NO: 7212 - protein, 631 aa, Magnetospirillum magnetotacticum MS-1
MCGIAGIVADRPVSPGAVEAMTGRLVHRGPDDQGIWRSDDGCAVLGHRRLSILDTSAAGHQPMERDGLVTVFNGEIYNFVEVRAELVGLGEVFHTNSDTEVLLAAYDRWGPECFARFNGMFALAILDRRRKVLVCARDRFGEKPFLFAARPGLFAFASEYKALLAMAEIGRDFDPVPLLRFAHRPATGLDDERATLFPAILQLLPGERLELDLSTLDTRIDRYWTLARDPALGALGMGEAAERFRDLLTDSIRLRLRSDVAVGSCLSGGLDSGSIIMLARRLLGDDAPYHVFTGRFPGTRADEWDYARHTSQAAGAIVHQVEPSAAGLLADLPDFLWANELPVGSASQYAQYCVFRLAKEQGVTVLLDGQGADEILGGYEQYFARYLAGLPGPERGAEEAAIRARYPGALDSPRQALSKALPPRLRHWLAQISGKGSDLLFGLSPDLAEQVAKANAPPVVPQGWSPLAAELMRDSFSTHLPVLLRYGDRNSMAHSREVRLPFCDHRIAEFALSLDPKLLMGEAQTKRLLREAVKGILPEQVRTRWNKQGFLPPQDIWFAQGLIDEAERVIEDPSFARAGYWNVSWWRCAIRRFRAGETHLGWVLWRPLMLESWRRHFLERITAQPGVEALP

SEQ ID NO: 7213 - protein, 353 aa, Bacillus halodurans C-125
MKKITLSVIPGDGVGKEIMPHALRVLDAVAEVHGGLTFEKVEYPWSCEYYLEHGEMMPEDGLVQLTESDAVFLGAVGNPQLVPDHVSLWGLLIAIRRGFQQSLNIRHAKQIRGIDPPIKHANQFDLLVVRENSEGEYSEVGGRIHQGDDEVVVQNAIFTKKATKRAIDYAFQLAATRGKRVTSATKSNGIVFSMPFWDNVFQEVGKQYPDIEQQSVHIDALTAFLVTKPAEFDVIVASNLFGDILTDVSAAIMGSIGIGPAANLNVEGTYPSMFEPVHGSAPDIVGKGMANPIGQIWTGKMMLDHFGEEELGKTLLDIVEDVTEAGIKTPDIGGRATTGEVADAIIERVKSLT

SEQ ID NO: 7214 - protein, 594 aa, Arabidopsis thaliana
MASGGGDDGLRRRGCSCTKDDFLPEESFQSMGNYLKALKETPSRFMDRIMTRSLDSDEINEMKARSGHEMKKTLTWWDLMWFGIGAVIGSGIFVLTGLEARNHSGPAVVLSYVVSGVSAMLSVFCYTEFAVEIPVAGGSFAYLRVELGDFMAFIAAGNIILEYVVGGAAVARSWTSYFATLLNHKPEDFRIIVHKLGEDYSHLDPIAVGVCAIICVLAVVGTKGSSRFNYIASIIHMVVILFVIIAGFTKADVKNYSDFTPYGVRGVFKSAAVLFFAYIGFDAVSTMAEETKNPGRDIPIGLVGSMVVTTVCYCLMAVTLCLMQPYQQIDPDAPFSVAFSAVGWDWAKYIVAFGALKGMTTVLLVGAIGQARYMTHIARAHMMPPWLAQVNAKTGTPINATVVMLAATALIAFFTKLKILADLLSVSTLFIFMFVAVALLVRRYYVTGETSTRDRNKFLVFLGLILASSTATAVYWALEEEGWIGYCITVPIWFLSTVAMKFLVPQARAPKIWGVPLVPWLPSASIAINIFLLGSIDTKSFVRFAIWTGILLIYYVLFGLHATYDTAKATLKEKQALQKAEEGGVVADNSCSAT

SEQ ID NO: 7215 - protein, 515 aa, Vibrio vulnificus CMCP6
MNDQVIIFDTTLRDGEQALSASLTVKEKLQIAYALERLGVDVIEAGFPVSSPGDFESVQTIARNIKNSRVCALSRAVEKDIDAAAEALKVAEAFRIHTFISTSTIHVQDKLRRSYDDVVEMGVRAVKHARKYTDDVEFSCEDAGRTPIDNLCRMVEAAINAGARTINIPDTVGYTVPSEFGGIIQTLFNRVPNIDKAIISVHCHDDLGMSVANSIAAVQAGARQVEGTINGIGERAGNCSLEEIAMIIKTRQELLGVRTGINHEEIHRTSKLVSQLCNMPIQANKAIVGANAFSHSSGIHQDGMLKNKNTYEIMTPESIGLKNQALNLTSRSGRAAVKSHMDAMGYKEDEYNLDALYQDFLKLADRKGQVFDYDLEALMHFSNLREEDDYYKLNYLSVQSGSVMATTSIKLLCGDEEKCEAAVGNGPVDALYQCIYRLTGYDIVLDKFDLTAKGEGEDGLGQADIIANYKGRKYHGTGISTDIVEASGQALLHVINSIHRADEIAEMKQKKIATV

SEQ ID NO: 7216 - protein, 323 aa, Yersinia enterocolitica (type 0:8)
MKQSKLGVLMVNLEHRMPPTPQAVKRYLAEFLSVRRVVDTSPWLWWPLLRGVILPIRSPRVAKLYQSVWMDEGSPLLVYSRRQQKALAERMPEIPVELGMSYGSPNLPDAIDKLLAQGVTKLVVLPLYPQYSWSTSAAVWDAVARILASYRRLPSISFIRDYAEHPAYISALKQSVENSFVQHGKPDRLVLSFHGIPKPYAQLGDDYPQRCEDTSRALRAEIALPAETKSRVHIQSRFGREPWLTPYTDETLKSLPSQGVKHIQLICPGFSADCLETLEEIKEQNREIFLHAGGEKFEYIPALNDDKGHIDLLEQLVRDHLSC

SEQ ID NO: 7217 - protein, 372 aa, Pyrococcus furiosus DSM 3638
MLKLVENVVGRVSEEENKVPEVQVPQSSIDEELKKIVEQIKARIYVVGVGGAGCNTVNRMMEVGVTGAKIIAVNTDAQDLLKVKAHQKILIGKELTRGLGAGNDPKIGEEAAKESERELRDALEGADMVFITCGLGGGTGTGAAPVIAEIARKMGALTVSVVTLPFTMEGIRRAKNAEYGLKRLVKYSDTVIVIPNDKLLEVAPKLPIQMAFKVADEILVQAVKGITELITKPGLVNLDFNDVRAVMKDGGVAMIGIGESDSEKRALEAAEQALNSPLLDVDISGATGALIHISGADVKLEEAQQIIEYVTRNVDPKAQVIWGIQLEPELEKTIRVMVVITGVTSRYITPEEETPLETPEESPSIEISIPEL

SEQ ID NO: 7218 - protein, 117 aa, Glycine max
MASMKVTWVVVIMCMAVVGAPMMAQAMTCNDVTVNMAQCLSYLMQGGTPSTLCCSGVKNILGSAVTTVDKQTVCNCLKADAARYNINDQYAQALPGFCKVNVPYKISRSTNCASIRF

SEQ ID NO: 7219 - protein, 112 aa, Alkalilimnicola ehrlichei MLHE-1
MKLVTAIIKPFKLDDVREALSEIGVQGITVTEVKGFGRQKGHTELYRGAEYVVDFLPKMKIEVALADDLVDRACEAVAKAANSGKIGDGKIFVFPLEQAIRIRTGETGSDAL

SEQ ID NO: 7220 - protein, 456 aa, Oryza sativa (japonica cultivar-group)
MSATEVMEECTETARERREEERLRNVNLDDWLPITSSRTAKWYYSAFHNVTAMVGAGVLGLPFAMSQLGWPTGVAAIASSFAITLYTLWQLVELHEPAPGGGKRFDRYHELGQAAFGRRLGVCLIVPLQLIVQVGTDIVYMVTGGQTLKKFVELACDGRCADIRLTFYIMMFASAQFVLSQCPNFNSISAVSAAAAAMSLCYSMIAFFASVLKAHPAAAAAVDYGFKATTAAGRVFGAFNALGAVSFAFAGHNVVLEIQATIPSTPERPSKRPMWRGVVVAYAVVALCYFTVAFGGYHAFGNAVAPNVLISLEKPRWLVAAANLMVVVHVIGAYQVYAMPVFDMIETVLAKKLHLRPGLPLRVTARSAYVALTMFIGITFPFFDGLLGFFGGFGFAPTTYFIPCIIWLIMRKPAKYSLSWLMNWCFIIIGMLLMLVSPIGGLRQIILDASKYKFYS

SEQ ID NO: 7221 - protein, 117 aa, Vigna radiata
MASIKCACVVALLCLVVATAPTAHAITCGQVASSLTSCIPFITKGGIVPPSCCAGVKSLNAAAKTTPDRQAVCNCLKSEAGRIGGFNANNAAILPGKCGVSIPYKISTSTNCASIKF

SEQ ID NO: 7222 - protein, 375 aa, Methanosarcina barkeri str. fusaro
MTQYKIPVLPGDGIGPEIIAEGRKVIDAAGERFGFDVEWIEYPQGADHYLETGELISEDTLKELSGYPAIYLGSIGDPRIAPGVLEKGILLTARFYFDEYVNLRPIKLLDGVWTPLKDKTSKDIDFVVVRENTEDFYVGVGGRAKKGASKDLLEVKRTLYSAKFGLDIETDSEEIGYQIGLISKEGTDRVIEYAFDLAENRRKHVSSVDKANVLSDIYGFWREEFNAISAKHPGVTTDFNFVDAVTMWFVKNPEWFDVVVTPNMFGDIITDLGAMIQGGLGLAPGGNINPTGTSMFEPIHGSAPKYKGQNKVNPIATIWAGAMLIEHLGEKEAADTIVNAIQKNILDSKVKTYDMGGKSTTSDVGDDIARIIKGE

SEQ ID NO: 7223 - protein, 416 aa, Alkalilimnicola ehrlichei MLHE-1
MEEIREISYALDTFYFLVSGALVMWMAAGFTMLEAGLVRSKNTTEILTKNISLYAIACIMYMVVGYNIMYGDGLSSVIPSISFILGASDNSAAAVAAGEASYYSDVSDFFFQVVFVATAMSIISGAVAERMKLWSFLLFAVVLTGFVYPIQGYWSWGEGFLDQLGYADYAGSGIVHMFGASAALAAVLVLGPRKGKYGPNGEVRPIPGANMPLATLGVFILWLGWFGFNGGSELKVSDVDSANAVALVFANTNLAAAGGVVAALVTARLMFGKADLTMALNGAIAGLVSITAGPDAPSLLLATFIGAVGGVLVVLSIVGLDKLKIDDPVGAISAHGTAGIWGVMAVLLWMDDASFFAQIAGILTIFAWTFGVSLVLWLILKAVMGIRVTEEEEQQGLDITECGIEAYPDFVQQSKT

SEQ ID NO: 7224 - protein, 487 aa, Sinorhizobium meliloti
MRAQPKASHFIDGEYVEDAAGTVIESIYPATGEIIARLHAATPGIVEKAIAAAKRAQPEWAAMSPTARGRILKRAAELMRQRNRELSELETLDTGKPIQETIVADPTSGADSFEFFGGVAPAALNGDYIPLGGDFAYTKRVPLGVCVGIGAWNYPQQIACWKGAPALVAGNAMVFKPSENTPLGALKIAEILIEAGLPKGLFNVIQGDRATGPLLVNHPDVAKVSLTGSVPTGKKVAGAAAAELKHVTMELGGKSPLIVFDDADLESAIGGAMLGNFYSTGQVCSNGTRVFVQRKIKEPFLARLKERTEAIVIGDPLDEATQLGPMVSAAQRDKVFSYIGKGKAEGARLVTGGGIPNNVSGEGTYIQPTVFADVTDGMTIAREEIFGPVMCVLDFDDEVEVIARANATEFGLSAGVFTADLTRAHRVADRLEAGTLWINTYNLCPVEIPFGGSKQSGFGRENSVAALNHYTELKTVYVGMGPVEAPY

SEQ ID NO: 7225 - protein, 455 aa, Methanothermobacter thermautotrophicus str. Delta H
MEMIIDGEGVSGEKIFTVRNPFNGDEVDRVPLAGRSDVERAIRAAHRARDAMADLSARKISEKLYDVADELKTELDEFARLITLESGKPIRFSRDEVKRSVETARLSAEEAGRLYGESIPMDAGIGGKGLTGFTVRIPLGVVAAITPFNYPLNLAIHKVGPALAAGNTTILKPSLEAPLSALKLAWILSEHFPAGAVNAVTGRGSEVGDVIIDSPLVDKITFTGSVEVGRYISARASMKKITLELGGNDPLIVMDDADIDSAVEAAVRGSYLYSGQVCIAVKRMIVHEDVADEFADKLVNITGSLRAGDPMDVRTDVGPLINEDAAIEVERVIGAAVEDGAELLCGGSRRGNFVEPTVLDHVVPGMEVIERETFGPVSPIIRFNGADEAIRIANGTCYALQAGVFTENIRTALRMAREIEAGTVLVNKQSTFRVDHMPFGDSGAVEWVRRVSSTP

SEQ ID NO: 7226 - protein, 451 aa, Prochlorococcus marinus str. MIT 9313
MSDATSHEIDHFMKGLMKRNPGEPEFHQAVHEVVETLIPFILSNRVYKDAQILERMTEPDRVVIFRVCWEDDSGNIRTNRAWRVQFNNSIGPYKGGIRFHPNVTLSVLKFLGFEQTFKNSLTGLPMGGGKGGSNFNPKGKSDREIMRFCQSLMIELHRHIGEDTDVPAGDIGVGSREISYMFGQYKRLENRFSGILTGKGLSFGGSLVRTEATGYGCAYFCENMLNHIEDSLVDKICSISGSGNVALYAVEKAIELGAKVVTLSDSDGFVHVPNGINLEMLAFIKELKTVRRGRIHEFANHYKGVDFYAGKRPWNVPCDIAFPCATQNEINRADSQELINNGVKAVVEGANMPTNLDGIHEFRHAKVILAPAKAANAGGVAVSGLEQSQNALRLSWSREEVDQRLKSIMLEIHSKCVQHSHKYEDYTDYITGANIAGFTKVADAMLAYGIV

SEQ ID NO: 7227 - protein, 260 aa, Clostridium beijerinckii
MICNEKLDNEIYIVDTTLRDGEQCAGKAFSIDEKIEIAKYMDKMKIYQIEAGIPAMGDLEKECIRRILEIRKNSLISAWNRMNKDDIFHSMECKPDIIHISVPTSDIQIYSNLGKDKKWVEENLKECVFLARDKGYEVTIGFEDASRADISYLINLCEIIMAMGVKRARYADTVGISMPSLIKNSDKTLINNTGIEIEIHAHNDFGMAIPISLEAVKSGAKYVDCTLDGIGERTGNCNLQEFLKISNAFLERNKKIEGLI

SEQ ID NO: 7228 - protein, 342 aa, Corynebacterium diphtheriae
MRIATLTSGGDCPGLNAVIRGIVRTCSEYGSTVVGYQDGWVGLMEDKRIQLYDDENIDRILLRGGTILGTGRLHPDKFKSGLDQIKANLEDAGIDALIPIGGEGTLKGAKWLSDNGIPVVGVPKTIDNDVNGTDYTFGFDTAVSVATDAIDRLHTTAESHNRVMIVEVMGRHVGWIALHAGMAGGAHYTVIPEQPFDIAEICKAMERRFQMGEKYGIIVVAEGALPKEGTMDFVEGGVDQFGHQTFNGIGQVIGEEIKKRLGHDVRTTVLGHIQRGGTPTSYDRVLATRYGVHAARACHNGDYGKMVALHGEHIDLIPLEDAVDTLKTVPEGRYRTARALFG

SEQ ID NO: 7229 - protein, 383 aa, Triticum aestivum
MAMERELMETFEAAKKAADAAAEEADGSSPEAERCLDALRRLREFRVNTDVLVSTQVGKRLRYLTKHPNSDIQAVAADLFGYWKKVVIEETGKKNGTPANGKSNNSAAKAEKPQPMKVERKSANVKVEKNSTSTTVKTEKNATVKTEKDSMSASVKIEKTVNSDSKVQHVKVEKVSKESSRTTDTKKPSSVPSGPPKLTSLVRCNDAARDKYRELLVDAFVKVSKETSEDDREEIRDLLDQVNACDPYRVAVTVESALFERIGRSTGTHKVKYRSILFNLKADNNPDFRRRVLLGEVRPGSLVDMPADEMASDARKLENQQIKEKALFDCERASAPKASTDQFKCGRCGQRKTTYYQLQTRSADEPMTTFVTCVNCNNHWKFC

SEQ ID NO: 7230 - protein, 491 aa, Arabidopsis thaliana
  misc_feature (71)..(71): Xaa can be any naturally occurring amino acid
  misc_feature (114)..(114): Xaa can be any naturally occurring amino acid
  misc_feature (157)..(157): Xaa can be any naturally occurring amino acid
SLPLSRLDYILEFLKRGESQSFFSVFVSLAIYIQTLCEQNTNQHNTHNFVFFKFCFRDQWTGTGLFAEILXGEVYKYYADGEWKTSSSGKSVAIINPATRKTQYKVQACTARKXWTSYCAEEGVRILGGAKILLSDSFPGHDRTKYNPNAQQPLGGXLAIPEINYPVNLAVSEIAPALIAGNSLVLKPPTQGAVSCLHMVHCFHLAGFPKGLISCITGKGSEIGDFLTMHPAVNCISFTGGDTGISISKKAGMIPLQMELGGKDACIVLDDADLDLVASNIIKGGFSYSGQRCTAVKVVLVMESVADELVEKVKAKVAKLTVGPPEENSDITAVVSESSANFIEGLVMDAKEKGATFCQEYKREGNLIWPLLLDNVRPDMRIAWEEPFGPVVPVLRINSVEEGINHCNASNFGLQGCVFTKDINKAILISDAMETGTVQINSAPARGPDHFPFQGLKDSGIGSQGVTNSINLMTKVKTTVINLPTPSYSMG

SEQ ID NO: 7231 - protein, 549 aa, Porphyromonas gingivalis W83
MAKSALHLARMSYQPKMPASLQGAVKIIEGKATEAVSDKEEIAAIFPRTYGLPLISFAPGGERTEYPPTNVGVILSGGQAPGGHNVIAGLFDEMKLLNPDSRLFGFLMGPDGLIEHKYRELTAEVIDEYRNTGGFDMIGSGRTKLDKPEQFEAGLEILRELDIKALVIIGGDDSNTNACILAEYYASIDAGIQVIGCPKTIDGDLKNKQIETSFGFDTAAKVYSELIGNIQRDCNSARKYWHFIKLMGRSASHITLECALQTHPNICIVSEEVEANNYYLDDVVTYIAETVVRRSEAGMNFGTVLIPEGLIEFLPAMKRLIKELNEFLSQNDAEFKLIKRSAQRQYIKNKLSPENSRLYDSLPVDVARQLIADRDPHGNVQVSLIATEKLLADMTAQKLAEWAEEGRFQGRFSTLTHFFGYEGRCAMPSNFDANYCYCLGRAASILIAAGKTGYMAAIKNTADPVSEWEAGGVPMTMMMNMERRSGKMKPVIRKALVDMDGEPYRALREMRREWALSTEYVYPGPIQFFGPEHVCDSPTMTLRLEKNDR

SEQ ID NO: 7232 - protein, 116 aa, uncultured epsilon proteobacterium
WTMVAGGGASVVYADTIADMAGGVEDLANYGEYSGGPTTDETRFYTETVLDLMTREKDPKGRDKILIIGGAIANFTDVAKTFTGIIQAFEKYAVKMKDVGTRIYVRRGGPNYKGEF

SEQ ID NO: 7233 - protein, 282 aa, Haemophilus influenzae 86-028NP
MAAKIISGTELSKQIKANLADKITHYIEQGKRAPGLAVILVGADPASQIYVGNKRKSCEEVGILSKSYDLPETTTQNELLAIIDQLNADKNIDGILVQLPLPKQINAEAIIERIDPKKDVDGFHPYNVGRLCQRIPTLRACTPYGVMKLLETTGIDLHGKHAVIVGASNIVGRPMSLELLLAGATVTVTHRFTKNLENHVRQADILVVAVGKPNLISGDWIKESAVVIDVGINRVDGKLVGDVEFDKAAEKAAYITPVPGGVGPMTVAMLMSNTLYAYEHNK

SEQ ID NO: 7234 - protein, 116 aa, uncultured epsilon proteobacterium
WTMVAGGGASVVYADTIADMAGGVEDLANYGEYSGGPTTDETRFYTETVLDLMTREKDPKGRDKILIIGGAIANFTDVAKTFTGIIQAFEKYADKMKDVGTRIYVRRGGPNYKGEF

SEQ ID NO: 7235 - protein, 853 aa, Ipomoea trifida
MRNAAEDHRYPLWFFLISQIFIGNLAVALAVDSITPTQPLAGNRTLVSSDGLFELGFFTPNGSDQSYVGIWYKEIEPKTVVWVGNRDGASRGSAGILKIGEDGNIHLVDGGGNFIWSPTNQSAARNTVAQLLDSGNFVLRREDDENPENYLWQSFDYPTDTLLPGMKLGWDSKTGLNRYISAWKSLNDPGEGPISFKLDINGLPEIFLRNRDKIVYRSGPWNGVRFSGVPEMKPTATITFSFVMTKNERYYSFELHNKTLYSRLLVTRNGNLERYAWIPTSKIWSKFWYAPKDQCDSYKECGTFGFCDTNMSPVCQCLVGFRPKSPQAWDLRDGSDGCVRYHELECRKDGFLTMNFMKLPDTSSSFVDTTMNLDECMKMCKNNCSCTAYTNSNISNGGSGCVIWTTELLDAAVRGGRRWPSCLHPRSASDVAQGGDSGDASGRTKRIIIACGIAVGVGILLFALSALFILKRRQSKRALGKNTELRGFRDRSQDLLMNAAVIPSKREYSGETMTDEFELPLFDFSTIVVATDNFADVNKLGQGGFGCVYKGMVEGEEIAVKRLSKNSGQGVEEFKNELRLIARLQHRNLVRLLGCCVDMEEKILIYEYMENKSLDSTLFNKQRSSLLNWQTRFNIICGIARGLLYLHQDSRFRIIHRDLKASNILLDKEMNPKISDFGMARIFGGDETDANNTKRVVGTYGYMSPEYAMDGLFSVKSDVFSFGVLVLEIVTGKKNRGFYNQNNQQNLLGHAWRLWRERRGSELLDSAIGESYSLCEVMRCIQVGLLCVQEQAEDRPNMATVVLMLGSESATLPQPKHPGFCLGSRPADMDSSTSNCDESCTVNQVTVTMLDGR

SEQ ID NO: 7236 - protein, 117 aa, uncultured epsilon proteobacterium
WTMVAGGGASVVYADTIADMAGGVEDLANYGEYSGGPTTDETRFYTETVLDLMTREKDPKGRDKILIIGGAIANFTDVAKTFTGIIQAFEKYADKMKDVGTRIYVRRGGPNYKGEFQ

SEQ ID NO: 7237 - protein, 310 aa, Arabidopsis thaliana
MEEEVLSRVPVKSLGKLRLTCKKWNTITKSESFLKKKQRNGIEVVMMMDYRVSLMSVDLLSPSIDPIGNLNADGIKISKIFHCQGYIELPRNSIYHKCVKYALGYEKKNHKILRFVNEYLETSRDRIRELQIYSLYSNSWEVIDDFTPDWYILYKHSGVSLKGNTYWYALEEIPFHAVFGDTVTLASVREEQLAVLFHRASVVEIWITNKIEPNAVSWSNLLFAVDMKPVAGFWFPNVGRSFFVDEEKKVAVVLDKEIIDKCHLPARNIAYIIGNNGILSKVDLGESRDKFCYPLVCSYVPSSVQIPNTP

SEQ ID NO: 7238 - protein, 99 aa, Pseudomonas putida
MKLVTAIIKPFKLDDVRESLSEIGVQGITVTEVKGFGRQKGHTELYRGAEYVVDFLPKVKIDVAIDDKDLDRVIEAITKAANTGKIGDGKIFVVNLEQA

SEQ ID NO: 7239 - protein, 256 aa, Burkholderia xenovorans LB400
MESIGFSREGHIAHVRLNRPKSLNAINEEMDRGLYEAWNEINNDPDIWVAVLSAEGERAFCVGADVSGGAERPSRMALGGGLTGVGGPLVTLRKPLVAAVQGYALGGGFELAMCADVIVAATTAVFSMPETKVGIIGESGIMHRAIRQLPYRVAMAMILTGDRLPARDALAYGLVNEVVEPQVLAEAALRWAEKIAAASPLAVQAAKSAVLQRLDWPLEVALSTRFEPIEQYATSEDRVEGRKAFAEKRAPIWRGR

SEQ ID NO: 7240 - protein, 125 aa, Oryza sativa
  misc_feature (15)..(15): Xaa can be any naturally occurring amino acid
PGDPQACPTVIDQLXEMLKETGIPVQVIFSSGKDVDLLPQRSNKGNATQYLQQHLAMEPSQTLVCGDSGNDIGLFETSARGVIVRNAQPELLHWYDQWGDSRHYRAQSSHAGAILEAIAHFDFLS

SEQ ID NO: 7241 - protein, 387 aa, Arabidopsis thaliana
  misc_feature (103)..(103): Xaa can be any naturally occurring amino acid
SEAANIANPPAKDSSTPDDDSNEDSEDYKPATKKAAHAAANAASSSYSSDEDSDDESEHEKPAHTYADTTASKKSSSDKSSESDEDYTEYYEETPKKKSSDVXIVDPRKSSAIQPKTPSTPAAGGSKTLFAANLSFNIERADVENFFKEAGEVVDVRFSTNRDDGSFRGFGHVEFASSEEAQKALEFHGRPLLGREIRLDIAQERGERGERPAFTPQSGNFRSGGDGGDEKKIFVKGFDASLSEDDIKNTLREHFSSCGEIKNVSVPIDRDTGNSKGIAYLEFSEGKEKALELNGSDMGGGFYLVVDEPRPRGDSSGGGGFGRGNGRFGSGGGRGRDGGRGRFGSGGGRGRDGGRGRFGSGGGRGSDRGRGRPSFTPQGKKTTFGDE

SEQ ID NO: 7242 - protein, 468 aa, Methanococcoides burtonii DSM 6242
MEVRGEYEAIIYTGDTIHNVHSASEIQFISLNDAMIGFDSLKASSPLSSSSDKFELVGDIDIYNSDEFACEFHCGNVENMSILTRFLQDTFGLEKCSDDEMFQRFDSSLKAIRGVYAIACHIGDKVFLARDLIGVKSLWYDVSSGFAFASEKKFLEMAGLHEVVELDPRHILCYDFENDIIKSYDREFLQGLAEHQGSFVEIRNGFLSLLKEAVSKRVPDEDFGVMFSAGIDSTILALLCKGFAEAKGVKCNYYTVGLSGQVPSPDIACARKLADELELELNVHEIGLDTVEEYLSTVVPLIEDATVPKTGVALTMYAACRAAKEDGINVLFAGAGADELFAGYNRFKSSESVNEDCIRDIMEMHKVNTYRDDTVAAFTGTIVRYPYLDENFVEYALAIPKEYKISDEMNKIVLRKAGEELGLPKYVVERGKKAAQYGSSFDQALKKLAKRAGFANKTDYINSFQERR

SEQ ID NO: 7243 - protein, 459 aa, Emericella nidulans
MSNLPVEPEFEQAYKELASTLENSTLFEQHPEYRRALQVVSVPERVIQFRVVWENDKGEVQINRGYRVQFNSALGPYKGGLRFHPSVNLSILKFLGFEQIFKNALTGLNMGGGKGGSDFDPKGKSDSEIRRFCTAFMTELCKHIGADTDVPAGDIGVTGREVGFLFGQYRRIRNQWEGVLTGKGGSWGGSLIRPEATGYGVVYYVQHMIKHVTGGKESFAGKRVAISGSGNVAQYAALKVIELGGSVVSLSDSKGSLIVKDESASFTPEEIALIADLKVARKQLSELATSSAFAGKFTYIPDARPWTNIPGKFEVALPSATQNEVSGEEAEHLIKSGVRYIAEGSNMGCTQAAIDIFEAHRNANPGDAIWYAPGKAANAGGVAVSGLEMAQNSARLSWTSEEVDARLKGIMEDCFKNGLETAQKFATPAKGVLPSLVTGSNIAGFTKVAEAMKDQGDWW

SEQ ID NO: 7244 - protein, 344 aa, Cytophaga hutchinsonii
MALPNKKSKTAVFLINLGTPDSPNTPDVRKYLRQFLMDRRVIDIPWLNRWLLINMIIAPFRAPKSAHEYKKLWTEQGSPLMFHGVAVKELLQQALGDEYKVVLGMRYQNPSIESAAKELEAKGYNKVIVVPLFPQYASASTGSAVEEALRVLGKWEITPHIEVISKFFDHPLFIKAFAEIGRKYLAERNWDHIIFSYHGIPERQIKKASIGDQCKLGTCCQVYGSRNEYCYRAQCYETTRLLVKELGLAEGSYSVSFQSRLGKTPWIKPYTDHNIEELGKAGKKSILFFSPSFIADCLETTVEGGEEYKLLFEEHGGKDWQLVESLNTNPTWVECLKDMVVSKS

SEQ ID NO: 7245 - protein, 363 aa, Vibrio vulnificus CMCP6
MTDKTYKIAVLPGDGIGPEVMAQAHKVLDAIEKKHAIHFEREEHDVGGIAIDNHGCPLPQSTVTACEESDAVLFGSVGGPKWEHLPPNDQPERGALLPLRKHFQLFCNLRPAQIHSGLEAFSPLRADISGRGFDIVVVRELTGGIYFGQPKGREGEGANEKAYDTEIYHRFEIERIAKIAFESARLRRKKVCSIDKANVLQSSILWREVVEELAKDYPDVELSHMYIDNATMQLIKDPAQFDVMLCSNIFGDIISDECAMITGSMGMLPSASLNESKFGLYEPAGGSAPDIAGKNIANPVAQILSAALMLRYSLGEEAAAQDIENAVSQALAAGELTADLAGDKPALSTAEMGDKIAQYILNS

SEQ ID NO: 7246 - protein, 361 aa, Daucus carota
MSNMYLSSFNFLVQCLCTSTTNMAFKHFMIAALILLGAWACQATSRTLPEASMFERHEQWMIQYGRVYKDEAEKSVRFQIFMDNVKFIEEFNKDGRQSYKLAVNEFADQTNEEFQASRNGYKMAVSSRPSQTTLFRYENVTAVPSSMDWRKKGAVTPVKDQGQCGSCWAFSTIAATEGITKLKTGKLISLSEQELVDCDKTGEDQGCEGGYMEDGFEFIVKNKGIALEASYPYTAADGTCNSKEEASRAAKISGYEKVPANSETALLKAVANQPVSVSIDASGVAFQFYSSGVFTGECGTDLDHGVTAVGYGKTSDGTKYWLVKNSWGASWGDSGYIMMQRGVAAKGGLCGIAMDASYPTA

SEQ ID NO: 7247 - protein, 356 aa, Pyrococcus furiosus DSM 3638
MFYGITHKCSKMLLSRHHQVRAGGEDMFSLGGLTKSSVDTSKVWDVIIIGAGPAGYTAAIYAARFGLDTLIITKDLGGNMALTDLIENYPGFPEGISGAELSKRMYEQVRKYGVDVIFDEVVRIDPAECAYYEGPCKFTIKTANGMEYKSRTVIIAVGAEPRKLNVPGEKEFTGRGVSYCATCDGPLFVGKEVIVVGGGNTALQEALYLHSIGVKVTLVHRRDKFRADKILQDRFREAGIPAILNTVVTEIRGKDKVESVVLKNVKTGETFEKKVDGVFIFIGYEPKTDFVKHLGITDEYGYIKVDMYMRTKVPGIFAAGDITNVFKQIAVAVGQGAIAANSAKEFLENWNKKDVE

SEQ ID NO: 7248 - protein, 377 aa, Ulva pertusa
MGDEGEVSAVVCDNGSGVVKAGFAGDDAPRSIFPSIVGRPRHQGVMVGMGQKDAYVGEEANAKRGILALKYPIEHGIVTDWDDMEKIWHHTFYNELRVAPEEHPILLTEAPMNPKLNREKMTQLMFETFNAPAMYVQIQAVLSLYASGRTTGIVLDCGDGVSHTVPIYEGYAMPHAIQRLDLAGRDLTEYMMRILTDRGYSFTTSAEREIVRDIKEKLCYVALDYEQEMATSMSSSTLEKTYELPDGQVITVGSERFRCPEVLFNPALLGMEAVGVHDTTFNSIMKCDVDIRKDLYGNIVLSGGTTMFAGIADRMSKEVSALAPSSMKIKVVAPPERKFSVWIGGSILASLSTFQQMWISKAEYDESGPSIVHRKCF

SEQ ID NO: 7249 - protein, 116 aa, Vigna radiata
MASLKVACMVAVVFMVVVSAHMAHAITCGQVASSLAPCISYLQKGGVPSASCCSGVKALNSAASTTADRKTACNCLKNLAGPKSGINEGNAASLPGKCKVNVPYKISTFTNCANIK

SEQ ID NO: 7250 - protein, 133 aa, Brassica napus
MTTAADQPDPSLQTTRVSPKTVDDAITSLLKWKTEKSKTEKPQLLEQDEFVYLTVTLKKIPQTTRTNAHRIRLPHPLINTEEESPELCLIIDDRPKSGLTKEDAVKKIESENIPITKVLKLSKLKTDYKGVEA

SEQ ID NO: 7251 - protein, 537 aa, Aspergillus awamori
MAPLSKALSVFMLMGITYAFNYDQPYRGQYHFSPQKNWMNDPNGLLYHNGTYHLFFQYNPGGIEWGNISWGHAISEDLTHWEEKPVALLARGFGSDVTEMYFSGSAVADVNNTSGFGKDGKTPLVAMYTSYYPVAQTLPSGQTVQEDQQSQSIAYSLDDGLTWTTYDAANPVIPNPPSPYEAEYQNFRDPFVFWHDESQKWVVVTSIAELHKLAIYTSDNLKDWKLVSEFGPYNAQGGVWECPGLVKLPLDSGNSTKWVITSGLNPGGPPGTVGSGTQYFVGEFDGTTFTPDADTVYPGNSTANWMDWGPDFYAAAGYNGLSLNDHVHIGWMNNWQYGANIPTYPWRSAMAIPRHMALKTIGSKATLVQQPQEAWSSISNKRPIYSRTFKTLSEGSTNTTTTGETFKVDLSFSAKSKASTFAIALRASANFTEQTLVGYDFAKQQIFLDRTHSGDVSFDETFASVYHGPLTPDSTGVVKLSIFVDRSSVEVFGGQGETTLTAQIFPSSDAVHARLASTGGTTEDVRADIYKIASTWN

SEQ ID NO: 7252 - protein, 959 aa, Oryza sativa (japonica cultivar-group)
MERHQSIDAQLRLLAPGKVSEDDKLVEYDALLVDRFLDILQDLHGPHLREFVQECYELSAEYENDRDEARLDELGRKLTSLPPGDSIVVSSSFSHMLNLANLAEEVQIAHRRRIKLKRGDFADEASAPTESDIEETLKRLVTQLGKSREEVFDALKNQTVDLVFTAHPTQSVRRSLLQKHGRIRNCLRQLYAKDITADDKQELDEALQREIQAAFRTDEIRRTPPTPQDEMRAGMSYFHETIWKGVPKFLRRIDTALKNIGINERLPYNAPLIQFSSWMGGDRDGNPRVTPEVTRDVCLLARMMAANLYFSQIEDLMFELSMWRCSDELRIRADDLHCSSRKAAKHYIEFWKQIPPNEPYRVILGGVRDKLYYTRERTRHLLTTGVSEIPEEATFTNVEEFLEPLELCYRSLCACGDKPIADGSLLDFLRQVSTFGLALVKLDIRQESDRHTDVLDAITTYLGIGSYAEWSEEKRQDWLLSELRGKRPLFGPDLPQTEEIADVLGTFHVLAELPADCFGAYIISMATAPSDVLAVELLQRECHIKQPLRVVPLFEKLADLEAAPAAVARLFSIDWYMNRINGKQEVMIGYSDSGKDAGRLSAAWQMYKAQEELVKVAKHYGVKLTMFHGRGGTVGRGGGPSHLAILSQPPDTIHGSLRVTVQGEVIEHSFGEEHLCFRTLQRFTAATLEHGMHPPISPKPEWRALMDEMAVVATKEYRSIVFKEPRFVEYFRSATPETEYGRMNIGSRPSKRKPSGGIESLRAIPWIFAWTQTRFHLPVWLGFGGAFKHIMQKDIRNIHTLKEMYNEWPFFRVTLDLLEMVFAKGDPGIAALYDKLLVAGDLQSFGEQLRNNFEETKQLLLQVAGHKDILEGDPYLKQRLRLRESYITTLNVCQAYTLKRIRDPSFEVMSQPALSKEFVDSNQPAELVQLNAASEYAPGLEDTLILTMKGIAAGMQNTG

SEQ ID NO: 7253 - protein, 517 aa, Magnaporthe grisea 70-15
MVHLTSIPSHEEADDKIVSGVKKVHLQLANDEDKFTTSVYGSRFAIDDLPKHEMAENEMPKEVAYRMIKDELSLDGNPMLNLASFVTTYMEEEAEKLMADSFSKNFIDYEEYPQSADIQNRCVAMIGRLFNAPVGASEGVGAVGTSCVGSSEAIMLAVLAMKKRWKNKRLAEGKSVDKPNLIMSSAVQVCWEKATRYFEVEEKLVYCSPDRYVIDPKETVDLVDENTIGICVILGTTYTGEYEDVRAVNDLLNERGLETPIHVDAASGGFVAPFVVPDLEWDFRCDRVVSINVSGHKYGLVYPGVGWVVWRSAEFLPQELVFNINYLGADQASFTLNFSKGASQVIGQYYQLIRLGKHGYRAIMSNLTRTADYLSDSLEALGFGIMSKKSGEGLPLVAFRLTPDEDRIYDEFAIAHQLRVRGWVVPAYTMAPHTENLKMLRVVVREDFTRNRCDALIADVKLSLELLNQMDKKELERHQDVIHKHGTHSGKASHNHPRFRKEKHSLQGKHGKTHAVC

SEQ ID NO: 7254 - protein, 434 aa, Raphanus sativus
TSFLLVYVVMILFHPALSIYINTLSSTESITISSNRTLVSPGHVFELGFFRTTSSSRWYLGIWCKKLPERTYVWVANRDSPLSDSNGTLKITGNNLVILGHSNKSVWSTNLTRINERSPVVAELLANGNFVMRYFNDHDANRLLWQSFDYPTDTLLPEMKLGYDLNTGFNRFLTSWRNLDDPSSGDYSYKLEPRELPEFYLLKAGIRGHRSGPWNGVRFSGIPEDRKLSYMVYNFTENSKEVAYTFLVTNNSIYSRLQLSYDGDLKRLMWIPTSWEWSLFWSSPVDPQCDVYKTCGPYGYCDLSTSPVCNCIQGFDPKNRQQWDLRNPTSGCIRRTRLSCSGDGFTRMKNMKFPETTIAIVNRSIGLKECKKRCISDCNCTAFANVDIRNGGTGCVIWSGRLHDMRNYFDDGQDLYVRLAATDLGQKRNANGKI

SEQ ID NO: 7255 - protein, 302 aa, Glycine max
  misc_feature (90)..(90): Xaa can be any naturally occurring amino acid
  misc_feature (282)..(282): Xaa can be any naturally occurring amino acid
ELYLDSGWLPHPCSAPKTKTASLSKASVAVEQQTKVALIRIGTRGSPLALAQAHETRDKLRASHPDLAEEGAIEIVIIKTTGDKILTQPXDVPTYLPDKTILPCNLPREDVRDAFISLTAASLADLPPASVIGTASLRRKSQILHRYPSLNVQENFRGNVQTRLRKLNEGVVQATLLALAGLKRLSMTENVTSILSIDDMLPAVAQGAIGIACRSDDDKMAEYIATLNHEETRLAVVCERAFLQTLDGSCRTPIAGYACRNEDGNCLFRGLVASPDGTRVQXLETSRVGPYAVEDMIEMGVQ

SEQ ID NO: 7256 - protein, 391 aa, Oryza sativa (indica cultivar-group)
MQHQQRMKQAAAAAQQQQMMQQALLMQQQQAAAVAAAAQQQQAPLFPPHHPHPGLLAAPQIEPIVSGNLPPGFDSSTCRSVYVGNIHLQVTDSLLHEVFQSIGPVEGCKLIRKEKSSFGFVDYYDRRSAAIAIVSLNGRQLDARVMWDQKTGRSRGFGFVSFRNQQDAQNAINELNGKWLGNRQVRCNWATKGANAGEEKQNTDSKGMIELTNGSSEGGKDNANEDGPENNPQYTTVYVGNLPHDVNSNDVHRFFHSLGVGSIEEVRVTRDKGFGFVRYSTHEEAALAIQTGNGQLIGGRQIKCSWGSKPTPPGTASAPLPPPAPTPFNPGMSATDLLAYERTLALSKMAANPALMSQHAALKQAAAMGMGAGASQAIYDGGYQSANAVFY

SEQ ID NO: 7257 - protein, 433 aa, Raphanus sativus
TSFLLVFVVMILFHPAISIYINTLSSTESLTISSNRTLVSPGDVFELGFFRTNSRWYLGIWYKKLSERTYVWVANRDNPLSNSIGTLKISGNNLVILGHSNKSVWWTNITRGNESSPVVAELLANGNFVMRDSNNNSASGFLWQSFDYPTDTLLPEMKLGYDLQTGLNRFLTSWRSSDDPSIGNSSYKLKTGRIPEFYLSTWIVPVYRSGPWNGIRFSGIPDDQKLSYMVYNFTENNDEVAYTFLMTNKSIYSRLVVSSGYIERQTWNPSLGMWNVFWSLPLDSQCDTYKMCGPYAYCDVSTSPICNCIQGFNPFNVEQWDQRSWSGGCIRRTRLSCSGDGFTRMKNMKLPETTIAIVDRSIGVKECEKRCLSDCNCTAFANADIRNGGTGCMMWSGELDDMRNYAADGHDLYVRLAAADLVKKRNANGKIIS

SEQ ID NO: 7258 - protein, 112 aa, Azoarcus sp. EbN1
MKFVTAIIKPFKLDEVREALSAIGVQGITVTEVKGFGRQKGHTELYRGAEYVVDFLPKVKIEAAIRPDLLDQAIEAIEKSAATGKIGDGKIFVFDLEQAIRIRTGETGPDAL

SEQ ID NO: 7259 - protein, 175 aa, Brassica napus
  misc_feature (20)..(20): Xaa can be any naturally occurring amino acid
GNIWIESEGVGKGCTAIFDXKLGISNESKQSGIPKVPANPQHVNFAGLKVLVMDENGVSRMVTKGLLVHLGCEVATVSSSEECLRVVSHEHRVVFMDVCTPGVENYQIALRIHEKFTKRHQRPLLVALTGNTDKSTKERCMSFGLDGVLLKPVSLDNMRNVLSDLLEHRVLYEAM

SEQ ID NO: 7260 - protein, 468 aa, Arabidopsis thaliana
MPRVIPPENLGCPPFRALTFDSLGLIKVTEARGQERGIPTVVNTWGEMNASRSVLAASIDDRLRNPLLAVARKDGNVEVINPCNGDLHFSYSVFGDDGCSPEDNEISALHLFRKKIDDQTERSCTLLTCTKKGDVSLRSVKFPDAHGNSTDDASPKTWKACGSGEILVGKVDGSENFSLFGGKRVEANIWDLEQCTKIWSAKCPPKNNLGIFTPTWFTSATFLSKDDHRKFVTGTKSHQVRLYDISTQRRPVLSFDFRETAITSIAEDPDGHTIYVGNASADLASFDIRTGKLLGSFLGKCSGSIRSVVRHPQHQVIASCGLDRYLRVYDVKTRQLISAVFLKQHLTGLVFDSGFSGEETAVANTVAEAATEEKMTIMDQEDDETEKAPVKRKKSKKEKRSREIVFEGEDDEENEDEIEKAPVKTKKSKKEKRSREKVSEGEEKDELRSKKTREHKKKTKIVKHNQED

SEQ ID NO: 7261 - protein, 437 aa, Raphanus sativus
TLSFFLVFVVMILFHPALSIYINTLSSTESLTISSNRTLVSPGNVFELGFFRTTSSSRWYLGMWYKKLPYRTYVWVANRDNPLSNSIGTLKISGDNLVIFGLSNKSVWSTNVTRGNERSPLVAELLANGNFVMRDSNNNDASQFLWQSFDYPTDTLLPEMKLGFQPKTGLNRFLTSWRSSDDPSSGDFSYKLEPRSFPEFYLLKGNVRVHRSGPWSGIQFSGIPEDQKLSYMVYNFTENSEEVAYTFKMTNNSFYSRLTLTYTGSFQRLTWAPSSVDWNVFWSSPANPQCDMYRICGPYSYCDVNTSPLCNCIQGFDPGNAQQWDLRIPLSGCIRRTRLSCSGDGFTRTKKMKLPDTTMAIVDRSIGVKECKKRCLSDCNCTAFANADIRNGGLGCVIWTRELVDIRTYAVGGQDLYVRLAAADLVQKRNANGKIIS

SEQ ID NO: 7262 - protein, 215 aa, Haemophilus influenzae R2846
MNQSILSPFGNTAEERVLNAINAFKNGTGVLVLDDEDRENEGDLIFPAETITPEQMAKLIRYGSGIVCLCITDERCQQLNLPPMVEHNNSVNKTAFTVTIEAAKGVSTGVSAADRVTTIQTAIADNAVPTDLHRPGHLFPLRAANGGVLTRRGHTEASVDLARLAGFKEAGVICEITNDDGTMARTPEIVEFAKKFGYSVLTIEDLVEYRLAHNI

SEQ ID NO: 7263 - protein, 360 aa, Pisum sativum
MEMKKLLLFSLSLALIFRATNTFDFNEHDLDSEKSLWDLYERWRSHHTVTRSLDEKHNRFNVFKANVMHVHNTNKLDKPYKLKLNKFADMTNYEFRRIYADSKVSHHRMFRGMSNENGTFMYENVKNVPSSIDWRKKGAVTDVKDQGQCGSCWAFSTIVAVEGINQIKTQKLVSLSEQELVDCDTGGNEGCNGGLMEYAFEFIKQNGITTESNYPYAAKDGTCDLKKEDKAEVSIDGYENVPINNEAALLKAAAKQPVSVAIDAGGYNFQFYSEGVFSGHCGTDLNHGVAVVGYGVTQDRTKYWIVKNSWGSEWGEQGYIRMQRGISHKEGLCGIAMEASYPIKKSSTNPTESSTLKDEL

SEQ ID NO: 7264 - protein, 938 aa, Porphyromonas gingivalis W83
MVREAKNLRARTKKISLHICRKHAPQSEDFRCVFLRQQVIDRDIEAMAKPYDFYIVWKLSYNHVFTIHPRHTILELPPVYPDTALVPFFIMRFSFFDHMISCEYIFHRKLFVCLHRKNKQKQKSNMRYVIVGGVAGGATAAARLRRIDEKAEIILFEKGQNISYANCGLPYYIGGVIKERENLFVQTPEKFGRLLNLDVRVQSEVLSIDRSDKQIRVREANGREYSEHYDKLLLSPGALPFVPPLPGVDSPGVFTLRNVEDTDAIKSYLDTHKVKRAIVVGGGFIGLEMAENLHARGIAVNVIEMAPQVMAPVDFSMATIVHAHLQEKGIGLYLGKAVKSIEKRGEVLTASLDSGEKIEAELILLSIGVRPNTKLAADAQLAIGPARGIRVNEYLQTSDPDIYAIGDAIEYPHPLTGKPWTNFLAGPANRQGRIVADNMHGQTLRSYEGAIGTAIAKIFDLTVAATGLPAKALKREGLPYESVTVQPNSHAGYYPNAYPLTLKITFHPESGMLYGAQCVGIEGVDKRIDSIAQIIKRKGGIADLMQTEQAYAPPFSSAKDPVALAGYVADNIITGRMKPLHWREMKEVDPNRVTLIDARPRQAYEVEHIPGAISMPVEEIRARIGEIPHDKPIYVYCAVGMRGYFASNILRQCGFSNVRNLIGGYRLYSTITADYSSAGQPATAQLPAKDSPSSHTQVPEVDACGMSCPGPILKLKQSIDQIAVGEQLCILATDPGFARDAQAWCDTTGHNLIRQETIKGKYKVTIEKTACKEEGTCVNETPSKGKTFILFSDDLDKALATFVLANGAAAMGQPVTIFFTFWGLNAIKKPHAVKAKKDIWGKMFGMMLPKNSKGLGLSKMNMFGLGAKMMRMVMKEKHVDSLESMRKQALENGVEFIACQMSMDVMGINREELLDEVSIGGVATYMNRAEEANINLFI

SEQ ID NO: 7265 - protein, 120 aa, Oryza sativa
MKGAAAVAMVVVAGCLLAAAAVSVVDGAVTCGDVDASLLPCVAYLTGKAAAPSGDCCAGVRHLRTLPVGTAERRFACDCVKKAAARFKGLNGDAIRDLPAKCAAPLPFPLSLDFDCNTIP

SEQ ID NO: 7266 - protein, 662 aa, Rosa hybrid cultivar
MEECSTGALVPAVKVEPILSSIGGSVDPCSSDLGRLTEEKGMSEVDKDLLCPICMQIVKDAFLTACGHSFCYMCIITHLSNKSDCPCCAQSLSKNQLFPNFLLDKLLKKTSAQQISKSAPPVEHFRQALQQGCEVSIKELDTLLALLAEKKRKMEQEEAERNMQILLDFLNCLRKQKVQELNEVQSHLQFLKEDISVVERRRMELYRARDRYSVRQRMLGGDDSVNGARNSWPSSIDNNTSALRVRGGTSSWNIQGRGLQRNDALSASDSQYVNQSGLAVARKKRVHALFDELQECYLQKRRQMNQPYSQLERDRTVIPREGYSTGLADFQSVLTTLTRYSRMRVIAELRHEDLFHSANIVSSIEFDRDYELFATAGVSKCIKVFDFSSVVNDPADMHTAVVEMPTRSKLSCLSWNKFTKNHIASTDYEGIVTVWDVDTRQSVMEYEEHEKRAWSVDFSCTEPSMLVSGSDDCKVKVWCTRQEASVLNIDMKANICCVKYNPGSSNCIAVGSADHHIHYYDLRNVSQPLHVFTGHRKAVSYVKFLSNYELASASTDSTLRLWNVKDNIPVRTFKGHTNEKNFVGLTVNSEYIACGSETNEVFVYHKEISKPVTWHRFGSPDMEDTEDDAGSYFISAVCWKSDSPTMLTANSQGTIKVLVLAA

SEQ ID NO: 7267 - protein, 443 aa, Rosa hybrid cultivar
ETTLVELGRTLGLEECALWMPCRSGMNLQLSHTLNYEAQIGSTVPFSLPVVSEVFKSSQAMRIPYTCPLARVRPLVGRYVQPEVVALRVPLLNLSNFQINDWPDVSAKSYAIMVLILPTNSTRKWRDHELELVDVVADQVAVALSHAAILEESMRASDQLVEQNGALDLARREAELAIHARNDFLAVLNHEMRTPMHAIIALSSLLLETDLEDGSLDLDIGKFNLHGVFREAINLIKPIATVKKLSMTLILAPDVPVCAVGDENRLMQTILNVAGNAVKFTKEGYISVIASVAKPDSSRDWRPPEFYPASSDGHFYLRVQVKDSGSGILPQDIPHIFTKFAEPRNGSNRVKDGAGLGLAICKRFVNTMGGHIWIESEGIDKGTLVVFIVKLGICDNCGNTTIAHQKVPKGEANHGSADLIGYKPAFRDGYGLASTNPRYQRSL

SEQ ID NO: 7268 - protein, 265 aa, Brassica napus
VDPRVRASKWLPDLSGNVSAITTPPPTESVTASVMKKRFFVETLIGILPPEKDSVPCNFLLRLLRTAKMVGANANYLTELENRVAWQLDQASLKELMIPSFSHTSGTLLDVELVTRLVKKFVGLDSEGVKTGAALVKVAKLVDSYLAEAALDGGLTLPEFISLIEALPSYARTTEDGLYRAIDTYLKAHPQVLKQERKELCRLIDSRKLSPEAALHAAQNDRLPVRSIIRVLFTEQTKLSRHVDWSGSLTRSPTNPSGSHYFEQE

SEQ ID NO: 7269 - protein, 899 aa, Helicobacter hepaticus ATCC 51449
MQHSHSPQEGIKKSPKSTLLQPIQVEFVSDTIIHLLQSVDEELKNAFLNIKQSLQNHDSTMLKRILADISAQDKTLFIIKAFTLYHMLLNIIEELNLSNNAMLNHLPKTLKELNQEGYDKNDTLEILQHLRFYPVFTAHPTESRRRTFLEAHHQMSENIKNIFAHNDANAKSQLLYRLHLLWHTHLVRSEKMEILFELDNLLYIIESSILKSATQVLGDIKSTLGKALESSPIILGSWIGGDRDGNPYVSNEVMTKTMKIAHKAIIEIYIRTSEKLIRELSMSMDFIQPSKRLIQSLQNDSSELLNNEAKLFAKEPFRAKLYLIKKKLQNRLIAINTTDSIDFTYKDSNELLEDIDMMIESLDDISARGLVEFRHLVLLGGFHLLRLDFREHRDIILSTISEIFCLIGFCDSDFKDLNENKKIEILNYALSAKKYDLNTIIEQLSESSKRLVGAFLRIQWAKKHISKHILQSFIISMSTQASDLLCVLWFAKQSGLWKPGKKKEGKKGKASVSITPLFETIDDLQRAQSIIQTLYANTHYQQYLFDHNSTQEIMVGYSDSSKDGGIFTSNYNLYCAISNLTKLQTQLDIRISFFHGRGGSVSRGGGSLEEALLCSAPQSVHSFLKTTEQGEMISAKYLNSHIATKNFSSTLSALLKKGVYDSYGTEKYKNNPQTMALLENVSNASCATYRALVYENKGFLEYFKNATPIKFIQNLNLGSRPSKRKDTQKIEDLRAIPWVFAWTQNRAIISAWYGLGSGLANVDKNQLRDCYEQSLFFKTTIDNISQALLKVDLDIASLYNQFVKDKKVREDIWEHIYTQYHLTMEYLLHLRGESVLLDSEGAIRESILLRKPYLSVLNLTQIELIKKYESCKYPKGQERLLEQIHATIVGIAQGIRNTG

SEQ ID NO: 7270 - protein, 306 aa, Helicobacter pylori 26695
MGNLVIGSRGSELALWQANHIKERLKKECLIESEIQIVKTKGDKILDTPLNKIGGKGLFTKELEELLLKGAIDLAVHSLKDVPVVFEKGLDLACITKRADVRDTFLSVKFPDLMSLPKGAKVGTTSLRRSMQIKLKRQDLDTESLRGNVQTRLKKLECGEFDAIILAEAGLCRLEIQGAKYRKAFSVEEMIPSMGQGALGVEMLKNHKHFATLQKLNDEKSAFCCRLEREFIKGLNGGCQIPIGVHASLMGDRVKIQAVLGLPNGKEVITKEKQGDKTKAFDLVQELLEEFLQSGAKEILEKAQLF

SEQ ID NO: 7271 - protein, 345 aa, Schizosaccharomyces pombe 972h-
MSEETSIPGIIASTPPISKDSRRNVSHWLQALAVFLHSVSLTLTASWYTVLWAFLPFWPFLIVYLIWLIYDDGFVTGKDRQKRWLRNAPPYRWFCHYFPIRLHKTTELDSEKNYIFGYHPHGIISLGAFGGFASEGADFSKLFPGINVSVLTLNSNFYVPVYRDYLMALNINSVSKKSCVSILSRKPGDSVLIVIGGAQESLLSRPGQNNLVLKKRFGFVKLAFLTGSSLVPCFAFGESDIFEQVDNNPRTRIYKFQEIVKKIAGFTVPFFYGRGLLNKTFGLMPWRKPINIVVGEPIDVPKKSHPTNQEIYEVHEEYIRRLEGLWNKYKDVFLPNRISELKLSA

SEQ ID NO: 7272 - protein, 213 aa, Candida maltosa
DQSLNILLAGRDTTAGLLSFAVFELGRNPEVWSKLRQEIGDKFGLDSDSRIEDISFELLKLCEYLKAVINETLRLYPSVPRNGRFAAADTTLPHGGGKDGMSPILVRKGQTVMYSVYALQRDEKYYGKDANEFRPERWFEPEVRKLGWAFLPFNGGPRICLGQQFALTEASYVLVRLIQSFETLELSPEAAYPPAKLTHLTMCLFDGAPVRIE

SEQ ID NO: 7273 - protein, 383 aa, delta proteobacterium MLMS-1
NLAMLTGNVEKQECGVDPLRGQNNVQGACDMGGLPAMLPGYQPVADEECRRRFEQAWGVEIPTRPGKTLLEMTHGRLPPDHRRPAAGRQQPATPLRGLFIMGENPLLSDPDLTRVRKNLAGLELLAVSDIFLTETAARAHVVLPAACFAEKDGTFTNTERRVQLIRQAVAPPGQARPDGEIIAALARRLGYEMAGSPAHEIMEEIALLTPIYGGIYHDRLASGTGLQWPCWDRRHPGTPYLHKYYFTRGKGRFVVAAQEEPAEAPDADYPLLLNSGRLYHHYHTGAMTRKSPLLEREARVARLQVNPADAESRGIRDGERVRLRSRRGQVELAAELTTMVPPGMVYGTFHFQEAPINRLTIAACDQRAKCPEYKICAVELSKE

SEQ ID NO: 7274 - protein, 528 aa, Clostridium perfringens str. 13
MNNIKFDDLGLKESLLKAIKDMGFEEPSQIQAESIPVALEGHDIIGQAQTGTGKTAAFGCAIINNADFSGKKKSPKALILAPTRELAIQVNEELVRLGKHEKLSVLPIYGGQPIDRQIRALKNGVDIVVGTPGRVLDLIRRKSLPLNDIGFLVLDEADEMLNMGFIDDLEEIVKSLKTDRQTLLFSATMPPQIKKLARNYMKEDTKHIAIKKSSLTVSKIEQFYFEIKHRDRFETLCRVLDFDEPNAAIIFCKTKKGVDEVVEKMQARGYMVEGMHGDMSQNHRLQTLRKFKEGSLDFLVATDVAARGIDVESVTHVINYDLPQDNESYVHRIGRTGRANREGVAYSLVTPKEYMMLKQIQKHTKSKIIRKAVPTVDEIFQNKHNNIINNVKSTIEEASEDFQKFIPIATQLDEDYSLVDVAAALLKIVFDKESSFDYTSNSIEAPVMDETRLFMSVGRRDGITPKSLVNFLKETARISPKQVGDIDIKENFCFANVDADAVNNIMKKSMGKKLNKRTVNIEVAKKRK

SEQ ID NO: 7275 - protein, 581 aa, Sorghum bicolor
MHPQRMKQAAAQQQLMQQALLLQQQQAQQPPLFPGHHHPHPGLLAAPQMEPIVSGNLPPGFDSSTCRSVYVGNISLQVTDTVLQEVFQSIGPVEGCKLIRKEKSSFGFIDYYDRRYAALAILSLNGRPLYGQPIKVNWAYTSTQREDTSGHFNIFVGDLCPEVTDATLFAFFSGYSTCSDARVMWDQKTGRSRGFGFVSFRNQQDAQSAINDLNGKWLGNRQIRCNWATKGANAGEEKQIVDSKVDLTNGTSESGKENPNEDGPESNPQFTTVYVGNLPHEATNNDVHLFFHSLGAGSIEEVRVTRDKGFGFVRYSTHEEAAQAIQMANGQLIGGRQIKTTIYNGVYKLRAVEESDFCEVLLYWSRLVTLVASLVVVASAVFLLEGNDAVRQGIDLLYAASTAGFAVGCWGLGVLGFLVTYLVAAQSPDEGLLTRMKGAACTACEVIVRRSKLCGGSVKECAEKGEAVVARVCTENLGMCSWGSKPTPPGTASSPLPPPAPALFSTGVSPTDFLAYQRMALNKMATNPSLMGQHALNQVALGMGGRASQSIYDGGFQGISTAAATTSAQQQQQQQQQLMYY

SEQ ID NO: 7276 - protein, 424 aa, Staphylococcus aureus subsp. aureus COL
MEITMPKLGESVHEGTIEQWLVSVGDHIDEYEPLCEVITDKVTAEVPSTISGTITEILVEAGQTVAIDTIICKIETADEKTNETTEEIQAKVDEHTQKSTKKASATVEQTSTAKQNQPRNNGRFSPVVFKLASEHDIDLSQVVGSGFEGRVTKKDIMSVIENGGTTAQSDKQVQTKSTSVDTSSNQSSEDNSENSTIPVNGVRKAIAQNMVNSVTEIPHAWMMIEVDATNLVKTRNHYKNSFKNKEGYNLTFFAFFVKAVADALKAYPLLNSSWQGNEIVLHKDINISIAVADENKLYVPVIKHADEKSIKGIAREINTLATKARNKQLTAEDMQGGTFTVNNTGTFGSVSSMGIINHPQAAILQVESIVKKPVVINDMIAIRNMVNLCISIDHRILDGLQTGKFMNHIKQRIEQYTLENTNIY

SEQ ID NO: 7277 - protein, 637 aa, Magnetospirillum magnetotacticum MS-1
MCGLAGLFLPRHAALAEADIAAMLRVMRHRGPDGTGIHLSDDRRFQAGFTRLAIIDLATGDQPLVRNGGETVLLGNGEVYNYRELRAELAAKGHTFLTQGDMEAALESFMAKGRDFVHDLNGMYALAILERDDHRLTLVLDRLGIKPLYWARLGNGGILFASEIKALFASGLLRPLVDEVSVAAYLAHGYVPAPATLYKGVSKLPPGSIMSVDASGEVQIERYWRAAAATDLPGDEAGIRAHLVSILDDAVGLQLRSDVPVGAMLSGGLDSGLLVALAARRLDRPLKTYTVRFLGARVDETPLAAQVAERYGTDHTVFELETGSAAQLLPRLVWHADEPLADASLLPNHLINEVIGKETRVVLNGTGGDELFGGYGRYFQLPVEARWLRLPRPLRKAAEAMIGLGNPFLAWQLARAEKFGRDRGGYLHDHCALFPPPMAKLLGCTLPWPIPAQAAFADEYAGPLDSAALYAELNTYLPEDLLTLLDRTTMAHSVEGRVPLLDHRMVEAALAVPPHIRNPGGRQKALERAIAAEYLPDSLLSAPKQGFASPVPAWFESGGLAPLARRLLTSRRALERGWWSREGVERLLAQPGRHAFRLYSLLVLELTVRIHVEGAFAEAPAFGLAEMAEGEDAPCAA

SEQ ID NO: 7278 - protein, 319 aa, Actinidia chinensis
MEAFPVIDMEKLNGEERAPTMEKIKDACENWGFFELVNHGISHELMDTVERLTKEHYNKCMEQRFKEMVATKGLEAVQSEINDLDWESTFFLRHLPVSNISEIPDLEQDHRKAMKEFAEKLEKLAEQLLDLLCENVGLEKGYLKKAFYGSKGPTFGTKVSNYPPCPRPELIKGLRAHTDAGGIILLFQDNKVSGLQLLKDGEWIDVPPMKHSIVINIGDQLEVITNGKYKSVMHRVIAQPDGNRMSIASFYNPGSDAVMYPAPALVDKEEDQQKQVYPKFVFEDYMKLYAGLKFQAKEPRFEAMKAMENAVNLGPIATI

SEQ ID NO: 7279 - protein, 612 aa, Allium cepa
MDAQDIESRHPLIGARPRRRALRSLSILLAAALLLGLVLFYANGTGSGTAVDPVRVDNEFPWTNDMLAWQRCGFHFRTVRNYMNDPSGPMYYKGWYHLFYQHNKDFAYWGNITWGHAVSRDLINWQHLPVAVGPDHWYDISGVWTGSIIVVSEDRVVMLFTGGTKSFDQSINLAEAADPSDPLLLKWIKYDNNPILWPPPGIVRDDFRDPNPIWYNASESTYHIVVGSKNDSLQHTGIALVYLTKDFKKFDLLPTVLHSVDKVGMWECVEVYPVATTGPLLHKAIDNFDVDRVLDRSTVKHVLKASMNDEWHDYYAIGTFDPIGNKWTPDDETVDVGIGLRYDWGKFYASRTFFDPLKQRRIIWGYIGEVDSQKADIAKGWASLQGIPRSVLYDVKTGTNVLTWPIEEMEGLRMARKDFSGIKIKKGSTVELSDFGDAFQIDIEAEFTISKEALEATIEADVGYNCSSSGGAAIRGTLGPFGLLVLANQDLTENTATYFYVSKGIDGSLITHFCQDETRSSKANDIVKRVVGGTVPVLDGETFAVRILVDHSVIESFAMGGRTSATSRAYPTEAINSAARVFLFNNATGVDVIAESVKIWQMNSTYNDFYHF

SEQ ID NO: 7280 - protein, 327 aa, x Doritaenopsis sp.
MESGSFPVINMELLQGSQRPAAMALLRDACENWGLYELLNHGISHELMNRVETVNKEHYRRFREQRFKEFASKTLDTVENVEPENLDWESTFFLRHLPTSNISQIPDLDDDCRSTMKEFALELENLAERLLDLLCEDLGLEKGYLKKVFCGGSDGLPTFGTKVSNYPPCPKPELIKGLRAHTDAGGIILLFQDDKVSGLQLLKDGEWIDVPPVRHSIVVNIGDQLEVITNGKYKSVLHRVVAQTDGNRMSIASFYNPGSDAVIFPAPALVEKEAEEKEEKKKEIYPKFVFQDYMNLYIRKKFEAKEPRFEAMKSMEIVMSSQPIPTA

SEQ ID NO: 7281 - protein, 228 aa, Staphylococcus epidermidis RP62A
MPKLILCRHGQSEWNAKNLFTGWADVKLSKQGIEEAQSAGKKIYGNQIEIDIAFTSLLTRALETTQYILAGSDQQWIPVYKSWRLNERHYGGLQGLNKDDARKKWGEDQVHQWRRSYDVRPPRESEEQREAYLKNRRYQHIDHRMMPYCESLKDTLERVVPFWTDHISQHLLDDKTVLVSAHGNSIRALIKYLEGLSEEDIVGYEIKTGAPLVYELTDDLVVKDKYYL

SEQ ID NO: 7282 - protein, 317 aa, Pisum sativum
MENFPIVDMGKLNTEDRKSTMELIKDACENWGFFECVNHGISIEMMDTVEKLTKEHYKKCMEQRFKEMVATKGLECVQSEIDDLDWESTFFLRHLPVSSISEIPDLDDDYRKVMKEFALKLEELAEELLDLLCENLGLEKGYLKKAFYGSKGPNFGTKVSNYPPCPKPELIKGLRAHTDAGGIILLFQDDKVSGLQLLKDDQWIDVPPMRHSIVINLGDQLEVITNGKYKSVMHRVIAQTDGARMSIASFYNPGDDAVISPASTLLKENETSEVYPKFVFDDYMKLYMGLKFQAKEPRFEAMMKAMSSVKVGPVVSI

SEQ ID NO: 7283 - protein, 442 aa, Raphanus sativus
AFSFLLVFDVMILFHPVFSIYINTLSSTESLTISSNRTLVSPGNDFELGFFRTTSSSRWYLGIWYKKLSDRTFVWVANRDNPLSNSIGTLKLSGNNLVLLGHSSKSIWSTNLTKRNERSPVVAELLANGNFVMRDTNNNDASAFLWQSFDFPTNTLLPEMKLGYDLKTGLNRFLASWRSSDDPSSGDHSYKLKPRRFPEFYIFNDDFPVHRVGPWNGIRFSGIPEDQKSSYMVYNFTENSKEVAYTFLMTNNSIYSILKITSEGYLQRLMWTPSSKIWQVFWSSPVSFQCDPYRICGPYAYCDENTSPVCNCIQGFDPKNRQQWDLRSHASGCIRRTRLSCSGDGFTKMKNMKLPETTMAIVDRGIGVKECEKRCLSNCNCTAFANADIRNGGSGCVIWTGELEDIRNYVADGQDLYVRLAAADLGFFSFSPQLRRETLMGK

SEQ ID NO: 7284 - protein, 366 aa, Pseudomonas fluorescens Pf-5
MSNTFLNPVTTQTWANGRHIVRCVKVIQETWDVRTFCFMADQPIMFFFKPGQFVTLELEIEGQPVMRSYTISSSPSVPYSFSVTIKRVPGGKVSNWLHDTLHEGQELAVHGPVGLFNAIDFPAPKILYLSGGVGITPVMSMARWFYDTNANVDMVFIHSARSPKDIIYHRELEHMASRIDNFSLHLICEKHGLGEPWAGYRGYLNHKMLELMAPDFLEREVFCCGPTPYMSAVKRLLEAAGFDMARYHEESFGATPAEARADAVEHAEQAAEAPEPDLADLHQVEFTASGKSIRVAPGETVHAAAAKLGLMIPKACGMGICGTCKVLKLGGEVEMEHNGGITEEDEAEGYILSCCSVPKGDVRVEF

SEQ ID NO: 7285 - protein, 439 aa, Raphanus sativus
IFSFLLVFVVLILFHPAHSIYINTLSSTESLTISGNRTLVSPGDDFELGFFKTTSRSRWYLGIWYKKISRRTYVWVANRDNPLSSAVGTLKISGNNLVLLGDSNKSVWSTNLTRGNERSPVVAELLANGNFVIRYSNNNDASGFLWQSFDFPTDTLLPEMKLGYDLKKGLNRFLTSWKNSDDPSSGEISYQLDIQRGMPEFFLLKNGFRGYRSGPWNGVRFNGIPEDQKLSYMVYNFTDNSEEVAYTFLMTDKSIYSRLMISNDEYLARLTLTPASWDWNLFWTSPEEPECDVYMTCGPYAYCDVNTSPVCNCIQGFKPLNVQQWDLRDGSGGCIRRTQLSCSGDGFIRMKSMKLPDTTMATVDRSIGVKECEKRCLSDCNCTAFANADVRNGGTGCVIWTGKLDDIRNYFEDGQDLYVRVAAADLVKKRNANGKIIAL

SEQ ID NO: 7286 - protein, 454 aa, Geobacillus kaustophilus HTA426
MAQLETNTSVESLGYKQELKRSLTFVDLLIYGMVFMVPIAPFGIYGYVAQGSKGMVALAYLIGMVGMIFTALSYARMAEAFPIAGSVYSYAQRGMNEYVGFMAGWVILLDYIFVPALLYLVSAAALADIVPQVPISVWLVLFIAMNTVINILGIEMTAKANKVIVVLELIVLAVFVITGIIAIIKGVNGAQFTFKPLYDPNHFSAETVMGAVSVAVLSFLGFDAVSTLAEETRDGKSSIGKAIIFALLVVGALFIVQTWVAALIWPDYTTFKNADVAFYQIAELAGGPWLKWTTIVATALSWGIANALVAQAAISRILYSMGRDRKLPSVLAKVHPKFQTPYVSTLLVAVISLIVTTVFASQIDKLASLVNFGALTAFLFLHVSVMNYFLRKQKSNDYINHLLFPLIGFVIIGYVWMNLDPLSKKLGLIWIAIGLVYLVFLRLTNKDSRLSGEL

SEQ ID NO: 7287 - protein, 200 aa, Prototheca wickerhamii
WHSHSSVQLALQQQRMLLAKPFMRLVMGPMRCPRNAMAAAPLSRKHLRVQAVAAVAENGAAVQAAEGQARPIFPFTAVIGQEEMKLALILNVIDPKIGGVMIMGDRGTGKTTTIRALADLLPQVPVVAKDPFNSDPFDAELMSEEVRQRLKAGEELPVGSMKIPMVDLPLGATEDRVCGTIDIEKALTEGVKAFEPGLLA

SEQ ID NO: 7288 - protein, 430 aa, Raphanus sativus
SYTLSILLVFLVLILFYPALSIYVNTMSSSESLTISSNRTLVSSDGVFELGFFKPSGLSRWYLGIWYKKVSEKTYAWVANRDNPLSNSIGTLKISGNNLVLLGQSNNTVWSTNRTRGNARSSVIAELLPNGNFVMRYSNNKDSSGFLWQSFDFPTDTLLPEMKLGYNLKTGRNRFLTSWRSYDDPSTGIFAYKLDIRRGLPEFILINQFLNQRVEMQRSGPWNGMEFSGIPEVQGLNYMVYNYTENSEEISYSFHMTNQSIYSRLTVSDYTVDRFTWIPPSSAWNLFWSLPTDVCDPLYLCGSYSYCDLNTSPNCNCIRGFVPKNRQQWDLREGSEGCVRTTQLSCTGDGFLRLNNMKLPDTKTATVDRRIDVKKCEERCLSDCNCTSFATADVRNGGLGCVFWTGDLVEMRKQAVGGQDLYVRLNAADL

SEQ ID NO: 7289 - protein, 106 aa, Brassica napus
  misc_feature (21)..(21): Xaa can be any naturally occurring amino acid
  misc_feature (36)..(38): Xaa can be any naturally occurring amino acid
  misc_feature (40)..(40): Xaa can be any naturally occurring amino acid
  misc_feature (83)..(83): Xaa can be any naturally occurring amino acid
  misc_feature (91)..(91): Xaa can be any naturally occurring amino acid
MASVRLSSATMTSSLAHATMXAPFIGLKSSAAFPVXXXAXTEITSITSNGGRINCMKVWPPVGKKKFETLSYLPGLTDVEIAXEIDYLIRXKWTPCIEFEVEHGFV

SEQ ID NO: 7290 - protein, 339 aa, Corynebacterium diphtheriae
MKLAVIGGDGIGPEVTAEALKVLNAVRDDIEVTDYDLGARRYLRNGELLADADLVSLREHDAILLGAIGAPGEVPPGVLERGLLLKMRFALDHHVNLRPSKLYPTATSPLANPGDIDFVVVREGTEGLYCGNGGTLREGTPHEIASEVSQNTRYGVERVVRDAFERAQNRKKHLTLVHKTNVLVNAGGLWQRTVNEIATEYPEVTVDYNHIDAATIYMVTDPSRYDVIVTDNLFGDILTDLAGAVTGGIGLAASGNIDATGVNPSMFEPVHGSAPDIAGQGIADPTAAILSAAMLLRHVGDESNAQRIEAAVTYDVAERPAGPVKTVEVGDRIVAALQR

SEQ ID NO: 7291 - protein, 435 aa, Raphanus sativus
TFLLVFVVMILFRPALSIYINTLSSTESLTISSNRTLVSPGDDFELGFFRTTSSSRWYLGIWYKKLSERTYVWVANRDNPLSNSTGTLKISTMNLVLLGESNKSVWSTNLTRGNERSPVVAELLANGNFVIRDTNKNDASGFLWQSFDYPTDTLLPEMKLGYDLKTRLNRFLTSWRMSDDPSSGNSSYELETRGLPEFYLWSGIFPMHRSGPWNGIRFSGIPDDQKLSYMVYNFTENSEEVAYTFRMTNNSTYSRLTLSFLGDVERLTWNPSLGAWNVFWALPFDSQCDTYKICGPNSYCDVSTSPICNCIQGFIPSNVQQWDQRSWSGGCIRRTPLSCSGDGFTRMKNMKLPETMMAIVDRSIGEKECKKRCLGDCNCTAFANADIRNGGTGCVIWTGLLDDMRNYATDGQDLYVRLAAADLVKKRNANGKIIS

SEQ ID NO: 7292 - protein, 432 aa, Raphanus sativus
TLLVFFVLIRFRPAFSINAFSATESLTISSNITLVSPGNVFELGFFITNSSSLWYLGIWYKKLSERTYVWVANRESPLSNAIGTLKISDNNLVLLDHSNKSVWSTNLTRGNERSPVVAELLANGNFVMRDSNNNDASALLWQSFDFPTDTLLPEMKLGYDHETGLNRFLTSWRSSNDPSSGDFLYKLEARTLPEFYLSSGIFRLYRSGPWNGIRFSGILDDQNLSYMVYNFTENNEEVAYTFRMTNNSIYSRLTVSSSGNFERLTWNPTLGMWNVFWSLPSDSQCDTYRICGPYSYCDVSTLPICNCIQGFNPSDVQQWDQRSWSGGCIRRTQLSCSGNGFTRMKNMKLPEIRMALVDRSIGVKECRKRCLSDCNCTAFANADIRNGGTGCVIWTGRLDDMRNYASDGQDLYVKLAAADIVKKRNPNGKITS

SEQ ID NO: 7293 - protein, 653 aa, Lolium perenne
MESPSAVVPGTTAPLLPYAYAPLPSSADDARQNRSGGRWRACAAVLAASALAVVVVVGLLAGGRVDRVPAGGDVASATVPAVPMEFPRSRGKDFGVSEKSSGAYSTDGGFPWSNAMLQWQRTGFHFQPEQHYMNDPNGPVYYGGWYHLFYQHNPKGDSWGNIAWAHAVSKDMVNWRHLPLAMVPDQWYDSNGVLTGSITVLPDGQVILLYTGNTDTLAQVQCLATPADPSDPLLREWVKHPANPILYPPPGIGLKDFRDPLTAWFDHSDHTWRTVIGSKDDDGHAGIILSYKTKDFVNYELMPGNMHRGPDGTGMYECIDLYPVGGNSSEMLGGDDSPGVLFVLKESSDDERHDYYALGRFDAVANVWTPIDRELDLGIGLRYDWGKYYASKSFYDQKKNRRIVWAYIGETDSEQADITKGWANLMTIPRTVELDRKTRTNLIQWPVEEVDTLRRNSTDLGRITVNAGSVIRLPLHQGAQLDIEASFQLNSSDVDAINEADVGYNCSTSGAAVRGALGPFGLLVLANGRTEQTAVYFYVSKGVDGALQTHFCHDESRSTRAKDVVNRMIGSIVPVLDGETFSVRVLVDHSIVQSFAMGGRITATSRAYPTEAIYAAAGVYLFNNATGATVTAERLVVHEMASADNHIFTNDDL

SEQ ID NO: 7294 - protein, 117 aa, Nicotiana attenuata
MAKVALLVVVCMAAVAVMLTPHADAAISCGQVVASLSPCISYVRQGGAIPAPCCSGIKSLNNQATSTPDRQTACNCIKSAAAAINGINYSLAGSLPSKCGVNLPYKISPSIDCSTVH

SEQ ID NO: 7295 - protein, 253 aa, Agrobacterium tumefaciens str. C58
MILVEKRDEVGVITLNRPKVLNALNSVLLKELRHILSSFSADDSIGAIIITGSEKAFAAGADIKEMQGLDFVDAYVGDFLGGWDEVAATRKPVIAAVSGFALGGGCELAMMCDFIIASDTAKFGQPEITLGVIPGMGGSQRLTRAVGKAKAMDLVLTGRMMDAAEAERAGLVSRIVPAADLMEVAVEAATRIASLSRASVLMAKESVNRSFEVPLAEGLRYERRAFQSLFATEDQKEGMAAFVEKRKPAFRNR

SEQ ID NO: 7296 - protein, 479 aa, Klebsiella pneumoniae
MTAPVQHPMYIDGQFEPGRGDAWIDVINPATEALLSRIPDGSAEDARRAILAAERAQPGWEALPAIERARWLRKIAAGIRERAEEIAALIVAEGGKIQQLAAVEVSFTADYLDYMAEWARRYEGEIVQSDRTGENILVFKRALGVTTGILPWNFPFFLIARKLAPALITGNTIVIKPSEFTPNNAIAFAQIVHDIGLPKGVFNLVLGRGETVGQELASNPKVAMVSMTGSVAAGEKIMAAAAKNITKVCLELGGKAPAIVMDDADLELAVKAVVDSRVINSGQVCNCVERVYVQKGIYDRFVNRLGEALKAVQFGDPASRDDIAMGPLINAAALARVEQKVAKAVAQGARVALGGKAVTGRGYFYPPTLLLDVRQEMDIVHEETFGPVLPVVAFDTLEEALAMANDSDYGLTSSIYTRDLNVAMKAIKGLKFGETYINRENFEAMQGFHAGWRKSGVGGADGRHGLNEYLQTQVVYLQA

SEQ ID NO: 7297 - protein, 540 aa, Haloarcula marismortui ATCC 43049
MPPCRSIHWRITTCHRRSVSKTASAKQSISNMVREFELPDVGEGVAEGELLRWRVEPGDAVSEDQPVAEVETDKAVVDVPSPVDGVVEELRAAEGEMVPVGDVIIVFRVDGEDGPKATETAPADDTTAGSGQQTEVGATAQPAEETQSEPAITQRVQVPAPPSVRRLARELGVDISSVADSSSGRITEPDVRAYASPESSTQERSSQQTTAAEQRTQQAAPAQSVSPAQTREVVDRETTVAVPKTRHIAAEEGIDLDTVPTDEQKDGEPFVTLEAVQEYAEAQQQAQQTDRDAVVERAAADEPARPESRKPYKGIRQTIGAAMTSSKYTAPHVTHQDEVDVTALVDARSTLRREAEAQDIRLTYMPFVMKACAAALQENPQVNVSLDEANEEIVEKQYYNIGVATATDDGLLVPVVENVDAKGLLEVASETNEKTQKARERSLSPEEMRGGTFTISNIGGIGGEYGTPIINQPESAILALGEIKKKPRVVEADGEETIEPRHIMTLSLSFDHRVLDGADAAQFTNSIQKYLQNPNLLLLE

SEQ ID NO: 7298 - protein, 604 aa, Aeropyrum pernix K1
MIDYDSCKPKKCSYECIAVCPVNKSGRGVAIDADMASRGKPVIYEDACIGCALCVKACPFDAIYIVNLPMELEEEAVHRYGVNGFKLFRLPIPREGQVVGLLGRNGTGKTTALRILAGELKPNLGRVEGGEPEWDEILKRFRGSELQTYFRKLVDGKLRVAHKIQYVELVPRRLKGRVRDLLKRADERGVALELAEQVGLDKVFDRDVRQLSGGELQKMLIVAVLSRDANVYIFDEPSSYLDIRERMRMARLIAGAARPGAYVMVVEHDLAVLDYVSDLVHILYGEPGAYGIVSKPYSTREGINVFLQGYLPAENIRLRKEPILFRKPAPEAQPAAPGGGRQASRRRIVGWTGLRVALDGFTLTSGEGALYGGEVIGVAGPNGIGKTTFVRTLAGALKPVEGAVYPYVEDLRVSYKPQYISPESLPDATVEQVLKAANPAILAPGSWLNLELVKRMRLDKLLERRVRTLSGGELQKVAVAAALAREADVYLLDEPSAYLDVEERVGVARAIRRIVETREAAALVVEHDLMILDYVSDRIMLVTGEPGVRGHVDDPRPVKEGMNLLLQNLGVTVRKDEQTGRPRLNKEGSYLDRMQRARKLYYAV

SEQ ID NO: 7299 - protein, 151 aa, Zea mays
  misc_feature (62)..(62): Xaa can be any naturally occurring amino acid
  misc_feature (69)..(69): Xaa can be any naturally occurring amino acid
  misc_feature (93)..(93): Xaa can be any naturally occurring amino acid
GTSSRRETFQKSHSQADSPPTCEQSHASVKRRNGRLARTQAAGALVVVAALLLLAAWATTSXAAITWGXVRSAIAPCLSYARGTVTSPSASCXNGVRNLKSADSTAVDRRAACICLKNAARGGSGLNAGNDASIPSKGVVSIPYTISTSTD

SEQ ID NO: 7300 - protein, 518 aa, Sorghum bicolor
MATSPAASSGTATGTIGETIVGSHLWKIDRFSATKDLGVGKSIKSSTFNVGGHTWYIECYPCGDNEYSAGLVTLFLCLSAHKEQVEAKCRFTLMDDDRDYYQDGYNHTYNAEDSRGLGIDLIKRADLKKHLKDDCFRIRCDVYIVREFPAVPPPDLHRPLSDLVASGMPGGDRTFQVGGEVFTVHRGLPDPSAHIAASPTPAGTSSSTAGSISSVSHVLTIDGYSKSKKMFRTDDYVESEWFRVVGGHSWYIKLYPSREKEDDDSGCLAVFLNNNWWLLDEDHIEDKVLKVRVELTLLTFAREIISSAQFCYAFTSRYDKCRCYFPFNTEMEPLIGDSFHVKCDVTVVKEITPILRPPDLNLYFGHLLASQVATDVTFEVGSDLFSAHKLVLATRSRAFMAEFFGPAGKGSSTTVTRVQIDDMEPRVFKALLHFIYTDTLPELHEDDDKIVMAQDLLVAADRYDMGRLKLICADMLCNYVNDARAAFAMLELADKHCCRRLKVKCMKLLKGHFAKVAP

SEQ ID NO: 7301 - protein, 974 aa, Desulfovibrio desulfuricans G20
MDNAMENEVELLKKQIVELQRENEILKSGNVFTGSSREHDLLLRLFDSVKEYVYVADMETYELLYVNRTLEKDIGPCTGKKCYQFLQGLEEPCPFCTNDIIRNDPDSSHIWELYNPVLKRWYRCIDRAIPWVGNRLVRYELALDISDIRTAEEEMRRFRMALEASSDAVYLTDLRTGLFVDVNSRAYTQLGYTREEILGMRPEDINIAVSEHGLEPYLRNVLDGRDEGAVETYHRHKDGTLLPVEVGLRRLTTVSSELLVSVARDISERRDAQRDLATRLMYERVLSTCARELLSQFSSLNAMHTTLESLRETVDVCRVYIFENFINDDGQLCCRHRFEVCSEGVASQFGKSELECVPYLPAFSRWAQTLEQGKALSGLVDEFPEEEQPLLRAQDIQSILVLPLKVGGQWWGLIGFDDTRTMRRWTQLDEQLLMTAAEIIAAAIERNRAQKQLEKTSREAEAASRSKSEFLANMSHEIRTPLNAIIGLTELSLQEDLPEGVGENLRASLSSAEALLDIVNDILDLARVESGKLHLEEVEFSLPRFLGGVMRVMRHEAERKGLDFSMFLGRGLPRELMGDSGRLRQILVNLIGNAIKFTEEGGVNVAVECVSSSGGYIAGVQRVRFTVQDTGIGIPEHLHGIIFENFRQADGSITRKYGGTGLGLTISRQLVEMMGGSISLRSEAGKGSRFEVELPFKVAETHACAIEEGEDVPEMLPLRILLAEDNALNRRTMILALKKLGHQADAVQNGAEAVEKAALKRYDCIFMDVQMPVMDGLDATRAIRGFTPDTAATAPDVHIIALTAHALAGDKERFVQAGMSSYLSKPVRLEALKKHLVQLQAGTADGGGADAPLMPAYDAHPVMEPYTGGQREAYRFRRFLVTVAALRESLWSAFDRGNLLELHSLAHTLMHEADKMGAPRVCVMASRLESRVRDARPEEVRPIFLLLMDAINHLEHELLKIFPDARGAEGHHAG

SEQ ID NO: 7302 - protein, 368 aa, Sorghum bicolor
MSTSASSSATGDDDDDSGSTSTITAETTTGRHELKGESYTRTKGGVGKFIDSVTFRVGGHSWYIRYYPDGNRDESADWISVYLYLDGAGSEDDGGGVKARYKFSLFRDAAAAGDGEAPPVLIHTRTASNYSFWSADQHRRGYCRFIKATDMEEATKGGGFCIRCDVAVMKETCVETTMADSVTVPASELNQHLGALLDSKVGGDVTFDVGGEQFTAHRYVLAARSSVLMAELFGPMKENTMSSIQIDDVEPRVFRALLHFIYTDSLPEIDGEDEPGMAQHLLVAADKYGMQRLKLMCEAMLLKHIDTSVLATTLTLAEQHDCQGLKDGCFKFLRSPGNTKAVVESDGFQHLRSSCPSLIEEMLVKVAP

SEQ ID NO: 7303 - protein, 492 aa, Helicobacter pylori 26695
MELNQPPLPTEIDGDAYHKPSFNDLGLKESVLKSVYEAGFTSPSPIQEKAIPAVLQGRDVIAQAQTGTGKTAAFALPIINNLKNNHTIEALVITPTRELAMQISDEIFKLGKHTRTKTVCVYGGQSVKKQCEFIKKNPQVMIATPGRLLDHLKNERIHKFVPKVVVLDESDEMLDMGFLDDIEEIFDYLPSEAQILLFSATMPEPIKRLADKILENPIKIHIAPSNITNTDITQRFYVINEHERAEAIMRLLDTQAPKKSIVFTRTKKEADELHQFLASKNYKSTALHGDMDQRDRRSSIMAFKKNDADVLVATDVASRGLDISGVSHVFNYHLPLNTESYIHRIGRTGRAGKKGMAITLVTPLEYKELLRMQKEIDSEIELFEIPTINENQIIKTLHDAKVSEGIISLYEQLTEIFEPSQLVLKLLSLQFETSKIGLNQQEIDAIQNPKEKTPKPSNKKTPQHERARSFKKGQHRDRHPKTNHYSKKPKRR

SEQ ID NO: 7304 - protein, 770 aa, Ustilago maydis 521
MSPVQDFTDATVPLQHKAEQGQKAPPSWSDGSSCPVPHAKSQPLPPGHPPVPDAPASTLFPPTGSRCIFYRSPEDLAQTPPLSRSTSSSMLSSTATLPSLHELAVTHNASAHEFNKLQILDQQRKEANINPLPVDREGQLGLDPSCTLVLASRNSQLALVQSSHVSAMLEARFGRSSPLFRSQAEQATGALESTSSGQSDTSSSSSPRASTSSSRLQEVDGKHSQDDVDFLCKLLHGFQTTSEAPLRPHAFPITSMSTAGDQNLRSPLYVIGGEGKAIWTKELEVALEQGAVDAIVHCLKDVPTALPQGLELAAVLEREDPRDALVVKAGLPYKVLDELPVGSVIGTSSVRRVAQLRRRYPHLVFSDVRGNINTRLAKLDAPNGPYTALILAAAGLVRLNMHARITAFLSSPVLLHSVGQGSLAIEVRTPPEGADPTTNRDARIRELIRSIGDWRATFRAEAERSLLKELEGGCSIPVGVETRFDDHDQVEGQRSEAIALVDDFVTQGNAGAKAELPNGGMPLIREGHTIPACQLSDATEASSSTPQRPPLESLTTGVEEMEAAKAQSKRTAPSTNAQTIAERIVSTSYSIVDRSTPAPEGRTLHLDAIVVSLDGSQESRYSASKHCTTVKDARELGIHVAHELAHKKGARAILEEVERHRKMAEEADRRRREDARKRKAMGLPGGEINTIAVTNGVASVAEHGDLNALKKSRDGWMRGQAEISLSTELEKLRHVYATGTGGPADAACDPLEMDRRGVPRDDGQPKAWEV

SEQ ID NO: 7305 - protein, 342 aa, Rickettsia conorii
MKKRIAIVLFNLGGPKNLKSVKPFLFNLFYDKAIINLPNPLRYIIAKIISITREKKSQKIYSLIGGKSSLLQETEEQKLALTEKLKQLIKEDFAIFINMRYSAPFAKEVIGQIKKYNPSEIILLPLYSQFSSTTTGSSVKNFLQNLDIDIPIKTICCYPLEKDFIKAHVSLIKEKLYDKNFRILFSAHGLPEKIIKAGDPYSFQIKETVQAIVKELNIKDLDYKITYQSRVGPIEWLKPNTEDEIELAGKLKKDIIIVPISFVSEHVETLVELDIEYKLIADKYEIQYIRIPTLGTNKIFINSLTNILLRFINKVDTNLVMSSSSTRICPNEFTKCLCKLTS

SEQ ID NO: 7306 - protein, 417 aa, Sorghum bicolor
MAGQLQPAVGHAGTSTSWHQLVSTTDSDTYGSSSTLSAETTTGSYVFTVADYSRDKELHAAGSALPSNTFTAGGYSWRITYSHDTDDWIRFSLCLEPPVAGGGAGTGGGRDLGDAAIMVRTRYILLDKAGLPLPSSIRKDSERALSTMRSMRATQFMRRKRFESYYLKDNRFSVRCDVTLVRRTMCGRETGAMPPPDMRRHLGELLAGGVGADVVLEVGAEAFRAHRSILAARSPVFKAELLGGPTDDKDAPPPTTSTTSRRLRIHDIEPSVFRAVLHFIYTDSLPPEIGAGDEMVMAQQLLVAAQRYKLEGLKWICEDVISTLCHRRAANESSCPCLLYQLHAYAKTILSYSRHCRLAESQARSPCSPKTQLLRVSSPWLKKTTTSLVLVYWAPTYRRSKLIARLGGPARSLRGTS

SEQ ID NO: 7307 - protein, 333 aa, Sorghum bicolor
MSSWSRRRRTMLRNDDDDDDDGRASTTMLTEIATGWHVLKATPGASPTSPIDGLTEDTADCISFALRLEDRRAGTGRDAVKVRTTFSLLDVAAGGPVPSLTVSCGVWTFSRIGQSCCDARFMERKEFESCYVKDDEFCIRCDVTVLSAAAAPPLDLRRQLGDLLAGGDGADVTLDVGGESFRAHKNVLAARSPVFMAEFFGGPHKEQVAGRVSIHGIEPSVFKALLHFIYTDSLPDIDGGDMTAMAQHLLVAADRYGIQRLKSICEYLLRTFVDRSAVVTTLVLAERHGCHQLKEACFKVMKSSANYKELVSGEDFQYLASTCPSLVQELEAA

SEQ ID NO: 7308 - protein, 499 aa, Schizophyllum commune
MGAQQSRRSGHGSRPCSTMKHDSSRSSSEASDSKGSRSLKTVSVASASAFAAIAAVTPSSSSSAEDISRLSERTRVEKREVQKPPPPRPKSYLEMPQTTVPCQYRTGKTLGSGTYAIVKEAIHIHTGKYYACKVINKKLMQGREHMVRNEIAVLKRISSGHKNIVTLHDYFETTHNLYLCFDLCTGGELFDRICAKGNYYEADAANLVRTILQAVKYIHDCGIVHRDLKPENLLFRTQAEDADIMIADFGLSRVMEEEKLNMLTEICGTPGYMAPEIFKKTGHSKPVDIWAMGVITYFLLAGYTPFDRDSQQLEMEAIIAGDYKFEPEEYWENVSSTAKDFVTQCLTIDPTNRPTAAEALQHKWLSDPTAHFVTDKEGPVDLLPHVKKAFNAKQLWKKAAFSIKALNRMTMLASSGLDKDAAELSENLKKYKEESAREIMEESTITHSHNMETESTTDLTLKEKEVRDAVKASDDISAHDHEDISSKLASVSLDEGQKK

SEQ ID NO: 7309 - protein, 734 aa, Robiginitalea biformata HTCC2501
MRHTIALIFLVSCFSAGWGLHAQLPLQEEREFDVYINQARVYWNRDDLELALEELDKAAEWAEEQQSEKDLIDCYHYFALIYLDMDKEETAQFNNGRAALMLEEIEYPYGTAVHYYINAKILYTEGNFFQAIFQLNEARQRTNDRNLLNRITLLEADNLRSIDKYEQAETNYNSLLVNTDPYEREFLRARAYLGLARLDLVQELLPEGIENAQYALDIAESNGFTTEYILANELLANMFEQTRQFDQALASTRHLMHFKDSVRGLAREKAQLETADRIQTEYMSKEIQRQDEEIQELSESANRSELTAILSSAFLIIISLLAVSLYRNNQIKLKTNDLLHTKNRELHAARDAAVQAMEAKTNFLSTVSHELRTPLYAVTGLTHLLLEENPSKEQQEHLKALKFSGDYLLNFINDILQINKIDADKLEMLEIEFNLKKILTEVMNSLQQTAKESKTEMILDFDPEIPSHLMSDPVKLSQVFMNLMGNALKFTKNGEVLVLARLVRKEDDRARVYFEVRDTGIGISEEKQKTIFDSFEQGSIQINREYGGTGLGLTIVKSLLGLFGSTIQLESTLGQGSSFFFELDFKCKDDLIDEVPFEVTPKEYDFKGLHLLIVEDNKINQVITRKMLAKKEISSDIANNGTEAIQLASSNSYDGILMDIHMPGISGVEATQEIRKFDPETPIIALTAISLDDSLEAFYAAGCNDVVTKPFKPEVFYQKIGENILEPKLRKTLS

SEQ ID NO: 7310 - protein, 332 aa, Listeria monocytogenes str. 4b H7858
MPNEVYDVTIIGGGPIGLFSAFYSGLRSMKTKIIDAEPAVGGKVRYFFPEKIIRDIGGIPAITGENLVANLKQQAETFHPTIVCSERVVDVTKLSDGTFQLTSHNGSIHFSKTIVIATGSGTFEVNKLEALHAEDFPFAIHYDVKNIEQFRDKVVVVSGGGNSAIDWAQTLEPIAKQVHLIYRGEDFKAHEESVRELQNSRVEIHIHHEINELIGTNNQLTKINVCCNKTQATKTIQTDALFINHGVKVDLGTMAEWGFEQADFGIVVDDEMKTTVPGIFACGDSATYPRKIRIIAAGLHEGPIAINSAKKYLEPTAADEAMISTHHESFIG

SEQ ID NO: 7311 - protein, 181 aa, Nostoc sp. PCC 7120
MGTEIYLDGSGNPDSDWSEILNDGWNRELVLSVTKKFPELMLQPDSEQRPFKVSFFLHQEASFKVIPQLETELAKCKLNIKLIYSSGIDLDIVPLNSDKGQAMQFLRQKWKFAAERTVVCGDSGNDIALFAVGNERGIIVGNARPELLQWHSEYPADHRYLAKNFCAGGIIEGLQFFGFLE

SEQ ID NO: 7312 - protein, 776 aa, Streptomyces coelicolor A3(2)
MTPDKTVATACQFCNSNCRLNVDLKAGRVLAVRGEDSDPVQQGQVCVKAELMPQLVYNTERLTRPLRRVSGAKGSPHSKFEAVSWEEALHTIAKKFLALRDAGQAHTIANRTTGRMPRGTGSLVARMFAMLGSPNNTDVGPVCNDAGGNALAMTFGLGNFTNGYGTDGSTGKDDLGSARHYLFLGTNQAETHPVTFDYLLRGRKENNATLTVVDPRLTPTGAAADRWVAPKPHTDLALLLAMLHHIVQEKLYDKAFVKRWVAGFDELRRHLAKHQYTPEWAAKVTGVKADVITKMAVEYAKAKPAAIFCNAGISHQLGAFDTYRVATFLAAVTGNIGQPGGGCNFMHNTWPGDLQLPPLDADLPERREALPVGPDYFAESILTDNPYRLRAVVTQGNPLVSSANTTKVKKAFEQLDFYVYTGLFMEEAAYYADIILPVCSGLEMEGVYMRRDDRAIRWQDQAVDRVGESRPDWEIWVGLAHALAELDSRRPAAEWRAAFPERWMNYRELWDAFVTHTPGVGGMTRARMRQRTEPLRWPCPTEDHPGVSTLYLDHPSWYQAAESLDPANRGKRFLTPSGKVEISTPDLEKKLAVTGHSALPIFYTHPEVTGRNPTLSYSRKFVTNPINPQAVTHPVRLGVPGSDAVHHDFPLMGMTGRPSVVHFAEVTHWTPTGKQLNGIRFIQIHPDTARRSGIADGDEVTVESPRGSVTGTALLWEGIRADTVFVPNTFGPAQKQGDLFDDPRYEAANTLPDDRFYDNLSGQQAFKCFACRVVKA

SEQ ID NO: 7313 - protein, 184 aa, Kluyveromyces lactis NRRL Y-1140
MARYGATSTNPAKSASARGSYLRVSYKNTRETAQAISGWNLQKAQKYLDQVLDHQRAIPFRRFNSSIGRTAQGKEFGVTKARWPAKSVKFVQGLLQNAASNAEAKGLDATRLYVSHIQVNQAPKQRRRTFRAHGRINKYESSPSHIELVVTEKEEAVEKASEKKVARLSSRQRGRLATQKRITA

SEQ ID NO: 7314 - protein, 226 aa, Oryza sativa
MDSEHWISRLAAAKRFYAAQLGHADRAGMEEVDMDEEVRPEFACPYCYEDHDVVSLCAHLEEEHPFEPHAAPCPICSDKIAKDMLNHITVQHGYLFKNRRRLRRFVIPGSQALSLLSRDLREAHLQVLLGGGGHRSNNSSNTTNISADPFLSSFGLSFPTSDTEETSKPPISIPDDASVIKETPAQPWDSSIDSSLTREEREQKRKQASVRATFVQDLLLTTLFGD

SEQ ID NO: 7315 - protein, 491 aa, Bacillus anthracis str. 'Ames Ancestor'
MSKYKTILQSNKDELHSLYEIANQDSWKPIYHIHPPFGLMNDPNGVSYYNDEYHVFYQWYPFGPIHGMKHWGHVKSKDLINWERMPVAIIPTESYESHGAYSGSAIVKDDLLHLLYTGNIKNPDDSRDAKQCMATMDSQYTMTKYSNNPVIDIIPDGYTKHVRDPKVWKHNDIYYMLLGAQRKNKTGTLLLYKSKDLYNWNFQGEITTNLKEFGFMWECPDYFQLSGKDVLLFSPQGIEKDREDFHNIYNVVYAIGHFDIKNLYFHIDSYYEADKGFDFYAPQTLEDSTSRRLLFAWAGSSEITYPSDDYMWAHCLTLPRELTLEDNILKQKPVSELTKLRTTKKEISGDITAGLNVLSTLDNEGSYELIVTLKTEDAKRFGLSLFHNEEECFPITFNREQGTISIDRGNFYHQFGGEYGFERCKKIDIQDTIELQIFVDKSIVEIFLYDGSTVFTSRVFPRKDMKHHIAIFSDAKLNFTITQYKLKRGIV

SEQ ID NO: 7316 - protein, 828 aa, Photobacterium profundum SS9
MKMTRRAFVKANAAASAAAVAGITLPASAANLIVSSDETKIKWDKAPCRFCGTGCSVLVGTQNGRVVATQGDPEAPVNKGLNCIKGYFLSKIMYGKDRLQTPMLRMKNGEYNKEGDFAPVSWDQAFDVMAEKFKKALKEKGPTSVGMFGSGQWTVMEGYAASKMMKAGFRSNNIDPNARHCMASAVGGFMRTFGIDEPMGCYDDFEHADSFVLWGSNMAEMHPVLWTRITDRRLSHPHVKVNVLSTYYHRSFELADNGMIFEPQTDLAIANFIANYIIQNDAVNWDFVTKHTHFKRAETDIGYGLRDDNPLQMKAKHPNSGALHPMDFEQYKASVAEYTVEKASQMSGVSEEKLIEMAKQYADPKVKVMSLWTMGMNQHTRGVWMNSLVYNIHLLTGKISQPGNSPFSLTGQPSACGTAREVGTFSHRLPADMVVANPKHRAIAEKIWKLPDGTIPAKPGYHAVQQDRMLKDGKLNAYWVMCNNNMQAGPNINEERLPGYRNPENFIVCSDPYPTVTAQASDLILPTAMWVEKEGAYGNAERRTQAWYQQVKSQGDSKSDLWQLMEFSKRFKIEEVWGEDLLAQMPEYRGKTMYEVLFRNGQVDKFPLSEAQELNDDAKAQGFYLQKGLFEEYAAFGRGHGHDLAPYDVYHQVRGLRWPVVDGKETLWRFVEGSDPYVPEGEGFRFYGKPDGKANIIFAPFEPAPEEPDQEYDMWLCTGRVLEHWHTGTMTRRVPELYKAVPDALCFIHPDDAQKRGLRRGDEVLLESRRGEVRCRVETRGRNRPPVGLVFVPFFDARVLVNKLILDATDPLSKQTDYKKCPIKITKV

SEQ ID NO: 7317 - protein, 423 aa, Arabidopsis thaliana
  misc_feature (399)..(399): Xaa can be any naturally occurring amino acid
MAVEYECCGTSFFIHIAVIVLLVLFAGLMSGLTLGLMSMSLVDLEVLAKSGTPRDRIHAAKILPVVKNQHLLLCTLLICNAAAMEALPIFLDALVTAWGAILISVTLILLFGEIIPQSVCSRHGLAIGATVAPFVRVLVWICLPVAWPISKLLDFLLGHGRVALFRRAELKTLVDLHGNEAGKGGELTHDETTIIAGALELSEKMAKDAMTPISDTFVIDINAKLDRDLMNLILDKGHSRVPVYYEQRTNIIGLVLVKNLLTINPDEEIQVKNVTIRRIPRVPETLPLYDILNEFQKGHSHMAVVVRQCDKIHPLQSNDAANETVNEVRVDVDYERSPQETKLKRRRSLQKWKSFPNRANSLGSRSKRWSKDNDADILQLNEHPLPKLDEEEDAVGIIXMEDVIEELLQEEIFDETDHHFEDL

SEQ ID NO: 7318 - protein, 329 aa, Fusobacterium nucleatum subsp. nucleatum ATCC 25586
MRVKIKKMEKKLAILTSGGDAPGMNAAIRATAKIAEYYGFEVYGIRRGYLGMLNDEIFPMTGRFVSGIIDKGGTVLLTARSEEFKEARFREIAANNLKKKGINYLVVIGGDGSYRGANLLYKEHGIKVVGIPGTIDNDICGTDFTLGFDTCLNTILDAMSKIRDTATSHERTILIQVMGRRAGDLALHACIAGGGDGIMIPEMDNPIEMLALQLKERRKNGKLHDIVLVAEGVGNVLDIEEKLKGHINSEIRSVVLGHIQRGGTPSGFDRVLASRMAAKAVEVLNKGEAGVMVGIEKNEMVTHPLEEACSVDKRKSIEKDYELALLLSK

SEQ ID NO: 7319 - protein, 902 aa, Corynebacterium diphtheriae
MTAAISDRVREDIRLLGRVLGRVIAQQEGEEVYELVEATRRMAFDVSHGDADPEDLMVIFRDLDITKTNLVARAFSYFALLANLVEDLDDESVEADVSLRKTFAKLKREGVSAADAASVIRSAEVAPVLTAHPTETRRRTVFDTQTRIKQLLKDAHHGGDMQVIEQEMYLRMTLLWQTALIRIARPTLEDEIDVGLRYYKKSLLEQVPALNRSIRHSMRETFGLQLPDIAVMRPGSWIGGDHDGNPYVNARTLTYATRQAAKTVARYYVEQLGELERELSLSDRYSSCSKELLALAEASGNNWESRVDEPYRRAVYGMRARMKSNVDALERPEKTAGKKSSKRTPYATPEEFLRDLDVIDRSLRAHNDDVIADDRLARIRSAVTTFGFHLYTLDIRQNSESFEAVIEEVFAAARRVPGGKRYSELAEAEKVELLIQELQTPRPLLFPGALEVEDAFSADTTKELGIFLAAAQAVRDFGSRSIAHCIISMTATVSDILEPMVLLKEVGLRDVDVVPLFETIDDLRCGAAILRELWSHPFYREHLRARGDIQEVMLGYSDSNKDGGYLQANWALYDAELGLVELCREHNIELRLAHGRGGAVGRGGGPTYDAILAQPKGAVSGSVRITEQGEVISAKYGAPETARRHLEAFVSGALEASLLDTEPIADPDRAYAIMRDLAGFSGQRYQELVGDPGFIEYFTQSTPLHEIGELNLGSRPAARKQTTAISDLRAIPWVLSWSQSRTNIPGWFGVGSAVSRFVSAVPEKDRESRWQELRDLYATWPFFRSVMSNMAQVMAKAEISLARLYADLVDDPEVADRIYALIAEEFELTRRAYLAITGNEALVSENQRQARSLKRRYPYLLPLNAIQLELLRRYRGGDDQFLVSKTIQVTMNGLATALRNAG

SEQ ID NO: 7320 - protein, 192 aa, Triticum aestivum
MSSSSSFPGSRFPFAAGGAGAGASGGGGGGGSGSSVRPWGSSGGTSVSSSGKRIQKELLDLNASDCSAGPKGDNLYHWLSTIIGPQGSPYEGGIFFLDVVFPLDYPFKPPMVTFKTRIYHCNVDSTGAVSLEILKDGWSPALTISKVLLAIKAIITNPDPYNPLVESIARLYLTDRAKHDEIAAEWTLRFAR

SEQ ID NO: 7321 - protein, 231 aa, Bradyrhizobium sp. BTAi1
MPATPHLEKHFTATEAVRDVVIGMADGLTVPFALAAGLSAAVTSTGVIVTAGLAEVVAGAIAMGLGGYLAARTDAEHYAAEERRENDEIDRLRSREIEEVAAIFRDYGLKGDALTTVVEAIAADRKRWVDFMMRFELGLERPDPKRAPVSAVTIGGSYVIGGLIPLIPYMLVHDISGALRISVIATGAALLIFGAIKGHFTGVSKVKSALQTALVGGLAAGAAFWLAHLFG

SEQ ID NO: 7322 - protein, 396 aa, Dechloromonas aromatica RCB
MAKEKFARTKPHVNVGTIGHVDHGKTTLTAAITTVLSAKFGGAAKKYDEIDAAPEEKARGITINTAHVEYETANRHYAHVDCPGHADYVKNMITGAAQMDGAILVCSAADGPMPQTREHILLARQVGVPYVLVFMNKCDMVDDAELLELVEMELRELLSKYDFPGDDTPIIHGSALKALEGDQSEIGEPSIFRLADALDSYIPDPERAIDQPFLMPVEDVFSISGRGTVVTGRVERGIVKVGEEIEIVGIRPTVKTICTGVEMFRKLLDQGQAGDNIGALLRGTKREDVERGQVLCKPGSVKPHTHFTSEVYILSKDEGGRHTPFFNGYRPQFYFRTTDVTGSIELPEGTEMVMPGDNIAMTIKLIAPIAMEEGLRFAIREGGRTVGAGVVAKIIE

SEQ ID NO: 7323 - protein, 407 aa, Methanococcoides burtonii DSM 6242
MQTGNSLKEKAEKAIEKSAMYGEDFDLNKFEIAAQEVPQTDDLENLDDDFKKTLLNVGVLTDEKDRSGSFLMLDNGVSHSSLKDPNIELMSLHEALEKHDWLKDYSWKLVSVDADKYTAKSYLEDANGYFIRAPAGQKSSMPVQTCLVMGHKDVAQTVHNIIIVEEDAKLDVITGCTTKKGVERAIHLGISEIYVKKGGILNFTMIHNWAGDVGVRPRTVIHLEEGASFVNNYILLKPVRSIQSYPTAILDGEGAFARFHTIAVAHPGSELDLGSRVLFNAPNTKAELISRTITTGGKVIARGEMVANKPHCKGHLECHGLVLKDGGTQLAIPALEASVADVELTHEAAVGRIAREQVEYLMARGLSEEDAVGMIVRGFLDVGITGLPDELAKDIDDTIAQIGKDAV

SEQ ID NO: 7324 - protein, 349 aa, Arabidopsis thaliana
MVKGTKRKIAIETIQKRDSLRVTCTKRRKGLYSKASQLCLLSDAQIAILATPPSSESDVSFYSFGHSSVDAVVSAFLSGKRPVSAPKDNKETREDVGICLTRKNLGLGFWWNDESLVRSENPQEISEAIGSMWTLLSNLKELRADEACVNDHKDLKKNEKSDVHGTQDQTLIFQSASAVCCIPENLNDITQEPNQTLDIQSSSSAICCVPDKSPEIFNEITEEQDQILSICETFCVTDNNNNNNNNAALPEVNLYYNQDMAIDQLIDFNTPFESSIDDWFSDNTTHQETTSASILNDVGVDDQVSVDTNPFSYFQSLEDADLVFQRCLDGDNLRFSDCFNDFANTIAAV

SEQ ID NO: 7325 - protein, 508 aa, Medicago truncatula
MVLSKTASESDVSVHSTFASRYVRTSLPRFKMPEESIPKDAAYQIINDELMLDGNPRLNLASFVTTWMEPECDKLIMASINKNYVDMDEYPVTTELQNRCVNMIAHLFNAPLEENEAAVGVGTVGSSEAIMLAGLAFKRKWQNKRKQEGKPYDKPNIVTGANVQVCWEKFARYFEVELKEVKLSEGYYVMDPAKAVELVDENTICVAAILGSTLNGEFEDVKRLNDLLVEKNKETGWDTPIHVDAASGGFIAPFIYPELEWDFRLPLVKSINVSGHKYGLVYAGIGWAIWRSKEDLPEELIFHINYLGADQPTFTLNFSKGSSQVIAQYYQLIRLGYEGYKNVMENCRDNMIVLKEGLEKMGRFNIVSKDDGVPLVAFTLKDPHNFDEFQISDLLRRFGWIVPAYSMPPDAQHITVLRVVIREDFSRTLAERLVADIEKVLHELDSLTAKIKMLSGTSSVTVHEVVKDNGQVVVAKKSALETQREITAIWKKFVLDRKKLNDKMNGVC

SEQ ID NO: 7326 - protein, 353 aa, Arabidopsis thaliana
  misc_feature (189)..(189): Xaa can be any naturally occurring amino acid
  misc_feature (238)..(238): Xaa can be any naturally occurring amino acid
MKAICDRFVPSKCSSSSTSEKPAGSPPPPPRPDSASSDNKSNLTLCSDVVASSSPVSQLCREASTSGHNPVCTTHSSWTVILKTASMASGAIRRFQDRVLGPSRTGISSSTSEIWLLGVCYKISEGESSEEADAGRVLAAFRQDFSSLILMTYRRGFEPIGDTTYTSDVNWGCMLRSGQMLFAQALLFXRLGRSWRKKDSEPADEKYLEILELFGDTEASAFSIHNLILAGESYGLAXGSWVGPYAVCRSWESLARKNKEETDDKHKSFSMAVHIVSGSEDGERGGAPILFIEDVTKTCLEFSEGETEWPPILLLVPLVLGLDRVNPRFVTLSKRFLDDKCYRRQEFSFSFSS

SEQ ID NO: 7327 - protein, 439 aa, Aster tripolium
MKILLGVGINGGLFGSCVSSRSKVDSSTSGISSHFEIKSTNNVSKDQPTTSNSEHNLPTLTPEDELKVASRLRKFGFNDLKMATRNFRPESLLGEGGFGCVFKGWIEENGTAPVKPGTGLTVAVKTLNHDGLQGHKEWLAEVNFLGDLGNPNLVKLIGYCIEDDQRLLVYEFLPRGSLENHLFRRSLPLPWSIRMKIALGAAKGLAFLHEEAKRPVIYRDFKTSNILLDAEYNAKLSDFGLAKDGPEGDKTHISTRVMGTYGYAAPEYVMTGHLSSKSDVYSFGVVLLEMLTGRRSMDKKRPNGEHNLVEWARPHLGERRRFYRLIDPRLEGHFSIKGAQKAAQLASRCLSRDPKARPLMSEVVDCLKPLPALKDMAGPSYYLQTVQPERAGSSPDPNRTRVGSFSRNGSQHPRTLSIPNASPRHNQFLQDSPNPNGKQ

SEQ ID NO: 7328 - protein, 174 aa, Arabidopsis thaliana
MASSMLSSAAVVTSPAQATMVAPFTGLKSSAAFPVTRKTNKDITSIASNGGRVSCMKVWPPIGKKKFETLSYLPDLSDVELAKEVDYLLRNKWIPCVEFELEHGNTPGYYDGRYWTMWKLPLFGCTDSAQVLKEVEECKKEYPGAFIRIIGFDNTRQVQCISFIAYKPPSFTEA

SEQ ID NO: 7329 - protein, 170 aa, Triticum aestivum
MGSEKFPAPVADLCDANASLILTGELRILDPVFQPYGQCRSFSGRVVTMRVLEHNAGLRALLEAPGEGRVLVLDGGGSKRCALIGGTLAEVARRSGWAGAVVNGCVRDVDDVNGCAIGVRALASNPRKPGKSGATEMHVDVDVGGAVVRDGEWLYPDSDALIVCDREIYG

SEQ ID NO: 7330 - protein, 438 aa, Oryza sativa
ALPATVGSARAMLPQQQQQQKQQAAALMPPSMYAMPPPPPLHHHHHPLLAAAPPQQQIEPILTGNLPPGFDTSTCRSVYVGNVHVQVTEALLREVFQSTGLVEGCKLIRKEKSSYGFVDYYDRRSAALSILTLNGKQIFGQLIRVNWAYASGQREDTTDHFNIFVGDLSPEVTDSALFAFFSGYSSCSDARVMWDQKTGRSRGYGFVSFRNQQDAQSAINDLNGQWLGSRQIRCNWATKGASNGEQQTSDSKNVADLTNNLTEDGKEKANEDAPENNPQYRTVYVGNLAHEVTQDVLHRLFHALGAGAIEEVRIQLGKGFGFVRYSNHAEAALAIQMGNGRILGGKPIKCSWGNKPTPPGTTSAPLPPPAAPSVTAADLLEYQRSLALSKMVSSQALMQAQAQQHLKQAMGMGAGVSQAMYDASFPNVGPSQQQLMYY

SEQ ID NO: 7331 - protein, 484 aa, Hordeum vulgare subsp. vulgare
GKTLGIGSFGKVKIAEHIITGHKVAIKILNRRKIKSMEMEEKVKREIKILRLFMHPHIIRLYEVIDTPADIYVVMEYVKSGELFDYIVEKGRLQEEEARRFFQQIISGVEYCHRNMVVHRDLKPENLLLDSKCNVKIADFGLSNVMRDGHFLKTSCGRPNYAAPEVISGKLYAGPEVDVWSCGVILYALLCGTLPFDDENIPNLFKKIKGGIYTLPSHLSPLARDLIPRMLVVDPMKRITIREIREHSWFKARLPRYLAVPPPDTAQQVKKLDDETLNDVIKMGFDKNQLTESLQKRLQNEATVAYYLLLDNKLRTTSGYLGAEYQESMDSSFSQISPETPSSASEARQYGSPGFGLRQHFAAERKWALGLQSRAHPREIITEVLKALQELNVCWKKIGHYNMKCRWSPGFFENMMHNNNGFGVESAIIEADGLGDKSTHIVKFEIQLYKTRGDKYLLDLQRVSGPQLLFLDLCSAFLTQLRVL

SEQ ID NO: 7332 - protein, 706 aa, Lycopersicon esculentum
YFSIPIELVYFVQKSAVFPYRWVLVQFGAFIVLCGATHLINLWTSTPHTRTVAMVMTTAKFSTAAVSCATAVMLVHIIPDLLSVKTRELFLKNKAAELDREMGLIRTQEETGRYVRMLTHEIRSTLDRHTILKTTLVELGRALQLEECALWMPTRTGVELQLSYTLHHQNPVGFTVPIQLPVINQVFSANCAVKISPNSAVARLRPTRKYIPGEVVAVRVPLLHLSNFQTNDWPELSPKSYALMVLMLPSNSARQWHVHELELVDVVADQVAVALSHAAILEESMRARDLLIEQNVALDLARREAETAVRARNDFLGVMNHEMRTPMHAVVALSSLLQESELIPEQRLMVETILKSSNLLATLINDVLDLSRLEDGSLQLDVGTFNLHALFREVLNLIKPVAAVKKLFVTLSLSSDFPEVAIGDEKRLMQILLNVVGNAVKFSEEGSVSVSAVNAKSESLIDPRAPEFFPVQSENHFYLRVQVKDTGSGINPQDFPKLFCKFAQNQEPATKNSAGTGLGLAICKRFVNLMEGHIWIESEGVGKGSTAIFIVKLGIPGRLNESKLPFTAGLPANHMQMTFQGLKVLVMDDNGFSRMVTKSLLVHLGCDVTTIGSGDECLRILTREHKVLIMDASITGMNCYDVAVSVHEKFGKRLERPLIVALTGNTDQVTKENCLRVGMDGVILKPVSIDKMRSVLSGLLEHGTVL

SEQ ID NO: 7333 - protein, 615 aa, Magnetospirillum magnetotacticum MS-1
MCGIAGFVGDGDRDILAAMAGAIAHRGPDGEGLWIDPERAVHLAHRRLAVIDLEGGAQPMWSGDGRIGVVFNGEIYNHRALRRDLESLGHVFASDHSDTEVLIHGWRQWGRDLPGRLNGMFAFAIHDRERGSLFLARDRFGEKPLYVVERPGLFAFASEISALLRHPGVPAEADALAIRKFFAYCLFPAPHTPFKAIAKLPAGHWLELSLSGLTTERGCYWRFAIEPEETGRSETELAEELRALLDASVRDRLESDVPLGIFLSGGIDSSAMLALAARHRPAASLDGFSIGFTEASFDESAFARRMAAEVGCRHHVETCDLDAARRDLPDLLARLDEPSGDPSILPTSLLCRFARRSVTVALSGDGGDELFGGYDPLTALAASRRYRALVPGAVHPAIEALAGLLPPSDANMSLDFKIQRWLRGVGREPSMWLPGWMGALSPSEIDQVFGSRLAPEELYSEAIERWEACASPDPIDRALDYFTAFYLQDGILTKSDRASMQVALEVRAPFLDNDVADFARRLPSRFKVAGGQRKVLLKKAVRGLVPDALIDRPKKGFGIPLARWLRDMDPPTAGTPLLDDAWLRQRWERHRTKRQDCRHGLWCWLALERRFSTVN

SEQ ID NO: 7334 - protein, 1211 aa, Oryza sativa
MRDLQLSLNQTQRVRLEAALHELQTVAPAAAVTVADTIPVNDEDNILKGHGTSDQDGEVVATLCGVVERVNKLVYVRTLRARYKPEVGDIIVGRVIEIAPKRWRLEINFSQDAVLMLSSMNLPDGIQRRRTAVDELNMRTIFEENDVICAEVRGFQHDGSLHLQARSQKYGKLERGQLLVVPAYLVKRRKQHFHHLEQYDVDLILGCNGFIWVGEHVVVGENANMMENKLNLSAEVENFTPLETRKHICRLANAVRVLSALGFTLTVELIIETAEASVSSNIEINNMLGAEFYVQTAERETSSEILNLGKFANLPLPLDAEQAGKRGFSEASALEHVKYLAALGPHPVGSDSIDLAVQYVYAVADKIKKTAHWDVDVQLELFHTDIGANRMAGGLFNGKTMLYSNLKHVILRVVPKYLPEAEDNLILVSSHIDTVSTTEGAGDCSSCVGVMLELARGVAQWAHGFKSGVLFLFNTGEEEGLDGAHSFITQEWGWVVYISTSFEYPLLHGNGGLVVFTVQHRHRWRNSVRFAIDLEAMGISGKSTLFQGTDHWALESFASVAKYPSAQIASQDVFQSGAIKSATDFQIYQEVGGLPGLDFAYTDRTSVYHTKNDKMKHLKPGSLQHIGENMLAFLLHAAASPKFMKDAIQAKQEGAEKTKAVFFDILGKYMVVYPQRLTTMFHNSIIFQSLLIWGTSLLMGGRPGLVSFGISCLGIVLMLISSVTLSVVVAIALPHICSFPVTFVAHPWLVVGLFGSPALLGAFIGQHIGFIILKRHLKHVYSITKSGLAHNMLEQIVNLEAERWIFKSGFVQWLIVLILGTYLKVGSSYIALIWLVSPAFAYGLMEATLSPARSPKQLKVITLVLALAAPVVSSAGLVIRMVDVIIGSIVRIDRNPGGLPDWLGNVVVSVAIAIVICFTFVYLLSYVHISGAKRTLGFLLCIFFGLALALVSSGILPAFTEDIARSVNVVHVVDTTTVNSGNTEPSSYVTLFSNTPGKLTKELVDLRDEEFSCGRNRAIDFVTFTMKYGCLSYEGTNTGWSKSEVPVLSLKSDSVTNDARQTIISVDTKSSTRWSLAINKQEIDDFTVHVDSENLVPLGNKSEIDGWHTIQFAGGLVVLYVLVVMEKSKALPDFRHSSLSISDCCGRLAIVQVYYPCLVSSNNEVDEKRQSNNEVDTKRQSLNRSESPHWRTEDALCRGGAKAKWRVVPLA

SEQ ID NO: 7335 - protein, 69 aa, Glycine max
DKDSFLFDSCPHVSSIENQDQFCTRDIKGSEGQMVRLVCVTTFNDTGVAGMLNLRDHDRYALSCATHIS

SEQ ID NO: 7336 - protein, 95 aa, Vibrio vulnificus CMCP6
MQINIQGHHVDLTDSMQDYVHTKFDKLERFFDHINSIQVVLKVEKIHQIAEATLHVNQGEIHASSDDENMYAAIDSLVDKLVRQLNKHKEKLHSH

SEQ ID NO: 7337 - protein, 366 aa, Pseudomonas aeruginosa UCBPP-PA14
MALLPLALLTPLLAPLRRLAARGWLPQADVDGLLRHAHPLASLNRHYARVEARYWVADDMLALALRTAPGWPPARPGQHIQLLAERDGVRVGRSYSLTRVVGERLEIAVKRHPDGLLSPWLCEHLAVGQRVELQPAQGDLRWPMQAEAVCLLAAGSGLTPLLGLLREALENGYRGPVLWLHYARHPGQRAWFGELEALAARHPNLELRWSLTRGARADGCLEGHFQPRHLDGWAADLARSQALACGPAAFVEAVGEQLGARFAGLQTESFSVPRWRSGEAPREVRLRFARSQREVSGDSAASLLEQAEAHGLRPAHGCRQGICASCTCVLLSGCVRDLRSGALCSEPGQSIRLCVSAAHGDLALDL

SEQ ID NO: 7338 - protein, 159 aa, Synechococcus sp. WH 5701
MAVNVSDVVVRGATGGEQRLGDFAGQVLLIVNVASRCGFTRQYAGLQKLQDSYGPRGLQVLGFPCNDFGAQEPGTLPEIQQFCATTYGASFTLFDKVHAKGVKTAPYDLLTTVEPAGDVEWNFEKFLVGKDGTVLARYKSAVEPDGAELTAAIEAALAA

SEQ ID NO: 7339 - protein, 326 aa, Streptomyces coelicolor A3(2)
MSTAKDVRDVIVIGSGPAGYTAALYTARASLNPLVFGGAIFVGGSLTTTTEVENFPGFPDGVQGPELMENMRAQAERFGAEMVDDDIVAVDLTGDVKTVTDTAGTVHRARTVIVATGSGYRKLGVPKEDELSGRGVSWCATCDGFFFRDRDIVVVGGGDTAMEEATFLTRFARSVTVVHRRSALRASQVMQNRAFSEDKISLAFDSEVATLHEENGMLSGMTLRDTLTGETRELATTGLFIAIGHDPRTELFKGQLHLDSEGYLMVESPSTRTNVPGVFGAGDVVDHTYRQAITAASSGCAAALDAERYLAARSDTSVSAEVVAVA

SEQ ID NO: 7340 - protein, 1014 aa, Oryza sativa
MISLHSAPFTLLVKLPGRRRSGLTPPRCAVRGAGNVSSAAVREMAVAEGRRQHEYSIDARLRQLAPEKVSADDRLVDYETLLVARFLDILEDLHGGDFRQVVEDCLRLSGEYQSEGDPARLGELGGLLTSLDVGDAIMVASSFSHMLNLANLAEEIQMVYRKKAEASRRGDFVDEASAPTESDIDETFQRLVRGLGKSPREVFDALRSQTIDLVLTAHPTQSVRRSLLQKHASIRSCLTQLCGEGISDNEEQEIDEALQREILAAFKTDEIRRTPPTPQDEMRAGMSYFHDTIWNGVPKFLRRVDTALKNIGIDERLPYNAHEDQFSSWMGGDRDGNPRVTPEVTRDVCLLARMMAANMYFSKMADLMFELSMWRCNDELRARANELHRKSSRKYAKYYIEFWKKISPGEPYRIILGDVRDKLYNTCERARQILSKGISSIPEDQTYTNVEQFLEPLELCYRSLCDCGDKLIADGRLLDLMRQVSTFGLSLVKLDIRQESERHTDAMDAITTHLGIGSYREWPEERRQEWLVSELRGRRPLFGPDLPQSEEVADVLGAFRVIAELPADSFGAYIISMATAPSDVLAVELLQRECGVKKPLRVVPLFEKLADLQQARATMELLFSVDWYKERIDGKQEIMIGYSDSGKDAGRLSAAWQLYKAQEEIVGVAERHGVKLTIFHGRGGTVGRGGGPSHLAILSQPPNTVNGSLRVTVQGEVIEKSFGEENLCFRTLQRFTAATLEHGMNPPVSPKPEWRRLLDDMATVATDEYRSIVFQEPRFVEYFRAATPETEYGRMNIGSRPSKRKPGGGIESLRAIPWIFAWTQTRFHLPVWLGFGAAFRHAMQQSDAGGGLATLREMYDEWPFFRVTIDLLEMVFAKGDPGIAALYDELLVPDDLRPFGEQLRANYVETQRLLLQVAGHKDLLESDPYLRQRLMLRDSYITALNVCQAYTLKRIRDGGFRPETRPPLSKELLGSSAVAEKLVKLNPNSEYDPGLEDTLILTMKGIAAGMQNTG

SEQ ID NO: 7341 - protein, 122 aa, Triticum aestivum
MASLKVACVVAVMCMVVVAMSAAPMAQAAITCGQVAGDMSPCFSYLRSGGKPSQACCNGVKSLSSAAKTTADRQGACSCLKNLANNMGQSLNAGNAASLPGKCGVNIPYKISTSTNCATIKF

SEQ ID NO: 7342 - protein, 434 aa, Sulfolobus solfataricus P2
MSWNNFLFLKYLIKAMEELLTSNLFVQQVKKLYKVGELLGLDIDTLEALSQPERVIQVKIQIRGSDGKLRTFVGWRSQHNSALGPYKGGVRYSPNVTQEEVIALSMIMTWKNSLLLLPYGGGKGGIRVDPKKLTLKELEDLSRKYIQLIHNYLGSNVDIPAPDINTNPQTMAWFLDEYIKITGEVDFAVFTGKPYELGGIGVRLYSTGLGVATIAREAANKFIGGIEGSRVIIQGFGNVGSFTAKFLSEMGAKIIGVSDIGGGVINENGIDVNKALEVVQRTGSVVNYPEGKKVTNEELLISDCDILIPAAVENVINKFNAPKVKAKLIVEGANGPLTADADDVIKQSGIVVIPDILANAGGVVGSYVEWANNKSGGIISDEEAKKLIIDRMTNAFNTLYDFHKRKFADQDLRTVAMALAVDRVVKAMKARGLL

SEQ ID NO: 7343 - protein, 421 aa, Leptospira interrogans serovar Copenhageni str. Fiocruz L1-130
MSVEIKVPEMGESITEATIANWVKKEGESVKQDEILLELETDKATMEVPAPSSGVLQKIHKKAGETVKVKEIIGLIDSSATASSPSPSASAPTNSAQTTQTSGNGTINETLPPAVRKLIEDNGLNPASITGSGKNGQITKEDVLKAIETKATSSVSNASVNVGTPAAVKATLTLPEIPKAVPAARRTDLPRENVVPMTRLRKVIAERLVSAQHNAAILTTFNEVDMSAVMELRNRYKDKFKEAHNVSLGFMSFFTKAAIHALKTIPAINAEIRGSDIVYKNYYDIGVAVGGPKGLVVPVVRDADLLSFAGVEQEIIRLANRVKDGKIELAEMEGGTFTISNGGIYGSMMSTPILNPPQSGILGLHNIVKRAVVVNDQIVIRPMMYLALSYDHRIVDGKEAVTFLVKVKEAIEDPSRLLLEL

SEQ ID NO: 7344 - protein, 357 aa, Bradyrhizobium sp. BTAi1
MRTHSIAAIPADGIGPEVISAGVRVLEALAKRSGDISFNVKTFDWGSDYYKKNGVMMPADGLAELKKFDAIYFGAVGAPDVPDHITLWGLRLPICQGFDQYANVRPTKILPGVSSPLRNVGVGDLDWVIVRENSEGEYAGMGGRAHRGLPEEVGTEVAVFTRIGVTRIMRFAFKLAQSRPRKFLTVVTKSNAQRHGMVMWDEIAAEVAREFPDVTWDKMLVDAMTVRMTLQPKSLDTIVATNLHADILSDLAGALAGSLGVAPTGNIDPERRFPSMFEPIHGSAFDITGKGIANPVATFWTGAQMLEHLGEKEAATRLMAAVEKVCAAGILTPDVGGKATTKEVTDAVIDAIHGSNV

SEQ ID NO: 7345 - protein, 149 aa, Triticum aestivum
  misc_feature (73)..(73): Xaa can be any naturally occurring amino acid
  misc_feature (80)..(80): Xaa can be any naturally occurring amino acid
  misc_feature (98)..(98): Xaa can be any naturally occurring amino acid
  misc_feature (106)..(106): Xaa can be any naturally occurring amino acid
  misc_feature (115)..(115): Xaa can be any naturally occurring amino acid
  misc_feature (124)..(124): Xaa can be any naturally occurring amino acid
  misc_feature (126)..(126): Xaa can be any naturally occurring amino acid
  misc_feature (129)..(129): Xaa can be any naturally occurring amino acid
  misc_feature (138)..(138): Xaa can be any naturally occurring amino acid
  misc_feature (142)..(142): Xaa can be any naturally occurring amino acid
MRPLDEKETTQVFEKLFKFTGPNLKHLLERPAVEGPDAEPGRYCLRLHRNRVYYASEALVRRATAVSRPRLAXRGDAHRXFTHHGAFHLTATRSTPRXTARRRVWXKPDTERPFXLGFRAKSSXAXITXNTKRGRVAXSMVXPLGSDEP

SEQ ID NO: 7346 - protein, 175 aa, Triticum aestivum
MAPTVMASSATSVAPFQGLKSTAALPVSRRSNGASLGSVSNGGRIRCMQVWPIEGIKKFETLSYLPPLSTEALLKQVDYLIRSKWVPCLEFSKVGFIFREHNTSPGYYDGRYWTMWKLPMFGCTDATQVINEVEEVKKEYPDAYVRIIGFDNMRQVQCVSFIAFKPPGCEESGKA

SEQ ID NO: 7347 - protein, 637 aa, Nostoc punctiforme PCC 73102
MRSRSVSAGESLSQISLPQTENHKQSRASSPPVLPKRASGGFALLDSLHRHGVDYIFGYPGGAILPIYDDLYKVEATGAIKHILVRHEQGAAHAADGYARATGKVGVCFGTSGPGATNLVTGIATAYMDSIPMIVVTGQVARPSIGTDAFQETDIYGITLPIVKHSYVVRDPKDMARIVAEAFHIASTGRPGPVLIDVPKDVALEEFDYVPVKPGSVKLRGYRPTVKGNPRQINAAIQLITESRRPLLYIGGGAIAAGAHEEIKELAELFNIPVTTTLMGIGAFDEHHPLALGMLGMHGTAYANFAVSDCDLLICVGARFDDRVTGKLDEFASRAKVIHIDIDPAEVGKNRIPEVPIVGDVRNVLVDLLRRCKETGVKATPNQNQEWLNLVNRWRDEYPLIVPQHPDSISPQEVIVEVNSQAPNAFYTTDVGQHQMWAAQFLKNGPRRWISSAGLGTMGFGLPAAMGAKVAFPDEEVICISGDASFQMCLQELGTLAQYGINVKTIIINNGWQGMVRQWQQAFYGERYSCSNMEVGMPDVELLAKAYGIKGMVISDRSQLKDAIAEMLAHKGPVILNVHVTRDENCYPMVAPGKSNAQMVGLQKQPPKAAAEPVYCSNCNAKNAPNHNFCAECGTKL

SEQ ID NO: 7348 - protein, 155 aa, Aster tripolium
MGSGGGYEKGKHGGIQNPLRSTDHEMGNKGTNIHSTTGGHGIGSTGTTMGSGGGQGYEEGKHGATGGILHRSGSGSSSSSEDDGEGGRRKKKGVIGKIKEKLPGGQQGSDEQSRLQAPATHVGAGGGGHGYQGEEVPEMMGLMNKIKDKLPGGNH

SEQ ID NO: 7349 - protein, 372 aa, Nostoc punctiforme PCC 73102
MVATPEKVQHTHEHLSGKDRVAVLLMGYGEVESYEDFANYNEQALNLLTAKFAPVPTWIYPPLAKLLALFDRHEWGHTHHDFISPHNAIFEQQRAGIEKNLQEKWGDKVQVFKAFNFCAPFLPNQVLAEIKNKGFEKLLIYPLLVVDSIFTSGIAIEQVNNALVELTDGEEHWVKAQRYIPSFFNEPAYIDLMAHLVEEKIAELAGAYLPSQIGIVLMNHGCPHKAKGFTSGIAESEAMYDLVRDKLINRYPLISVGWLNHDTPLIDWTQPNAEQAANNLIQLGAKVVILMPIGFATENHETLLDVHHIIHALEKQHPGTNYVQMACVNDRPEFLAMVAQWADDHIAELLSEQPLAVNPQLAGDHHHHHHHH

SEQ ID NO: 7350 - protein, 957 aa, Salmonella enterica subsp. enterica serovar Typhi str. CT18
MTQTLSQLENRGAFIERHIGPDAAQQQEMLNAVGAESLNALTGQIVPKDIQLATPPQVGEAATEYAALAELKAIAGRNKRFTSYIGMGYTAVQLPPVILRNMLENPGWYTAYTPYQPEVSQGRLEALLNFQQVTLDLTGLDMASASLLDEATAAAEAMAMAKRVSKLKNANRFFVAADVHPQTLDVVRTRAKTFGFDVIVDDADKVLDHQDVFGVLLQQVGTTGEIHDYGTLISELKARKVIVSVAADFMALVLLTAPGKQGADIVFGSAQRFGVPMGYGGPHAAFFAAKDEFKRSMPGRIIGVSKDAAGNTALRMAMQTREQHIRREKANSNICTSQVLLANIASLYAVYHGPVGLKRIANRIHRLTDILAAGLQQKGLKLRHAHYFDTLCVEVADKAAVLARAEAAEINLRSDIHNAVGITLDETTTRENVAQLFNVLLGDSHGLNIETLDKDVALDSRSIQQGMLRDDAILTHPVFNRYHSETEMMRYMHSLERKDLALNQAMIPLGSCTMKLNAAAEMIPITWPEFAELHPFCPPEQAEGYHQMISQLSDWLVKLTGYDAVCMQPNSGAQGEYAGLLAIRHYHGSRNEGHRDICLIPASAHGTNPASAHMAGMQVVVVACDKNGNIDLDDLRAKAEQHAANLSCIMVTYPSTHGVYEETIREVCEVVHQFGGQVYLDGANMNAQVGITSPGFIGADVSHLNLHKTFCIPHGGGGPGMGPIGVKAHLAPFVPGHSVVQIEGMLTRQGAVSAAPFGSASILPISWMYIRMMGAEGLKQASQVAILNANYIASRLKDAYPVLYTGRDGRVAHECILDIRPLKEETGISELDIAKRLIDYGFHAPTMSFPVAGTLMVEPTESEGKAELDRFIDAMLAIRAEIDQVKAGVWPLEDNPLVNAPHIQSELVAEWAHPYSREVAVFPAGVADKYWPTVKRLDDVYGDRNLFCSCVPISDYQ

SEQ ID NO: 7351 - protein, 412 aa, Oryza sativa (japonica cultivar-group)
MNALAATSRNFRQAARLLGLDSKLEKSLLIPFREIKVECTIPKDDGTLASFIGFRVQHDNARGPMKGGIRYHPEVDPDEVNALAQLMTWKTAVAAIPYGGAKGGIGCAPGELSTSELERLTRVFTQKIHDLIGAHTDVPAPDMGTNSQTMAWILDEYSKFHGHSPAVVTGKPIVSLGGSLGRDAATGRGVMYATEALLAEHGKSISGSTFVIQGFGNVGSWAARIIHEKGGKVIALGDVTGSIRNKNGLDIPALMKHRNEGGALKDFHDAEVMDSSELLVHECDVLIPCALGGVLNRENAPDVKAKFIIEAANHPTDPEADEILAKKGVTILPDIYANSGGVIVSYFEWVQNIQGFMWDEEKVNMELHKYMNNSFQHIKAMCKSHDCNLRMGAFTLGVNRVARATLLRGWEA

SEQ ID NO: 7352 - protein, 307 aa, Desulfovibrio desulfuricans G20
MRSRSLYNRVQNTASWCKSNTFFPDFSFPASCGGWTPPPRWFTIKKTNPHHDSHGERMSDTGKNKLGVIVDTVRENDDTTSIFFRPEDDERFKAFRPGQFASIRVMTEEGWSEPHPFTISGAPGDTLRMTIKRNGRFTGEIIPALKAGVPIQCAGPFGAFCRDIEGEEQIVFVAGGVGITPFLSVLRHFRNTDAANSIVLFWCNKTYADAFAAQELEEIADTIDLTVVHVLSREHKPDLYEEEDKPRIRFEKGHFSRHMLERHIRSTTASFYLCGPGPMQEHVLDEMAAYGIDPAGVNKEQFVFTGK

SEQ ID NO: 7353 - protein, 401 aa, Pisum sativum
MISSLRQPSISISGSDVVLRKRHATLIQLRPQSFSPFSSREKSQRSVVSTKKPLHLACLGVGNFGSVKNFESEASFGQSDLVKCGAYEADRSEVEGGDGTPSEAAKKVKIGIYFATWWALNVVFNIYNKKVLNAYPYPWLTSTLSLACGSLMMLISWATRIAEAPKTDLEFWKTLFPVAVAHTIGHVAATVSMSKVAVSFTHIIKSGEPAFSVLVSRFILGETFPVPVYLSLLPIIGGCALAAVTELNFNMIGFMGAMISNLAFVFRNIFSKKGMKGKSVSGMNYYACLSILSLAILTPFAIAVEGPAMWAAGWQTALSEIGPQFIWWVAAQSIFYHLYNQVSYMSLDEISPLTFSIGNTMKRISVIVSSIIIFHTPIQPVNALGAAIAVFGTFLYSQAKQ

SEQ ID NO: 7354 - protein, 555 aa, Glycine max
MAAKTSTNGTHYSRSRPEYIPNRIPDPHYVRILDTTLRDGEQAPGASMVSSQKLARQLAKLGVDVIEGGFPSASQEDFNAVKMIAQEVGNNCDADGYVPVIAALCRCNEKDIATAWEALKYAKRPRLMPFIAVSPIHMEYKLNKTKEEVLQIAKDMIKFARSLGCSDIQFCSEDAARSDREFLYQILEEVIKAGATTLGIGDTVGITMPFEIRQLIADIKANVPGAENVIISMHCHNDLGHATANAIEAAQAGAMQLEVTINGIGERAGNASLEEVVMALKCRGDQVLGGLYTGINTRHLLKTSKMVEEFSGMYLQPHKAVVGDNAFLHESGVHQAGLLKHRATYEIMSPEDIGHEKSSGVNMVLGKLSGRQALKSRLKELGYELRDEEVESVFRNFKAIAEKKKRVTDVDLKALVSNQVSHDEPIWKLDGLQVTCGTMGSSTATIKLVTSDGITHVACSVGVGPVDSAYKAINLIVKETVKVLEYSLSTVTEGTDAIATTRVVIRRENKQSPTPALNGNVIYPTFSGTGEGVDVVTSSVEAYLTALNKMLDLKE

SEQ ID NO: 7355 - protein, 393 aa, Solanum tuberosum
YAFSTNFDPLQQNLWGSKPPISSLSIKDIDFKQCDKHNILSKKPLYISAVLSGFGHADESKEFKSRDPLVQCNAYEASQPQSIPIDIEFGQEAQAAATQKLKIGLYFATWWALNVVFNIYNKKVLNAFPFPWLTSTLSLAAGSLMMLVSWATKIAETPKTDFDFWKALFPVAVAHTIGHVAATVSMSKVAVSFTHIIKSGEPAFSVLVSRLLGETFPLPVYLSLLPIIGGCGLAAITELNFNLIGFMGAMISNLAFVFRNIFSKKGMKGKSVGGMNYYACLSMMSLLILIPFAIAVEGPQVWALGWQNAVSQIGPNFIWWVVAQSVFYHLYNQVSYMSLNEISPLTFSIGNTMKRISVIVSSIIIFQIPIQPINALGAAIAILGTFLYSQAKQ

SEQ ID NO: 7356 - protein, 553 aa, Daucus carota
MNRNSINILNYMQFTDAYLDKYGVLMTLELYSNNISGPIPSDLGNLTNLVSLDLYMNSFSGPIPDTLGKLTRLRFLRLNNNSLSGPIPMSLTNITTLQVLDLSNNRLSGPVPDNGSFSLFTPISFANNLNLCGPVTGRPCPGSPPFSPPPPFIPPSTVQPPGQNGPTGAIAGGVAAGAALLFAAPAMAFAWWRRRKPREHFFDVPAEEDPEVHLGQLKRFSLRELQVATDTFSTILGRGGFGKVYKGRLADGSLVAVKRLKEERTPGGELQFQTEVEMISMAVHRNLLRLRGFCMTPTERLLVYPYMANGSVASCLRERQPSEPPLDWPTRKRIALGSARGLSYLHDHCDPKIIHRDVKAANILLDEEFEAVVGDFGLARLMDYKDTHVTTAVRGTLGYIAPEYLSTGKSSEKTDVFGYGIMLLELITGQRAFDLARLANDDDVMLLDWVKSLLKEKKLEMLVDPDLENNYIDTEVEQLIQVALLCTQGSPMERPKMSEVVRMLEGDGLAEKWDEWQKVEVIHQDVELAPHRTSEWILDSTDNLHAFELSGPR

SEQ ID NO: 7357 - protein, 74 aa, Kandelia candel
REEPTEPVTPAPKVSTKFSDVLAFGGPGPERINGRLAMIGFVAAMAIELSKGQDVFTQISNGGVTWFLGATLVV

SEQ ID NO: 7358 - protein, 343 aa, Coxiella burnetii RSA 493
MAVKNNNKIGVLLINLGTPDEPSVPAVRRYLRQFLSDPKVIDVPSLVRWIIVHLCILPFRPKRSAKLYQKIWMPEGSPLLVYSEMLRERVGETLGDDFCVALGMRYGKPSIETALKKLQEAQCRQLIVLPLFPQYSTSTTASALEEVRAKNSFKEMTVIDRFFEEPHYIDSMTTLIHENLNEFQPDYFLFSYHGLPERHLVKSGCQLAICNRKNNCSPISSSNENCYRAQCFETSRLIAKKLNLTDQQYGVAFQSRLGRAKWIEPYTDKYLIELSKKGIKKLMVVCPSFPVDCLETLEEIGIRAQSQWQRLDGETLKLIPSLNAHPQWVNAIAKMAKKSLQLF

SEQ ID NO: 7359 - protein, 409 aa, Desulfovibrio desulfuricans G20
MRILVQKFGGTSVANLECMQQVKQKVLHARENGYKVIAVLSAMSGETNRLLNMAGQWSQCPDEAEVDALISTGEQVSVSLFAMLLQNEGIKARSVLGFQIPLKTNTAYSRARILDIRKDTLVELLEAHDVLAVAGFQGINDDNRITTLGRGGSDTSAVALAAALGCECEIYTDVDGVYTTDPNMCSAARKLDRISYDEMLEMASMGAKVLQIRSVEFAKKYKVPVRVRSTFTNDSGTLLTQEDSQMEAVMVSGIAYDKDQARITLRGVPDTPGVAASLFCPLADAGIVVDMIVQNPSLDGVTDMTFTVPRKDLTRALELVEKTRAEVGAKEVLHDLNVCKVSAIGVGMRNHSGVASKTFATLRRENINILMISTSEIKITCLIEEKYTELAVRTLHDAFGLDKDQSQAG

SEQ ID NO: 7360 - protein, 172 aa, Brassica napus
  misc_feature (155)..(155): Xaa can be any naturally occurring amino acid
EQSFGEEHLCFRTLQRFTAATLEHGMRPPVSPKPEWRDPRVRGRVGATEEYRSVVFQEPRFVEYFRLATPELEYGRMNIGSRPSKRKPSGGIESLRAIPWIFAWTQTRFHLPVWLGFGAAIRHVVEKDVKNLHMLQDMYQHWPFFRVTIDLIENXSAKRGSGIRCLYHKLFV

SEQ ID NO: 7361 - protein, 538 aa, Desulfovibrio desulfuricans G20
MKHIEIYDTTLRDGTQAEDINLSTEDKIKIALKLDELGVRYIEGGWPGSNPVDRSFFSDIENYALKTARIAAFGSTHHPNFQAQEDPNLRAIIESGVSTATIFGKSWDVHVKEALRVTEQRNLEIVHDSVAYLRQKLSEVLFDAEHFFDGFKANPDYALAVLRQAYAAGARVLVLCDTNGGSLPSEVATITASVRKALPDAALGIHAHNDCELAVANSIAAVQSGATHIQGTMNGVGERCGNANLCSIIPTLEQKFARTYQCLPEGRLPQLTRISHFVSEVANVQPFSRQPFVGRSAFAHKGGIHASAVNRMASLYEHMDPEEVGNRQRVLLTELAGRSNIVSIARRFGFHLDKDEPVVKGLLKELKDNASLGYDYAAAEASVELLLFKKLARRGVRQFFRLINFRVIESKQGRDAEPMSEATVMVEVEGVEEHTAASGRGPVNALDNALRKALSGFYPRLNEMRLLDFKVRVLNGSKRSDGGTASVVRVLIESGDQHSRWVTVGVSFNIIEASWQALVDSITYKLYKDEGEQRAKLG

SEQ ID NO: 7362 - protein, 1213 aa, Oryza sativa
MPEPEVGVLGGRGLHRDGLKGWPDLRSLSGKKMTTPPPPPVEKQQQQARPAAVAPPDQTLEFSDGLLLRVLACLPEPHLTGAASLVCRRWMRLAGRLRRRLVVRDWAFVTHRLHHRFPELADLDLFPASIVAPAVPSPTSPLLTCAEVSLTLDTGADPPLVACRFLADDVLDRGLVAVAASFPNLRRLSATAASESGGLMDIAGGCATLQELELHRCTDLALRPVSAFAHLQILRLVAASSALYGTSEDGGVTDIGLTILAHGCKRLVKLELVGCEGSYDGIAAVGRCCAMLEELTIANHKMDNGWLAALAFCGNLKTLRLQGCCRIDDDPGPAEHLGACLTLESLQLQQCQLRDRRALHALLLVCEGARELLVQNCWGLEDDMFAMAGLCSVRRYNACKLQCMDPSMFGVSMPLLLLWRVKFLSLEGCSQLTTRGLESVITSWSDLQSLKVVSCDKIKDEEISPALSELFSTFKELKWRPDNKSRLAASLAGTGMGKKGRVLCKRLREREMKGKGQRTDAGAQLSTNRARMSVKGRAPPPEEGKKNGEKMAAAAAIPIPIPCVAEPTAASRVSPGSSPARSDASEGAAFYAADTEAEPEASVGRSTQMLLAMAAMGGRGGPYGRRPASSYGSCAAWSAGSLTDHRPASPSPICSPVSSNGGEGCRDVERTNPVPPRFIHKATPARLMRRARSSHNYRRRLGAMDAINEWRLPKVSEEEDEAVDQTDWQADTLSSRISSARDWNFEAGGAYEGSDHNGVQRMGRWPQGSAVKHKENFVHAKLVAWKNAEIEKLIDKLRRKEADIDEWQMNQVTQAKEKMKRIEIKLEKKRARAAEKMQKAIKDAQKKADKKKIKEHAATDNQIASVERAMVKMSRTGKLPWFLEVFVCPSNCNQNNSSALSTIPMRSGEGRDCEVPGSTAVQGTNVPTISQEQDRSVYKELRSQNEEFFELFMLKVSLKRQIDRVNHHLALCRKLWRQANESAGGHRCGNSSCSGGHRHRAVAVPVPHAEATPRAMPSTPLAVPLPATAMAQRTQCNLARMPRPQQPNCGGRPGSSRGGAVGLSAAGRMLETPGQPHVAPNGWPAGHGHPASGTLAAAMACSSRPVARQQGNRREQGWDAHQAQVGAQHQNLPRFPPQQGGGNIGERQGQGQFRPGTPSYVQEQRPPPQSSSSHEALQAGERQQANNNSSGSSRQQRQTDTATVASRREPMSK

SEQ ID NO: 7363 - protein, 207 aa, Candida albicans SC5314
MPPPDKARRDVLISKALSYLLRHGAEKEKLSIDDQGYVKISDVLSHQRLKSLKTTRDDINRIVQENDKKRFTIKDDMICANQGHSLKAVKNDNLTPMTVDELNQLRIYHGTYRTKLPLIKSSGGLSKMNRNHIHFTCEQYSTCSGIRYNANVLIYINASKCIEHGIVFYKSLNNVILTSGDKDGKLSWEFIDRIVGLDGNEINKEQV

SEQ ID NO: 7364 - protein, 175 aa, Triticum aestivum
MAPTVMASSATSVAPFQGLKSTAGLPVSRRSNSAGLGSVSNGGRISCMQVWPIEGIKKFETLSYLPPLTVEDLLKQIEYLLRSKWVPCLEFSKVGFVYRENHRSPGYYDGRYWTMWKLPMFGCTDATQVLKELEEAKKAYPDAFVRIIGFDNVRQVQLISFIAYKPPGCEESGGN

SEQ ID NO: 7365 - protein, 398 aa, Geobacillus kaustophilus HTA426
MMFDTIEAALSALKNGEVIIVCDDEDRENEGDFVVLAEKATPDVINFMITHGRGLVCVPITEELAERLELEPMVTHNTDAHGTAFTVSVDYKTTTTGISAYERAATIQALLDPNVKASDFKRPGHVFPLIAKKGGVLRRAGHTEAAVDLARLCGAKPAGVICEIIKEDGTMARVPDLRQIADQFGLKMITIKDLIAYRSQREKLVKREVDVWLPTEFGEFRAIGYTNVLDGKEHVALVKGEIIPDEPILVRVHSECLTGDVFGSYRCDCGPQLHAALRQIEAEGRGVLLYMRQEGRGIGLMNKLRAYKLQEQGYDTVEANEKLGFPADLRDYGIGAQILKDLGVTKMRLLTNNPRKIAGLKGHGLEVVERVPIQMPAKKENEKYLRTKHEKLGHMLHF

SEQ ID NO: 7366 - protein, 500 aa, Mycobacterium tuberculosis CDC1551
MTTLWQPHRNDYSPIPGRGVHARRGARRPRPRGGRAERPGTGQLTRSGRRALLVGLTAASVGVLYGYDLSAIAGALLSLSEEFELTTREQELLTTTAVLGQIAGALGGGILANAIGRKKSVVLIVAGYAVFALLGATSVSVPMLVVARLLLGVTIGLSVVVVPVYVAESAPAAVRGSLVTAYQLATLSGIVVGYLVGYLLAGSHGWRAMFGLAAAPATLLLPLLWRMPIPPAGICSRAGSPTRVAAADPAGRDIDAELADMAAAVDERGGGIGEMVRRPYLRATLFVIALGFLVQITGINAIIYYSPRLFAAMGFAGYFAMLALPAMVQVAGLAAVCASLFLVDRLGRRPILLSGIATMITADAVLITVFANDSDGGTGLVLGFAGVLLFIIGFNFGFGSLVWVYAAESFPSRLRSMGSSLMLTSTLTANAIVAAFSLTMLRVLGGAGVFAVFGTFAVVAFVVVYRFAPETKGRKLEEIRHFWENGGRWPAERSPAADEP

SEQ ID NO: 7367 - protein, 679 aa, Magnaporthe grisea 70-15
MGSARVIYWFRTDLRLHDSPALQAALDLDPAVLWPIFTWDPHYVYRSRGGLNRWQYLLDCQNDLSASITNLNPRSKLFVLREAPQSLFPKLFKAWKVTHLVFEKDTDAYARQRDEVVKKAAQAAGVKVITRYGRTLWDSDAIVKANGGEPTMSMARLRTVGAKVGSIPRPIPAPKALPDPGEMPLDFNLDLPDVGQDYNAKWRSEGKEKAYGAIAGPNGDFAIETLEELGYPPATTPYKGGESLALRELDAIIENQVYTATFRKPQTSPAAFEPQSTTLLSPAMHFGSLSVRLFYHRVQDTVDAYNQAKKKGASLPPESLTGQLLFRDMYFAAQAAIGPCFSQTAGNAHCRFIPWHLPSHVEDNAVSGQVLRKFEYEVDSEQAESWFRRWEAGQTGFPWIDALMRQLRVEGWIHHLGRHSVACFLTRGGCYVSWERGLDVFEELLLDHEPACNAGNWQWLSCTAFFSQYFRCYSPISFGKKWDPDGTFIRKWVPELASLDKKYIYEPWKAPEAELRRAGVVMVSGHDFGVKTEQGKHKAGAVRVKKEGGVGGGGASGTYFTPMFDFDERRRVCMRLMKQAYDAGLKGDDLRVLNGSWRDLFAEEDKPDIDMLDGDAKHHESDEGEFADDAEPKIKREDSGDGSGPGRATRASKREKKPAKGQSTLDGHFLTKRQKTDQK

SEQ ID NO: 7368 - protein, 141 aa, Arabidopsis thaliana
  misc_feature (56)..(56): Xaa can be any naturally occurring amino acid
  misc_feature (65)..(65): Xaa can be any naturally occurring amino acid
  misc_feature (95)..(95): Xaa can be any naturally occurring amino acid
  misc_feature (107)..(107): Xaa can be any naturally occurring amino acid
  misc_feature (112)..(112): Xaa can be any naturally occurring amino acid
  misc_feature (116)..(117): Xaa can be any naturally occurring amino acid
  misc_feature (129)..(129): Xaa can be any naturally occurring amino acid
  misc_feature (139)..(139): Xaa can be any naturally occurring amino acid
DITSITSNGGRVNCMQVWPPIGKKKFETLSYLPDLTDSELAKEVDYLIRNKWIPCXEFELEHGFXYREHGNSPGYYDGRYWTMWKLPLFGCTDSXQVLKEVEECKKXEYPNXFIRXXGFGNNRQSPVHXVSLPSKPPRXTG

SEQ ID NO: 7369 - protein, 227 aa, Haemophilus influenzae 86-028NP
MELVFIRHGFSEWNAKNLFTGWRDVNLTERGVEEAKAAGKKLLDKGYEFDIAFTSVLTRAIKTCNIVLEESHQLWIPQVKNWRLNERHYGALQGLDKKATAEQYGDEQVHIWRRSYDISPPDLDPQDPNSAHNDRRYANIPSDVVPNAENLKLTLERALPFWEDQIAPAMLSGKRVLVVAHGNSLRALAKHIIGISDAEIMDFEIPTGQPLVLKLDDKLNYVEHYYL

SEQ ID NO: 7370 - protein, 585 aa, Treponema denticola ATCC 35405
MTVNDRVAALRQKMKEHSLSAYLIPSSDPHQSEYLPENYKTREFISGFTGSAGTVLVTKDKAILWTDGRYFLQAEKQLKGSVVELYKMLEPGVPTINEFLKSNLKSGEKLGMDGKVVSVFNFDSMKKELEGIEFVTNIDLIGEIWENRPQAVLSKAFILDEKYTGKSAKEKIQEVRSMLAEKKADSTVIGALEDVCYLFNVRGRDIRCNPVVTAYALVDKARAVIFISEKQLTDDVKSYFASQGITVMGYEDVFTEAAKLTGKVYIDPARTNVYLYNQIKAKTEKGLNLTSTLKAIKNEVELKNFDYAMEKDGAAMVKILKWVEENAGKGITEWDVSEQLLKFRAEGKDFFEESFETISGYGPNGAIIHYAPSPSNSAKLEAKSFLLLDSGGQYLNGTTDITRTIKLGELTEQEKTDYTLVLKAHISLARAKFKAGTTGHAIDTIPREHLWAYGRDYKHGTGHGVGYVLSVHEGPQSISSRFLDVPMKLGMVTSNEPGLYVAGSHGIRIESLVATTEFKTTEDGEFYQFKTITLCPIDTRPIVPGILSDEDIKWLNEYHKEVCERLIPYLDEDHKIFLKERTKAI

SEQ ID NO: 7371 - protein, 215 aa, Haemophilus influenzae 86-028NP
MNQSILSPFGNTAEERVLNAINAFKHGTGVLVLDDEDRENEGDLIFPAETITSEQMAKLIRYGSGIVCLCITDERCQQLDLPPMVEHNNSVNKTAFTVTIEAAKGVSTGVSAADRVTTIQTAIADNAVPTDLHRPGHVFPLRAANGGVLTRRGHTEASVDLARLAGFKEAGVICEITNDDGTMARTPEIVEFAKKFGYSVLTIEDLVEYRLAHNI

SEQ ID NO: 7372 - protein, 270 aa, Haloarcula marismortui ATCC 43049
MTDLADIAADCETVSVRVGDRVENVATVELHRPEARNALNTQLRSEFKQVFDAIPDSDVRAVVLTGAADTGAFVAGADVTELRERDMLEQREASKRPRVYEYVDECPMPVIARINGHALGGGCELIQAADIRIAHTDAKFGQPEINLGIMPGGGGTQRLPRLVGEGHAMRLILTGELIDASEAVDIGLVDEVHDDDSFDERVYDIASSIAEKSPAALELAKKAVRASSRMDLEAGIEYEAELFAQLFATGDKDEGIDAFLEDRDPEWASE

SEQ ID NO: 7373 - protein, 450 aa, Helicobacter hepaticus ATCC 51449
MSYASNVLNKLKEQYPSQTLFHQAVAEVFESLEPALQKDKKYETYAILERLTIPDREIHFRVSWTDDNGKIQTNRAYRIEFNAAIGPYKGGLRFHPSVNEGVIKFLGFEQILKNSLTTLAMGGGKGGSDFDPKGKSEGEIMRFCQAFMNELYRHIGATTDVPAGDIGVGGREIGYLFGQYRKLTNCFEGVFTGKAIPWGGSLVRTEATGYGCVYFAQEMLKDRGESLEGKVCSVSGAGNVAIYTIEKLLQLGAIPVTASDSQGMIYDKEGIDLALLKEVKEIKRLTLAEYAKARPQAVYTKVADYPKDSNPVWAIPCFAAFPSATQNELNGNDAKTLLANGCKCVSEGANMPSTIEAVHQFLDAKICYGPGKAANAGGVAVSGLEMAQNASMNPWTFEVVDKRLHTIMESIYANASETAKEFGEPTNLVLGANIAGFRKVAGAMIDQGVI

SEQ ID NO: 7374 - protein, 514 aa, Cytophaga hutchinsonii
MAFEVKVPTVGESITEVTIGRWNKKDGEFVDVNELICEIESDKATFELNAEKSGILKLNAKEGDTVAIGTVICSIEEGAGSAAAKPAANAAPAAAPAATPAAPAPAASNAAPVEVKIPTVGESITEVTLGAWSVKSGDAVKAGDLLLEIESDKATFELHAETTGTIEILSKSGDTVAIGTVVCKIVPGAGGASQAAAPASAPAATAAASSGGANYAGGHASPAAGKILNEKGVDASAVAGSGKDGRITKEDALKASAAPAAAAKPAAAASTAAPAAKASAAGRADDRVKMTSLRKTIARRLVAVKNETAMLTTFNEVDMKPVMDMRSKYKDTFKEKYGIGLGFMSFFTKAVCMALQEFPAVNAYIDGDEIVYHNFCDVSVAVSTPKGLVVPVIRNAETMSFNEIEAEIVRLATRARDGKLSIDEMSGGTFTITNGGIFGSMLSTPIINSPQSAILGMHNIVERPVAVGGQVVIRPIMYLALSYDHRIIDGRESVGFLVRVKQLLEDPSRLLLGV

SEQ ID NO: 7375 - protein, 146 aa, Triticum aestivum
MANTLQRALRATMARPFSTGALAEIKRGEIGMVSGIPEEHLRRRVLIYSPARTASQQGSGKVGRWKINFLSTQKWENPLMGWTSTGDPYSHVGDSALTFDSEQAAKAFAEKHGWEYSVKKPHTPLLKVKSYADNFKWKGPPKSGEE

SEQ ID NO: 7376 - protein, 248 aa, Clostridium perfringens str. 13
MENVWNGFRQLEIFKIEEEAKDIKSFYLRATDGKPLKEYKCGQFLPLKIETDDEVIKKEMRRYSLSGDPKKNYYRLTIKRVPNGKVSGYFHESINVGDTILAMPPFGNFTLTEDSNKPLVLLSGGIGITPILSMLYGAKEQSRDIYFVEAVLNSDNLALNSDVQGIKKVKNFKEIKIFSEPLESDIKGKDFDEEGFITKEWIKNNLPLNGEFFFCGPTLFMKSIRNSLKDLGVKEDNINFEFFGKEEF

SEQ ID NO: 7377 - protein, 571 aa, Striga hermonthica
MCGILAVLGVSENSQAKRSRIIELSRRLRHRGPDWSGLHNHQNCYLAHQRLAIIDPTSGDQPLYNEEKTVFVTVNGEIYNHKELREKLKSHVFRTGSDCEVIAHLYEEYGEEFVNMLDGMFSFVLLDTRDNSFIAARDAIGITPLYIGWGLDGSTWFASEMKALSDDCERFMTFLPGHIYSSKSGGLRRWYNPPWYAEQIPSAPYEPLVLRAAFEKAVIKRLMADVPFGVLLSGGLDSSLVASVASRYLADSPAAQWGTQLHTFCIGLKGSPDLRAAREVADYLGTRHHEFHFTVQEGIDALEEVIYHIETYDVTTIRASTPMFLMSRKIKSLGVKMVLSGEGSDEIFGGYLYFHKAPNKEEFHEETCRKIKALHLYDCLRANKATSAWGLEARVPFLDKEFIDVAMGIDPEWKMIRPDLGRIEKWILRNAFDDEEKPYLPKHILYRQKEQFSDGVGYSWIDGLKDHANQQVTDAMLANANFVYPENTPTTKEAYYYRTVFERFFPKNAARSTVPGGPSVACSTAKAVEWDASWSKNLDPSGRAALGVHVAAYDEAKMAGEGPTANGSPKE

SEQ ID NO: 7378 - protein, 82 aa, Pyrus pyrifolia
MAASVMTSSVSLKPSPFTVDKPAVRGLPSLSRSSASFKVQASGGKKIRTATPYGINGGMDLRDGVDASGRKGKGKGVYQFVD

SEQ ID NO: 7379 - protein, 291 aa, Clostridium perfringens str. 13
MELIIATRKSKLAQVQTEKVMELLKGKENVDSKKLLVMTEGDRRLDVSLNKIGGKGLFVKEIELALLNKEAHGAVHSMKDVPFELPSEFELVAMPEREDIRDAFVSLNGSTLSNLRKGARIGTSSIRRAEQLKLFRDDLEIVPIRGNVQTRIKKITEENLDGIILAAAGLKRLGMEDVISDYFDPKVFLPAIGQGALGIECLKGGEFNDYFKALDSKEVRTTVEAERSFMKVLNGGCHSLIGAYSEVKDNDLYMIGTFTVNNRIVKKDILGNKEDNILLGKKLAEKILEEV

SEQ ID NO: 7380 - protein, 490 aa, Pseudomonas fluorescens Pf-5
MARFELQKLYIDGGYTDAGSDATFDAINPANGEVLAQVQRATKEDVERAVVSAEKGQKIWAAMTAMERSRILRRAVEILRERNDELAALETLDTGKAFSETKYVDIVTGADVLEYYAGLVPAIEGEQIPLRTTSFVYTRREPLGVVAGIGAWNYPIQIALWKSAPALAAGNAMIFKPSEVTSLTTLKLAEIYTEAGLPDGVFNVLTGSGREVGTWLTEHPRIEKVSFTGGTDTGKKVMASASSSSLKDVTMELGGKSPLIIFDDADLDRAADTAMMANFYSSGQVCTNGTRVFVPSHLKAAFEAKIAERVARIRIGNPEDENTNFGPLVSFPHMESVLGYIAKGKEEGARVLCGGERLTDGEFAKGAFVAPTVFTDCTDDMTIVREEIFGPVMAILTYETEEEVIRRANDTDFGLAAGLVTKDLNRAHRVIHQLEAGICWINAWGESDAKMPVGGYKQSGVGRENGISSLNNFTRIKSVQVELGDYASVF

SEQ ID NO: 7381 - protein, 180 aa, Arabidopsis thaliana
  misc_feature (124)..(124): Xaa can be any naturally occurring amino acid
  misc_feature (137)..(137): Xaa can be any naturally occurring amino acid
  misc_feature (140)..(140): Xaa can be any naturally occurring amino acid
  misc_feature (142)..(142): Xaa can be any naturally occurring amino acid
  misc_feature (146)..(146): Xaa can be any naturally occurring amino acid
  misc_feature (150)..(150): Xaa can be any naturally occurring amino acid
  misc_feature (154)..(154): Xaa can be any naturally occurring amino acid
  misc_feature (168)..(168): Xaa can be any naturally occurring amino acid
MERLTSPPRLMIVSDLDHTMVDHHDPENLSLLRFNSLWEHAYRHDSLLVFSTGRSPTLYKELRKEKPLLTPDITIMSVGTEITYGNSMVPDHGWVEALNNKWDLGIVKQEASNFPELKLQAETXQRPHKVSFLLLKXGRXRXVPKXLSQXVLNXGWIQKISSGGLGLXFSPRSRRARVFS

SEQ ID NO: 7382 - protein, 339 aa, Trichodesmium erythraeum IMS101
MIRVAINGFGRIGRNFLRCLLTRTDSQLDLVAVNDTSDPKTNAHLLKYDSMLGTLKDVDISTDENSITVNGKTIKCVSDRNPLNLPWADWGIDLIIESTGVFVTEEGASKHLQAGAKKVLITAPGKGGQIGTFVVGVNHQDYKHEDYNIISNASCTTNCLAPIVKVIHDNFGIIKGTMTTTHSYTGDQRILDASHRDVRRARAAAVNIVPTSTGAAKAVALVIPEMKGKLNGIAMRVPTPNVSVVDLVAQVEKKTFVEQVNEVMEVAAKGPMKGIIEYSDLPLVSIDYRGHDCSSIVDASLTMVMDGDMVKVIAWYDNEWGYSQRVVDLAEVVAQNWAA

SEQ ID NO: 7383 - protein, 265 aa, Pisum sativum
MGFDSNLGGSPSSSSPTAKRTRDPEEEVYVDNLRSHKRYLSEIMASSLNGLTVGDSLPDNLLESPARSESAFSLRDDISLQYSPMSEDSDDSRFCETPVHSCLTNLDSRPSSPVSPCRYQRQQNSFSSAPSTSLNTSHGFPVSAVTCSQPRQRSSDSDGRFPSSPSDICHSADLRRAALLRSVQMRTHPPGSASLELPFGSGQEPAPNIDSEDRPCSYMKSLVDERDYQIEECSSIGAPETEFNHDNNKPCRVLNMNPKAADSGG

SEQ ID NO: 7384 - protein, 254 aa, Candida albicans SC5314
MTKTQQPAVFYVHAALFDCDGTLVNSTGAISEFWRDFGKTRPHVDPEEIIRTSHGCRTFDVIAKWSPEDAIEEQVTAWEGAIPDTFGHHAKPIPGSVELVKSFDKLSKEATENGKQRWAVVTSGTLPLATKWLKLLSIERPDCFITAEKVTKGKPHPQGYQAARDTLGYHDAHYKVVVFEDAPAGITAGKGAGAMVVGICSTYDPEKVRKSGANIVVKDLSSFRIDSYNKETDEFKVVVDDYFYADEQFLQESA

SEQ ID NO: 7385 - protein, 528 aa, Trichodesmium erythraeum IMS101
MESKALWQRYIDWLYYHEGLGFYVDISRIKFDDSFVEIMKPKFEKAFQEMKKLEEGKIANPDENRMVGHYWLRDLDIAPTKEIKNEISTTLEAIETFAKKVHSGEIKPSSAPKFTDILSIGIGGSALGPQFVAEALGLDDPPMEIHFIDNTDPAGIDRVLHKLSDRLKSTLVIVISKSGGTPEPRNGMIEVKAAFASQNLNFATQAVATTTPSSKLGQIAKSEGWIDIIPMADWVGGRTSELSSVGLLPAALQGIDIRAMLAGAKEMDKVTRTHEIKGNPSALLALSWYAAGKGHGEKDMVVIPYKDSLLLLSRYLQQLVMESLGKEKDLDGKVVNQGIAVYGNKGSTDQHAYVQQLRDGVLNFFVTLIEVLEDREGTSPEVEPGVTSGDYLSGFIQGTRQALYENDRDSITVTIPKVNPYNLGALIALYERAVGFYGSLVNINAYHQPGVEAGKKAAAAVLELQHKVINILKQEKSPLSLEELSEKAGAGDQIETIYKILRHLAANKRGIVFHGNVGQPDKLGVSYN

SEQ ID NO: 7386 - protein, 333 aa, Rubrobacter xylanophilus DSM 9941
MAVRIGINGFGRIGMLVAKAAMQRGDVEVVAVNDLMPMESLALLFKRDSTHGIWDEDVALEGSVLRVGDRQIKTFSEREPSGIPWGDVGADIVVEATGKFTSRDGAAGHLEGGAKKVVISAPAKGADATFVYKVNHETYDPDNHQVVSNASCTTNCIIPMVKVLQDNFGIESGFMTTCHAYTNDQSLLDAAHKDPRRARSAPNNIVPTSTGAARTAGVIYPELRGKVDGMALRVPVPDGSITDFVAELSREASVEEVNGAFRRAAEGELSGILEYSEAPIVSQDIVGNPASCIFDAPLTMSTGRTVKVLGWYDNEWGYSNRTVDLVSYIGERL

SEQ ID NO: 7387 - protein, 365 aa, Candida albicans SC5314
MAKTRSKSAATAAATSPKASPTAAKVTKNKVTKPSTASPSKTTKTKAVKKTTTKKATPKKEEEEKKEVHVETVTKDSSLIPEEITEKAISELKKYISRQSQQQQETENDESKKSKLFDEDEDDEDNKQNESFYLTIDSKKFWSSKPQFKPKSFKLTKPLYDNNQTTTTTSNSNNDINVDNNICLIIRDKLVKSIDELNELENNQSLSQITQIIPLNSIKTEYKSFEKKRELYHQFKIFLVDEAILNIMPNTLGKVFYSKGSSNDKIPIPIKVTSTTTGSQTNGKQLSIVTLTNQLNKVLNNTYYLPPIGNNITIKIGKLKFDNNDLIANINDVVKNLDLDTIKSIHVKTSTSPAIPLFYTKSLSQ

SEQ ID NO: 7388 - protein, 469 aa, Methanothermobacter thermautotrophicus str. Delta H
MTAMCAIAGFRGDDAPVKVQEMLDVLRHRGPDATGIYHDSRIVIRTATGEDVKEAPQSAEIAVGHNLLSIVGGPQPVSGDGVLVFNGEIYNQEELNWTGSDSELILDLIEGHGGDLEDALRFTVNKIDGDYAFAYTDGENLASRQDPVGVKPLYHSGEAFASEKKALWRIGLRNVETLPPGHAMINGVKVKLRGLPRAEPSDAEPEELRENLKSALRESVERRVRGLDEAALVFSGGVDSTLLAVLLDEHIDVRLYTVGLPGSSDPQFASRAAADLGMELEVLEVTEDTIREALPHVLGAIEEYNLMKIGVAMPLYLASEAASADGYRVMFSGQGADELFAGYHRYRRLLAEGRLEDALRHDLENIHHVNLERDDAVTMANSVELRVPFLDLQLIGVALTIPADLKIRGPEDELRKRILREAALEMGVPEYIAMRPKKAAQYGSGIDKVLRRKVLPGFDHETFLRRLMF

SEQ ID NO: 7389 - protein, 583 aa, Brucella melitensis 16M
MKAGRKREMNQPVSTPKSVSQAVSARKGMPIAGTKYAPFPAPQLDDRTWPSKRIEKAPIWCSVDLRDGNQALIDPMGHDRKERMFRLLIDMGFPEIEIGFPSASQTDFDFCRWAIEQGDVPDDVDLQVLVQCRPELITRTFEALEGAKTPIIHFYNSTSELQRRVVFAKDVGGIKQIATDAAKMIMDMAAKAGGGYRFQYSPESFTGTELDVALEICNAVIEIVKPTPDNKLIVNLPSTVEMNTPNVYADQIEWMCRNLDNRESLIISLHPHNDRGTGIAATELGLMAGADRGEGTLFGNGERTGNVDVVTLALNMYTQGIDPGLDCTDINRMKEVYEYSNQLKIAERHPYVGELVYTAFSGSHQDAINKGMKARRSANSPVWEVPYLPIDPQDVGRSYEAIIRINSQSGKGGIAYILQADYGLNLPRNLQVEFREIIQHITDEEGKELPSKRIYEEFQKLYVTQPDARIKFVDHHTYPHPEQKGRRILTAEITDNGVTKTIEGKGTGPIDGFVDALSKYLGVKMSVVDYSEHSLQQGSDASAISYVEMVYPGGKLFGVGINDNIVSASLEAVVSAANRVIAK

SEQ ID NO: 7390 - protein, 413 aa, Nitrosomonas europaea ATCC 19718
MSKRKVAITGLGIISPVGNTVSEAWENVIAGKSGITRITRFDASDFSSKIAGEVNGFDITEYLSAKEARRMDIFIQYGMAAAIQAIRDAGISDVSGFNADRIGVNIGSGIGGLPMIENTDAAYHAGGPRKISPFFIPSTIINMVAGNLSIMFGYKGPNLAIVTACTTATHCIGSSARMIEYGDADIMVCGGTESCVTPLAVGGFASARALSSNNDDPAAASRPWDLKRDGFVLGEGAGILVLEEMEHARKRGAKIYAELAGFGMSADAHHMTAPCEDGEGAARCMTNALSDAQMHADELHYINAHGTSTPLGDIAETIAVKRCFGEHAKDLAVSSTKSMTGHLLGAAGGVEAIFSALAVYHQIAPPTINLDDPDPACDLDYVPNNAREMKIDAALSNSFGFGGTNGTLVFRKI

SEQ ID NO: 7391 - protein, 438 aa, Mycobacterium tuberculosis CDC1551
MPRRSPADPAAALAPRRTTLPGGLRVVTEFLPAVHSASVGVWVGVGSRDEGATVAGAAHFLEHLLFKSTPTRSAVDIAQAMDAVGGELNAFTAKEHTCYYAHVLGSDLPLAVDLVADVVLNGRCAADDVEVERDVVLEEIAMRDDDPEDALADMFLAALFGDHPVGRPVIGSAQSVSVMTRAQLQSFHLRRYTPEWMVVAAAGNVDHDGLVALVREHFGSRLVRGRRPVAPRKGTGRVNGSPRLTLVSRDAEQTHVSLGIRTPGRGWEHRWALSVLHTALGGGLSSRLFQEVRETRGLAYSVYSALDLFADSGALSVYAACLPERFADVMRVTADVLESVARDGITEAECGIAKGSLRGGLVLGLEDSSSRMSRLGRSELNYGKHRSIEHTLRQIEQVTVEEVNAVARHLLSRRYGAAVLGPHGSKRSLPQQLRAMVG

SEQ ID NO: 7392 - protein, 257 aa, Leptospira interrogans serovar Copenhageni str. Fiocruz L1-130
MSEKLINITKEGQIAILTIQRPSALNALNREVLIQIGQEVDALEKDENIRVLIVTGEGKAFVAGADIAEMKDLNVSQGNEFSKLGNSVFQKLHQSRIVSIAAINGFSLGGGLELALACDIRVGSEKAKLGLPEVSLGLIPGFGGTQRLARLIGYARAIELVITGEMISAEEGYRIGILNKLVKEGESILDFSKSIANSILKKGPQAIERVKKTIQQGLDVSLKEGISIEEKAFGDCFDGGQSKEGMSAFLEKRSAQF

SEQ ID NO: 7393 - protein, 112 aa, Brassica napus
MASALSFFTCLVLTVCIVASVDAAISCGTVTSNLAPCASYLTKGGPVPAPCCAGVSKLNSMAKTTPDRQQACKCLKTAAKNVNPSLASSLPGKCGVSIPYPISMSTNCDTVK

SEQ ID NO: 7394 - protein, 624 aa, Xanthomonas campestris pv. campestris str. ATCC 33913
MANERPAQQSDIKLLISKGLEQGYLTYAEVNDHLPDDLVDPEQIEDIISMINGMGIDVHEVAPDAETLLLNDGNTGNREVDDTAAEEAAAALTALDTEGGRTTDPVRMYMREMGTVELLTREGEIAIAKRIEEGLSQVQAALGTFPLSTELLLSDYEAHKEGKKRLAEIVVGFNDLIEEADAAAAALAAAGPVAVDEDAVDEDADEDGDDDAAEEEAGPTGPDPVEVATRMENLANEYAKFKKAYVKYGAEHKNVAKAREDMAAIFTTLKLPLPLTDALVTQLRGVVNGIKDHERKVLHLATTVARMPRKDFIRSWEGNQTNLEWVEDALKRKQKWSSALRDVKDQIVSEQQGSIEMEKANYLTLAEIKDISRAMAYGEAKARKAKKEMVEANLRLVISIAKKYTNRGLQFLDLIQEGNIGLMKAVDKFEYRRGYKFSTYATWWIRQAITRSIADQARTIRIPVHMIETINKLNRISRQMLQQFGREATPEELAKEMDMPEDKIRKVMKIAKEPISMETPIGDDEDSHLGDFIEDTNVESPIDNTTNINLSETVRDVLAGLTPREAKVLRMRFGIDMNTDHTLEEVGKQFDVTRERIRQIEAKALRKLRHPSRSEQLRSFLDID

SEQ ID NO: 7395 - protein, 122 aa, Oryza sativa
MASTGGRSMALSLLLFAVTLSLLEMYRGRFASSELMTIAGGFVSSLLFLFLLTFIGNYQEANGVKTGWGAVVVAELTALIVAGTVHRVCITTCFLFSAGFLYEVDKLSGMILAKSESKARRH

SEQ ID NO: 7396 - protein, 347 aa, Musa acuminata
HVHELEPVEVVADQVAVALSHAAILEESMRARDLLMEQNVALDYARQEAELAIRARNDFLAVMNHEMRTPLHAIITLSSLLLETELNPEQRSMVETVLKSSSLLATLINDILDLSKLEDGSLELEIGIFNLHSVFREVVNFIKPIAAVKKLSVSLTLSPDLPLCAIGDEKRLMQILLNIVGNAVKFTKEGHISLTASVARADYLRDFRASEFYPVSSDGHFYLRVQVKDTGCGISSQDLPHLFTKFAHGRNVASRGFSGSGLGLAICKRYVSLVQGHIWLESEGIGKGCMATFVVKLGICENPDGSQQKIVLLPWTKHGQEDTSSSRGMPKDPKAFIPLKPRYQRSV

SEQ ID NO: 7397 - protein, 556 aa, Clostridium perfringens str. 13
MSKIYDLVIIGGGPAGLSAGIYAGRAKMNTLIIEKGELGGQVNKTFDISNYPGSRNTNGPKLMSEMRAQAEDFKVKFMNGEVLEVSLEGDIKEIKTDKGLVQGRSVIIATGAAPRQLGFKGEEEFTGRGVAYCATCDGQFFEGLEVFVIGAGFAAAEEAIFLTRFASKVTVIAREPEFTCAKSIADKVLSNPKIEVKFNTEIIEAKGKDMVNYAKFKNNVTGEIFEYRAKKEDGAFGIFVFVGYAPKSELFKDILELDKQGYIITNEDMETNINGVYVAGDLRPKSLRQIVTAVSDGAIAATTAERYVKELKEKLGIEDEYLEEEENIQEEKNSDENNDLGNISRKSSLLNDVLRAQLKGILSKIENEVTLVSIVDRSNTKSIELRDLVLDISDLGEKINAKIFNRGENKEVEEKINADKYPIVALLDENENYSGIKFHGVPGGHELNSFILAIYNLGGPGQGIDEGVLDEIKKLDKKTNIKVCVSLSCHLCPDVVVSAQRIAKENKNIEAEMIDLANFKDIKDEFKIMSVPALIVNNKDVYFGSKKIEEILEIIK

SEQ ID NO: 7398 - protein, 62 aa, Brassica napus
MAAAGGGRSMLGSMLLFTVVLSLQEVYRGKLASSELFTILGGFTSSLLFLFSLTVSYHLCLF

SEQ ID NO: 7399 - protein, 116 aa, Triticum aestivum
MARAQLVLVAVVAALLLAAPHAAVAITCGQVNSAVGPCLTYARGGAGPSAACCSGVRSLKAAASSTADRRTACNCLKNAARGIKGLNAGNAASIPSKCGVSVPYTISASIDCSRVS

SEQ ID NO: 7400 - protein, 478 aa, Bifidobacterium longum NCC2705
MDQLVAESTPLKRTMRTFDLTMLGIGAIIGTGIFVLTGKGALTAGPALSVSFLLAAVCCGFAGLCYAEFAAMAPVSGSAYSYAYLAFGELIAFVIGWDLILEYALQAATVSAGWSGYFNKLLEGFGLHLPVELTAAYGTNPDVTTYFNLPGFVIVLIITWVLSIGINQTKRTNDVMVLIKLAIIVLFIACAVWYVKPSNWQPFSPYGVYTFQPGSTQPYGIVPAASIVFFSFIGFDAVSSSAEETINPNKTLPRGILLSLAVSTVLYIVMTMIMTGVVPYQDFAKYIDAPVAGVILETGMNWLAVIVNLGALIGMTTVMLVQLYGQSRICYAMSRDGLFPKFFGHVHEKYRTPFKGTWFFGLLTAFAGGFININVLFELVNIGTLSAFIIVSAGILWMRKTQPNAPRGFRAPGVPVTPILAIVFCFVLIAGLNWETWVRFAIWFGLGLIVYFGYSRKRSKLGLEQKAGADTKVAATED

SEQ ID NO: 7401 - protein, 676 aa, Synechocystis sp. PCC 6803
MTTLTPFIPLNFPITAIVGQEAIKLALLLGAIDPGLGGIVIAGRRGTAKSVMARAIHTLLPPIEIIKGNRYQCDPKNPGSWDDDTLEKFADVPLDQLETQVIPAPFIQIPLGVTEDRLLGSVDVEKSVKQGEAVFQPGLLAQAHRGVLYIDELNLLDDQIANQLLTVLTEGKNQIEREGMSFQHPCQPLLIATYNPEEGPLRRHLLDRIAIALSADGILGLDQRVAAVDQVLAYADSPISFIDQYDAELDDLKTTIILAREWLKEVSLTPEQVSYLVEEAIRGGLQGHRGELFAMRVAKAIPALDGRSDVQADDLRQAVELVIVPRSVLMDNPPPPEQAPPPPPPPQNQDEGKDEQEDQQDDKEDDKDNEPEAEQDPPSIPEEFIFDPEGVSLDPSVLYFAQMAQKQGKSGSRSVIFSDDRGRYLKPILPKGKVRRIAVDATLRAASPYQKSRRLRHPDRQVIVEQGDIRGKKLVRKAGALIVFLVDASGSMALNRMQAAKGAVMQLLTEAYENRDQVSLIPFQGENAEVLLPPTRSIAMAKKRLETLPCGGGSPLSHGLMQAVNVGMNAKRSGDIGQVVIVAITDGRGNIPLARSLGDEIPEGEKPDIKAELLEIAAKIRGLGMQLLVINTEKKFVSTGFGKELAQKAGGKYYQLPKATDQGIASMARQAIADMQ

SEQ ID NO: 7402 - protein, 604 aa, Saccharomyces cerevisiae
MVKHSFIALAEHASKLRRSIPPVKLTYKNMLRDPSVKYRAFAPPKMVKRIWPDKTIQKAPRWLSTDLRDGNQSLPDPMSVAQKKEYFHKLINIGFKEIEVSFPSASQTDFDFTRYAVENAPDDVGIQCLVQSREHLIKRTVEALTGAKRATIHTYLATSDMFREIVFNMSREEAISKAVEATKLVRKLTKDDPSQQATRWSYEFSPECFSDTPGEFAVEICEAVKKAWEPTEENPIIFNLPATVEVASPNVYADQIEYFSTHITEREKVCISTHCHNDRGCGVAATELGMLAGADRVEGCLFGNGERTGNVDLVTVAMNMYTQGVSPNLDFSDLTSISEIVHRCNKIPIPPRAPYGGELVVSAFSGSHQDAIKKGFAIQNKKQAQGETRWRIPYLPLDPKDIGRDYEAVIRVNSQSGKGGAAWVIMRSLGLDVPRPMQVDFSNTLQKNADALGRELKSEEITKLFKETYNYNNNEHIYVTLLNYEVKKLNPERRALVGQVEINDKVVNIEGYGNGPISSLVDALSNLLNVKLSVQNYSEHSLGSGSATQAASFINLSYIKDINNHATSNMWGVGVSEDTGDASIKAVFATVNNIIHSGDVLLAE

SEQ ID NO: 7403 - protein, 150 aa, Prochlorococcus marinus str. MIT 9211
MEVRFREVDPFNCWLWLHFSDVPSEGERNYLDGIFDSWYVLGRLGGFNSENLQSHLAGNELSWMTYESQDASAIMPALMHNLGQMEYEGAWARCWVDLGTCDAIAIDVLINALLQVNGDVIKLEEFIIGGVNDDWPVEDHPDAIFTSPKE

SEQ ID NO: 7404 - protein, 559 aa, Staphylococcus epidermidis RP62A
MKNNSKSKSNKISLSQLVLLGLGSLIGSGWLFGAWEASSMAGPAAIISWVIGFLVIGTIAYNYIEIGTMFPQSGGMSNYAQYTHGSLLGFIAAWANWVSLVTIIPIEAVSAVQYMSSWPWDWAKPMGSLMKDGSISTYGLIAVYIIIAIFSLLNYWSVKLLTSFTSLISVFKLGVPILTIIMLLVSGFDTGNYGHSIGTFMPYGSAPIFAATTTSGIIFSFNAFQTIINMGSEIKNPEKNIARGIVISLTLSAILYIVLQSTFITSMPSSMLHEHGWSGINFNSPFADMAILLGLNWLAILLYMEAVVSPFGTGVSFVAVTGRVLRAMEENGHIPKFLGKINKKYNIPRVAIAFNAIISMVMVTLFRDWGTLAAVISTATLVAYLTGPTTVISLRKMAPKMTRPFKANILKFMAPLSFVLASLAIYWAMWPTTAEVILIIILGLPIYFFYEYKMNWKNTKKQIGGSLWIIIYLIVLAFLSFIGSKEFKGLNWIHYPWDFLVIVIVALIFYQLGTTSYFESIYFKRANKLNKKMGDKLRKTRKKARHKDWKERDRQEQNQ

SEQ ID NO: 7405 - protein, 715 aa, Salmonella enterica subsp. enterica serovar Paratyphi A str.
  misc_feature (140)..(140): Xaa can be any naturally occurring amino acid
MKKVVTVCPYCASGCKINLVVDNGKIVRAEAAQGKTNQGTLCLKGYYGWDFINDTQILTPRLKTPMIRRQRGGKLESVSWDEALNYVAERLSAIKAKYGPDAIQTTGSSRGTGNETNYVMQKFARAVIGTNNVDCCARVXHGPSVAGLHQSVGNGAMSNAINEIDNTDLVFVFGYNPADSHPIVANHVINAKRNGAKIIVCDPRKIETARIADMHIALKNGSNIALLNAMGHVIIEENLYDKAFVASRTEGFEEYSKIVEGYTPESVEEITGVSAQEIRQAARMYASAKSAAILWGMGVTQFYQGVETVRSLTSLAMLTGNLGKPSAGVNPVRGQNNVQGACDMGALPDTYPGYQYVKFPENREKFAKAWGVESLPAHTGYRISELPHRAAHGEVRAAYIMGEDPLQTDAELSAVRKAFEDLELVIVQDIFMTKTASAADVILPSTSWGEHEGVFSAADRGFQRFFKAVEPKWDLKTDWQIISEIATRMGYPMHYNNTQEIWDELRHLCPDFYGATYEKMGELGYIQWPCRDTSDADQGTSYLFKEKFDTPNGLAQFFTCDWVAPIDKLTEEYPMVLSTVREVGHYSCRSMTGNCAALAALADEPGYAQINTADAARLGIEDEALVWVHSRKGKIITRAQVSDRPNKGAIYMTYQWWIGACNELVTENLSPITKTPEYKYCAVRVEPIADQRAAEQYVIDEYNKLKTRLRESAMG

SEQ ID NO: 7406 - protein, 480 aa, Musa acuminata
RSTLDRHTILKTTLVELGRTLDLAECALWMPSRSGLNLQLSHTLHHQMPLGSVVSINLPVVNQVFSSNRAVRIPHTCPLARIRPQTGRYVPPEVVAVRVPLLHLSNFQINDWPELSAKSYAIMVLMLPSDSARKWHIHELELVEVVADQVAVALSHAAILEESMRARDLLMEQNVALDSARREAEMAIRARNDFLAVMNHEMRTPMHAVIALSSLLLETELTPEKRLMIETVLKSSNLLAALINDVLDLSKLEDGSFELEIANFNLHAVFREVINLIKPIAAIKKLSVSVTLAPDLPLCAIGDEKRLMQTILNVAGNAVKFTKEGHISITASVARSDSSRDPRAPEFSPVTSDRHFDLRVQIKDTGCGISPQDLPHIFTKFAHSRNSANKASNGSGLGLAICRRFVSLMEGQIWLESEGIGKGCTATFIVKLGICDPSGNLQQILQTTPSHGDANLPGPRAKFDDENGKFTPMMRYQRSV

SEQ ID NO: 7407 - protein, 365 aa, Aspergillus fumigatus
MAEFVRAQIFGTTFEITSRYNLQPVGMGAFGLVCSARDQLTGQPVAVKKIMKPFSTPVLSKRTYRELKLLKHLRHENIISLSDIFISPLEDIYFVTELLGTDLHRLLTSRPLEKQFIQYFLYQILRGLKYVHSAGVVHRDLKPSNILINENCDLKICDFGLARIQDPQMTGYVSTRYYRAPEIMLTWQKYDVEVDIWSAGCIFAEMLEGKPLFPGKDHVNQFSIITELLGTPPDDVIQTICSENTLRFVKSLPKRERQPLANKFKNADPEAVDLLERMLVFDPKKRIRAGEALAHEYLSPYHDPTDEPEAEEKFDWSFNDADLPVDTWKIMMYSEILDFHNIDQGNDAGQVLMEGGVAQAQQNYA

SEQ ID NO: 7408 - protein, 189 aa, Pseudomonas syringae pv. phaseolicola 1448A
MACAARRCRLTSVLTFRSSHRLVLRPLLMSENLLSIPVTTIKGEQKTLADYAGKAVLVVNTASKCGFTPQYKGLEKLWLDYKDKGLVVLGFPCNQFGKQEPGDEGAISGFCELNYGVSFPLFKKIDVNGAQAHPLFVQLKQQAPGLLGTERIKWNFTKFLIGRNGALVKRFAPLTKPEELTGEIEALLR

SEQ ID NO: 7409 - protein, 277 aa, Mycobacterium tuberculosis CDC1551
MLDGKATRDEIFGDLKQRVAALDAAGRTPGLGTILVGDDPGSQAYVRGKHADCAKVGITSIRRDLPADISTATLNETIDELNANPDCTGYIVQLPLPKHLDENAALERVDPAKDADGLHPTNLGRLVLGTPAPLPCTPRGIVHLLRRYDISIAGAHVVVIGRGVTVGRPLGLLLTRRSENATVTLCHTGTRDLPALTRQADIVVAAVGVAHLLTADMVRPGAAVIDVGVSRTDDGLVGDVHPDVWELAGHVSPNPGGVGPLTRAFLLTNVVELAERR

SEQ ID NO: 7410 - protein, 320 aa, Pseudomonas syringae pv. phaseolicola 1448A
MSDVRHSRVIILGSGPAGYSAAVYAARANLKPLLITGMQAGGQLTTTTEVDNWPGDPHGLTGPALMERMREHAERFETEIVFDHINSVDLAGKPFSLQGDSATYTCDALIIATGASARYLGLPSEEAFMGKGVSACATCDGFFYRNREVAVVGGGNTAVEEALYLANIASKVTLVHRRETFRAEKILIDKLHARVAEGKIELKLNATLDEVLGDNMGVTGARLKNNDGTSDELKVDGVFIAIGHTPNTSLFEGQLALKDGYMVVHGGREGNATATSVEGVFAAGDVADHVYRQAITSAGAGCMAALDVERYLDGLANATF

SEQ ID NO: 7411 - protein, 244 aa, Cytophaga hutchinsonii
MVQYFLGFVFAATTLLVSCSNQQTQTKAITVSDTTLLSAEEFSQKIKKEPNALILDVRTPEEFSEAHIANATNVNWKDNFASGITEVNKNQPVLVYCLSGGRSASASDYLRKNGYTQVYELQGGLLKWQASNFEVVADTVTAAQDSGMTLQQFEALLVTDKYVLIDFYATWCGPCKMMEPALEDIAATMSDKVIVVRIDVDKNEELSKHFEVESLPTVQIYKNKKLVWEDIGYKTKKQLVSQLK

SEQ ID NO: 7412 - protein, 330 aa, Cryptococcus curvatus
MVNNTEYYKTLGLSKDASEADIKKAYRKESLKWHPDKNPGDKRATAEEKFKKVGEAYEVLSDPEKRKIYDQFGEEGLKGGMPAGGGGGGPGFSSFGAGGAAPASPSTPTDPNDIFNAFFSQMGSGGGGGGDEYASFGGGGFPGGGTRRRAGRGGMGGMGGMGGMGGMPGMGGMGGMGGMPGGYARPEPPTPVAEIERPLPLSLEELYKGGTKRLKITRHMRNGRTNEKILEVAYKPGWKAGTKVTFAGAGNEDEYGRGQNIKFVIQEKEHPRFNAQGDDLVVQVNLTLSQALLGPEGGGPITKQIEQLDGRRIDVSIPADTSSSPERRPS

SEQ ID NO: 7413 - protein, 597 aa, Coxiella burnetii RSA 493
MTNLIADRLAALRRLMHEIGVDYYYVPSSDPHKNEYVPSCWQRRAWISGFTGSAGDVVVGIDKAFLWTDPRYFLQAEQQLDDSLYHLMKMGQGETPAIDQWLTQQRNGIVFAVDPRLINLQQSEKIQRALEKQNGKLLALDENLIDRVWKDQPPLPQSAIQLQPLQYAGLSAEDKLAALRQTLQKESADAIVLNTLDAIAWLFNIRGNDVAYNPLVISYAVITQNEASLFVDPHKITEGDRSYFKKIPVHIEPYEGIGKLLESLSGSVWLDPGATNLWLRDQLKNTASLILKPSPITLAKALKNPVEQKGAREAHIIDAIAMIQFLHWLENHWQSGVSEISAAEKLEFFRRGDSRCLDLSFPSISGFGPHGAIVHYSATTDTDATINDSAPYLIDSGGQYHYGTTDITRTIHLGTPTEEEKRLYTLVLKGHLAIRQAVFPKGTCGEHLNALAHQFLWREALDYGHGTGHGVGSYLCVHEGPQAITSRYTGIPLQPGMIVSNEPGVYLTHKYGIRIENLCLVTEKFTVDDSLTGDGPFYSFEDLTLVPYCRKLINPNLLTSEEIQQINDYHQRVDQTLRDLLPANELNDWLHEATAPL

SEQ ID NO: 7414 - protein, 973 aa, Zea mays
  misc_feature (541)..(541): Xaa can be any naturally occurring amino acid
  misc_feature (558)..(558): Xaa can be any naturally occurring amino acid
  misc_feature (578)..(578): Xaa can be any naturally occurring amino acid
MASTKAPGPGEKHHSIDAQLRQLVPGKVSEDDKLIEYDALLVDRFLNILQDLHGPSLREFVQECYEVSADYEGKGDTTKLGELGAKLTGLAPADAILVASSILHMLNLANLAEEVQIAHRRRNSKLKKGGFADEGSATTESDIEETLKRLVSEVGKSPEEVFEALKNQTVDLVFTAHPTQSARRSLLQKNARIRNCLTQLNAKDITDDDKQELDEALQREIQAAFRTDEIRRAQPTPQDEMRYGMSYIHETVWKGVPKFLRRVDTALKNIGINERLPYNVSLIRFSSWMGGDRDGNPRVTPEVTRDVCLLARMMAANLYIDQIEELMFELSMWRCNDELRVRAEELHSSSGSKVTKYYIEFWKQIPPNEPYRVILGHVRDKLYNTRERARHLLASGVSEISAESSFTSIEEFLEPLELCYKSLCDCGDKAIADGSLLDLLRQVFTFGLSLVKLDIRQESERHTDVIDAITTHLGIGSYREWPEDKRQEWLLSELRGKRPLLPPDLPQTDEIADVIGAFHVLAELPPDSFGPYIISMATAPXSDVLAVELLQRECGVRXQPLPVVPLFERLADLQSAPXASVERLFSVDWYMDRIKGKQQVMVGYSDSGKDAGRLSAAWQLYRAQEEMAQVAKRYGVKLTLFHGRGGTVGRGGGPTHLAILSQPPDTINGSIRVTVQGEVIEFCFGEEHLCFQTLQRFTAATLEHGMHPPVSPKPEWRKLMDEMAVVATEEYRSVVVKEARFVEYFRSATPETEYGRMNIGSRPAKRRPGGGITTLRAIPWIFSWTQTRFHLPVWLGVGAAFKFAIDKDVRNFQVLKEMYNEWPFFRVTLDLLEMVFAKGDPGIAGLYDELLVAEELKPFGKQLRDKYVETQQLLLQIAGHKDILEGDPFLKQGLVLRNPYITTLNVFQAYTLKRIRDPNFKVTPQPPLSKEFADENKPAGLVKLNPASEYPPGLEDTLILTMKGIAAGMQNTG

SEQ ID NO: 7415 - protein, 269 aa, Ureaplasma parvum serovar 3 str. ATCC 700970
MKLKIDFLYEKVLTELLTKKNKTKKRIYVFYDSDLVNFNSAYIQSKLKYAKLFSVKLIIYDLNAYQIQENHHFLSKLKQANKDFLFFEFPLSKKHLDQNYFQYLTFQNDLDGINSHLFLNKKQENQIIYHPATINAILTLIKELDVNLNDYRICIIGRSPYLGDYLYKLLNPKNNKINIIHSQTKNPLRIIKESNFIISCVNKAHIFNSNALSDNSYLIDVTTEYINNKLCGSFLINKNDALNRNIKYTPVPGGIGKLTTLFLFLNYFK

SEQ ID NO: 7416 - protein, 525 aa, Deinococcus radiodurans R1
MKELLLPELAESVVEGEILKWLVEEGDAIALEQPLCEVMTDKVTVELPSPFEGTLHKRMANEGDVVAVHAVIALIDDGAGAGAGAIPSATQAIQDSAENPTTTEVTLPAQAEEEREAMGGSIVEAGHIAKADDDSTSLFKTFANDEEVKVQGLGARSGSGAPGSSTAGTGTLDRAPETAPASPTPATANGGRVLAVPAARQAARELGIDLAAVRGSGPNGRIRVADVLAHQQSGQAQPQQTQPQQAAASQAVAPQPQAAAPAAPAPAGKLAAPSAHLPAPVQYRTPKGYEDRETRVPLRGMRRAIANQMQASHLYTVRTLTVDEVNLTKLVEFRQRVKDEAKAADVKLSYLPFIFKAITVALKKYPSLNTSFDEATQEIVQKSYYNLGMAVATEAGLTVPVIRDVDRKSIFDLARDVVDLAGRANAGKLSPDELTGSSFSVTNIGSIGALFSFPIINVPDAAIMGVHSIVKRPIVDEHDNITVAHMMYLSLSFDHRLIDGAEAARFCKEVIRLLENPDRLMLEGF

SEQ ID NO: 7417 - protein, 109 aa, Brassica napus
  misc_feature (29)..(29): Xaa can be any naturally occurring amino acid
  misc_feature (100)..(100): Xaa can be any naturally occurring amino acid
MGNFLAKEPPPPVVLVPPLFDFPPLSARXRMLEPSYNLLFGKLALKCLFEDYFEDARQFSAKFLLKPIDDPHVDLVASLSGALDRKAEGDLVGNALFRWXSDVDDPHTF

SEQ ID NO: 7418 - protein, 104 aa, Brassica napus
MAKRFTTQLFVSRLSGYTTDQSLRQLFSPFGQIKEARLIKDSQTQRPKGFGFVTFESEDDAQKAMKALDGKIVDGRLIFVEAAKDVEAPTTKLDENTHSHYKTS

SEQ ID NO: 7419 - protein, 75 aa, Brassica napus
  misc_feature (7)..(7): Xaa can be any naturally occurring amino acid
  misc_feature (45)..(45): Xaa can be any naturally occurring amino acid
  misc_feature (53)..(53): Xaa can be any naturally occurring amino acid
  misc_feature (59)..(59): Xaa can be any naturally occurring amino acid
EKEEVVXAYSMLSSAAVVTSPAQATMGAPFTGLKSSSAFPVTRKXNNDITSIXSNGGRXVPSIFASINLPSLPLP

SEQ ID NO: 7420 - protein, 596 aa, Oryza sativa
MPAAESCHSRSLSWLVKSCIPADPARHIAVPVLCPTPQPPPPSSPPAPPISTLPDDLLLECLARVPRASLPPLPAVSRRFATLLASDAFLHLRRAHAHLRPSLLALSVSDNGCVPQALLRFESSVPVLEVAPLPLPPTLLHCGGSVFAHARAVVLGRDVFLIGRGATLRVDALTGAARACAPTLFPRKKFAAAAVGDRIYVAGGSARTAAVEEYDPEVDAWRVVGEAPRRRYGCAGASAGGVFYVAGGVAVSGEGARALEAHVCAGSVDALHVASGTWARPRALPGGGCVVGACGVGDHLYVVASHAVELSFWRWSGATGRGGDGRGWGGWVALEAPPMPRGSVGLGMAVRVAMAGLGTNRVAAVLRLKFCHAIFNSYAARIAARSCHYPAASSTSLQPQSPSIPFDLPTLLLRMHASISFALAPASSPDAASFAPTAADVGGAVCLGYGIAIAVGVLVFISTVMLASYICVRAKAGAAAVLLADDDGGGAPAASAVVVLGLDGPAIDALYPKLLHVGVGDDDDACAGAQCAICLGEFVAGDALRRGHGCGHRFHAECAERWLRVSATCPVCRDSPLPSPMATPLAEAVPLAAHAR

SEQ ID NO: 7421 - protein, 172 aa, Triticum aestivum
  misc_feature (138)..(138): Xaa can be any naturally occurring amino acid
MATMMATSSFAGAAVLPRGSAGRSGARSLPALGRRALVVRAQTEGPSAPPPNKRKASTSIWDVMAFSGPAPERINGRLAMVGFVTALAVEAGRGDGLLSQLGSGTGQAWFAYTVAVLSMASLVPLLQGESAESRAGAXMNPNAELWNGRFAMLGLVALAATEIITGAPFINV

SEQ ID NO: 7422 - protein, 548 aa, Propionibacterium acnes KPA171202
MSRKPEPMTNPITNRGTAFTRAERLEHGMIGRLPAAVETLEQQAQRCYRQLQGLGCNIDRYVFLEELQNRNETLYYKLLVDHLVELLPVIYDPTVGEAIKKWSHAYRRSRAVYLSVDHIEDVRPSFETLELGPDDVDLLVVSDSEQILGIGDWGVNGTDISIGKLAVYTAAAGIRPERTIAVNLDVGTDNAYLLNDPSYLGNRHARVRGERYDELIHEYLEVASELYPHALLHFEDFGASNARRILVQNAANHRIFNDDMQGTAAIVLAAVISGLKVTRQSFADQRLIVYGAGTAGTGIADQIRAAMISDGLSQQEAVDRIWLVDRNGLVTDDMKGLPDYQEPYAKPVEKTRHWAHTNRHIGLTETIRRIHPTILIGTSTDHDAFTQQVVEEMCREVERPIIMPLSNPTEKIEAMPADVIAWSKGKALVSVGIPVAPFHYEGTRYEIGQGNNALLYPGLGLGVIVSGAERVSARMIRAAAEAVASQVDPRPAGSSLLPAVENLRASSATVAVAVVQAAIEEGLATKKPSNVVQAVQDAMWWPHYPPVG

SEQ ID NO: 7423 - protein, 316 aa, Desulfovibrio desulfuricans G20
MKKIVIATRGSKLALWQAEHIKERIMQQYPDSFEVELLVLKTKGDIILDVPLAKVGGKGLFVKEIEEALLDGRADIAVHSMKDVPMELPQGLTLGAIPEREVPTDSLLSARYDGLDALPQGAVVGTSSLRRQSQILAMRPDLEVKWLRGNVQTRIRKLMDGEYDAIIMATSGLKRLGETAPFHSELGPPLFMPAVGQGALGLEYRSDRQDLAEMLAFLDHRPSRICVEAERGFLFGLQGGCQVPIAGYAVMTGDNSFELTGLVAELDGTAVIRRTAAGTEADARDTGLTLAAQVKAAGADAILQRVYENGHASPQA

SEQ ID NO: 7424 - protein, 409 aa, Pseudomonas syringae pv. phaseolicola 1448A
MKKLKLVMIGNGMAGVRTLEELLKLSEDLYDITVFGAEPHPNYNRIMLSPVLAGEQNFEDIVLNDLAWYESNGIQLLLNRRVVKIDRIKRVVIADDGTQASYDRLLIATGSRPFILPVPGNTLEGVIGYRDIGHTRQMIDTAVTHKRAVIIGGGLLGLEAANGLSLRGMQVTVIHNGQTLLERQLDKTSGLMLQAALEKRGLGFRLNEQTEALLGDDLGRVRAVQFKSGEVIDTDLVVMAAGIRPNTELAEQAGLPCNRGILVNDTLQTYDPRIYAIGECVSHRGIAYGLVAPLFEQARVCANHLAQLGFARYPGSVTSTKLKVTGIDLFSAGDFLGAEGTESITLSDPIGGVYKKLVIKNDVLVGVCLYGDTADGSWYLQQIRDGQGIDAIRNHLMFGKPAAPEAACA

SEQ ID NO: 7425 - protein, 194 aa, Glycine max
  misc_feature (27)..(27): Xaa can be any naturally occurring amino acid
  misc_feature (55)..(55): Xaa can be any naturally occurring amino acid
  misc_feature (117)..(117): Xaa can be any naturally occurring amino acid
  misc_feature (129)..(129): Xaa can be any naturally occurring amino acid
  misc_feature (166)..(166): Xaa can be any naturally occurring amino acid
DTSFILARDAIGDTYLFIAWRLNGSHXTPSYLNGDYDDCEHYESFPPGHLYSIKXRALLTIAQSLHGFCDAILLSHLMITLALRHAFEMAVVKRMMTDVPSAGSLSQGSYSTLSAVXLYLYLSGSRCSXQRASKLHSLCVCLEGAPDLMASLEVTYYIGTVHHEYXYSVQEGIYTIDDEIYHIYSSWVDTIRAS

SEQ ID NO: 7426 - protein, 183 aa, Clostridium perfringens str. 13
MKNNDSKISKYISLILRHKPEEIGLKLDEHGYLGVLDLIEGLNKSYKGFSMDDLERIVREDSKGRYSFNEDKSKIRANQGHSIKVDLGLEAIKPPKVLYHGTGRKYIESILKNGLIKKERQYVHLSKDIETASIVGKRHGDLVILEVDSESMFKDGIKFYLSKNNVWLCDYVKVEYIKEISLL

SEQ ID NO: 7427 - protein, 634 aa, Prochlorococcus marinus str. MIT 9313
MEVGMVLKQSDGLKTAVARSADNRYSAASNLRNVRGWRARGTFHCLHRTPADRTGVDNEPSTFIPKALRTSPIPAESVEIRFDEISDALAAIRNGECVVVVDDERRENEGDLICAAQFATPEQINFMATEARGLICLAMQGSRLDQLDLPLMVDRNTDANQTAFTVSIDAGPEKGVSTGISAEDRARTIQVALHPETRPRDLRRPGHIFPLRASQGGVLKRAGHTESAVDLSQLAGLAPAGVICEIQNSDGSMARLPQLQNYARRWGLKLINIADLIRYRLENERFVYRQATADLPSLFGSFQAIGYLNGLDGSEHIALVKGDPRKLKEPVLVRMHSECLTGDAFGSLRCDCRPQLEAALARIEQEGEGVVVYLRQEGRGIGLINKLKAYSLQDGGLDTVEANESLGFPADLRNYGVGAQILTDLGIHRLRLLTNNPRKIAGLGGYGLQVESRVPLVICPGDHNAAYLAVKREKLGHLIDAGKSENKAPEVGPFVVVAWDGEVNGETLAKLRTRAHDWAKSNELELIAESSPRLLALWDRPLFVWRVCPRVKTSSEVSSDPLKKASLELLLQELIQWSGSRRIGLLRTDRAEQAMHPPQDLKREERSLATLFKDDFSPLKDWDATSFPNLILWS

SEQ ID NO: 7428 - protein, 258 aa, Bordetella bronchiseptica RB50
MSESFVLVETRGRVGWLTLNRPKALNALNDQLMEELGAALLALDADDGIGAIVITGSEKAFAAGADIGAMKDWSYMDVYRSDYITRNWETIKRVRKPVIAAVAGYALGGGCELAMMCDIVIAADSARFGQPEIKLGVIPGAGGTQRLPRAVGKAKAMDLALTARMMDAAEAERAGLVSRVVPADRLADEALEAATVIASMSLPSVMMAKECINRAYEVPLNDGLLFERRVFHSLFATEDQKEGMAAFTEKRKPDFKHR

SEQ ID NO: 7429 - protein, 324 aa, Lactobacillus plantarum WCFS1
MHPGLLLVNLGSPASPRTKDVKAYLQEFLSDPSVIEMPAALWQPLLRGIILPTRSWRSATFYQDSWLPQGSPLIVYSQAICQQVQAALPDWNVRLAMTYGQPDIGATLKAMVADGCEKPIILPLFPQYTQSTHGGIHRQVEATGLPHTFIDSFYDQPTYIHLLATKVWQSYQAHHYDAVIFSYHSIPTAMVRHGDPYQRECEATTKAVLAERPELPADKVITAYQSKFGPMPWLKPYLKNELMQLVELGKRNVLVVTPSFVVDCLETLEEDYVQNYQTFRASGGDRFDLVPPMNKDTGFSQFLADLAIQKQEASNHAITSSSKS

SEQ ID NO: 7430 - protein, 464 aa, Cytophaga hutchinsonii
MPNVTPELYDSVMLIKQQMLVDSLNHAQAALNDSLHATNDLMFKTRTELQLTQNSLANSSFKANNIWMMVATAFVFIMHLGFATLESGLTQAKNTTNVLFKNSIVPAIGIMTHALCGFNLMYPGFEFGVSMDFIGFKGWGVELPEGGETFVYNPGMTYWTDFLFQAMFAATAATIVSGAVAERIKLFSFMVFSFFFTAFIYPIIGSWKWGGGWLNTIGFSDFAGSTLVHSVGGWAALAGVILLGPRLGKFNKGVINPIQGHSMTSAVIGTFLLWLGWFGFNGGSVLSAEPGMVSRVLVMTCISGSSGAIAAAFSIFAINKHFDLSMVLNGILAGLVGITAGADQMGIIDATLIGLISGCLVVFAIITFEKIRLDDPVGALSVHLVCGIWGTLAVALFGAKAGAAQFVTQLIGIGSVAVAAFGSSFLILLAIKYTIGLRVGKEEEIYGLDASEHYMEAYPNFMSK

SEQ ID NO: 7431 - protein, 290 aa, Triticum aestivum
  misc_feature (249)..(249): Xaa can be any naturally occurring amino acid
  misc_feature (285)..(285): Xaa can be any naturally occurring amino acid
MSEELERDYEIGEEIGRGRFGVVRRCASRSTGDLYAVKSVDRSLLADDLDRGLAELEPKLAQLAAAGNPGVVQVHAVYEDDAWTHVVMDLCAGPDLLDWVRLRHGAPVPEPEAAAVAAQLAEALAICHRRGVAHRDVNPDNVLLDAPDGGEGDGPVRARLADFGSAALVGGGEGARGLVGTPHYVAPEVVAGGEYGEKADVWSAGVVLYVLLTGGALPLSGETASDVFARVLRGSPRFPPRLFAGVSPXAKDLMRRMMCRGVSRRFSAEQVLRPPWIVNGGGARXAVHPT

SEQ ID NO: 7432 - protein, 316 aa, Arabidopsis thaliana
MWFFGSKGASGFSSRSTAEEVTHGVDGTGLTAIVTGASSGIGVETARVLALRGVHVVMAVRNTGAGAKVKEDIVKQVPGAKVDVMELELSSMESVRKFASEYKSAGLPLNLLINNAGIMACPFMLSKDNIELQFATNHLGHFLLTKLLLDTMKNTSRESKREGRIVNVSSEAHRYSYPEGVRFDKINDESSYSSIRAYGQSKLCNVLHANELAKQLKEDGVNITANSLHPGAIMTNLWGYFNSYLAGAVGAVAKYMVKSVPQGAATTCYVALNPQVAGVTGEYFSDSNIAKPIELVKDTELAKKLWDFSTKLTDSQ

SEQ ID NO: 7433 - protein, 390 aa, Wolbachia endosymbiont of Drosophila melanogaster
MTAVVEAFGKPHVNVGTIGHVDHGKTTLTAAITKHYGNFVAYDQIDKAPEERKRGITIATAHVEYQTEKRHYAHVDCPGHADYVKNMIVGAAQMDAAILVVSGVDGPMPQTREHILLAKQVGVGYIVVYINKADVADADMIDLVEMEVRELLSKYGFPGDEVPVVVGSALKALEDDSSEYGKKSIDKLMEKLDEYVAVPPRPVDLPFLLPIEDVFSISGRGTVVTGRIEKGEIKTGEEIEIIGLKATQKTICTGVEMFKKLLDKGSAGLNVGILLRGTKREEVERGQVLAKPGTITPHRKFKAEVYILKKEEGGRHTPFFANYQPQFYLRTTDVTGSIKLLDGKEMVMPGDNVSVEVELQVPIAMDKGLRFAIREGGRTVGSGVVSEILE

SEQ ID NO: 7434 - protein, 81 aa, Gaertnera macrostipula
TPQDEMRAGMSYFHETIWKGVPKFLRRVDTALKNIGINERLPYNAPLIQFSSWMGGDRDGNPRVTPEVTGDVCLLARMMAA

SEQ ID NO: 7435 - protein, 287 aa, Robiginitalea biformata HTCC2501
MRQLKITKQVTNRETASLDKYLQEIGKVDLITADEEVELAQRIKAGDQAALEKLTKANLRFVVSVAKQYQNQGLTLPDLINEGNLGLIKAAQRFDETRGFKFISYAVWWIRQSILQALAEQSRIVRLPLNKIGSINKINKTFAFLEQAHERVPSAEEIAKELDMTVEDVKQSLKNSGRHVSMDAPLIDGEDSNLYDVLRSGESPNPDKELLHESLRTEIERALETLTPREADVIRLYFGLAGQHSMTLEEIGETFDLTRERVRQIKEKAIRRLKHTSRSKILKTYLG

SEQ ID NO: 7436 - protein, 645 aa, Oryza sativa (japonica cultivar-group)
MAAAARDALLDELRALMAAHSPPLHALVVPSEDAHQSEYVSERDKRRQFVSGFTGSAGLALITMKEALLWTDGRYFLQAEQQLSDRWKLMRMGEDPPVEVWIADNLSDEAVVGINPWCISVDTAQRYEHAFSKKHQTLFQLSSDLIDEIWKDRPSAEALPVFVQPVEYAGRTVTEKLKELREKFLHEKARGIIIAALDEVAWLYNIRGDDVHYSPVVHSYSIVTLHSAFFYVDKRKVSVEVQNYMTDNGIDIKDYNMVQSDASLLASGQLKGSAVNGSSYGENDMNENSKVWIDSNSCCLALYSKLDQDQVLMLQSPIALPKAVKNPVELDGLRKAHIRDGAAVVQYLAWLDNQMQENYGASGYFSEAKGSQKKQHMEVKLTEVSVSDKLEGFRASKEHFKGLSFPTISSVGPNAAVIHYSPEASSCAELDADKIYLCDSGAQYLDGTTDITRTVHFGKPSEHEKSCYTAVLKGHIALDSAVFPNGTTGHALDILARTPLWRSGLDYRHGTGHGIGSYLNVHEGPHLISFRPSARNIPLQASMTVTDEPGYYEDGSFGIRLENVLIVKEANTKYNFGDKGYLAFEHITWAPYQTKLIDTTLLTPAEIEWVNAYHADCRKILQPYLNEQEKEWLRKATEPIAVSCC

SEQ ID NO: 7437 - protein, 139 aa, Colwellia psychrerythraea 34H
MKFLHTMVRVRDLDQSLDFYINKLGLIETKRIEVPAGKFTLVYLATEIGGPEVELTYNWGSTEDYTAGRSFGHLAFEVDNIYQTCQTLQDGGITINRPPRCGHMAFVNSPDGISIELLQKDGSLEPQEPWLSMENSGSW

SEQ ID NO: 7438 - protein, 644 aa, Oryza sativa (japonica cultivar-group)
MSAAAGRNALLDELRALMAAHSPPLHALVVPSDDAHQSEYVAERDKRLQFISGFTGIARSAGLALITMKEALLWTDGRYFLQAEKQLSDHWELMCMGEDPPVEVWIADNLSDEAVIGINPWCISVDTAQRYEHAFSKKHQTLFQLSSDLVDEVWKDRPLANTQPVVHPVEFAGCSVTGKLKELRKKLLHEKARGIIIAALDEVAWLYNIRGNDVHYSPVVHSYSIVTLHSAFFYVDNRKVSVESYMSENGIDIRDYNMVQSDVSLLASGQLKGSAVNGSSHEGNGMNDNSKILIDNSCCLALYSKLDEDQVLILQSPVALSKAVKNPVELDGLRKAHIRDGVAVVQYLAWLDNQMQENYGASGYFSGAKGSQKKEHVEVKLTEVSVSDKLEGFRAAKEYFKGPSFPMISAVGPNATILHYSPEASSCAELDTDKIYLFDTGAQYLDGTTDITRTVHFGKPSEHEKSCYTAVLKGHIALDTAVFPNGTTGHALDILARTPLWKSGLDYRHGTGHGVGSYLTVHEGPHQISFRPSARNVPLQASMTVTDEPGYYQDGSFGIRLENVLIVQDANTKFNFGDKGYLAFEHITWAPYQTKLIDATLLAPAEIEWVNTYHSDCRRILQPYLNEQEKEWLRKATEPITVSC

SEQ ID NO: 7439 - protein, 124 aa, Triticum aestivum
MAARRAHAAAALALLVAALVLSAAPAPAEGAVANCGQVVSYLAPCISYAMGRVSVPGGGCCSGVRGLNAAAATPADRKTTCTCLKQQASGMGGIKPNLVAGIPGKCGVNIPYAISQGTDCSKVR

SEQ ID NO: 7440 - protein, 204 aa, Triticum aestivum
  misc_feature (185)..(185): Xaa can be any naturally occurring amino acid
MAAHAALAATRIPTSARLHSKAASRQRVDFADFSGLRPGSCSVSAAAREASFSDVLGAQLVARASGENAVRAPAEAKLKVAINGFGRIGRNFLRCWHGRENAPLEVIVINDSGGVRNASHLLKYDSMLGTFKADVKIVDNETISVDGKNIQVVSNRDPLKLPWAELGIDIVIEGTGVFVDGPGAXKHLQGWRQESSINCSGPGA

SEQ ID NO: 7441 - protein, 320 aa, Photobacterium profundum SS9
MIKKIGVLTSGGDAPGMNAAVRGVVRAALSDGLEVYGIYDGYQGLHQNRIEKLSRTSVSDVINRGGTFLGSARFPEFKDEKVRAQAIQNLKMHGIEALVVIGGDGSYMGAKKLTEMGFPCIGIPGTIDNDVAGTDYTIGYFTALNTVIDAIDRLRDTSSSHQRISIVEVMGRHCGDLTLMSAIAGGCEYIITPETGLHKEELIAKIKEGIYKGKKHAIVALTELMTDANELAKYIEDETGRETRATVLGHIQRGGQPTAFDRILASRMGAYAVELLIQGEGGRCVGVQNEKMVHHDIIDAIENMKRPVRKDLYELADKLF

SEQ ID NO: 7442 - protein, 448 aa, Ureaplasma parvum serovar 3 str. ATCC 700970
MSTKQNEPLFVNLEDLKQKVKLSFTEEFSFSYALSELEAGIFESRNLKGADAGDPEEILLNVVLDVSKKKRSRNEIKFNKLQNYFIHMNLREEHFSEIIDVLEAIGIRVPDYDLVMQSKSKTNTKKKDEYGIDDTLEISTSKIGFSSTTTEKVDDGIKAYLGVLGESKMLRSDEETEYAKMVISDDPSLVKIGKNQLYTSNMRLVTSIAKKYLNRGLDLEDLIQEGSSGLLKAIDKFDHEKGHKFSTYATWWIRQSITRAIADQARQIRIPVHMVETINKLTKAERNLIQELGRDPTAEEIAQAMNKVSQAKNQKEQLITAQKVVEIKKLNVDPVSLDKQIGHDEESQFSDFISDDEIISPEKYTEKKALNDQINEMFEKVLNDNEQRVIKMRYGLLPFERPYTLEEVGEYLGVTRERARQIESKAIRKLKHPSKTAKLRSFIGESEN

SEQ ID NO: 7443 - protein, 413 aa, Burkholderia thailandensis E264
MSTTDPYLIAGGGHAARRAAETLRERDPAARIVMIGEEPELPYDRPALSKEALVGGDEGERRAFVRDAAWYRERGVELRLGVRVEAIERGTQRVRLSDGASLGYARLLIATGSRVRRFRGPVDAGVPIHYVRTVADARALRAALAPGRRVAVLGGGFIGLEVAASAVRLGCRATIVDPAPRLLQRGMPEVVGAFALALHARHGVDVRLGALPERIRRGANGAAVVETSAGDIAADVVVAGIGVVPNVELAQAAGLHVDDGISVDERCRTADAAIFAAGEVTRHFNPLVGRRLRIESWQVAEHQPAVAAANILGGHDTYEEWPWLWSDQHDCNLQTLGVFDGEQTLVLRGSPELDRAFCVFALNARRELRAVAAVNAGREIAACRRLMTANVALDPARLADPTVALRSMLRDGA

SEQ ID NO: 7444 - protein, 1209 aa, Trichodesmium erythraeum IMS101
MGRKCILGFILFLLTLTLTILHGSVISKNTNDYQLSNQIKEVKTWQTSELEKEQYNFYQSSEEDFIKPQKFDHLQTVINKKDLPVYKNLSTSKPHSTYKVTDILWLLISSGLVFLMQPGFMCLESGLTRSKNNINVAFKNLTDFGISVFCFWSIGFAFMFGTSASGIIGHSNFFFATNVQPLDAAFFLFQVMFCGTATTIVSGAVAERMKFGTYLFVAFLVSGFIYPIFGHWAWNGIDTGVLRGWLGQRGFIDFAGSTVVHSIGGWVSLATLLVIGPRTGRFPRDRPPEKIHGSNLPLSILGVMLIWFGWFGFNGGSTLALNEQVPGIIVNTIFSSVAGMITGLSIGWSIRGIPGVDLIINGTLGGLVAITASCHAVTTLSAVIIGFIGGIVTILVEQILEKIRVDDAVGAIPVHLGAGIWGTLAVALFGKPEILGTGLSLSEQLTVQLLGVCTAFLLGFFVVYPILLITNKFFLLRVSTEDEHIGLNISEHHAKTEILDLFEIMSSQASTQDLTLRVPVEPFTLVGQIAERYNHVMDTLEEVTTRNDAIIKLATDAIITFNKSELEIISVNPSAEKIFSYKPQDLVGMPIYEILDFTINPLMREKIDSNDLITEGKKSTVEALKLWVNPSFISFPTREIINAYYTFNFQDIKPENLQSYFPNFIHLFDKNSADTQIELETEKKITQKKYYIERLISLIAETGNLYELVGIRKDGSLFPIEIAVREAKLNQKNFYTGTFRDISERKESEAKLKENEQRFRSLSTATFEGIIIYEQGKIVDANTAALQMFKYELSEIIGMNGLELIDSKYKNLVWKNMSSGYEKPYEVVGIRKDNSTFPIEIQAKTFFYCSYQHRVSAIRDITERKLAEKALRESEEKFRAVMEQAADAFIIHDLQGKIVDVNQSTCQTLGYTYEELLHLFIEDIEINFVLEYLYQKWQKLIPGIPITLQGTHKRKDGTTFPVEVRLGLLKAGNGNLVLALCRDITERKKVEQALLLEQGKSEKLLLNILPKPIADKLKENQDIIAEGFDEVTVLFADLVGFTQLASSVYPKRLVYWLNEIFSKFDLLAEKYGLEKIKTIGDAYMVVGGLPTPMENHAEAIALIAIDMREELAHFAHKSKQDFLIRIGINTGPVVAGVIGRKKFIYDLWGDTVNIASRMESQGIPGVIQVTEATYQILKHKFLFTERGLIHIKGKGYMKTYFLQGKKVIP

SEQ ID NO: 7445 - protein, 476 aa, Arabidopsis thaliana
MVKPSSSVSSVSMFALFSLVLCILIHCLYTKKPSFFQRFLSLLLPDLRLLEVDKEKQDPKSPRGALEACLTRCSISSASSSSDDPPPNREAIDNADADTDVQCKNHRASSNWGKFFKLWKRRSMKRLSSFPPLSGAAPPIIKQNKSADPNMNGMVLHDIYDFQSSLQNFSISDIEIATDNFSPENIIGRGGYADVYQGILPEGKLIAVKRLTKGTPDEQTAEFLSELGIIAHVDHPNTAKFIGCCIEGGMHLVFRLSPLGSLGSLLHGPSKYKLTWSRRYNVALGTADGLVYLHEGCQRRIIHRDIKADNILLTEDFQPQICDFGYFAPEYFMHGIVDEKTDVFAFGVLLLELITGHPALDESQQSLVLWAKPLLERKAIKELVDPSLGDEYNREELIRLTSTASLCIDQSSLLRPRMSQVVELLLGHEDVVMTPREAKIKMMQRTYSEELLDSVEYNSTKYLGDLDRIREVALAS

SEQ ID NO: 7446 - protein, 217 aa, Desulfovibrio desulfuricans G20
MILSPSLLSSDYGRLADELAALEDAGLSWVHWDVMDGMFVPNITLGAPIIKKLRKASGLFFDVHLMVQAPERYIADFADAGADMLVVHAEATNHLERTLSEIRRMGVQCGVALNPHTPLCVLEYVLDQLDMVLIMSVNPGFGGQKFIPFTMRKIEELSAMITARGLKTLIQVDGGVDPENTPELVRRGADVLVSGSAFFGHPPYRQRHDAFQAAAAR

SEQ ID NO: 7447 - protein, 115 aa, Triticum aestivum
MAHSPVAQVVLVAVVAAMLLAATEAAVSCGQVSSALSPCISYARGNGANPSAACCSGVRSLASSARSTADKQAACKCIKSAAAGLNAGKAAGIPTKCGVSVPYAISSSVDCSKIR

SEQ ID NO: 7448 - protein, 381 aa, Coccidioides immitis RS
MLSGRFVTSSLRQCSRRAVSTSNSSQIRYYAVPAAEKIAKFPGTKGPDGKYTVTLIEGDGIGPEISQSVKDIFSAAKVPIKWEPVDVTPILKDGKTAIPDEAINSVKKNYVALKGPLATPVGKGHVSLNLTLRRTFNLFANVRPCRSIAGYKTPYDNVNAVLIRENTEGEYSGIEHVVVDGVVQSIKLITREASERVLRFAFQYAQEVGKPKVRAVHKATIMKMSDGLFLRTAKEISKEFPDIEFDAELLDNTCLRMVTDPAPYNDKVLVMPNLYGDILSDMCAGLIGGLGLTPSGNIGNECSIFEAVHGSAPDIAGRALANPTALLLSSIMMLRHMGLNDHAKKIETAIFETLAEGKTLTGDLGGKAKTHEYAGAIIKRL

SEQ ID NO: 7449 - protein, 520 aa, Kluyveromyces lactis
MNEYDAVDRHTFKVFNQDFTVDKRFQLIKEIGHGSYGIVCSARFTEAADETTVAIKKVTNVFSKTLLCKRSLRELKLLRHFRGHKNITCLYDMDIVFQPDGMFNGLYLYEELMECDMHQIVKSGQPLTDAHYQSFIYQILCGLKYIHSADVLHRDLKPGNLLVNADCQLKICDFGLARGYSENPVENNQFLTEYVATRWYRAPEIMLSYQGYTKAIDVWSCGCILAELLGGKPIFKGKDYVDQLNRILQVLGTPPEETLKRIGSKNVQDYIHQLGYIPKIPFSTLYPNANPDALNLLEGMLSFDPQLRITVDDALQHPYLSIWHDPADEPICTEKFDFSFESVNEIEQLKQMVIDEVTDFRQYVRLPLLHEQQQQQGKTDGGFDDQIREDQRTFQAQLEEQVNNGRTASNVPSFDEPFSSQMMGSASQQDPLVGIHSDNLPSHELDFPPRPSENVLDSPMGLSHQQTHNGSPECQDINDLLGLERELEFGLDRQFNETVWYIASSTLFVEHKLLLRFCYT

SEQ ID NO: 7450 - protein, 445 aa, Frankia sp. EAN1pec
MDEPLTVDGAELDVRKLGPCRIDSPLLPLLGARPTTQHYIDEGDKVLFDDTVSMISARKVPLDELPGFEPAGPRRKIYFDPSKTRVGIVTCGGLCPGLNNVIRGLVLELTNHYGVNRIFGFRHGYQGFIAKYGHSVVDLTPERVANIDEDGGTILGTSRGQQDPAEIVDCLSRMNINILFVIGGDGTLRGARAIAGIVAERGEKIAVVGIPKTIDNDIPYIDQSFGFQTAFAKAAESIRAAYAEATSAPGGVGIVRLMGRHSGFIACYAVLAKSDADVVLIPELPFTLEGERGLLAYIRQRVEKRGHAVVVVAEGAGQDLVAGLPESSDASGNRKLYDIGPELSRRITEDFAARGAELNLKYIDPSYHIRSVAANPYDNVYTIRLAHAAVHAAMSGRTEMVVGRWRRRFIHIPIALAVSQRNQVDPAGDLWMSVLEATGQPYRFG

SEQ ID NO: 7451 - protein, 804 aa, Arabidopsis thaliana
MVVEEENRSMEEGLLQHQNDRDDRRITACVILSTFVAVCSAFSYGCAAGYTSGAETAIMKELDLSMAQVFFSVWLLSECGRCGGGLVQRSIGSHPRQKTNVVGMRFFLRFWLALHCFRKGNVFWLDLGRISLGIGVGLISYVVPVYIAEITPKHVRGAFTASNQLLQNSGVSLIYFFGTVINWRVMAVIGAIPCILQTIGIFFIPESPRWLAKIRLSKEVESSLHRLRGKDTDVSGEAAEIQVMTKMLEEDSKSSFSDMFQKKYRRTLVASAVGMSIGSLLIGVSFTLQIFPINIKVSAGTIVALTSWTSGWFVSYAFNFMFEWSAQGTFYIFAAVGGMSFIFIWMLVPETKGQSLEELQKLSVRVVAGENKSMEEGLLRHENDRDDRRITACVILSTFVAVCSSFSYGCANGYTSGAETAIMKELDLSMAQFSAFGSFLNLGGAVGALFSGQLAVILGRRRTLWACDLFCIFGWLSIAFAKNVLWLDLGRISLGIGVGLTSYVVPVYIAEITPKHVRGAFSASTLLLQNSGISLIYFFGTVINWRVLAVIGALPCFIPVIGIYFIPESPRWLAKIGSVKEVENSLHRLRGKDADVSDEAAEIQVMTKMLEEDSKSSFCDMFQKKYRRTLVVGIGLMLIQQLSGASGITYYSNAIFRKAGFSERLGSMIFGVFVIPKALVGLILVDRWGRRPLLLASAVGMSIGSLLIGVSFTLQEMNLFPEFIPVFVFINILVYFGFFAIGIGGLPWIIMSEIFPINIKVSAGSIVALTSWTTGWNLLHICDGGGIVIAFYMDARAGNQRTVA

SEQ ID NO: 7452 - protein, 1186 aa, Nostoc sp. PCC 7120
MKRDTTGKFVSNWDSEPKHRYSVSLTSTAWRSLDEEAHKQGISRSELIEHFARNLGSEQSLADEAISTNAGNPEQQLILATVFHQDITNNQQLQLITSPETERQITTILESITDAFVAFDENWHYTYVNQAAVKILHKTPAELIGKHVWDEVFPELVGGLAYQELHRAVVEQVAVSWEEFGEPVQCYLEANAYPFSQGVAVYFRDITERKQAEAERERLLHELETERARFEAVLRQMPAGVMIADAASGKLVLTNEQAKQILRYQFEDSLELKEYAPVTPFAAFRCDGQPYDPYEYPLPRSLLTGEVISQEEMLLRWEDNSHIFISVNSAPILDSQGQIAAAAIVFQDVTERKHLESELQQREQEFKMVAENAPDIISRIDREFRHLYVSPAVEAATGIPPEEFIGKTNTELGMPEEICNFWCENLQRAFDTGEKQVVEFSFPTPTGLRWYQSLIVPEFASDGYATTLINVARDVTDYKQIEQALRDNEERLRLALTVAQAAQRQLATIFETSPVGIALLDSQQRYVAINQALAQINGLTREQHLGRSIAELFGQSDPQLVQVFHDIYTTGEPFISPSFAVNVPGRSDRQPGYYNVYYLPTTNSNHQVEDVLVYVLDVTEQIRLERGQRFLSETSKVLASSLDYQTTLERLAQLAVPELADWCTVHMMAEDGLIEQIAVAHVDPAKLEWAEEIRRKYPLNLNDPRGAALTLRTGQSDLLIDISDELLVQSARDPEHLEILRRVGFKSAMTVPLRTQTRTLGVISFISAESGHKYDQGSMQLAEELAYRASLAIDNAHLYRLAQSDRTKAEAANRIKDEFLAVLSHELRSPLNPILGWSRILRSKQLSPTKVEQALETIERNAKLQAQLIEDLLDVSRILQGKMTLNVASVNLAATIAAALETVQLAAEAKNIHIQTTLKPISATVVGDQNRLQQVVWNLLSNAVKFTPSGGQIEVQLEQVNLYAQIQVKDSGKGIAREFLPYVFEYFRQEDGATTRQFGGLGLGLAIVRHFTELHGGTVQVSSLGQDLGATFTVRLPLNLVEQELPADDEQLKNVTDLTGTHILVVDDDADMRELAEFILIQFGAQVTTAASAVEALNIFSQFIPDLLLCDIGMPEMDGYSLMRQIRQWLPQEGGTIPAIALTAYAGEINQQQALAAGFHQHISKPVEPEELVQAIFQLLHPCFFS

SEQ ID NO: 7453 - protein, 206 aa, Triticum aestivum
MHPTRWELSHMVDLQAAALVIARAGPAATPAAAAMVKYSRDPSTPTKSAKACGKDLRVHFKNTRETAFALRRMPLGKAKRYLEDVLAHKQAIPFRRYCRGVGRTAQVKNHQPNGQGRWPAKSAQFVLDLLKNAESNAEVKGLDVDNLYISHIQVNQAQKQRRRTYRAHGRINPYMSNPCHIELILSEKEEPVKKEADNVVAPRKAI

SEQ ID NO: 7454 - protein, 337 aa, Lentinula edodes
MAVKVGINGFGRIGRIVLRNALLNPEVNVVAVNDPFIALEYMVYMFKYDSVHGRFKGTVETKGGKLIVDGKEISVFGEKDAGAIPWSSVGAEYIVESTGVFTTIEKASAHLKGGAKKVIISAPSADAPMYVCGVNLDSYDSQHAVISNASCTTNCLAPLAKVIHDKFGIVEALMTTVHATTATQKTVDGPSNKDWRGGRSVNGNIIPSSTGAAKAVGKVIPSLNGKLTGLAFRVPTLDVSVVDLVCRTEKSATYDEIKAAVKEASKGPLKGILGYTEDHVVSTDFIGDNHSSIFDATAGIQLNKNFVKLIAWYDNEWGYSGRVVDLLVFAAKKDGAL

SEQ ID NO: 7455 - protein, 876 aa, Vibrio fischeri ES114
MNEKYAALKSNVSMLGHLLGNTIRDAHGEELLAKVETIRKLSKTARAGSDEDRNALIEEIKSLPDDQLTPVARAFSQFLNLTNMAEQYHTISRHCEAHVCEPDAISTLFSKLSQSNVSKLDTAQAVRELNIELVLTAHPTEIARRTMINKLVKINECLSKLELGDISFSERDKTERRLEQLIAQAWHSDVIRQERPTPLDEAKWGFAVVENSLWQGIPEFLREFDQRLEGHLGEGLPIDARPVHMSSWMGGDRDGNPFVTHKITREVMLLSRWKAADLYLKDINELISELSMVKCTDEVRELAGDQHEPYRAILKQLRTLLGDTLESLDAQMKGELAPNKVILTDADQLWNPLYACYQSLHACGMGIIADGSLLDTLRRVKAFGAHLVRLDIRQESTRHSDVLSELTRYLGIGDYDQWSEQDKISFLVNELSSKRPLLPRKWEPSPEVQEVIDTCKVVAEQSKEALGSYVISMARTASDVLAVHLLLQEAGCPFRMDVCPLFETLDDLNRSKEVMEQLFSIDWYRGFIQNHQMVMIGYSDSAKDAGVMSAGWAQYSAMEALVEVCEKESIELTLFHGRGGTIGRGGAPAHAALLSQPPKSLKGGLRVTEQGEMIRFKLGLPEVAVNSFNLYASAILEANLLPPPEPKQEWRDLMEVLSEVSCEAYRNVVRGEKDFVPYFRAATPELELGKLPLGSRPAKRNPNGGVESLRAIPWIFSWSQNRLVLPAWLGAGEAIQYSIDKGHQALLEEMCREWPFFSTRLGMLEMVYTKCNPQMSEYYDQRLTDKSLWPLGERLRNQLQADIKAVLNVENNDHLMERDPWGSESIRLRNIYVDPLNMLQAELLFRTRQQEETSPELEEALMVTIAGIAAGMRNTG

SEQ ID NO: 7456 - protein, 183 aa, Brassica napus
PSVLYYAGSILQTAGFSAAADATRVSVIIGVFKLLMTWVAVAKVDDLGRRPLLIGGVSGIAISLFLLSAYYKFLGGFPLVAVGALLLYVGCYQISFGPISWLMVSEIFPLRTRGRGISLAVLTNFGSNAIVTFAFSPLKEYLGAENLFLLFGAIALVSLLFVVLVVPETKGLSLEEIESKILK

SEQ ID NO: 7457 - protein, 492 aa, Triticum aestivum
  misc_feature (192)..(192): Xaa can be any naturally occurring amino acid
MAAPSGKAAMERHQSIDAQLRLLVPGKVSEDDKLVEYDALLVDRFLDILQDLHGPHLREFVQECYELSAEYETDRDEARIAELGSKLTSLSPADSIVVSSSFSHMLNLANLAEEVQIAFRRRSKLKRGDFGDEASAPTESDIEETLKRLVSELGKSREEVFDALKNQTVDLVFTAHPTQSVRRSLLQKHREXSRNCPEAGCMPKDITADDKQELDEALQREIQAAFRTDEIRRTPPTPQDEMRAGMSYFHETIWKGVPKFLRRIDTALKNIGINERLPYNAPLIQFSSWMGGDRDGNPRVTPEVTRDVCLLARMMAANLYFSQIEDLMFELSMWRCSDELRVRADELHRSSKKSAKHYIEFWKQVPSNEPYRVILGDVRDKLYYTRERSRHILTTGVSDIPEESTFTNVEMFLEPLELCYRSLCACGDKPIADGSLLDFLRQVSTFGLALVKLDIRQESDRHTDVLDTITTHLGIGSYAEWSEEKRQEWLLS

SEQ ID NO: 7458 - protein, 570 aa, Bacillus anthracis str. Sterne
MSKFTVASNGSLETTLRGVEVLSTPLLNKGVAFTQEEREELGLKGLLPPAVLTLEEQARRAYEQFCSQPDDLLKNVYLTALHDRNEVLFYRILTDHLREMLPIVYTPTVGVAIQRYSHEYRKPRGVYLSINDPSGIEEAFANIGATAENIDLVVVTDGEGILGIGDWGVGGINIAIGKLAVYTAAVGIDPSRVLPVILDVGTNREELLNNPFYIGNRHPRITGEAYDEFIDTFVQAVNKQFPKALLHWEDFSSRNARKILDKYRHDICTFNDDIQGTGAVSLAAVLSAVKASGVPLSEHRVVVFGAGTAGIGIADQVRDAMVRVGVSEEESYKRFWCIDRNGLVTDNMEDLLDFQIPYARKEAEVSEWKENGVIGLAEVVKHVKPTILIGTSTVAGAFKEEIIKEMASHVERPIILPMSNPTPLAEAKPADLIEWTEGRALVATGSPFEPVTYNGVTYVIGQSNNALIFPGLGLGTIVVRASVMTDGMFAAAAEAVASMVDTSQPGAPILPEVEELRNISEMVAIEVAKVAVAEGVARENFSDNDIKIAVKEAIWEPEYRQIKAVEKVTI

SEQ ID NO: 7459 - protein, 148 aa, Triticum aestivum
  misc_feature (81)..(81): Xaa can be any naturally occurring amino acid
  misc_feature (87)..(87): Xaa can be any naturally occurring amino acid
  misc_feature (109)..(109): Xaa can be any naturally occurring amino acid
  misc_feature (115)..(115): Xaa can be any naturally occurring amino acid
  misc_feature (121)..(121): Xaa can be any naturally occurring amino acid
MAPTVMASSATSVAPFQGLKSTAGLPVSRRSNGASLGSVSNGGRIRCMQVWPIEGIKKFETLSYLPPLSTEALLKQVDYLXIRSKWXVPCLDSASWVHLPVEHNASPGXYYDGRXYWDNVXTAYFGCTDPPVGSQEGYLTLCISVRKS

SEQ ID NO: 7460 - protein, 394 aa, Ipomoea batatas
MVDGNHPKVVCVTGAAGFIGSWLVMTLLQRGYHVHATVRDPGNTKKVKHLLELPKADTNLRVWKGVMEEEGSFDEAIAGCEGVFHVATPMDFDSKDPENEVIKPAINGVLNIINSCVKAKTVKRLVFTSSAGTLNVQPQQKPVYDESCWSDLDFIYAKKMTGWMYFASKILAEKEAWKATKEKKIDFISIIPPLVVGPFITPTFPPSLITALSLITGNQAHYSIIKQGQYVHLDDLCEAHIFLYEHPKAEGRFICSSHHTTIHGLGEMIRQNWPEYYIPSQFKGIEKDLPVVYFSSKKLQDMGFQFKYSLEDMYRGAIETLRKKGLLPYSTKEPAAIEEEQETVPLKVQEPTKQEATTVPLKPAAIEQKQETVPLKLEEPTAIEQKQKVVPLKA

SEQ ID NO: 7461 - protein, 113 aa, Zea mays
AVLAALLLASSEPASAAVSCSDVTSSVAPCLGYAMGTTASPSPACCTGVRSLNSRASSTADRQATCACLKSMTSRLGGGGGGVSMGNAASIPSKCGVSVGVPISPNVDCSKIN

SEQ ID NO: 7462 - protein, 402 aa, Streptomyces collinus
MAAPQNYLAVIKVIGVGGGGVNAINRMIEVGLKGVEFIAINTDAQALLMSDADVKLDVGRELTRGLGAGANPAVGRKAAEDHREEIEEVLKGADMVFVTAGEGGGTGTGGAPVVANIARSLGALTIGVVTRPFTFEGRRRANQAEDGIAELREEVDTLIVIPNDRLLSISDRQVSVLDAFKSADQVLLSGVQGITDLITTPGLINLDFADVKSVMSEAGSALMGIGSARGDDRAVAAAEMAISSPLLEASIDGARGVLLSISGGSDLGLFEINEAAQLVSEAAHPEANIIFGAVIDDALGDEVRVTVIAAGFDGGQPPARRDNVLGSASSSPAPARREEPAPARQPESRPSFGSLGSVTPKEDPEPAPEPVAEIPVAPPVPPSPRTYSDSAAEELDVPDFLK

SEQ ID NO: 7463 - protein, 598 aa, Schizosaccharomyces pombe 972h-
MVVHTGNRLNKLRELMKERGYTLYVVPSEDAHSSEYTCDADARRAFISGFDGSAGCAVIGETSAALFTDGRYFNQASQQLDENWTLMKQGFTGVPTWEEYCTQMTKCNEKVGIDSSLITFPAAKALRESLFLKSGAVLVGDHDNLVDIVWGASRPKEPLEKLIVQEIKYAGLGVDEKLHNLREAMKEQKIEAFVVSMLDEVAWLYNLRGADVPYNPVFFAYSLVTLDEAFLYVDERKVTPEVSKHLDGFVKILPYDRVFSDAKNSNLTRIGISSKTSWCIATSFGETKVMPILSPISQAKGIKNDAELKGMKECHIRDGCALVEYFAWLDEYLNSGNKINEFDAATKLEQFRRKNNLFMGLSFETISSTGPNGAVIHYSPPATGSAIIDPTKIYLCDSGAQYKDGTTDVTRTWHFGEPSEFERQTATLALKGHIALANIVFPKGTTGYMIDVLARQYLWKYGLDYLHGTGHGVGSFLNVHELPVGIGSREVFNSAPLQAGMVTSNEPGFYEDGHFGYRVENCVYITEVNTENRFAGRTYLGLKDLTLAPHCQKLIDPSLLSPEEVKYLNEYHSEVYTTLSPMLSVSAKKWLSKHTSPI

SEQ ID NO: 7464 - protein, 400 aa, Aspergillus parasiticus
MPLLEAPRNGPKVSNGVLSGVSHSQSFGIDTESHSDDPNRRQRIVVVGLGMVAISFLEKLVKQDSERRKYDIVVIGEEPHVAYNRVGLSSFFEHRNIEDLYLNPKEWYGSFKDRSFDYHLNTRVTDIFPDRKTVKTSTGDTIAYVLLVLATGSDAVLPTHTPGYDANGVFVYRTISDLERLIEFASKHQGETATTVGGGLLGLEAAKAMTDLEDFGKVKLIDRNKWVLARQLEADAGTLVTRKIRELGLDVLHQKRVAKIKTDDNNNVTGIVFEDGEEIDCCCVCFRIGVRPRDELGTTAGIQCASRGGFVINESLQTSIPEIYAIGECASCANQTFGIIAPGIEMADVLAFNLTNPDKEPKSFRRPHLSTKLKLLGVDVASFGDFFADRDGPKFLPGRR

SEQ ID NO: 7465 - protein, 474 aa, Tetragenococcus halophilus
MKSHPLTLTQNIMNNKGLNRYVITITLIATLGGLLFGYDTAVISGAEQSIQNNLVNGVGLGSFAHGLTVSSALIGCVFGGLLSGIFSNNLGRRNSLKLAGSLFLISALGSAYPEFLFFQAGDASVGLLIVFNLYRVLGGIGVGMASGISPTYIGEIAPGKVRGSLVSWYQFAIIFGQLVVYFVNWGIATGQSPEWVNDIGWRFMFASEAIPAILFFALLFYVPETPRYLVLKNNEEKAFDVLSKINNSKEEAKDILTDIKGSLNTTETSGKLFSYGKTVVIVGVLLSIFQQFIGINVALYYAPRIFESMGAGQNASMVQTIIMGIVNVTFTYVAIRTVDKWGRRPLLLVGSIGMAIGMFAVALLAKNGVLGIWTLVFIIVYTASYMMSWGPIVWVLLSEIFPNKIRGQAMAFAVAAQWLSNFFISSTYPAMIDFSGPLTYGFYGLMCVISAIFVWKMVPETKGKTLEQLENTWL

SEQ ID NO: 7466 - protein, 120 aa, Glycine max
MKQVFVAFLALQVVLVLTIMAADPAGKGYDCEKAKRSLKSCMEYLTGNVDSPSAACCNGVKELKASAPTKDEKIAECQCIEEALTPIPNFKQDRAIALPKECGVDVGFPIPKNFTCSSIS

SEQ ID NO: 7467 - protein, 344 aa, Brassica napus
MALTQIQIFLIVSLVSSFSLSITLSRPLLDEVAMQKRHAEWMTEHGRVYADANEKNNRYAVFKRNVERIERLNDVQSGLTFKLAVNQFADLTNEEFRSMYTGFKGNSVLSSRTKPTSFRYQNVSSDALPVSVDWRKKGAVTPIKDQGLCGSCWAFSAVAAIEGVAQIKKGKLISLSEQELVDCDTNDGGCMGGLMDTAFNYTITIGGLTSESNYPYKSTNGTCNFNKTKQIATSIKGFEDVPANDEKALMKAVAHHPVSIGIAGGDIGFQFYSSGVFSGECTTHLDHGVTAVGYGRSKNGLKYWIIKNSWGTKWGEGGYMRIKKDIKDKEGLCGLAMKASYPTI

SEQ ID NO: 7468 - protein, 368 aa, Zea mays
MDRELLETFDVAKKAADAAAGDGNSPEAGRCLDALRRLRDIRVNTDILVSTQVGKRLRPLTKHPHSGIQAVAADLFGYWKKVVLEESGKKNGGSENERSSDSSGKVEKARPVKIEKNSVSASMKLEKRDVDVRGQKPNNAKVEKTTSNGSKAQSVKVERVSKEVIRTPDAKRPASVPNGHPKLTSLVKCNDPTRDKIRELLAEAFVRVSRETSDDDRDEVKNILDEVEACDPYRVAVTVESALFERLGPSTGTHRAKYRSIMFNLRAESNTDFRRRVLIGLVAPERLPDVSPDEMASDARKQENMQIKEKALFDCERGAAPKATTDQFKCARCGQRKTTYYQLQTRSADEPMTTFVTCVNCNNHWKFC

SEQ ID NO: 7469 - protein, 639 aa, Solanum tuberosum
MATQYHSSYDPENSASHYTFLPDQPDSGHRKSLKIISGIFLSSFLLLSVAFFPILNNQSPDLQSNSRSPAPPSRGVSQGVSDKTFRDVVNASHVSYAWSNAMLSWQRTAYHFQPQKNWMNDPNGPLYHKGWYHLFYQYNPDSAIWGNITWGHAVSKDLIHWLYLPFAMVPDQWYDINGVWTGSATILPDGQIMMLYTGDTDDYVQVQNLAYPTNLSDPLLLDWVKYKGNPVLVPPPGIGVKDFRDPTTAWTGPQNGQWLLTIGSKIGKTGIALVYETSNFTSFKLLDEVLHAVPGTGMWECVDFYPVSTEKTNGLDTSYNGPGVKHVLKASLDDNKQDHYAIGTYDLTKNKCTPDNPELDCGIGLKLDYGKYYASKTFYDPKKQRRVLWGWIGETDSESADLQKGWASVQSIPRTVLYDKKTGTHLLQWPVEEIESLRGGDPIVKQVNLQPGSIELLHVDSAAELDIEASFEVDKVALQGIIEADHVGFSCSTSGGAASRGILGPFGVVVIADQKLSDVTPVYFYISKGADGRAETHFCADQTRSSEAPGVAKQVYGSSVPVLDGEKHSMRLLVDHSIVESFAQGGRTVITSRIYPTKAVNGAARLFVFNNRTGASVTASVKIWSLESANIRSFPLQDL

SEQ ID NO: 7470 - protein, 409 aa, Euglena longa
MSRQKFERIKPHINIGTIGHVDHGKTTLTAAITMALSVTGNTKSKKYEEIDSSPEEKARGITINTAHVEYETKNRHYAHVDCPGHADYIKNMITGAAQMDGAILVISATDGPMPQTKEHILLAKQVGVPNLVVFLNKEDQIDDNELLELIELEIRETLNNYEFPGDEIPIITGSALLAIEALNKNPKIIKGENKWVDKILDLMDKIDSYIPTPIRDTDKDFLLAIEDVLSITGRGTVATGRIERGKIKVGETVELIGLKNIKSTTITGLEMFQKSLDEAIAGDNVGVLLRGIQKNEVERGMVIAKPGTIQPHIKFNSQVYILTKEEGGRHTPFFEGYKPQFYVRTTDVTGKIESFKSDDGTTVQMVMPGDKIKMIVELVQPIAIEKGMRFAIREGGKTVGAGVIINIID

SEQ ID NO: 7471 - protein, 113 aa, Arabidopsis thaliana
  misc_feature (15)..(16): Xaa can be any naturally occurring amino acid
  misc_feature (20)..(20): Xaa can be any naturally occurring amino acid
  misc_feature (22)..(22): Xaa can be any naturally occurring amino acid
  misc_feature (24)..(24): Xaa can be any naturally occurring amino acid
  misc_feature (30)..(30): Xaa can be any naturally occurring amino acid
  misc_feature (32)..(32): Xaa can be any naturally occurring amino acid
  misc_feature (34)..(34): Xaa can be any naturally occurring amino acid
  misc_feature (38)..(38): Xaa can be any naturally occurring amino acid
  misc_feature (43)..(43): Xaa can be any naturally occurring amino acid
  misc_feature (45)..(46): Xaa can be any naturally occurring amino acid
  misc_feature (48)..(48): Xaa can be any naturally occurring amino acid
  misc_feature (52)..(52): Xaa can be any naturally occurring amino acid
  misc_feature (54)..(57): Xaa can be any naturally occurring amino acid
  misc_feature (60)..(63): Xaa can be any naturally occurring amino acid
  misc_feature (65)..(65): Xaa can be any naturally occurring amino acid
  misc_feature (69)..(70): Xaa can be any naturally occurring amino acid
  misc_feature (72)..(73): Xaa can be any naturally occurring amino acid
  misc_feature (75)..(75): Xaa can be any naturally occurring amino acid
  misc_feature (77)..(77): Xaa can be any naturally occurring amino acid
  misc_feature (80)..(82): Xaa can be any naturally occurring amino acid
  misc_feature (86)..(86): Xaa can be any naturally occurring amino acid
  misc_feature (88)..(88): Xaa can be any naturally occurring amino acid
  misc_feature (90)..(93): Xaa can be any naturally occurring amino acid
  misc_feature (97)..(97): Xaa can be any naturally occurring amino acid
  misc_feature (99)..(100): Xaa can be any naturally occurring amino acid
  misc_feature (102)..(103): Xaa can be any naturally occurring amino acid
  misc_feature (106)..(107): Xaa can be any naturally occurring amino acid
RAYEEAAFINFTKKXXKKRXAXDXRPHSDXRXTXKESXRRPKXIXXRXRRKXKXXXXTPXXXXGXDKKXXHXXPXGXKKXXXHNTXEXEXXXXHNRXNXXEXXHNXXTKKRKA

SEQ ID NO: 7472 - protein, 81 aa, Gaertnera vaginans
TPQDEMRAGMSYFHETIWKGVPKFLRRVDTALKNIGINERLPYNAPLIQFSSWMGGDRDGNPKVTPEVTRDVCLLARMMAA

SEQ ID NO: 7473 - protein, 257 aa, Leptospira interrogans serovar Lai str. 56601
MSEKLINITKEGQIAILTIQRPSALNALNREVLIQIGQEVDALEKDENIRVLIVTGEGKAFVAGADIAEMKDLNVSQGNEFSKLGNSVFQKLHQSRIVSIAAINGFSLGGGLELALACDIRVGSEKAKLGLPEVSLGLIPGFGGTQRLARLIGYARAIELVVTGEMISAEEGYRIGILNKLVKEGESILDFSKSIANSILKKGPQAIERVKKTIQQGLDVSLKEGISIEEKAFGDCFDGGQSKEGMSAFLEKRSAQF

SEQ ID NO: 7474 - protein, 401 aa, Leptospira interrogans serovar Copenhageni str. Fiocruz L1-130
MIQPIENAIEEIKSGKMIILVDSEDRENEGDLVVAAEFADKEKINFMAAFGRGLICIPMEVERLKKLGLNRMVDDYSLGDKHGTAFTVSVDAKHGTSTGISAQDRAVTVQVLLDDKTVSADLMRPGHLFPLQAVPGGVLRRAGHTEAAVDLSKLAGLYPAGVICEIMNDDGTMARLPDLEKFAEKHGLNIYTIEDLIRYRRAKENLIRLEVESKLPTEYGEFTIRAYSTLIDDKIHIALIKGDIKKEETIMVRVHSECLTGDIFSSNRCDCGPQLHAALEMISKEGRGVLLYMRQEGRGIGLINKLKAYNIQDKGYDTVEANEKLGFAPDLRDYGIGAQILREIGVGKMKILTNNPRKIVGLDGYGLEVVERVPIEIQPGSDNHDYLMTKKLKLGHMLGLG

SEQ ID NO: 7475 - protein, 1283 aa, Yersinia pestis KIM
MHTPIIWCNSLRTTFLLRGRFSLRTVLYCLLLISGQLHASLMTGRQGCDTGQPLTIHSIANSYNDDLLLTPATDTRQSSRRTVKVGVVMDANTPFVVNRDDNAIEGIVADYLKIISDASQLSFQMIGYCDYGLVLNALENGQIDLMAGTPMLAQPGLIASHAFFTNRHVEVRSKNWDPTKRTHPETVAIVNNEPLSPEFLFNYHADRIVAYPNQLQGLLAVAYGNADVFVANATSANYLIDQLQLLTLQIRNFAPYHPAPYSFLARESNQKLIDYLNQILELLPTRATGDIQQRWFGSKHHYNIDAKLLLTEQELSWIQHHPVVTYIAPLDLAPLIFRDRRTGEMAGFSVDLIDIIARRTGIKFDPVYTKDTGEGVRSFKAGKVDLLPIVAVRNGQYGNNLYSSSIAQSLWGIMTREDRMDINNVGDLAGKRVGIQAGSASSSIISNPLLAQRITFVEAPDTMTLVRWLQQGKVDAVVKNMMTANYLSAQNFSPNIKTVAVAGEEPLMMAFAIRPDLPELKTIIDKVIESIPPEEFDNLTSEWSTFKPKPISFDESSLDNELLMIALKISSGLLLVFGLYLCYLVFNKRRQAKLLHARLLQQESIINALPFAVFIRTASGELAVYNSHFADVHSDKLYDMLNQTHEPAHWPMTSPLDREIDKYCRSVLLNRKPQLVDLSVEIKGDIRDIFLWIIPLNNAEQGVLGGWLDISQRKTVERQLEAARVEAESANRTKSTFLATISHELRTPMYAIMGLLELEIRSNRPVEKDTLVTVSKSAQSLMLLLDDIIDSAKIEAGQLSIHPTAVDFHQEMERMFTLYQPIANERGLRFSGWLDDHIPPLLMADMLRVRQVMGNLLGNALKFTEQGSVSVDITWEPSDEQHGVMNIDITDTGIGISPAAQATLFQPFSQANEGKSPRFGGSGLGLWICHQLIHKMGGKIALESQLGKGTSLLITLPLNIATADDLAQDAAITHVDDERLNQLRNLRILVVDDLPANRQLLQQQLAFIGIEQVVTAENGAKACQILQHNNFDVVITDCSMPVMDGYELAAHIRQDPALKDLIVIGCTADAREESAARCIDAGMNACMIKPVAIDTLQATLLRKDIVSQISNTNHSQSTEDNDRGGNQSNLSEKNTAQQENAPAIHSTTITSSVNRLAAAQNKLRTLSGGNPAVELQLLQSLLESNLQDAVTLTQLYRQLCVEDEDVVETVDTAETVDTADTVEDGETRGPGSTVGRHSTAGSDHIPHADIYKQMASLVHRIKGSVQLIDAQELVASCVKFESQ

SEQ ID NO: 7476 - protein, 258 aa, Mesorhizobium loti MAFF303099
MMDRLVQAVEPAPGIRLLTLNRPDKLNALSKALLAELSHLLSGYDADTEVGCVVLTGAGRAFAAGADISDMLERGVASYADPERLACWRAIEGFTKPIIAAVNGYALGGGLELALLCDIVIASQAAQFATPEIKIGAFPGDGGTQRLPRLVGKSFAMQMVLTGDMVDATLAERKGLVSEVVEADRLLPRALEIAAAIAAKSVAITPYAKKAVLAAFETELQSGLEIEHRLTVEAFGKEDRIEGLRAFAEKRAPAFRGK

SEQ ID NO: 7477 - protein, 480 aa, Streptococcus thermophilus CNRZ1066
MNLPTEVRYRPYTDWTDGEKTKIKENVGKSPWRASYHIEPETGLLNDPNGFSYFNGKFQLFYQSWPFGAAHGLKQWVHTESEDLVHFTETGVKLLPDHENDSHGAYSGSAYQIGDKLFIFYTGNVRDENWIRDPRQIGAWMDKNYKIKKIDKVLIKKPTDVTEHFRDPQIFDYKGQFYAIIGAQNHNKQGFIKFYKAVDNDVENWVEVGDLDFGGTGSEYMIECPNIVFVDGKPVLLYCPQGLDKAELDYNNIYPNTYKIFQDFDPEKAALVGGTPIINLDYGFEAYATQGFNTPDGRALIVSWIGLPDVDYPTDKYDYQGAMSLVKELSIKDGKLYQYPVEAITSLRTRQEDFSEKTATTNTYELELNFQANTQTELVLFADQEGNGLSLTVDTAKGKVILDRSKAGEQYATDFGTSRECTLDAGQAATANIFVDNSIVEIFFNKGEKVFTSRVFPSAEQTGIKVASGNVSGHYFDLKY

SEQ ID NO: 7478 - protein, 394 aa, Vibrio fischeri ES114
MLNKNTIDIVKSTIPLLAETGPALTAHFYDRMFTHNPELKDIFNMSNQRNGDQREALFNAICAYAGNIENLEVLLPAVEKIAHKHTSFMITAEQYNIVGGHLLATLDEMFSPGQEVLDAWGEAYGVLANVFIQREEQIYQENNNQEGGWRGLREFELIAKEKESELITSFTFIPTDDQPVSRFKPGQYLGIYLTPEEFENQEIRQYSLSSAPQEKTYRISVKREDGGKASNYLHDQLNIGDKVNLAAPAGDFFLDVEASTPVTLISAGVGLTPTLSMLETLTEHNANVSWLHATENGTQHAFREHVNTLAEAHSHISTYTWYNQPQEVDKLNQHFDFSGFMNLSEVKDEIITDNGHYYFCGPVGFMQHVAKQLVELGVSEDRIHYECFGPHKVL

SEQ ID NO: 7479 - protein, 449 aa, Haemophilus influenzae R2866
MSKVASLDAFLTKVAQRDGYQPEFLQAVREVFTSIWPFLEANPKYRSEALLERLVEPERAFQFRVAWTDDKGQVQVNRAFRVQFNSAIGPFKGGMRFHPSVNLSILKFLGFEQIFKNALTTLPMGGAKGGSDFDPKGKSDAEVMRFCQALMTELYRHVGADTDVPAGDIGVGGREVGYLAGYMKKLSNQSACVFTGRGLSFGGSLIRPEATGYGLIYFAQAMLAEKGDSFAGKVVSVSGSGNVAQYAIEKALSLGAKVVTCSDSSGYVYDPNGFTTEKLAALFDIKNTKRGRVKDYAEQFGLQYFEGKRPWEVQVDIALPCATQNELELSDAQRLIKNGVKLVAEGANMPTTIEATEALLAADVLFGPGKAANAGGVATSGLEMAQSSQRLYWTAEEVDAQLHRIMLDIHANCKKYGTIEGQENINYVVGANVAGFVKVADAMLAQGVY

SEQ ID NO: 7480 - protein, 455 aa, Arabidopsis thaliana
  misc_feature (177)..(177): Xaa can be any naturally occurring amino acid
  misc_feature (255)..(255): Xaa can be any naturally occurring amino acid
IINKKQEALLPSLRGLLLSTSVVVAGSFFYGCAMSYSSPAQSKIMEELGLSVADYSFFTSVMTLGGMITAVFSGKISALIGRRQTMWISDVCCIFGWLAVAFAHDIILLNIGRLFLGFGVGLISYVVPVYIAEITPKTFRGGFSYSNQLLQCLGISLMFFTGNFFHWRTFSSFKCNXPSAFQVICLFFIPESPRWLAMYGQDQELEVSLKKLRGENSDILKEAAEIRETVEISRKESQSGIRDLFHIGNAHSLIXIGLGLMLLQQFCGSAAISAYAARIFDKAGFPSDIGTTILAVILIPQSIVVMLTVDRWGRRPLLMISSIGMCICSFFIGLSYYLQKNGEFQKLCSVMLIVGLVGYVSSFGIGLGGLPWVIMSEIFPVNVKITAGSLVTMSNWFFNWIIIYSFNFMIQWSASVTYFIFSGVSLVTIVFIWTLVPETKGRTLEEIQTSLVRLS

SEQ ID NO: 7481 - protein, 498 aa, Nostoc sp. PCC 7120
MAINTGKNKLMNRHIRPWQRLLVLAIGSMVFAVFAPTIVQAVDTPTLESLSETTIKLQISIDTTWVLLSGFLVFFMQTGFAMLEAGLVRQRSVVNTLLENFIDAAVTVLAWWAVGFGIAFGTSAGGLFGIDTFFLSQLPGADGSYPLGAPGSTAAINTYTLFFFQFAFAATASTITTGSMAGRTDFIGDLIYSAIMGAISYPIIVHWAWNSNGWLGKLSYHDFAGGSIVHTVGGWTALVGAYLLGPRPDRPPWGKLPPAHNLALATLGTMILWFGWYGFNPGSTLGTANPGLIGLVTINTTLAAGAGALAALIFLYVRTGKWDLVYCLNGSLAGLVAITAPCAYVAPWASVLIGLTGGIAVVLGVSLIESLHIDDPVGAFSVHGISGMMGTLSIGFLGQEELTLNQKAGLLLGGGFDLLGIQMLGIVAITVFTVAFAFLMYGGLKAMGHLRVNAEADRIGIDTYEHGASVWPDVYSVEELSKPQEHTKISENKTLEGE

SEQ ID NO: 7482 - protein, 518 aa, Nostoc sp. PCC 7120
MYQQKSRTRNRRFSTRNYAKSRQSNSQIQIFNLVKKLSPSWQACIPLACLIVLGWSYVAVAQAPAAGPTTAELKVALDTLWVAIAAFLVFFMNAGFGMLETGFCRQKNAVNVLAKNLIVFALATVAFWAIGFGLMFGDGNDFIGFNGLFLSGVDNSPATGDAYKGVFSALSWAGVPLAAKFLFQLVFAGTAATIVSGAVAERIKFVDFLIFSLLLVGIAYPITGHWIWGAGWLAKAGFWDFAGSTVVHSVGGWAALMGAAFLGPRIGKYQDKQIVALPGHNMSIATLGCLILWLGWFGFNPGSVMAADPNAITHIALTTNMAGAVGGIAATATAWLYLGKPDLSMIINGILAGLVGITASCAYVSIPSSIIIGLIAGVIVVFSVTFFDKLGIDDPVGATSVHLVCGVWGTLAVGLWSVGPGVYSWYGEGLGPTKGLFAGGGLGQLITQFLGAAAVGGMTVLVSSIFWVVLKATLGIRVTREEELEGLDIGEHGMEAYSGFLKEASPGGFAEGKTSDGY

SEQ ID NO: 7483 - protein, 475 aa, Streptococcus mutans
MTKQYKNYVNGEWKLSENEIKIYEPASGAELGSVPAMSTEEVDYVYASAKKAQPAWRALSYIERAAYLHKVADILMRDKEKIGAILSKEVAKGYKSAVSEVVRTAEIINYAAEEGLRMEGEVLEGGSFEAASKKKIAVVRREPVGLVLAISPFNYPVNLAGSKIAPALIAGNVIAFKPPTQGSISGLLLAEAFAEAGLPAGVFNTITGRGSEIGDYIVEHQAVNFINFTGSTGIGERIGKMAGMRPIMLALGGKDSAIVLEDADLELTAKNIIAGAFGYSGQRCTAVKRVLVMESVADELVEKIREKVLALTIGNPEDDADITPLIDTKSADYVEGLINDANDKGATALTEIKREGNLICPILFDKVTTDMRLAWEEPFGPVLPIIRVTSVEEAIEISNKSEYGLQASIFTNDFPRAFGIAEQLEVGTVHINNKTQRGTDNFPFLGAKKSGAGIQGVKYSIEAMTTVKSVVFDIK

SEQ ID NO: 7484 - protein, 353 aa, Streptococcus thermophilus CNRZ1066
MQRRLERFDAKLVQSGLDALLVTGQNNIYYLTDFWGTNATVFITKNRRLFLTDSRYTLIAKQSVHGFDIIESKDPLKDIVKFVEVDKLDTIGFDNQVSFAYYQALQAIFEGYTLLPQTNFMEELRMIKDEKELATIRKACSISDRAFTDVLDFIKPGQTTELQVANFLDFRMREYGASGISFESIIASGYRSAMPHGVASDKVIQSGETLTMDFGCYYNHYVSDMTRTIHIGETTDEEREIYDIVLRSNRALIDATKAGMTRRDYDKVARDVIVEAGYGDYFTHGIGHGIGLDIHEIPYFGNSDETIEAGMVLTDEPGIYLADKYGVRIEDDIIITENGCEVITLAPKELIVL

SEQ ID NO: 7485 - protein, 169 aa, Capsicum chinense
MASQSNRPQSVYDFTVKDAKGKDVDLSIYKGKVLIIVNVASQCGLTNSNYTDMTELYRKYKDKGLEILAFPCNQFGGQEPGSIEDIQQMVCTRFKAEYPVFDKVDVNGDNAAPLYKFLKSSKGGFFGDGIKWNFSKFLIDKEGNVVDRYSPTTSPASMEKDIKKLLGVA

SEQ ID NO: 7486 - protein, 117 aa, Glycine max
MASFTKLAWVVLVCMVVMGAHNTVQGITCGQVQGNLAPCLGFLHNGGAVTRGCCNGVRSIVSNARTTADRRGVCNCLMVAAGAVRRFNTYNAQALPGKCGVYIPYKISTSTNCNSIR

SEQ ID NO: 7487 - protein, 206 aa, Prunus persica
HGTEVAVKILMEQDFHAERFKEFLREVTIMKRLRHPNIVLFMGAVTKPPNLSIVTEYLSRGSLYRLLHKPGATEALDEKRRLNMAYDVAKGMNYLHRRNPPIVHRDLKSPNLLVDKKYTVKVCDFGLSRLKANTFLSSKSAAGTPEWMAPEVLRDEPSNEKSDVYSFGVILWELATLQQPWGNLNPAQVVAAVGFKNKRLEIPRDL

SEQ ID NO: 7488 - protein, 386 aa, Desulfovibrio desulfuricans G20
MSKIDLSRYAFDGGTADSIADLTTLSNEDKQRLLYAGIDVNQNKLGGSFMHMNHSGVHCQSRQEGLEIMDIKDAYNKYDGLPEYWWKMVDPDKDEFTRAAHEHLHGGYFIRARKGVKVQDPVQSCLFIKDSGLAQNVHNIVVVEEGAELHVLSGCATAHGAKDTAHMGISEFYVKKGGKLTFTMIHNWGDDTAVRPRSGGVMEEDCVFLSNYVLLKPVRDLQMYPSITLNGSGSVARFNSVMVTPPGSYVDAGNRIILNAPDTRAEIIARTLTTGGTVINRGFIGGYNVPAKGHLECKGLILGGGRIHAIPELDATIDGVELSHEAAVGKIAQEEIEYLMARGMDEDEATSTIVRGFLNVDIMGLPHELEDAIRQQIDQLDAGDAM

SEQ ID NO: 7489 - protein, 564 aa, Pyrococcus furiosus DSM 3638
MEMSGAKALVRALEKEGVQHTFGIIGGSIMPVFDELLDSNIRHITTRHEQGAAHAADGYARVSGRPGVAITTSGPGATNLVTGIATAYMDSSPIVALTGQVPTYMVGKMAFQETDIINITKPITKWNYQVKRPREIPEAVKMAFTIATLGRPGPTLIDLPKDAQTDVEDVDFDVDISQKVTPWRPPKLDACPEEVKKAVDMILSAERPVIIVGGGVVWSGATDEVLAIAEYLLIPIMATFMGKGAVPENHPLYVGNLGMHGKIAANKLLPQTDLIIAVGMRWSDRTVSEFENFAPEAKIIHIDIDPKEVGKNVKVDLGIIGDAKRVLRAIYNEIVRRAKKRESWPWLEKVREFKEKYKEELVPIDGDYLRPPEILKELRKLLPPDAIVATEVGQNQMWVALFFPILKPRTFLTSGGLGTMGFGFPAAIGAKVAKPEKVVVDIAGDGSFMMSERELATAVNENLPVIVIILNNSSLGMVAQWQRMFYNRRYIATYFKKNPDFVKLAEAYGANGYKAETMDELLKAVKEGMNSDVPTVIDVPIHPEDDVLPMVPPGQHISNVVTRY

SEQ ID NO: 7490 - protein, 564 aa, Triticum aestivum
  misc_feature (515)..(515): Xaa can be any naturally occurring amino acid
MAARLPLAACIVAFHLCLLLSPSSALRRLSEAESSLVRHGVGIRPAYHFLPAKNWQNDPNGPMYHNGVYHMFYQYNPLGAMWQPGNLSWGHSVSRDLVNWDALDTALDPTAPFDYNGCWSGSATILPGGIPALLYTGRIDADKEVQVQNVAFPKNPADPLLREWVKPAYNPVIPLPADVPGDNFRDPTTAWVGRDGLWRIAVAAKVGGPNGIASTLIYRSKDFRHWKRNALPLYTSRAAGMVECPDLFPVAEPGVEEGRLGYASGPASGAVRHVLKLSVMNTTQDYYAVGRYDDVADTFVPEVDVERNADDCRTWRRFDYGHVYASKSFFDSSKNRRVLWAWANESDSQDNDIARGWSGVQTVPRKVWLDQDGKQVRQWPIEEIETLRSKRVVGLLGAQVNAGGVNKIVGVGAQADVDAIFEIPSLEEAETFQPNWLLDPQKLCEENGASVPGRVGPFGLLVMASSNLQEHTAIFFRVFRHNQKYKVLMCTDLTRSSGRDNVYKPSYGGFVDIDXCITARVYPEHAENKNSHVFVFNNGSRLVKVSKLEAWRLAMASVNVVHGG

SEQ ID NO: 7491 - protein, 644 aa, Streptomyces sp. 139
MCGIAGTYRWPDGKAVTDRLTETLAHRGPDGSGGYSHALGDGEVHLGHRRLAILDLSENGAQPMVSGGLALTYNGELYNAPELRAELEGAGVRFRGTSDTEVLLEAWRRWGTDCLPRLRGMFAFAVFDERTGDLVLVRDQLGIKPLFLLRRGKGLVFASELKALAAVTGGSLEVDPAALVASLLYYWVPDSRCAFRGAEKLPPGTWLRCRADGSVSAAGSGTCARSPPRAGAGTVRYLPDLAAVVEESTRRHLLSDVPVATFLSGGLDSSYLTALAARDRPGIPAYTIGFRAEDARFEAMPDDLRYARRVAERFGVDLREIEIAPDVLDLLPRMTYHLDEPVGDPAAINTFLICSAAREAGVKVMLSGMGADELFAGYRKHLANLIAVRYRHVPGPVRRGVASAVDRLPVATSRRGLRSVRFAKRFLSFAGLPEETAFRRSYTLYDRQELAGLLDPDLAPAVDDVLAEHADVYQDNELDDFVNRMCLADARMFLPGLNLAYTDRSSMAASTEVRVPYVDVEVVRAAFAVPGARKIAGRQGKAVLKEAATTVLPREIVYRPKGLFSAPLRAWMSRDLAPLVREVVNDGLLVRSGFLRREALARMVAEDAAGQRDFSKHLWHVLTLEYWYRDATSRAGRNSPTSTA

SEQ ID NO: 7492 - protein, 452 aa, Triticum aestivum
  misc_feature (300)..(300): Xaa can be any naturally occurring amino acid
  misc_feature (362)..(362): Xaa can be any naturally occurring amino acid
  misc_feature (437)..(437): Xaa can be any naturally occurring amino acid
MNALAATSRNFRQAARLLGLDSKLEKSLLIPFREIKVECTIPKDDGTLASFVGFRVQHDNARGPMKGGIRYHPEVDPDEVNALAQLMTWKTAVAAVPYGGAKGGIGCSPGDLSRSELERLTRVFTQKIHDLIGTHTDIPAPDMGTNSQTMAWIFDEYSKFHGHSPAVVTGKPIDLGGSLGRDAATGRGVMYATEALLAEYGKSISGSTFVIQGFGNVGSWAAQLIHEKGGKVIALGDVSGTIRNKAGIDVPALMKHRNEGGQLKDFHGAEVMDASELLVHECDVLLPCALGGVLNRENAXPDVKAKFIIEAANHPTDPEADEVRVLYHQTTYDKFSSLRNIKSTTIVQFCFLNVSLLLYVLXILTKKGVVVLPDIYANAGGVIVSYFEWVQNIQGFMWEEEKVNMELHKYMNSAFQNIKAMCKSQDCNLRMGAFTLXVNRVARATILRGWEA

SEQ ID NO: 7493 - protein, 475 aa, Ureaplasma parvum serovar 3 str. ATCC 700970
MNYKTLINGAFVDAKEKLPVYNPSNNQIIAYVPNIHNENEINTIFENAHIAYLKFKDTPIKYRCDLLLKLADKLDEHKQELAQIISTEIAKGLKDSLIEVERSADYLRETVFEYQKLMQKPIIFDETVHHVKNKVATYYRIPVGVVLAICPFNYPINLLISKLAPALVSGNSLVYKPSTQGSLIGIRISELVHEVGFPKGVVNCLTTEARITGDLLVTNKYVKAISFTGGPKVGNHIAEITSKISLVLELGGKDPALVLDDADFELAANEIVKGAYGFSGQRCTAIKRVFVSHKNHDLLVNLINKKVDALTVGLPQQNPIITPLINSNSLKYNLSLVEDAIKKGAIVHQKIVYNEKNNLLHPLVIDNVTKEMRVAWEEPFGPILPIITYNSIQEAIDLINQSQYGLQACIFTTNYASIEQLALQIESGTININKSSSRGPDILPFFGVKDSGFGVQGIVDAILSMTTIKGIIINK

SEQ ID NO: 7494 - protein, 499 aa, Pyrococcus furiosus DSM 3638
MARKIKIFDTTLRDGEQTPGVSLTVEEKIEIAKQLARLNVDVIEAGFPISSPGEFEAVKRIAREVRGPTIAALARAVKKDIDAAGEALKDAESKRIHTFIATSLIHMKYKLRKTPEEVKKMAVEAVEYATKYTDDIEFSAEDATRSDWNFLVEVYEAVIDAGATTINVPDTVGYTTPEEFYELIRYLKRNITNLNGVTISVHCHNDLGLAVANSLSAVRAGADQVEVTVNGIGERAGNAALEEVVVALDVRKDFYNVETGINLGEIARTSKLVARLTGIEVPPNKAVVGANAFAHESGIHQDGVLKERTTYEIIDPRKLGFSGSKIVLGKHSGRHAFRKKLEEMGYRLSEEEINRLFAKFKEIADRKKGLTELDIEAIVQEELGKGKGKYSVEVLHVISGKISTATVRVQGDGIDKIESAWSSNGPIDALFAAINRALGIDCKLKEYRVSSVTSGRDALGEVLVRVEYNGEIYVGRGLSTDIIEASAQAYLSALNRIRR

SEQ ID NO: 7495 - protein, 479 aa, Zymomonas mobilis
MNNNSEIENDTQTNVRNTVSDFIGSQLYLLGTVLVTAIAGFLYGYDTGIISGALMNIAHDFKLDAHQQEIITSILLFGAVIGSLVCGRLSAFVGRRHMIMIVTAIFGFSVIAADAPTAFWLGAARLVLGFAVGGSSQIVPVYIAELAPADQRGRMVTFYNISIGLGILAAGIVGAFLQEEWTWRTMFSVAAIPAAVLFCSMMMLPESPRWLVRQERVEEARDMLDTVRETDHEVTKELRSIKKNQQPDEGSGSRWLESLAQPWVRPALIAGLGVAAFTQLSGIEMMIYYTPTFLRDSGFTEKMAYYSALGVALIYVIMTTIGKLLVDHVGRRKLALCMMPLAALSLFALGIAFNLPGGASEHRWLILACLFAFMVFNAGGIQVIGWLIGSEVYPLCIRARATSLHAATLWGSNLILTSTALTMTSLLGIGGSMWFYGGLNALGFVFVYFMVPETKGRSLEEIESSLKDGSFLPSKKASA

SEQ ID NO: 7496 - protein, 162 aa, Paracoccus marcusii
MTNFLIVVATVLVMELTAYSVHRWIMHGPLGWGWHKSHHEEHDHALEKNDLYGLVFAVIATVLFTVGWIWAPVLWWIALGMTVYGLIYFVLHDGVVHQRWPFRYIPRKGYARRLYQAHRLHHAVEGRDHCVSFGFIYAPPVDKLKQDLKTSGVLRAEAQERT

SEQ ID NO: 7497 - protein, 355 aa, Pyrococcus furiosus DSM 3638
MIKIAVIPGDGIGKEVVAEGLKVLRKIEELSNVKFDFQEYPFGAEHYLKTGETLPDWALEEFRHFDAIYFGAIGDPRVKPGILEHGILLKLRFSLDLYVNLRPVKLYHPKLTPLKGKEKIDMVFIRENTEGLYAGAGGFLRKGTPHEVAIQEMINTRFGVERTIRFAFEYAKTKGRKKVTLVDKANVLTYAHDLWQRVFKEVASEYQEIETDHYYVDAMAMKMIRSPEIFEVVVTPNMFGDILTDLGAEIVGGLGLAASGNINPRGVSMFEPVHGSAPDIAGKGIANPLAAILTAALMLEHLGLDREASLVEKAVAKTIEENKVTPDLGGELKTSEVGNEVVKNLEVLWDEGEES

SEQ ID NO: 7498 - protein, 161 aa, Photobacterium profundum SS9
MEYNTSELCDIYLDQVDVIEPMFNSYGGRSSFGGQITTVKCFEDNALLRTVLQQPGVGRVLLVDGGGSLRRALIDADIALLATENEWEGLIVYGSVRNVDDLDELEIGIQAIASIPVGADQQGVGDVDIAVNFGGVTFLPEDHIYADNTGVILSPEPLDIE

SEQ ID NO: 7499 - protein, 1177 aa, Methylococcus capsulatus
MSEDLTSPPAMRQRFLRSLGSICLIVILAEVIVMTLLGAFHRGGLELVRWQESALDGLLLGLFSAPLLWIMALRPLAQQIARESQRNKELLDALDAHALVSITDLQGRILYANDNFCAVSRYGREELVGQDHRIVNSGYHGKAYIRDMWRTISRGNIWQGEFCNRRKDGTRYWVDSTIVPLMDNAGKPRQYISIRRDITAQKEAEAQLARLKQAMDANSEMILLTDRAGRIIYANPALCRFSGMAEGELLGQSPSILDSPLADQETLAAMQEALQAGQPWSGRLLNRRRTGPAPHDAEDYWAEISTTPIHTDGNGLVGYVQIQHDVSARVERERALAMEQEDTAARLRITETLQQSAPLDERCRQVLRILFELGTFGLQRKGGIFLKAEHGNCLKLFVLEGKFCDEFVRREQTIPMGACLCGRSAVSGEILVSDDCFQDHRHEHRFEDMESHGHYIVPIASGGDLLGVLFLYTDPNPTRSEARMVMLRQVGEMLALAILEDRAKASLKAAHDAAVDAAQAKSAFLANMSHEIRTPMNGVLGMLELLKDTDMSREQWDLVETASNSAESLLEIINSILDFSKLEAGKVEIERTEFNLPDLVEEVCALLAGRAHDKGLELNCFLPADLPRMWIGDPTRIRQILTNLLGNSVKFTERGEVSVKVMQGEAGAKRTDLSFEIRDTGIGIAPDVQARLFQPFTQADGSTSRRFGGTGLGLSICRNLVELMGGTIGLESAPGRGSRFWFTLPLEPLPGASAPALPDFSHRRVLVVDDNATNRVILSHYLTHWGLEVDEAERGDTALNRLRTALHESRPYDIVLLDLHMPYMDGHELARAMNAEPGLKDTPRLLLSSGGLTGEAELRALGIARSLLKPVRQSLLFNAIAEVLAAKATVQRRPAAKTETVLPAYEGRRVLVVEDNRVNQKVIVAMLGKFGIVPDVADNGQAALELLARSSYDLVLMDCQMPVLGGYEATGELRAREMSAGGRRTPVVALTAHAATGEREKCLAAGMDDYLSKPISRDRLAEALERWLGHPAAPASAETGQGAVNDDGGDRPAGLSWNREETLARLDHDEALLAEMIALCIEELPRHLAALQEAGAANDIAALADAAHAIKGMAGHFCAGSVRDLAARLEDQARKAGSMPDAASIGALETAAARLLEDLHGGSPAGDPAKGTNDAAQ

SEQ ID NO: 7500 - protein, 525 aa, Pyrococcus furiosus DSM 3638
MRERRVELYDTTLRDGSQMEGISFSLEDKLKITEKLDEFGIHYIEGGWPGSNPKDIEYFRAVKDLPLENAEIAAFGSTRRPRVRAEEDANLNALVDSEAPIATIFGKSWDLHVTRALKTTLENNLQMIAESIEYLREHGMRVFYDAEHFFDGYRANPEYAITTIKVAEEAGAERIVLADTNGGSLPSFVKSVVEKVKEEIKTPLGIHAHNDSELAVANSLMAFEAGVIQIQGTINGYGERCGNANLISIIPALELKYGVEVVGRERLKKLKELAHFVAELANMEIPRNQPYVGDSAFAHKGGVHVSAVLKDPRTYEHIPPEAVGNRRKVVVSELSGRSNLIYKAKELGIDINENDPKLQEVVKKIKELEFLGYHFEAAEASLELLIKKVKGEYTPTFELERAMVVSEILPDHSPISEATVVVKVGDKKVHTAAEGNGPVNALDLALRKALSEFYPELKKISLVDYKVRVLGSEKGTAAKVRVLIQTSDGRRTWGTVGVSTNIIEASLNAIIDSMEYWLMKGRENK

SEQ ID NO: 7501 - protein, 963 aa, Pseudoalteromonas tunicata D2
MSHAKSLDQLEQKQDFIRRHIGPDAAQTAAMLAELNVSSVEELISQTVPADIRLKQGLTVGESRTEVEALSYLKSVVSKNKLYKSYIGQGYHPTLVPNVILRNVLENPGWYTAYTPYQPEIAQGRLESLLNFQTLSIDLTGLDLASASLLDEATAAAEAMALAKRVAKAKKANAFFVADDVHTQTIDVIKTRAGQFGFDVVVAPAADVANHDIFGALFQYPSTTGEVVDIPALIATVQDKKAIACVAADIMSLILLKSPGSLGADVVLGSAQRFGVPMGYGGPHAAFFATRDEYKRSLPGRIIGISKDRLGNDALRMAMQTREQHIRREKANSNICTAQVLLANMAAFYAVYHGPQGLKVIAQRIHRFADILAAGLQAKGVSLKHSTWFDTLTVVAANKDEVVARALAAEINFATNHAGEYSISVNEETTRADIATLFDVILGAGHGLDVAALDAQITANGSDSIPAALVRDDAILTHPNFNSYHSETEMLRYIKRLENKDLSLNHSMISLGSCTMKLNATAEMIPVTWPEIANLHPFCPLDQAAGYQIMINELHDWLVNITGYDAVSMQPNSGAQGEYAGLIAIRKYHESRGDFHRNVCLIPSSAHGTNPATAQMASMKVVVVNCDKNGNVDMADLKAKAEEVSENLSCIMVTYPSTHGVYEATIRELCDVIHQHGGQVYMDGANMNAQVGVTSPGFIGSDVSHLNLHKTFCIPHGGGGPGVGPIGVKSHLAPFMPNHSVINVPGTTAGNGAVSAAPYGSAAILPISWAYITMMGSEGLKQATEMAIVNANYLTEKLSKHFPILYRGQNSRVAHECIVDLRPLKEATGITEMDVAKRLMDYGFHAPTMSFPVAGTLMIEPTESESKVEIDRFIEAMVSIKGEIDKVASGEWTVENNPLVFAPHTQADVLGNEWDRAYDRFYAAFPVPAVAKNKFWPTVTRIDDVYGDRNLVCACPPIDSYTE

SEQ ID NO: 7502 - protein, 151 aa, Methanosarcina barkeri str. fusaro
MARINYSVKEDPETTSKAMGSELHISPKKSREVCCKIKGMKVPEARKFLEDVIALKQAVPFKRHHDGSGHRKGPMAAGRYPVSASKEILKILRNAESNAEYKGLEPANMYITHAAIQRGRVIRGFMPRARGRATPKDTETVNIEMILSEVR

SEQ ID NO: 7503 - protein, 407 aa, Brucella suis 1330
MRRVVVTGMGIVSSIGSNTEEVTASLREAKSGISRAEEYAELGFRCQVHGAPDIDIESLVDRRAMRFHGRGTAWNHIAMDQAIADAGLTEEEVSNERTGIIMGSGGPSTRTIVDSADITREKGPKRVGPFAVPKAMSSTASATLATFFKIKGINYSISSACATSNHCIGNAYEMIQYGKQDRMFAGGCEDLDWTLSVLFDAMGAMSSKYNDTPSTASRAYDKNRDGFVIAGGAGVLVLEDLETALARGAKIYGEIVGYGATSDGYDMVAPSGEGAIRCMKMALSTVTSKIDYINPHATSTPAGDAPEIEAIRQIFGAGDACPPIAATKSLTGHSLGATGVQEAIYSLLMMQNNFICESAHIEELDPAFADMPIVRKRIDNVQLNTVLSNSFGFGGTNATLVFQRYQG

SEQ ID NO: 7504 - protein, 326 aa, Azoarcus sp. EbN1
MTELNLIEAINHALAHELARDPAVVLLGEDIGVNGGVFRATAGLQQRFGAARVVDTPLAETAIAGTAVGMAAMGLKPVAEIQFAGFIYPTFDHIINHASRLRHRTRSRMSCPLVLRSPSGAGIHAPEHHSESTEALFAHVPGLRVVIPSSPSRAYGLLLAAIRDPDPVIFLEPTRLYRLFKQEVADDGEALPLDVCFTLRSGSDVTLVSWGAMVHETQAAADALAQQGIMAEVIDVATLKPLDMGTILESVGRTGRCVIVHEAARTAGFGAEIAANLAEEGLYTLLAPVRRVTGYDTVVPLARLEYQYLPSVERIVAAVHKTLEGA

SEQ ID NO: 7505 - protein, 418 aa, Bradyrhizobium japonicum USDA 110
MSRLVMKFGGTSVANIERIRNVARHVKREVDAGHEVAVVVSAMSGKTNELVAWCTEASPMHDAREYDAVVASGEQVTSGLLAIVLQSMGIQARSWQGWQIPIKTSDAHASARIEDIDGSEIIKRFRDRKEVAVIAGFQGINPETNRITTLGRGGSDTSAVAVAAAVKADRCDIYTDVDGVYTTDPRIVPKAKRLGKIAFEDMLELASQGAKVLQVRSVELGMVHNMPIFVRSSFDKPEDIDPHANQPPGTLICSEEEIMESHVVTGIAFSKDEAQISVRQIEDKPGVAASIFGPLADANINVDMIVQGVSEDGKTTDLTFTVPAADFTRARDTITAAKGKIGYARLDTATDVAKISVIGSGMRSHAGVAAQAFSALAGRNINIRAITTSEIKFSVLIDTAYTELAVRTLHTLYGLDQA

SEQ ID NO: 7506 - protein, 929 aa, Pseudomonas syringae
YRRTDTCCRRKSVLTKLGIKGRVLLLTILPASLMAAMLGGYFTWMQLSELQSQLLQRGEMIAQDLAPLAANALGRKDKVLLSRIATQTLEQTDVRAVSFLDTDRTVLAHAGPTMISPSPIGSGSQLLSSTGTDATRYLLPVFGSQRHLTSPIIPAEADTLLGWVELEISHNGTLLRGYRSLFASLLLILTGLAFTATLAVRMSRTINGPMSQIKQAVSQLKDGNLETRLPPLGSRELDELASGINRMAATLQNAQEELQLSIDQATEDVRQNLETIEIQNIELDLARKEALEASRIKSEFLANMSHEIRTPLNGILGFTHLLQKSELTPRQFDYLGTIEKSADNLLSIINEILDFSKIEAGKLVLDNIPFNLRDLLQDTLTILAPAAHAKQLELVSLVYRDTPLALSGDPLRLRQILTNLVSNAIKFTREGTIVARAMLEDETEEHAQLRISVQDTGIGLSSQDVRALFQAFSQADNSLSRQPGGTGLGLVISKRLIEQMGGEIGVDSTPGEGSEFWISLKLPKAREDKEESLNIPLGGLRAAVLEHHDLARQALEHQLEDCGLQTIVFNNLENLLNGVTAAHETPAAIDLAVLGVTALEISPERLRQHIWDLENLNCKVMVLCPTTEHALFQLAVHDVYTQLQAKPACTRKLQKALSELIAPRAVRADIGPPLSSRAPRVLCVDDNPANLLLVQTLLEDMGAEVVAVEGGYAAVNAVQQEAFDLVLMDVQMPGMDGRQATEAIRAWEAERNQSSLPIVALTAHAMANEKRSLLQSGMDDYLTKPISERQLAQVVLKWTGLALRNPAPERQNEALEVHVGPLVLDHEEGLRLAAGKADLAADMLAMLLASLDADREAIRVARANQDVHALIERIHRLHGATRYCGVPQLRSACQRAETLLKQNAPHTEEALNDLDKAIIRLEAEARVMA

SEQ ID NO: 7507 - protein, 451 aa, Medicago truncatula
MATHAALASTRIPTSTRFPSKASHSFPTQCASKRLEVAEFSGLKSTSCITYASNARESSFSDVVAAQLATKAIGSTAVRGETVAKLKVAINGFGRIGRNFLRCWHGRKDSPLEVIVVNDSGGVKNASHLLKYDSMLGTFKADVKILNNETITVDGKPILVVSSRDPLKLPWAELGIDIVIEGTGVFVDGPGAGKHIQAGAKKVIITAPAKGADIPTYVVGVNEQDYGHEVADIISNASCTTNCLAPFVKILDEEFGIVKGTMTTTHSYTGDQRLLDASHRDLRRARAAALNIVPTSTGAAKAVSLVLPQLKGKLNGIALRVPTPNVSVVDLVVNVAKKGISAEDVNAAFRKAAEGPLKGVLDVCDVPLVSVDFRCTDVSSTIDSSLTMVMGDDMVKVVAWYDNEWGYSQRVVDLAHLVANKWPGTPQAGSGDPLEDFCETNPSTDECKVFE

SEQ ID NO: 7508 - protein, 363 aa, Photobacterium phosphoreum
MTLSTAQEIIEDIHQGKMVILMDDEDRENEGDLIIASDKVTPEAINFMATYGRGLICLTLNKERCLQLELPMMVKSNTDKFATPFTISIEAASGVTTGISVNDRARTVQAAIAATATAKDIVMPGHIFPLMAQDGGVLARAGHTEAGCDVARLAGLEPSSVIVEILNDDGTMARRPQLEVFAKKHGLKLGTVADLIEYRNKYETMIERISECKLNTEFGEFDMITYRDKINHQIHYALQKGNIEPNSQTLVRVHLQDTFKDILQTGSTRWTLPAAMERISSENGVLVIVTKQEDPEMVISKIQNLALENKETPVVNSQSRQVGLGSQILSDLGIRKMRLLSSSSHLYHSLSGFGLEIVEYVCS

SEQ ID NO: 7509 - protein, 219 aa, Arabidopsis thaliana
  misc_feature (178)..(178): Xaa can be any naturally occurring amino acid
  misc_feature (186)..(186): Xaa can be any naturally occurring amino acid
  misc_feature (192)..(192): Xaa can be any naturally occurring amino acid
MLREAATGRGVVFATEALLAEYGKSIQGLTFVIQGFGNVGTWAAKLIHEKGGKVVAVSDITGAIRNPEGIDINALIKHKDATGSLNDFNGGDAMNSDELLIHECDVLIPCALGGVLNKENAGDVKAKFIVEAANHPTDPDADEILSKKGVIILPDIYANAGGVTVSYFEWVQNIQGFXMWGEGKVXLELQKXMTRAFHNIQGNGAQHPLEPPGASTLGG

SEQ ID NO: 7510 - protein, 455 aa, Ruminococcus flavefaciens
MALKNQYLKELLERVEKRNPGEPEFIQAVTEVLETLQPVAEKRQDLIDAGVFERIVEPERQIIFRVPWVDDNGKVQVNRGFRVQFNSAIGPYKGGIRLHPSVYLGIIKFLGFEQVFKNSLTTLPMGGGKGGSDFDPKGKSDGEIMRFCQSFMTELSKHIGADCDVPAGDIGTGAREIGFMFGQYKRLRNEFVGVLTGKGLTYGGSLARTEATGYGLCYFTNEMLQANGKSFEGKTVVISGSGNVAIYATEKATQYGAKVVTVSGSNGYIYDPDGIELDLVKQIKEVERGRIKEYASRTSHKNAEYHEGSVWTLKCNAGGIKLDIALPCATQNEINGDGAKAIVANGGFAIAEGANMPSTPEAIETYLSNGLLYGPAKAANAGGVATSGLEMSQNSERLSWTFEEVDEKLHGIMKSIFKACDDAAKEYGMAGNYMAGANIAGFLKVAEAMKAQGCV

SEQ ID NO: 7511 - protein, 486 aa, Bordetella bronchiseptica RB50
MEDLRNHEFKNYIGGQWVACAAGKTYPNVNPADTDDIVGRFQASQAEDAAAAVAAAQAAFDGWRNLAVSKRAALMQRAADYLEAHAEQFGRELTREEGKALNLAKDEVLRSAQTIRFYAAEGQSFSGETFVNDDPDMVVYSQREPLGVVTVISPWNFPVSIPARKIAPALITGNTVVFKPSSDAPLSGLRLVEAFEQAGLPPGVLNLVTGSASAIGAAITQAPQVRAVSFTGSTAAGEQIHRSVDMTTRTQMELGGKNPLIVMADADLDRAVDLVVKGGFSLSGQACTGTSRVLVDAPVKAAFTEKLLAKVKALKVGNSLEGSFDLGPLATARQLESVMRYIEVGKQEARLLYGGERLDGPGYERGYYLTPAVFADVTQQMRIAREEIFGPVIALIEVNGYEDAIAKANDTEYGLAAAIATTNAQYAHRFARDIQAGTVKINRTTTGNLINAPFGGLKRSSTSTFRESGRIGLEFYTQIKTVYRAG

SEQ ID NO: 7512 - protein, 450 aa, Lactobacillus acidophilus NCFM
MSPAQITTNLVATILIFIVASFFVAAEFALVQTRPSQLEDMLAKGQGNKKKLQCALNMTHNLNEYLSTTQVGTTLVGVVLGWFSADTFAVILEDLFHLTPMSQSLIKSVSAILGVILLTYLEVVLTEVVPKNIAIDKPVSMMMVIVTPLHVFHTLVYPFVWLLNTSSNGILKLLGFDPADEENQVYSQSEIIKLSRNAVHGGSLDKEDLTYMERAFELNDKVAKDIMTDRTRLSVLDSTDSIKYALKKYLEEGYSRFPVVRDNNKDDVVGYVYSYDIVQQNQIDGSVPVTRIIRTIITVPESMPIQDILHLMISKHTPIVLVVDEYGGTSGIVTDKDIYEELFGSVKDEIDDVSDDYIIKDKDGIVHVSGKTTLYDFERFFHTDLKAFQDSDIITIGGYMMEHYPNLQKDESIDLEGYKFTLESIEQGFMRWFIVEPIKKKKSDQLKDEK

SEQ ID NO: 7513 - protein, 434 aa, Lactobacillus acidophilus NCFM
MKRQISFGQALATVVGSVIGAGVFFKIGTITAQTGSSSMTLLVWVLAGIISIASGLTISEIAASLKINGAIKYLDYTYGRVWGFLFGWAQMIVYFPAQIGALSSIFGVQFVSLFGIEAKYSNLIAVILVLFLLSINLIGTKFSSKMQSVITILKIIPIILIIVLGLFNQNKVSAPIFPVTVGSSKDLIGSLSQGLLSALFAFEGWIVVTNLANEVKNPENDLSRAIISGLSIVTLIYVLINYTFLTVLPINQLVNNDNAAFEASMKLFGQFGGKLITIGILISVYGAANAFMLTGMRTPYILAQDRLLPFSNKIGKANIHTGVPVTGALIVDAIAIIMIILGNFTVLTDMLVFVMWTFNTMLSIAVVILRKREPELRRPFKVPWYPIIPIISVLGGLFIVISTIINQFLLSLIGIGLTLIGLPIYYHMQKKNQN

SEQ ID NO: 7514 - protein, 634 aa, Arabidopsis thaliana
MASHSPPLDALVVPSEDYHQSEYVSARDKRREFVSGFSGSAGLALITKKEARLWTDGRYFLQALQQLSDEWTLMRMGEDPLVEVWMSDNLPEEANIGVDSWCVSVDTANRWGKSFAKKNQKLITTTTDLVDEVWKSRPPSEMSPVVVHPLEFAGRSVSHKFEDLRAKLKQEGARGLVIAALDEVAWLYNIRGTDVAYCPVVHAFAILTTDSAFLYVDKKKVSDEANSYFNGLGVEVREYTDVISDVALLASDRLISSFASKTVQHEAAKDMEIDSDQPDRLWVDPASCCYALYSKLDAEKVLLQPSPISLSKALKNPVELEGIKNAHVRDGAAVVQYLVWLDNQMQELYGASGYFLEAEASKKKPSETSKLTEVTVSDKLESLRASKEHFRGLSFPTISSVGSNAAVIHYSPEPEACAEMDPDKIYLCDSGAQYLDGTTDITRTVHFGKPSAHEKECYTAVFKGHVALGNARFPKGTNGYTLDILARAPLWKYGLDYRHGTGHGVGSYLCVHEGPHQVSFRPSARNVPLQATMTVTDEPGYYEDGNFGIRLENVLVVNDAETEFNFGDKGYLQFEHITWAPYQVKLIDLDELTREEIDWLNTYHSKCKDILAPFMNQTEMEWLKKATEPVSVSA

SEQ ID NO: 7515 - protein, 320 aa, Escherichia coli
GTTKHSKLLILGSGPAGYTAAVYAARANLQPVLITGMEKGGQLTTTTEVENWPGDPNDLTGPLLMERMHEHATKFETEIIFDHINKVDLQNRPFRLNGDNGEYTCDALIIATGASARYLGLPSEEAFKGRGVSACATSDGFFYRNQKVAVIGGGNTAVEEALYLSNIASEVHLIHRRDGFRAEKILIKRLMDKVENGNIILHTNRTLEEVTGDQMGVTGVRLRDTQNSDNIESLDVAGLFVAIGHSPNTAIFEGQLELENGYIKVQSGIHGNATQTSIPGVFAAGDVMDHIYRQAITSAGTGCMAALDAERYLDGLADAK

SEQ ID NO: 7516 - protein, 959 aa, Saccharomyces cerevisiae
MTVTTPFVNGTSYCTVTAYSVQSYKAAIDFYTKFLSLENRSSPDENSTLLSNDSISLKILLRPDEKINKNVEAHLKELNSITKTQDWRSHATQSLVFNTSDILAVKDTLNAMNAPLQGYPTELFPMQLYTLDPLGNGVGVTSTKNAVSTKPTPPPAPEASAESGLSSKVHSYTDLAYRMKTTDTYPSLPKPLNRPQKAIAVMTSGGDAPGMNSNVRAIVRSAIFKGCRAFVVMEGYEGLVRGGPEYIKEFHWEDVRGWSAEGGTNIGTARCMEFKKREGRLLGAQHLIEAGVDALIVCGGDGSLTGADLFRSEWPSLIEELLKTNRISNEQYERMKHLNICGTVGSIDNDMSTTDATIGAYSALDRICKAIDYVEATANSHSRAFVVEVMGRNCGWLALLAGIATSADYIFIPEKPATSSEWQDQMCDIVSKHRSRGKRTTIVVVAEGAIAADLTPISPSDVHKVLVDRLGLDTRITTLGHVQRGGTAVAYDRILATLQGLEAVNAVLESTPDTPSPLIAVNENKIVRKPLMESVKLTKAVAEAIQAKDFKRAMSLRDTEFIEHLNNFMAINSADHNEPKLPKDKRLKIAIVNVGAPAGGINSAVYSMATYCMSQGHRPYAIYNGWSGLARHESVRSLNWKDMLGWQSRGGSEIGTNRVTPEEADLGMIAYYFQKYEFDGLIIVGGFEAFESLHQLERARESYPAFRIPMVLIPATLSNNVPGTEYSLGSDTALNALMEYCDVVKQSASSTRGRAFVVDCQGGNSGYLATYASLAVGAQVSYVPEEGISLEQLSEDIEYLAQSFEKAEGRGRFGKLILKSTNASKALSATKLAEVITAEADGRFDAKPAYPGHVQQGGLPSPIDRTRATRMAIKAVGFIEDNQAAIAEARAAEENFNADDKTISDTAAVVGVKGSHVVYNSIRQLYDYETEVSMRMPKVIHWQATRLIADHLVGRKRVD

SEQ ID NO: 7517 - protein, 608 aa, Ralstonia eutropha JMP134
METAMAMTVSDFVLKRLREWGVRRVFGYPGDGINGLMGAFGRADNDPEFIQARHEELAAFMACAHAKFTGEAGVCLATSGPGAIHLLNGLYDAKMDHQPVVAIVGQQKRAALGGDYQQEVDLTTLMKDVARDFVAMAIDPAQMRHLVDRAMRIAIERRTVTCIIIPNDVQNLPAVPVPPREHGTVHTGIGYTARALVPPEPDLRRAADVLNAGSKVAMLVGAGALQATDEVIEVARRLGAGVAKALLGKAAVPDDLPFVTGSIGLLGTKPSWELMTGCDTLLMVGSAFPYSEFLPEEGKARGVQIDIDARMLNLRYPMEICLEGDSAATLRALLPMLEQKPLAWQQEIEHNVAEWWQVLAQRAAAKANPINPQRVFVELSERLPDGCILTCDSGSAANWYARDLKIRRGMMASLSGGLATMGPAVPYAIAARYAHPDRPVIAMVGDGAMQMNGINALITISRDWKRWSGGSLTIIVLNNGDLNQVTWEQRVMEGDPKFAVSQDLPVFGYAAFAQLLGLQGVRVDRPEGIGPALDQALAARIPTVLEMVTDPDVPPLPPHISAKQARDYIAAMLHGDTDAGGTLRATFRQVWESLTASSKRHADKDATP

SEQ ID NO: 7518 - protein, 334 aa, Zymomonas mobilis
MTDSNNPLPISEKIGVLLVNLGTPDAPNAKALRRYLGQFLSVQRVIELPAVFWQIILRGIILPFRAPRSARAYQKIWTNEGSPLAAITKKQAQGLQKRMPNITVDYAMRYGTPSISSRLEKLIAFRCRRILLAPLYPQYSAASTATVQDEAYRYLQKIRWQPNLRSLEPYYTHPAYIQTLKKNIEDQIKALDFKPDSLLLSYHGMPVKTRELGDPYYFQCQATSQALSSLLDIPVITSFQSRFGSQKWFTPATDMTLKELPSKNIRNLAVAMPGFSADCLETLEEIALQGKSTFLEAGGENFAALRCLNDSEESLAMLEILVNQGLYGWLKSWE

SEQ ID NO: 7519 - protein, 367 aa, Azoarcus sp. EbN1
MKIFKLPDLGEGLQEAEIVEWHVAAGDEIEADRPLLSVETAKAIVEIPSPHSGHIEKLFGQPGQIVHVGAPLVGFAGTAEDSDTGTVVGEVQVGHQLAPEAPAAVGGGAAAIKATPAVRALARQLNVELEMVTPSGPDGLITTADVQRVAKILADVGPPEVLRGVRRAMARNMALAQSEVAGATVVDDADIDAWLPDSDVTIRLVRALVAGCRAEPALNAWYESHTMGRRVLEKIDVGIAIDLAEGLFVPVLRDVANRDANDLRRGLDRMRADVIARKIPADELRGNTITLSNFGMIAGKYAAPIVMPPTVAILGAGRVHQQVLAIDGAPAVRRVLPLSLTFDHRVVTGGEAARFLAAVIADLALPE

SEQ ID NO: 7520 - protein, 260 aa, Azoarcus sp. EbN1
MNYETILYDMTDGIAEIRLNRPHRLNAVTAQLYDELNAALSRAEADPDARVVLLTGEGRAFCVGADLKEHKAGRTPFERRQYLQGEQKVCKRLLQLGKPVIAAVNGFALGAGAEMAIASDFVLMAESAQIGLPEISIGNFLGGGVTYLLPRLVGLAKARELVFLGERIGGAEAVRIGLANRALPDEGFLDAARDFARRIAAKAPFSMQLAKEQLNMAAERTLDAALTAELEGMMFVGTTRDWQEGVDAFAEKRAPVFRGE

SEQ ID NO: 7521 - protein, 81 aa, Gaertnera fractiflexa
TPQDEMRAGMSYFHETIWKGVPKFLRRVDTALKNIGINERLPFNAPLIQFSSWMGGDRDGNPRVTPEVTRDVCLLARMMAA

SEQ ID NO: 7522 - protein, 340 aa, Pseudomonas fluorescens Pf-5
MTDHALLLVNLGSPASTSVADVRSYLNQFLMDPYVIDLPWPVRRLLVSLILIKRPEQSAHAYASIWWEEGSPLVVLSRRLQKVMSEQWKQGPVELAMRYGEPSIESVLLKLVAQGQRKITLAPLYPQFADSTVTTVVEEARRVVREHKLDVQFSVLQPFYDQPEYIEALEASTRPHLQQPFDHLLLSFHGLPERHLNKLNPGHSLDGAGDCCAESSPQVLANCYRGQCFRTARAFAQQMGLADGQWSVSFQSRLGRAKWIEPYTEARLDELGKQGVKKLLVMCPAFVADCIETLEEIGDRGREQFREAGGEELVLIPCLNDDPQWAKALNALCERAPLAL

SEQ ID NO: 7523 - protein, 217 aa, Wolbachia endosymbiont of Drosophila melanogaster
MVQATYASMSLPGISSVEDVLEDARSGKLFILVDDESRENEGDLVVLAEKVKPEHMAFMVRYGTGIVFLAMTKLHMSKLNLEFMRKSNVDEKLTPHTAFTTSIDARYGITTGVSAHDRTHTILTAIDEKSTKDDIITPGHVFPIIANEGGVLARNGHTEASVEIAKLVGLNHAAVGCELVNDDCSMMRLPQLLKFAEQHKIKLTTIDKLISYVKKLN

SEQ ID NO: 7524 - protein, 232 aa, Zea mays
VCGILHLVVRHGLLLNSHQVRLYDTALQRRPAISVEFKESPIKAVAADPNGHDVYIGTGTGDLASFDMRTGKLLGCYFGKCSGSIRSIVRHPDLPLIASCGLDSYLRIWDTNTRQLLSAVFLKQHLTTVVLDSHFSVEEPGEMKSKQLESSVETETEVRKEKKKKSKAITEDETEAQIRKEKKSRTIEEEEQAGLVDHSDINDEVYARKEKKKKKSRGIEGGKERDSDNLQS

SEQ ID NO: 7525 - protein, 202 aa, Xerophyta humilis
WVFPKCDHVAVGTGTVTHKGEIKKFQAATRLRARDKIEGGKIIRVEAHPIPEHPRPRRVLDRVALVGDAAGYVTKCSGEGIYFAAKSGRMCAEAIVEASENGKRMIDESDLRRYLKKFDDMYWPTYKVLDVLQKVFYRSNPAREAFVEMCADKYVQKMTFDSYLYKKVVPGNPIDDLKLAVNTIGSLIRANALRREMQKITL

SEQ ID NO: 7526 - protein, 702 aa, Bradyrhizobium sp. BTAi1
MATKAKTLQVKDKEKDDKAADAPEKDSADAPSPLLDLSDAAVKKMIKQAKKRGFVTFDQLNEVLPSDTTSPEQIEDIMSMLSDMGINVTEAEEADESEEKDDGDDETDNELVEITQKAVTEVKKSEPGERTDDPVRMYLREMGTVELLSREGEIAIAKRIEAGREAMIAGLCESPLTFQAIIIWRDELNEGKIFLRDIIDLEATYAGPESKGGMNPQIAAPANGEGEAADGGEIQAAVAPPAAPQQPTPFRAAPNGAPVEEKDPGEAAAEADMDDDEFENQMSLAAIEAELKPKVVETFDKIASEYKKLRRLQEQDIANQLQSESLSPSQERKYKKLKDEIIVEVKSLRLNQARIDSLVEQLYDINKKLVSFESRLMRLADSHGVAREDFLRNYQGSELDPRWLNRVSKLSAKGWKNFVHYEKDRIKDLRQEVQSLAALTGLEIGEFRKIVHSVQKGEREARQAKKEMVEANLRLVISIAKKYTNRGLQFLDLIQEGNIGLMKAVDKFEYRRGYKFSTYATWWIRQAITRSIADQARTIRIPVHMIETINKIVRTSRQMLNEIGREPTPEELAEKLGMPLEKVRKVLKIAKEPLSLETPVGDEEDSHLGDFIEDKNAILPIDAAIQSNLRETTTRVLASLTPREERVLRMRFGIGMNTDHTLEEVGQQFSVTRERIRQIEAKALRKLKHPSRSRKLRSFLDN

SEQ ID NO: 7527 - protein, 257 aa, Brucella suis 1330
MAYETIIVETRDSVGLIRLNRPQALNALNRAVLEELTDALAAFDADGKVGAVVLTGSEKAFAAGADIKEMQSINFVDAYLQDMFADWQKVDRIRKPIIAAVSGYALGGGCELAMMCDFIIAGSNAKFGQPEITLGVIPGMGGSQRLTRYVGKSKAMDMCLTGRMMDAAEAERCGLVSRVVAPEALLEEALKAAERIASFSRVSVYMAKEAVNRAYETTLDEGLRFERRLFHSLFATEDQKEGMSAFVDKRTPSFKNR

SEQ ID NO: 7528 - protein, 450 aa, Actinobacillus pleuropneumoniae serovar 1 str. 4074
MSHLSVAKFGGTSVANFDAMTSCANIVTSDANTRVVVLSASAGVTNYLVELANGCEKERREEILDAVRTIQYNIIEKLQNQSEVSAEIDELLQHIAALAESASLATSNALTDELICHGEMMSTKIFTQLLKERNFPAVWVDVRDIVATNSNYGKAAPNDEKTQQQSDAIIKPLIAAGNVVITQGFIGRDDEGKTTTLGRGGSDYSAALLAEVLNANDVLIWTDVPGIYTTDPRVVPNAQRIDTMAFNEAAEMATFGAKVLHPATLLPAVRSNIPVYVGSSKAPEQGGTWVTRDPQPRPTFRAIALRRNQTLLTLSSLSMLHAQGFLANVFAILAKHKISVDVITTSEVSVALTLDKTGSASSGADMLSKELLDELNAYCHVQVEHDLALIAIIGNNLHTQAGVAKQLFHTIENFNIRLISYGASTNNVCTLIKNDEADEVVRALHAGLFE

SEQ ID NO: 7529 - protein, 487 aa, Bacillus subtilis subsp. subtilis str. 168
MAEIRKLKNYINGEWVESKTDQYEDVVNPATKEVLCQVPISTKEDIDYAAQTAAEAFKTWSKVAVPRRARILFNFQQLLSQHKEELAHLITIENGKNTKEALGEVGRGIENVEFAAGAPSLMMGDSLASIATDVEAANYRYPIGVVGGIAPFNFPMMVPCWMFPMAIALGNTFILKPSERTPLLTEKLVELFEKAGLPKGVFNVVYGAHDVVNGILEHPEIKAISFVGSKPVGEYVYKKGSENLKRVQSLTGAKNHTIVLNDANLEDTVTNIVGAAFGSAGERCMACAVVTVEEGIADEFMAKLQEKVADIKIGNGLDDGVFLGPVIREDNKKRTLSYIEKGLEEGARLVCDGRENVSDDGYFVGPTIFDNVTTEMTIWKDEIFAPVLSVIRVKNLKEAIEIANKSEFANGACLFTSNSNAIRYFRENIDAGMLGINLGVPAPMAFFPFSGWKSSFFGTLHANGKDSVDFYTRKKVVTARYPAPDFN

SEQ ID NO: 7530 - protein, 131 aa, Brassica napus
  misc_feature (37)..(37): Xaa can be any naturally occurring amino acid
CQVMLRVGDLDRSIKFYEKAFGMELLRTRDNPEYKYXIAMMGYGPEDKTAVLELTYNYGVPEYDKGNAYAQIAIGTDDVYKTAEAVKLFGGKITREPGPLPGISTKITACLDPDGWKSVFVDNVDFLKELE

SEQ ID NO: 7531 - protein, 377 aa, Zea mays
  misc_feature (89)..(89): Xaa can be any naturally occurring amino acid
MARRSAPLLRRLVSASSPPALQSLTDHVGVLARRTVTYMPRPGDGAPRAVTLIPGDGIGPLVTGAVRQVMEAMHAPVYFETYDVHGDMXRVPPAVIESIRRNKVCIKGGLATPVGGGVSSLNMQLRKELDLYASLVHCSNLPGLPTRHEGVDIVVIRENTEGEYSGLEHEVVPGVVESLKVITKFCSERIAKYAFEYAYLNNRKKVTAVHKANIMKLADGLFLESCREVASKYPGIQYNEMIVDNCSMQLVSKPEQFDVMVTPNLYGNLVANTAAGIVGGTGIMPGGNVGQDYAIFEQGASAGNVGNENLVEQKKANPVALLLSSAMMLRHLQFPSFADRLETAVKRVVAEGTYRTKDLGGSSTTQEVTDAVVANLD

SEQ ID NO: 7532 - protein, 575 aa, Brucella suis 1330
MNQPVSTPKSVSQAVSARKGMPIAGTKYAPFPAPQLDDRTWPSKRIEKAPIWCSVDLRDGNQALIDPMGHDRKERMFRLLIDMGFPEIEIGFPSASQTDFDFCRWAIEQGDVPDDVDLQVLVQCRPELITRTFEALEGAKTPIIHFYNSTSELQRRVVFAKDVGGIKQIATDAAKMIMDMAAKAGGGYRFQYSPESFTGTELDVALEICNAVIEIVKPTPDNKLIVNLPSTVEMNTPNVYADQIEWMCRNLDNRESLIISLHPHNDRGTGIAATELGLMAGADRVEGTLFGNGERTGNVDVVTLALNMYTQGIDPGLDCTDINRMKEVYEYSNQLKIAERHPYVGELVYTAFSGSHQDAINKGMKARRSANSPVWEVPYLPIDPQDVGRSYEAIIRINSQSGKGGIAYILQADYGLNLPRNLQVEFREIIQHITDEEGKELPSKRIYEEFQKLYVTQPDARIKFVDHHTYPDPEQKGRRILTAEITDNGVTKTIEGKGTGPIDGFVDALSKYLGVKMSVVDYSEHSLQQGSDASAISYVEMVYPGGKLFGVGINDNIVSASLEAVVSAANRVIAK

SEQ ID NO: 7533 - protein, 536 aa, Mesorhizobium sp. BNC1
MKERIYLFDTTLRDGQQTPGVDFSVEDKIAIAQLLDELGVDYVEGGYPGANPTDTEFFSKKRTRRAAFVAFGMTKRPGISAANDPGLAALTQAESDAVCFVAKSWDYHVRVALGATNEENLESIRSSVAAARAAGREAIVDCEHFFDGYKANPDYALACALAAYEAACRWVVLCDTNGGTQPREVREIVSAVIAAGIPGSHLGIHAHDDTGQAVANSLAAVEAGVRQIQGTLNGIGERCGNANLVTIIPTLMLKPVYAERFEVGIAEDELKRISRISHAFDELLNRAPDTQAPFVGTSAFATKAGIHASAILKDPQTYEHVLPERVGNTRRVMVSDQGGKSNFIAELTRRGIQVEKADPRLDTLIALVKEREAQGYAYEGADASFELLARRILGKVPEFFKVDGFRCMVERRFDANGNLKTVSEAVVRVTIDGETRLSVAEGHGPVNALDVALRKDLGKFQSEIEDMTLTDYKVRILNGGTEAVTRVLIESHDAAGDRWWTVGVSDNIIDASFQALMDSIVYKLVKNRERTGLAAE

SEQ ID NO: 7534 - protein, 334 aa, Xanthomonas campestris pv. campestris str. ATCC 33913
MSIEQLAETAQAMVAPGKGIIAIDESTSTIAKRFSGVGIENTEENRRAYRELLLTTPKLSDYISGAILFDETIRQKTKDGVPFAKYMADHGIIPGIKVDKGAQPLAGMPGELVTEGLDGLRARLEEYYTLGARFAKWRAVINIGEDIPSGTCIEANAHALARYAALCQEQGLVPMVEPEVIMDGDHDIETCYEVTEATLRSLFGALYEQNVVLEGTILKASMVISGKGCEEQASVEEVAESTVMCLKSTVPAILPGIVFLSGGQTDEQSTAHLNEMHQLGNLPWPLSFSYGRAMQQAALKLWSKDMTGNYAKAQQIIYERAKENGLAALGKWKG

SEQ ID NO: 7535 - protein, 325 aa, Comamonas testosteroni
MASTYLQARVHQMRYEAAGILSVELRPLAAAQEFSQSVQAGAHIDLHLADGLIRSYSLTNPGERHRYVVAVSLDPTSRGGSRFVHQRLRVGDVIQIGGPRNHFPLVETAPHSVLVAGGIGITPVLAMLRRLNALGRTAHLIYCASSRASAAFVPEIEAIAAQAGGRVTLDWHFKEEKGVRADLHNLLQEHAEGTHFYACGPLAFLDSYEDSCGKLGLAHVHLERFAAAPLAAPRTPEVGYAVELRRTGRTVQVAAGTSLLDTLINAGMNPEYSCREGVCGACEVRVISGDVEHRDQILSEQERAVNKSMMICVSGCRSGNLVLDC

SEQ ID NO: 7536 - protein, 320 aa, Vibrio fischeri ES114
MVKKIGVLTSGGDAPGMNAAVRGVVRTALTEGLEVFGIHDGYLGLVEDRIEKLERHSVSDMINRGGTFLGSARFPEFKEVAVREKAIENLKKHDIDALIVIGGDGSYMGAKKLTEMGYPCIGLPGTIDNDIAGTDYTIGYLTALNTVIDAIDRLRDTSSSHQRISIVEVMGRHCGDLTLMSAIAGGCEYVITPETGLNKEALIQNIQDGIAKGKKHAIIAITELMTDVNQLAKEIEAETGRETRATVLGHIQRGGQPGAFDRILASRMGNYGVKLLIDGHGGRCVGIQNEQLVHHDIIDAIENMRRPEKLELYKVAEELF

SEQ ID NO: 7537 - protein, 446 aa, Marchantia polymorpha
MYVQVRPSLTPNSCHGSSPVFASAARPAICGSVGPAARCCALPSLHGKVSSLLSPYLGRSGTLQHDCKRAEWQRAKKSAKGTRIFASMIPMDSARIKVIGVGGGGNNAINRMIGSGLQGVEFWAINTDAQALLQSAATHRVQIGETLTRGLGTGGNPELGEKAAEESLEAIAEAVSDADLVFITAGMGGGTGSGAAPVVARLAKEGGQLTVGVVTYPFTFEGRRRAQQGLEAIEQLRKNVDTLIVIPNDRLLDVVQEATPLQEAFLLADDVLRQGVQGISDIITIPGLVNVDFADVKAVMSNSGTAMLGVGMSTGKNRAEEAAQQATSAPLIERSIERATGVVYNITGGKDLTLQEVNRVSQVVTGLADPAANIIFGAVVDEKYTGAVHVTIIATGFSQTFQKTLIDPKVARQEQQDSPKGVDSPWKRPAPVSSRFPQGLGSKGFL

SEQ ID NO: 7538 - protein, 78 aa, Escherichia coli
IGHSPNTAIFEGQLELENGYIKVQSGIHGNATQTSIPGVFAAGDVMDHIYRQAITSAGTGCMAALDAERYLDGLADAK

SEQ ID NO: 7539 - protein, 734 aa, Ustilago maydis 521
MEAISSALSALSIQTEKAVKHAAATSPESWRSAVADVASSLGLTSQNFTKTVVFKPKTAKTAAPTPVVLIAKDDSEYNTGAIAKHIGQKEMRLAAPEVLKEFLNATKDDVSALSITKDNASQLIAILDASLATSTDHFAVHASSSEQTLFMTGAEIAKYLQSTGVKLEVIDFAKLKAEAATPAAKASAPSSSSASAPGSTQGSIAASNKAKAAEAAKIPDAEQIGITVRKAGDFPEWYTQVLRKGDMLDYYDVSGCYILKPWSYFVWQSIQNFFDAEIKKIGVENCYFPMFVSADVLEREKDHIEGFAPEVAWVTKAGSSDLERPVAIRPTSETVMYPYYAKWIQSHRDLPLKLNQWNSVVRWEFKHPQPFLRTREFLWQEGHTAHISLEEADKEVMHILDLYRQVYEKLLAVPVVPGVKSEKEKFAGGYYTTTVEGFVPTTGRGIQGGTSHCLGQNFSKMFGIMVEDPKAPEEFRGKDEGKLHVWQNSWGLSTRTIGVMVMVHGDDDGLVMPPRVAQVQVIIIPCGIGVKTSAQEKQNIMDACDQTAKDLQAAGIRAKADLRDNYSPGFKFNDWELRGVPVRLEIGPKDLEKKSVVAVRRDNKAKTSFSVDGLYGSISTLLDQIHDDMFAKADAEYRSRRKVCEQWDDFTRILNDKCHVVIPWCEVEACEDEIKKRSARQAVAGEAEDERAPSMGAKSLCIPFDQAQFGDISGKKCPQCGADAKRWTMFGRSY

SEQ ID NO: 7540 - protein, 683 aa, Candida albicans SC5314
MISRNLRTSSTKTFYGSILRSQIRSISKNNSQQAAAQSTSRPQPSPAFNTADTSTQPIINDPTLNKHKSSAISRKKKEQLMDDSFIGLTGGEIFHEMMLRHKVDTVFGYAGGAILPVFDAIYNSDKFKFVLPRHEQGAGHMAEGYARASGKPGVVLVTSGPGATNVITPMADALMDGVPLVVFSGQVPTTAIGTDAFQEADIVGISRSCTKWNVMVKNVAELPRRINEAFEIATTGRPGPVLVDLPKDVTASILRESIPINTTLPSNALSQITKKAVSEFTSEAIKRAANILNKAKKPIIYAGAGILNNEQGPKLLKELADKANIPVTTTLQGLGAFDQRDPKSLDMLGMHGSAAANTAIQNADCIIALGARFDDRVTGNISKFAPEAKLAASEGRGGILHFEISPKNINKVVEATEAIEGDVTANLQSFIPLVDSIENRPEWFNKINEWKKKYPYSYQLETPGSLIKPQTLIKEISDQAQTYNKEVIVTTGVGQHQMWAAQHFTWTQPRTMITSGGLGTMGYGLPAAIGAQVAKPDAIVIDIDGDASFNMTLTELSSAVQAGAPIKVCVLNNEEQGMVTQWQSLFYEHRYSHTHQSNPDFMKLAESMNVKGIRITNQQELKSGVKEFLDATEPVLLEVIVEKKVPVLPMVPAGKALDDFILWDAEVEKQQNDLRKERTGGKY

SEQ ID NO: 7541 - protein, 180 aa, Glycine max
NHHLNACVRSHRFSLWSKNLARTLQFKVRVDIQRTKLKLTFELQRSPTEEDFVERVRISPERYHDVMKASKPILSLHSRHTTTQEEFINGIVDDDGVNGDNRKPPALLRLALDDVLDSLKPKESLVIRQRFGLDGKGHRTLGEIAGNLNISREMVRKHEVKALMKLKHSARLDYLRRYVV

SEQ ID NO: 7542 - protein, 610 aa, Asparagus officinalis
MATSLQAPILGSRPPRRTLRFLSFALFSALVLVVASFSSRKSESGSGLRSGSVEPEYAWTNQMLTWQRAGFHFRTVKNYMNDPSGPMYYKGWYHLFYQHNPNYAYWGDISWGHAVSRDLLNWFHLPVAVKPDRWYDIYGVWTGSITVMPDDGRVVMLYTGGTKEKYQIMSVAMAADPSDPLLVEWVKYDEVNPVLRPPPGIGLTDFRDPNPIWYNTTDSTWQLVIGSKNDSLQHTGIAMVYTTKDFINLTLLPGVLHSVDHVGMWECVDLFPVASSGPLIGRGLDRSMMLADNVKHVLKASMNDEWHDYYAIGSYDVATHRWVPDDESVDVGIGMRIDWGKFYASRTFYDPVKERRVMWGYVGETDSGDADVAKGWASFQGIPRTVLFDVKTGTNVLTWPIEEVESLRMTRKDFSDIVVNKGSTVELHVGDANQLDIEAEFEMDKDALETAIEADIGYNCSSSGGAVSRGVLGPFGLFVLANQDLTELTATYFYVSRATDGSLHTHLCHDEMRSSKANDIVKRVVGGTFTVLDGELLSLRILVDHSIVESFAQGGRTSATSRVYPTEAIYERARVFLFNNATGATITAKAVKVWQMNSTSNQYYPFTSSN

SEQ ID NO: 7543 - protein, 481 aa, Pseudomonas fluorescens Pf-5
MQLIWLRSDLRLHDNTALSAAAQRGAAVAVYLLSPEQWLAHDDAPCKIDFWLRNLQSLSTALGRLNIPLLIRSAATWEQAPQVLLELCRQLQVQMLHFNQEYGIHESRRDAAVTRALQHAGISVQGHLDQLLFQPGSVLTKSGGYFQVFSQFRKVCYSRLHTALPALVKAPGAQLPLSINADPLPQRVEGFPSPTQALRELWPAGDDEAQRRLEKFSDEQIHYYQSERDFPAKPGTSQLSPYLAAGVISPRQCLHAALRGNQGEFESGSPGAVTWINELLWREFYKHILVGYPRVSRHRAFRPETEAVKWRHAPEELAAWQEARTGLPIIDAAMRQLLETGWMHNRLRMVVAMFLTKNLLIDWREGERFFMRHLIDGDLAANNGGWQWSSSTGTDSAPYFRIFNPISQSQKFDSEGRFIKHWLPQLAGLNKKDIHNPAAMGGLFGVPGYPAPIVDLSRSRERALAAFKALPARMDAGVSHE

SEQ ID NO: 7544 - protein, 503 aa, Arabidopsis thaliana
MYRTAASRARALKGVLTRSLRPARYASSSAVAETSSSTPAYLSWLSGGSRAALTSLDMPLQGVSLPPPLADKVEPSKLQITTLPNGLKIASETTPNPAASIGLYVDCGSIYEAPYFHGATHLLERMAFKSTLNRTHFRLVREIEAIGGNTSASASREQMSYTIDALKTYVPEMVEVLIDSVRNPAFLDWEVNEELRKMKVEIAELAKNPMGFLLEAIHSAGYSGPLASPLYAPESALDRLNGELLEEFMTENFTAARMVLAASGVEHEELLKVAEPLTSDLPNVPPQLAPKSQYVGGDFRQHTGGEATHFAVAFEVPGWNNEKEAVTATVLQMLMGGGGSFSAGGPGKGMHSWLYRRVLNEYQEVQSCTAFTSIFNDTGLFGIYGCSSPQFAAKAIELAAKELKDVAGGKVNQAHLDRAKAATKSAVLMNLESRMIAAEDIGRQILTYGERKPVDQFLKSVDQLTLKDIADFTSKVISKPLTMGSFGDVLAFPSYDTISSKFR

SEQ ID NO: 7545 - protein, 577 aa, Ralstonia eutropha JMP134
MAQADRTESVEGQGTEATASLDAPYSTLESRWHQMFPTLTGDEVERMRHFGTPQRWQAGEQLFSVGQVGRGMCVVVSGCIQIIRRDGLGHEHRITDLGPGMFSAEVGTLTGRPSLVDGRAVTDSEGFAIPPDRLRALLVAEADLGERIMRALILRRVGLIESGSGPVLVGHGAEPLLLALQAFLRRNGHPYTVIDMDVERDCSCLSEFANAPASDFPLVICPDGRVLRAPDEGQLASCLGLLPEFDPTHVYDVVVVGAGPAGLATAVYAASEGLSVAVIDCRSPGGQAGASARIENYLGFPTGISGQALAGRAFVQALKFGAHIAIPLEVKALHCGSDPIRLELADGRMISTHTVVIATGAQYRRPAIDALERFEGRGVYYWASPVEAKLCKNEPVMLVGGGNSAGQAAVFLATHAAHVHMLVRGQGLAATMSRYLVDRIGGLPNVQLHTRAEIHALEGDGWLSDVRYQAPTESDGLVSLPVRHLFLFIGADPNASWLRTCNVETDDKGFVRTGGGTLGCASAVPYPLQTSVPGVFAIGDVRSGSTKRVAAAVGEGASVVAQIHSYLAGLTTAAQAA

SEQ ID NO: 7546 - protein, 195 aa, Triticum aestivum
MTSTVTTPTPSRPLPAGPQRRRYRPTVLAIAGGSKPPRRRAPAAATSCAALAAPEKQSTAPSKLPAPSPAPEGTDYDEVAATLETLYKLSPVIVEEDGKRSKKQAATKKKRKQVRAISGAATTTAATPRRTVVVRSQPRPRMDLGKRVEMPDLAARQGGRTPGTGKRAFRGRRFCGEHGRGRREMGQPWDWEGGM

SEQ ID NO: 7547 - protein, 966 aa, Alternanthera pungens
MATVKVEKMASIDAQLRLLAPGKVSEDDKLVEYDALLLDRFLESLDSLHGPGIRETVQELYEHAAEYERTRDTKKLEELGNMITSLDAGDSIVVTKSFSHMLNLSNLAEEVQIAYRKRTKKTKKGDFADESSAITESDIEETFRRLVVDLKKSPQEIFDTLKNQTVDLVLTAHPTQSVRRSLLQKHGRIRDCLTQLYAKDITPDDKQELDEALQREIQAAFRTDEIRRAQPTPQDEMRAGMSYIIETIWKGVPKFLRRVDTALKNIGINERVPYNAPLIRFSSWMGGDRDGNPRVTPEVTRDVCLLARMMAANMYFSQIQDLMFELSMWRCNDELRARAHEIHQHSKTDAKHYIEFWKRIPPSEPYRVILGEVRDKLYSTREHALQLLSNGVSNIPEEATFTHVDQFLEPLELCYRSLCACGDRPIADGSLLDFMRQVSTFGLSLVRLDIRQESDRHTDVMDAITKHLGIGSYRAWSEEKRQEWLLSELRGKRPLFGPDLPKTEEIADVLGAFHVIAEIPSDSFGAYIISMATAPSDVLAVELLQRECGVKDPLRVVPLFEKLADLENAPASVTRLFSIDWYRNRINGKQEVMIGYSDSGKDAGRLSAAWQLYKAQEELIKIAKEFGVKLTMFHGRGGTVGRGGGPTHLAILAQPPGTINGSLRVTVQGEVIEQSFGEEHLCFRTLQRYTAATLEHGMHPPSSPKPEWRALLDEMAAVATKEYRSVVFREPRFVEYFRRATPELEYGRMNIGSRPAKRKPSGGIESLRAIPWIFSWTQTRFHLPVWLGFGPAFKHVIEKDKGNLTMLKEMYNQWSFFRVTIDLLEMVFAKGDPKIAALYDKLLVSEDLKPFGEHLRKSYEETQQLLLEVAGHKDILDADPYLKQRLRLRDPYITTLNVFQAYTLKRIRDPNFHVTAGPHLSKEIMDSNSPAAELVKLNLTSEYPPGLEDTLILTMKGIAAGLQNTG

SEQ ID NO: 7548 - protein, 126 aa, Pseudomonas stutzeri
SDRLTQPLLRMKDGKFDKQGEFQPVTWDQAFDIMEEKYKAALKQGGPEAIGMFGSGQWTIWEGYAANKLMKAGFRSNNIDPNARHCMASAAFGFMRTFGMDEPMGCYEDIEAADAFVLWGSNMAEM

SEQ ID NO: 7549 - protein, 271 aa, Pseudomonas fluorescens Pf-5
MNSALYNGWISHRRFAPKDHAFRYRIGLLYLDLDEQEAVLGLSPLAGRSRFAPFAFRESDYLPTFTGQGMRLIDAVRQQVAAAIGHAPSGAIRLLTQVRSWGLAFNPVSFFYCFEANGQLAAILCEVTNTPWRERYHYVLPARPGTATTPEHQHFAVAKAFHVSPFLPRDLEYRMSFSPPAERLGVHMADWQGELKVFDATLNLQRQPLDRRSLHQYLRHFPWMTAKTCLAIYWQALRLAAKGMRFFPHRAAVGAYRTAVVQPKDRRHEIL

SEQ ID NO: 7550 - protein, 81 aa, Gaertnera longifolia
TPQDEMRAGMSYFHETIWKGVPKFLRRVDTALKNIGINERLPYNAPLVQFSSWMGGDRDGNPRVTPEVTRDVCLLARMMAA

SEQ ID NO: 7551 - protein, 81 aa, Gaertnera lowryi
TPQDEMRAGMSYFHETIWKGVPKFLRCVDTALKNIGINERLPYNAPLIQFSSWMGGDRDGNPRVTPEVTRDVCLLARMMAA

SEQ ID NO: 7552 - protein, 212 aa, Carica papaya
IPEYVDWRQKGAVTPVKNQGSCGSCWAFSAVVTIEGIIKIRTGNLNEYSEQELLDCDRRSYGCNGGYPWSALQLVAQYGIHYRNTYPYEGVQRYCRSREKGPYAAKTDGVRQVQPYNEGALLYSIANQPVSVVLEAAGKDFQLYRGGIFVGPCGNKVDHAVAAVGYGPNYILIKNSWGTGWGENGYIRIKRGTGNSYGVCGLYTSSFYPVKN

SEQ ID NO: 7553 - protein, 81 aa, Gaertnera junghuhniana
TPQDEMRAGMSYFHETIWKGVPKFLRRVDTALKNIGINERLPYNAPLVQFSSWIGGDRDGNPRVTPEVTRDVCLLARMMAA

SEQ ID NO: 7554 - protein, 588 aa, Arabidopsis thaliana
MDGDELTEQETALYDRQIRVWGAGAQRRLSKSHVLVSGIKGTVAEFCKNIVLAGVGSVTLLDDRLVTTEVFNANFLILPDENAYVGKTVAEICCDSLKDFNPMVHVSIEKGDLSTLGVDFFEKFDVVVIGYSSRATKKAVNEKCRNLAKDVAFYTVDCRGSCGEIFVDLQNYKYTKKKLDETVECELTFPSFEEAVSVPWKPMPRRTAKLYFAMRVIELFEETEGRKPGECSLSDLPRVLKLKKELCEGNSVSENHIPDILLERLVSNNTEFPPACAIIGGILGQEVIKVISGKGEPLKNFFYFDAEDGKVFMPFSIFFKLLQFIRGCKESEKVNGKVVIITGSSSGIGEHLAYEYARRGAYLTLVARREDRLQVVADRCRKLGSPDVAVVRGDVSVIKDCKRFVQETISRFGRLDHLVNNAGIAEAKFFEDYSEISDVLPIVNTNFWGPVYATHFAIPHLKKTKGKIIAVASPAGWSGVPRMSIYAASKAAMINFYETLRIELHPEVGVTIVFPGLIENGNTNPDLLAEKQDWSQVVTIESAAECAKAVVNGICRGKTFVAEPSWVRVLFWLSAICPELLISKPKRN

SEQ ID NO: 7555 - protein, 352 aa, Zinnia elegans
MAFIFSSKKTSLLFLFVSILACSALAHEFSILGYAPEDLTSIHKVIHLFESWLVKHSKFYESLDEKLHRFEIFMDNLKHIDETNKKVSNYWLGLNEFADLTHEEFKHKFLGFKGELAERKDESSKEFGYRDFVDLPKSVDWRKKGAVAPVKNQGQCGSCWAFSTVAAVEGINQIVTGNLTMLSEQELIDCDTTFNNGCNGGLMDYAFAYVMRSGLHKEEEYPYIMSEGTCDEKKDVSEKVTISGYHDVPRNDEASFLKALANQPISVAIEASGRDFQFYSGGVFDGHCGTELDHGVAAVGYGTTKGLDYVIVRNSWGPKWGEKGYIRMKRGSGKPHGMCGLYMMASYPTKQK

SEQ ID NO: 7556 - protein, 249 aa, Propionibacterium acnes KPA171202
MTAKLILLRHGESEWNSKNLFTGWVDVDLNEKGEGEARHAADLLKQENLLPDIVHTSLLRRAIHTAYLALDGCDRHWIPVHRSWRLNERHYGALQGLNKAETKEKYGNDQFMAWRRSYDVRPPDLDRDSEFSQFHDPRYADIPASERPVAECLKDVVARMVPYFTSDIAADLKDGKTVLVAAHGNSLRALVKHLDEISDEDIAGLNIPTGIPLFYELDDNLKPVTRGGRYLDPEAAAAGAKAVANQGNK

SEQ ID NO: 7557 - protein, 273 aa, Frankia sp. EAN1pec
MSDENTASPARPDADELIYTVDGAIATITLNRPQVKNAFTLTMIDRWAEALRSAAADPRVRVVVVTGAGGAFCSGIDLAVLGGIEPTPIARRRMLTEGVHKVARAVLDLEKPLIAAISGVAVGAGLDMALMCDLRFAGRSARLAEGYIKIGLVPGDGGCYLLPRLVGPAKALELLLTGDTVDGVEAERIGMVNRVYEDDELLDATYAFAGRLAGMSPISAAMIKKTVYQSQTMDLRASLDMIASHMAIVQSTEDYAEARAAFAERRTPGFTGR

SEQ ID NO: 7558 - protein, 333 aa, Xanthomonas campestris pv. campestris str. ATCC 33913
MAIKVGINGFGRIGRNVLRSAVQNFANDIEIVAINDLLEPDYLAYMLQYDSVHGRFKAEVSVDGNTLIVNGKKIRLTQERDPANLKWDAVGAEVVIESTGLFLTKETAQKHIDAGAKKVILSAPSKDDTPMFVYGVNDKTYKGEAIVSNASCTTNCLAPLAKVINDKWGIKRGLMTTVHAATATQKTVDGPSNKDWRGGRGILENIIPSSTGAAKAVGVVIPELNKKLTGMSFRVPTSDVSVVDLTVELEKPATYAEICAEVKAQSEGALKGILGYTEDKVVATDFRGETCTSVFDADAGIALDSTFVKLVSWYDNEWGYSNKCLEMVRVVAK

SEQ ID NO: 7559 - protein, 327 aa, Photobacterium sp. SKA34
MADITLIEAVNLALHYEMQHDPNVVILGEDIAENGGVFRATLGLKQAFGCKRVIDTPLAESLIAGVTVGMASQGLRPIAEFQFQGFIFPAMEHLVCHAARLRNRTRGRLTCPAVFRAPFGGGIHAPEHHSESIEAMFAHIPGLKVVIPSSPQRAYGLLLAAIRSNDPILFFEPKRIYRTVKSHVENNGLALPLDQCFTLRKGTDITLVTWGACVVESLQAAETLSQHGIELDVIDLASIKPIDMATISASLEKTGRLLVVHEAAKTCGVGAEIITRVAESAMFLLKAPPKRLTGFDTIMPYYRNEDYFMIQHDDIVNAARELMEGWQ

SEQ ID NO: 7560 - protein, 167 aa, Medicago truncatula
MAKAHIVGVAMDFSPTSKLALRWAVDNLINKNDQIIMINVQPPSADHTRKELFEDTGSPLVPLEELREINFTKQYGIAKDPEVIDILETASKIKGQAKVVAKVYWGDPREKLCNAVEDLHLDSLVIGSRGLGTIKSVLLGSVSKHVVTNASCPVTVVKGMQSSKSRH

SEQ ID NO: 7561 - protein, 677 aa, Bacillus subtilis
MKKRLIQVMIMFTLLLTMAFSADAADSSYYDEDYRPQYHFTPEANWMNDPNGMVYYAGEYHLFYQYHPYGLQWGPMHWGHAVSKDLVTWEHLPVALYPDEKGTIFSGSAVVDKNNTSGFQTGKEKPLVAIYTQDREGHQVQSIAYSNDKGRTWTKYAGNPVIPNPGKKDFRDPKVFWYEKEKKWVMVLAAGDRILIYTSKNLKQWTYASEFGQDQGSHGGVWECPDLFELPVDGNPNQKKWVMQVSVGNGAVSGGSGMQYFVGDFDGTHFKNENPPNKVLWTDYGRDFYAAVSWSDIPSTDSRRLWLGWMSNWQYANDVPTSPWRSATSIPRELKLKAFTEGVRVVQTPVKELETIRGTSKKWKNLTISPASHNVLAGQSGDAYEINAEFKVSPGSAAEFGFKVRTGENQFTKVGYDRRNAKLFVDRSESGNDTFNPAFNTGKETAPLKPVNGKVKLRIFVDRSSVEVFGNDGKQVITDIILPDRSSKGLELYAANGGVKVKSLTIHPLKKVWGTTPFMSNMTGWTTVNGTWADTIEGKQGRSDGDSFILSSASGSDFTYESDITIKDGNGRGAGALMFRSDKDAKNGYLANVDAKHDLVKFFKFENGAASVIAEYKTPIDVNKKYHLKTEAEGDRFKIYLDDRLVIDAHDSVFSEGLFGLNVWDATAVFQNVTKES

SEQ ID NO: 7562 - protein, 603 aa, Lactobacillus plantarum
MVMKQTKQTNILAGAAVIKVLEAWGVDHLYGIPGGSINSIMDALSAERDRIHYIQVRHEEVGAMAAAADAKLTGKIGVCFGSAGPGGTHLMNGLYDAREDHVPVLALIGQFGTTGMNMDTFQEMNENPIYADVADYNVTAVNAATLPHVIDEAIRRAYAHQGVAVVQIPVDLPWQQIPAEDWYASANSYQTPLLPEPDVQAVTRLTQTLLAAERPLIYYGIGARKAGKELEQLSKTLKIPLMSTYPAKGIVADRYPAYLGSANRVAQKPANEALAQADVVLFVGNNYPFAEVSKAFKNTRYFLQIDIDPAKLGKRHKTDIAVLADAQKTLAAILAQVSERESTPWWQANLANVKNWRAYLASLEDKQEGPLQAYQVLRAVNKIAEPDAIYSIDVGDINLNANRHLKLTPSNRHITSNLFATMGVGIPGAIAAKLNYPERQVFNLAGDGGASMTMQDLATQVQYHLPVINVVFTNCQYGWIKDEQEDTNQNDFIGVEFNDIDFSKIADGVHMQAFRVNKIEQLPDVFEQAKAIAQHEPVLIDAVITGDRPLPAEKLRLDSAMSSAADIEAFKQRYEAQDLQPLSTYLKQFGLDDLQHQIGQGGF

SEQ ID NO: 7563 - protein, 550 aa, Pichia stipitis
MSSQDLPSGAQTPIDGSSILEDKVEQSSSSNSQSDLASIPATGIKAYLLVCFFCMLVAFGGFVFGFDTGTISGFLNMSDFLSRFGQDGSEGKYLSDIRVGLIVSIFNIGCAIGGIFLSKIGDVYGRRIGIISAMVVYVVGIIIQISSQDKWYQLTIGRGVTGLAVGTVSVLSPMFISESAPKHLRGTLVYCYQLCITLGIFIGYCVTYGTKDLNDSRQWRVPLGLCFLWAIFLVVGMLAMPESPRFLIEKKRIEEAKKSLARSNKLSPEDPGVYTEVQLIQAGIDREAAAGSASWMELITGKPAIFRRVIMGIILQSLQQLTGVNYFFYYGTTIFQAVGLQDSFQTSIILGTVNFLSTFVGIWAIERFGRRQCLLVGSAGMFVCFIIYSVIGTTHLFIDGVVDNDNTRQLSGNAMIFITCLFIFFFACTWAGGVFTIISESYPLRIRSKAMSIATAANWMWGFLISFCTPFIVNAINFKFGFVFTGCLLFSFFYVYFFVSETKGLSLEEVDELYAEGIAPWKSGAWVPPSAQQQMQNSTYGAEAKEQEQV

SEQ ID NO: 7564 - protein, 747 aa, Bacillus subtilis subsp. subtilis str. 168
MCGLAGIINLAAPRSQECTFHILKGMADAISYRGPDDEQYHIDSKVGFAFRRLSILDLVNGQQPFLNEDGSIVVMVNGEIYNYKELKASLHNHMFKTTSDCEVIVHLYEEKGIGFVDDIIGMFSIAIWDKNKNKVFLVRDRFGIKPLFYTELKHELIFASEIKSLFSHPHCPRQFNWKEALSDICLSGEAASNHKETTSFFVNIQNLDAGHYLEINLTTNERKTASYWSLQDILLRQGYRENLHPDDLIEGYRELLADSVHRCLQSDVEVGLFLSGGIDSAAVAHFAAEKQDLHTFTVLSQSTFTNEDAKYAHWLAKDLHLPNHQVLYQLGNDELLQPESYKHLLWICETPFCGPEQLYKFHLHKYAKAIRPNLKVMLTGQGSDEFNGGYSTTLSPAENPSWEGFIESVNTMEMNRLHRLQGNIFRVWEEHFGLSPINLSYLKSNDSSQADPWQSYVLTKYRDLQMYNCWHEDRIAAANHIENRVPFLDHRLVEWVCGIPDGLRKDLLWDKSVLRKSLTNELHTSYTHRPKVPFFYGKDVRYTHKMMFHLLKKNNYQLIEEAFSHSDASSIIQVEHIHAIMTYLEDDPEFTNFEFLLRLVNMGLLSKMTKETPSVQLDITSHLESITIKDWHSQEGDIASRLNISANKCEGQDILALNPGVTLLRPESDSEHCIYIAEEGFIQFIVSEEDVGAWLHILCDINGKDTLHTILDRHGVSLEEVAKYIQEAIEHNIILIKQKNLPEGAYR

SEQ ID NO: 7565 - protein, 504 aa, Medicago truncatula
MVLSETATHMDASVHSTFASRYVRTSLPRFKMGENSIPKEAAYQIINDELMLDGNPRLNLASFVTTWMEPECDKLIMASINKNYVDMDEYPVTTELQNRCVNMIAHLFNAPLEDSEPAVGVGTVGSSEAIMLAGLAFKRKWQNRRKSEGKSCENPNIVTGANVQVCWEKFARYFEVELKEVKLRDGYYVMDPEKAAEMVDENTICVAAILGSTLNGEFEDVKRLNDLLVEKNAETGWDTPIHVDAASGGFIAPFLYPELVWDFRLSLVKSINVSGHKYGLVYAGIGWIIWRSKEDLPEELIFHINYLGADQPTFTLNFSKGSSQVIAQYYQLIRLGYEGYRNVMENCRDNMMVLKDGLEKTERFEIVSKDEGVPLVAFTLKDHNNFNEFQISDMLKRHGWIIPAYTMPPDAEHVTVLRVVIREDFSRTFAERLVIDITRVIHELDLVPSRVVSTNTITVTGGEEDADNDGTVTIANQSVLETQRKITTAWKKFVMNRKKTNGVC

SEQ ID NO: 7566 - protein, 133 aa, Pseudoalteromonas tunicata D2
MRLLHTMLRVTDLEKSIAFYTQVLGMKEIRRAENPQYRYTLAFVGYADESEQAVIELTYNWDTDSYDLGNAYGHIALEFDDIYRACEQIKARGGIVTREPGPVLGGTTEIAFVKDPDGYAIELIQTKTKLDDF

SEQ ID NO: 7567 - protein, 319 aa, Nicotiana attenuata
MENFPIINLEKLNGSEKAATMEMIKDACENWGFFELVNHGIPHEVMDTVEKLTKGHYKKCMEQRFKELVASKGLEGVEAEVTDMDWESTFFLRHLPVANISEVAGLDDQYREVMRDFAKRLENLAEELLDLLCENLGLENGYLKNVFYGSKGPNFGTKVSNYPPCPKPDLIKGLRAHTDAGGIILLFQDDKVSGLQLLKDGQWIDVPPMRHSIVVNLGDQLEVITNGKYKSVMHRVIAQKDGTRMSLASFYNPGSDAVIYPAPALVEKEAAESKQVYPKYVFDDYMKLYAGLKFQAKEPRFEAMKSIESDVKLDPIATA

SEQ ID NO: 7568 - protein, 665 aa, Zea mays
  misc_feature (121)..(121): Xaa can be any naturally occurring amino acid
  misc_feature (142)..(142): Xaa can be any naturally occurring amino acid
MATMSAASHRCCASSLRALTVLFVLAALVSDVGGRHHHHVCRPYFSCGGFSNISYPFRRQGDPSGCGVQSYELVCTDTDATIRIGSGTYTVLSINSTYSYFWVVDANLDIQSSCPLPWWDXMVRPVLPTHIVGGLSSGLISXYPNSMSIIFVNCSKPIENNDIYEPVPCLSNSSFIYLLTHYSYGYALAEILEPSCGYLAMIYLGGPGIPVPKNTSYPDVVKLMRNGFGLRFPSSIGDRGIRECFAESVRNFLKEPRKYQIVDILMVEELWSCFLDQHGSTNNVVTSVIIDIIKTIPICMWLLKSTHVFCRLVLMPLAVFVFLAHKYWKARITIDAVEKFLRMQQMLVPMRYAYTNIIAITGHFREKLGQGGYGSVYKGVLQPGEVHVAVKMLGNSNCNGEEFISEVATIGKIHHVNVVRLIGFCSEENIRALIYEFMPRGSLDKYIFSSEKSFSWDKLNEIALGIARGLNYLHHGCDMQIVHFDIKPHNILLDNNFVPKVADFGLAKLFPRDDSFVPLSAMRGTIGYIAPEMVSRSFGVISSKSDVYSFGMLLLEMTGGRRNADPHAGSSSQAYYPSLVYRQLSQGDANRISEGVDMHELEKKLCIIGLWCIQMKPQDRPTMSEVIEMLEAGVDGIQMPPRPYFCDEEGDSSYSIISELDTIEE

SEQ ID NO: 7569 - protein, 287 aa, Lactobacillus acidophilus NCFM
MSSDPGAGNLFDRLKNRLSGEKKEKSKDHLEKEIINLHDNHKIDDTEFSMLEGILDFQGKTAREVMVPRTDAFMVDADVSFQDNLNEILREPYSRIPVYKKDKDKIVGIIHIRSVLRKAREKGFKNLDYEDVMTEPLFAPETAELGDLLIEMQQTQRQLAILVDEYGGVTGLATIEDLIEEIVGDIDDEVDHTEVLYNQIAPNKYIIYGKMPLDDFNEQFGTDLKMEDVDTVAGYVINTLKVIPAKGEKLTVDIGNDMTLTTRRMKGSRLLTVLLSINKKKEEDIKD

SEQ ID NO: 7570 - protein, 567 aa, Oryza sativa
MASSALICDTEQWKGLQAHVGEIQKTHLRHLMHDVERCKAMTAEYEGIYLDYSRQRATGETMEKLFKLAEAAKLKEKIEKMFRGDKINSTENRSVLHVALRAPRDEVINSNGVNVVPEVWGVKDKIKQFSETFRSGSWVGATGKALTNVVSVGIGGSFLGPLFVHAALQTDPEAAESAKGRQLRFLANVDPVDVARSIKDLDPETTLVVVVSKTFTTAETMLNARTLKEWIVSSLGPDAVAKHMIAVSTNLELVEKFGIDPKNAFAFWDWVGGRYSVCSAVGVLPLSLQYGFPIVQKFLEGAASIDKHFRSSSFEKNIPVLLGLLSVWNVSFLGYPARAILPYSQALEKFAPHIQQLSMESNGKGVSIDGVQLSFETGEIDFGEPGTNGQHSFYQLIHQGRVIPCDFIGVVKSQQPVYLKGEIVSNHDELMSNFFAQPDALAYGKTPEQLHSEKVPEHLIPHKTFQGNRPSLSLLLPSLSAYEIGQLLAIYEHRIAVQGFLWGINSFDQWGVELGKSLASQVRKSLHASRVEGKPVLGFNSSTTSLLTRYLAVEPSTPYNTTTLPKV

SEQ ID NO: 7571 - protein, 340 aa, Corynebacterium efficiens
MKLAVIGGDGIGPEVTDEALKVLRALRADIETTDLDLGARRYLRNGELLTDEDLALLREHDAILLGAIGAPGSVPPGVLERGLLLKLRFALDHHVNLRPSKLYEGVESPLKNPGEIDFVVVREGTEGAYTGNGGAIRVGTPHETANETSVNTRYGAERVIRYAFELAQSRRRHLTLVHKTNVLVHGGGLWQRTVDEVAREYPEVTVDYNHIDAATIYLVTDPSRFDVIVTDNLFGDILTDEAGAISGGIGLAASGNIDATGTNPSMFEPVHGSAPDIMGKGIADPTAAILSAAMMLRHLGDEANAVRIEEAVARDVAGRDPEAPISTTEVGDRIAAAVVA

SEQ ID NO: 7572 - protein, 966 aa, Alternanthera sessilis
MATVKLEKLTSIDAQLRLLAPRKVSEDDKLVEYDALLLDRFLDILDSLHGSDIRETVQELYEHAAEYERTRDTKKLEELGNMITGLDAGDSIVVTKSFSHMLNLSNLAEEVQIAYRRRTKKTKKGDFADESSAITESDIEETLRRLVVDLNKSPEEVFATLKNQTVDLVLTAHPTQSVRRSLLQKHGRIRDCLTQLYAKDITPDDKQELDEALQREIQAAFRTDEIRRTQPTPQDEMRAGMSYFHETIWKGVPKFLRRVDTALKNIGINERVPYNAPLIQFSSWMGGDRDGNPRVTPEVTRDVCLLARMMAANMYFSQIEDLMFELSMWRCNDELRARAHEIHQYSKSDAKHYIEFWKRIPPNEPYRVILGEVRDKLYSTREHARQLLSNGASDVPEEATFTHVDQFLEPLELCYRSLCACGDRPIADGSLLDFMRQVSTFGLSLVRLDIRQESDRHTDVLDAITKHLGIGSYRDWSEEKRQEWLLSELRGKRPLFGPDLPKTEEIADVLDTFHVISELPSDSFGAYIISMATAPSDVLAVELLQRECRVKDPLRVVPLFEKLADLEAAPASLTRLFSIDWYKNRINGKQEVMIGYSDSGKDAGRLSAAWQLYKVQEELIKVAKEFGVKLTMFHGRGGTVGRGGGPTHLAILAQPPDTIHGSLRVTVQGEVIEQSFGEEHLCFRTLQRYTAATLEHGMHPPSSPKPEWRALLDEMAVVATKEYRSVVFHEPRFVEYFRLATPELEYGRMNIGSRPSKRKPSGGIESLRAIPWIFAWTQTRFHLPVWLGFGAAFKHVIEKDIRNLTMLKEMYNQWSFFRVTIDLLEMVFAKGDPGIAALYDNLLVSEELKPFGEHLRKSYEETKQFLLEVAGHRDLLDADPYLKQRLRLRDPYITTLNVCQAYTLKRIRDPNFHVTVRPPLSKDIMDPDSPAAELVKLNPTSEYPPGLEDTLILTMKGIAAGMQNTG

SEQ ID NO: 7573 - protein, 174 aa, Glycine max
MSDEGERTCPLCAEEMDLTDQQLKPCKCGYEICVWCWHHIMDMAEKDDTEGRCPACRSPYDKEKIVGTAANCERLMKTQKAKSKSSDGRKQLSSVRVIQRNLVYIVGLPLNLADEDLLQRREYFAQYGKVLKVSMSRTAAGVIQQFPNDTCRVYITYSKEEEAVCCIQNVHGIC

SEQ ID NO: 7574 - protein, 186 aa, Oryza sativa
MRPVAELASAPASYAHAANGTAAHSPWQSPVPYLFGGLAAMLGLIAFALLILACSYWKLSGYLDGGSGNGQASGSAAAGEGAEGEKGSAAGAARPALGFREHVVVIMAGDERPTFLAMPATSRPAVELGAAPVASSCGCSHSEEEKKVEEVSSPPLRLMRMKRARGWRALVGAVFLVFWERDITAL

SEQ ID NO: 7575 - protein, 622 aa, Xanthomonas campestris pv. campestris
MANERPAQQSDIKLLISKGLEQGYLTYAEVNDHLPDDLVDPEQIEDIISMINGMGIDVHEVAPDAETLLLNDGNTGNREVDDTAAEAAAAALTALDTEGGRTTDPVRMYMREMGTVELLTREAEIAIAKRIEEGLSQVQAALGTFPLVDRAAAVRLRSAQGRQEAPGRDRGRLQRPDRRSRRCRCSLAAAGRSPLTKMRWTKTQTKTAMTTLPRKKSGPTVRTRWKLPRAWRTWPTSTPSSRRPYVKYGAEHKNVAKAREDMAAIFTTLNVPLTDALVTQLRGVVNGIKDHERKVLHLATTVARMPRKDFIRSWEGNQTNLEWVEDALKRKQKWSSALRDVKDQIVSEQQGSIEMEKANYLTLAEIKDISRAMAYGEAKARKAKKEMVEANLRLVISIAKKYTNRGLQFLDLIQEGNIGLMKAVDKFEYRRGYKFSTYATWWIRQAITRSIADQARTIRIPVHMIETINKLNRISRQMLQQFGREPTPEELAKEMDMPEDKIRKVMKIAKEPISMETPIGDDEDSHLGDFIEDTNVESPIDNTTNINLSETVRDVLAGLTPREAKVLRMRFGIDMNTDHTLEEVGKQFDVTRERIRQIEAKALRKLRHPSRSEQLRSFLDID

SEQ ID NO: 7576 - protein, 333 aa, Thermotoga maritima MSB8
MARVAINGFGRIGRLVYRIIYERKNPDIEVVAINDLTDTKTLAHLLKYDSVHKKFPGKVEYTENSLIVDGKEIKVFAEPDPSKLPWKDLGVDFVIESTGVFRNREKAELHLQAGAKKVIITAPAKGEDITVVIGCNEDQLKPEHTIISCASCTTNSIAPIVKVLHEKFGIVSGMLTTVHSYTNDQRVLDLPHKDLRRARAAAVNIIPTTTGAAKAVALVVPEVKGKLDGMAIRVPTPDGSITDLTVLVEKETTVEEVNAVMKEATEGRLKGIIGYNDEPIVSSDIIGTTFSGIFDATITNVIGGKLVKVASWYDNEYGYSNRVVDTLELLLKM

SEQ ID NO: 7577 - protein, 398 aa, Candida albicans SC5314
MGIDMDLPNMGFTAPNESQSNASEPKSEPKSVPESKPEPKAEQKEEESTSAKDEDTPMTDAQDDTNDNDAKTQADNAKAEGNALYKKRQFDEAIAAYNKAWELHKDITYLNNRAAAEYEKGDYDAAIATCEKAIDEGRDMRADYKLIAKSFARLGNIYLKKDELPEAVKNFEKSLTEHRTPDVLNKLRSTQREIKTRELNAYIDPEKAEEARLQGKEYFTKGDWPNAVKAYTEMIKRAPEDARGYSNRAAALAKLLSFPDAIQDCNKAIEKDPNFIRAYIRKANAQLAMKEYSHVMDTLTEARTKDVELGGKSIHEIDELMNKATYQRFQAIEGETPEQTMERVSKDPEIVQILQDPVMQGILAQARENPAALQDHMKNPEVYKKINMLIAAGVIRTR

SEQ ID NO: 7578 - protein, 557 aa, Burkholderia thailandensis E264
MHSSRIPQMSLLRSRLAPVLPGFVALAACFAAHAAGTPCAPLPAASAHGTPQWRPALHYTPRRNWMNDPNGLVYDDGVYHLFYQYNPHGNFWGDMSWGHATSRDLVHWDEQPVAMTANAREEIFSGSIVADARNTSGLGSANAPPLVALYTSVYKAGSGHAPGTQAQSLAYSLDQGKTWRPYARNPVLTLEPESQHFRDPKVTWYAPGGYWMMTAVVADAHVVKLYRSGDLIHWDFLSDFTLPGVPHRGALWEMPELLPMPLDGDASRTKWVMIVNVNPWSIAGGSGAMYFVGNFDGRTFTPDRVAPANADPAQYAWLDHGADYYAAGTFANAPGGRPIAIAWMSNWDYADRIPTTPWKGTMALPRELAMKTIDGRPQLTFAPARSFDAFARSRPAVRVGSLAVASSLRELGAEMRGDVQRITLTIEPRSARRAGLIVRRSADGRAGVRIVYDTVARTLSVDRSVSGETNFSNAFSKQHIVALPLVNGKLRLDVIVDRASVEVFDGDGRTVVTDLVFPSPADDRVAVFAEGGDATFGDIVVTKLDENAGTRRTCSKS

SEQ ID NO: 7579 - protein, 194 aa, Candida albicans SC5314
MTTADEYKAEGNKYFAAKEFEKAIEAFTKAIEASPEPNHVLYSNRSGSYASLKDFNNALKDAQECVKINPNWAKGYNRIAGAEFGLGNFDQAKSNYEKCLELDPNNAMAKEGLKSVESALSSGGGDDKDLGFGKILNDPNLYTKLKNNPKTSEFMNDPQFVAKLERLKTNPQLGNPDMFSDPRLLTGFCCFNGY

SEQ ID NO: 7580 - protein, 374 aa, Prochlorococcus marinus str. MIT 9211
MAIGMGNNLGASKVEDIQPSQNARIEVIGVGGGGSNAVNRMILSDLKGVSYRVLNTDAQALLQSSAENRVQLGQTLTRGLGAGGNPSIGQKAAEESRADLQQALEGADLVFIAAGMGGGTGTGAAPVVAEVAKETGALTVAIVTKPFGFEGRRRMRQADEGIERLAENVDTLIVIPNDRLKDVNAGAPLQEAFRNADDILRMGVKGISDIITCPGLVNVDFADVRSVMTEAGTSLLGIGFGSGRSRAVEAAQAAINSPLLEASRIDGARGCVLNITGGKDMTLEDMTTASEVIADVVDPEANIIVGAVIDPELDGEVQVTVIATGFNGSQPYKNQKSGAKLSPQAFYRQGASKEAGASIPEFLRLRQIRKDPEN

SEQ ID NO: 7581 - protein, 400 aa, Photobacterium sp. SKA34
MKAFTLPDLGEGLAESEIVQWHINIGDTVKTDQVVVTVETAKATVDVPAPYSGKIVHRYGNEGDVINIGQCLLEIDELLTNTTGVQPEKISTCSASNTSSSTTVVGNISQLDKHVDVDPIYDDVNQTVNLHSIANQHHPLIATPSARLLANKLGVNIKEITGSGSKHLIIDNDIYLAYQQQVPGTEILKGSRRNMAKNMTRSHHDVASVTITEEAHLYYWQKNDDITVNLVKAINNACHIEPALNAWFDADTMTRCLHKTVNIGIAVDSSHGLYVPVLHHAEQYHQEGIRRWIDRSAASIRSRKIDRHQLQKATITLSNYGAIAGIYATPVVTPPQVAIIGAGRIMDKVIMEGERVKTIKVLPLSITFDHRACTGGEAARFIKALVNSLESPPCDNIESS

SEQ ID NO: 7582 - protein, 431 aa, Burkholderia thailandensis E264
MNAPVERGATAAPHHAGSLTILQGTALYIGAVLGTGVIALPALAAEVAGPASLLAWAALVVLSIPLAATFAALGARYADAGGVSTYVRNAFGAKAAAVVGWCFYFAVPAGAPAAAMFGGAYVAAVTGGGHATMIASAAALIAIVAAANAFGVTVSGRMQLVLSALLVALLVAAVLASAPHARAANLHPFAPHGWLAVGQAAALLVWSFAGWEAITHLAAEFRRPAHDLPRSTGIAVAVVGLLYLSVAAASVLVLGPAAGTSGAPLAALIARGIGGNAQLIATAAALLLTLGTMNAYFAGAAKLGAALGRDGALPRWFAQGSQTGGVPRRSLAVLAALAGCALAATVATGTGPKPLVLATSGNFVMVYVLGSAAATKLLPRGGFARRASVVAFLSSLLLLATTGWYLLWPLLLTAAAIGYLRVTDKRTAAKR

SEQ ID NO: 7583 - protein, 481 aa, Sorghum bicolor
MSMHYLAALSVTLLGAILLRWAFKWMNYGRTGGEEGMLLPPGSRGLPFLGETLEFFAASPTLELVPFFKRRLERFGPIFRTNIVGEDMIVSLDPELNARVLQQEERGFQIWYPSSFMRILGADNMVSMLGPLHRHIRNLVLRLFGPEALRLVLLRDVQRSARDELRSWLDRPEVEVRTATSRMIFGVTAKKLISHDDVASGGSLWKCFDAWTKGLMSFPICVPGTAFYRCMQGRKNVMKVLKQQLDERRNGAERKTVDFFDLVIDELDKPNSIMSESIALNLLFLLLFASHETTSMGLTVILKFLTDNPKSLQELTEEHEKIMERRVDPDSDITWEEYKSMKFTSHVIHESLRLANIAPVVFRQANQDVHIKGYTIPEGSKIMICPSAAHLNSKVYEDPLAFNPWRWKDTPEPVGGSKDFMAFGGGLRLCVGAEFAKLQMAMFLHYLVTNYRWKALSKGTMMLYPGLRFPDGFHIQLHKKT

SEQ ID NO: 7584 - protein, 818 aa, Thiobacillus denitrificans ATCC 25259
MDMSTPMGQGPKMKLVMVGNGMAGVRTLEELLKLAPELYDITVFGAEPHPNYNRILLSPVLAGEQTVDDIILNGADWYSENGIRLHLGQKVVRIDRAAREVETADGTRARYDRLLLATGSTPFILPVAGADLPGVVSFRDIADVDAMVDAAGRYKHAVVIGGGLLGLEAANGLMKRGMDVTVVHIGPWLMERQLDEPAARLLQRSLEEKGMKFLLQKHTAELVAGASGRVTGVRFKDGDAIPADLVVMAVGIRPNTELAESAGLHCNRGIVVNDTMQTFDPRIYSIGECVAHRGVAYGLVAPLFEQAKVCANHLAHYGIGRYQGSATSTKLKVTGVDLFSAGDFMGGEGTETILYSDPIGGVYKKLVIRDDKLVGGVMVGDTVDGAWYFSLLRDGKDIGALRDHLMFGQDHCGNLGHQGINRAAAMTDDMEVCGCNGICKGDIVKAIREKGLFTLEDVRKHTKASSSCGSCTGLVEQILAVTAGGDYSAAPKTKSMCGCTDHTHEAVRAAIREHRLLTIPQAMAFLEWRTPNGCASCRPALNYYLISTWPGEAEDDPQSRFINERAHANIQKDGSYSVIPRMWGGQTTPAELRRIAEVAEKYAVPSVKVTGGQRIDLLGVKKEDLPKIWADLDMPSGHAYGKALRTVKTCVGSEWCRFGTQDSTQMGIDLEKVFYKMWAPHKVKLAVSGCPRNCAEVAIKDVGVIGVDSGWEIYVGGNGGIKTEVAQFLVKVKTPDEVLEYSGAFLQLYREEARYLDRTVHYLERVGLDYVKKKVVDDAASRCALYERLLFALSVERDPWLERAQEGKLKHEFETISA

SEQ ID NO: 7585 - protein, 81 aa, Morinda royoc
TPQDEMRAGMSYFHETIWKGVPKFLRRVDTALKNMGINERVPYNAPLIQFSSWMGGDRDGNPRVTPEVTRDVCLLARMMAA

SEQ ID NO: 7586 - protein, 151 aa, Neurospora crassa
MSTAARRRLMRDFKRMQTDPPAGVSASPVPDNVMTWNAVIIGPADTPFEDGTFRLVMHFEEQYPNKPPSVKFISEMFHPNVYATGELCLDILQNRWSPTYDVAAVLTSIQSLLNDPNTGSPANVEASNLYKDNRKEYHKRVRETVEKSWED

SEQ ID NO: 7587 - protein, 610 aa, Mycobacterium tuberculosis CDC1551
MLCAVRPEIGGALIRGEKGTAKSTAVRGLAALLSVATGSTETGLVELPLGATEDRVVGSLDLQRVMRDGEHAFSPGLLARAHGGVLYVDEVNLLHDHLVDILLDAAAMGRVHVERDGISHSHEARFVLIGTMNPEEGELRPQLLDRFGLTVDVQASRDIDVRVQVIRRRMAYEADPDAFVARYADADAELAHRIAAARATVDDVVLGDNELRRIAALCAAFDVDGMRADLVVARTAAAHAAWRGVRTVEEQDIRAAAELALPHRRRRDPFDDHGIDRDQLDEALALASVDPEPEPDPPGGGQSANEPASQPNSRSKSTEPGAPSSMGDDPPRPASPRLRSSPRPSAPPSKIFRTRALRVPGVGTGAPGRRSRARNASGSVVAAAEVSDPDAHGLHLFATLLAAGERAFGAGPLRPWPDDVRRAIREGREGNLVIFVVDASGSMAARDRMAAVSGATLSLLRDAYQRRDKVAVITFRQHEATLLLSPTSSAHIAGRRLARFSTGGKTPLAEGLLAARALIIREKVRDRARRPLVVVLTDGRATAGPDPLGRSRTAAAGLVAEGAAAVVVDCETSYVRLGLAAQLARQLGAPVVRLEQLHADYLVHAVRGVA

SEQ ID NO: 7588 - protein, 119 aa, Arabis alpina subsp. caucasica
PGSFNKILISYESGTVNGQWSAVGRTAVTTTLAGCTAALTTLFGKRLLSGHWNVTDVCNGLLGGFAAITGGCSVVEPWAAIICGFVAACVLLGCNKLAEKLRYDDPLEAAQLHGGCGAW

SEQ ID NO: 7589 - protein, 497 aa, Oryza sativa (japonica cultivar-group)
MVSRRFKPVEECSSDGRSEQTVAADFDGTLVRSRSAFPYYLLVALEAGSVLRAVVLLLSVPFVYVTYIFFSESLAISTLVYISVAGLKVRNIEMVARSVLPKFYAEDVHPESWRVFNSFGKRYIITASPRIMVEHFAKTFLGADKVVGTELEVGKNGKATGFMVKPGVLVGDHKRQAVVKELRDAVPDVGLGDRETDFDFMSICKEAYLVTSRKYSAVPKNQLLSPLILHDGRLVQRPTPLVALVTFLWMPFGFALALLRVYVNLPLPERIVFYTYKLMGIRLIVKGNPPPPPKKGHPGVLFVCNHRTVLDPVEVAVALRRKVSCVTYSISKFSELISPIKAVALSREREKDAENIRRLLEEGDLVICPEGTTCREPFLLRFSALFAELTDRIVPVAINTKESMFHGSTVRGFKLMDPYFFFMNPRPTYEITFLNQLPKELTCSGGKSPIEVANYIQKTLSGQLGFECTAITRKEKYSILAGTDGRVPSKNKEKEKN

SEQ ID NO: 7590 - protein, 454 aa, Brassica napus
  misc_feature (350)..(350): Xaa can be any naturally occurring amino acid
MATHSALAVSRIPVKPRLQSKSAIHSFPAQCSSKRLEVAAFSGLRVSSNGGEASFFDAIAAQITPKAVGTSSPVRGETVAKLKVAINGFGRIGRNFLRCWHGRKDSPLEVVVLNDSGGVKNASHLLKYDSMLGTFKADVKIVDNETISVDGKFIKVVSNRDPLKLPWAELGIDIVIEGTGVFVDGPGAGKHIQAGASKVIITAPAKGADIPTYVVGVNEQDYSHDVANIISNASCTTNCLAPFAKVLDEEFGIVKGTMTTTHSYTGDQRLLDASHRDLRRARAAALNIVPTSTGAAKAVSLVLPQLKGKLNGIALRVPTPNVSVVDLVINVEKKGLTAEDVNEAFRKAAXFRKAAAGPLKGVLEVCDTPLVSCDFRCSDVSTTIDSSLTMVMGDDMVKVVAWYDNEWGYSQRVVDLAHLVAAKWPGEVAAGSGDPLEDFCKTNPADEECKVYEA

SEQ ID NO: 7591 - protein, 509 aa, Nitrosomonas europaea ATCC 19718
MTSYLSEEAGPDLTQGISLSDFGNQPLLRGHVGDEPVILARIGDEITAVGATCTHYGAPLTEGLVVGETVRCPWHHACFSLRSGEALGAPAFDPLPCWQVERDGDRIMVRDKITPKPRSIPVAAANQPANVVIIGGGAAGFACAEMLRRRGYQGQLTMLSEDSDAPCDRPNLSKDYLAGNAPEEWIPLKSDDFYVRNRIDLQLHTTVTKINTTGHTVTTADGRIFPFDRLLLATGAEPVRLPIPGANQSHVFTLRTLADSRAIIERAKHAKAAVILGSGFIGLEAAAALRARELDVHVVSLDKHPLEKILGSEPGDFIRSLHEQHGVQFHMGTSLAHIEPHKVVLSNGKELTADLVIIGVGVRPCVSLAEAAGITVDNGILVNEYLETSVPGIFAAGDVARWRDEASGKTQRIEHWVLAERHGQIAAENMLGANTAFQDVPFFWSAHYDISIRYVGYAGPWDTLEIEGDMAAYDCLISYKTGGKTVAVAAIGRDKQALEYRALIAQQQH

SEQ ID NO: 7592 - protein, 347 aa, Streptococcus agalactiae NEM316
MFVKKGLFVFLLLCILSMWLMIFGVAFYYFGSLHQSLTSRIIYQFVLTVLLTTTAWFMGAYFLAFEGHFKTVFQFQEADGKQIVNCLFQLCFALYAVVMLIGSIIDRVQTKRLLLAVVSWLFLVYTPLAYLIWNSEGVFAKMGVLDFSGGMVVHLSAGLSSYILAHVIGKSEHQHNKVKNDSLFLGMILITFGWFGFNMGPVGEWNSQAIMILLNTIFAIIGGGLAWTLAAKWNGEEEKTGSLLNGIIVGLVTSTAGVGYLLTWQLLAVTFFASLFTYFVTDYVAKAFAIDDVVSSFGMNGIGGLLGSLGVGLFKLSHMPVQLLALATTILLSIIMTYIISKAIFRK

SEQ ID NO: 7593 - protein, 191 aa, Pleurochrysis carterae
GNAVNNMISAQLQGVDFIVANTDAQALANANADNRIQLGVEITQGLGAGAQPKIGEAAAEEALERIDEVLAGCHMAFVTAGMGGGTGTGAAPVIARRAREKGILTVGVVTKPFQFEGGRRMKIAEAGIQELASNVDTLIIIPNQNLFRVANERTTFADAFNMADEVLHSGVRGITDLMVMPGLINLDFADV

SEQ ID NO: 7594 - protein, 526 aa, Streptococcus suis 89/1591
MKFTDLQLSEDILLAVEKAGFETPSPIQEQTIPLALEGKDVIGQAQTGTGKTAAFGLPTLNKIDTNNQAIQALIIAPTRELAVQSQEELFKFGREKGVKVRSVYGGSSIEKQIKALRSGAHIVVGTPGRLLDLIKRKALKLDGVETLILDEADEMLNMGFLDDIEAIIERVPESRQTLLFSATMPEPIKRIGVKFMKEPEHVKIAAKELTNVNVDQYYLRVKEHEKFDTMTRLMDVDQPELSIVFGRTKRRVDELTRGLKLRGFRAEGIHGDLDQNKRLRVIRDFKNDQIDVLVATDVAARGLDISGVTHVYNYDIPQDPESYVHRIGRTGRAGQSGQSITFVSPNEMGYLAIIEDLTKKRMKGLKPATAQEAFEAKKKVALKKIEREMADETIRSNFDKFKKDAIQLAAEFTPEELALYVLTLTVQDPESLPEVEIAREKPLPFKFAPGQAKGKGGRGGRDRDRGGRRDGDRNRDRGGRRGDRNDRNRRDDKFKRDNRRQDNKKPHQRTSSEKKTGFVIRNKGER

SEQ ID NO: 7595 - protein, 127 aa, Oryza sativa
DSIEKLREKLPSLRAEIKDDHKFREIYNFAFAWAREKGQKSLALETALGMWQLLFAERHWPLIDHWCQFLQVRHNKAISRDTWSQLLEFVKTIDPQLSNYDEEGAWPYLIDEFVEYLTENGFVQLRK

SEQ ID NO: 7596 - protein, 79 aa, Brassica napus
MSEESGRPLPKFGEWDVNDPASADGFTVIFNKARDEKKAGNGQDTESPCKDARTERVESYATKANSKKWFCCVTPSPTQ

SEQ ID NO: 7597 - protein, 406 aa, Actinobacillus pleuropneumoniae serovar 1 str. 4074
MKRVVITGLGVISSIGNNKEEVLASLKEGKSGIEFVPEFAEVGMRSQVAGTIKLNPAELIDRKVYRFMGDAAAYAYLSMKEAIEDSGLTEDQVSNDRTGLVIGAGTGSAHSQLVACDAVRGPRGVKAVGPYAVTKTMASSVSACLATPYKIRGVNYSISSACATSAHCIGHAMELIQLGKQDVVFAGGAEELSWECATEFDAMGAVSTKYNDNPTKASRAYDANRDGFVIAGGGAVVVVEELEHALARGAKIYAEIVGYGATSDGYDMVAPSGEGAERCMKQALATVNGEVEYINVHGTSTPVGDVKELGAIKNVFGDKSPAISSTKSMTGHSLGAAGAHEAIYSLLMLENGFIAPSINIETLDEQAEGLNIVTERQDKALTTVMSNSFGFGGTNACLVFQKYNGQ

SEQ ID NO: 7598 - protein, 231 aa, Populus suaveolens
MVLAGSNSFSADKQESSLSSLLSDSSGSQQDSPCSNEKVLLAASRPKKRAGRRIFKETRHPIFRGVRKRNGDKWVCELREPNKKSRIWLGTYPTPEMAARAHDVAALAFRGKSACLNFADSAWRLPAPISNEAKDIRRAAGEAAELFRTSDLGGQVMEDFTTEGRGEVCSSSNDDIRDLPSENVSYIDEEAEFNMPWLLANMAEGLLLSPPHYTGDWNDGEIDADWSLWSS

SEQ ID NO: 7599 - protein, 125 aa, Zea mays
AAPDELQPSAAALLLLLVASPPASAAATLQCAQVAQLMAPCTPYLTGAPGMTPYGVCCNSLAVLSQLAAARADRVAACACAKAAAAGLPAAVDFARAAGLPAACGLSISFTISPDMDCNQVTEEP

SEQ ID NO: 7600 - protein, 648 aa, Oryza sativa
MDFTNLLITVLLLLAPLKYKSDVATASDDEDFFKTCSSHRCSKHGPEIRYPFRLSTQPPSCGAPGMQLSCSGQDTILDHPVLGSCKVTMIYYRHVIMNAIPLVDSSPHCLLHKFISVNQSTAVYRPHTLKAASLVGCSRDSIDTNQYNSIVGPTSCLSLANNASQFWYLAYPYEYMSILPLGCTIVSKDIPMPYSYDKNGPNFDISIFTETAKRVISTGETVFTWYSSNVTSICQQCEHEGRRCGFSSQRDQAFCQHHSMVETRTYPSYTTLIRKLCTCIFPAMLCKIIELVTSSVGTFIVLSLIVATALYISLKSRYNEEIHLKVEMFLKTYGTSKPTRYTFSEVKKIARRFKDKLGHGAFGTVYKGELLNGVPVAVKMLENSVGEGQEFINEVATIGRIHHANIVRLLGFCSEGTRQALIYEFMPNESLEKYIFPHGSNISRELLVPDKMLDIALGIARGMEYLHQGCNQRILHFDIKPHNILLDYSFNPKISDFGLAKLCARDQSIVTLTAARGTMGYIAPELYSRNFGAISYKSDVYSFGMLVLEMVSGRRNTEPTVENQNEFYFPEWIYERVMNGQDLVLTMETTQGEKEMVRQLAIVALWCIQWNPKNRPSMTKVVNMLTGRLQNLQVPPKPFTSSQNQLVI

SEQ ID NO: 7601 - protein, 565 aa, Saccharomyces cerevisiae
MKRTVISSSNAYASKRSRLDIEHDFEQYHSLNKKYYPRPITRTGANQFNNKSRAKPMEIVEKLQKKQKTSFENVSTAMHWFRNDLRLYDNVGLYKSVALFQQLRQKNAKAKLYAVYVINEDDWRAHMDSGWKLMFIMGALKNLQQSLAELHIPLLLWEFHTPKSSLSNTKEFVEFFKEKCMNVSSGTGTIITANIEYQTSELYRDIRLLENEDHRLQLKYYHDSCIVAPGLITTDRGTNYSVFTPWYKKWVLYVNNYKKSTSEICHLHIIEPLKYNETFELKPFQYSLPDEFLQYIPKSKWCLPDVSEEAALSRLKDFLGTKSSKYNNEKDMLYLGGTSGLSVYITTGRIRTRLIVNQAFQSCNEQIMSKALKDNSSTQNFIKEVAWRDFYRHCMCNWPYTSMGMPYRLDTLDIKWENNPVAFEKWCTGNTGIPIVDAIMRKLLYTGYINNRSRMITASFLSKNLLIDWRWGKRWFMKHLIDGDSSSNVGGWGFCSSTGIDAQPYFRVFNMDIQAKKYDPQMIFVKQWVPELISSENKRPENYPKPLVDLKHSRERALKVYKDAM

SEQ ID NO: 7602 - protein, 678 aa, Ralstonia eutropha JMP134
MLTAPTPITGLLAACVVLMAACLLHWHRRLRTMGSQRDVLAAIIDAAPYPMVARDARGRFVAVNVALEDFLDIRRQTMLGKTMEDAGVPPNIVAAVASPIARARASGQRVDETLRVRDAAGEWHDLLFATQPLRLPDGTEAGTVSATIDITAQLAAEQAALEAKRVLDEIADALPVASFQLCAEPGGRYWFSYFSAKAERYRGWSAERLLAVVDGEYPSIHPEDRLKMADALHQSAAAQSAAQFELRILVDGETRWLRLFVGAPARDPSGQLRWSGYAGDATDEHRQLEALAAARAAAEGAAQAKARFLATMTHEIRTPLAAVIGALELLRGSPMSAQQASEVALADNAARLLMEILDGILDYSRLEAGQLALESLPLDLRALVESVMQVHRPAVAAKQLAFAFEADARVAVALLGDPTRLKEILLNLIGNAVKFTAQGGITVRLDLLEDMEEHQRVSLSVADTGVGIDARQQEQLFAPFSQADSSISRRFGGSGLGLAICRRLAERMGGTLTLQSQPGAGTTIVLCVTLPVAMSPVPQGVAGRAGPPPPLEPLDVRKAILVVEDHLPFQVIMRRQLEMLGQDCTVASGGEAALEQLRQQRFALVLTDCQMPGMNGFELASRIRASGPGANADVPIVALTASAGAEVARQCHDAGMDACLAKPVRMDDLRACIARWAR

SEQ ID NO: 7603 - protein, 613 aa, Alkaliphilus metalliredigenes QYMF
MCGIAGWIDYQRDLRDENPIIERMTASLGHRGPDTKSSYISKHGLLGHRRLIVVDPSGGAQPMTKRLGEKTYTMVYNGELYNTEDLRKELKDKGHTFNSYSDTEVLLVAYMEWGENCVQHLNGIYAFGIWNEVEKTVFLARDRLGVKPLFYNLKNGGLFFASEIKALLAHPEIDPVVTTEGLCEVFGLGPARSPGNGVFKDINEIKPGYCLTYTPQGVKIKSYWQLESKPHEDSLGDTIENVRGLLIDAIERQLVSDVPICTFLSGGLDSSAIASVTANAFKRDGRGQLHTYSIDYVDNDQYFKPSEFQPNADSEWIGRMVSHIDSKHHDIIIDTPQLTEALEAAVLSTDLPGMADVDSSLYLFCKNVKQNDTVALSGECADEIFGGYPWFRRREDIEANTFPWSKATTERRNILSGDLRKLPLEEYVATKYEETLREVPRMKGESLETHRMREIFYLNMKWFMITLLNRKDRMSMANGLEVRVPFADHRIVEYAWNIPWEMKYLGQREKGLLRSALKDILPEDVRTRKKSPYPKTHNPAYLKAVQQWMGEIMQDPSSPILQVINQEKVKEIVETGGKSFGKPWFGQLMTGPQLIAYLIQVNLWMKHYNVSIE

SEQ ID NO: 7604 - protein, 304 aa, Enterococcus faecalis V583
MYDVIIIGAGPAGMTAALYASRSNLSVLMIERGAPGGQMNNTAEVENYPGFDSIMGPELAYKMYENVEKFGTENAYGIVMGIEDHGSYKEVICDDKSYEAKAVIIATGCEHRKLGVKGEEEFAGRGVSYCAVCDGAFFKNKRLVVVGGGDSAVEEAIYLTQFASEVVIVHRRDELRAQKIIQDRAFANEKISFVWDTVVEEIVGNEMVVTGVKARNVKTDEVSEIEANGVFIYVGLDPLTEPFKKAGITNEAGWIETDQEMRTKIPGVYAIGDVREKTLRQITTAVGEGGIAGQQVFNYIEELK

SEQ ID NO: 7605 - protein, 119 aa, Barbarea verna
PGSFNKIAVTYATGTYNGQWSAVGRTAVTTTLAGCTAALTTLFGKRLLSGHWNVTDVCNGLLGGFAAITGGCSVVEPWAAIICGFVAALVLLGCNKLAEKLKYDDPLEAAQLHGGCGAW

SEQ ID NO: 7606 - protein, 579 aa, Methanosarcina barkeri str. fusaro
MEKLAKFKALGLSDSMLKALKKKGFEEPTPIQEKVIPLFLKGECDIIGQAQTGTGKTTAFGAPIIEKIPEKSGKVQAIVLTPTRELAIQVSEELNSLKGDKKLHIVPIYGGQSMTQQFRMLKSGVDIVVGTPGRVIDHLERKSLNLENIAYFVLDEADEMLNMGFIDDIKEILKATGPDKRMLFFSATMPKPILGIIKKHMKNYEYVAIKKEDLDVNLTEQIYFEVKESDKFEALCRIIDIEDEFYGLVFCRTKTDTSQLAQKLGDRGYAADALHGDLSQREREKILNRFRKQKINILVATDVAARGIDIMDLTHVINYSLPQDPESYVHRIGRTGRAGKQGTAITFVTSTEYRRLTYIKKTSKSAMKRGRIPEIKDVIKAKRARVKAELEETIKNEEYGDCLEMSEKFLEEYPAEKILAALLKYSFKEMFDESMYTEISGSSYVDRKGKTRLFIAMGKADGMTPEKLCEFIQEETGVSDLKIRDAEIFPHFSFVTVPFAQASALLEIFKDKKRGRKPFIELAQKSKRRSSKSADEYRGGTRNGSRSYSRNDSWNGSRNTNSKSYTRDTRTAKKKYSSY

SEQ ID NO: 7607 - protein, 340 aa, Pseudomonas putida
MARKISYQQAINEALAQEMRRDNTVFHHWRRRGRRCRRPGEDDAWGGVLGVTKGLYHQFPGRVLDAPLSEIGYVGAAVGAATQGLRPVCELMFVDFAGCCLDQILNQAAKFRYMFGGKAVTPLVMRTMYGAGLRAAAQHSQMLTSLWTHIPGLKVVCPSSPYDAKGLLIQAIRDNDPVIFCEHKLLYSMQGEVPEEVYTVPFGEANFLRDGDDVTLVTYGRMVHVALEAANNLARQRSTAKCWTCAPPARWTKTAFSKAWKKPAALVVIDEANPRCSMATDISALVAQKAFGALKGPIEMVTAPHTPVPFSDALEDLYIPDAAKIEAAVRKVIEAARSAA

SEQ ID NO: 7608 - protein, 324 aa, Leptospira interrogans serovar Copenhageni str. Fiocruz L1-130
MAVLTYREALNRAMCEEMDKDPNIFLMGEEVGHYDGAYKVSQGMLSKYGEKRVIDTPISENGFAGVGIGAAMVGLRPIIEFMTWNFSLVAIDQIINSAAKMNYMSAGQFPIPIVFRGAGGAGGRLAAQHSQSFESWYAHIPGLKVIAPYTPSDACGLLKTAIRDNNPTIFIESEVLYGTRGEVPDQEYSIPFGKADIKREGSDITIVSWSRALMYVLPAAEKLSKEGISVEVLDLRSIRPLDEEAIYTSIRKTNRALVVEEGWEVAGFGSQIAYLIQKNSFDDLDAPVERITQEDVPMPYAANLEKASLPSEEKIISKVREMLE

SEQ ID NO: 7609 - protein, 119 aa, Crambe cordifolia
PGSFNKILVTYESGSMNGQWSAVGRTAVTTTLSGCTAALTTLFGKRLLSGHWNVTDVCNGLLGGFAAITGGCSVVEPWAAIICGFIAALVLLGCNKLAERLRYDDPLEAAQLHGGCGAW

SEQ ID NO: 7610 - protein, 390 aa, Wolbachia endosymbiont of Drosophila melanogaster
MTAIVEAFGKPHVNVGTIGHVDHGKTTLTAAITKHYGNFVAYDQIDKAPEERKRGITIATAHVEYQTEKRHYAHVDCPGHADYVKNMIVGAAQMDAAILVVSGVDGPMPQTREHILLAKQVGVGYIVVYINKADVADADMIDLVEMEVRELLSKYGFPGDEVPVVVGSALKALEDDSSEYGKKSIDKLMEKLDEYVAVPPRPVDLPFLLPIEDVFSISGRGTVVTGRIEKGEIKTGEEIEIIGLKATQKTICTGVEMFKKLLDKGSAGLNVGILLRGTKREEVERGQVLAKPGTITPHRKFKAEVYILKKEEGGRHTPFFANYQPQFYLRTTDVTGSIKLLDGKEMVMPGDNVSVEVELQVPIAMDKGLRFAIREGGRTVGSGVVSEILE

SEQ ID NO: 7611 - protein, 119 aa, Lunaria rediviva
PGSFTKILVTYQTGTINGQWSAVGRTAITTTLAGCTAALTTLFGKRLLSGHWNVTDVCNGLLGGFAAITGGCSVVEPWAAIICGFVAALVLLGCNKLALKLRYDDPLEAAQLHGGCGAW

SEQ ID NO: 7612 - protein, 365 aa, Oryza sativa (japonica cultivar-group)
MASSAAAAAATDRIALVKAFDETRTGVRGLVESGVSAVPVIFRHPDPYASVPLAPPGVSIPVVNLSLPAPLAAEAAAGAARDWGFFYLVNHHALVPSGFTAGLLAAVRAFNELPAAERAAHYGRSVDGGVSYSSNVDLYRSGAASWRDTIQVVLGPSRPDAERIPAACRAEVVGWDAHATAVARAVMALLCEGLGLRGETLEEASCLEGKLMVCHYYPVCPEPERTMGIVPHTDPGVLTVLAQDGVGGLQVKHTNEDGESYWVDTKPVPGALVINVGDLLQIMSNDKYKSVEHRVVMKSHEEARVSSAIFYNPGKRGDSVFYGPLPDLISSGNPPKYRNFTMSEFLGAFFKRDLASKALIEHFKI

SEQ ID NO: 7613 - protein, 119 aa, Ptilotrichum spinosum
PGSFTKIMVTYESGTANGQWSAVGRTAVTTTLAGCTAALTTLFGKRLLSGHWNVTDVCNGLLGGFAAITGGCSVVEPWAAIICGFVSALVLLGCNKLAEKLKFDDPLEAAQLHGGCGAW

SEQ ID NO: 7614 - protein, 480 aa, Methylobacter alcaliphilus
MTFHTVEKIGGTSMSDYVAVRDNIILKPVHREDLYQRIFVVSAYGGITDMLLEHKKNGQAGIYGQFANSVNDDGWQASLVALKQAMFAINANIFDTADAIKKADTFIGERLDDAERCLADLQHLCRHGHFSLDAHLSTVREMLASLGEAHSAWNTVQLLQQDGINAVFVDLTGWQTDKHMTLDERIKNAFAEIDLRQQLPIATGYAHSIDGLMSTFDRGYSEMTFSRIAVLTKADEAIIHKEFHLSSADPRLVGEDKAVPIGRTNYDVADQLANLGMEAIHPKAAKGLRQNDIALRVRNTFEPDHAGTLITGDYVSSKPCVEIIAGCKGVYAFEVFDQNMAGEIHNYDREILGQIRRFRAHIVSKDINANTITHYLSASLKTIRRIRDALQEIYPDAEINQQKVSIVSAIGSDMKIPGILAKTVSALAEKQISVLAMHQSMRQVDMQFVIDEDAYTDAMKSLHCHLVEVHDHGIAICLAS

SEQ ID NO: 7615 - protein, 655 aa, Burkholderia sp. 383
MCGIDGFLNSVAFDEETARGTLARMTASLAHRGPDGQGIWVDPEAGIALGHRRLAIVDLSVHGRQPMASACGRYVMVFNGEIYNHRELRAELERAGRAPAWRGHSDSEVLIAAIVAWGVDATLRRATGMFSIALWNRESRVLTLARDRIGEKPLYYGRIGDALVFASELKALRGYPGFDGAIDRDALCLYLRQSSVPAPHTIYRGIHKLPPGTYIQFEHARDTPRLRAYWTLEQAIEDGRAQPFEGNADEAVSQLDAVLRQAVARQMEADVPLGAFLSGGVDSSTIVALMQAQSSTPVDTFTIGFHEAGYDEAGYAKAVARHLGTRHTELYVTADHALGVVPKLPSIYDEPFSDASQIPTFLVSEMTRRHVKVSLSGDGGDELFGGYTRYFLTPRLWRKLHRVPGAVRARIAAALHALRPDHADQLAAVAQGAWGGVEARESATRIGDRLHKLGHVMTAESRIGLYRLLMSSVHHPERLALSGQEPATPLDTVSAWPAHLSFAEQAMAIDTLTYLPTDILAKVDRAAMAVSLETRMPFLDHHVVEFAWRMPADLRLPEGQSKALLRRLLDRYVPSALIDRPKQGFCAPVDHWLRGSLRDWAEALLRPSRLREEGFFDAAAVERLWRQHVTGRMNWQHQLWTVLMFQAWLEAQRAT

SEQ ID NO: 7616 - protein, 959 aa, Photobacterium sp. SKA34
MTNTTFLQALSDDNDFSHRHNGPNALEQQRMLETIGVGSIDQLIAQTVPASIRLTEPMTLPQAQSEAAMLAELKQIAGKNIINKSYIGQGYYNTFTPNVILRNVLENPGWYTAYTPYQPEISQGRLESLLNYQQMIMDLTAMELANASLLDEATAAAEAMTLCKRAGKNKSNAFFISTDLHPQTIDVVTTRAKYIGFEIITGSVEDLAKHDVFGALLQYPASNGELKDLTDIIDAAHDKKTLVAVASDLLALTVLKAPGEMGADVVIGSAQRFGVPMGFGGPHAGFMATKDKHKRTMPGRVIGVSKDAKGNQALRMAMQTREQHIRREKATSNICTAQALLANMAAFYALYHGPEGLKKIGRRVHHFTAVLAAGLRNNGFELENQHFFDTLTIKTGTKTNTLYQKALDAGVNLRKYSDKLGVSIDETTLAEDIEQLLGLFTNQDLKVSMFSDDIAADEFAAIPPACRRSSAYLTHSVFSRYHSETQMMRYMKQLENKDYSLTHGMIPLGSCTMKLNAVAEMIPVTWPEFGQLHPFAPQAQTLGYQELAKNLSEMLCSITGYDAFSLQPNSGAQGEYAGLIAIQRYHEANGDSHRNVCLIPSSAHGTNPASAAMVSMKVVVVGCDELGNIDINDLKAKIEKHRDALSCIMITYPSTHGVYEEAVQEVCDLVHEAGGQVYLDGANMNAQVGLTSPGFIGSDVSHLNLHKTFCIPHGGGGPGMGPIGVKSHLTPFLPGHVEGTNSDEQQYAVSAAALGSASILPISYAYIAMMGEQGLTQATELAILNANYVMERLRPHYPVLYRGTEGRIAHECIIDLRPIKDASGISEEDIAKRLMDYGFHAPTMSFPVAGTLMIEPTESEDIAELDRFCDAMIAIKEEINLVQSGEWPLDDNPLVNAPHSQVDMMESEWNHAYSREVACFPSAHTKAAKYWPSVNRVDNVFGDRNLVCSCPSIENYIED

SEQ ID NO: 7617 - protein, 449 aa, Haemophilus influenzae 86-028NP
MSKVASLDAFLTKVAQRDGYQPEFLQAVREVFTSIWPFLEANPKYRSEALLERLVEPERAFQFRVAWTDDKGQVQVNRAFRVQFNSAIGPFKGGMRFHPSVNLSILKFLGFEQIFKNALTTLPMGGAKGGSDFDPKGKSDAEVMRFCQALMAELYRHVGADTDVPAGDIGVGGREVGYLAGYMKKLSNQSACVFTGRGLSFGGSLIRPEATGYGLIYFAQAMLAEKGDSFAGKVVSVSGSGNVAQYAIEKALSLGAKVVTCSDSSGYVYDPNGFTTEKLAALLEIKNVKRGRVKDYAELFGLQYFEGKRPWEVQVDIALPCATQNELELSDAQRLIKNGVKLVAEGANMPTTIEATEALLAADVLFGPGKAANAGGVATSGLEMAQSSQRLYWTAEEVDAQLHRIMLDIHANCKKYGTIEGQENINYVVGANVAGFVKVADAMLAQGVY

SEQ ID NO: 7618 - protein, 447 aa, Corynebacterium glutamicum
MTVDEQVSNYYDMLLKRNAGEPEFHQAVAEVLESLKLVLEKDPHYADYGLIQRLCEPERQLIFRVPWVDDQGQVHVNRGFRVQFNSALGPYKGGLRFHPSVNLGIVKFLGFEQIFKNSLTGLPIGGGKGGSDFDPKGKSDLEIMRFCQSFMTELHRHIGEYRDVPAGDIGVGGREIGYLFGHYRRMANQHESGVLTGKGLTWGGSLVRTEATGYGCVYFVSEMIKAKGESISGQKIIVSGSGNVATYAIEKAQELGATVIGFSDSSGWVHTPNGVDVAKLREIKEVRRARVSVYADEVEGATYHTDGSIWDLKCDIALPCATQNELNGENAKTLADNGCRFVAEGANMPSTPEAVEVFRERDIRFGPGKATPEAVEVFRERDIRFGPGKAVNVGGVATSALEMQQNASRETCAETAAEYGHENDYVVGANIAGFKKVADAMLAQGVI

SEQ ID NO: 7619 - protein, 509 aa, Bacillus subtilis subsp. subtilis str. 168
MVLDANIKAQLNQYMQLIENDIVLKVSAGEDDTSKDMLALVDELASMSSKISVEKAELNRTPSFSVNRVGEDTGVTFAGIPLGHEFTSLVLALLQVSGRPPKVDQKVIDQVKKISGEYHFESYISLTCHNCPDVVQALNMMSVLNPNITHTMIDGAAYKAEVESKNIMAVPTVYLNGESFGSGRMTLEEILAKMGSGTDASEFADKEPFDVLVVGGGPAGASAAIYTARKGIRTGVVAERFGGQVLDTMSIENFISVKATEGPKLAASLEEHVKEYDIDVMNLQRAKRLEKKDLFELELENGAVLKSKTVILSTGARWRNVNVPGEQEFKNKGVAYCPHCDGPLFEGKDVAVIGGGNSGIEAAIDLAGIVNHVTVLEFAPELKADEVLQKRLYSLPNVTVVKNAQTKEITGDQSVNGITYVDRETGEEKHVELQGVFVQIGLVPNTEWLEGTVERNRMGEIIVDKHGATSVPGLFAAGDCTDSAYNQIIISMGSGATAALGAFDYLIRN

SEQ ID NO: 7620 - protein, 909 aa, Pseudomonas tolaasii
MLRRMGIKGRVLLLTLLPTTLMALLLGGYFTWMQLSELQTQLLQRGEMIAEQLAPLVAPALSTRNTDLLERIATQSLEQPDVRAVSFLAPDRSPLAHARPTMLNQPPVGNSSHLVAASGNDATRYLLPVFGRHRNLAGELIPDEADRLLGWVEVELSHNGMLLRGYRSLFASLLLIAIGLICTAALAVRISRTINSPIGQIKQPVAQLKDGNLETCLAPLGSQELDQLASGINRMAETLQNAQEELQHSIDQATEDVRQNLETIEIQNIELDLARKEALEASRIKSEFLANMSHEIRTPLNGILGFTHLLQKSELSPRHVDYLGTIEKSADNLLGIINEILDFSKIEAGKLVLDSVPFNLRDLLQDTLTILAPAAHAKQLELVSLVYRDTPLAVVGDPLRLKQILTNLISNAIKFTREGTIVARAMVEDEEEDSVQLRISVQDTGIGLSNQDVRALFQAFTEADNSLSRQPGGTGLGLVISKRLIEQMGGEIGVDSTPGEGSEFWISLNLPKTRDDVDDLPSAPLLGRRVAVLENHDVARQALQHQLEDCGLEVTPFNTLESLTNGITSTHQTEQAIDLAVLGVTANDIPPERLNQHLWDLEHLGCKVLVLCPTTEQMLFNQSVPNPNSQLQAKTPCTRKLRRALADLISPPVAQRTREPLSSRAPRVLCVDDNPANLLLVQTLLEDMGAKVLAVESGYAAIDAVKQETFDLVLMDVQMPGMDRRQSTEAIRQWESERHGTPLPVVALTAHAMANEKRALLQSGMDDYLTKPISERQLAQVVLKWTGLALRNQGPERGNDNLGHGVQLLVLDHEEGLAAANKADLAADMLAMLLASLEADRLAITVAREAKDNNALIERIHRLHGATRYCGVAELRAACQRAETLLKQDDAQGHGALDELDMAIGAAGQ

SEQ ID NO: 7621 - protein, 214 aa, Clostridium perfringens str. 13
MNSFMMDIKNNSNDLHAVAEKTGFLKRLLEGKASTESYAEYLYNLYEVYNAIEVNLEKCKDNKVVKDFVLPEIYRAEAILKDLKFLLEENLNTMKPLASTRAYVARINEIGETAPELLVAHAYTRYLADLFGGRTIYGMVKDLYKIDEEGLNYYKYETLSDGSEMKGFVMNYHNKLNNIELNEEMKERFINEVANSYVYNIAISNELAFIRFNR

SEQ ID NO: 7622 - protein, 291 aa, Xylella fastidiosa Temecula1
MLAATDLARILDGRRIADDLLDALKTRVDARVAAGKLPPTLAVVLVGSDPASVVYVRNKRRAAEKVGIKAYDFDLPEATTEAELAALIDRLNADPKIHGVLIQLPLPGIPDAHRLIQRIDPRKDVDGFHPQNVGHLALREFGLRPCTPRGIVTLLGHTDRPVRGRNATIVGVSNHVGRPMGLELLMAGCTVTSCHKFTPPQMLEAAVRQADILIVAVGRPGVIPGEWVKPGAVVIDVGINRLDDGQLVGDVGFESAVKRASWITPVPGGVGPMTVATLMQNTLEAAEATDC

SEQ ID NO: 7623 - protein, 812 aa, Glycine max
MKFILSLMSIILYTLFISSLVVSIAADKSSNSQFQSLSHEETIVSPNGVFELGFFPLGNSNKSYLAIRYKNYSDETFVWVANGSYPINDSSAKLTLHSSGSFVLTHNSNQVWSTSSLKVAKNPVAELLDSGNLVIREKSEANSEDKEEYLWQSFDYPSNTMLARMKIGWDLKRKINRRLIAWKSDDDPTPGDLSWVIVLHPYPEIYMMRGKEKHHRLGPWNGLRFSGMPEMKPNPVFHYKFVSNEEEVTYMWTLQTSLITKVVLNQTSLERPRFVWSEATASWNFYSTMPGEYCDYYGVCGGNSFCSSTASPMCECLKGFTPKSPEKWNSMVRTQGCGLKSPLTCKSDGFAQVDGLKVPDTTNTSVYESIDLEKCRTKCLKDCSCMAYTNSNISGAGSGCVMWFGDLLDIKLYPDPESGQRLYIRLPPSELDSIRPQVSKIMYAISVAAAIGVILAIYFLYRRKIYEKSMAEKNYESYVNDLDLPLLDLSIIIVATNKFSEGNKIGEGGFGSVYWGKLASGLEIAVKRLSKNSDQGMSEFVNEVKLIARVQHRNLVKLLGCCIQKKEKMLVYEYMVNGSLDYFIFDSTKGKLLDWPKRFHIICGIARGLMYLHQDSRLRIVHRDLKASNVLLDDTLNPKISDFGVAKTFGEENIEGNTNRIVGTYGYMAPEYAIDGQFSIKSDVFSFGVLLLEIICGKKSRCSSGKQIVHLVDHVWTLWKKDMALQIVDPNMEDSCIASEVLRCIHIGLLCVQQYPEDRPTMTSVVLLLGSDEVQLDEPKEPGHFVKKESIEANSSSCSSTNAMSITLLTAR

SEQ ID NO: 7624 - protein, 412 aa, Kluyveromyces lactis NRRL Y-1140
MGKEQIRKRQTKKVRKGSQPVANGKSSVVGVSKDGKPEFCAIDTPIERRLQTLSVAWYVECIPLMIIIMLFVWVNPLMWSFVIPYTIYYFIDRTASNGNAVKRHSKWFRSLKVWFYFRDYFPISMHKSTELEPTFTSIDSTELENDASEPGYLDSSQPVLPDKWWNPFREKDETVRPTGPRYIFGYHPHGIAAFGAFGAFATEACNWSKVFPGIPVCLLTLVNQFQIPVYRDYLLALGITSVARKNAMKVLEKNYSIAIVIGGASESLLTNLGSSDIILSKRKGFVKLALQTGNVSLVPVYGFGETDTYKILKLKNDSIIGRIQIWLKENYSFTVPLFFARGVFNYDFGLLPFRHPVNVVVGNPIHIKEKIDHPTIEEIDHYHSLYIEELKRLYDDNKAKFNYSEKTLNIVE

SEQ ID NO: 7625 - protein, 286 aa, Neorickettsia sennetsu str. Miyayama
MLSLKVGTRCSPLALIQARLVERALAPYCARTDLVEVKTSGDIVSDVPLTEVGGKALFLKELEEKLLTGEIDIAVHSMKDVPAFYHDDLEVVPVLKRAIPNDVFVSFRYPNMLSLPNGAVIGTCAPRRVVQLNQRFRVIPLRGNIATRIEKAKNLDGIILAFCALERLGLRRMISEVIHENVMLPGVAQGALCVEFRKKDRFLRELILNISDRETIICTAAERAFLEEINGDCKTALGALAIVKNNILYFTGMLAKDNRPRYFRTSGSCLNAKQVGRRAALALLRM

SEQ ID NO: 7626 - protein, 405 aa, Candida albicans SC5314
MVEKKNFQFLTINSWHLYHNSTFQLIMSGSGKLPGLASDAVLKQSIPVPEDFQEVKGIDYSQDNAYNMRAKDLIKSMSTMGFQASSLSQACDIIDNMRSWRGKHKDTLEEHEQTGEFDDEGYQKTTIFMGYTSNLISSGLRDTLRYLVQHKMVSAIVASAGGVEEDLIKVLAPTYMGDFTLPGKGLRDQGMNRIGNLLVPNDNYCKFEEWIVPILDKCLEEQEEAMKKLGPKGLIAGSEAIWTPSKLIDRLGKEINDESSVLYWAHKNKIPIFCPALTDGSIGDMLFFHTFKASPQQLRLDIVADIRKINSMSMAASKAGMIILGGGLIKHHICNACLMRNGADYAVYINTGQEFDGSDAGARPDEAISWGKIKAEAKSVKVYADVSLVFPLIVAATFASEKPQN

SEQ ID NO: 7627 - protein, 225 aa, Shigella flexneri 2a str. 301
MKQYLIAPSILSADFARLGEDTAKALAAGADVVHFDVMDNHYVPNLTIGPMVLKSLRNYGITAPIDVHLMVKPVDRIVPDFAAAGASIITFHPEASEHVDRTLQLIKENGCKAGLVFNPATPLSYLDYVMDKLDVILLMSVNPGFGGQSFIPQTLDKLREVRRRIDESGFDIRLEVDGGVKVNNIGEIAAAGADMFVAGSAIFDQPDYKKVIDEMRSELAKVSHE

SEQ ID NO: 7628 - protein, 980 aa, Bordetella pertussis Tohama I
MAAYNAPVSNCQFRLTHILPIPQRHGAPTDPFQMNAIRQQSDSAEPLRHDIRLLGRCLGEVIQACEGKRVYDTIETLRRTAVRFRRAGDPADDKLLQARVKQLRGNDPNSVARAFSYFLHLSNIAEDRDQNRRQRERALAGAGPERGSLRQAIESLKAQGVNNARIRRLLSEACVMPVLTAHPTEVQRKSTLDVHREISSLLVQRERELTADELSELDLALIGQVATLWQTRMLRYTRLTVADEIENALSYYRSTFLNVIPRVYGDLARLLNREPVKPFTPPPPPLEPFLRMGSWIGGDRDGNPNVDAATLERALLRQATVLFEHYLQEVHALGAELSASTLLIEADPALLALADAGGDDSPHRRDEPYRRALIGIYARLAATARHLTGQKLARRATVPAAPYDTPDALAADLAVIAASLSARHGAPIARLRLSGLQQAVTVFGFHLATVDLRQSSDVHERVLAELFARAGDGIDGQAVDYLALDEAARVAGRELAHARPLASPWIAYSEETASELAVLRAAAAGRARYGRQAVLQSIVSHTETLSDLLEVLVLQKEAGLIAPPGETIAPGDGLMVVPLFETIPDLQRGPEIMAAWLDLPEVRQRVRLAQGDTQEVMLGYSDSNKDGGFLTSNWSLYQAERALVDVFSARSVRLRMFHGRGDSVGRGGGSSYDAILAQPPGTVAGQLRLTEQGEVIQSKYKDAEVGRWHLELLVAATLESSLAPQAAATSAEDAHMQQHAPAMSFMSELAQRTYRGLVYDTPGFADYFFAATPISEIAGLNIGSRPASRKKGQHIEDLRAIPWGFSWAQCRLMLTGWYGMGSAIEAYLETGAQGAPRSRRARLAQLREMASDWPAFRTLLSNMEMVLAKSDLAIAAGYAQLVPRRGLRERVFGAITAEHGRTLAMLRLLTRRDLLADNPGLMASLRERFAYIDPLNYLQIELIKRHRAAQRRAGDDADIRVPRAIHLTINGIAAGLRNSG

SEQ ID NO: 7629 - protein, 775 aa, Schizosaccharomyces pombe
MSTISEVGPWELGLSLGSGGPNSSRLAKHRETGQLAVVKPIVGWSELTSSQQARIEGELVLLRLIEHPNVLQLIDVISAQEQLFVVVEYMPGGELFDCMLRKGSFTEQDTAKFLWQILCGLEYCHKLHICHRDLKPENLYLDAHGSIKIGEFGMASIQQPGKLLQTSCGSPHYASPEIIMGRSYDGCASDIWSCGIIFFALLTGKLPFDDDNIRSLLLKVCQGQFEMPSNISPQAQHLLYRMLDVDSSTRITMEQIREHPFLSCFVHPNISIPIISAPIQPIDPLIVQHLSLVFRCSDDPMPLYEKLASQSPLVEKTLYTLLSRHLHPPSSAAVDRNRAVVDDLLGTAASNGQQMDEEEIEQAINIPTLAPYPISYAAESVPRPATSASPFLTPVTTSGTFNYSFNATNPQSILQRPATTSSAVPQLPKSVTPGLAYPHDSSMLSSNYRPPSALSPRNFNVSINDPEVQLSRRATSLDMSNDFRMNENDPSIVGNLAASNFPTGMGPPRKRVTSRMSEHTGNRVVSFPRGSAFNPRVTRFNVGNEQFSNNIDNNNYNQPYANATMNNSRRLRTPSGERSMRADLSQSPASYDSLNVPKHRRRQSLFSPSSTKKKLSGSPFQPKRSFLRRLFSSEPSCKCVYASLVASELEHEILEVLRRWQLLGIGIADIIYDSVSASISARIKRQNSLNLKPVRFRISVLAEFFGSQAVFVLESGSSTTFDHLATEFQLIFEDKGFLDNLELSYFQASASRPVSRMSVSSSPFAVFRQRQSVQS

SEQ ID NO: 7630 - protein, 179 aa, Chrysanthemum x morifolium
MASISSSAVATVNRTTSAQASMVAPFTGLKSNVAFPVTKKSNDFSSLPSNGGRVQCMKVWPPLGLKKYETLSYLPPLTETQLAKEVEYLLRNKWVPCLEFELEHGFPYRENNRSPGYYDGRYWTMWKLPMFGCNDASQVLKELNECKKEYPQSWVRIIGFDNVRQVQCISFIAHKPDGY

SEQ ID NO: 7631 - protein, 644 aa, Arabidopsis thaliana
MVLEDRKDGSSLPGRSGSFSKSSPSELDVVDPYKRISSPGSILDAEKVEKKPGGWRAVSFILGNETLERLGSIGLLANFMVYLTKVFHLEQVDAANVINIWSGFTNLTPLVGAYISDTYVGRFKTIAFASFATLLLLNYFCIVRKRMNLLRDHAIEDDKGLITITLTASFPQLHPASCNSQDPLSCGGPNKLQIGVLLLGLCFLSVGSGGIRPCSIPFGVDQFDQRTEEGVKGVASFFNWYYMTFTVVLIITQTVVVYIQDQVSWIIGFSIPTGLMALAVVMFFAGMKRYVYVKPEGSIFSGIAQVIVAARKKRKLKLPAEDDGTVTYYDPAIKSSVLSKLHRSNQFRCLDKAAVVIEGDLTPEGPPADKWRLCSVQEVEEVKCLIRIVPIWSAGIISLAAMTTQGTFTVSQALKMDRNLGPKFEIPAGSLSVISLLTIGIFLPFYDRVFVPFMRRITGHKSGITLLQRIGTGIVFAIFSMIVAGIVERMRRIRSINAGDPTGMTPMSVFWLSPQLILMGLCEAFNIIGQIEFFNSQFPEHMRSIANSLFSLSFAGSSYLSSFLVTVVHKFSGGHDRPDWLNKNLNAGKLDYFYYLIAVLGVVNLVYFWYCARGYRYKVGLPIEDFEEDKSSDDVEMTSKKSMK

SEQ ID NO: 7632 - protein, 213 aa, Brassica napus
MAVGEVMRMEIPAGGDLTVTSPDLHVLAVDDSIVDRKVIERLLRISSCKVTTVESGARALQYLGLDGDTGASDLKDLKVNLIVTDYSMPGLTGYDLLKKIKESSTFREIPVVIMSSENILPRIEQCLREGAEDFLLKPVKLADVKRIKELIMRNEAEDCKTLSHSYKRKFAEYIDDASSPSPSSSSTHDESAAKDFPSSKRMKSEDDKFSSLL

SEQ ID NO: 7633 - protein, 395 aa, Thiobacillus denitrificans ATCC 25259
MLSAETLATIKSTAPLLAEQGRAITDLFYSKLFSEHPELQHIFNMANQAQGEQSRALAESVFMYATHIDALQKLGPMVSRIAHKHASLQVAPEHYPIVGKYLLEAIRDHLGLEDGHPVLGAWSEAYAQLADIFITTEEGIYAANADKPGGWRGFRAFVIDEIRDEAQGIKSIYLVPEDGQAIADFEPGQYLGVKVQVPGHAYDEIRQYSLSDAPGKRTYRITVKAEGDAPAGKVSHHLHGAEPGDRVWVQPPTGDFTVEREDRRLAFIAGGVGITPLLSMLHARAERGADLSDVVFVHCCRDKAHHAMADELRQLARAHGFSYRVAYERGEGGDHQGYLDRDVLTRWLGEPDADVYFCGPRPFMAALNTALGEMGYREERLHYEVFGPSIRLQPH

SEQ ID NO: 7634 - protein, 124 aa, Arabidopsis thaliana
  misc_feature (83)..(83): Xaa can be any naturally occurring amino acid
MAGVMKLACLLLACMIVAGPITSNAALSCGSVNSNLAACIGYVLQGGVIPPACCSGVKNLNSIAKTTPDRQQACNCIQGAARXALGSGSQRWARASWNFLRACGVNIPLQKSAPEPTCKNREGD

SEQ ID NO: 7635 - protein, 681 aa, Frankia sp. EAN1pec
MNLRIRRSAGNKHSVVRRPVTLTAVLTAATAAASILLGLPAPTPASAVGPSYRDTYHFTVPDHWKNDPQRPVYVNGKFYYYYLYNADYDANPTANYGTEWRLATSYDGVVFADQGVAAPKKTNANYDLWSGSTVVDTANTAGFGAGAVVMLVTQMDHPTEAQKLNASGPQAQFLWYSTNGGRNFTPYGEAPVIANGGRADFRDPKVLWDADRNRWVALIAEGQKIGFYTSANLKDWTRVSEYTNSGLGILECPDLFKMRADDGTTHWVMGMSANGYLTGAPSTYAYWTGSFDGTTFTPDTAEPQWADHGFDWYGAVTWEDPTAPLDKRYAIGWMNNWSYPHSTPTWPNDGFNGTDSITRQLALKKYGSTYSLTSQPVAALNNIATQTTNLGTFSVNGTVPLAYSGTSYQLETTVTWSTAQNIGLGLRRSNDGTRHADVGVHDTYSYLNRGGTTNPDTSGQKLESRAPFDMSAQTVHLRILVDRTTIEVFVDDGRFVHSSQVFPDPADAGIALYSLGGTATFSNVTITEFGSVVQRPARLIADFEGSTWGNGWTATGSFASAAPTVASLPGQVGAKVADTYVGGGDPATGTITSPPFTIDRNHLHFSIAGGNHPLGAEPATSVQLLVGGQPVLTSTGDNSSTLRHVEWDVTAYAGQAAQFQILDDATGTWGHLVVDQVVLSD

SEQ ID NO: 7636 - protein, 300 aa, Bacillus cereus G9241
MTAAVYTSRANLSTLMLERGIPGGQMANTEDVENYPGYESILGPDLSNKMFEHAKKFGAEYAYGDVKEVIDGKEYKTIIAGKKEYKARAIIVASGAEYKKIGVPGETELGGRGVSYCAVCDGAFFKGKELVVIGGGDSAVEEGVFLTRFASKVTIVHRRDTLRAQKILQDRAFQNEKVDFIWNHTIKEINEANGKVGSVTLVDVNSGEEKEVKTDGVFVYIGMLPLSKPFVELGITNENGYLETNERMETKVPGIFAAGDVREKMLRQIVTATGDGSIAAQSAQHYVEELLEELKTVSEK

SEQ ID NO: 7637 - protein, 479 aa, Bradyrhizobium japonicum USDA 110
MPPSRTSGLGLSPGIMMSANRSVACLFTALLSTSVLTANAALAQTTVTSAPPASFTLSNGLQVVVIPDHRTPVVTEMIWYKVGSADETPGKSGLAHFLEHLMFKGTEKHPVGEFSQTVLRVGGNENASTSVDYTNYYQRVPKEQLPTMMEFEADRMTGLILKDENVLPERDVVLEEYNMRIANNPDARLNEQIMAALYLNHPYGRPVIGWHQEIEKLDREDALAFYRRFYAPNNAILVIAGDVEAADIRPLVERNFASIPAQPAIPARRVRPQEPDPAAPRTVTLSDPRVEQPSLRRYYLVPSATTAAAGESAALDVMAQLMGSGSNSYLYRALVVDKPLAVSASASYSSVSLDPTQFAISAAPKPGVGFAEVEQVIDGVIADIAQNPIRAEDLERVKTQLIAEAIYAQDNQAVLARWYGGALTTGLSIEDIRSWPDRIRAVTADQVRAVAQKWLEKKRSVTGYLIKDTTATKREEKRS

SEQ ID NO: 7638 - protein, 335 aa, Bacillus subtilis subsp. subtilis str. 168
MAVKVGINGFGRIGRNVFRAALNNPEVEVVAVNDLTDANMLAHLLQYDSVHGKLDAEVSVDGNNLVVNGKTIEVSAERDPAKLSWGKQGVEIVVESTGFFTKRADAAKHLEAGAKKVIISAPANEEDITIVMGVNEDKYDAANHDVISNASCTTNCLAPFAKVLNDKFGIKRGMMTTVHSYTNDQQILDLPHKDYRRARAAAENIIPTSTGAAKAVSLVLPELKGKLNGGAMRVPTPNVSLVDLVAELNQEVTAEEVNAALKEAAEGDLKGILGYSEEPLVSGDYNGNKNSSTIDALSTMVMEGSMVKVISWYDNESGYSNRVVDLAAYIAKKGL

SEQ ID NO: 7639 - protein, 239 aa, Streptococcus thermophilus CNRZ1066
MKLKTVAKYIKKLSKESRSLMSYKIAPSILAADYANFASELARIDASGAEYVHIDIMDGQFVPNISWGADVVASMRKHSKLVFDCHLMVVDPERYVTAYAQAGADIMTIHVEATKHIHGAIQKIKAAGMKAGVVINPGTPVEALIPVLALVDQVLIMTVNPGFGGQTFIPEMMSKVEQVVELRQKGGYSFDIEVDGGVDNKTIAACAKAGANVFVAGSYLFKNHDLTAQVQTLRDAIDA

SEQ ID NO: 7640 - protein, 528 aa, Nostoc sp. PCC 7120
MDAKALWQRYQEWLYFHEGLGLYLDVSRMRFDDAFVKSLLPKFDKAFADMAELEKGAIANPDENRMVGHYWLRNPDLAPTPEIAQEIVQTLEQIEAFAEKIQTGAIHPPKANRFTDIISIGIGGSALGPQFVAEALAPEFPPLKIHFIDNTDPAGIDRILTHLRNHLASTLVLVISKSGGTPEPRNGMIEVKKAYAGQNLDFAQYAVAITSTGSNLDKVAQSEGWLATFPMYDWVGGRTSEMSSVGLVPAALQGIDVRAMLEGAKEMDDATRVPEVKNNPAALLALSWYYSGNGKGEKDMVVLPYKDSLLLFSRYLQQLVMESLGKEKDLDGNTVYQGIAVYGNKGSTDQHAYVQQLREGVPNFFATLIEVLEDRHGASPEIDPGVTSGDYLSGFLLGTRQALYENQRDSITVTIPQVNARTVGALVALYERTVGLYASLVNINAYHQPGVEAGKKAAAVILDLQTKVVGLLQKEKTALSLEQIAEKIGAADQVEAIYKILRHLQANQRGVVFQGNLGQPSSLKISLS

SEQ ID NO: 7641 - protein, 104 aa, Streptococcus thermophilus CNRZ1066
MTKVVTDTTFEQETAEGLVLIDFWATWCGPCLMQAPILEQLSEEISEDELKIVKIDVDENPETAQKFGIMSIPTLLFKKDGEVVKQVAGVHTKEQIKAIVSELS

SEQ ID NO: 7642 - protein, 406 aa, Bacteroides fragilis NCTC 9343
MQYNIHTLSNGLRIIHEPSSSKVAYCGFAVDAGTRDEAENEQGMAHFVEHLIFKGTRKRKAWHILNRMENVGGDLNAYTNKEETVIYSAFLTEHFGRALELLADIVFHSTFPQNEIEKETEVIIDEIQSYEDTPSELIFDDFEDMIFRNHPLGRNILGRPDLLKKFRSEDAMAFTSRFYQPSNMVFFVLGDFNFQKIVRQVEKLLVDLPLVTVENQRTIPPLYVPEQLVVHKETHQAHVMIGSRGYNAYDDKRTALYLLNNILGGPGMNSRLNVSLRERRGLVYTVESNLTSYTDTGAFCIYFGTDPEDVDTCLKLTYKELKRMRDVKMTSSQLMAAKKQLIGQIGVASDNNENNALGMAKTFLHYNKYESSESVFRRIEALTAEGLLEVANEMFAEEYLSTLIYR

SEQ ID NO: 7643 - protein, 602 aa, Coccidioides immitis RS
MPRFAIRPGSLRPFIRPHLAQRFNPRWTKRFAQVKSTGSETATKDPVELDQITTLPNGLRVATESLPGPFAGVGVYIDAGSRYENESLRGVSHIVDRLAFKSTKTRTGDQMLEALESLGGNIQCASSRESLMYQSASFNSAVPTTLGLLAETIREPLITDEEVQMQLAVADYEIRELWAKPEMILPELVNMAAYKDNTLGNPLLCPKERLDQIDRKTVERYRDVFFGPERMVVAFAGVPHAEAVRLTEMYFGDMKRKTAPVLEGVGSEIRVNDADEEVPTMPAFSPSSTTVAETSSSSSSSSSRTSSSASTSRSSSSGMFSKLPFLKSLSTSASARASVSPLSPDLLKPDTLNLNQVSHYTGGFLSLPPIPPPANPALPRLSYIHIAFEALPISSPDIYALATLQTLLGGGGSFSAGGPGKGMYSRLYTNVLNQHGWVESCMAFNLSYTDSGLFGISASCHPQRLTHMIDVICGELQALTLEKGYSALQLAEVNRAKNQLRSSLLMNLESRMVELEDLGRQVQVHGRKIGAMEMCKQIEAVTVADLRRVAKDVFFGKVKNKGMGTGLPTVVLQEGELEGVKLNPMRWNDIQDRINGWYLGRR

SEQ ID NO: 7644 - protein, 718 aa, Arabidopsis thaliana
MMMSDLPHDLVEEILSRLPLISLKAMRSTCKTWNVLSKHRSFANKHIGNVTASGKRDLIMIKDCKVYSIGVNLHGIQNNNNIIDLSIKNKGILHLENLDLIFKEIFNVFHCNGLLLLYGSITDDSIRLVVCNPYWGKREWVKRINNFASFDKLAFGYDKSCGCHKILRVFDSYPNRLEIYNLRSNSRMVSSFPLKWDIAFMQDGVSLKGNTYWYAKDRRSEDCYLICFDFTRERFGPRLPLPQPFIDEFLGSLYVVREEKLAVLVKRWRGGKSEIDIWVTNKIEPDEVSWSKFLKVDNTPRFFLTEGYLIYDEEKVVVFFNKEETEGLKSTVHIAYIVGENGYFRRADLREPLYQPLCRLIYKLSNYKTERQQVTSKRSAMASSTLFKLNSQTFKALNPSPPSLSPPNSRIFHLHFSKSLSQQHSKLNHKSTTTRLFAPLCSSLPSPSSSSPPLSKEEAINQAKTCLLSCLIKPLNNPKLASPKLRKLKQPRFRLEIPILDDDSPSSLSQLAFSIFHDLPISRRGSNVKLLFLWPNPSFIDPAVKAFRSDSIHHIAMSPVSDSLKTALRSADVAIFMAPEKSQLEDVKTASEAFSTKPVVMINPRWLFEEEKSFGDGFIGSFEVIYAFTGLEVRGVFSKRKGVIFKCVRDGVVSGERWNVLVEEEEGNGTLKVVSQFNSRPSIEEVELVLYNLMAMNSPITKSAKFLSDLVSNITGKK

SEQ ID NO: 7645 - protein, 545 aa, Magnaporthe grisea 70-15
MRLHFFTELLAAGSLLLSSVNALEAKLTQQEDKREKCVGMYSRSAWGGDIDPFILVRFNKVEEEGDHRASMLIFEWMDQDLVLFQSSPDTPKKLAICNPENVSAGNCNETHLGEYIVSANVNKESHNIVHTQVVDLKDPKPFNYPIKNTGYYCIFTAEYTRSDYEAIVEFRNAFGELPAAQIPKLPFYGGITILYALVAVFWGLLYYRHRSDILPVQNYITAILIFLVVEMLLTWAFYDYLNRHGSNTLSKFLLVLVAVLNAIRNSFSFFLLLIVCMGYGVVKHTLGKTMIYVRYLAIAHFFFGLVYAVASLVITPDSAGPFVLLIVLPLAGTLTAFYVWTLNSLNLTLKELNERKQHVKEGMYKKLWWCILISIIVIFGFFFFSSFSFTSMRDPDYVPFHWKTRWFMLDGWLNLVYFADVAFIAYVWRPTANNRRFAMSDEIAQEDDGTFDMTNMDIGAPDDSDDEEANIGTKPATSTHTATQTNGGAPSNARSGPTATRNAGPAARDSLDGETIFAVGEDLDKFSDDDEDSEEERGLVKKSNK

SEQ ID NO: 7646 - protein, 500 aa, Triticum aestivum
  misc_feature (117)..(117): Xaa can be any naturally occurring amino acid
  misc_feature (126)..(126): Xaa can be any naturally occurring amino acid
  misc_feature (170)..(170): Xaa can be any naturally occurring amino acid
  misc_feature (251)..(251): Xaa can be any naturally occurring amino acid
  misc_feature (280)..(280): Xaa can be any naturally occurring amino acid
  misc_feature (403)..(403): Xaa can be any naturally occurring amino acid
  misc_feature (414)..(414): Xaa can be any naturally occurring amino acid
  misc_feature (429)..(429): Xaa can be any naturally occurring amino acid
MVLSHAASAGSSDDSVHSTFASRYVRASLPRFRMPENSIPKEAAYQIINDELMLDGNPRLNLASFVTTWMEPECNKLMMDSINKNYVDMDEYPVTTELQNRCVNMIAHLFNAPLGEXETAVGVGTXVGSSEAIMLAGLAFKRRWQNKMKAAGKPCDKPNIVTGANVQVCXWEKFARYFEVELKEVKLSEGYYVMDPEKAVEMVDENTICVAAILGSTLNGEFEDVKMLNDLLVKKNEETGWDTPIHVDAAXSGGFIAPFLYPELEWDFRLPLVKSINVSXGHKYGLVYAGIGWCIWRSKEDLPDELIFHINYLGADQPTFTLNFSKGSSQVIAQYYQLIRLGFEGYRNIMDNCQENAMVLKEGLERTGRFNIVSKDQGVPLVAFSLKDSSRHDEFEISEFLRXRFGWIVPPYTXPPTRKHVTVLRVRLXRRTFSRTLAERLVLDVEKVLHELDALPARVVANGGDAAAASASEREMEKQREVISLWKRAVLAKKKTNGVC

SEQ ID NO: 7647 - protein, 432 aa, Propionibacterium acnes KPA171202
MTRQEWIVLAIAFIFTVLASLNVAMETALQHMSHSKAEELAADGKTAHQRVLDMVADPAPFINTAMLVRVISEVTATALVALLIFGHFDLPWQQVLVVVAIMVLVDFLAWGVAARTLGRQHDTAICTFWSRPWGVLAHVLGPIAALLILIGNALTPGKGYAEGPFTSEAELREMVDYAEASDLIEAGEREMIHSVFELGDTLTKEVMVPRTDVVYIPRTKNLRQAMSLALRSGFSRIPVVGEGFDDIRGVVYLKDLSQRVLDNPDGYATESVESIMRPAVLCPDSKPVDQVLREMQRDRNHLVIVVDEFGGTAGLVTIEDIVEEIVGEIVDEYDAEPTLTEEIEDGVFRISSRLPVDDLGELFDLKVDDDDVETVGGLMAKELSVVPIPGSVIIWEGLEITAEKATGRRHQVDTCLVKRAPEETPDQEYDDE

SEQ ID NO: 7648 - protein, 287 aa, Nitrosomonas europaea ATCC 19718
MNETSPKIGWFEHISTLLSRKPEDREQLLALLHSAYERNLLDADALAMIEGVMQVSEMQVRDVMIPRSQMDTIDISEKPEGFIPFVMETAHSRFPVTDGSKDQIIGVLLAKDLLRYYASREEFNIRDMLRPVIYIPESKKLNILLKDFRSNRSHIAIVVDEYGGVAGLVTIEDVLEQIVGDIEDEFDFDEDDAYIVADTDGHYRVRAITEISSFNETLGATFSDKEFDTIGGLVINKFGRLPKNGESITIEGFNFTVTRADSRRLHLLKVERIEPGVVEDADSHDSV

SEQ ID NO: 7649 - protein, 581 aa, Propionibacterium acnes KPA171202
MTHIQPRPCQLTSPMPSGRYKPFVPHTLPDRTWPDKTLDHAPRWLSTDLRDGNQALVDPMTPARKMRMFELLVGMGYKEIEIGFPSASQTDFDFVRQVIESGILPDDVTISVLTQAREDLIERTMRSLVGAHRATVHMYNAVAELFRRVVFNIDEKQCIDLAHRGTEWVVRYADKYLGDVEFGYEYSPEMFSQTRTDFAIDVCHSVMDVWQPGPGREIILNLPATVEMSTPNTYADQIEYFCRNIRDREHVCVSLHPHNDRGTAIAAAEFAQMAGADRVEGCLFGHGERTGNVDLVTLGMNLVSQGVDAGIDFSDMPKIRRTVEYCTGLPVPARQPYAGDLVFTAFSGSHQDAIKKGLEDLERQAQEQGIGIHEVDWQAPYLTIDPHDVGRTYEAVIRVNSQSGKGGMAYLLKTEHQVDLPRRLQIEFSRAVQNYTDDQAREISHDEIWDLFNREYLQMPGIELVSRTTSTETGTYQLTANLRINGADTQIRGEGNGAMSAFIDALVSLDIVVHVLDYSEHAMTAGGTARAAAYVECEIGDGETSQILWGVGIDPDITQASLKAVVNAVNRSRRQTLDRES

SEQ ID NO: 7650 - protein, 621 aa, Citrus unshiu
MKTKVWALCLILVVHSSWLASANMEGDALHSLRSNLIDPNNVLHSWDPYPCQSLHMVSCYMQMNNSVILVDLENAALSGQLVSQLGLLKNLQYLELYSNNITGPIPSDLGNLTSLVSLDLYLNSFTGPIPDTLGKLSKLRFLRLNNNSLSGPIPMSLTNISSLQVLDLSNNRLSGVVPDNGSFSLFTPISFANNLDLCGPVTGRPCPGSPPFSPPPPFIPPPPISSPGGNSATGAIAGGVAAGAALLFAAPAIAFAWWRRRKPQEFFFDVPAEEDPEVHLGQLKRFSLRELQVATDSFSNKNILGRGGFGKVYKGRLADGSLVAVKRLKEERTPGGELQFQTEVEMISMAVHRNLLRLRGFCMTPTERLLVYPYMANGSVASCLRERPPSQLPLDWPTRKRIALGSARGLSYLHDHCDPKIIHRDVKAANILLDEEFEAVVGDFGLAKLMDYKDTHVTTAVRGTIGHIAPEYLSTGKSSEKTDVFGYGIMLLELITGQRAFDLARLANDDDVMLLDWVKGLLKEKKLEMLVDPDLQNNYVEAEVEQLIQVALLCTQGSPMDRPKMSEVVRMLEGDGLAERWDEWQKVEVLRQEVELAPHPNSDWIVDSTENLHAVELSGPR

SEQ ID NO: 7651 - protein, 237 aa, Sulfolobus tokodaii str. 7
MDIRIIYSIQDAVGKTIKELGYKFEEINEDIIDFRYEKGDVIVVFSRHESSSKIPSLTVHYPGNPIDKTMGGEPKKLGIAFPSLLTSIYREIRKINIDIEKAIEATHHGPTYQHIPIIFVEIGSSKEYWENKELVKTLIEATLRGIDKYKDIECENKIVGFGGTHYTPYFSLLAEKSCVGHIISKYYLAELSNEVILQTVNNTIEKIDTVMFDNVNSKIREKIVNLLATYKLNFKFR

SEQ ID NO: 7652 - protein, 384 aa, Arabidopsis thaliana
  misc_feature (97)..(97): Xaa can be any naturally occurring amino acid
  misc_feature (269)..(269): Xaa can be any naturally occurring amino acid
MTLPELPKDLVEEILSFVPATSLKRLRSTCKGWNRLFKDDKRFTRIHTEKAAKQFQPLTLTKNYRICPINVNLHGTTPSLEVKNEVSLLDPHSKNSXAQFNIDRVFHCDGLLLCTSQKDSRFVVWNPLTGVTKWIELGDRYNEGMAFILGYDNKSCNKSYKAMSFNYLDKDSEIYEFSSDSWRVIDDIIKPPHYMDYFRECFSLKGNTYWLGIDRRRRPPDLRITLIKFDFGTEKFGYVSLPPPCQVHGFEASNLSVVGDEKLSVLVQXGSTSKTEVWVTSKIGEANVVSWSKVLSLYPKPDVGFWHGLSFLLDEEKKVVLCCKSKGWMEEEDEENVYSVGEDTKFILLNFGVQTIGGYSPIIVNYVPSLGQIELAGSKRKRDY

SEQ ID NO: 7653 - protein, 140 aa, Sulfolobus tokodaii str. 7
MTSKDKISMTTEKDPELGKLLEKKAKELMSQKPKGEVIHLDSKNFDSFLASHKIAVVDFWAEWCAPCLILAPIIEELAEDYPQVGFGKLNSDENPDIAARYGVMSLPTVIFFKDGEPVDEIIGAVPREEIEIRIKNLLGE

SEQ ID NO: 7654 - protein, 313 aa, Desulfotalea psychrophila LSv54
MLFKEYGEIPQLPWHKTMSAKIISGTEIRKEILGEIKDAVTEMKDKYGTVPGLVTILVGESPASMSYVSLKIKTALSLGFYEVQESLSVETTEAELLALIEKYNNDDSIHGVLVQLPLPKHINEQNIITAIDPDKDVDAFHPVNIGRLMIGGDDVKFLPCTPAGIQEMLVRSGVETAGAEVVVVGRSNIVGKPIAMMMAQKGIGANATVTIVHTGSRDLATHCRRADILIVAAGVPNLVKPEWIKPGATVIDVGVNRVGTNSETGKAILRGDVDFEAVKEIAGKITPVPGGVGPMTIAMLMKNTLASALAHSS

SEQ ID NO: 7655 - protein, 353 aa, Saccharomyces cerevisiae
MPKRIVYNISSDFQLKSLLGEGAYGVVCSATHKPTGEIVAIKKIEPFDKPLFALRTLREIKILKHFKHENIITIFNIQRPDSFENFNEVYIIQELMQTDLHRVISTQMLSDDHIQYFIYQTLRAVKVLHGSNVIHRDLKPSNLLINSNCDLKVCDFGLARIIDESAADNSEPTGQQSGMTEYVATRWYRAPEVMLTSAKYSRAMDVWSCGCILAELFLRRPIFPGRDYRHQLLLIFGIIGTPHSDNDLRCIESPRAREYIKSLPMYPAAPLEKMFPRVNPKGIDLLQRMLVFDPAKRITAKEALEHPYLQTYHDPNDEPEGEPIPPSFFEFDHHKEALTTKDLKKLIWNEIFS

SEQ ID NO: 7656 - protein, 323 aa, Aquifex aeolicus VF5
MAVSLMQQPDKVYDVIIIGAGPAGTTAAIYTARAGWKTLVLYRAEADGALGVTQKIENYPGVPGPLSGYELLKIMREQAKSFGAEFVRGKVIATDLNSDPKKVYTIDGREFRGKTIIVASGAMERANKFKGEEEFLGRGVSYCGVCDAAFFKDQPVAVIGDDDYAIEEAEFIARFANKVFFVVPGSKIKAPPEVIEHFEKLPNVEILLRHRPIEIVGDQVVKGIKLKDLEKKEEKLLEVNGVFIFLGGTKPSVDFLMGQVEMTEGDCIVVNEEMMTSVPGVFAAGDVLCNEVKQAVVAAAMGCKAALAVDKFLSGKKKIVPQW

SEQ ID NO: 7657 - protein, 506 aa, Aspergillus oryzae
MAVSLSFLTYLFLIVAGVYLARKISRAVQIRQFKKRHGCLPPPRDHHKDPVLGLDEVRSMLRVFREDYLMEYTLEKYRRHGNTFATSVLGDDDIFTAEPENIKTILAVKFKQFDLGETRRRTFHPLLGDGIFAADGPQWEHSRTLLRPSFTRTQIAATDLHERHIQRLISRIPRDGSTVDLQELFFNLTLDTATEFLFGESVESLRLGSSAGSSSFAHHFNVAQDEIAFSMVIAPFDQLIFRPRFRESVREARGYVGNFVKKAIEYRHSLDAEKHAGDTTDSQSRYVFLEELAKETDNPSDITDQILNILLAGRDTTASLLSMVFYNLARRPDIWDLLRSEVATLDGKCPSFEELKQLKYLSWVINETLRLYPVVPSNSRTANEDTFLPVGGGPDGKSPVFVAKGQRVAYDVYVMHRRHDIFGPDAEEFRPERWETIRPGWGYLPFNGGPRICLGQQFALTEASYTTVRIVQSFKEITSRDPEPYRERLALTLASRHGTKVAMVPA

SEQ ID NO: 7658 - protein, 115 aa, Glycine max
MRSLFLLALFLVLAFHHGEAAVTCNNVVGDLYPCLSYVMQGGNAPSTNCCNGVRTLNSQAQTTADRQSVCRCIKNAIGGASYSSSNLNNALSLPAKCGVNLPFSISPSTNCNSIH

SEQ ID NO: 7659 - protein, 413 aa, Pseudomonas fluorescens Pf-5
MALIVQKFGGTSVGSVERIEQVADKVKKFREAGDDLVIVLSAMSGETNRLIDLAKQISGEAKPVPRELDVIVSTGEQVTIALLAMALIKRGVPAVSYTGNQVRILTDSAHNKARILQIDDQKIRGDLKAGRVVVVAGFQGVDEHGNITTLGRGGSDTTGVALAAALKADECQIYTDVDGVYTTDPRVVPKAQRLDKITFEEMLEMASLGSKVLQIRAVEFAGKYNVPLRVLHSFQEGPGTLITIDEEESMEQPIISGIAFNRDEAKLTIRGVPDNPGVAFKILGPISAANIEVDMIVQNVSHDNTTDFTFTVHRNDYLAAQTVLENTAREIGAREVVGDTDIAKVSIVGVGMRSHAGVASRMFEALAKESINIQMISTSEIKVSVVIEEKYLELAVRALHTAFELDAPARQGE

SEQ ID NO: 7660 - protein, 114 aa, Methanosarcina barkeri str. fusaro
MKYIIAMIRPERLDAVKRELQKLEVNRLTVSSVAGYGAQKGHLEIYRATEHEANLLEKVKIEIAVEDHFLKSVIEAIKTGAKGKDGYIGSGKIFVLPLENVIRIRTNETGPEAL

SEQ ID NO: 7661 - protein, 499 aa, Aquifex aeolicus VF5
MEQGYRTISRKTLRPLQKDIRKITFLCKAECSRKRIIQYSIMIKFGTDGWRARIAEEFNFDNVRRVAKAHAEVLKEKGVKRVIVGYDWRFRSEDFAKAVYDVFRSEGLEAKLVGSACTTPMVSFAVKYLGYENGVMITASHNPPAYNGYKIKESFGGSATPEFVKNVEEKVKDIESVEIKEFEPEYQEVRKKYVEKIREFFDMDLFKEKKTLVVHDSMHGTSSGLLDFVLRDTKVSVINIRKDRDPLFGGHPPEPIEKYMEITKEKVRALGAELGIANDGDGDRIALVDDKGNYVNTQLIYAMLLLHLLENKGKRGKVVKTVSTTYLADRICKEFGVPLIEVGVGFKNINEIILKEGGVIFGGEESGGYGIPEYLPERDGIFSALNILELLYLKDKKVSEVVAEIFERFGEAYYKRVDLRVKEKIKGRIKELKENPPERIGEFKVREVKTIDGVKFVFEDDSWLLMRPSGTEPLIRVYAETPTKEEVEKIIQKGLELLK

SEQ ID NO: 7662 - protein, 325 aa, Enterococcus faecalis V583
MAQKTMIQAITDALALELEKDENVLIFGEDVGNNGGVFRATEGLQEKFGEDRVFDTPLAESGIGGLAFGLALQGYRPVPEIQFFGFVFEVFDEIVGQMARTRYRMGGTRNMPITVRAPFGGGVHTPELHSDNLEGLIAQSPGVRVVIPSNPYDAKGLLISSIRSNDPVVYLEHMKLYRSFREEVPDEAYEVPLDKAAVTREGTDVSIITYGAMVREAIKAADSLAKDNISAEIIDLRTVAPLDVETIINSVEKTGRVVVVQEAQKQAGVGAMVVSEISERAVLSLEAPIGRVSAPDTIFPFGQAENIWLPNAKDIEAKAREIVEF

SEQ ID NO: 7663 - protein, 472 aa, Streptococcus thermophilus LMG 18311
MTETNEKVEPKPIDLGEYKYGFRDDVTPVFSTGKGISEDVVRAMSAEKEEPEWMLEFRLKSLETFNKMAMQEWGPDLSGINFDDLTYFQKASDKPARDWEDVPEKIKETFERIGIPEAERAYLAGASAQYESEVVYHNMKEEYDKLGIIFTDTDSALKEHPELFKKYFSKLVPPTDNKFAALNSAFWSGGTFIYVPKGVKVDIPLQTYFRINNEATAQFERTLIIVDEGASVHYVEGCTAPTYTTASLHAAIVEIFALDGAYMRYSTIQNWSDNVYNLVTKRATAKKNATVEWIDGNLGAEVTMKYPSVYLDGEGARGTMLSIAFANTGQHQDTGAKMIHNAPHTSSSIVSKSIARNGGKVDYRGQVTFNKDSKKSVSHIECDTILMDDLSKSDTIPFNEIHNSQVALEHEAKVSKISEEQLYYLMSRGLSEQEATEMIVMGFVEPFTKELPMEYAVELNRLISYEMEGSVG

SEQ ID NO: 7664 - protein, 539 aa, Enterococcus faecalis V583
MAYQFKLPDIGEGIAEGEIVKWFVKPGDTINEDDTLLEVQNDKSVEEIPSPVTGTVKNIVVPEGTVANVGDVLIEIDAPGHEDNDAAPAAPAQEQTPAQPAAVPTTEAAGGFFQFKLPDIGEGIAEGEIVKWFVKAGDTINEDDSLLEVQNDKSVEEIPSPVTGTVKNIVVPEGTVANVGDVLVEIDAPGHNSAAPSVAAPATDAPKAEASAPAASTGVVAAADPNKRVLAMPSVRQYAREKDVDITQVTATGKGGRVIKADIDAFVSGGSQAAPATEAAATEAAPKAEAAAPKAAPKAFTSDLGEMETREKMTPTRKAIAKAMVNSKHTAPHVTLHDEVEVSKLWDHRKKFKDVAAANGTKLTFLPYVVKALTSTVQKFPILNASIDDAAQEIVYKNYFNIGIATDTDHGLYVPNVKNANTKSMFAIADEINEKAALAIEGKLTAQDMRDGTITISNIGSVGGGWFTPVINYPEVAILGVGTIAQEPVVNADGEIVVGRMMKLSLSFDHRIVDGATAQKAMNNIKRLLADPELLLMEG

SEQ ID NO: 7665 - protein, 702 aa, Desulfotalea psychrophila LSv54
MRHILFDLEIYRAQMQRILGVKEENDVFWRALDFAVDAHDDQWRKSGDAYILHPCYVAKILAGEMDITHPEILAAALLHDTIEDVEEVTAEVVGELFGSYVQAIVEGCTKVTHVSDNKQLNSKRTHRKIFSGAALRPEVMLVKLADRLHNLRTLQAMPKRKRQRIADETLDIYAPLATVFGLFCMKREMYNLALLYKFPKQGVKLKGYVRNIGNEPIVTKIAEALRESASELDLDCDVNIRIKDLWAYYDTNSHILLKQIDTPVEILILVDEPSSCYHALGVVNQTFPPIPRTIRDFISNPKPTGYQGLHARTIIEGRKYLVKIRTKEMALQGQRGIFRDWSSKTGKQGKFVQEIQEMFDIIGTDDSFSYRDVIAASGKKEVYTYTPNGDLICLPVNSTVLDFAFRVHTHIGLSCLGALIRSEKVGPAHVLRDGDMVRVIHSDEPIRFEQENLAACKTPRARSELAKGFRARRRKVTTIVGATILRQEMLRYGLPIDLLTSPNIDICLKRFSIDCLDDLHALIGEGRLHLHTIISAIKEDLFDGISPLVDPTGAFNSIEITTLDPVSVKLSSCCKPNPTAKDNFALLTPHGLSVHHKRCKTLEKLNFRRDDAVNITWRTRQTNVRKPQIISIPRASSAEVMSALSNAPIFMKIHEVKLVSVRHEVPEPAWQITFKVENLFELHRVQRYLQKTSLIYQSVFKV

SEQ ID NO: 7666 - protein, 234 aa, Triticum aestivum
  misc_feature (119)..(119): Xaa can be any naturally occurring amino acid
  misc_feature (185)..(185): Xaa can be any naturally occurring amino acid
MAAAAKIAPSMLSSDFANLASEAERMVRLGADWLHMDVMDGHFVPNLTIGAPVIESLRKHTKAYLDCHLMVTNPSDYVEAFGKAGASGFTFHIEVARDNWKELIQNIKAKGMRPGVSLXPGTPVEDVFFPLVEAETPVELVLVMTVEPGFGGQKFMPEMMDKVRTLRKKHPSLDIEVDGGLGPSXTIDAAASAGANCHSSPGASVFGAPDPGRQVHLRRCARAEASHRSRADHL

SEQ ID NO: 7667 - protein, 309 aa, Dehalococcoides sp. BAV1
MITGAAQMDGAILVVSAPDGPMPQTREHVLLIHQVEVPAVVVALNKCDMMDDEELLELVELEVRELLTKNSFPGDEIPVVRVSAIKALECGCGKRECEWCGRIWKLMDAVDTYIPIPPRPVDKPFLMKVEDVFSIKGRGTVATGRVERGVIKGGDEVDLVGLHHEPRKIVVTSLEMFHKILDTAEPGDAVGLLLRGVEREDIERGMVLAKPGSIKPHVNAEAEVYVLSKDEGGRHTPFFNGYKPQFFFGTTDVTGEIHLPEGVEMVVPGDHVKMKISTIYPVAMEKGMRFAIREGGKTVGAGAISQVLA

SEQ ID NO: 7668 - protein, 361 aa, Desulfotalea psychrophila LSv54
MKKIAISTGGGDAPGLNAVIYAVVHACYRKGWEVYGSRNGYAGFLDLEEMIQLRPRDVEGIYAIGGTIIGSTNKGNPFANPVKNLAGETQVIDISDKILRNFKRMNFDCHIAIGGDGSMEIAHQFAEKGMPVIGVPKTIDNDLEETDRTFGFDTAVSTATEALDKLHSTAKSHDRVMVVEVMGRDSGWIALYSGISGGADIILIPEVPFDMDKVCEKITDNDLRGKDYSIVVVAEGAQALNGQRFIKGGLEPGRQEVILGGVGEWVATEIQRRTDKDTRSLVLGHLQRGGSPTTFDRLLALRFGAAAVRLVEQETFDHMVALKNSEMKAVPIADAIRARKKVDLTSDKVQTARDIGICLGD

SEQ ID NO: 7669 - protein, 383 aa, Ustilago maydis 521
MAPHHPASETAGQRAQPHDADDTSLQASSTTTSGEAPSDASKSKSDPTNKENVIRFAPISIPRSRRLQTLGVLFWALLLPICLSIFFLLLSFPILWPVLIPYLVWINFIDKAPENGGRRFSWVRKLPVFRYFAEYFPISMIKTTNLPADRPYIFGYHPHGILGVAAVANLATDATEFPESFPGITPHLLTLATNFTIPLFRDCLMAMGICSVSKRSCEAILRKGKGSAIAIVVGGASESLAAHPGTADLTLKRRLGFIKIAIRNGADLVPVFSFGENDVYEQLSNEEGTKIYALQKQFQALFGFTLPFFHGRGLFNYSVGLMPYRHPIVSVVGKPIHVKKNPNPSKEEIEEVQHRYIEELMNIWETWKDAYAANRTKELTIVA

SEQ ID NO: 7670 - protein, 387 aa, Zea mays
MIPSVRLSPGPAAFSGSSLRSKLPSIPSISSLKPSKYVVSSLKPLYLAPLDGPRTAELKSRRQPLEFRCSASAADDKESKTQVVPVQSEGAQRLKISIYFATWWALNVIFNIYNKKVLNAFPYPWLTSTLSLACGSAMMLFSWATRLVEAPKTDLDFWKVLFPVAVAHTIGHVAATVSMSKVAVSFTHIIKSAEPAFSVLVSRFFLGETFPIPVYLSLLPIIGGCALAAVTELNFNMVGFMGAMISNLAFVFRNIFSKRGMKGKSVSGMNYYACLSIMSLVILTPFAIAMEGPQMWAAGWQKALAEVGPNVVWWIAAQSVFYHLYNQVSYMSLDQISPLTFSIGNTMKRISVIVSSIIIFHTPVRAVNALGAAIAILGTFLYSQAKA

SEQ ID NO: 7671 - protein, 225 aa, Wolbachia endosymbiont of Drosophila melanogaster
MSIKIAPSILSADFAKLGEEVRKISDLGVDYIHIDVMDGNFVPNITIGPSVVSAIRKYSNLPFDVHLMVKSPGKHIESFINAGADIITVHAEVETHLERLIRKIKSYKNVNDEKKPIQVGVSIVPSTSPSVLEYIIHELDIVLIMTVNPGFGGQEFIHSQLNKISTIKKMIQERNLKTQISVDGGINFFNAADIIKAGADILVAGSAIFKAEDIKKAINYLKNPS

SEQ ID NO: 7672 - protein, 818 aa, Frankia sp. EAN1pec
MSILVRLMRSSLTRVRFTAVTVALAAVFTSLLPAVPALAGQVSDYPEFPYPTTDYTEPLRGQFHFSSRGGWMNDINAPLYHNGLYHVFYQHNPHSLLWETMHWGHATSPDLVHWTQKPIALEPGVHPHDLWSGAGVVDTNNTSGLQTGSEAPILVFTATNGVSINYSNDAAKTFQIYNQGQKVVTPAGISRDPKVFWHAPSNRWVMVVWSDAGGNGVNIYTSPNLLTWTFRSRYAADWLYECPDLFSLAVDGDPGNTRWVMTDAGGEYVIGSFDGVTFTPEWTSPQRMDQGHNTFEGTFYAGLTFNHMPDNRIVQMAWMRSNQGSVWTGNASFPAELGLRAYPEGIRLTRNPVGEIASLRVDSQSWVNRDITPDPASDPLTSTFADTYEIIAEFDTATATASRFGFRLHTRSDGTFDRAVTYDRTAQTLYGAPLAPINGRVRMRLLVDRGQLEIFGNDGKLSWTDNVNFNSAPSSQGVQLYAEGGNVQLVSLQFHRLQSAWGSGESTLESNLAGPWHPAGGTWVDTTTGKQGTAGGDGFYLSNQTGADFTYEGDLRLDTAVAAGITFRANSDATQQYTANVDANGLVKLWRPGRDIGIFYTPISQGRTYHLKVVTSGSIIRVYLDHRPTPVIDAVDTAYTSGYFGTNVFGGTGVVQNANVNATGFVSNLGATWRPATGLWTVPGAGVKGRVAGDGFYLSDQTGTNFTYEGDVKVINGVAAALTFRSNADATGHYTANVDTNGLVKLWRPGSVIGVFNTPIVEGRTYHLKVVANGPNIRVYFDGGATPVIDAVDSTYSSGFFGVNVFSGVGVIQNVVTS

SEQ ID NO: 7673 - protein, 930 aa, delta proteobacterium MLMS-1
MPGRLFFGKRLALFLFTAILACTMIKFDDSQAGELAPRLHKEELANGLTVITRQTPATGVATVQIWLEAGSVYEEPHEAGITHFIEHLIFKGTEKRGPGEIAGAIEALGGRINAYTSFEHTVYHATLDARHWEQALEVLADAVLNSVFDPDEIEREKPVIFEEIRMRQDRPELHLFQELLSHAYQQHPYRLPIIGSQESVAAIERDDILAYVKEHYHPGNMTVVVVGDVNPAEVSAQTRKLFGELPAKEETPPRELPVEPPPTDFRFFLEEQAINQTHLTLALPIPAFKHPDTPVLSVLSQILGQGEASRLNERLRHEKGLVYRLGTSLLSLRDPGLLRISATLDAERAPEVLEEILAELFALRHFPVDDEELERARRNLEADFVFNLEQAEGMARVLGTFELLTGDPREQEYLERIRAVEAADIKRVANQYFRKEHLTVGLLTPLAASLELDRRQLTEIMVRAAERARKQVPDRRASDLPPHTHRFELDNGLTLLVRERPDVPTVAMRAVFPGGLRGETPATNGAFAFLAELLPRGAGELGARQMARTIADLAGELEGFSGRNTFGLKGDFLARFFDQGLLLLRDVIKKPAFDAEEAEKIRGELLANLRRQEDALPSVAIRELNRLLFRGHPYALNTMGSATSLRELELATLKEIYQDHARPDKMVLSVVGDIDAEGVRRQVEELFGNWQAPPEVDTQVVETLLPPEPPLKPEMIELTREREQVHIVFGFLGTTLTDPDRYPLEILDQVLSGQSGRLFTELRDRQGLAYSLSSFALLGTDTGSFGVYIGTSPEQREQAIKEIWSQLYRLRNEPISADELKRARNVLVGNYHLGLQGNGAQAMEMALNETYGLGLDFGQRYPAALEAVSAAEVREAARRYLQPERYVMVTVGGSEAPPTDEPADPVVPPEQPPAKAEGQANDREGSHDGE

SEQ ID NO: 7674 - protein, 409 aa, Actinobacillus pleuropneumoniae serovar 1 str. 4074
MTIEILTPVLPESVADATVATWHKKVGDTVKRDEVLVEIETDKVVLEVPAPNDGVLAEISQEQGATVTSKQLLGKISTVQAGDFTQETIKQTNEATPADRKSAAIEYDHSDADSQGPAIRRLLAEHNIEAHLVKGTGVGGRITREDIEHYLAQRQVQETKQAMASEHNTVSTVAYSARSEKRVPMTRLRKRIAERLLEAKNTTAMLTTFNEVDMQPIMSLRKTYGEKFEKQHGVRLGFMSFYIKAVVEALKRYPEINASIDGDDVVYHNYFDISIAVSTPRGLVTPVIRNCDKLSMADIEKTIKALAEKGRDGKLTVEDLTGGNFTITNGGVFGSLMSTPIINPPQSAILGMHAIKDRPVAVNGQVVIRPMMYLALSYDHRLIDGRESVGFLVAVKDLLEDPTRLLLEI

SEQ ID NO: 7675 - protein, 827 aa, Actinobacillus pleuropneumoniae serovar 1 str. 4074
MELNRRDFMKANAAMAAAAAAGMTIPVKNVYAADDGIRWDKAPCRFCGTGCSVLVGTKDGRVVATQGDPDAEVNRGLNCIKGYFLSKIMYGADRVQTPLLRMKDGKFHKEGDFTPVSWDQAFTIMAEKVKDILKKKEPNSVGMFSSGQTTIFEGYAKVKLWKGGLRSNTIDPNARHCMASAAVAFMRTFGMDEPMGCYNDIEKTDAFVLWGSNMAEMHPILWSRISDRRLSDDKVKVVVMSTFEHRSFELADTPIIFKPHSDLAILNYIANYIIQNDKVNWDFVNKHTKFKRGETDIGYGLRPDHPRQKAAKNAKTAGKMYDSDFEEFKKIVEPYTLEKAHEISGVPKDQLETLAKMYADPKQTLVSFWTMGFNQHVRGVWVNHMVYNVHLLTGKISTPGCGPFSLTGQPSACGTAREVGTFVHRLPADMVVTNPKHVEIVEKAWKLPKGTIPTVPGYPAVMQSRMLKDGKLNFLWQLCTNNMQGGPNINEEIFPGWRNPENFIVVSDPYPSVSAVAADLILPTCMWVEKEGAYGNAERRTQFWRQQVKGPGESKSDLWQIVEFSKYFKTDEVWDEALLAQMPEYRGKTLYEVLYKNGQVDKFDTPTNIPGYINDEAEHFGYYLQKGLFEEYAAFGRGHGHDLADFDTYHQVRGLRWPVVDGKETLWRYREGFDPYVKAGEGVSFYGYPDKKAIILGVPYEEPAESPDEEYDLWLCTGRVLEHWHTGTMTRRVPELHRSFPNNLCWMHPDDAKARGLRHGDKVKLITRRGEIITHLDTRGRNKCPKGLIYTTFFDAGQLANKLTLDATDPISGETDYKKCAVKVVKA

SEQ ID NO: 7676 - protein, 448 aa, Rhodospirillum rubrum ATCC 11170
MRYLPHSEADRAAMLATIGAASVEDLFRDVPREALDQAAFDALPDHGGEMEVERALSALAARNLTAGSVPCFLGAGSYRHHVPAAVDALIQRGEFLTSYTPYQAEVSQGTLQYLFEFQTQVALITGMEVANASMYDGATACAEAAAMAVRITRRRKVLMAGGLHPHYTATTQTLLACLGHEGEGLPPDPLALGDLIGRVGSDTACVIVQNPDFFGRLRDLSPLAEACHAAGALLVVAVCEPVSLGLVAPPGAMGADIVVAEGHALGSPTGFGGPGVGLFATREKYLRQMPGRLAGETLDESGKRGYVLTLSTREQHIRREKATSNICTNSGLIALAFTIHMTLLGEAGFTRLAWINHANAVALAEKLARVKGVKVLPETFFNEFTLRLPKPAAEVVEALAARSILAGVPVSRFLPTYPELANLLLVNATELTTPEDADALVAALKEVL

SEQ ID NO: 7677 - protein, 478 aa, Oryza sativa (japonica cultivar-group)
MELGVPLPRRPVPGSYGVPFVSAVRDRLDFYYLQGQDKYFESRAERYGSTVVRINVPPGPFMAREPRVVALLDAKSFPVLFDVAKVEKRDVFTGTFMPSTSLTGGYRVCAYLDPSEPNHAKIKQLLLSLLVSRKDAFVPVFRSNFGALLDTVESQLASGGGKSDFTALNDATSFEFIGEAYFGVRPSASSSLGTGGPTKAALWLLWQLAPLTTLGLPMIIEDPLLHTLPLPPFLISSDYKALYAYFAAAASQALDAAEGLGLSREEACHNLLFATVFNSYGGFKLLLPQILSRVAQAGEKLHERLAAEIRSAVADAGGNVTLAALEKMELTTSVVWEALRLDPPVRFQYGRAKADLEIESHDASFAIKKGEMLFGYQPCATRDPRVFGATAREFVGDRFVGEEGRKLLQYVYWSNGRETENPSVDNKQCPGKNLVVLVGRLLLVELFLRYDTFTAEAGKKVVITGVTKASTSAVNRTA

SEQ ID NO: 7678 - protein, 123 aa, Ipomoea batatas
MAAATSSEEGQVIACHTVDHWKEQFAKGVETKRLVVVDFTASWCGPCRMIAPILAEIAKKMAHVIFVKVDVDELQAVAAEYKVEAMPTFVFLKDGKEVDRMVGAKKDDLQNCITKHAAAVMTA

SEQ ID NO: 7679 - protein, 472 aa, Escherichia coli
  misc_feature (450)..(450): Xaa can be any naturally occurring amino acid
MVTINTESALTPRSLRDTRRMNMFVSVAAAVAGLLFGLDIGVIAGALPFITDHFVLTSRLQEWVVSSMMLGAAIGALFNGWLSFRLGRKYSLMAGAILFVLGSIGSAFATSVEMLIAARVVLGIAVGIASYTAPLYLSEMASENVRGKMISMYQLMVTLGIVLAFLSDTAFSYSGNWRAMLGVLALPAVLLIILVVFLPNSPRWLAEKGRHIEAEEVLRMLRDTSEKAREELNEIRESLKLKQGGWALFKINRNVRRAVFLGMLLQAMQQFTGMNIIMYYAPRIFKMAGFTTTEQQMIATLVVGLTFMFATFIAVFTVDKAGRKPALKIGFSVMALGTLVLGYCLMQFDNGTASSGLSWLSVGMTMMCIAGYAMSAAPVVWILCSEIQPLKCRDFGITCSTTTNWVSNMIIGATFLTLLDSIGAAGTFWLYTALNIAFVGITFWLIPETXNVTLEHIERKLMAGEKLRNIGV

SEQ ID NO: 7680 - protein, 178 aa, Arabidopsis thaliana
  misc_feature (74)..(74): Xaa can be any naturally occurring amino acid
  misc_feature (116)..(116): Xaa can be any naturally occurring amino acid
  misc_feature (125)..(125): Xaa can be any naturally occurring amino acid
  misc_feature (171)..(171): Xaa can be any naturally occurring amino acid
SGIFGANHPSGLKTQWSFHPWFPKISVSFPVTRKARDDITSITSNGGRVSCMKAWPPIGKKKFETLSYLPDLSXTVELVNEADYLLRNKWIPCVEFELEHGFVYREHGISLGYYDXRNWTSLKLXLVGGTDSAQRATEVEDCQKEYPGAFFLIIGFDNTRQVQCISFIAHXPPSFTEA

SEQ ID NO: 7681 - protein, 648 aa, Triticum aestivum
  misc_feature (236)..(236): Xaa can be any naturally occurring amino acid
  misc_feature (582)..(582): Xaa can be any naturally occurring amino acid
MLSARTAAASPAASLWKRGDGAGGRGDGCTSCLEVRRRAAAVTVRAAQPKRVEAVAMESAAETAEAEKEVAAEKEVAAAGGGVEDKYGEDRATEELPVTPWAFSVASGYTLLRDPHHNKGLAFTERERDAHYLRGLLPPGVVSQDLQVKKIMHNLRQYKVPLQRYVAMMDLQERNERLFYKLLIDNVEELLPVVYTPTVGEACQKYGSIFRRPQGLYVSLRDKGKVIDVLRNWPEXRNIQVIVVTDGERILGLGDLGCQGMGIPVGKLSLYTALGGVRPSACLPITIDVGTNNEQLLNDEFYIGLRQRRATGEEYHELMEEFMDAVKQIYGEKVLIQFEDFANHNAFDLLAKYSKSHLVFNDDIQGTASVVLAGLLSSLKVVGGTLAEHTYLFLGAGEAGTGIAELIALEISKQTNAPIEECRKKVFLVDSKGLIVSSRKNSLQPFKTSWAHEREPVTTLLDAIKSIRPTVLIGTSGVGRAFTKEVIEAMASFNERPVIFSLSNPTSHSECTAEEAYKWTKGRAVFASGSPFDPVEYDGKIHVPGQANNAYIFPGFGLGVVISGAIRVHEDMLLAASETLAXRATKENFDKGSIFPPFTNIRKISALIAASVAAKAYELGLATRLPRPRDLEKYAESCMYTPVYRSYR

SEQ ID NO: 7682 - protein, 191 aa, Triticum aestivum
  misc_feature (3)..(3): Xaa can be any naturally occurring amino acid
  misc_feature (155)..(155): Xaa can be any naturally occurring amino acid
LPXDVRRVIYLDSDVIVADDIRTLFSVDLAGHVVGAPEYCHANFTNYFTDTFWMDRALSGTFHGRRPCYFNTGVMVMDVDQWRTGGYTRRVEGWMAVQKQKRIYHLGSLPPFLLVLAGDIQAVDHRWNQHGLGGDNVKGRCRGLHPGPISLLHWXGKGKPWHRLDARRPCTVDYLWAPYDLYRPSSPVLEE

SEQ ID NO: 7683 - protein, 242 aa, Triticum aestivum
MRKAYRDSLKVLEADIQHANTLATEFPREYDGACLQMRLSFSPAAHIFLFLVQWTDCSLAGALGLMRILIYKVYVDGTTTMSTHERKASIKEFYAVIFPSLLQLQRGITDMEDKKQKAVCMERYRRRDEDETSSLSDVDAEREEECGICMEMNSKVVLPNCTHAMCLRCYQDWNSRSQSCPFCRDNLKKTDPGDLWIYVEDDDVVDMETVSRENLRRLFMYINKLPLIVPDVIFSVYDSHIK

SEQ ID NO: 7684 - protein, 172 aa, Zea mays
LLPLLSPGPRPAISLKEKSAAMKTTSSGIAVVLLVAMLAVQSAVADISCSDVLNDLSPCLPFLQGKAAKPSESNNQCCDGVRTLYAAADTRPDRQATCRCLKAAYVQVHAVLSAAQELPGDCGLSLSYNITPDIDCDKFQSEESLASPSSNRTKNDRMKGYCSLTRIHTTGW

SEQ ID NO: 7685 - protein, 354 aa, Arabidopsis thaliana
MWQMNLGSDDTMGVDGSYPERHGEPDCAYYIRTGLCRFGSTCRFNHPHDRKLVIATARIKGEYPERIGQPECEFYLKTGTCKFGVTCKFHHPRNKAGIDGSVSVNVLSYPLRPNEDDCSYFLRIGQCKFGGTCKFNHPQTQSTNLMVSVRGSPVYSALQSLTGQPSYSWSRTSFVANPPRLQDPSGFASGSQGGLFSSGFHSGNSVPLGFYALPRENVFPERPGQPECQFYMKTGDCKFGTVCKFHHPRDRQTPPPDCVLSSVGLPLRPGEPLCVFYSRYGICKFGPSCKFDHPMRVFTYNNNTASPSPSSSLHQETAITTELRNLLVSSSVEAKPTSLPETTSAKDTIVDAQH

SEQ ID NO: 7686 - protein, 485 aa, Emiliania huxleyi
MEKQTNDSEKVLEEIVVTPYKYGFKTEIENENFPKGLNQEIVDQISRKKDEPLFMSQFRAQAFSQWQKMPSPDWAYLGIPPIDYQNIQYYSVPKTKKKLGSLDEVDPELLKTFDKLGVSLNEQKRLTNVAVDAVFDSVSIGSTFKVELQRAGVIFCSFAEAVERYPELIKKYLGSVVPIGDNFFAALNSAVFSDGSFCYVPKDVKCPMELSTYFRINNEEAGQFERTLIVVEDRGEVGYLEGCTAPQFSTNQLHAAVVELIAFEEAVIKYSTVQNWYAGDENGIGGVYNFVTKRGLCSGRKARIAWTQVETGSAITWKYPSCILAGDSSIGEFYSVALTTNKQEADTGTKMIHLGSNSKSRIISKGISTGNSKNSYRGLVKVSPRAINTQNYSQCDSLLIGKDSSANTFPYLEIQNSETKIEHEASTSKIAEEQLFYLLQRGISMEEAVALMVNGFCKEVFNELPFEFASEADRLLNLKLEGSVG

SEQ ID NO: 7687 - protein, 125 aa, Methanosarcina barkeri str. fusaro
MKEITAIIRMNKAQRTKDVLLECGFPSFTVRRVMGRGKQRGLCHEFNPPLPDPEKEAETCIRFIPKRMFTIVVDDENVSEVVQKIIEINQTGNAGDGKIFVSDVTEAIRIRTGESGEATVNKELV

SEQ ID NO: 7688 - protein, 507 aa, Isatis tinctoria
MTSVNVKLLYHYVITNFFNLCFFPLTAIVAGKASRLTTNDLHYFYYSHLQHNLLTITLLFAFTAFGSVLYILTRPKPVYLVDYSCYLPPPHLKSSVSKVMDIFYQVRKADPLPNVACDDSSWLDFLRKIQERSGLGDETYGPEGLLQVPPRKTFAAAREETEQVIIGALENLFENTKVNPKEIGILVVNSSMFNPTPSLSAMVVNTFKLRSNIRSFNLGGMGCSAGVIAIDLAKDLLHVHKNTYALVVSTENITYNIYAGDNRSMMVSNCLFRVGGAAILLSNKPGDRRRSKYELVHTVRTHTGADDKSFRCVQQEDDESGKTGVSLSKDITGVAGRTVKKNIATLGPLVLPLSEKFLFFVTFMAKNLLKDKIKHYYVPDFKLAIDHFCIHAGGRAVIDVLESNLGLAPIDVEASRSTLHRFGNTSSSSIWYELAYIEAKGRMKKGNKVWQIALGSGFKCNSAVWVALRNVKASTNSPWEHCIDRYPVKIDSDSAKTSETRVQNGRS

SEQ ID NO: 7689 - protein, 512 aa, Zymomonas mobilis
MESPSYKNLIKAEDAQKKAGKRLLSSEWYPGFHVTPLTGWMNDPNGLIFFKGEYHLFYQYYPFAPVWGPMHWGHAKSRDLVHWETLPVALAPGDLFDRDGCFSGCAVDNNGVLTLIYTGHIVLSNDSPDAIREVQCMATSIDGIHFQKEGIVLEKAPMPQVAHFRDPRVWKENDHWFMVVGYRTDDEKHQGIGHVALYRSENLKDWIFVKTLLGDNSQLPLGKRAFMWECPDFFSLGNRSVLMFSPQGLKASGYKNRNLFQNGYILGKWQAPQFTPETSFQELDYGHDFYAAQRFEAKDGRQILIAWFDMWENQKPSQRDGWAGCMTLPRKLDLIDNKIVMTPVREMEILRQSEKIESVVTLSDAEHPFTMDSPLQEIELIFDLEKSSAYQAGLALRCNGKGQETLLYIDRSQNRIILDRNRSGQNVKGIRSCPLPNTSKVRLHIFLDRSSIEIFVGDDQTQGLYSISSRIFPDKDSLKGRLFAIEGYAVFDSFKRWTLQDANLAAFSSDAC

SEQ ID NO: 7690 - protein, 485 aa, Aeropyrum pernix K1
MLGPPSREKWSSDFPRWFDWVIETAEVYDYGRYPVKGMGVWMPYGFQIRRRVLEVVRGLLDSTGHEEVLFPLLIPEHLLRRESEHIRGFEGEVYWVTHGGREELDVKLALRPTSETSITYMETFWIKSYRQLPKKYYQVVSIFRYETKATRPMIRLREVTTFKEAHTVHESFEDAERQVLEAIEVYKAIFDRLLIPYVISKRPEWDKFAGALYTIAFDTIMPDGRALQIGTVHHLGQSFTRAFDFRIQMRDERLDHPWQTSYGVSDRVVASLIAVHGDDRGLVIPPSVAPIQVVVIPITPGDEEKRGKVLTYTAKAAEALEKAGLRVHVDDREWERPGAKFYYWEAKGVPIRVEIGLREAEQDTLTIARRDTLEKTEVPLGEAGNRIRELMAQIESSMRERAKSFFGERLLRTESLEEARDWVEGRRGIAEIPWCGRESCGLEMEERVNGKVLGTPWPEEPVEEGKRCPLCGRPAVAWIRLAKTY

SEQ ID NO: 7691 - protein, 137 aa, Thiobacillus denitrificans ATCC 25259
MRLLHTMLRVGDLDRSIDFYTRVLGMTLLRRKDYPDGKFTLAFLGYEPEDRAAVLELTYNWGVDRYEIGTGYGHIAIEVDDAAAACTAAADKGVRILRPAGPMANGSTVIAFVEDPDGYPIEFIQKGTAGWVKEWAE

SEQ ID NO: 7692 - protein, 612 aa, Chromobacterium violaceum ATCC 12472
MFEFVQNNKTVIQVILGAVALTFVGFGVGSYSSATDDPYLVKVGKTKIYKRDLDRALEGQPSDPATRQAALENLIRQELLLAEARDHGAAVSPDQLRKAIASIPAFQENGQFSAQRYSEFLKSRYPNPEAFEADISRDILLQSQLSSVAGTQFVSNTVVTRVAGLLGEGRELQPLVLKPSDFASEVKTDAAAIKAYYDANAKRFSLPEQVKLDYVVLSQDALAQGIKVSDAEVQKYYDQHKADLAGEQRRASHILLTVAKDAKPEQKAKVKAEAEAILKEVRVNPAKFAELAKAKSQDPGSAEKGGDLGFFGHGMMVKPFDDAVFKMKPGQISDLVETEYGFHIIRLDAVKSQSLDDVKGAVVDKLQKQKAAALFHEQAGKLNEIAYQQADSLKGVVDALKLEVKHSDWVRRNQPSQDELLGNAKLLSAVFSDDVLKKKHNSEVVDIGGNRLVVARIAEHQPERQQPLADVTDAIRKELVERDGAKLADKKGQALLAELKAGKGVDAQKWGPAATVSRRAAAGMPAADVRAVFAVAGSKLPGFAGVRHDTGEYVIYRVNKVIPAPAVTDADKAQLGNVLGELSANSQLASYLKALREKYPVTAGKQSLTDSN

SEQ ID NO: 7693 - protein, 396 aa, Methanosarcina barkeri str. fusaro
MIPEASYDVVIVGAGPAGSTSALYAAKNGASVLLLDKKREIGSPIQCAGFLPDASEVQALLHEARLPDTLKNYPDSCVLQRIDTQRIVTPNCNIKEFAVKGAVLDRRRYDQFLAEQATIAGAELMIKTRVTKIEGTTVETSGVFGKYKIKAKAIIGADGPNSLVAKLKGLALKPESRETSVALEYQIRNVDIDPSSLEMYFGKDFVPGGYAWIFPEGQDRANIGIGIRSGVAENGVSAKEYLHRFMRNHPLAGPKLKNCIIMNVIAGIIPVNGAPERTATENTLIVGDAAGHIFATNGGGIPPAMIAGKVAGETAAEFAAGKCRLEEYDRRWRAQFGSALETSVQARKLMDGIMKSDTLMNAAFKFISPEQMKVMQCGKLPGPVKLGLQALNRGKK

SEQ ID NO: 7694 - protein, 76 aa, Glycine max
QSKGEKNVEIGGTWRQSIKAAYEATYSAFPGGEILAHLDHKKKASVPRSFKGWQKNAITGFLAEQNIKIGKPNNFY

SEQ ID NO: 7695 - protein, 626 aa, Oryza sativa (japonica cultivar-group)
MDGGGGGDPGGRVGEAKADATRAANKRRAPSPAGGGGVEAKRRRKDAMGSSVSGSRSGGGGGRRLRHGRGRRARAFRRKLEEENKNSNNRPRASNVVIAYTPNLIRRYGTLLRNISFLLPYDGQGKAYACPSDKINVFLKWSRCNFCLFFEWAEGDQMMICHMFNTLKEIHISFLINPAFLDESMEVKVTNPLLSFSSNFVEDETWALVKEMLMMMFSPVQEDERAASDLYVFTKSRDSVYFRIFKITSIPAGESENSLVLDEVGLNFCLKLLDVHGAFVGSDCDQALDGLQSQTRNELKLSPDIYYCVPNDKLGCCTLHSVALNNQNYLFFLENGLDLSHFEGFCLTLEEFLERNSFLKIKHIVGSRNDEECNFVRNIAKAIIRSMLSHLVNLFSLGKCLRMGTDLLRRRKILLKGSDVKFFQLEVIAYEEDEAINNVLQVVELVKSCFVGEMIPADLQGDLHDLKENPLKRLESVIDSSSLMSAKEKKGLLVNLHTEYKTNISPAISEDDRDSLFKHIPYLDCWMNRTEDNEYLKLVANLDSKKVALKVNKVGTDKRKPSKNGILQFDFMRNSDVHIPEKALKDGITPFRLSWTDYILTSRYPTYLRAIQKSLEPYMKSRKKLK

SEQ ID NO: 7696 - protein, 751 aa, Thermotoga maritima MSB8
MCGNAHPRLMTAHDRIRLMLLSRVIIFSTEGEFGGEIVINRTEIETEAKVVIRELESLKKKSFTREEKKLLIKAYEFARIVHEGQKRFSGEPFITHPVEVTKILAGLGVDVTTLVAALLHDVVEDGENVSLDQIKKEFGPEVARIVDGVTKVSNINAPIGRDQDSRKKIETIQKMFFAMAEDMRVIFVKLADRLHNMRTIHYVQDPEKKRYKAYETLEIYAPLAHKLGIYSIKSELEDLAFKVLYPEEYYKIKELVAEKRKEREKRTNEYISLLKSALEEHKIKAIVEGRYKHYYSIWRKMKEKGKKFEEIYDLIALRVIVKDVTTCYTVLGIVHNIWKPLPGRFKDYIAAPKSNGYRSLHTTVITGYGEPLEIQIRDEEMHREAEYGLIAHWIYKERPDVKTAKEWIERLLDWRKELAQGFTEFEDIKKELQMDEVFVFTPKGDILHLPKGSTPIDFAYAIHTEIGHHYSGAKVNGKIVPIDYQLKNGDVVEIIVNKNSPGPSVDWLKYAKTHSARAKIRRFLKEKLAPELVERGKEVLRKICRKLGKSFEEVMQTEGIKRYLNTYQEKDFFMRIGEGSITTQDLIEAILGKKIVVKKRSTKKKTRIQNLVKVDGIDSIEFHIAKCCHPIMGDPIVAVVSRRGMTIHRRDCRNLKNMSQDRIFPAEWNLETSEMFDAHIRVVLNSEKNLPSLIDRITNLGAEFVAMKTLKSEEPLVVQIHIKISNTVELTGLLDRLRSYRYVLDAERVVQ

SEQ ID NO: 7697 - protein, 419 aa, Sulfolobus solfataricus P2
MEELLTSNLLVQQVKKLYKVGELLGLDSETIDVLSQPERVMQVKIQIRSSDGKLRTFIGWRSQHNSALGPYKGGVRYGPNVTQDEVIALSMIMTWKNSLLLLPYGGGKGGIRVDPKKLTLKELEDLSRKYVQLIHKYLGSDVDIPAPDINTNPQTMAWFLDEYIKITGKVDFAVFTGKPSELGGIGVRLYSTGLGVATIARDAANKFIGGIEGSRVIIQGFGNVGFFTAKFLSEMGAKIIGVSDIGGGVINENGIDVNRALEVVQSTGSVVNYLEGKKVTNEELLISDCDILIPAAVENVINKFNAPKVRAKLIVEGANGPLTADADEIMKQRGVIVIPDILANAGGVVGSYVEWANNRSGGIISDEEAKKLIVDRMINAFNTLYDFHKRKFADQDLRTVAMALAVDRVVGAMKARGLL

SEQ ID NO: 7698 - protein, 411 aa, Zea mays
MNALAATTRNFRRASKLLGLDSKLEQSLLIPFREIKVECTIPKDDGSLATFVGFRVQHDNARGPMKGGIRYHNEVDPDEVNALAQLMTWKTAVAAVPYGGAKGGIGCSPGELSRSELERLTRVFTQKIHDLIGTHTDVPAPDMGTNAQTMAWMLDEYSKFHGHSPAVVTGKPIDLGGSLGRDAATGRGVMYATEALLAEYGKCISGSTFVIQGFGNVGSWAARLIHEKGGKIIAIGDVTGSIRNTAGIDIPALVKHRNEGHAMKDFDGAEVLDSTELLVHDCDVLVPCALGGVLNKDNAPDVKAKFVIEAANHPTDPEADEILAKKGVVVLPDIYANSGGVVVSYFEWVQNIQGFMWDEEKVNDELEKYMSSAFQHMKAMCKSLDCDLRMGAFTLGVNRVARATLLRGWEA

SEQ ID NO: 7699 - protein, 166 aa, Xanthomonas campestris pv. campestris str. ATCC 33913
MTWTTPDLCDRFPEVAVAEPLFRHFGGRTTFSGPIATVRCVEDNSRIRELASTPGDGRVLVVDGQGSLRQALFGDQIGAQAVANGWAGVLIHGCVRDVEILAGLPLGVLALAACPRRTERRDLGDVDVPVNFAGVAFVPGHWLYADANGVVVAATPLSLEIAGVEH

SEQ ID NO: 7700 - protein, 391 aa, Arabidopsis thaliana
MSDLPRDLLAEILSRVPLASLRSVRFTCKKWNDLSKDRSFLKKQIVEAKKKQLKSKEFEVIMMRNFRVYLTSVDLHNDVNPSFTPKGTLTSFSDDANQHQVDNVSSVFHCDGLLLCITKDLNFRLVVWNPYFGQTRWIQPRNSYHIKDIYAIGYDENKNHKILRLKDQYYDYDSHPRARICEFELYSFESNSWKVVLDVSPDWYIHSYHRGLSVKGNTYWYATEKHGYVNFLICFDFTTEKFGPRLPLPFNATESFTYDDVVTLSSVGEEQLALLFQSDATLMMEIWVTSKVDPTEVLWNKLFLAVDHDMIEFDYELKFVADAGSFFIDQKKNVVVVFDKDMNEHTHRGMAYIVGKNGYFKRVDIGEEAYTSCFPLVCSYVPSSVQIRQLT

SEQ ID NO: 7701 - protein, 507 aa, Kluyveromyces lactis NRRL Y-1140
MSSTIAEKLNLKIVEQDAVSITLPNGLTYQQPTGLFINNQFIKSQDGKTLKVENPSTEEIIVEVQSATSQDVEYAVEAADAAFNSEWSTMDPKKRGSLLFKLADLIEAQKELIASIESADNGKTLALARGDVGLVIDYIRSAAGYADKLGGRTINTGDGYANFTYKEPLGVCGQIIPWNFPLMMLSWKIAPALVAGNTVILKPASPTPLNALFFASLCKEAGIPAGVVNIVPGPGRSVGDTITNHPKIRKIAFTGSTDIGRDVAIKAAQSNLKKVTLELGGKSAHLVFEDANIKKTIPNLVNGIFKNAGQICSSGSRIYVQDTIYDQLLSEFKTYLETEIKVGSPFDESNFQAAINNKAQFETILNYIDIGKKEGASILTGGERVGNKGYFIKPTVFYNVKEDMRIVKEEIFGPVVTISKFSTVDEAVALANDSEFGLGAGIETENISVALKVAKRLKAGTVWINTYNDFDAAVPFGGYKQSGYGREMGEEAFESYTQIKAVRIKLD

SEQ ID NO: 7702 - protein, 334 aa, Haemophilus ducreyi 35000HP
MAIKIGINGFGRIGRIVFRAAQLRDDIEVVGINDLIDVDYMAYMLKYDSTHGRFDGTVEVKDGQLVVNGKTIRVTSERDPANLKWDEIGVNIAVEATGLFLTDETARKHITAGAKKVVLTGPSKDATPMFVNGVNFDTYAGQDIVSNASCTTNCLAPLAKVIHNKFGIKEGLMTTVHATTATQKTVDGPSAKDWRGGRGAAQNIIPSSTGAAKAVGKVLPALNGKLTGMAFRVPTTNVSVVDLTVNLEKAASYQEICAEIKRASENEMKGVLGYTEDAVVSTDFNGATETSVFDAAAGIALTDTFVKLVSWYDNETGYSHKVLDLVAHVYNYRG

SEQ ID NO: 7703 - protein, 160 aa, Bacillus subtilis
MSIYHMKVRTITGKDMTLQPFAGKVLMIVNTASKCGFTSQLKQLQELYDTYQQEGLEILGFPCNQFMNQEPGEEADIQEFCETNYGVTFPMFSKVDVNGKNAHPLFVYLTEHAKGMLGTKAIKWNFTKFIVDRNGEIVGRYSPNTNPKELEDDIVKLLEQ

SEQ ID NO: 7704 - protein, 360 aa, Fusobacterium nucleatum subsp. nucleatum ATCC 25586
MTDAIKDLVKIKVIGVGGGGGNAINDMLYSGVTGVEYIAANTDKQDLEKSLADVKLQIGEKLTKGQGAGASPETGRLAAEEDIEKIQELLKGTDMLFITAGMGGGTGTGAAPVIAKAAKELDVLTVAVVTKPFNFEGERRKNNAESGIELLRQNVDSLVIIPNDKLFDLPDKSITLQNAFKEANNILRIGIKAVVDLVLGQGFINLDFADIKSVLKDSDIAVLGFGDGEGENRAMKAAEKALQSPLLEKSIQGADKILINLMTSQDVGLSESQTVTDVIRQAAGKKIEDVMFGVTIVPEFTDRIEITIIANNFKEGVDSNTDSPIRMDSAKPAEPLKETERKKEPEEEIDIPPWMRNNKR

SEQ ID NO: 7705 - protein, 173 aa, Triticum aestivum
MAAARGQKALATLVRSLRSDSISNSNAPRLRHLPSLRRTFSLYDQINLIDTVPEDQLRFQTYDDTGFKINNVKYEGSLLIVENKIMTWTPKTFADITAESLSIFKIVHPIPEILILGCGKYVQPVSPELRKFIRSTGMKLEAIDSRNAASTYNILNEEGRAVAAAVLPFGVDS

SEQ ID NO: 7706 - protein, 354 aa, Camellia sinensis
MTTVAAPRVQSLATSGIESIPKEYVRPKEELTGIGNIFEEEKNEEGPQVPTIDLKDIDSEVEEVRERCREALKKAAVDWGVMHLVNHGIADDVRERVKVAGEGFFEQPVEEKEKYANDPDNGNLQGYGSKLANNACGQFEWEDYFFHLAYPEDKCDMSIWPKTPTDYIPATVEYAKQLRALATKTLSILSLGLGLEENKLEKEVGGKEELLLQMKINYYPKCPQPELALGVEAHTDLSAVSFILPSMVPGLQLFYEGKWITAKCVPNSIIMLIGDTVEILSNGKYKSILHRGLVNKEKVRISWAVFCEPPKEKIILKPLPETVSEAEPPLFPPRTFAQHIQHKLFRKSQELGSK

SEQ ID NO: 7707 - protein, 333 aa, Geobacter sulfurreducens PCA
MALRVAINGFGRIGRSVLRAAAKEKGIEIVAINDLTDAKTLAHLLKYDSVHGPFPGKVEVGDGAIVVNGKPITIIAERNPELLPWKKMKIDVVLEATGLFTAREKAELHLKAGAKKVIISAPATNEDITIVMGVNHDAYDPKKHNIISNASCTTNCLAPVAKVLHETFGIEKGLVTTVHSYTNDQQILDLPHKDLRRARAAAMSMIPTTTGAAKAVSLVLPELKGKLDGMAIRVPTPNVSVVDLVVTLKKKTDAEKVNAALKKAAKGSLKGILRFEEEPLVSIDFNGTTHSSIVDALSTKVIDGTMVKVLSWYDNETGFSNRVVDLMKLIASK

SEQ ID NO: 7708 - protein, 327 aa, Sulfolobus tokodaii str. 7
MVVIGGGPVGLYATFYAGLRDMKALLIDAQDELGGQLVTLYPEKMVYDVGGFPGILAYELAQQLVEQAKMFSPDIRIKEWADMIERTQDNMWVVKTDKGNSFKTKTILIAAGIGKMTPSRLGAKGEVEYENKGVYYTVRRKKDFEGKRVLIVGGGDSAVDWALTLAPVAKSVTLIHRRDQFRAHERSVKQLYQVATVYTWHELKEVRGDGNRVTQAVIFDNRTKDEKILDVDAVIISIGFKGDLGNMPKWGVNMKGRDIIVNAKMETNLPGVYAAGDIASQEGAPKLALIAVGFGQAAIAVSVAKKYIDPNASLFAGHSSEMDKFKK

SEQ ID NO: 7709 - protein, 459 aa, Coccidioides immitis RS
MSATNGHANGVNGVNGTGLPNHPGYTAIPARENPHPHTARNPYGHNAGVTDFLSNVSRFKIIESTLREGEQFANAFFDTQKKIEIAKALDDFGVDYIELTSPCASEQSRKDCEAICKLGLKAKILTHIRCHMDDARVAVETGVDGVDVVIGTSSYLREHSHGKDMTYIKNTAIEVIEFVKSKGIEVRFSSEDSFRSDLVELLSLYSAVDQVGVNRVGIADTVGCASPRQVYELVRVLRGVVKCDIEIHLHNDTGCAIANAYCALEGGATHVDTSVLGIGERNGITPLGGLMARMIAVDRDYVMSKYKLHKLKDIEDLVAEAVEINIPFNNYITGFCAFTHKAGIHAKAILNNPSTYEIINPADFGMTRYVHFASRLTGWNAIKSRAQQLNLEMTDAQYKECTAKIKALADIRPIAIDDADSIIRAYHRNLKSGEDHPLLDLTADEKAQFAAKEKEYTEA

SEQ ID NO: 7710 - protein, 435 aa, Rhodopirellula baltica SH 1
MSDIIPVEVPTVGESISEVQIGNWLKQEGDWVKSGEDLVEIETEKASVQIPAPASGYLQSITKQSDEFAEVGQQIASIQVAEQPAGGDGGSSNGGSAPAAGNTASAPAPTASAPAPSSPAKSGGGFVMPAAQRLLDEHKLDASQVPATGPGGRLLKEDVLAYIRNGSSRPAPAAPPAAPAAPVAPTQQMSSPETASLMTSGGYRSEEVKPMSMLRRTIASRLVQAQQTAALLTTFNEINMAPVMAIRSKYKDAFAKKHGVKLGFMSFFAKATVEALRRYPAVNAEIRGDSMVYRNYQDIGIAIGGGKGLVVPVLRNVERMSFAEVEGSIAEYARLAGENRLQPSDLMGGTFTISNGGIYGSLLSTPIVNPPQSGILGLHSIQERPVAEDGQVVIRPMMYVALTYDHRIVDGREAVGFLVAIKETIEDPARLFLEV

SEQ ID NO: 7711 - protein, 410 aa, Buchnera aphidicola (Baizongia pistaciae)
MPDIGTDLVEVIEILVKIGDQVKKDDSLITVEGQKASIEIPASHTGTIKNIIVHIGEKITTGSLIAILNGIDDNVKSKNDSSSYSFKNSKNTSTNSNLGNVNNNINNRTILVHATPTVRRLARKFDIKLENITGTGRKGRILKEDVISYKNISLFNDIKKSLKKTNVNYYKDNVTCDDFKSIELTRTQIRSSKNLLKSWLTIPHVTQFDESDITELENFRQKYNSDLKDKSKKLTILIFVIKAVSKALEMFPKFNGRLINKDNRIAIVLNEHINIGIVVDTDDGLLVPVINRVNKKNISSISNDLRIISERARSRKLNFSDIKEYGSFTISNLGGIGGTNFTPIIKYPELAILGISRALIKPYWNSHAFIPKLMLPLSLSYDHRAIDGVAAVRFITFVKKMLTDIRFLMI

SEQ ID NO: 7712 - protein, 179 aa, Zea mays
  misc_feature (13)..(13): Xaa can be any naturally occurring amino acid
PKSAYRAFFTGAXVSFEPWKRVWKRWATKCKTFIWLAIKNKCWTADRLQKRGLDFPENCILCDQEDETVQHILTNGVFARQFWHDFLSQIGLTAVVPKRRDVCFVDRWRKASSKIPKGKRKGFNSVVILGAWSLWNHRNRCVFDGARPCLESLKEGFREELQLWFLAGVKNLRKKIDPG

SEQ ID NO: 7713 - protein, 337 aa, Thermococcus kodakarensis KOD1
MTEPKDIVLKESEEVEGIPIEGPWLDDVSSLEEVLDYYERIGFQATHLGKAIEIWKKVEKRRAEGKEVRVFLGYTSNIISSGLRELVAWLVKEGKIDVIVTTAGGIEEDFIKALKPFILGDWHVNDALMREKGINRIGNIFVPNDRYIEFEKYMIPFFERVLEIEKERGKPLTASEFIYELGRYMDEKLGKEKERSVIYWAYKRNVPIFCPAITDGSIGDMLYFFKEERGDRELIIDIANDIVKLNNLAVTAKETASIILGGSLPKHAIINANLFRGGTDYAIYITTAVPWDGSLSGAPPSEGVSWGKIRAKADYVEIWADATLVFPLLVWKVMKAP

SEQ ID NO: 7714 - protein, 250 aa, Geobacter sulfurreducens PCA
MDAGEEEGIINEEENAMIRSIFELRDTIVREIMVPRTDMACVSADAAVANVLNTIISCGHSRIPVYDGTVDNIIGLIYAKDLLKYWGMSEPAIDLKRIMRAPYFIPETKNLEELLQEFKRKRVHIAIVIDEYGGTSGLVTIEDLLEQIVGDIQDEYDLEEEWLEEEPDGSILVDARLPIEDLEEYFGIEVEREKFDTVAGLIFHLTGRIPMVREEVESDTLRMTVLEAGERNIKKVRIARRSDEAGEAQS

SEQ ID NO: 7715 - protein, 367 aa, Aquifex aeolicus VF5
MEEFVNPCKIKVIGVGGGGSNAVNRMYEDGIEGVELYAINTDVQHLSTLKVPNKIQIGEKVTRGLGAGAKPEVGEEAALEDIDKIKEILRDTDMVFISAGLGGGTGTGAAPVIAKTAKEMGILTVAVATLPFRFEGPRKMEKALKGLEKLKESSDAYIVIHNDKIKELSNRTLTIKDAFKEVDSVLSKAVRGITSIVVTPAVINVDFADVRTTLEEGGLSIIGMGEGRGDEKADIAVEKAVTSPLLEGNTIEGARRLLVTIWTSEDIPYDIVDEVMERIHSKVHPEAEIIFGAVLEPQEQDFIRVAIVATDFPEEKFQVGEKEVKFKVIKKEEKEEPKEEPKPLSDTTYLEEEEIPAVIRRKNKRLL

SEQ ID NO: 7716 - protein, 323 aa, Solibacter usitatus Ellin6076
MSTTYLEAIREGLWEEMERDPNVFCIGEDIGEYGGAFKVTAGFLEHFGARRIVDTPISEAAIAGASIGAGLMGLRPVAEMQFADFISCGFDQIVNFAAKCRYRWNASVPMVVRSPSGGGIHGGPFHSQNPEMWFVRTPGLKVVCPATAYDAKGLIKSAIRDNDPVLFFEHKALYRRIKEDLPAGDFTVPIGKARVIREGRDLSIITYGAMVWTALEAADKLAPEGISVEVVDLRTLVPLDRDTVCESVRKTSKVLLLHEDTRTGGMAGELAATITENVFEYLDGPIVRVTAPDTPVPYSPPLEEAFLPNADKVVEKARWLYRY

SEQ ID NO: 7717 - protein, 480 aa, Methanosarcina barkeri str. fusaro
MAESEKEAALPPKEEFSEWYNELLWMAEIMDVRYPVKGLYVWYPFGFAIRRNTYNIIREILDNSGHQEALFPLLIPENEFMKEAEHIKGFEDEVYWVTHGGRDTLDIPLALRPTSETAIYPMYKMWVRSHADFPIKIYQIVNTFRYETKHTRPLIRLREITSFKEAHTVHATWEDAEAQVKEAIGLYTEIYRRLGVPVLRSRRPDWDKFPGADYTDALDAIMPDGRTLQIGTAHHLGDNFAKTFDIKYETPDGEQRYAYQTCYGISERSIAATISIHGDDKGLVLPPEIAPVQVVIIPIIFKKGAEEVLAACKDVKERLTKAGIRVEIDASDLRPGAKYYKWEMKGVPLRLEIGPRDLQNNVAVAVRRDTGEKEQISLPEIEAGVSSKFEAIHENLYQKAKVELENRIFECTELEEVKNKIQDGVATIPWCGKRECGRAMEDVIGAGILGIPLEQKRDRKEKCPICGEETETRVYVARTY

SEQ ID NO: 7718 - protein, 343 aa, Ralstonia eutropha JMP134
MDTASELQATIRAMVQPGKGLLAADESGPTIAKRFTTIGVESNEENRRAWRSLLLSTPGLGAHISGVILYEETLGQRADDGTPLPELCARQGIVPGIKVDKGKVPLVNAPGDEITEGLDGLPKRLEAYRQQGARFAKWRAVFNVSDTLPSALAVQANAQVLAAYAAICQASGIVPIVEPEVLMDGDHGLARSAAVTERVLHAVFHALHRYGVVLEHMVLKPSMVIAGKKSAQQTSVQDVATETVRVLKRTVPGAVPGIFFLSGGQTPEQATANLDAMNRLGPLPWPLSFSYGRALQEPPLAAWRGQAANVGKAQQALLQRSLLNGEACQGQYEAAQESMEKVG

SEQ ID NO: 7719 - protein, 316 aa, Tulipa gesneriana
MASFPVINLEKLEGGERSRVMEVLHDACANWGFFELLHHGISHELLDKVERLTKDHYKKCMEERFREFASKTLQDGSKVDVDNLDWESTFYLRHLPTSNMSEIPDLSDEYRETMKEFALRLEELAEQLLDLLCENLGLEKGYLKKAFSGSKGPTFGTKVSNYPPCPKPELIKGLRAHTDAGGLILLFQDDKVSGLQLLKDGEWVDVPPMHHSIVINLGDQIEVITNGEYKSVLHRVLAQPDGTRMSIASFYNPGSDAVIYPAAALLEEVENQSEVYPKFMFEDYMKLYAVQKFQAKEPRFETMKAMKIANVQPIAT

SEQ ID NO: 7720 - protein, 362 aa, Geobacter metallireducens GS-15
MSQVFKVAVLPGDGIGPEVMAEALRVLDAIEKKYDVKFERTHANVGGAGIDLEGKALPETTITICKTSDAILFGSVGGPKWETLPPDEQPERGALLPLRKIFGLYANLRPAIIFPSLTGASSLKEEVIAGGFNVLVIRELTGGIYFAQPKGIEGEGRDRVGFDTMRYSVPEIERITHVAFQAARKRGKKVCSIDKANVLSSSVLWREVVTGIAKEYPDVELSHMYVDNAAMQLVRWPKQFDVILCENMFGDILSDEAAMLTGSLGMLPSASLAEGTFGMYEPSGGSAPDIAGQGIANPIAQILSMGMMLRFSFGMVDAADAIDNAVAKVLDQGCRTRDIFQEKPGEKLVNTKEMGDAIIVAL

SEQ ID NO: 7721 - protein, 424 aa, Debaryomyces hansenii CBS767
MFRNVVNAFRSTGRTSFKVRPTSIRTYAAFDRSKPHVNIGTIGHVDHGKTTLTAAITKVLADKGGASFLDYQSIDRAPEERSRGITISTTHVEYETEKRHYAHVDCPGHADYIKNMITGAAQMDGAIIVVAASDGQMPQTREHLLLARQVGVQHLVVFVNKVDTIDDPEMLELVEMEMRELLSQYGFDGDNTPVVMGSALCALENKQPEIGVQAIEKLLDNVDEYIPTPQRDLEQPFLLPVEDVFSISGRGTVVTGRVERGTLKKGEEIEIVGNFDKTFKATVTGIEMFKKELDAAMAGDNAGILLRGVKRDEINRGMVLAKPGTVTSHKKVLASLYILSKEEGGRHSSFGENYKPQLFLRTTDVTGTLRFPEGADHSQMVMPGDNIEMEIELVRKTPIEVNQRFNIREGGKTVGTGLVTRILE

SEQ ID NO: 7722 - protein, 965 aa, Flaveria trinervia
MANRNLEKLASIDAHLRLLVPGKVSEDDKLIEYDALLLDKFLDILQDLHGEDLKETVQECYELSAEYEGKRDPKKLEELGSVLTSLDPGDSIVIAKAFSHMLNLANLAEEVQIAYRRRIKLKKGDFADEAHATTESDMEETLKKLVYKLNKSPEEVFDALKNQTVDLVLTAHPTQSVRRSLLQKHGRIRNCLAQLYAKDITPDDKQELDEALHREIQAAFRTDEIRRTQPTPQDEMRAGMSYFHETIWKGVPKFLRRVDTALKNIGINERVPYNAPLIQFSSWMGGDRDGNPRVTPEVTRDVCLLARMMAANMYFSQIEDLMFEMSMWRCTDELRVRAEELFRTARRDVKHYIEFWKQVPPTEPYRVILGDVRDKLYNTRERARHLLAHDISDIPEEAVYTNVEQFLEPLELCYRSLCACGDRVIADGSLLDFLRQVSTFGLSLVKLDIRQESDRHTDVLDAITQHLEIGSYREWSEEKRQEWLLAELSGKRPLFGSDLPKTEEIKDVLDTFNVLAELPSDCFGAYIISMATSPSDVLAVELLQRECHVKQPLRVVPLFEKLADLEAAPAAMARLFSIDWYKNRINGKQEVMIGYSDSGKDAGRFSAAWQLYKAQEELKNVAKEFGVKLVMFHGRGGTVGRGGGPTHLAILSQPPDTIQGSLRVTVQGEVIEQSFGEEHLCFRTLQRFCAATLEHGMNPPISPRPEWRELMDQMAVVATEQYRSIVFKEPRFVEYFRLATPELEYGRMNIGSRPSKRKPSGGIESLRAIPWIFAWTQTRFHLPVWLGFGAAFKQAIQKDSKNLQMLQEMYKTWPFFRVTIDLVEMVFAKGDPGIAALNDKLLVSEDLWPFGESLRANYEETKDYLLKIAGHKDLLEGDPYLKQRLKLRDSYITTLNVCQAYTLKRTRDPNYHVTLRPHISKEYAEPSKPADELIHLNPTSEYAPGLEDTLILTMKGIAAGMQNTG

SEQ ID NO: 7723 - protein, 417 aa, Sulfolobus solfataricus P2
MSEKKLLTFWQALFIGLGNIIGAGIFVMAGSTISVAGPGAIIAFIFTAIFAMSIGLNSAELSSIFTDVEGGVYSFTLKTLGEMSGFLVGWFRVISYVIGGAATALGFSGYLLLFGLPKTLYYTLAVILIVILLVLDYFGIGTVAEVDTIFVIINISSLILFSLTIPIIVGIKVHNFVPLFPHGIQGVLTTSNLAFFSYSGFNTIVTLTPSTKNGEKVIPRAIVMSLIITSIIYISVIFSMVDAMPWYYYGQTSAPLSLALSQIHAPTWLFLITSISAILATISVTLSIIVASERTLRQLSRDFQLPVKHELLVVGGIMLASLLLGNVEAIALASNFGIIFSYMLTGLEVIIVRRKGLRGSFRSPAFPVIQVFAIILSALFMISLGLNSLEIGVVTLFIGILVYETLREVKAHENRKK

SEQ ID NO: 7724 - protein, 112 aa, Brucella suis 1330
MKKIEAIIKPFKLDEVKEALQEVGLQGITVIEAKGFGRQKGHTELYRGAEYVVDFLPKVKVEVIVADETVDSAIEAIRKAAQTGRIGDGKIFVSNIEEVIRIRTGESGVDAI

SEQ ID NO: 7725 - protein, 967 aa, Flaveria trinervia
MANRNLEKLASIDAQLRLLVPGKVSEDDKLIEYDALLLDKFLDILQDLHGEGLKETVQECYELSAEYEGKHDPKKLEELGNVLTSLDPGDSIVIAKAFSHMLNLANLAEEVQIAYRRRIKLKKGDFADEASATTESDIEETFKKLVHKLKKSPEEVFDALKNQTVDLVFTAHPTQSVRRSLLQKHGRIRDCLAQLYAKDITPDDKQELDEALHREIQAAFRTDEIRRTPPTPQDEMRAGMSYFHETIWKGVPKFLRRVDTALKNIGINERVPYNAPLIQFSSWMGGDRDGNPRVTPEVTRDVCLLARMMAANMYFSQIEDLMFEMSMWRCSDELRVRAEELHRSSSKRDVKHYIEFWKQVPPTEPYRVILGDVRDKLYNTRERARHLLAHDVSDIPEESVYTNVEQFLEPLELCYRSLCACGDRVIADGSLLDFLRQVSTFGLSLVRLDIRQESDRHTDVLDAITQHLEIGSYREWSEEKRQEWLLSELSGKRPLFGPDLPKTEEIADVLDTFHVLAELPADCFGAYIISMATSPSDVLAVELLQRECHVKQPLRVVPLFEKLADLEAAPAAVARLFSIEWYKNRIDGKQEVMIGYSDSGKDAGRLSAAWQLYKAQEELINVAKKFGVKLTMFHGRGGTVGRGGGPTHLAILSQPPETIHGSLRVTVQGEVIEQSFGEEHLCFRTLQRFCAATLEHGMNPPISPRPEWRALMDEMAVYATEQYREIVFKEPRFVEYFRLATPELEYGRMNIGSRPSKRKPSGGIESLRAIPWIFAWTQTRFHLPVWLGFGAAFKYAIEKDIKNLHMLQEMYKTWPFFRVTIDLVEMVFAKGDPGIAALNDKLLVSEDLWSFGESLRANYEETKNLLLKIAGHKDLLEGDPYLRQRLRLRDSYITTLNVCQAYTLKRIRDPNYHVTFRPHISKEYSEPSSKPADEYIKLNPKSEYAPGLEDTLILTMKGIAAGMQNTG

SEQ ID NO: 7726 - protein, 245 aa, Triticum aestivum
TSLYKKAGWYRSGIPGISSTHASAKTKKKPGLERKGKVVTEIKDAIERHSSAYVFTYNNMRNQKLKDLRDQLKSSSRIFLAGKKVMQIALGRSPADEAKTGLHKLSKFLQGASGLLFTNLPRDDVERLFREFEVNDFARTGSIATQTVELKEGPLEQFSHEMEPFLRKQGLPVRLNKGVVELVADHVVCEEGKPLSPEAAHTLRVLGTKMATFRLYLVCRWSSDDFEVYKEGLAHLGGEEADESS

SEQ ID NO: 7727 - protein, 432 aa, Neisseria gonorrhoeae FA 1090
MPSETALPLYADTRAAHTLVWFRQNLRIRDNAALCAAVAEGSPVIGIWIDDAETDNPRRAAFYRQSAAELAQGLARRGIPLYTAASPAGLVRLAVRLNIRAVIADESHTFADKLADNALWHELDKHGIALTFVNDRSVFGKTDLTPDNGTAHTDFNRYREVWLDRFSKQPPAGSDLFAAYRQPFPENLPAPPPAALSDGIFLPQNGGETAAWRQWRRFLEQAASYSVLKDFPSRKNTSLMGAYLSVGCISPRLLARESLERRLNAWADNIIRRDFFLQLALQHADDDPSDGNPEHTLRLTLWQQGRTGIPIIDAAMRCLHKTGSLHPALRRLSADFFCHVLNLPRREGEIWFARQLTDFDAAINQGNWRLAASRHTCPDIAAASYRTDPDGTFIKRHIPELAHLSADTVHTPWRFACSVDTHGYPARPVAGV

SEQ ID NO: 7728 - protein, 373 aa, Cichorium intybus
VLELGFFRTPSSSRWYLGMWYKKLSERTYVWVANRDNPLSCSIGTLKISNMNLVLLDHSNKSVWSTNHTRGNERSPVVAELLANGNFVLRDSNKNDRSGFLWQSFDYPTDTLLPEMKLGYDLRTGLNRFLTSWRSSDDPSSGDFSYKLQTRRLPEFYLFKDDFLVHRSGPWNGVGFSGMPEDQKLSYMVYNFTQNSEEVAYTFLMTNNSIYSRLTISSSGYFERLTWTPSSGMWNVFWSSPEDFQCDVYKICGAYSYCDVNTSPVCNCIQRFDPSNVQEWGLRAWSGGCRRRTRLSCSGDGFTRMKKMKLPETTMAIVDRSIGLKECEKRCLSDCNCTAFANADIRNGGTGCVIWTGQLEDIRTYFANGQDLY

SEQ ID NO: 7729 - protein, 411 aa, Xanthomonas axonopodis pv. citri str. 306
MSRRVVVTGMGMVSPLGNDLATSWDGIVHGRSGIGPITQIDASQFTTKIAGEIKNFDPTLFVSAKDVKKMDSFIHYGVGASFMALDDSGLEIDESNAERVGAILGSGIGGLLGIEEQTIKFHEGGARKISPFYVPSTIINMLPGQVSLIKGLKGPTFSAVSACATSNHSIGTAMRMIQHGDADVMLAGGAERGSSPSSVGGFCAMKAMSTRNDDPAGASRPWDKQRDGFVLGDGAGVLVLEEYEHAKARGARIYAELVGFGASSDAFHMTAPSEDGEGAARSMAAAMRDAKLNPEQIGYLNAHGTSTPLGDLAETMAMKRALGDHAYKTMVSSTKSMTGHLLGAAGGVEAIFSVMALHTGIIPPTINLEEPSEGCDLDYVPNVARQVQVDAVMSNGFGFGGTNGTLVFKRV

SEQ ID NO: 7730 - protein, 660 aa, Ashbya gossypii ATCC 10895
MRRSQDRSARRAGVLGVLARVPTLAAALPVAGRRAEVPSGEGQFWTFMAVSAVLVLLGGMFRGLPLGLMGQDKMYLKVTSTSGSRAERQHARKVLRLIGHGKHWVLVTLLLSNVITNETLPIVLDRCLGGGWQAVVMSTGLIVVFGEIIPQSVCVRYGLEVGAWCSPFVLCLMYLTYPVAYPIALLLDYLLGEDHGTVYKKSGLKTLVTLHKTMGVERLTQDEVTIISAVLDLKDKQVQEIMTPIENVFTISADRILDEKVVEEIFNSGFSRIPIYLPGQPTNFIGMLLVRVLISYDPADALPVSHFPLATLPETSPNTSCLNILNYFQEGKSHMCIVSRDPGSSSGALGVVTLEDVIEELIGEEIVDESDVFVNIHQRIVREQPGPLSRRHVTSYLHSLYTSTSRASAVAAAGARSEQAGPAEKQALLGAGPAEGRLHPAQDVIQPLNPAANPLNISNPHVTIKRQAAILQHADCPNRATADNSDENHALQSAHGSPQERGASCDYGGTSTTPSREHAAREVMVNEHSALATKALEHTYATGSTTHVVTTMEGGHSPSSGHLRGGLPRRVDALAPRPGAAKELPYRNAISSSYRSTKNGIVESIVTIEGVPKTIIEPAQDWDDSHSAAEFRLSSHRGLYLESTAKDSSEDPSESSSNAA

SEQ ID NO: 7731 - protein, 367 aa, Arabidopsis thaliana
MSRQSFSLLKNLRSIASGSKIQTRSVTYMPRPGDGKPRPVTLIPGDGVGPLVTNAVQQVMEAMHAPVYFEPFEVHGDMKSLPEGLLESIKKNKVCLKGGLKTPVGGGVSSLNVNLRKELDLFASLVNCFNLPGLASRHENVDIVVIRENTEGEYAGLEHEVVPGVVESLKVITKFCSERIAKYAFEYAYLNNRKKVTAVHKANIMKLADGLFLESCQEVAKKYPSIAYNEIIVDNCCMQLVARPEQFDVMVTPNLYGNLVANTAAGIAGGTGVMPGGNVGAEYAVFEQGASAGNVGKDTTEEQKNANPVALLLSSAMMLRHLQFPSFADRLETAVKRVIAEGNCRTEDLGGNSTTQEVVDAVIANLD

SEQ ID NO: 7732 - protein, 449 aa, Haemophilus influenzae Rd KW20
MSKVASLDAFLTKVAQRDGYQPEFLQAVREVFTSIWPFLEANPKYRSEALLERLVEPERAFQFRVAWTDDKGQVQVNRAFRVQFNSAIGPFKGGMRFHPSVNLSILKFLGFEQIFKNALTTLPMGGAKGGSDFDPKGKSDAEVMRFCQALMAELYRHVGADTDVPAGDIGVGGREVGYLAGYMKKLSNQSACVFTGRGLSFGGSLIRPEATGYGLIYFAQAMLAEKGDSFAGKVVSVSGSGNVAQYAIEKALSLGAKVVTCSDSSGYVYDPNGFTTEKLAALFDIKNTKRGRVKDYAEQFGLQYFEGKRPWEVQVDIALPCATQNELELSDAQRLIKNGVKLVAEGANMPTTIEATEALLAADVLFGPGKAANAGGVATSGLEMAQSSQRLYWTAEEVDAQLHRIMLDIHANCKKYGTIEGQENINYVVGANVAGFVKVADAMLAQGVY

SEQ ID NO: 7733 - protein, 245 aa, Bacillus thuringiensis serovar konkukian str. 97-27
MIKLVLIRHGQSLWNLENRFTGWTDVDLSENGLSEAREAGAILKKNGYTFDVAYTSVLKRAIRTLWIVLHEMNLAWVPVHKSWKLNERHYGALQGLNKDETAQKYGEEQVHIWRRSIDVRPPALTEDDPRYEMNDPRYKTLKKGEFPLTECLVDTEKRVLAYWHSEIAPKLKDGNKVIISSHGNTIRSLVKYLDNLSSDGVVSLNIPTSIPLVYELDENLRPIRHYYLSMDGEVPEGEIPKHITF

SEQ ID NO: 7734 - protein, 453 aa, Propionibacterium acnes KPA171202
MSTTLAPDSQLKDLGYQPSLNRQLPFGSLLVYGLLFFVPMAPVAVFGLVVNRSGGVPVLVYLVAAAVMGLSAISYREMALRFPVAGSVYGYTRFSLGRTPGFIAGWLILLDYILMPALLTVLSAVALAHIWPSVPMGIFSLVFVFASMALNLQGMTVTTRVGIVLLTIQLATIAFFLVCVGLGLAGGGVVWSWHALWRSGTSWTSVASAVSIAALSYLGFDAVATLNEEARGGGRAVGIATLSLVGLLAVLFGIQVMAAGLVSDATHFAPGGATDRAFYHAVDTVCPAWFIPVFTVVNAFVAIFACLVVAHSSTARLIFAMARDKVMPPALSRTNSKGVPWVAIIVVATVTAILAITFDSHVETMTTLVTFGALSSYVLLHADVIVQCIVKERSHNWVRHLIVPILGALTLLVALAKTEEMTRIVGLGWLAAGIIGAVIARVRHSHHVGTGAS

SEQ ID NO: 7735 - protein, 221 aa, Dianthus caryophyllus
MAEITQIQVESHVFPPEVKPPGSDKTFFLGGAGVRGLEIQGKFIKFTAIAVYIEDDAVSSLAVKWKGKTADELTDSVDFFKDIVTGPFEKFTQVTMILPLTGQQYSEKVVENCVAHWKSVGTYTDAESEATQKFLQVFKNVSNPPGASILFTQSPLGSLTISFSKDGSLPENGKEVIVNKQLSEAVLQSIIGKHGVSPEAKKSLSARLSDLINQHENPKKE

SEQ ID NO: 7736 - protein, 298 aa, Neorickettsia sennetsu str. Miyayama
MTQLIDGFRIAAGICESIATSVAHLRKNNGLVPSLRVIIVGENPASQVYVRSKQKKAESLGIDAETIALPKDTSEVELIRLVNSLNDDTSINAILVQLPLPPHINPTRIIESIDSKKDVDCFHPENVGRLALSKDALLKPCTPAGSLYLIKSALGDNLSGMDAVVIGRSNIVGKPMAMLLLHENCTITLTHSKTRNIQEKTRQADIVISAVGIPHFVKKDFIKPGATVIDVGMNKVDGKLVGDVDFEDVLQKVKFITPVPRGVGPMTIAFLMLNTVITTCLQNKLEHQEVIGTVIQKL

SEQ ID NO: 7737 - protein, 360 aa, Dianthus caryophyllus
MVSSTINETLDGKHDINKVGQGETVCVTGASGFIGSWLIMRLLERGYTVRATVRDPDNTKKVQHLLDLPNAKTNLTLWKADLHEEGSFDAAVDGCTGVFHIATPMDFESKDPENEMIKPTINGMLDILKSCVKAKLRRVVFTSSGGTVNVEATQKPVYDETCWSALDFIRSVKMTGWMYFVSKILAEQAAWKYAAENNLEFISIIPPLVVGPFIMPSMPPSLITALSPITRTESHYTIIKQGQFVHLDDLCMSHIFLYENPKANGRYIASACAATIYDIAKMLREEYPEYNVPTKFKDYKEDMGQVQFSSKKLTDLGFEFKYGLKDMYTAAVESCRAKGLLPLSLEHHLCVFRVTLIFFK

SEQ ID NO: 7738 - protein, 404 aa, Pasteurella multocida subsp. multocida str. Pm70
MSNFEIITPDLPESVADATVVTWHKKVGDVVKRDEILVEIETDKVVLEVPAQSDGVLEAIIEAEGATVISKQLLGKLSATAVAGGVTKETVVTQEPTPADRHHANLSTESVGSDSVSPGVRRLIAEHDLNAEDIKGSGVGGRITREDVEKVIAQKANKAPNKPAEPAFVVGNREEKRVPMTRLRKRIAERLLEAKNSTAMLTTFNEVDMAPIMKLRKTYGEKFEKQHGTRLGFMSFYIKAVVEALKRYPEVNASIDGDDIIYHNYFDISIAVSTPRGLVTPVLRNCDKLSMVDIEKEIKALADKGRDGKLTVEDLTGGNFTITNGGVFGSLMSTPIINPPQSAILGMHAIKDRPVAVNGEVVIRPMMYLALSYDHRLIDGRESVGFLVTIKELLEDPTRLLLEI

SEQ ID NO: 7739 - protein, 584 aa, Lycopersicon esculentum
MELFMKNSSLWGLKFYLFCLFIILSNINRAFASHNIFLDLQSSSAISVKNVHRTRFHFQPPKHWINDPNAPMYYNGVYHLFYQYNPKGSVWGNIIWAHSVSKDLINWIHLEPAIYPSKKFDKYGTWSGSSTILPNNKPVIIYTGVVDSYNNQVQNYAIPANLSDPFLRKWIKPNNNPLIVPDNSINRTEFRDPTTAWMGQDGLWRILIASMRKHRGMALLYRSRDFMKWIKAQHPLHSSTNTGNWECPDFFPVLFNSTNGLDVSYRGKNVKYVLKNSLDVARFDYYTIGMYHTKIDRYIPNNNPIDGWKGLRIDYGNFYASKTFYDPSRNRRVIWGWSNESDVLPDDEIKKGWAGIQGIPRQVRLNLSGKQLLQWPIEELETLRKQKVQLNNKRLSKGEMFEVKGISASQADVEVLFSFSSLNEAEQFDPRWADLYAQDVCAIKGPTIQGGLGPFGLVTLASKNLEEYTPVFFRVFKAQKSYKILMCSDARRSSMRQNEAMYKPSFAGYVDVDLEDMKKLSLRSLIDNSVVESFGAGGKTCITSRVYPTLAIYDNAHLFVFNNGSETITIETLNAWGMDACKMN

SEQ ID NO: 7740 - protein, 409 aa, Oceanobacter sp. RED65
MSKRRVVVTGIGAVTPLANNAKETWQRLISGQSGIDIISHFDASNLATQFAGTIKDFELDDVLSAKDAKKMDTFIQYGMVACAEAIEQSGLDGNSVDLNRVGCALGSGIGGLATIEHNYTQLVNSGPRRVSPFYIPASIVNMIAGHVAMKWGFTGPNFAISTACTTGTHNIGYGARTIAYGDADVMIVGGAEAACTPSGMAGFCAARAMSTRNDDPKAASRPWDKDRDGFVLGDGAGALVIEEYEHAKARGANILAEITGFGMSDDAFHMTSPPEDGAGAAKAMANALKDAGLVGSDIQYINAHGTSTPQGDVAETRAIQSIVGNDVLVSSTKSMTGHLLGAAGAIEAVFSIQALTHNVVPPTINIENQDDQCALDYVANTARDVELAHVLSNSFGFGGTNGSLIFSKV

SEQ ID NO: 7741 - protein, 583 aa, Lycopersicon esculentum
MDYSSNKSSRWALPVILVCFFVILLSNNVVFASHKVFIHLQSQNAVNVHTVHRTGYHFQPEKHWINDPNAPMYFNGVYHLFYQYNPNGSVWGNIVWAHSVSKDLINWINLEPAIYPSKPFDQFGTWSGSATILPGNKPVILYTGIIDANQTQVQNYAIPANLSDPYLREWIKPDNNPLIIADESINKTKFRDPTTAWMGKDGHWRIVMGSLRKHSRGLAIMYRSKDFMKWVKAKHPLHSTNGTGNWECPDFYPVSSKGTDGLDQYGEEHKYVLKNSMDLTRFEYYTLGKYDTKKDRYVPDPDSVDSLKGLRLDYGNFYASKSFYDPSKNRRVIWGWSNESDIFPEDDNAKGWAGIQLIPRKVWLDPSGKQLVQWPVEELETLRTQKVQLSNKKMNNGEKIEVTGITPAQADVEVTFSFASLDKAESFDPKWNDMYAQDVCGLKGADVQGGLGPFGLATLATENLEENTPVFFRVFKAHQNYKVLLCSDAKRSTLKFNETMYKASFAGFVDVDLADKKLSLRSLIDNSVIETFGAGGKTCITSRVYPTLAINDEAHLFAFNNGTEPVTIESLDAWSMGKAKIQY

SEQ ID NO: 7742 - protein, 507 aa, Nectria haematococca mpVI
MAKSKTKESKKAKAAEPLAAVKAGGITKPSKTTKAKSKELAKSAAKKLVKEKDSKKKKKAEPESESSESESESEAESSDDSDSSSEEEKKVTKKATTNGKAKAKAPTPSSDSESESDSGSDDSDDSDSESEEEEKPKAKATKVNGTAKAAAKKAESSDSSDSESDSDSDSDDESEEKEEKKPAAKVAEKKAASSDDSDDSDDSEEDSDDSDDSSEESDAKAKTEEAPSKKRKAEDDIDSDEAKKTKTDAPTTLFAGSLSWNIDDDALYEAFKEFNGLVGARVVTEKGTGRSRGFGYVDFNDPEGCTKAYEAMQGFELDGRALNLDYANARPADANPAGRAADRAKRHGDTLSPESDTLFVGNLPIDVDQDAVREFFGEVAEVASVRLPTDPDSGNLKGFGYVSFNSVEDAKAVIDAKNGAPIGNGRMSRSVRLDFASSRPQQGGGGGGFGGGRGGGRGGGRGGFGGRGGGGRGGGRGRGGRGGGRGGFGTGANSTPASYSGTKISFD

SEQ ID NO: 7743 - protein, 224 aa, Ustilago maydis 521
MSSRPMNDEEVLSEMKKMVAFIKQEAVEKAREIQIKADEEFAIEKAKIVRQEAINIESQYDKKIKQAEVAQKIAQSNQTNKSRLKILQTREQHLQSLFDAAREKLDGIAKDQDKYKKLLAELILQGLLLLMEPKVTVTVKSSDVQLAQDAAKQAENDFKEKSGKTTSVTVQEGLDKGSAGGVLLAGHAGKITINNTLDERLRLLEDRMLPEIRLDLFGPNQNRK

SEQ ID NO: 7744 - protein, 685 aa, Rhodopirellula baltica SH 1
MLRELPVSRSHAACLSMQGAPQLAAPSVVDVPSAKRLVIVGGGMAAHGFCKRVIGSTQRSRFAISVYGEEPRPAYDRVNLSSLLSGRPESDLLLSPREWYEANDIDLHTGRRITRIDLQRQQIHDDQGGVQSYDHLVLATGSYPWVPPISGSDSPGVFVYRTIDDLEAIQRYVREHGAKTSAVIGGGLLGLEAAKVITDLGLATTILEVAPGLMPRQLDAQAAKVLREKVESLGVDVHVTRRTKAIEPRDGRLTLQFENAEPSQVDIVLVAAGIRPRDELARDAGLELGPRGGIAVNRRLETSDPHVFAIGECAAVDGHIHGLVAPCYRMADVLAARLAGEQTEFVDSEEAVELKLLGVPVITLGKAIGESTSGVVVTHDGKNGYRKLILEQGRVVGAASVGEWDDVNLIRMSVAQHKRLWPTQRVRFQRTGMPYAGGTGLQIHQWPGHATVCSCMGITRHQLGMAIADGHGTAAQLSAATGAGTACGTCTNLLCELVGEGPEQVNVRGSKVVLVTSVLAACLALALFLTPPLPFATSVQDSWRKIDLFWRDGFIKQVTGFSLLFLMLAALVFSLRKRVKRISFGEYGWWRAAHAAIGTAMLFGLIVHTGVRMGSNLNFVLSLTFMLLALVGGLAGIASSLESKLSGDSAMFMRAWRPKLTWIHIALFVPLPALLAGHVFSVYWY

SEQ ID NO: 7745 - protein, 222 aa, Zea mays
MRRKIAQRMQDATRRAAHFSYVEEIDVTALDELRVHLNEKHGATRGKLTLLPFIVRAMVVALRDFPQINARYDDEAQVITRLGAVHVGVATQSDVGLMVPVVRHAEARSLWGNAEEIARLATAARNGKASRDELSGSTITLTSLGALGGIVSTPVLNLPEVAIVGVNRIVERPMVIKGQIVVRKMMNLSSSFDHRVVDGMDAAQFIQAIRGLLEQPASLFLE

SEQ ID NO: 7746 - protein, 837 aa, Blastopirellula marina DSM 3645
MTHRDDKSIYAELGKLRSDSTLAELPAHHASVDASTWGKEVEEIFDKRHDLPGVLIMVGDQLLGLISREKFLEYMSRLFSRDLYSQRPVRVLYESMNIPHLEVSADASIHDASRMALSRPRDAAYEPLAIRRQDGTFRVVSVHMLIQAQSHLLAIAKDVIQSQKESADAANRAKGQFLANMSHEIRTPMNGIIGMTELLLETELAPQQHEYLQMIKTSADCLVSVINDILDFSKIEAGKLEIESIPFQLRENLGDLMKTLAFRAHGKGLELVAHVRPDVPWRMTGDPGRLRQILVNLVGNAIKFTEHGEIVVRVDIDEISETDALLHFTVCDTGIGIPEAALQKIFAAFEQADGTTTRKFGGTGLGLSICSRLVELMHGKIWVESQVHVGSQFHFTAQLGIDANSYDERHIPPDDCRQLNVLIVDDNDTCGEIIAEMLANWGMQPTVIGGAVEAISLYAEEVTSPKFQLLIIDQQMPVLEGTELLERIQKSPRGAAAKSILLTTGTFDKEPTNPLQARVDAILSKPIKQSDLFDTLMNVMGHGVAGDLATQNAGAEPKLGSWGRRILLAEDNLVNQKLAVLLLEKRGHLVTVASDGKQAVEAWKEGGFDLVLMDVQMPILDGMAATTEIRRHETRTALRIPIIAMTAHAMKGDRERCLEAGMDGYVTKPINAQALYDAIDEALLSFPPPTHNETPDHASPPPVEMINSPLLKSLAAPKVDWEAALTNVGGDESLLQAMVDVFLTDVRRILSEIDEAIEAKDGPRLQRNAHSLKGSFGYFAAASGQDAAMLLESLGKNQKFAEAPAALRTLNEVFAEIEPELNFLLQHGKTPIAGENV

SEQ ID NO: 7747 - protein, 324 aa, Sinorhizobium meliloti
MTARHTKVLIIGSGPAGYTAAIYTARAMLSPVLIAGMEQGGQLMITTDVENYPGYADPVQGPWMMEQMLNQAIHVGTEIVNDLVTDVDLSVRPFRIKTDSGTDWTADALIIATGAKAKWLGIETEPTFMGFGVSACATCDGFFYRNKEVIVVGGGNSAVEEALYLSNLAKTVTVVHRRDAFRAEKILQERLFAKPNVKVIWDHEVLEYLGTPAKPPMPASVNGVKLRNTKTGETSDMAIDGVFVAIGHAPAVELFKGKLRQKPNGYLWTAPDSTATDVAGVFAAGDVTDDIYRQAVTAAGMGCMAALEAEKYLAGHMPAAIAAE

SEQ ID NO: 7748 - protein, 432 aa, Thiobacillus denitrificans ATCC 25259
MDNISTGTLFGVLAVLLLTSAFFSASETAMMAINRYRLRHAADSGVRGAVRAQALLDQTDKLLGVILLGNNLVNAASGTLSAVLAIRLFGDGEIVLFTATLLLTFLILVFSEVTPKVLGASFPERVAYPATLLLAPLLKLAYPVVWFVNLFVQGILKLAHIKQPDPTQGNSLGLEELRTIVLESSGRLPREHHRILVNLLELEDITVDDVMTPRSQIEAIDIEDDPERLRQQISTSHHTRLVVYQGAPDAVLGVLHVRRVLHALSGDVLDPEMMKQNLEEAYFVPAGTPLFTQLRNFQTARRRLALVVDEYGELQGLVTLEDLLEEMVGEFTTQAPSDTGYLRREEDGTWLAEGSVLLRHLNRKLGLALPLDGPKTLNGLLLEHFEDIPEAGVSLKLGDVPVEIVQTQDRAVKMARIYLPAVPEAASSRAST

SEQ ID NO: 7749 - protein, 483 aa, Brucella suis 1330
MLALKDPSLLKSQCLVNGRWIDAADGTTIKVTNPADGSVIGTVPSLSVATIKEAIDASAKALSGWAAKTAKERAGILRKWFDLIIANADDIALIMTSEQGKPLAEARGEVLYAASFIEWFAEEAKRVYGDTIPAPQNGQRLTVIRQPVGVTAAITPWNFPAAMITRKAAPALAAGCTMIVRPADLTPLTALALGVLAEKAGIPAGVLQIVTGKAREIGAELTSNDTVRKLSFTGSTEVGRLLMAQCAPTIKRISLELGGNAPFIVFDDADLDAAVDGAMVSKYRNAGQTCVCANRIYVQRGVYDKFAEKLAAKVKELKVGNGTEPGVVIGPMIEEKAITKVKAHIEDAVSKGAKLITGGKELGGLFFEPGILTGVTSDMLVAKEETFGPLAPLFAFDTEEEVIAQANDTIFGLAAYFYTENFSRAIRVSEALEYGMVGHNTGLISNEVAPFGGVKQSGLGREGSKYGIEEYLETKYICSAYKR

SEQ ID NO: 7750 - protein, 170 aa, Medicago truncatula
MTVNDDPMVVPPTLSPPNTYEAVVNGGTFDRLHDGHRLFLTASATLAKHRIVIGVCDGPMLAKKQFSELIEPIETRMNNVKTFIKSVKPELEVQAVPITDPYGPSIIDEKLEAVIVSKETLPGGLAVNRKRAERGLSQLKIEVVDLVSGESGEIKLSSSMLRKLEAEKGP

SEQ ID NO: 7751 - protein, 390 aa, Mycoplasma pulmonis
MSDLENFVPTANIKVIGVGGGGNNSVETMIQAGIQGVEFIVANTDIQALQRSSAPNFIHLGENKRGLGAGANPEVGKKAAEESIVEIKEKLKGADMVIITSGMGGGTGTGASPIIAKIARELGALTISIVTTPFEFEGNLRNKNAQEGIKNLRAVSDSIIIISNNKLLEQYGDAPMKDSFLFADTILKHTVKTITDIIAIPAHINLDFADVKTVMKDKGDALIGIGRASGKDRAVKAAIHAISSPIIETSIQGASHTIINITGSANLTLTEVHSAVNVIKNAVGPEMNTIFGATINESIGDEIYVSVIATGLSSSKKFNSEQEIKDEVSSMLKTMEIDLQASETKTILINDPLPKDEKMVLTSLLDRDSKILEKDDSQDDTLPFFLKRNV

SEQ ID NO: 7752 - protein, 120 aa, Zea mays
  misc_feature (74)..(74): Xaa can be any naturally occurring amino acid
  misc_feature (88)..(88): Xaa can be any naturally occurring amino acid
MAASMISSSALAVAPQGLPPLGRRASSFADNCSKNKIKTDKPYRIGGGLTDNADANGRKGKGKGEDQFNDKYGXNVDGYRPIYNEDDXAPTGDVYGSGTTGLLIWAGTLAVILGGGALLV

SEQ ID NO: 7753 - protein, 119 aa, Vitis vinifera
MGSSGAVKLACVMVICMVVAAPAAVEAAITCGQVASSLSQCINYLQKGGAVPPGCCSGIKSLNSAAKTTGDRQTACKCLKTFSSSISGINFGLASGLPGKCGVSVPYKISPSTDCSKVT

SEQ ID NO: 7754 - protein, 328 aa, Oryza sativa (japonica cultivar-group)
MAASLVHAAAASASPAPAARVGAFHPLASSSPFLRLACATASSPSTRRRRCLDAPLRALSAGSRLAAGWGAPRTRRVIATFAGEESVGSESGDDKEKGKGEMKPEEAQEVWKEMLKQFKDEAQRMHGLTLQAYGVYSQRAREVLLEASEKLKIHADKAQKDLSVIATEVGEEGQEYLKLAAQNSPDSIKDIIETFNSLGKLKISEYEDYHVGIPFGTFLTVGGFLNFMLTGRTSAIRFGIILGFALLAMGISSLRSQRAGGRRPRLLLKGQAAIASVIFFRELLIFFHYGWFPNIFVVLLSGAVTAFYTHRIMTGGHKGPSSESTAEN

SEQ ID NO: 7755 - protein, 683 aa, Zea mays
MGMSAASHLCASSSLRALTVLFVLAAFVSDVEGRHRRHVCPPYFSCGGLSNISYPFRRQGDPSGCGVQSYELVCTDTDATIRIGSGTYKVLSINSTYSYFWVVDADLDIQSSCPLPRWDYPARWINRNSHRWRIEFSHYYLYSSFYTVSRWAIFVNCSQPIENNDICNNIYDDDVYGPVSCLSNSSFIYLLVTDNWDVISAGDLEPSCGYLAKTPLGGPGMTVPSNTSYPDVVKFMRNGFALGFPFSIRSYPTIRECLAENMRTFHKEPRNSTGIRQQILDILTFETLWFCVIEQLGSTNNGVKSVLIDIIQQIPYVLSSLKSAHVICRFVLMPLAVFVFLAYKYWKTQITIDAVEKFLRMQNMLVPMRYAYTNIIAITGHFRDKLGQGGYGTVYKGVLLPGEIHVAVKMLGNSNCNGEEFISEVATIGKIHHVNVVRLIGFCSEENIRALIYEFMPRGSLDKYIFSSEKTFSWDKLNEIALGIARGLNYLHHGCDMQIVHFDIKPHNILLDSNFVPKVADFGLAKLFPRDDSFVPLSAMRGTIGYIAPEMVSRSFGIISSKSDVYSFGMLLLEMTGGRRNADPHAGSSSQAYYPSLVYRQLSQGDANRISEGVDMHELEKKLCIIGLWCIQMKPQDRPTMSEVIEMLEAGVDGIQMPPRPYFCDEEGDSSYSTISELDTIEE

SEQ ID NO: 7756 - protein, 549 aa, Salmonella typhimurium
  misc_feature (4)..(4): Xaa can be any naturally occurring amino acid
  misc_feature (200)..(200): Xaa can be any naturally occurring amino acid
  misc_feature (224)..(224): Xaa can be any naturally occurring amino acid
  misc_feature (272)..(272): Xaa can be any naturally occurring amino acid
  misc_feature (282)..(282): Xaa can be any naturally occurring amino acid
  misc_feature (290)..(290): Xaa can be any naturally occurring amino acid
  misc_feature (322)..(322): Xaa can be any naturally occurring amino acid
  misc_feature (357)..(357): Xaa can be any naturally occurring amino acid
  misc_feature (417)..(417): Xaa can be any naturally occurring amino acid
  misc_feature (470)..(470): Xaa can be any naturally occurring amino acid
  misc_feature (501)..(501): Xaa can be any naturally occurring amino acid
SNAXAIHNRAGQPAQQSDLINVAQLTAQYYVLKPEAGNAEHAVKFGTSGHRGSAGRHSFNEPHILAIAQAIAEERAKNGITGPCYVGKDTHALSEPAFISVLEVLAANGVDVIVQENNGFTPTPAVSNAILVHNKKGGPLADGIVITPSHNPPEDGGIKYNPPNGGPADTNVTKVVEDRANALLAGGLQGVKRISLDAAXASGHVKAVDLVQPFVEGLADIVDXAAIQKAGLTLGVDPLGGSGIEYWKRIAEHYKLNLTLVNDQVDQTFRFXHLDKDGAIRXDCSSECAXAGLLALRDKFDLAFANDPDYDRHGIVTPAGLXNPNHYLAVAINYLFQHRPLWGKDVAVGKTLVSSAXIDRVVNDLGRKLVEVPVGFKWFVDGLFDGSFGFGGEESAGASFLRFDGTPWSTDKDGIIXCLLAAEITAVTGKNPQEHYNELAARFGAPSYNRLQASATSAQKAALSKLSPEXVSASTLAGDPITARLTAAPGNGASIGGLKVXTDNGWFAARPSGTEDAYKIYCESFLGEEHRKQIEKEAVEIVSEVLKNA

SEQ ID NO: 7757 - protein, 347 aa, Sulfolobus tokodaii str. 7
MDYNKNYIEELFDSEVYRRLGDVEKDRVTRIYLYKLSEMERKHSEIWKEIAISRGIKLGKLKWYHKWKINFYVIFRKIFGLELTTKLLENGEESDIKKYYELSKSEELSEEERQKMRELSVDEAVHEEIISTVKSKDVSDFVYGISDGLVEVLAATSGLSGAFNIPFLVGISGLIIGASGTLSMAIGAYLSTKSEKEINEHKRRKIEIQKLVDRKEVAKKLSMILTELGIRENIASDISPQLVDVAEDIIAPKVEESPKKSAGVTALSYISGAVIPIIPYLLGIGGLVGVISSYIISGIAIFIVGYLIGLLSSVNPAKKGVEMLSLGILAAIGTHILGLLASYYLHI

SEQ ID NO: 7758 - protein, 183 aa, Arabidopsis thaliana
MMSLPKMRLSCLQPHLHFTSSRSIAAALAFPSSSIRNRTSCLVRCGSARRRLTTKSSRNSKLERAQPPPLGLERHWRYAVVGGVSVGLMMVLVLGMDAEKAMALGPEGPLMEEFWDNVRRYGLYALTVSTGALSAVFEPIFELLKNPISAILILLILGGSFYIVSQVVSAMIGVNEFAYQYSY

SEQ ID NO: 7759 - protein, 385 aa, Wolinella succinogenes
MQITVEEATTITGARIKVIGVGGGGSNMISHLIAGGSHEDIELAIANTDAQALNASPAPIKIQLGARLTKGLGAGMQPETGRNAAIESFEDIKALLSGTDIVFISAGLGGGTGTGAAPIIAQAAKEAGALTISIVTKPFKFEGSKRSKLAEQGLAELKKESDSIVVIPNDKLLSIVDKNLGIKESFKIVDDVLARAVNGMSGIILNHGENDINVDFADVRTVMSHRGLALMGIGESSGNNAAYEAIKNAIESPLFDNMSINGAMGVLVHFYIHPDYPLQQISSAMEIVEECASSDAYVIFGTTTDASAPKDAVKITIVATGFEKELVRPDSQEEANTLKLVASKDLSQSTKALSSASTLRKVSGGDYEQNEDILEIPTFIRKQMD

SEQ ID NO: 7760 - protein, 500 aa, Crocosphaera watsonii WH 8501
MCGIAGIWGQTEQTNVEAMMKSIIHRGPDAKGIFTVPNGSGILGHQRLSIMDVDGGDQPIYSKANTQAIIGNGEIYNYPKLQPELAKKYKFLTKSDTEAVLHLYEEKNTTAVGELDGMFAFAIIDDNKFIAARDPIGIKPLYYSEKDGNFWFASELKAITQFCENVEEFPPGHFFSSETGFSQYYSLPDIPPELDANVDELLQEIRETVEASVVKRLMSDVPLGAFLSGGLDSSIIAAIAKKHKSELHTFSVGIAGSKDINAARLVSDYLGTIHHEYIITPEEAIAKLPEIIYYLESFDQDLVRSGIPCYFTSRLASEYVKVILTGEGADELFAGYTYYKDIPSDDTLHRELRRSVNSLHNINLQRVDRLTMAHSIEGRVPFLDLKMIELGQKVPAHLKLKGTPPVEKWILRKAFEDILPEEIVWRKKEQFDEGSGTVDLLTETLKDVMNEQQAQQYQKEHPDIKLRSAEECYYHQIFMKAFDNPDALLTNVARWAETRF

SEQ ID NO: 7761 - protein, 139 aa, Glycine max
MESRKPQRSALVDSYVVPGDVILDLADMTNQTIKLGAGLRQDCDTIQATSAGRLRLSKPNKYWVENSQKRYVPSVEDTVLGIVVDTKPDNFLVDIKGPNLAFLPVLSFEGGTRRNIPKFEIGTLIYARMVKANSIMNPE

SEQ ID NO: 7762 - protein, 289 aa, Pasteurella multocida subsp. multocida str. Pm70
MSILINKDTKVICQGFTGGQGTFHSEQALAYGTQLVGGVSPGKGGTTHLGLPVFNTVRDAVDATGATASVIYVPAPGCKDAILEAIDAGIQLVICITEGIPTLDMLQVKQRLNQTGVRMIGPNCPGVITPEECKIGIMPGNIHKKGKIGIVSRSGTLTYEAVKQTTDEGFGQSTCVGIGGDPIPGSNFIDILKLFQDDPQTEAIVMIGEIGGSAEEEAAAFIKDYVTKPVVSYIAGVTAPKGKRMGHAGAIISGGKGTADEKFAALEAAGVKTVRSLAEIGAALKALLK

SEQ ID NO: 7763 - protein, 423 aa, Propionibacterium acnes KPA171202
MSDVVITGFGTTTPLGPDAPSTWQGLLEGRNGVHTLDFDWIDDVPVKFAAPAVDDPANHLPRPQARRLDRSSQLALVAAKEAWADAGLELPEADDNSGSNGIDPERLVVCCATGIGGLHSLLGQWDIQKDKGFKRVSPFTVPMLMANAPAANIGLMVHAKAGVHTPVSACASSSEAISLGLDQLHLGRADIAVVGGAEAIIHPLPVAAFAQMKALSTRNDDPEHASRPWDVDRDGFVIGEGAAIMVIETLEHAQARGAKIYGTLAGSGISADSHDIVQPDPTGSGQASAMHKALASAGLSPSDVNHVNAHATSTPLGDTAEAHSIAAVLEKATDQVLVNGTKSMTGHLLGGAGALESFAAVMALLKRQVPGTINVEHLEEGLEINVVTETTDLPDGDLAALNNSFGFGGHNVTLAFTNTNATR

SEQ ID NO: 7764 - protein, 292 aa, Arabidopsis thaliana
MGVIINHHFLAFIFGILGNVISFLVFLAPVPTFYRIYKRKSTESFQSLPYQVSLFSCMLWLYYALIKKDAFLLITINSFGCVVETLYIAMFFAYATREKRISAMKLFIAMNVAFFSLILMVTHFVVKTPPLQVSVLGWICVAISVSVFAAPLMIVARVIKTKSVEYMPFTLSFFLTISAVMWFAYGLFLNDICIAIPNVVGFVLGLLQMVLYLVYRNSNEKPEKINSSEEQLKSIVVMSPLGVSEVHPVVTESVDPLSEAVHHEDLSKVTKVEEPSIENGKCYVEATRPETV

SEQ ID NO: 7765 - protein, 666 aa, Arabidopsis thaliana
MQDFFGSVRRSLVFRPSSDDDNQENQPPFPGVLADKITSCIRKSKIFIKPSFSPPPPANTVDMAPPISWRKGQLIGRGAFGTVYMGMNLDSGELLAVKQVLIAANFASKEKTQAHIQELEEEVKLLKNLSHPNIVRYLGTVREDDTLNILLEFVPGGSISSLLEKFGPFPESVVRTYTRQLLLGLEYLHNHAIMHRDIKGANILVDNKGCIKLADFGASKQVAELATMTGAKSMKGTPYWMAPEVILQTGHSFSADIWSVGCTVIEMVTGKAPWSQQYKEVAAIFFIGTTKSHPPIPDTLSSDAKDFLLKCLQEVPNLRPTASELLKHPFVMGKHKESASTDLGSVLNNLSTPLPLQINNTKSTPDSTCDDVGDMCNFGSLNYSLVDPVKSIQNKNLWQQNDNGGDEDDMCLIDDENFLTFDGEMSSTLEKDCHLKKSCDDISDMSIALKSKFDESPGNGEKESTMSMECDQPSYSEDDDELTESKIKAFLDEKAADLKKLQTPLYEEFYNSLITFSPSCMESNLSNSKREDTARGFLKLPPKSRSPSRGPLGGSPSRATDATSCSKSPGSGGSRELNINNGGDEASQDGVSARVTDWRGLVVDTKQELSQCVALSEIEKKWKEELDQELERKRQEIMRQAGLGSSPRDRGMSRQREKSRFASPGK

SEQ ID NO: 7766 - protein, 566 aa, Acinetobacter sp. ADP1
MTAETNTNKHPLYIPYAGYTLLELPLLNKGSAFTQEERSHFNLHGLIPHVIETIEEQSQRSYQQYGAFNDDINKHIYLRNIQDTNETLFYRLINDHLEEMMPIIYTPTVGEACQRFSDIYRRHRGIFISYPDREHIDDILQNVSKRNVKVIVITDGERILGLGDQGIGGMGIPIGKLSLYTACGGISPAYTLPITIDVGTNNQQLLNDPIYMGWRQPRISGDEYYEFIDQVLTGIRRRWPHALIQFEDFAQKNAMPLLTKYRDKFCCFNDDIQGTAAVSVGSLIAASRAAGKQLKDQTITFLGAGSAGCGIAEQIVAQMVAEGLTDAQARARVYMVDRFGLITENQPNLLDFQRKLAQKAEVVSDWGNVEEVISLLDVVKNAKPTVLIGVSGQPGLFTEEVIRTLAENCERPIVMPLSNPTSRVEALPSDVIQWTNGRALIATGSPFAPVNYQGKLYNISQCNNSYIFPGIGLGVIASGAKRVTDNMLMASSNALADCSPLLQNPNADLLPAIADIQDVSKRIAFKVAKAAIEDGVALNMSDEVLLQNIEKEFWKPKYRGYKRVPF

SEQ ID NO: 7767 - protein, 175 aa, Triticum aestivum
MAPTVMASSATSVAPFQGLKSTAGLPVSRRSNGASLGSVSNGGRIRCMQVWPIEGIKKFETLSYLPPVSTEALLKQVDYLIRSKWVPCLEFSKVGFIFREHNASPGYYDGRYWTMWKLPMYGCTDATQVINEVEEVKKEYPDAYVRIIGFDNMRQVQCVSFIAFKPPGCEESGKD

SEQ ID NO: 7768 - protein, 957 aa, Escherichia coli CFT073
MTQTLSQLENSGAFIERHIGPDAAQQQEMLNAVGAQSLNALTGQIVPKDIQLATPPQVGAPATEYAALAELKAIASRNKRFTSYIGMGYTAVQLPPVILRNMLENPGWYTAYTPYQPEVSQGRLEALLNFQQVTLDLTGLDMASASLLDEATAAAEAMAMAKRVSKLKNANRFFVASDVHPQTLDVVRTRAETFGFEVIVDDAQKVLDHQDVFGVLLQQVGTTGEIHDYTALISELKSRKIVVSVAADIMALVLLTAPGKQGADIVFGSAQRFGVPMGYGGPHAAFFAAKDEYKRSMPGRIIGVSKDAAGNTALRMAMQTREQHIRREKANSNICTSQVLLANIASLYAVYHGPVGLKRIANRIHRLTDILAAGLQQKGLKLRHAHYFDTLCVEVADKAGVLARAEAAEINLRSDILNAVGITLDETTTRENVMQLFSVLLGDNHGLDIDTLDKDVAHDSRSIQAAMLRDDEILTHPVFNRYHSETEMMRYMHSLERKDLALNQAMIPLGSCTMKLNAAAEMIPITWPEFAELHPFCPPEQAEGYQQMIAQLADWLVKLTGYDAVCMQPNSGAQGEYAGLLAIRHYHESRNEGHRDICLIPASAHGTNPASAHMSGMQVVVVACDKNGNIDLTDLRAKAEQAGDNLSCIMVTYPSTHGVYEETIREVCEVVHQFGGQVYLDGANMNAQVGITSPGFIGADVSHLNLHKTFCIPHGGGGPGMGPIGVKAHLAPFVPGHSVVQIEGMLTRQGAVSAAPFGSASILPISWMYIRMMGAEGLKKASQVAILNANYIASRLQDAFPVLYTGRDGRVAHECILDIRPLKEETGISELDIAKRLIDYGFHAPTMSFPVAGTLMVEPTESESKVELDRFIDAMLAIRAEIDQVKAGVWPLEDNPLVNAPHIQSELVAEWAHPYSREVAVFPAGVADKYWPTVKRLDDVYGDRNLFCSCVPISEYQ

SEQ ID NO: 7769 - protein, 117 aa, Triticum aestivum
MARVALLAVFAVLAALAVAEMASGAVTCGDVTSAIAPCMSYATGKASAPSAGCCSGVRTLNGKASTSADRQAACRCLKNLAGSFKGISMGNAATIPGKCGVSVSFPINTNVNCNNIH

SEQ ID NO: 7770 - protein, 555 aa, Buchnera aphidicola str. Sg (Schizaphis graminum)
MKNINLIETKSWKDLKNHFKEVKNIHLKDLFLSDFNRFKKFSIFFENEILIDFSKNRITEKTLILLLNLAKEMNVKSAIKLMFSGSKINQTENRSVLHIALRNRSNFPILLNNSDIMSEVNDVLKKMKNFSELVIDGTWKGYSGKSISDVVNIGIGGSDLGPYMVTEALRPYKNHLNIHYVSNIDGTHLSEILKKINPETTIFLIASKTFTTDETITNANSAKFWFLKHSKTKETLDKHFFALSANINNAVNFGINIKNIFQFWDWVGGRFSLWSSAGLSIVLSIGFNNFEKFLQGAHVMDNHFYHTEYDKNIPILLALISIWYTNFFNSETEAIFPYDQYMHRFSAYFQQSNMESNGKSIDKNGNKVCYQTGPIIWGEPGTNGQHAFFQLIHQGTKLIPSDFIVPTVSHNNLNDHHLKLISNFLAQTQVLAFGKSKNSFLKESTSFKKEEDEFNRILPFKICEGNKPTNSILLRKITPYTLGMLIALYEHKIFVQGHILNIFSFDQWGVEIGKEVAQSIYKNINEKTKNSKSYDSSTQGLIDFYNFFKNKQNYL

SEQ ID NO: 7771 - protein, 95 aa, Oryza sativa
VAAVSCGDVTSSIAPCLSYVMGRESSPSSSCCSGVRTLNGKASSSADRRTACSCLKNMASSFRNLNMGNAASIPSKCAVSDRFPISTSVDCSKIN

SEQ ID NO: 7772 - protein, 396 aa, Geobacter metallireducens GS-15
MAKAKFERTKPHVNIGTIGHVDHGKTTLTAAITRVLAERGQAEFKGFDQIDNAPEERERGITIATSHVEYETEKRHYAHVDCPGHADYVKNMITGAAQMDGAILVVSAADGPMPQTREHILLARQVGVPYIVVFLNKADMVDDEELLELVELEIRELLSSYDFPGDDIPIIKGSALKALNGDKDELGSEAIVKLMDAVDAYIPEPERAIDKPFLMPVEDVFSISGRGTVATGRVERGVVKVGEEVEIVGIKTTTKTTVTGVEMFRKLLDEGRAGDNIGALLRGVKREDIERGQVLARPGSITPHTKFKAEAYILTKEEGGRHTPFFNGYRPQFYFRTTDVTGIVDLPAGTEMVMPGDNVAVTVNLITPIAMDEGLRFAIREGGRTVGAGVVSSIIE

SEQ ID NO: 7773 - protein, 254 aa, Mycobacterium sp. KMS
MTGPVRVERNGAVTTVIIDRPDARNAVNRPTAEALYEAFDAFDRDDSAAVAVLWGDHGTFCAGADLKAFGTPDANAVHRSGPGPMGPTRMVLSKPVIAAVSGYAVAGGLELALWCDLRVVEEDAVLGVFCRRWGVPLIDGGTVRLPRLIGQSRAMDLILTGRPVDAAEAHAIGLANRVVPKGQARRQAEELAAEIARFPQQCMRADRGSALGQWGLPEAEAIDREFASISRVRDEALEGAGRFAAGAGRHGAKA

SEQ ID NO: 7774 - protein, 318 aa, Burkholderia xenovorans LB400
MQMFKVVVNRVDELAAGIRSYELVAEPHATLPPFEAGSHIDVITPAGHTRQYSLCNDEQERHRYVIAVKREPQSRGGSASMHDTLTAGTTLTIGYPRNNFELDAHEPAVILLAAGIGITPLLAMAFRLGTQGRTFALHYFVRGDEHIAFRDILLSPRFSRWVELHRGLDAAATRATLAKILAAPPAGAGVYLCGPLPFIEAGQQCMAGKSGCNLHVEYFAAPPQAPHDGDQPFEVILARTGRTLVVPPGKSIVDTLADAGIHADVSCEQGVCGTCITPVLGGVPDHRDVYLTDEEKASGKCMMICVSRARGARLELDL

SEQ ID NO: 7775 - protein, 174 aa, Vibrio cholerae
  misc_feature (1)..(1): Xaa can be any naturally occurring amino acid
  misc_feature (4)..(4): Xaa can be any naturally occurring amino acid
  misc_feature (77)..(77): Xaa can be any naturally occurring amino acid
  misc_feature (105)..(105): Xaa can be any naturally occurring amino acid
  misc_feature (108)..(108): Xaa can be any naturally occurring amino acid
  misc_feature (136)..(136): Xaa can be any naturally occurring amino acid
  misc_feature (156)..(156): Xaa can be any naturally occurring amino acid
XSLXRDITPDLCDKYESQVTLLNLPLQNFGQRSAFWGEIVTVRCYHDNSKVRDVLSQNGKGKVLVVDGHGSCHKALXGDQLAILAIKNDWEGVIIYGAVRDVVAXSEXDLGIKALGTSPFKTEKRGAGQVNVTLTXQNQIVEPGDYLYADWNGILXSETALDVAEGGSHHHHHH

SEQ ID NO: 7776 - protein, 593 aa, Pyrococcus abyssi GE5
MVRKMRIAVIDYDKCNPDKCGHFLCERVCPVNRMGGEAIIIDEENYKPIIQEASCTGCGICVHKCPFNAISIVNLPEQLDEDCVHRYGVNAFVLYRLPIVKDGMVVGIVGPNGTGKTTAVKILAGQLIPNLCEDNDSWDNVIRAFRGNELQNYFERLKNGEIRPVVKPQYVDLLPKAVKGKVRELLKKVDEVGKFEEVVKELELENVLDRELHQLSGGELQRVAIAAALLRKAHFYFFDEPSSYLDIRQRLKVARVIRRLANEGKAVLVVEHDLAVLDYLSDVIHVVYGEPGVYGIFSKPKGTRNGINEFLQGYLKDENVRFRPYEIRFTKLSERVDVERETLVEYPRLVKDYGSFKLEVEPGEIRKGEVIGIVGPNGIGKTTFVKMLAGVEEPTEGKVEWDLTVAYKPQYIKAEYEGTVYELLSKIDSSKLNSNFYKTELLKPLGIIDLYDRNVEDLSGGELQRVAIAATLLRDADIYLLDEPSAYLDVEQRLAVSRAIRHLMEKNEKTALVVEHDVLMIDYVSDRLIVFEGEPGRHGRALPPMGMREGMNRFLASVGITFRRDPDSGRPRANKEGSVKDREQKARGEYYYA

SEQ ID NO: 7777 - protein, 371 aa, Medicago truncatula
MATRRSIPLLKHLLSTRSQSEPFTISKRCVTYMHRPGDGTPRPVTLIPGDGIGPLVTGAVEQLMEAMHAPVYFEKFDVHGDMKAVPTEVLESIRKNKVCLKGGLVTPMGGGVSSLNVQLRKELDLYASLVNCFNLPGLPTRHDNVDIVVIRENTEGEYAGLEHEVVPGVVESLKVITKFCSERIAKYAFEYAYLNNRKQVTAVHKANIMKLADGLFLESCREVATKYPGIKYNEIIVDNCCMQLVSKPEQFDVMVTPNLYGNLVANTAAGIAGGTGVMPGGNVGAEHAVFEQGASAGNVGNEKVAAQKTANPVALLLSSAMMLRHLQFPAFADRLENAVEKVILEGKYRTKDLGGTSTTQEVVDAVIDALD

SEQ ID NO: 7778 - protein, 379 aa, Bacillus cereus ATCC 14579
MVAEKGTQTKTQQQREQHFELLNSTQIVISEALEKLGYPNEVYELLKEPIRMMTVKIPVRMDDGTVKIFTGYRAQHNDAVGPTKGGIRFHPNVTENEVKALSIWMSLKCGIVDLPYGGGKGGIICDPREMSFRELERLSRGYVRAISQIVGPTKDIPAPDVFTNSQIMAWMMDEYSRIDEFNSPGFITGKPLVLGGSHGRETATAKGVTICIREAAKKRGIDIKGARVVVQGFGNAGSFLAKFMHDAGAKVIAISDAYGALHDPNGLDIDYLLDRRDSFGTVTKLFNNTISNKELLELDCDILVPAAIENQITEENANDIKAKIVVEAANGPTTLEATKILTDRGILLVPDVLASAVWLPVSTLSGSKTPKVTTGLRRK

SEQ ID NO: 7779 - protein, 516 aa, Bacillus subtilis subsp. subtilis str. 168
MNYIKAGKWLTVFLTFLGILLFIDLFPKEEHDQKTKSKQKPDYRAAYHFTTPDKWKNDPQKPIYFDGKYHYFYLYNRDYPKGNGTEWRHAVSEDLVHWTDEGVAIPKYTNPDGDIWTGSVVVDKENTAGFGKNALVAIVTQPSAKDKKQEQYLWYSTDKGKSFKFYSGNPVMPNPGTDDFRDPKVIWDDQDNKWVMVMAEGSKIGFYESDNLKDWHYTSGFFPEQAGMVECPDLYMMRASDGTNKWVLGASANGKPWGKPNTYAYWTGSFDGKEFKADQTEAQWLDYGFDWYGGVTFEDSKSTDPLEKRYALAWMNNWDYANNTPTMKNGFNGTDSVIRELRLKEQDGTYSLVSQPIEALEQLTVSTDEIEDQDVNGSKTLSITGDTYQLDTDLSWSELKNAGVRLRESEDQKRHIDVGIFAEGGYAYVNRAATNQPDKSNTYVESKAPYDVNKRKVHLKILVDKTTIEVFVGDGKTVFSNEVFPKPEDKGITLYSDGGTASFKNITVKHFDSIHE

SEQ ID NO: 7780 - protein, 417 aa, Mycobacterium aurum
MSRPSTANGGFPNVVVTAVEATTSVAADAEGTWKALLTGQSGIRELTDDFVTKWDLPVRIGGHLVDGVDEHMTRLDMRRMSYVQRMGKLLGNRLWENAGKPEVDPDRFAVVIGTGIGGGEKIVETYDSMNEGGIRRCHRSPEVDLDHAQWRCAVVGLEARGARRGHHPVSACSSGSEAIAHAWRQIVMGDADFAVCGGVEGGIEALPIAAFSMMRAMSTRNDNPEGASRPFDKNRDGFVFGEAGALMIIETEEHALARGAKPLARIMGAGITSDAYHMVAPAADGLRAGQAMKRAMETAGLAPEDINHVNAHPTSTSIGDTAEANAIRVAGVGHAAVYAPKSALGHSIGAVGALESILTVLALRDDVIPPTLNYETPDPEIDLDVVAGEPRYGDYQYAINNSFGFGGHNVALAFGRY

SEQ ID NO: 7781 - protein, 311 aa, Shewanella sp. MR-7
MFFEGAEKKLEIRLTPKLASLRLREYGFWSTLVACANAEILSTSSNHACDAYLLSESSLFVWDDKILILTCGNSTLIEAASYFINALGTEHIAALCYQRKNEYQAQLQSTSFADDIAKLRLLIPGEAFRMGHLDSHHHYVFCAENQSVSSSETSLELMMYHIRGELAEYLKLPTQTEQGIYQQLGLQQLFGDFQLDMHCFQPAGFSLNAIRGADYFTLHITPSMGQGDNSYISFETNLDLAVYPHPVVARLLDLFSPISWDLINFNQPINTAGFPAHICLGQGLVTTGSGSQISFRHYQQLEPQILQPEFI

SEQ ID NO: 7782 - protein, 422 aa, Mycobacterium aurum
MAGVKGLSTGNGFPNVVVTGYTMTTALATDADTTWRKLLDGESGIRTLTDPFVEEYDLPVRIGGRLLEDFDDELTRVELRRLSYLQKMSTVLSRRVWEHAGNPDVDPKRLMVSIGTGMGSTEQLLFACEGMKAKGLRAVSPLAVQMYMPNAAAAAVGLERKARAGVITPVSACASGSEGVAQAWRNIVLGEADVAICGGVETRIEAVPIAGFAQMRIVLSTTNDDPPGACKPFDKDRNGFVFGEGGALMVIETEEHAKARGATIMPRLMGASITSDGYHIVAPDPNGEQAGYAMTRAIQLAGLQPSDIDHINAHATGTSVGDVAESKAIRNAIGDHQPAVYAPKAPLGHSVGAVGAVEVQSSPSSPFARASIPPTRNLEEPRPGDRTSTVVAGSPRPGNYEYAINNSFGFGGHNVALAFGKY

SEQ ID NO: 7783 - protein, 134 aa, Zea mays
MDGGGGGGGGGGGVGAGVMVGGGVVPGGGGGDVELVSKTLQFEHKLFYFDLKENPRGRYLKISEKTSATRSTIIVPIDGVAWFLDLFDYYIRTDERDVFSKELRLQTKVLARFLRGWPGSAAGSRAVAANFGVA

SEQ ID NO: 7784 - protein, 168 aa, Zea mays
MAAASSATSVHDFTVKDASGKDVDLSVYKGKVLLIVNVASQCGLTNSNYTELSQLYPKYKDQGFEILAFPCNQFGGQEPGTNDEIVQFACTRFKAEYPIFDKVDVNGSNVSPLYKFLKSSKGGLFGDSIKWNFSKFLVDKEGHVVDRYAPTTSPLSIEKDIKKLLGSS

SEQ ID NO: 7785 - protein, 611 aa, Sinorhizobium meliloti
MFQSFEVTSTPQFGKERTTALRAALATLGVDGFLVPRADEFQGEYVPRSSERLSWLTGFTGSAGVALVTQREAIVFVDGRYVTQLKEQVDGSVFTGGDLIGEPPHVWLERHGPKGFRLGIDPWLHTAAEVRRLEKALAAIGGSVVLLDHNPLDRLWTDRPATPLGPVTIQPVEHAGQLAKDKIAEIAAGVAKAKAAAVVLTDPSSVAWTFNIRGSDVPHTPHPLARAIIHADGSAELFLDKRKTGIEQEAYLTQLADIMAPASFDDRLAALASTGAAIMIDPDLAPFAIGELIRRKEGSVVEAVDPARLPRACKNAAEIAGSTRAHLQDGAAMVEFLAWLDGREPGSVTEIGATRQLEATRAAVGERMQNPLKDVSFDTIAGAGSHAAIMHYRVTNETDRRIEAGTMFLIDSGAQYINGTTDITRTVAIGAVPEEQKRFFTLVLKGMIAISTARFPKGSRGVDLDPLARIALWKAGADYAHGTGHGVGSYLSVHEGPQRIARLATQELLPGMILSNEPGYYRPGAFGIRIENLVVVREPEEIEGGDQPMLGFDTLTFCPIDRRLVLPALLTDDELDWLNAYHAETLEKLMPLLSGTETRDWLASATEAIVR

SEQ ID NO: 7786 - protein, 481 aa, Propionibacterium acnes KPA171202
MASNGHARVEMKPGDSGSAGATRNSQTSRAVFIAVTAAALGITYGYDISNTAAALQFVQRDFGIYSAINTASVVGQIAGAILGGPMANAIGRKKSMLVIAAGYTIFAILTAISPSAGLFLAMRVLLGITIGLSITVVPVFIAESAPASRRGGLATAYQVTCVVGIILGYLVGYSLLPTDTWRWILGVAAVPAFIVLLMLVRTQETPSWYMLKGREDEARRAMERIEVAELVEPSLDEIRNSLSSRPSGSVWGRLREMFHGGMARATIFAIVLGFSIQITGINATIYYAPGIYSRMGFTDTATTYLVPSLVQFLSLISVVISMLVIDKVGRRFVLITGISTMIVATIVLIVTYLASGFEGAVAGIIGLVGMSLFTMGFTFGFGSIVWVYAGEIFPARYRSLGASLVLTADLIANAITAQLGAAMLDGIGLAGTFGVYGGLLVVALLFLLRYAPETSGRSLEEIQDYWNNGARWPKADSPSMG

SEQ ID NO: 7787 - protein, 355 aa, Nanoarchaeum equitans Kin4-M
MEEFIRAAQERAKMDEKQQIDEYLNRIKKKIKVIGVGGAGCNTINRLYELGLQDVELIAVNADVKDLAKIKAHKKVLIGEEVTRGLGTGRDPELGEQAARESEKVIKELLQGTDMVFITFGLGGGTGTGAGPVIADIAKQMGILTVAVVSWPFSSEGNLTLRNAQWGLARLEETTDTHIVIPNDKLLEIAPNLPIAVAFKLSDEVLANTIKKTTELILKPGQVTRDFADLKVILENGGLGMVGFGESDSENKALEAIERAINNPLLDTDVSGAKRALLHIVAGPDFKTEELNKILEYVSNKLDPEAKLLWGLWIEEEKKGKVEIMILVTELKNVPDYLKISEKRKKKDELGIDVI

SEQ ID NO: 7788 - protein, 115 aa, Triticum aestivum
MARGAATQLVLVSMVAAMLLVACDAAMSCGQVTSALSPCISYARGNGANPPAACCSGVRSLAGAARSTADKQAACKCIKSAAGGLNAGKAAGIPLKCGVGVPYAISSSADCSKIR

SEQ ID NO: 7789 - protein, 845 aa, Blastopirellula marina DSM 3645
MSLSTRAILLTICTILGLATCAPSLSAEPAPPTCCAGSECDTPNAAAPAEARQFHADTFTGFFSKLFDASDYPARWFCGNWTLETGWLHVLSDVAIFGAYFAIPLVLLYFLRQRPDLPFPKIVWLFAAFILACGFGHLVEAGIFWWPVYRFSGLIKAMTATVSWATVLVLIRMTPDLLKLPSMALLGQKLQTANERLDCALEAGGIGVWQWRDENDQFEADGRALQMHGIQATDNVSTLAEFLDLLHEDDREELRTATARCVSHGTNYSVNYRIPRANGTVRYIQSHGKVLSSDDGKTRKLVGVCIDQTELTEYHAAVKKLSLVASSTRHSVVITNQAGETEWVNNAFTQLTGYSAEEAIGRKPGSLLQGPETNQETIEIVRRALQKQEQVSAELLNYAKDGHSYWIALEIEPVFDQEGRLSNFIATQIDITDQVRRTEELIEAMETAESANHAKSQFLANMSHEIRTPLNGIMGFTDLLLYDIESTEADRREYLETVRSSGEHLLALINEILDLSKIESGQLLIEKFPCSPQQILTDVISVLRPKFEEKKIQIRRHWDSDIPTQVLTDAPRLKQLLLNIVGNAIKFTQTGEVRIVARLEAEATRSRLIFDVIDTGIGIPQGKLEMIFQPFSQADSSVTRRFGGTGLGLTISRNLAELLGGSLHAESVEGLGSKFTITVDAGNLTLSSEPKPAPPEDAPTAMIHETKLPSLSGVQALVVDDGEANRRFISVVLEHAGANITMAENGQEAVDSIAEHTSDIILLDMQMPVMDGYVAAELIRFQGFTGPIIAVTAHAMQGDREKCLAAGCSGYLSKPLSREELLRTVAYALHEQRLRDADAPHDIAF

SEQ ID NO: 7790 - protein, 725 aa, Fusobacterium nucleatum subsp. nucleatum ATCC 25586
MNNYWEQLLDKAKANHLNLDFDKIKLALGFAEESHQGQYRKSGDDYIIHPVEVAKILMDMKMDTDTIVAGLLHDVVEDTLIPIADIKYNFGDTVATLVDGVTKLKTLPNGTKNQAENIRKMILAMAENIRVILIKLADRLHNMRTLKFMKPEKQQSISKETLDIYAPLAHRLGMAKIKSELEDIAFSYLHHDEFLEIKRLVDNTKEERKDYIENFIRTIIRTLSDLDIKAEVKGRFKHFYSIYKKMYQKGKEFDDIYDLMGVRVIVEDKATCYHVLGIVHSQYTPVPGRFKDYIAVPKSNNYQSIHTTIVGPLGKFIEIQIRTKDMDDIAEEGIAAHWNYKENKKSSKDDNIYGWLRHIIEFQNESDSTEDFIEGVTGDIDRGTVFTFSPKGDIIELPVGATALDFAFMVHTQVGCKCVGAKVNGRMVTIDHKLKSGDKVEIITSKNSKGPSIDWLDIVVTHGAKGKIRKFLKDENKETVTKIGKDNLEKEASKLGMTLKELENDLTLKKHMEKNNIPNLEEFYFYIGEKRSRLDVLITKIKTSLEKERAASTLTIEEVLKKKEEKKKEGKNDFGIVIDGINNTLIRFAKCCTPLPGDDIGGFVTKLTGITVHRKDCPNFHAMVEKDPSREILVKWDENLIETKMNKYNFTFTVVLNDRPNILMEIVNLIANHKINITSVNSYEVKKDGDRIVKVKISIEIKAKTEYDYLINNILKLKDVISVER

SEQ ID NO: 7791 - protein, 308 aa, Zea mays
MAAGLSGAAMTGFVAKNPLLAAAARRRALPPLAGRALPFSPLTTARAPRRRGLGTVTCFVPQDTEHPAAAPAPVAPVPETALDEEARAAAARRVAERKARKRSERRTYLVAAVMSSLGVTSMAVAAVYYRFSWQMEGGAVPVSEMFGTFALSVGAAVGMEFWARWAHRALWHASLWHMHESHHRPREGPFELNDVFAIVNAVPAISLLAYGFFHRGLVPGLCFGAGLGITLFGMAYMFVHDGLVHRRFPVGPIANVPYFRRVAAAHKIHHMDKFEGVPYGLFLGPKELEEVGGLDELEKELARIGRTI

SEQ ID NO: 7792 - protein, 462 aa, Arabidopsis thaliana
MASNGVDEQIKLVEGPAGYVLEDVPHLSDYILDLPTYPNPLQSNAAYSVVRQYFVDEDDTVQEKIVVHKDSPRGTHFRRAGPRQKVYFKPSDVRACIVTCGGLCPGLNTVIREIVCGLHFMYGVTEVIGVDCGFRGFYSKNTVALTPKTVSDIHKRGGTILGTSRGGHDTSKIVDNIQDREINQVYIIGGDGTQKGANAIYKEIRRRGLKVAVAGIPKTIDNDIPVIDKSFGFDTAVEEAQRAINAAHVEATSVENGIGIVKLMGRYSGFIAMYATLASRDVDCCLIPESPFYLEGKGGLYEFIAKRLRENGHMVIVIAEGAGQDLVAESIEQQDASGNKLLKDVGLWMSLKIKEYFAKHNVMDITLKYIDPTYMIRAIPANASDNVYSTLLAQSAVHGAMAGYTGFVSGLVNGRHTYIPFNRITERQNKVVITDRMWARMLSSTNQPSFMNPPKGTTEFTD

SEQ ID NO: 7793 - protein, 395 aa, Musa acuminata
MALQASFLPSALSARKEGKVACTVKESAFLGSSILEHHKSHPVLRTKRESNHSVGVVKAQTTAVAAPGLNQSAVHGKKVLRKGVVVITGASSGLGLAAAKALAETEKWHVVMACRDFLKAEKAAQSAGMAKENYSIMHLDLASLDSVRQFVHAFRQSGRPLDVLVCNAAIYRPTARTPTYTADGYEMSVGVNHLGHFLLANMLLEDLKKSDYPSRRLIILGSITGNTNTLAGNVPPKAGLGDLRGLAGGLDGRNSSAMIDGGAFDGAKAYKDSKICNMLTMQELHRRFHEDTGITFASLYPGCIATTGLFREHIPLFRLLFPPFQKFITKGFVSEDESGQRLAQVVGDPSLLKSGVYWSWNNNSASFENQLSEEASDAVKAQKLWEISEKLVGLA

SEQ ID NO: 7794 - protein, 507 aa, Thermococcus kodakarensis KOD1
MVEPFVPEGEIFEGIFRQNEGIPEFATYVNGEWVFTGKTAEVRSPIDGSLIARVSLSDMALSNRAVAAAYSAGRHEIRDTPGEKRLEAFLKVAELIRDSFDDFVTALVLDAGKPLSNARGEVTATIERLEKTTMEFGRLIGDYIPGDWSAESLGSEGIVKREPYGVVLAISPYNYPLFISTAKIVPALLAGNAVLLKPSSQDPLAPLLLSRVLQLAGIPESAYHLLTVPGALMDSILADRRIRAVTFTGSTEVGEHILSMGGIKFYHMELGGKDPAVVLDDAPLEETVEKLVKGMVSYSGQRCDAIRLIIAEEGIYEQLKRELVAALSKIEPENPLEDEDAIMGPLINERSAEKIEEVYRDALEKGAVPLTGFKRKGAYVWPVLLEASREVLPGLRAFQEDVFGPLTILVKVSNEDEAVELANSSRFGLDAAVFSGDDSRARKVARRLEVGAVFINEFPRHGIGYYPFGGMKDSGIGREGIGYSIETLTTTKTIVRNYRGRGVWDYI

SEQ ID NO: 7795 - protein, 413 aa, Yersinia pestis biovar Medievalis str. 91001
MSKRRVVVTGLGMLSPVGNTVESTWKAVLAGQSGISLIDHFDTSAYATRFAGLVKDFNCEDYISRKDARKMDAFIQYGVAAGMQAMQDAGLDITEANASRIGAAIGSGIGGLGLIEENHTALVNGGPRKISPFFVPSTIVNMIAGHLTIMYGLRGPSISIATACTSGVHNIGHAARIIAYNDADVMVAGGAEKASTPLGVGGFGAARALSTRNDNPQAASRPWDKDRDGFVLGDGAGMMVLEEYEHAKKRGAKIYAEVVGFGMSSDAYHMTSPPEDGSGAALAMVNALRDAGITTSQIGYINAHGTSTPAGDKAETQAVKSVFGEDAYKVMVSSTKSMTGHLLGAAGAVESIFTVLALRDQAIPATINLDNPDEGCDLDYVPHDARQVKDMEYTLCNSFGFGGTNGSLVFRKV

SEQ ID NO: 7796 - protein, 333 aa, Bordetella pertussis Tohama I
MLAHPATKYRPFAPFAADHAERAWPARRPAAAPIWMSTDLRDGNQALIEPMDGARKLRLFEQLVAVGLKEIEVAFPSASQTDFDFVRKLIDERRIPDDVTIEALTQSRPDLMARTFEALAGSPRAIVHLYNPIAPQWRRIVFGMSRAEIKEIALAGTRQIRALADANPGTQWIYEYSPETFSLAELDFAREVCDAVSAIWGPTPQRKMIINLPATVESSTANVYADQIEWMHRSLARRDCIVLSVHPHNDRGTAVAAAELAVLAGAERIEGCLFGNGERTGNVDLVALALNLERQGIASGLDFRDMAALRACVSECNQLPIDVFHPYAWLDQD

SEQ ID NO: 7797 - protein, 319 aa, Zea mays
MAAAMTSFVAKNPLLAAAARRRAPPLAGRALPFSPLASTRAPRRTVTCFVPQDTAAPAAPVPALDEEARAAAARRVAEKEARKRSERRTYLVAAVMSSLGVTSMAVAAVYYRFSWQMEGGEVPVIETLGTFALSVGAAVGMEFWARWAHRALWHASLWHMHESHHRPREGPFELNDVFAIVNAAPAISLLAYGFFHRGIVPGLCFGAGLGITLFGMAYMFVHDGLVHRRFPVGPIADVPYFRRVAASHKIHHMDKFGGVPYGLFLGPKELEEVGGLDELVSSPVSEATDTEDAGEEKTRPVVCVVRTSVFMGQSVPNEF

SEQ ID NO: 7798 - protein, 306 aa, Dehalococcoides ethenogenes 195
MSPLLYDVIIIGGGPAGLTAALYTGRAKLKTLVIERAFIGGQITRSEKVDNYPGFPEGITGFDLTQQMQIQAEKYGAEIISAEVTALNKAKDSFELSTEAGKLSGRCIIICGGTERNKLGVPGEEEFSGRGVSYCATCDAPFYNDKVVAAVGGGNMAIYEALHLSEFAKKVYLIHRRQGFRADAVLVDKAKSKGNIEMVLDTVITSINGKDSIQSLSLNNLKTQKTSDLPVNGLFVAVGLQPNTAYLKGVVDMDKNGSILVNDQMETSVSGILCAGDIRSGSIRQVISAAGDGAVAALSAKRYLDR

SEQ ID NO: 7799 - protein, 108 aa, Buchnera aphidicola str. Sg (Schizaphis graminum)
MNKIIELTDQNFEKEVLEHKSFVLVDFWAEWCNPCKILAPILEEIAQEYFNKIKVGKLNIEKNPNTAPIYSIRGIPALLLFHGREVLATKVGAISKLQLKDFLDENIK

SEQ ID NO: 7800 - protein, 152 aa, Triticum aestivum
MEYGQQGQHGHGTTGRVDQYGNPVGAGTGGMGTGTGGMGQLGEHGGAGMGGGQFQPAREEHKTGGILHRSGSSSSSSSEDDGMGGRRKKGIKEKIKEKLPGGHKDNQHATATGGGAAYGQQEHTGAGTYGTEGTGEKKGIMDKIKEKLPGQH

SEQ ID NO: 7801 - protein, 115 aa, Blastopirellula marina DSM 3645
MKLVIAIIQPSRLEAVKEALTEVEVFRLTVMDCQGFGRQKGQTEVYRGHEFTINLLRKVQLQIAVNEEFVEPTVDAIVKGARSGEKGEIGDGKIFVLPMDECVRIRTGERGPDAI

SEQ ID NO: 7802 - protein, 522 aa, Ceratopteris richardii
MGNCCGTDGFKHERPLPAHPNRQGEDKTGAPKVISHTKLSSCGEQSVNEKYHLGRELGRGEFGITYLCTDRETDEVLACKSISKGKLRTPIDIEDVRREVDIMRHLPKHPNIVTLEGVYEDENAVHLVMELCEGGELFDRIVARGHYSERAAAAVMRTILEVVQVCHRHGVMHRDLKPENFLFANKKENSPLKAIDFGLSIFFKPGEKFTEIVGSPYYMAPEVLKRSYGPEVDIWSAGVILYILLCGSPPFWAETEQLVAQAILRGNVDFNRDPWPNVSENAKALVRQMLEPDPSKRLTAQQVLDHSWLVNARKAPDVPLGDAVCARLKQFSAMNKLKKRALRVIAELLTGEEVEGIRAMFNMMDVERTGSLTFGQLKAGLYKLGSQLPESEIQQLMEAADVNGNGTLDYGEFVAITVHLQRMDNDECLRKAFNFFDLNGDGFIDRSELHEMLEADLGEVGTDIIDDIIQEVDIDKDGRISYDEFASMMRTGTDWRKVSRNFSRERYASLSIKLMQEGSLKL

SEQ ID NO: 7803 - protein, 735 aa, Thermococcus kodakarensis KOD1
MLVEDLLKNNYLITPSAYYLLSDHYKKAFTLAELIKFAKNRGTFVVDSNLAREFLAEKGIISSGNGALDGSVLSGISVSESPVKPNGEAVLESESDESGAIESSLQEGVEDGVESIAEPSAASVEDVVVAGESSLASEGSSLEDEINTEPELSSSMDDGAEVVQSSEGDETSISTGNALGSVDYGGSDSESEALEEASSGGESFISTGTPEDEALLEESPEGEFPDENGFSDESLPVENGSENGYGDSEEYYENGDNGVKPKIVYGDYGVPIAYVADETPEEEKAYSTYSDLVIAPKEGFHYRAKEIPDEWELAFDVKNVKFEVPKVKNAQSKEGEVIIQAYSSYFKSRLKKMRRIFRENPEIGTIVDIAKLSYVREDDVTIIGLVNEKRETRKGYLFEIEDATGRIKVFIGSDKEGANEAYSTIMPDSVVAFRGTPGKGIFFANRVFLPDVPKFKRSKPPLEEKVYAILLSDIHVGSNKFCEEAFIKFLEWLNGEVNSRTEEELVSRIKYIIIGGDVVDGVGIYPGQYNELAIPDIFDQYEALANLLKQVPDHITMFIGPGNHDAARTALPQPGFYEEYAKPLYKLKNAVIISNPAVIRLHGRDFLVAHGRGIEDVVDFVPNRSHHRPAEAMVELLKLRHIAPTFGNKVPIAPDPEDTLVIESVPDLFQAGHVHVMQYKTYNGVFVINTGTWQAQTEFQKMVNIIPTPARVPIIDVETARLRAVVRFDQFCEGV

SEQ ID NO: 7804 - protein, 321 aa, Rhodococcus sp. X309
AAAGGKIDATADANKLALDVIGLAGFGYDFASFDGDEHPFVGAMSRVLEHVNRTSNDIPFLRKLRGNGADLQYEKDIAFVRTVVDDVITERQAKPGEHQDDLLDLMLNNIDDETGEKLDPVNIRNQVLTFLVAGNETTAGAIAFALYFLSRHPEIADAARAEVADITGGETPAFEDVARMRYLRRVVDETLRLWPSAPGYFRKVRTDTTLGGRYAMPKGSWVFVLLPQLHRDPVWGENPDSFDPDRFKPENVKKRPAHAYRPFGTGPRSCIGRQFALHEAVLSLATILQRYSFQSDPEYKLDVREALTLKPVGLELSLQRL

SEQ ID NO: 7805 - protein, 129 aa, Glycine max
  misc_feature (93)..(93): Xaa can be any naturally occurring amino acid
VPPTGRLSFCSFSFPSASGRRRFAAVRASAETMATEKLGIKVERNPPESRLSELGVRQWPKWGCEKSKFPGTYSAKETCYLLQGKVKVYPEGXGEGFVEIAAGDLVVFPKGMSCTWDVAEAVDKHYKFE

SEQ ID NO: 7806 - protein, 482 aa, Streptomyces avermitilis MA-4680
MSILNDVPKQLFIGGTWADAADGATMPVDDPATGEILCHVADAGPKDARLAADAAVEAQDGWARTAPRERSEILRRAYEIIVSRTGELALLMTSEMGKPLAEARGEVAYAAEFFRWFSEEAVRIDGGYGVLPDGRNRMLLMRRPVGPCLLVTPWNFPLAMGTRKIGPAIAAGCTMVLKPAPQTPLSSLALAGILKEAGLPDGVLNVVTTSRAGEVVEPLLTGGRIRKLSFTGSTRVGRLLLAQCADAVVRTSMELGGNAPFIVLDDADLSAAVDGAMTAKMRNMGEACTAANRFFVHRSVADEFGRRLAERMGALVVGPGTRDGVDVGPLIDEAGRAKVEELVADAVERGARVLVGGVAPDGPGRFYPPTVLADVDPGSRLMETEIFGPVAAILVFDDEDEVVRRANDTPWGLVGYVFTQGLDRALRVSERLEVGMVGVNTGLVSNPAAPFGGVKQSGLGREGGRVGIEEFLEYKYLAVPLR

SEQ ID NO: 7807 - protein, 579 aa, Xanthomonas oryzae pv. oryzae KACC10331
MRRRRRLRSPQQTSGVACSARHHRRLGAITRTKEEHMLEIYGKPTPINVRNVLWLCDELALDDTLHAYDRTRFATIWLHAANATSWTDSFAVLRWATLAHCVESREVRMSSWLRRKSIDQVTVHEAGRQLVRSLSWPHLIALGIGAIVGTGIYTLIGVGADKAGPAVLLSFVAAGIVCACAALAYAEMATMMPAAGSAYTYSYTALGESIAWVVGWSLVLEYSLVVSTVAVGWSGYFVGFLQWLGASLPHELIAGPHAGGIANLPAVVITFLVAGMLMAGTKESATLNAVLVVLKIIALGVFVAIALPTFKSANLQPFMPYGISKAMGPDGVERGVMAAAAIIFFAFYGFDAISTAAEETKNPGRDLSIGIVGSMIGCTLIYVLVALAAVGAMRFTVFGKSPEPLALILRELGHGKAALVIGAVAIIALPTVLLAFLYGQSRIFFVMSRDGLLPRGLSKVNARTGTPVAITLLTAVLVAALAGVARLDEIAALANAGTLAAFTAVAACLLVLRVREPGRARAFRTPLAWVVGPVAILGCLYLFWSLPSNTQGWFLLWNALGVVVYLAYGRRNSRLNSAG

SEQ ID NO: 7808 - protein, 829 aa, Pseudomonas aeruginosa PAO1
MNSPRPTPPPFAAAAAGLPILVRASNLVTEADVTSLVWNKAPCRFCGTGCSVMVATRDGQVVATHGDIKAEVNRGINCVKGYFLSKIMYGSDRLTRPLLRMKDGKFDKQGEFQPISWEQAFDIMAEKFKAALKAKGPESVGMFGSGQWTVWEGYAANKLFKAGLRSNNIDPNARHCMASAVMGFMRSFGMDEPMGCYDDIEATDSFVLWGSNMAEMHPVLWSRVTDRRLSAPQVKVAVLSTFEHRSFELADLPMVFKPQTDLIILNYIANHIIESGAVNRDFVERHVRFAHGAEDIGYGLRPDDPLEKKAKNADKANTWSDIDFKAFAEFVKPYTLERTARESGVPAERLKALAELYADPKRKVVSFWTMGFNQHTRGVWANNLIYNIHLLTGKISEPGNSPFSLTGQPSACGTAREVGTFSHRLPADLVVTNPKHRETAEKIWKVPAGTIQEKVGFHAVQQSRMLKDGVLNVYWTQVSNNMQAGPNVMQEVLPGWRNPDNFVIVSDVYPTVSAQAADLILPSAMWVEKEGAFGNAERRTQFWHQLVKAPGEAKSDLWQLVEFSKRFTTDEVWPAELLAKAPELKGKTLYDVLFRNGQVDRFPASDLAKGYANDEVDAFGFYIQKGLFEEYAAFGRGHGHDLAPFDAYHEARGLRWPVVDGKETRWRYREGYDPYVSKGSGVQFYGYPDKKAIVFALPYEPPAEAPDQDYPFWLATGRVLEHWHTGSMTARVPELYKAVPDALVYMHPEDARQLKLRRGSEVKVVSRRGEIRARVETRGRNKPPQGLVFVPFFDANKLINKVTLDATDPISKQTDYKKCAVRIELLNLA

SEQ ID NO: 7809 - protein, 555 aa, Kluyveromyces lactis NRRL Y-1140
MASKNTYSDFKLATELPAWNQLQSLYEQKGKKLNVKDEFAKDNSRYEKFAKTFVNYDGSKILFDFSKNLVDDEILKSLIQLAKEAKVTSLRDAMFNGEPINFTEGRAVYHVALRNRSLKPMYVDGTNVTPEVDAVLQHMKEFTEEVRSGAWKGYTGKSITDVVNIGIGGSDLGPVMVTEALKHYATNLKVHFVSNIDGTHIAETLKDLDHETTLFLIASKTFTTAETITNATSAKNWFLSKNGGDQSHISKHFAALSTNATEVEKFGIDTKNMFGFENWVGGRYSVWSAIGLSVALYIGFDNFEAFLKGAEAVDKHFVETPLEDNIPLLGGLLSVWYNNFFDAQTHLVAPFDQYLHRFPAYLQQLSMESNGKSVTRGNVFANYSTGSILFGEPATNAQHSFFQLIHQGTKLIPSDFILAAQSHNPIENNLHQKMLASNFFAQAEALMVGKDEEQVKSEGATGGLVPHKVFSGNRPTTSILAQKITPATLGALIAYYEHVTFTEGAIWNINSFDQWGVELGKVLAKVIGSELATDNKISSHDSSTNGLINQFKEWI

SEQ ID NO: 7810 - protein, 223 aa, Gibberella zeae PH-1
MASDTVFVLPGDSIDPSLIPSHPKKPLRLGPGLRHVPPNDIIPTLAGQLVTDRQKNAIRVENARGRYTPRVGELVIGTIQRSAADFFFVTLSDYTAPAQLPQLSFEGATKKTRPQLAAGALVYARKSEGLGPLAGGMLYNVSLGMARRLMMPKSVQEGRVVVLEELGNAGLQFETATGRNGKFWVDSENVKTVIAVGRAVQETDEKNLDVEDQKKLIPENEHV

SEQ ID NO: 7811 - protein, 223 aa, Zea mays
MVLLGAAKKKKKKKKKKNWNKKKKNTRKIKSGDGDSREPRSGREGKERRSGGEMGAAESVPETSIHEFTVKDCNGKEVSLETYKGKVLLVVNVASKCGFTETNYTQLTELYQKYRDKDFEILAFPCNQFLRQEPGTDQQIQDFACTRFKAEYPVFQKVRVNGPDAAPVYKFLKASKPGLFGSSRIKWNFTKFLVDKDGKVIERYGTSTAPMAIEKDIQKALEE

SEQ ID NO: 7812 - protein, 108 aa, Photorhabdus luminescens subsp. laumondii TTO1
MSDKIIHLSDASFDTDVLNAAGPVLVDFWAAWCGPCKMIAPILDEIAPEYSGKLTITKLNIDDNPATAPKYGIRGIPTLLLFKDGQVAATKVGALSKTQLKEFLDANL

SEQ ID NO: 7813 - protein, 391 aa, Rhodobacter sphaeroides
MSRQQPRASFLPESPLAPVALCDTTLRDGEQTAGVAFTRAEKRAIAEALQAAGVAEVEVGVPAMGEEERADIRAVAAVLKTAAPVVWCRLRAEDLAAAQRTGVVRLHIGVPVSERQISAKLGKDAAWVRDKVEKLVRAASWAGHKVSVGAEDASRADPFFLAEIAHVAAEAGAIRFRISDTLGVLDPFAAHELVGRVVTRCPLPVEFHGHNDLGMATANSLAAARAGASHLSVTVNGLGERAGNAALEEVAAALEAAGRATGVALGQLCALSELVARASGRPLSPQKPIVGEGVFTHECGIHVDGLMKDRATYESADLRPERFGRSHRIAIGKHSSAAGLARALAEAGLPADAATLAALMPALRDWAAITKRAAAPEDLAALLAAQTETAR

SEQ ID NO: 7814 - protein, 859 aa, Brassica rapa
MKGVHNIYHHSYTFSFLLVFLALILFHPALSTYVNTMSSSESLTISSNRTLVSPGGVFELGFFKPSGRSRWYLGIWYKKVSQKTYAWVANRDNPLSNSIGTLKISGNNLVLLGQSNNTVWSTNLTRENVRSPVIAELLPNGNFVMRYSNNKDSSGFLWQSFDFPTDTLLPEMKLGYDFKTGRNRFLTSWRSYDDPSSGKFTYELDIQTGLPEFILINRFLNQRVVMQRSGPWNGIEFSGIPEVQGLNYMVYNYTENSEEIAYSFQMTNQSIYSRLTVSDYTLNRFTRIPPSWGWSLFWSLPTDVCDSLYFCGSYSYCDLNTSPYCNCIRGFVPKNRQRWDLRDGSHGCVRTTQMSCSGDGFLRLNNMNLPDTKTASVDRTIDVKKCEEKCLSDCNCTSFATADVRNGGLGCVFWTGDLVEIRKQAVVGQDLYVRLNAADLDFSSGEKRDRTGTIIGWSIGVSVMLILSVIVFCFWRRRQKQAKADATPIVGNQVLMNEVVLPRKKIHFSGEDEVENLELSLMEFEAVVTATEHFSDFNKVGKGGFGVVYKGRLVDGQEIAVKRLSEMSAQGTDEFMNEVRLIAKLQHNNLVRLLGCCVYEGEKILIYEYLENLSLDSHLFDETRSCMLNWQMRFDIINGIARGLLYLHQDSRFRIIHRDLKASNVLLDKDMTPKISDFGMARIFGQDETEADTRKVVGTYGYMSPEYAMNGTFSMKSDVFSFGVLLLEIISGKRNKGFCDSDSNLNLLGCVWRNWKEGQGLEIVDRVIIDSSSPTFRPREILRCLQIGLLCVQERVEDRPMMSSVVLMLGSETALIPQPKQPGYCVSQSSLETYSSWSKLRDDENWTVNQITMSIIDAR

SEQ ID NO: 7815 - protein, 257 aa, Oryza sativa
MQLRIFRRMATTRPPSPFLLSRARPPPAAVNLLQRVDSDGCGLLCSCSCSFSFSIDGFLSCRERKGDFSCLTAARICEASTGDAVVQAAGTAMPVPLAPYPTPPVPFTPPNGAQSQLVCSGCRNLLMYPAGATSVCCAVCSTVTAVPAPGTEMAQLVCGGCHTLLMYIRGATSVQCSCCHTVNLAMEANQVAHVNCGNCRMLLMYQYGARSVKCAVCNFVTSVGEHWDPGDWYNLSDCHPKLMSAWQQLAVMACDAF

SEQ ID NO: 7816 - protein, 420 aa, Oryza sativa
MYIFRRAAARAVSAPRQLRATPCVNSFQSSIPSLTRSFHQSRIWRAEEQKKETETAAQDAVSESSGTTSEPLGQSEGVSSSETTTTPSSSTTSEPVGQSERQSKPVLEQASEIAEKAKDTVSDAAAKAAQAVGEFTQDPKERAQDAAASATEQASQTASKVSEQASEVTSQIREQAQSAAAEATRYARNTAASTRETFQERRPYESRPPAPPSKILYIGNLFFEVTAPQLEAEFAKFGEVTNSRVVTDDRGLSKGFGYVEFINQQQADAAREALDQKVFQGRRISVQYHRRREANNNTKRNQRSTAEPSKTLFIGNMSYQMSDRDLNDLFRSIKNVLDVRVAIDRRSGQPRGFAHADFTDVESAVTAKKALEQKSVYGRQLRVDYSGQAKEDGDRPARRERSDRYERRERRDRDDSNDLD

SEQ ID NO: 7817 - protein, 479 aa, Oryza sativa
MGRAFEYVILGGGVAAGYAALEFVRRNGGASSQELCIISDEHFAPYERPALSKGYLLPQDAPRLPAFHTCVGSKDELLTEEWYNEHGIVLVLGTRVISADVRQKTLLTSSGETISYKTLIVATGARAVKLEEFGVSGSDARNVCYLRNVEDADKLVGVMRSCPGGNAVVVGGGYIGMECAAALVTNNIKVTMVFPKKHCMGRLFTPKIAEFYESYYASRGVTFVKEAAVTSMQISAGKVTAVNLGNGRRLPADMVVVGVGARANTGLFDGQLVMENGGIKVNGRMQASDASVYAVGDVAAFPVKLFGGDVRRLEHVDCARRTARHAVAAMLEGTGSVGHIDYLPFFYSRVFSLSWQFYGDNAGEAVHFGDLAPPGDGDGAAPKFGAYWVRDGRVAGAFLEGGSRQEYEAVAAAVRRGAAVADVAELERRGLAFATQATGGGGKPTCAWHATVGVAAAVSIAAFACWYGWQAPYVLKRDF

SEQ ID NO: 7818 - protein, 283 aa, Fusobacterium nucleatum subsp. nucleatum ATCC 25586
MLMDGKELARDIKVKIKAEIDNIKKIHNINPMVATILVGDDPASQVYLNSQVKSYQDLGIGVQKYFFSEEISEAYLLNLIDKLNKDTEVDGIMINLPLPPQINATKVLNSIKLIKDVDGFKAENLGLLFQNNEGFTSPSTPAGIMALIEKYNIDLEGKDVVVVGSSNIVGKPIAALILNSRGTVTICNIYTKNLAEKTKNADILISAVGKAKLITEDMVKEGAVVIDVGINRVNGKLEGDVDFENVQKKASHITPVPGGVGALTVAMLLSNILKSFKANRGII

SEQ ID NO: 7819 - protein, 602 aa, Pseudomonas fluorescens PfO-1
MSTQTFTEGTVPQRLAHTRELMRREGIHALLVPSADPHLSEYLPGYWQGRQWLSGFHGSVGTLIVTTDFAGVWADSRYWEQATKELKGSGIELVKLQPGQPSPLDWLAEQTPEGGVVAVDGAVMAVASARTLGSKLEARGASLRTDIDLLKEVWSDRPALPNAPIYQHLPPQATVSRGEKIAKLRETLQERGADWHFIATLDDIAWLFNLRGGDVSFNPVFVSFALISQHQATLFVALSKVDAELRAVLEKDGVTLRDYSEVADALRAIPNGASLLVDPARVTSGLLDNLDTGVKLVEGLNPTTLAKSQKSLADAGHIRQAMEQDGAALCEFFTWLESAWGRERITELTIDEKLTAARERRPDYVSLSFNTIAAFNANGAMPHYHATPEEHAVIEGDGLLLIDSGGQYLGGTTDITRMVAVGTPTDEQKRDCTRVLKGVIALSRAHFPKGILSPLLDAIARAPIWAENVDYGHGTGHGVGYFLNVHEGPQVIAYQAAPAPQTAMQPGMITSIEPGTYRPGRWGVRIENLAMNVLAGSSEFGEFLKFETLTLCPIDTRCLEPSLLTQEEKQWFNAYHAEVRERLSPLLDGAALEWLNTRTAAI

SEQ ID NO: 7820 - protein, 188 aa, Zea mays
MVLVLALGDLHIPHRAPDLPAKFKSMLVPGKIQHIICTGNLCIKEVHDYLKSLCPDLHITRGEHDEDARYPETKTLTIGQFKLGLCHGHQVVPWGDLDSLAMLQRQLDVDILVTGHTHQFKAYKHEGGVVINPGSATGAYSSITYDVNPSFVLMDIDGLRVVVYVYELIDGEVKVDKIDFKKTATMHG

SEQ ID NO: 7821 - protein, 132 aa, Cryptococcus gattii
ERFGTKIITETVALVDLSVRPFKYWTEGEEEEHEFMTADTIIMATGASAKRLFLPGEDTYWQSGISACAVCDGAVPIFRQKPLAVIGGGDSAAEEATYLTKYGSHVYVLVRRDELRASKIMAKRLTSHPKVT

SEQ ID NO: 7822 - protein, 234 aa, Oryza sativa
LPHFYSRRPPNTPPPNTIGIGSGAGQAGGMAAAAAAKIAPSMLSSDFANLAAEADRMVRLGADWLHMDIMDGHFVPNLTIGAPVIQSLRKHTKAYLDCHLMVTNPSDYVEPLAKAGASGFTFHIEVSRDNWQELIQSIKAKGMRPGVSLRPGTPVEEVFPLVEAEMMEKVRALRKKYPSLDIEVDGGLGPSTIDVAASAGANCIVAGSSIFGAAEPGEVISALRKSVEGSQNKS

SEQ ID NO: 7823 - protein, 454 aa, Saccharomyces cerevisiae
MSEPEFQQAYEEVVSSLEDSTLFEQHPEYRKVLPIVSVPERIIQFRVTWENDKGEQEVAQGYRVQYNSAKGPYKGGLRFHPSGNLSILKFLGFEQIFKNSLTGLDMGGGKGGLCVDLKGRSNNEIRRICYAFMRELSRHIGQDTDVPAGDIGVGGREIGYLFGAYRSYKNSWEGVLTGKGLNWGGSLIRPEATGYGLLYYTQAMIDYATNGKESFEGKRVTISGSGNVAQYAALKVIELGGTVVSLSDSKGCIILETGITSEQVAVISSAKVNFKSLEQIVNEYSTFSENKVQYIAGARPWTHVQKVDIALPCATQNEVSGEEAKALVAQGVKFIAEGSNMGSTPEAIAVFETARSTATGPSEAVWYGPPKAANLGGVAVSGLEMAQNSQRITWTSERVDQELKRIMINCFNECIDYAKKYTKDGKVLPSLVKGANIASFIKVSDAMFDQGDVF

SEQ ID NO: 7824 - protein, 132 aa, Cryptococcus gattii
ERFGTKIITETVARVDLSVRPFKYWTEGEEEEHEFMTADTIIMATGASAKRLFLPGEDTYWQSGISACAVCDGAVPIFRQKPLAVIGGGDSAAEEATYLTKYGSHVYVLVRRDELRASKIMAKRLTSHPKVT

SEQ ID NO: 7825 - protein, 453 aa, Saccharomyces cerevisiae
MSEPEFQQAYEEVVSSLEDSTLFEQHPEYRKVLPIVSVPERIIQFRVTWENDKGEQEVAQGYRVQYNSAKGPYKGGLRFHPSVNLSILKFLGFEQIFKNSLTGLDMGGGKGGLCVDLKGRSNNEIRRICYAFMRELSRHIGQDTDVPAGDIGVGGREIGYLFGAYRSYKNSWEGVLTGKGLNWGGSLIRPEATGYGLVYYTQAMIDYATNGKESFEGKRVTISGSGNVAQYAALKVIELGGTVVSLSDSKGCIISETGITSEQVADISSAKVNFKSLEQIVNEYSTFSENKVQYIAGARPWTHVQKVDIALPCATQNEVSGEEAKALVAQGVKFIAEGSNMGSTPEAIAVFETARSTPLDQATVWYGPPKAANLGGVAVSGLEMAQNSQRITWTSERVDQELKRIMINCFNECIDYAKKYTKDGKVLPSLVKGANIASFIKVSDAMFDQGDVF

SEQ ID NO: 7826 - protein, 419 aa, Bacillus thuringiensis serovar konkukian str. 97-27
MIEIKVPELAESITEGTISQWLINVGDKVEKGGSVVELETDKVNVEIIAEDSGIVSKLLGEPGDTVEVGATIAILDANGAPVAVSTPAPAAEQPKQETAEAPKAAAPSAEQTATLQGLPNTNRPIASPAARKMARELGIDLNDVRSTDPLGRVRPHDVQAHAAAPKEAPAAPKSPAPAPVAKTEFEKPVERVKMSRRRQTIAKRLVEVQQTSAMLTTFNEVDMTAIMELRKERKDAFEKKHDVRLGFMSFFTKAVVAALKQFPLLNAEIQGDELIIKKFYDIGIAVAAPDGLVVPVVRDANQLNFAEIESEIRELGKKARDNKLSLKELQGGTFTITNGGVFGSLMSTPILNSPQVGILGMHKIQVRPVAIDNERMENRPMMYIALSYDHRIVDGKEAVSFLVAVKDMLEDPKSLLLEG

SEQ ID NO: 7827 - protein, 146 aa, Vitreoscilla stercoraria
MLDQQTVDTSKATVPVLKEHGVTITTTFYQNLFAKHPEVRPLFDMGRQASLEQPKALAMTVGAAAQNIENLPAILPAVQKIAVKHCQAGVAARHYPIVGQELLGAIKELLGDAATDDILDAWGKAYGVIADVFIQVEADLYAQDAE

SEQ ID NO: 7828 - protein, 228 aa, Ralstonia metallidurans CH34
MLTLTKSTSLPDSTAALAPSDADARPLAERIAQALDAMRDGRPVVLLDDDDRENEADLILAAERLTNSNMAMMIRECSGIVCLCLTPEKVRQLGLRPMVENNRSQYGTAFTVSIEAREGVTTGVSAADRITTIRAAIADEAGLDAVVSPGHVFPLVAVEGGVLARRGHTEGSVELARMAGLSPAAVLCELMNPDGTMARRPEALAFAEMYQLPVLTIADLVAWREINA

SEQ ID NO: 7829 - protein, 461 aa, Yersinia pseudotuberculosis IP 32953
MIQVAPQQTRDAPSATVVAKFGGTSVASFDAMSRSADVVLSNPDVRLVILSASAGITNLLVALADGSEPEKRADHLEEIRHIQYDIIARLTDSTVIREEIDRMLENIAMLSEAASLATSPALTDELVSHGELMSTLLFVELLRQRQVAVEWFDVRKVMRTNDRFGRAEPDTSALAELAQTLLAPRIEDAIVVTQGFIGSEGKGRTTTLGRGGSDYTAALLGEALNVSRIDIWTDVPGIYTTDPRVVPAAKRIDKIAFEEAAEMATFGAKILHPATLLPAVRSDIPVFVGSSKDPAAGGTLVCNETYNPPLFRALALRRKQTLLTLHSLNMLHARGFLAEVFNILARHSISVDLITTSEVSVALTLDTTGSTSTGDSLLTTSLLTELSSLCRVEVEEDLALVAIIGNNLSQACGVGKEVFGVLDPFNIRMICYGASSHNLCFLVPGNDADKVVQTLHYNLFE

SEQ ID NO: 7830 - protein, 698 aa, Debaryomyces hansenii CBS767
MRKVSRAQCANCTCSPGLLSRTHKRSVSLAKQVSMRNSGSGSPRGASRKGSVFTIDAASLCAPDAKEVNTSKRLEKLRLLMAEYDLGVYVVPSEDQHQSEYVSAFDQKRSFISGFQGSAGVAVVTRDVMCMNETPEGLAAVSTDGRYFNQATNELDFNWVLLKQGVKSEPTWQEWSVDQAIQLSLDSGSKINIGVDPKLITYQVFEKFDKVVRDKLSLPKNTKAEVELVAVKDNLIEKMWIDFEDLPSSPASIIKVLDEKYTGRTYSDKIKDVTEAMNKHKCVGLVVSALDEIAWLLNLRGSDIEYNPVFYGYLIITNQQVTLFANNYRFDTKVQAALQADNVNVEPYENFWTKLNSLSKDFNMANKKLLVPKNSSWEIIRNLKCSFEQPLRSPIEDLKGIKNEVELKGARSAHLKDGRALCKFFAWLENELLNKGELIDELQADDKLTQFRMQEDNFVGLSFATISATGANAAVIHYKPIKGECAVINPHKIYLNDSGSQFLEGTTDVTRTIHFTNPKPDEIKHYTLVLKGNISLGDLKFPEDTTGALIDSIARQHLWSAGLDYGHGTSHGIGAYLNVHEGPIGIGPRPNAASSSLRPGHLISNEPGYYEDGDYGIRIENVMYVKQSGHSYNERDFLEFDTLTRVPFCKKLIDISLLTTEEKAWINKYHQTVWNELSPSFSKTSLEYIWLKKETAPL

SEQ ID NO: 7831 - protein, 299 aa, Zea mays
MGNVSGRAEDLVDADIDDGNNMRRASSSSAGYVRGGGSSSSPPASPPRPHSPRMFVPQKINNIIRKEKVEGDAKKKNMISPVTPLQRATEVSPPVFNQILMNQQQEDSDGPPQKKIPTLLTCTLGGRNIYVEGSWDNWTSKKLVEKSGKDHTILLMLSSGVHRYRFIVDGERRFIPDLPCETDNVGQILNLVDVHDFVPDSVESVSELMAPPSPDSSYGFHVPGEKEFSKEPPQLPSQLYLGVLNSRSTEEGCARPRHVVLDHLYIEKGWGAQPLVALGYTHRFRSKFVTCVLYKAIER

SEQ ID NO: 7832 - protein, 479 aa, Chlamydomonas reinhardtii
MLASSSLTSKRSASASSSASRVPHVRAAPVPQRAVTPQPATSTSYPSQPVFRQHRVAPVSGRPGRNYMVVASTGYIPFGGDACIKVIGVGGGGGNALNRMINSGLQGVEFWAINTDAQALAAHQALNKVQIGSELTRGLGCGGNPELGRRAAMESEEALRRMVQGADLVFITAGMGGGTGTGAAPVVARLSKELGILTVGVVTYPFNFEGRRRAGQALEGIEALREAVDSVIVIPNDRLLDVAGASTALQDAFALADDVLRQGVQGISDIITVPGLINVDFADVKAIMSNSGTAMLGVGAASTATAAPGGPDRAEQAAVAATSAPLIQRSIEKATGIVYNITGGRDLTLAEVNRVSEVVTALADPSCNIIFGAVVDEQYDGELHVTIIATGFAPTYENELLNGGNAQQQQARAARRASNQATAASLAPNPVPAAAPAAPAPPAQPAMPAVQPTTPPANPAAPWSRPNRAKLDFLGRSIL

SEQ ID NO: 7833 - protein, 337 aa, Vitis vinifera
MGSQSETVCVTGASGFIGSWLVMRLLERGYTVRATVRDPTNVKKVKHLLDLPKAETHLTLWKADLADEGSFDEAIKGCTGVFHVATPMDFESKDPENEVIKPTIEGMLGIMKSCAAAKTVRRLVFTSSAGTVNIQEHQLPVYDESCWSDMEFCRAKKMTAWMYFVSKTLAEQAAWKYAKENNIDFITIIPTLVVGPFIMSSMPPSLITALSPITGNEAHYSIIRQGQFVHLDDLCNAHIYLFENPKAEGRYICSSHDCIILDLAKMLREKYPEYNIPTEFKGVDENLKSVCFSSKKLTDLGFEFKYSLEDMFTGAVDTCRAKGLLPPSHEKPVDGKT

SEQ ID NO: 7834 - protein, 489 aa, Synechococcus sp. WH 7805
MTTALNTPSGRRKALQEASLLEGPMLLLQSIRGFRTNRALLWLACVPVALFGLGIFNLSAHAEELPELNAAFLANNLWLLVATILVIFMNAGFAMVEAGMCRQKNAVNILAKNLFVFALAVTAYWFIGYSLMYGGSVVDGWLYFKGLFFDPAVSAETISEAGLVPTVDFLFQAAFAGTAATIVSGLVAERVKFGEFVVFALVLTAVIYPIAGSWEWNGGWLNSVGNKEFIDFAGSSIVHSVGAWAGLVGAMLLGPRIGKYVDGRTQAIPGHNMAIATLGALILWIGWYGFNPGSQLAMDQWVPYVAVTTTLAAAGGAIGATIISTMTSGKPDLTMIINGILAGLVSITAGCGNLTLVGSWVAGLIGGVIVVFSVSALDSAGIDDPVGAFSVHGVCGVWGTLVVGLWGFDIQGDGSPLGLLVGGGVEQLGIQALGCAAYAIWALVTCWIAWSIIGALFGGIRVTEEEETIGLDIGEHGMEAYPDFASAGN

SEQ ID NO: 7835 - protein, 590 aa, Sinorhizobium meliloti
MAINLQKPDITELKPRITVFGVGGGGGNAVNNMITAGLQGVDFVVANTDAQALTMTKAERIIQMGVAVTEGLGAGSQPEVGRAAAEECIDEIIDHLQGTHMCFVTAGMGGGTGTGAAPIVAQAARNKGILTVGVVTKPFHFEGGRRMRIADQGISDLQKSVDTLIVIPNQNLFRIANDKTTFADAFAMADQVLYSGVACITDLMVKEGLINLDFADVRSVMREMGRAMMGTGEASGEGRAMAAAEAAIANPLLDETSMKGAQGLLISITGGRDLTLFEVDEAATRIREEVDPDANIILGATFDEELEGLIRVSVVATGIDRTAAEVAGRSADFRPVAPKPIVRPSAAVPAQPQPTVSLQPVPQPQPVQQPLQQQNVDHIALAIREAEMERELDIAARAQVAAPAPQPQPHLQEEAFRPQSKLFAGVAPTEAAPVMRPAQPAPRPVEMQAPVQPQMQAQPVQQEPTQVVRQQAEPVRMPKVEDFPPVVKAEMDYRTQPAPAHQEERGPMGLLNRITSSLGLREREATNVSSDMTAAAPSAASQQRRPLSPEASLYAPRRGQLDDHGRAAPQMRSHEDDQLEIPAFLRRQSS

SEQ ID NO: 7836 - protein, 355 aa, Blumeria graminis
MSTRAPNATTGSRKISFNVSEQYDIQDVVGEGAYGVVCSALHKPTGQKVAIKKITPFDHSMFCLRTLREMKLLRYFNHENIISILDIQKPRSFDSFTEVYLIQELMETDMHRVIRTQDLSDDHCQYFIYQTLRALKAMHSANVLHRDLKPSNLLINANCDLKVCDFGLARSAASQEDCSGFMTEYVATRWYRAPEIMLTFKEYTKAIDVWSVGCILAEMLSGKPLFPGKDYHHQLTLILDVLGTPTMEDYYGIKSRRAREYIRSLPFKKKIPFKQMFPKTSDLALDLLEKLLAFNPVKRITVDEALQHPYLEPYHDPEDEPTADPIPEEFFDFDKNKDNLSKEQLKELIFQEIMR

SEQ ID NO: 7837 - protein, 515 aa, Shewanella sp. MR-7
MTTPADAPKWPRQIPYIIASEACERFSFYGMRNILTPFLMTALLLSIPEDLRGAVAKDVFHSFVIGVYFFPLLGGWIADRFFGKYNTILWLSLLYCVGHAFLAIFEHSVQGFYTGLFLIALGSGGIKPLVSSFMGDQFDQSNKSLAQKAFDMFYFTINFGSFFASLSMPLLLKNFGAAVAFGIPGVLMFIATVFFWLGRKRYVHMPPEPKDPHGFLPVIRSALLTKIEGKTNIGLVLALIGGVSAAYALVNIPTLGIVAGLCSAMVLLMGFVGLGASLQLERARGIHPDAAVDGVRSVLRILVLFALVTPFWSLFDQKASTWILQANDMVKPSWFEPAMMQALNPLLVMLLIPFNNFVLYPAIERMGVKLTALRKMGAGIAITGLSWIVVGTIQLMMDGGSALSIFWQILPYALLTFGEVLVSATGLEFAYSQAPKAMKGTIMSFWTLSVTVGNLWVLLANVSVKSPAVTEQIVQTGMSVTAFQMFFFAGFAILAAVIFALYARSYQMQDHYRQV

SEQ ID NO: 7838 - protein, 451 aa, Coccidioides immitis RS
MADTTLPPATRIVPIMARSRLNARSAGLSARSSRRNSTVEESDRRLKERLERLNCYAADIQGDGNCLFYSLSDQLYGTPDHHDKVRQRLVDHIRKHRDSFIHFVDLGPDRPRSTREASRQANRSFSSVGSTPSVDRINSKFEEMLSKMGEPHEWGGAFELQAFCQAYARDIVVYQADTVQEFTSNLHDVDPDRETVHLAYHEGNKNAANARSHSVATQTLPTPLTLAEPWKISTIAEALPFLDYDTIRAVLTKCRGDIDFAFSRLLDDDFSSSSQSSVAPTPGTETSGTVMASPGGVNPATRACLRASSRSSSRHSTGSKRPADPSDDDDDDDEDPVRSGVRRSARERKRRILQDVTVGISVRGDNRDDVISIQLRVDPDAVVETPRGIDTPEDDTEVETDEDTEVKVPEKEPNTGERRAKSSDGTLTGGPDSGNSATGSEGGDDSGDSDK

SEQ ID NO: 7839 - protein, 91 aa, Vigna radiata var. radiata
MTCGQVQGNLAQCIGFLQKGGVVPPSCCTGVKNILNSSRTTADRRAVCSCLKAAAGAVRGINPNNAEALPGKCGVNIPYKISTSTNCNSIN

SEQ ID NO: 7840 - protein, 552 aa, Festuca ovina
TEQWKALQAHVGAIHKTHLRDLMADADRCKAMTAEFEGVFLDYARQQATTETVDKLFKLAEAAKLKEKIEKMFNGDKINSTENRSVLHVALRAPRDAVINSDGVNVVPKVWSVKDKIKQFSETFRSGSWVGATGKPLTNVVSVGIGGSFLGPLFVHTALQTDPEAAESAKGRQLRFLANVDPVDVARSIKDLDPETTLVVVVSKTFTTAETMLNARTIKEWIVSSLGPQAVSKHMIAVSTNLKLVKEFGIDPNNAFAFWDWVGGRYSVCSAVGVLPLSLQYGFPIVQKFLEGASSIDNHFRTASFEKNIPVLLGLLSVWNVSFLGYPARAILPYSQALEKLAPHIQQLSMESNGKGVSIDGVPLPYEAGEIDFGEPGTNGQHSFYQLIHQGRVIPCDFIGVIKSQQPVYLKGETVSNHDELMSNFFAQPDALAYGKTPEQLRSENVSENLIPHKTFKGNRPSLSFLLSSLSAYEIGQLLAIYEHRIAVQGFIWGINSFDQWGVELGKSLASRVRKQLHASRMEGKPVEGFNPSSASLLARYLAVEPSTPYNT

SEQ ID NO: 7841 - protein, 473 aa, Kluyveromyces lactis NRRL Y-1140
MSALLSRVAPRMSVLACAARLQLRTYASYPPYTIIGMPALSPTMVQGGLTEWSKNVGDRLEPGDVLAEVETDKAQMDFEFQEEGYLAKILVPAGTKDIPVNKPLAVYVEEESDVPAFANFTAADAESATAAKEAAKNGAKQPAKEESKEESKEGAKPASKPAAKKSSGSSASSGTRIFASPLAKSIALEHGVSLKEVEGTGPRGRITKDDVEAFLASAPSRESSAAKAAPALAAPTPASATYEDVPISNMRQIIGDRLLQSTQNIPSYIVSSQISVSKLLKLRQSLNATAKDQYKLSINDILIKAIAVAAQRCPDANAYWMPEQGVIRKFKNVDVSVAVATPTGLLTPIVKNAESKGLVSISKEIKDLGKRAKDNKLKPEEFQGGTICISNLGMNPAVSMFTSIINPPQSTILAIGTVNKVPVEDAGSEFGFTFDQKMNITGTFDHRTIDGAKGGEFMKELKKVIENPLELLL

SEQ ID NO: 7842 - protein, 181 aa, Acinetobacter sp. ADP1
MSQSIYHIPVQTISGQDTSLDTYRGKVLLIVNVASKCGLTPQYEGLEKLYQDKQQQGLEILGFPANNFLEQEPGSNDEIQQFCSLTYDVHFPLFGKISVAGEDKHPLYQTLIEAQPERIGEGPWWKDLVDYGLTPNPKPEVLWNFEKFLINKNGEVVARFAPDITADDPRLVDAINAELAK

SEQ ID NO: 7843 - protein, 873 aa, Dechloromonas aromatica RCB
MLFFAKATKAKQAAMSVSSRDRFILLATAGYTVFSLLWIFLSDQLMSAFADINSMVWLSTAKGIFFVIATAGMFYLAMRAVPTDNAALSEGLLKSLLDRSMQGRWPRWAVYIFAILVTLLMLLVRASLPLPFDERPMLILFMLPIILSALLGGLGPGLFSTALSALGVNFLSIAPLRGLYIASSYDLFHWSFLVINGVAISLLSEVLRKARSKAEVNRQLLDTIVSGTSDAVFLKDAQGRYLLANAATAGFVGKAQEEIIGQDDTFLFPEETARDLMTSDRVIMLAARNTTHEECLRTLDGKEMVFLVTKGPVFDHQGRVVGLFGISREITELKRAMAALVASEAALKLAQRQAGIGNWTWNIGTGEHSWSEEVYRIYGHDPRLPPLGYPEVSQYFMPESWRLLSATIEKCLVDGEPYECDVELMSPPATSCWVAVRGEATRRPDGTIIDLHGTIQDITERKRSSKELEQYRHHLEELVESRTTELATARASAEAATRAKSAFLANMSHEIRTPMNGILGMVHLMRRAGASPAQLEQLDKIASSGTHLLVIINDILDLSKIEAGKLVLEQENFLLSEVVNTALAVIAGAAAAKGLTVNADVSSIPQALRGDPTRLSQALVNYLGNALKFTERGSISLKGSVVEETETDYLLRFEVSDTGIGMTAEQQSHLFIPFAQADSSTTRKFGGTGLGLAINQHIAQMMGGEVGVSSIPGQGSSFWLTVRLGKGRSTGQAKPTLASDPEEVLVSEHRGRRVLLVEDEPINQEVAGELLREVGLEVELAADGLQAVQLVVENDYDVILMDMQMPEMDGLEATRAIRKLPGRQTVPILAMTANAFAEDRERCMASGMNDFIPKPVNPDVLYATLLRWLTVRS

SEQ ID NO: 7844 - protein, 351 aa, Emiliania huxleyi
MVTDIKPQKTERPIFPFTAIIGQEEMKLALILNVIDPRIGGVMIMGDRGTGKSTTIRAVADLLPEIQVVAGDPFNSSPTDFELMGEEAKVAVMQNKDIPLEARKVPMIDLPLGATEDRVCGTIDIEKALTDGVKAFEPGLLAKANRGILYVDEVNLLDDHLVDILLDSAASGWNTVEREGISIKHPARFVLVGSGNPEEGELRPQLLDRFGMHAEIRTVRDPELRVQVVEQRSNFDQDPEACLSENAEQQQELRDNIVAAQELVSSVKLDYSLRVKISQVCGELDVDGLRGDIVTNRAAKAYAAYNKRTEVTVDDIEAVITSCLRHRLRKDPLESIDSGDKVNKVFEEIFR

SEQ ID NO: 7845 - protein, 208 aa, Glycine max
PPPGFSSLEKMGQAAASAPPHSLLDPSFLLRNSYQTPSNGNIGDPGDIEFMDPAILAVVKGRIQGAQNSPVLDMRSNYPEQLNYFENEARVQLLMQRSLSPHQNLRFSEIGNSFSQFGDSYGISSRLNQSQVSNLASFPQLSLQQSRNAILSNGQLDGWNEVPSGNGLGVAELLRNERLGFNKFYRGYDDSKYRMPNSMDLFNRTFGI

SEQ ID NO: 7846 - protein, 505 aa, Yarrowia lipolytica CLIB122
MIRADRHTYKVFNQEFTIDKRFQVTKELGHGAYGIVCAAKYTGTPDGPGVAIKKVTNIFSKNILCKRALRELKLLNHFRGHKNITCLYDMDIVDTNNFNELYLYEELMECDMHQIIRSGQPLTDAHYQSFVYQILAGVKYIHSADVLHRDLKPGNLLVNADCELKICDFGLARGFSSDDEKNAGFLTEYVATRWYRAPEIMLSFQSYTKAIDIWSVGCILAELLGGKPLFKGKNYVDQLNQILHYLGTPSEETLKRIGSPRAQEYVRGLPFMPKIPFSTLFPTANPEALDLLEKMLAFDPAERVTVEEALEHPYLKIWHDPRDEPVCPTPFDFSFEEVNDMEAMKQMILDEVVDFRAMVRKPVDEQTRIRDEQIEEQRREEEKQEVERQQKEAERQKQHQQEAERQQHQQQQHHPQQQDSPSTLSGFSDSDQSANPHFYEYAGFGVGSQTSDMGQPPVIQRKDSLGIPEEDFKYQDPPPKPQESGRQGDGDLELELEYGLDGWRS

SEQ ID NO: 7847 - protein, 562 aa, Chromobacterium violaceum ATCC 12472
MACLDITERKMAEFELRMARDQANAANRAKSAFLATMSHEIRTPMNGVLGMLELLAMTRLDAEQSDTVATIQDSANTLLRLIDDILDFSKIEADRLEIVPTRTAIRPFMDSVRSLYHENASKKGLELTLTLDDKLAPTLVIDPLRVRQILQNFISNAIKFTASGKVDIRVKVMDTVANYQVLSFEVEDTGIGMSQEQLSKLFQPFTQADSETTRRFGGTGLGLAICRRLAGLMGGHVEMESEQGKGSCARLLLEVEWLAEQVEPVMLPEQRVPLETVIAAAQADKEISLGSGLFPILFAEDNPTNRKLTLKQLEKLGYPADWAEDGDRAFSKWLSGRYSLILTDCHMPGIDGYQLARLVRAHEESHPERGRIPIVACTANAAKEEVDKTREAGMDDFLTKPLSILALEATLRKWMGSMSGSPPDGAAASSDVPGKAEVAEPPPLDAPRIPVDRSVLEVYSNGELSVELEILREFQTGNSEDVAELRAAMAAEDAERIGFSAHRIKGASRMVGANGMGDAAEAVEKAGKARDLELARKKMVFFEDQLAVFENWLASQGETVAE

SEQ ID NO: 7848 - protein, 143 aa, Zea mays
GTSRPAGDWEKKKRLTQRTFSPLVLQHSPYHTEPTRGARGSYSSLAHTTTHHHRATELPRVCCASLIDRPIDLGMADWGPVLIGLVLFILLSPGLLFQIPGKGRIIEFGNFQTSGLSILIHAVIYFALLAIFLLAVGVHIYLG

SEQ ID NO: 7849 - protein, 171 aa, Oryza sativa
MVKYSREANNPTKSSKAMGRDLRVHFKNTRETAFAIRKLPLGKAKRYLEDVIAHKQAIPFRRYCGGVGRTAQAKSRHSNGQGRWPAKSARFILDLLKNAESNAEVKGLDVDTLYVSHIQVNQAQKQRRRTYRAHGRINPYMSSPCHIELILSEKEEPVKKEPESQIAARKA

SEQ ID NO: 7850 - protein, 274 aa, Triticum aestivum
QGAFGKLRRGTYIGEDVAIKLLEKPDNDIERAQSLEQQFVQEVMMLSTLRHPNIVRFIGACRKSIVWCIITEYAKGGSVRQFLAKRQNKSVPLRLAVKQALDVARGMAYVHALGFIHRDLKSDNLLIAADRSIKIADFGVARIEVKTEGMTPETGTYRWMAPEMIQHRPYDHKVDVYSFGIVLWELITGMLPFTNMTAVQAAFAVVNKGARPAIPHDCLPSLTHIMTRCWDANPEVRPPFTEIVCMLENAEMEVVSHVRKARFRCCVAEPMTTD

SEQ ID NO: 7851 - protein, 396 aa, Flexistipes sinusarabici
MSKQKYERKKPHVNVGTIGHVDHGKTTLTAAMTHVLSLKGYADYIEFGNIDKAPEEKERGITIATAHVEYESDKRHYAHVDCPGHADYVKNMITGAAQMDGAILVVSAADGPMPQTREHILLARQVGVPSIVVFMNKCDMVDDEELLELVELEIRDLLNTYEFPGDDIPIIKGSALQALENAEDEEKTKCIWELLQAMDDYIPAPERDIDKPFLMPIEDVFSISGRGTVVTGRVERGKVRVQDEIEIVGLTDTRKTVVTGVEMFRKILDEGEAGDNVGVLLRGIKKDDVERGQVLAKPGSITPHRKFKCEAYILTKEEGGRHTPFFSGYRPQFYFRTTDVTGVITLAEGVEMVMPGDNISCDVDLIQPIAMEQGLRFAIREGGRTVGAGVVTEIVE

SEQ ID NO: 7852 - protein, 112 aa, Streptomyces coelicolor A3(2)
SHMAGTLKHVTDDSFEQDVLKNDKPVLVDFWAAWCGPCRQIAPSLEAIAAEYGDKIEIVKLNIDENPGTAAKYGVMSIPTLNVYQGGEVAKTIVGAKPKAAIVRDLEDFIAD

SEQ ID NO: 7853 - protein, 446 aa, Thermococcus kodakarensis KOD1
MTETITMADAKAIIENQIEELARRNKEPEWMTKIRYKALEAFERAPHKDPVISEEQLLHFIAKPEVKGLPDHIESLDDLPPEMKALLDRLGISEVEQKYIAGLAVQTDTGVIYNQFLQDWAKKGLIVLPTEEAVRKYPDIVKQHFLKLFRADESKLTAYHTAVWNGGIFLYVKEGLKVPFPLHLFFLIQESALAQAPHIIIIAERNTEFHLIEGCTAPILLKHSLHLDMTEAYFHEGAKAQLTVLQNWPEYVHTRPMTRAKVGRGARFINTTVTLGSGKSNIGDPHYWVEEGGHVELNGIILGQKDFYVDLGGRMFLQGPGASGINASKAVIMDESTVVTRGIIEADAPKTKGHISCDALLMSDKAVMETYPGLISRVDDAELSHEAAIGKIREEELFYLMSRGLDEEKATQLIVKGFLDPMLKDIPMEFLVEIRKIIELAVSGGM

SEQ ID NO: 7854 - protein, 396 aa, Micrococcus luteus
MAKAKFERTKAHVNIGTIGHVDHGKTTLTAAISKVLYDKYPDLNEARDFATIDSAPEERQRGITINISHVEYQTEKRHYAHVDAPGHADYIKNMITGAAQMDGAILVVAATDGPMAQTREHVLLARQVGVPALLVALNKSDMVEDEELLERVEMEVRQLLSSRSFDVDEAPVIRTSALKALEGDPQWVKSVEDLMDAVDEYIPDPVRDKDKPFLMPIEDVFTITGRGTVVTGRAERGTLKINSEVEIVGIRDVQKTTVTGIEMFHKQLDEAWAGENCGLLVRGLKRDDVERGQVLVEPGSITPHTNFEANVYILSKDEGGRHTPFYSNYRAQFYFRTTDVTGVITLPEGTEMVMPGDTTEMSVELIQPIAMEEGLGFAIREGGRTVGSGRVTKITK

SEQ ID NO: 7855 - protein, 132 aa, Kluyveromyces lactis
  misc_feature (78)..(78): Xaa can be any naturally occurring amino acid
LEQIVGEASAFSGSSVKYIAGARPWVHVGKVDVALPCATQNEVSGAEAEHLVSNGVKFVAEGSNMGSTQEAIDVFEGXRLQTASTSAPAVWYAPGKASNMGGVAVSGLEMAQNSARVSWTRETVDAELKKIM

SEQ ID NO: 7856 - protein, 256 aa, Burkholderia xenovorans LB400
MSVELSFRDNLAFLTLNRPEALNALSFAVLREISAAFDEVKASDARALVVCGRGGKAFCAGADIKELRGRSMVAQREGAVFGQSVFRQLDQLLMPSVAVINGYAFGGGLELALACTFRVATPSARMGLPEIRLGLVPGYGGTQRLPRLVGPARALELIMSGRTVDAAEAERIGLANRVVDDGDPHQIGQDFCAQFIGYSAIASMLARQAVLRACDVSLEEGLRIEADLSTLAFQSDDAEEGMRAFIEKRKPQFSDR

SEQ ID NO: 7857 - protein, 421 aa, Acidobacteria bacterium Ellin345
MVNTIIGSGIFGIPTPLNAVVGRASPLAMVMAGLGIGLMMACAAEVSSRFTEPGGAYLYARTAFGRFVGIQIGWFSWLAPMGTSAAASNLFTSYLAAYFPFAGTALGRAAVITTLFAFLALANCVGVKVGANLSSVFTIAKILPLLLLIVLGLLYFAHHPQTFAQAQPAPAGISPWIDAMLLLSFAYGGFENAILPAGEVKNPRQTFPIALAAGLLLCIAIYSLVQFVSVATIGTAPAERPLASAAELLLGTGGAAFITVAAMISTFGHLSAVQLATPRLTYSLAERHDFPSVFARVHPRFQTPYISIMIFSAITCVLALSGTFRWAIAMASGALIVIYASICASLIRLRRMHGDEALLGIPFGPAIACLCIGFGLVLLARLTLREGFLLLVTFAIATLHWLVVRNRAYPQAIISEAGSAS

SEQ ID NO: 7858 - protein, 311 aa, Acidobacteria bacterium Ellin345
MTDNVRNTVILGSGCSGLTAAIYAARANLKPLLIQGHEPGGQLSMTTLVENFPGWPEGIQGPELIENMHKQAERFGTEFHTGHLHSADLSKRPFELHMGKETILTKTLIIASGASARWLNLKSEQELIGHGVSSCATCDGFFFSGKEISVIGGGDSAMEEALFLTRFATKVHLIHRRDAFRASKIMLDRARKHEKISMITDTVVEEVHDPAQKEVTGLTLRNLKTDKVWDLPVSAMFLGIGHHPNATAFGDQLDKDADGYLITKDYVFTKVPGVFASGDVQDRRYRQAITAAGSGCMAAIEAERFLEEHGG

SEQ ID NO: 7859 - protein, 310 aa, Bacillus megaterium
MRKIIVGSRRSKLALTQTKWVIEQLKKQGLPFEFEIKEMVTKGDQILNVTLSKVGGKGLFVKEIEQAMLDKEIDMAVHSMKDMPAVLPEGLTIGCIPLREDHRDALISKNGERFEELPSGAVIGTSSLRRGAQLLSMRSDIEIKWIRGNIDTRLEKLKNEDYDAIILAAAGLSRMGWSKDTVTQYLEPEISVPAVGQGALAIECRENDHELLSLLQALNHDETARAVRAERVFLKEMEGGCQVPIAGYGRILDGGNIELTSLVASPDGKTIYKEHITGKDPIAIGSEAAERLTSQGAKLLIDRVKEELDK

SEQ ID NO: 7860 - protein, 456 aa, Pseudomonas aeruginosa UCBPP-PA14
MKTPARRRVGLLLASLCLPLFAQAAETQPTHEFSLDNGLKVIVREDHRAPVVVSQLWYRIGSSYETPGLTGLSHALEHMMFKGSRKLGPGEASRVLRDLGAEENAFTTDDYTAYYQVLARDRLPVALEMEADRMAHLSLPADQFKSEIEVIKEERRLRTDDNPNALAFERFKAAAYPASGYHTPTIGWMADLQRMTIDDLRHWYESWYAPNNATLVVVGDVTADEVKTLAKRYFGEIPWRQLPPARKPLELAEPGERRLKLYVRTQLPNLIMGFNVPSLGSSENPREVNALRLIGALLDGGYSARLASRLERGEELVAGASTYYDAFNRGDSLFVLSATPNVQKGKTLEQVEAGLWKQLDDLKQNPPSAAEIERVRAQMIAGMVYEKDSIAAQASSIGQLESVGLSWKLIDQDLEALKAVTPDDIQKAARTYFTPSRLTLAQVLPVKAEEKEARHE

SEQ ID NO: 7861 - protein, 363 aa, Schizosaccharomyces pombe 972h-
MSMTAGNVVFVGNIPYDVSEQQMTEIFNQVGPVKTFKLVLDPETGSGKGYGFCEFFDSETTAMAVRKLNNSELGPRKIRVEFPSNDPRRNQSYEYTERTDRYMEQQNAHESSYNSRFIPPVLHSTSSLPASQGGGMPSPAIYSSSMATNLNKNINSTSVPAYNFHNSMTSDFDSASQPHTDAYNARTFQYNKSSQNKGDYTSGTSISNPTSIPLAPSVVQVLSTFSAQELLNMLSKLQTVVHIAPEEARRLLIANPALPYAAFQAMLLMNLVDANVLQQVVVAVKNKNMHQPASATSSPPSVPQKIPSSNHKSQQANGSDQGNEGKRMALIQQLLALTPEQINALPPAQRDQILSIRRQHFRQ

SEQ ID NO: 7862 - protein, 448 aa, Pyrococcus furiosus DSM 3638
MGKHYIPNSAHKEEMLKEIGFSSIEELFADVPEGFIREFNVPEGKSEYEVFMEMNEILSKNKTVLEMPTFLGAGTYFHYVPAHVKYLIERSEFLTSYTPYQAEISQGMLQALFEYQSLIAELVGLPVVNSSMYDWGSALGEAALMTVRLHRGKRLKFVVPKHTHPERMQVLKTYTRGANLEIVEVKWNDRGQVDLEDLKEKVNDAAGVYVEIPNFFGLLEENIQEIGEIAHEAGAYFVVGVDPTILGVVEAPGELGADIVVGEASYFGSPMNFGGPRAGIFATRNDPKFIRQMPGRIIGMTKDAEGKRAFVMTLQTREQHIRRAKATSNICSNEALVAVAAAIHIASLGPKGMQELGEVILKNTAYLKKRLSEVAEIPFDGVNFKDVLVKFEKPYQEIHEHLLQKNIHGGYYVKPHFPELGESALFAATETTRKEWIDALIDALREVL

SEQ ID NO: 7863 - protein, 132 aa, Triticum aestivum
MAASMISSSALVAPPSRAQGLPSLGRRASSFAVVCGTGKKIKTDKPFGIGGGLTVDKDASGRKVKGKGVYQFVDKYGANVDGYSPIYNENEWSPSGNVYVGGTTGLLIWAITLAGLLGGGALLVYNTSALSG

SEQ ID NO: 7864 - protein, 648 aa, Oryza sativa (japonica cultivar-group)
MSADSAAAGRDALLDELRALMAAHSPSLHALVVPSEDAHQSEYVSERDKRRQFVSGFTGSAGLALITMKEALLWTDGRYFLQAEQQLTNRWKLMRMGEDPPVEVWIADNLSDEAVIGINPWCISVDTAQRYEHAFSKKHQTLFQLSSDLVDEIWKDRPPVNALPVFVQPVEYAGCSVTEKLKELREKLQHEKARGIIIAALDEVAWLYNIRGNDVHYSPVVHSYSIVTLHSAFFYVDKRKVSVEVQNYMTENGIDIKDYNMVQSDASLLASGQLKGSAVNGSSHGENDMNENSKVWIDSNSCCLALYSKLDQYQVLMLQSPIALPKAVKNPVELDGLRKAHIRDGAAVVQYLAWLDKQMQENYGASGYFTEAKGSQKKEHMNVKLTEVSVSDKLEGFRASKEHFKGLSFPTISSVGPNAAVIHYKPEASSCAELDADKIYLCDSGAQYLDGTTDITRTVHFGKPSEHEKSCYTAVLKGHIALDTAVFPNGTTGHAIDILARTPLWRSGLDYRHGTGHGIGSYLNVHEGPHLISFRPSARNVPLQASMTVTDEPGYYEDGSFGIRLENVLIVKEANTKFNFGDKGYLAFEHITWTPYQTKLIDTTLLTPAEIEWVNAYHSDCRKILQPYLNEQEKEWLRKATEPIAASC

SEQ ID NO: 7865 - protein, 502 aa, Pyrococcus furiosus DSM 3638
MFRQAKWDEPLIFELSRPGRVGYTLPKPIEDIKVDIPEKLRRKSKLELPELSEPEIVKHYTRLSEMNYGVDSGIYPLGSCTMKYNPKINEEIATHPKVAYIHPYQDERTVQGALAIMWELEQWLKEITGMDRFTLQPAAGANGEFTGVMIIRAYHLDNGEPQRNEMLVPDSAHGTNPASAAMAGFKVIEIPSNENGTIDLEALENAVSERTAGLMLTNPNTLGIFEDEIVEIAKIIHKAGGLLYYDGANLNGILGKIRPGDMGFDIVHLNLHKTFSTPHGGGGPGAGPVGVKEFLKDYLPVPLVSYDEKSGRYYLDYNVPKSIGKVKELYGNFAVLVRALTYLKIMGRDGLREVSEIAVLNANYLTQKLKGTRGYSLPGKELRKHEVVFSAEPMKKETGVKALDVAKRLLDFGMHAPTIYFPLIVHEALMIEPTETVSKEELDAYVEALKRISEEAYTNPEIVKSAPHNTAVKRVDDVLAAKKPIVTWRMYKELKEKGEVDY

SEQ ID NO: 7866 - protein, 229 aa, Ashbya gossypii ATCC 10895
MSTITSLTPNQVSDELNKMQAFIKKEAEEKAKEIQLKADHEYDIEKSSLVRSETSNIDAVTADKRKKASLQQQIVMSSISNKMRLRALSTREEVLQEIFEAAREKLRDIPANEARYRPVLRELAVEALLRLLEPEATVRVRAADAELLRSLQQEIVERYKQESGRDVVLSISPEHLGKDIAGGVVVTDATGRIVVNNTLEERLKLLDTSALPKIRLELFGPSKSRKFFD

SEQ ID NO: 7867 - protein, 553 aa, Cupriavidus necator
MSQAIEIKVPDIGDYDAVPVIEVHVKPGDSINAEDALVTLESDKATMDVPSPQAGVVKDVRIKVGDNVSEGSVLVMLEAANEPAAAPAPAAAAPAPAAAAPAPAPAPAAAPAAAPAAGGGGTIEVKVPDIGDYDAVPVIEVHVKAGDTINAEDAVVTLESDKATMDVPSPQGGVVKEVKVKVGDNVAEGTLLLILEGAAAAAAPAAAAAAPAPAASAPAPAPAPAAAASGTGRSTCCRAGRRWRNRQGRPRQPLGAQVRTRAGRGRVARAGHRPKGRITQEDVQGYVKGVMSGQAAAPAQAAAAGAGGGELGLLPWPKVDFTRFGEVESKALSRIKKISGANLHRNWVMIPHVTNHDEADITELEAFRLQLNKENEKSGIKVTMLAFMIKATVAALKKFPNFNASLDGDNLVLKKYFNIGFAADTPNGLVVPVIKDADKKGVLEISQEMSELAKLARDGKLKPDQMQGGCFSISSLGGLGGTYFTPIINAPEVAIMGVCKSYQKPVWDGKQFAPRLTLPLSLSWDHRVIDGAEAARFNTYFGQLLADFRRILL

SEQ ID NO: 7868 - protein, 482 aa, Bacillus halodurans C-125
MHTQVVQERMLISDQWQHGQQSIEVIDPGTNHVIATVPAATEADAKAAIEAAKEGAEIARQMPIHERAAILKRTAEIVTRDRELFAQTIAKEGSKTIREARSEVRRCIETLTLSGEEAKRLHGETIPFSQMPGHERRVGYFYRFPIGIIVAITPFNDPLNLVAHKIGPAIAAGNSLIIKPSSFTPLSALRLVKALEEAGLPKKIVQVITGHGSVIGPTLTKHRDVRLISFTGGYETGEKIARSAGVKKLAMELGSNSPTIVLQDAELMEAVASCVSGAFCAAGQNCIGVQRIYVEQSVFNSFIQSFVAQTKQLRLGDKQSEETDIGPMISEKEAKRIERWVEEAKEEGARVLTGGRRTGAYFEPTVLTNVSPSSRLAKEEAFAPIVIIEGVHSLTEAIARANDVDFGLQAGLFTNNLTAAFSAIEKLEVGGIMVNDSSDVRIDAMPFGGIKKSGLGREGVRYAIEEMTEQKVVAFHLPEHKI

SEQ ID NO: 7869 - protein, 423 aa, Ashbya gossypii ATCC 10895
MLRWIPTRICPRLCTRGFASSCARLAQGPAFFVKPITPNDLFVSCTVFNEKGAVTGVSERYPKLSFLRDRGLYPRDLRKLDTSSIEVIPSIVVKPTCILVNLLHIKAVIEKNRVYVFDTTSKEAAARLGVLMYDLESKLASHSSQPAQHYEHRALESILVNVMTCLETEFKHLSKQCGLVLNELEDQIDRDKLRDLLIHSKDLTSFYQKSLLIRDMLDELLESDEDLAAMCLSPAPGTVEADAAEVEMLLETYYKQCDEYVQQSGSLLQNIKSTEDVVNIILDANRNSLMLFELKVTIYTLGFTVATLLPAFCGMNLKNFIEESVWGFGGVLAVSAVAGLAVTASNFKALRNVARLTVMNSHSTSPGAKNISSARLHLDRDVPTLWMRLKTAFRTIWFGKSRPSRDGRQRDMIWKWLLDDTSK

SEQ ID NO: 7870 - protein, 166 aa, Glycine max
MNALAATNRNFRLASRLLGLDSKLEKSLLIPFREIKVECTIPKDDGSLATFVGFRVQHDNARGPMKGGIRYHPEVEPDEVNALAQLMTWKTAVANIPYGGAKGGIGCDPAKLSVSELERLTRVFTQKIHDLIGVQTDVPAPDMGTGPQTMAWILDEYSKFHGHSPA

SEQ ID NO: 7871 - protein, 329 aa, Arabidopsis thaliana
MASSIVTSSLKPLAMADSSSSTIFSHPSISSTISSSRIRSSSVSLLTGRINLPLSFSRVSLSLKTKTHLKKSPFVSFVAQTSDWAEEGGEGSVAVEETENSLESQDVSEGDESEGDASEGDVSEGDESEGDVSEGAVSERAEFPEPSEEAKLFVGNLAYDVNSQALAMLFEQAGTVEIAEVIYNRETDQSRGFGFVTMSSVDEAETAVEKFNRYDLNGRLLTVNKAAPRGSRPERAPRVYEPAFRVYVGNLPWDVDNGRLEQLFSEHGKVVEARVVYDRETGRSRGFGFVTMSDVDELNEAISALDGQNLEGRAIRVNVAEERPPRRGY

SEQ ID NO: 7872 - protein, 639 aa, Arabidopsis thaliana
VTSLQDPLSESRSDQIPETRRRRPIKVHLAVYSGLLLIALYVTLIVTHDGSKAEIATESRPRMAGVSEKSNDGVWISSDDGKVEAFPWNNTILSWQRTAFHFQPEKNWMNDPNGPLFYKGWYHFFYQYNPNAAVWGDIVWGHAVSKDLIHWLYLPIAMVPDQWYDANGVWTGSATFLDDGSIVMLYTGSTDEFVQVQNLAYPEDPSDPLLLKWVKFSGNPVLVPPPGIGAKDFRDPTTAWKTSSGKWRITIGSKINRTGISLIYDTTDFKTYEKHETLLHQVPNTGMWECVDFYPVSKTQLNGLDTSVNGPDVKHVIKASMDDTRIDHYAIGTYDDSNATWVPDNPSIDVGISTGLRYDYGKYYASKTFYDQNKGRRILWGWIGESDSEAADVQKGWSSVQGIPRTVVLDTRTHKNLVQWPVEEIKSLRLSSKKFDMTIGPGTVVPVDVGSATQLDIEAEFEIKTDDLKLFFDDDSVEADNKFSCETNGGSTARGALGPFGFSVLADEGLSEQTPVYFYVTKGKHSKLNTVFCTDTSRSTLANDVVKPIYGSFVPVLKGEKLTMRILVDHSIVEGFAQGGRSCITSRVYPTKAIYGATKLFLFNNAIDATVTASFTVWQMNNAFIHPYSSDDLGVPSST

SEQ ID NO: 7873 - protein, 421 aa, Gluconobacter oxydans 621H
MPDTIEVTRLDNGLTIITERMDRVETVSFGAYVSIGTRDETADNNGVSHFLEHMAFKGTERRSASRIAEEIENVGGYINAYTARETTAYYVKLLKNDLALGVDIIGDILTHSTFLDAEIERERGVILQEIGQANDTPDDIIFDQFQERAFPEQPMGRPTLGSEERVSTMTRDTLMSYMREHYTTHNITIAAAGNLHHQQVVDLVKDHFRDLPTHQTPRPRAASYEGGELRTTRELDQAHLVMGFPSVSYMHPDHYAVMILSTLLGGGMSSRLFQEIRERRGLVYSVYSFASPFSDSGLFGLYAGTGEEQTAELVPVMIDELKRLQDGLSAEELSRARAQLKSSLLMSLESTGSRCEQLARQIQVHNRPVPTAETVGKIDAVTEEDILRVARTIFSGTPTFTAIGPIDNMPSLEDITARLAA

SEQ ID NO: 7874 - protein, 802 aa, Dechloromonas aromatica RCB
MQGNEEIVKRLFPRYLALALTLLLVMGNTLPPTKFFSSPEHYLPLHTVLEFLAMTISAMVFSLSWNLRTQPRSSNNLLLGIGLMIVCMIDMAHTLSYAGMPKLVTPSSPEKAINFWLAGRFVAAISLLAYATLPEKTWNALVSALALFGGLLFAALVWWIGLFHADTLPCTFIPGEGLTVFKIAAEYSLSAFYAIAALLLYLRGQKTRRPELYWVAAASWTLGLAEMFFTLYVDVTDLFNLLGHIYKAFAYWMIYRALFAEGVRAPQHALSRQAQRLSAILDGTNVGTWEWNIQNGKVIINERWANIIGYDLAEMQPVNFQTWVGFVHPEDIQTSQFLLEQHFSGEIPYYECVVRMRHKDGHWVWVLDRGRIATWAADGKPLWMFGTHQDITAQKMAEQELLAHRDHLEELVSIRTHDLSIAKDAADAASRAKSAFLSNMSHELRTPLHGILGLGNILKGKINDQHSRLLVAKLLTTASHMNDVVNNVLDLARIEAGRFVIKNADFSTATLKEKLDSICAINAQAKGLEYKANFDLPPRVHGDSVQILQVLINIVGNAIKFTEHGSIHVSAFVLSEESSRLRLCFEVRDTGIGIPPEKLESIFEDFEQADGGINRKYGGSGLGLAITRRLVQMMEGETQVESQPGIGSLFRFEINVGKVASHDTGGATEASPAPPVNLLGAHILVVDDEPLNGMILTDILAEHQVNVSLAENGQSAIDLAKTEHFDLILMDMQMPVLNGLAATEQIRQLPGYETTPIIALTANVQPEHKAQAEGAGMNDFLGKPFNGEVLLAKISYWLQASK

SEQ ID NO: 7875 - protein, 570 aa, Treponema denticola ATCC 35405
MLITFKELGLDDIVLQAVEAKGFEEPTPIQVLAIPRLLSGEANVIAKARTGTGKTAAFGLPLVQELRSNTGKVRALILVPTRELAVQVAGELESFRIEEYPRIATVYGGAAIGPQLRSLKTGVEIVVGTPGRIMDHLERGSLKIEDIEYFILDEADEMLNMGFIEDIENIFSKANPEARVLMFSATMPKQILSIASDFMGDYEIVEEEPQEERASLTEQFFWVVREGDKTEALVRLIDTSPNFYGLVFCQTKIDADDVAKELDERHYEAAALHGDIPQSQREKILERFRSKKTRILVATDVAARGIDIEGISHVVNYAIPYDGPTYTHRIGRTGRAGAAGVAVSFVRPNEVKRIEYLRKHARGELKEGKIPSIEQVIEIKRTRILKETAAQIEKRISEEKPEQGFAAFANKLTEYGDAQTVLSFILQMQYGSFLSPAHYKTIKPVRSEGKARKSDDDSLRLYIGVGRKDGITKRKLAEMLSRLLSIPERLVDDIEVMDKFSLATMPKNAANDALRLCKKKRGLPHMHIDVKSEAPTNYGSIGKGKRGQKRKNGTQRKKEGLSSASKYKRK

SEQ ID NO: 7876 - protein, 334 aa, Bacillus thuringiensis serovar konkukian str. 97-27
MTKIGINGFGRIGRNVFRAALNNSEVEVVAINDLTDAKTLAHLLKYDTVHGTLNAEVSANENSIVVNGKEIKVIAERDPAQLPWSDYGVEVVVESTGRFTKKSDAEKHLGGSVKKVIISAPASDEDITVVMGVNHEQYDAANHNVVSNASCTTNCLAPFAKVLNEKFGVKRGMMTTIHSYTNDQQILDLPHKDLRRARAAAENMIPTSTGAAKAVALVLPELKGKLNGGAVRVPTANVSLVDLVVELDKEVTVEEVNAAFKAAAEGELKGILGYSEEPLVSIDYNGCTASSTIDALSTMVMEGNMVKVLSWYDNETGYSNRVVDLAAYMTSKGL

SEQ ID NO: 7877 - protein, 400 aa, Geobacter sulfurreducens PCA
MPVARIEEAIEDIRQGKMVILVDDEDRENEGDLTMAAEMVTPEAINFMARFGRGLICLTMTTERCDHLQLPLMVSANTSSFGTAFTVSIEAKRGVTTGISAADRAHTILTAVADDAKADDLARPGHVFPLRAKPGGVLVRAGQTEGSVDLARLAGLKPAGVICEIMNDDGTMARMPQLKVFAKEHGIRICTIADLVAYRLKHESLVRRAADVLLPTDFGEFRAIAFENDVDRLEHLALVKGEIRGDEPVLVRVHSECMTGDVFGSLRCDCGSQLHRAMEMIEAEGRGVILYMRQEGRGIGLFNKLKAYALQDEGKDTVEANLALGFKPDLRDYGIGAQILVNLGVRNIRLLTNNPRKLIGLQGYGINIVERVPIEIPPTTTNLDYLKAKREKLGHLLENI

SEQ ID NO: 7878 - protein, 635 aa, Medicago sativa
MPKSSKKSATKVDAAPVVVSPVKSGKKGKRQAEEEVKAVSAKKQKVEEVAAKQKALKVVKKEESSSEESSEESEDEKPVAKAPAPSKKTPAKNGNVKKAQPETTSEESDSDDISSDEEEVKKPAAKAVPSKNGSAPVKKDDESSEEDSDESSESSDEDKKPAAKAVPSKNGSAPAKKDDSSEEEDSEDSDEDEKPAAKAVSSKNGSVSAKKDDSSSDEDSESSDEEDKKPAAKASKNVSAPTKKAASSSDEESDEESDEDEDAKPVSKPAAVAKKSKKDSSDSDDEDDDSSSDEDKKPVASKKEVSESESDSSDDDHKMNIDKDSSDSDESEEESEDEPLKTPQKKIKDVEMVDAGKSGKKAPNTPATPNETSGSKTLFVGNLSFDVKRSDIENFFQGCVEVVDVRLASDGDGVFKGFGHVEFATAEAAQSALEMNGQELLHRALRLDLARERGAFTPNNNSNYSAQSGGRGQSQTVFVRGFDKNLGEDEIRAKLMEHFGGTCGEPTRVSIPKDYESGYSKGFAYMDFKDSDSFSKALELHESELDGYQLSVDEAKPRDSQGPGGRGGGGRIGGGRFGEGGRTGGFGGRSGGRGGGRFGGRDSAGRGGRGGRGGRGGFNKPSFASEGKKTTFADD

SEQ ID NO: 7879 - protein, 995 aa, Staphylococcus aureus subsp. aureus NCTC 8325
MNNKKTATNRKGMIPNRLNKFSIRKYSVGTASILVGTTLIFGLSGHEAKAAEHTNGELNQSKNETTAPSENKTTKKVDSRQLKDNTQTATADQPKVTMSDSATVKETSSNMQSPQNATANQSTTKTSNVTTNDKSSTTYSNETDKSNLTQAKDVSTTPKTTTIKPRTLNRMAVNTVAAPQQGTNVNDKVHFSNIDIAIDKGHVNQTTGKTEFWATSSDVLKLKANYTIDDSVKEGDTFTFKYGQYFRPGSVRLPSQTQNLYNAQGNIIAKGIYDSTTNTTTYTFTNYVDQYTNVRGSFEQVAFAKRKNATTDKTAYKMEVTLGNDTYSEEIIVDYGNKKAQPLISSTNYINNEDLSRNMTAYVNQPKNTYTKQTFVTNLTGYKFNPNAKNFKIYEVTDQNQFVDSFTPDTSKLKDVTDQFDVIYSNDNKTATVDLMKGQTSSNKQYIIQQVAYPDNSSTDNGKIDYTLDTDKTKYSWSNSYSNVNGSSTANGDQKKYNLGDYVWEDTNKDGKQDANEKGIKGVYVILKDSNGKELDRTTTDENGKYQFTGLSNGTYSVEFSTPAGYTPTTANVGTDDAVDSDGLTTTGVIKDADNMTLDSGFYKTPKYSLGDYVWYDSNKDGKQDSTEKGIKGVKVTLQNEKGEVIGTTETDENGKYRFDNLDSGKYKVIFEKPAGLTQTGTNTTEDDKDADGGEVDVTITDHDDFTLDNGYYEEETSDSDSDSDSDSDSDSDSDSDSDSDSDSDSDSDSDSDSDSDSDSDSDSDSDSDSDSDSDSDSDSDSDSDSDSDSDSDSDSDSDSDSDSDSDSDSDSDSDSDSDSDSDSDSDSDSDSDSDSDSDSDSDSDSDSDSDSDSDSDNDSDSDSDSDSDSDSDSDSDSDSDSDSDSDSDSDSDSDSDSDSDSDSDSDSDSDSDSDSDSDSDSDNDSDSDSDSDSDAGKHTPAKPMSTVKDQHKTAKALPETGSENNNSNNGTLFGGLFAALGSLLLFGRRKKQNK

SEQ ID NO: 7880 - protein, 265 aa, Vibrio vulnificus CMCP6
MSDIIPPSENGISLSLNGHVATITMVNPPANTWTANSLIELKKTVLALNDNKAIYALVLTGDGEKFFSAGADLKLFASGDKGVAVDMARIFGEAFETLSAFRGVSIAAINGYAMGGGLEVALACDIRIAEEQAVLALPEAKVGLLPCAGGTQNLTALVGEGWAKRIILCGEQVSAEKALSIGLIEEVVAKGESLSAAQALAQQVANQSPSSVSACKKLIQNTRQAPLSMGLIRERELFIQLFDTQDQQEGVQAFLEKRAPQWKNQ

SEQ ID NO: 7881 - protein, 1349 aa, Staphylococcus aureus subsp. aureus NCTC 8325
MLNRENKTAITRKGMVSNRLNKFSIRKYTVGTASILVGTTLIFGLGNQEAKAAESTNKELNEATTSASDNQSSDKVDMQQLNQEDNTKNDNQKEMVSSQGNETTSNGNKLIEKESVQSTTGNKVEVSTAKSDEQASPKSTNEDLNTKQTISNQEALQPDLQENKSVVNVQPTNEENKKVDAKTESTTLNVKSDAIKSNDETLVDNNSNSNNENNADIILPKSTAPKRLNTRMRIAAVQPSSTEAKNVNDLITSNTTLTVVDADKNNKIVPAQDYLSLKSQITVDDKVKSGDYFTIKYSDTVQVYGLNPEDIKNIGDIKDPNNGETIATAKHDTANNLITYTFTDYVDRFNSVQMGINYSIYMDADTIPVSKNDVEFNVTIGNTTTKTTANIQYPDYVVNEKNSIGSAFTETVSHVGNKENPGYYKQTIYVNPSENSLTNAKLKVQAYHSSYPNNIGQINKDVTDIKIYQVPKGYTLNKGYDVNTKELTDVTNQYLQKITYGDNNSAVIDFGNADSAYVVMVNTKFQYTNSESPTLVQMATLSSTGNKSVSTGNALGFTNNQSGGAGQEVYKIGNYVWEDTNKNGVQELGEKGVGNVTVTVFDNNTNTKVGEAVTKEDGSYLIPNLPNGDYRVEFSNLPKGYEVTPSKQGNNEELDSNGLSSVITVNGKDNLSADLGIYKPKYNLGDYVWEDTNKNGIQDQDEKGISGVTVTLKDENGNVLKTVTTDADGKYKFTDLDNGNYKVEFTTPEGYTPTTVTSGSDIEKDSNGLTTTGVINGADNMTLDSGFYKTPKYNLGNYVWEDTNKDGKQDSTEKGISGVTVTLKNENGEVLQTTKTDKDGKYQFTGLENGTYKVEFETPSGYTPTQVGSGTDEGIDSNGTSTTGVIKDKDNDTIDSGFYKPTYNLGDYVWEDTNKNGVQDKDEKGISGVTVTLKDENDKVLKTVTTDENGKYQFTDLNNGTYKVEFETPSGYTPTSVTSGNDTEKDSNGLTTTGVIKDADNMTLDSGFYKTPKYSLGDYVWYDSNKDGKQDSTEKGIKDVKVTLLNEKGEVIGTTKTDENGKYCFDNLDSGKYKVIFEKPAGLTQTVTNTTEDDKDADGGEVDVTITDHDDFTLDNGYFEEDTSDSDSDSDSDSDSDSDSDSDSDSDSDSDSDSDSDSDSDSDSDSDSDSDSDSDSDSDSDSDSDSDSDSDSDSDSDSDSDSDSDSDSDSDSDSDSDSDSDSDSDSDSDSDSDSDSDSDSDSDSDSDSDSDSDSDSDSDSDSDSDSDSDSDSDSDSDSDSDSDSDSDSDAGKHTPVKPMSTTKDHHNKAKALPETGSENNGSNNATLFGGLFAALGSLLLFGRRKKQNK

SEQ ID NO: 7882 - protein, 123 aa, Zea mays
  misc_feature (84)..(84): Xaa can be any naturally occurring amino acid
  misc_feature (96)..(96): Xaa can be any naturally occurring amino acid
LYYLDAGRSIDIEVDNPVPGPDGEEDAVHLPVICRLSRCNHRDILPVREAVRHLRPPQIHTYIVTSDIHMQHKLRKTPDSGGRXARDMEHYARSCXCTDVAFSHEDAGRLTGELSYHMLGEVI

SEQ ID NO: 7883 - protein, 525 aa, Novosphingobium aromaticivorans DSM 12444
MFGRVKPLDAILATAEKKSLHRSLGPVQLTLLGVGAIIGTGIFVLTAAAAQKAGPGMMWSFVIAGFVCAVAALCYSELASMVPVSGSAYTYSYAVVGEMLAWMVGWALILEYAVAASAVSVGWSGYFMGLLKSLTGFELPAMLQAGPTWTMNGLLPHADFSTGLINVPAIVVALLVTWLLMLGTKESATFNAILVAIKVAALTMFIVLTLPAIEREHFAPFAPNGWFGPAGTTGMGIVGAASSIFFAYVGFDAVSTAAEETKNPQRNVPIGLIGSLAICTVFYLLVAAGAIGSIGAQPTALGVAPGSAEFTQQCAALLASGQEPLVCSNEALAHVLRAINYTYAGDLIGLAANLALPSVILMMLYGQTRIFFVMARDGLLPEKLATVHPKWKTPHIVTAMTGVFVAIAAALLPVGQLADISNSGTLFAFFMVAIAVMLLRARDPNRVRPFRTPAVWVVGPIAAIGCIFLYWNLPFEAKMVLPVWGAIGLVFYFAYGYRKSHVGQGHVEVHEGDADVPPMPVPPID

SEQ ID NO: 7884 - protein, 497 aa, Vibrio vulnificus CMCP6
MTQSVPLFIQGSFVESQSNEWIDVTNPATGEVIARLPCATPAEMTNAITSASEAFQSWKEVAVSERARLMLRYQHLLKENHDALAQLLSQETGKTLADAKGDVWRGIEVVEQAANIASNMMGETVENVATDIDSYSLIQPLGVCCGITPFNFPAMIPLWMFPIAIASGNTFVLKPSEQVPLTSVRLAQLFADAGAPDGVLQIVHGGKAQVDFLLTHPDVRAVSFVGSVPTAQYIYQTATQNFKRVQAFAGAKNHMVVMPDANKAQVLSNLVGASVGAAGQRCMAISVAVLVGDAKHWVADIKAELATVKPGAWDDATAAYGPLISAAAKQRVLGLIAEGKAQGAVCELDGSQCQVAGYPNGNWVGPTLFSGVTTEMSIYQQEIFGPVLVCLEVDSLEEAIALINRNPYGNGTSIFTANGAAARKFQHQIQVGQVGINVPIPVPLPFFSFTGWRGSFYGDLHAYGKQAVRFYTETKTVTARWFEEDMPSGPNMTIQLR

SEQ ID NO: 7885 - protein, 367 aa, Ashbya gossypii ATCC 10895
MHRSSATSLIHKATYATSKTLTIGLIPGDGIGKEVIPAGQRVLEAIGKKHDIRFSYEHLDAGWQTFLETGNALPGATVEALRERCQGALFGAVQSPTTKVEGYSSPIVALRRQLGLYANIRPVKSVSGTGQPVDLVIVRENTEDLYVQQERTYVDAATGKRVAEAIKRISEPATERIAEISLRLALQRQRMGGRGALTVTHKSNVLSQTDGLFKEVCREVYEANKKSYGSIEYNEQIVDSMVYRLFKEPHCFDVVVAPNLYGDLLSDGAAALVGSLGLVPSVNVGNNIIIGEPCHGSAPDIAGRGIANPIATIRSVSLMLQFLGLEEAASDIDQAVTGNLKDRQVVSPDLGGKNTTQEVLDDILARI

SEQ ID NO: 7886 - protein, 415 aa, Neisseria gonorrhoeae FA 1090
MSQRRVVITGLGQVSPVGNTAAEAWDNLLAGKSGIGAITRFDASDINSRVAGEVRGFDIGQYISAKEARRMDVFIHYGIAAALQAIADSGLDDVENLDKDRIGVNIGSGIGGLPSIEATGKAVIEGGARKINPFFIPGSLINLISGHVTILKGYRGPSYGMVSACTTGAHAIGDSARLIKYGDADIMVAGGAEGAISTLGVGGFAAMKALSTRNDDPATASRPWDKGRDGFVIGEGAGILVLEELEHAKKRGAKIYAEIVGFGMSSDAYHITAPNEEGPALAVTRALKDAGINPEDVDYVNAHGTSTPLGDANETKALKRAFGEHACKTVISSTKSMTGHLLGAAGGVEAVYSILAIHDGKIPPTINIFEQDVEAGCDLDYCANEARDAEIDVAISNSFGFGGTNGTLVFKRFKG

SEQ ID NO: 7887 - protein, 316 aa, Bacillus subtilis subsp. subtilis str. 168
MSEEKIYDVIIIGAGPAGMTAAVYTSRANLSTLMIERGIPGGQMANTEDVENYPGFESILGPELSNKMFEHAKKFGAEYAYGDIKEVIDGKEYKVVKAGSKEYKARAVIIAAGAEYKKIGVPGEKELGGRGVSYCAVCDGAFFKGKELVVVGGGDSAVEEGVYLTRFASKVTIVHRRDKLRAQSILQARAFDNEKVDFLWNKTVKEIHEENGKVGNVTLVDTVTGEESEFKTDGVFIYIGMLPLSKPFENLGITNEEGYIETNDRMETKVEGIFAAGDIREKSLRQIVTATGDGSIAAQSVQHYVEELQETLKTLK

SEQ ID NO: 7888 - protein, 505 aa, Synechococcus sp. WH 7805
MGRRYGGQLLDPMHRRLPMASAPLPLTAAPIRFGTDGWRGILGVDITVERLLQVAAAAARELAYQAPEDHKSRTVVIGYDRRFLAPELAEAIAAAVRGAGLDPLLTSTAVPTPACSWAVVQRQALGALVITASHNPPEWLGLKIKGPFGGSVEGDFTAAVEQRLAAGGITVPIPGDLPRFDARNEHLQGLRNKLDLSAITQGLNSMGLKVIVDPMHGSAAGCVQELLGAEANGIVSEIRSLRDPLFGGCPPEPLAPHLKQLIAAVQASTQSGHPAVGLVFDGDGDRIAAVDETGCFCSTQQLMPLLIDHLAGSRQLPGAVVKTVSGSDLMRLVAEDLGRTVLELPVGFKYIAAEMLSGEVLIGGEESGGVGFGMHLPERDALFAAMLVLEALVAGGQPLGKRLAALRDRCGGASHYDRLDLRLPDMDSRRRLEALLGDQPPQTVAGVAVQEVITTDGVKLRLGPSHWLMLRFSGTEPLLRLYCEAPDAGRVAEVLAWARSFAEAA

SEQ ID NO: 7889 - protein, 83 aa, Pyrococcus furiosus DSM 3638
MSGTKKVGSAGRFGARYGLKIRRRVAAVEAKMRQKHTCPVCGRKAVKRISTGIWQCQKCGATFAGGAYLPVTPAGKAVRRITE

SEQ ID NO: 7890 - protein, 479 aa, Bacillus cereus ATCC 14579
MTTSNTYKFYLNGEWRESSSGETIEIPSPYLHEVIGQVQAITRGEVDEAIASAKEAQKSWAEASLQDRAKYLYKWADELVNMQDEIADIIMKEVGKGYKDAKKEVVRTADFIRYTIEEALHMHGESMMGDSFPGGTKSKLAIIQRAPLGVVLAIAPFNYPVNLSAAKLAPALIMGNAVIFKPATQGAISGIKMVEALHKAGLPKGLVNVATGRGSVIGDYLVEHEGINMVSFTGGTNTGKHLAKKASMIPLVLELGGKDPGIVREDADLQDAANHIVSGAFSYSGQRCTAIKRVLVHENVADELVSLLKAQVAELSVGSPEQDSTIVPLIDDKSADFVQGLVDDAVEKGATIVIGNKRERNLIYPTLIDHVTEEMKVAWEEPFGPILPIIRVSSDEQAIEIANKSEFGLQASVFTKDINKAFAIANKIETGSVQINGRTERGPDHFPFIGVKGSGMGAQGIRKSLESMTREKVTVLNLV

SEQ ID NO: 7891 - protein, 581 aa, Glycine max
MCGILAVLGCSDDSRAKRVRVLELSRRLKHRGPDWSGLHQHGDCFLAHQRLAIVDPASGDQPLFNEDKSVIVTVNGEIYNHEELRKQLPNHNFRTGSDCDVIAHLYEEHGEDFVDMLDGIFSFVLLDTRDNSFIVARDAIGVTSLYIGWGLDGSVWISSEMKGLNDDCEHFECFPPGHLYSSKERGFRRWYNPPWFSEAIPSAPYDPLVLRHAFEQAVIKRLMTDVPFGVLLSGGLDSSLVASITSRYLANTKAAEQWGSKLHSFCVGLEGSPDLKAAKEVADYLGTVHHEFTFTVQDGIDSIEDVIYHIETYDVTTIRASTPMFLMSRKIKSLGVKWVISGEGSDEIFGGYLYFHKAPNKEEFHRETCRKIKALHQYDCLRANKSTFAWGLEARVPFLDKAFINAAMSIDPEWKMIKRDEGRIEKWILRRAFDDEEHPYLPKHILYRQKEQFSDGVGYSWIDALKAHPPKHVTEKMMLNAGNIYPHNTPKTKEAYYYRMIFERFFPQNSARLTVPGGASAACSTAKAVEWDAAWSNNLDPSGRAALGVHISAYENQNNKGVEIEKIIPMDAAPLGVAIQG

SEQ ID NO: 7892 - protein, 161 aa, Picea glauca
MVSRTAITEDVCQVEAKRLWNALSKDSHNLLPKILPEIFASVTLLQGDGGVGTIKQLNFTPANKDFSFIKERVDEIDEEKMVYKYTTIEGGSLGEKLSAASFEVKLVPRKEGGCVASWICNYETLPGAQLDEGKTKEIKENSIAMLKKIEQYLLSNPNLYC

SEQ ID NO: 7893 - protein, 139 aa, Glycine max
LAPLTAITRPAISLKEKSAAMKTTSSGIAVVLLVAMLAVHSALADISCSDVLNDLSPCLPFLQGKAAKPSESNNQCCDGVRALYAAADTRPDRQATCRCLKAAYVQVHAVLSAAQELPGDCGLSLSYNITPDIDCDKIE

SEQ ID NO: 7894 - protein, 612 aa, Streptomyces seoulensis
MAVSVTLPALGESVTEGTVTRWLKAEGERVEADEPLLEVSTDKVDTEIPSPVAGVLASIKVAEDETVEVGAELALIDDGSGAPAAEAPAAEAPAAEAPAPAAEEAPQSAPSTEQEAPAEAPTAEAASGGGSAEGTDVVLPALGESVTEGTVTRWLKSVGDSVEADEPLLEVSTDKVDTEIPAPTSGTLLEIVVGEDETAEVGAKLAVIGAAGAAPAAAPEAPKAPAAEAPAAPAPAAPAPAAPAAPAPQAPAPQAPSAPAPQQQTAPAPDPAPAAPAPAPAPAPAQAPAAAPSAPTATQATDEGAYVTPLVRKLAAESSVDLASVKGTGVGGRIRKQDVIAAAEAAKAAAAPAPAAAQAPAAAKKAPALEASPLRGQTVKMTRIRKVIGDNMVKALTEQAQLSSVVEVDVTRLMKLRGKAKDSFAAREGVKLSPMPFFVKAAAQALKAHPVINARINEAEGTITYFDTENVGIAVDSEKGLMTPVIKHAGDLNLAGIAKATAELAGKVRANKITPDELSGATFTISNTGSRGALFDTIIVPPNQVAILGIGATVKRPAVLETEEGTVIAVRDMTYLTLSYDHRLVDGADAARYLTTVKQILEAGEFEVELGL

SEQ ID NO: 7895 - protein, 146 aa, Pisum sativum
MAFCNKLGNLLRQGATQSSHAPVSSMLNYLRHMSSSKLFIGGLSYGVDDQSLKDAFASYGEVVEARVITDRDTGRSRGFGFVNFTSDESATSALSAMDGQDLNGRNIRVSYANDRPSAPRGGGGGYGGGYGDGFSNRGGGGGGGGW

SEQ ID NO: 7896 - protein, 160 aa, Picea glauca
MVSGTPVTEDVCQVEARKLWNPMAKDSHNLLPKVLPEIFASVTLLQGDGGVGTIKQLNFTPANKDFSFVKERVDEIDEEKMVYKYTTIEGGSLGKKLSAASFEVKISPRKEGGCVATWVCNYETLPGGQLDEGRVKEIKENSVAMLKKIEQYLLSNPTLY

SEQ ID NO: 7897 - protein, 164 aa, Gluconobacter oxydans 621H
MTCAYDFSLPGLSGDTIDLSAYRGRPLLIVNTASKCGFTPQYEDLQHLWSRYGRDYPEGLMIIGVPSNDFGQQEPGSSEDIKNFCHRNYGVSFPMTARQHVRGPETTPLFRWLDKQGGFLARPRWNFYKYLTDRDGNLANWFTPLAKPASNRVEEAVRKVLLDH

SEQ ID NO: 7898 - protein, 452 aa, Zea mays
MASAAVLRNAGSRRLFSYPTLRAAAIYVPSALPDAPAAAAAPAQPPPTAGTLWARSMATFTRTKPHVNVGTIGHVDHGKTTLTAAITKVLAEAGKAKAVAFDEIDKAPEEKARGITIATAHVEYETAKRHYAHVDCPGHADYVKNMITGAAQMDGGILVVSAPDGPMPQTKEHILLARQVGVPSLVCFLNKVDAVDDPELLELVEMELRELLSFYKFPGDEIPIIRGSALSALQGNNDEIGKNAILKLMDAVDEYIPDPVRQLDKPFLMPIEDVFSIQGRGTVVTGRVEQGTIKTGEDVEILGLAQTGPLKTTVTGVEMFKKILDHGEAGDNVGLLLRGLKRGDVERGQVVCKPGSLKTCKKFEAEIYVLTKDEGGRHTAFVTNYSPQFYFRTADVTGRVELLGEMKMVLPGDNVTANFELISPVPLEPGQRFAIREGGRTVGAGVVSKVLS

SEQ ID NO: 7899 - protein, 153 aa, Haemophilus somnus 129PT
MCHNSHRFFSDLEENDYMRILHTMLRVGDMDRSIHFYQQVLGMRLLRTSENTEYKYSLAFLGYDDEENSSVIELTYNWGVSKYEMGTAYGHIAIGVEDIYATCKAVKEAGGKITREPGPVKGGKTVIAFVEDPDGYKIEFIENKMAQAGLGNQ

SEQ ID NO: 7900 - protein, 357 aa, Gluconobacter oxydans 621H
MNGLKLPFMNAPVLPSEALQRVAAEAVRRSHAAEPPTGRKLPLRVGSRASPLALVQTRNFLTRLTRFCPVLRDMGAFQEYQISTEGDRNLVQRLAEIGGKGLFAKEIHEALAAGRIDFAVHSLKDLETNLPPGLVLACTLKREDARDALILRDRDVKVDPQRPYDCLPEGALIGCASVRRQAQMLHVRPDLRFCLLRGNVQTRLDKLRAGACEATLLALAGLRRLGMEDRVDVVLEPDQMLPASGQGIVGVTVRESDLELRELLSAIEDPEARAVSTAERALLAELDGSCRTPIGGYARIENGVLKLSGMIASEDGTFLLRREIEGAPLEAARLGTELADELRRDTPAHIFDEMRRP

SEQ ID NO: 7901 - protein, 468 aa, Escherichia coli CFT073
MEGIMPDAKKQGRSNKAMTFFVCFLAALAGLLFGLDIGVIAGALPFIADEFQITSHTQEWVVSSMMFGAAVGAVGSGWLSFKLGRKKSLMIGAILFVAGSLFSAAAPNVEVLILSRVLLGLAVGVASYTAPLYLSEIAPEKIRGSMISMYQLMITIGILGAYLSDTAFSYTGAWRWMLGVIIIPAILLLIGVFFLPDSPRWFAAKRRFVDAERVLLRLRDTSAEAKRELDEIRESLQVKQSGWALFKENSNFRRAVFLGVLLQVMQQFTGMNVIMYYAPKIFELAGYTNTTEQMWGTVIVGLTNVLATFIAIGLVDRWGRKPTLTLGFLVMAAGMGVLGTMMHIGIHSPSAQYFAIAMLLMFIVGFAMSAGPLIWVLCSEIQPLKGRDFGITCSTATNWIANMIVGATFLTMLNTLGNANTFWVYAALNVLFILLTLWLVPETKHVSLEHIERNLMKGRKLREIGAHD

SEQ ID NO: 7902 - protein, 439 aa, Mycobacterium sp. KMS
MTRLDSVERAIADIAAGKAVVVIDDEDRENEGDLIFAAEKATPELVAFMVRYTSGYLCVPLDGAICDRLGLLPMYAVNQDKHGTAYTVTVDAKHGVGTGISASDRATTMRLLADPTSNADEFTKPGHVVPLRAKDGGVLRRPGHTEAAVDLARLAGLQPAGTICEIVSQKDEGAMAQTDELRIFADEHDLALISIADLIEWRRKHERHIERIAEARIPTRHGEFRAVGYTSIYDDVEHVALVRGDVAGPHGDGHDVLVRVHSECLTGDVFGSRRCDCGPQLDAAMAMVAREGRGIVLYMRGHEGRGIGLMHKLQAYQLQDAGDDTVDANLKLGLPADARDYGIGAQILVDLGVRSMRLLTNNPAKRVGLDGYGLHVIERVPLPVRANAENIRYLMTKRDRMGHDLTGLDEYDEANSMDDYDEGVYLLGERRPTDLGGSR

SEQ ID NO: 7903 - protein, 477 aa, Neisseria gonorrhoeae FA 1090
MNEYSQLIKHPDISLSPISDGIGVGNPATGEILAYVRNTGSDKLKNLIQKAAAAQKLWAAKTALERADILWRWYFLVKENKEALARLMTMEQGKSLTEARGEIDYAASFVRWFAEEARRIDGDVLTSVKASQKLVVLKQPVGVTAAITPWNFPSAMIARKAAPALAVGCAMIVKPASLTPLSAYALAVLAYEAGVPQDLLPVVSGRASEISHEFATNPTVRKISFTGSTEVGAKIFAGSAADIKKLSLELGGNAPFIVFDDADLDKAVEGALASKFRNSGQTCVCTNRVYVQSGIYDVFCRKLSEKAAALKLGDGLDEGVNQGPLIEEKAVEKVEQHIADALSKGAVCLTGGKRSALGGTFFEPTVLSGVTAQMAVAREETFGPLCPVFRFETEAEVIEAANNTEYGLAAYLFTSDTARQWRVGEVLEYGMVGINTGLISNEAAPFGGVKRSGLGREGSKYGADEYLELKYLCIDAG

SEQ ID NO: 7904 - protein, 131 aa, Oryza sativa
MATILAVAAMATFQAPTTLPGPLAPTLPVRRNVVSFAGRRQGRALGRLAVVVAAGSPTPPELAQKVSESIKQAEETCAGDPEGGECAAAWDEVEELSAAASHARDRKKDSDPLEEYCKDNPETDECRTYED

SEQ ID NO: 7905 - protein, 522 aa, Vibrio vulnificus CMCP6
MLDQAIKQQLTQYLTNLKQDVRLVVSLDDSKGSQDILALANEIAELSPLITVVRDDAASTRKPVMTVTNPEKSTALRFAGLPMGHEFTSLVLALLHSGGHPIKLDAETIEQIAQLDKELDVEVFISLSCQNCPDVVQAFNMMAAINPKIRATMIDGALFQDEVKQRDILAVPSVFVNGELFGQGRMSLTEILNKLDDGAAEKAAASLNDKDPYDVLVVGGGPAGAAAAIYAARKGIRTGIVAQRLGGQVMDTMAIENFISVKHTEGPKLAANLGEHLKEYGVDIITEQQAEKLMGAQYTEDGKIHVNLQSGATLKSNSVILSPGARWREMNVPGEQEYRNKGVAYCPHCDGPLFKGKKTAVIGGGNSGIEAAIDLAGIVEHVTVLEFADTLRADQVLINKANSLPNVDIITMAQTTEVVGDGKRVTGLKYKDRNTDEIKQLDLAGIFVQIGLVPNTEWLKDSDVELSARGEIEIGSRGETSLEGVFAAGDATTVPYKQIIIAMGEGAKASLGAFDYLIRKQG

SEQ ID NO: 7906 - protein, 440 aa, Helicobacter hepaticus ATCC 51449
MDPYSSILMLILALFLVFLNAFFVLSEFAIVKIRKSKLEELAKNEVKNASLALKITHSLDTYLSATQLGITLASLALGWISENAFVKLISIPFGYLLESSPLLVHSIASMIAFVFVTLLHVVLGELVPKSVAIAKTESVVLLVAKPLYTFRIIFSPLIKLFDLLAAFFLKFINISPARENEAVHSDEELKIIIGESLKEGYIDSIEGEIIKNAVDFSDTLAREIMTPRKDMICLNAQDGYEKNIDIILQTNHTRYPYYQDSKDNILGMIHIRDLFENAIKGKEHNLSKLVRNMIIVPESAHISEILNTMNRQQVHTALVVDEYGGTSGLLTMEDIIEEIMGDISDEHDLKIEDMRQIDAQTYEFDGKLEISDIEEMLDITFKNTNDHITIGGYVFGLFGRLPMMKDKITDEHCIFEVLEMEGARIKKLKVTYTPKITSTL

SEQ ID NO: 7907 - protein, 112 aa, Oceanicola granulosus HTCC2516
MKKIEAIIKPFKLDEVKEALQEAGVQGLSVVEVKGFGRQKGHTELYRGAEYVVDFLPKVKIEVVLSDDLAEAAINAIIAAAKTDKIGDGKIFVSDISQAIRIRTGETGEDAL

SEQ ID NO: 7908 - protein, 303 aa, Acidobacteria bacterium Ellin345
MTKNAVLLLAHGSPENVADIPEYMKYVTGGRGLPESVVKEVQHRYGLIGISPLRCHTVGQQTGVQRETGVSTYIGMRNWHPFVADTIEQMKQDGIEHCVALCLAPQNSRTSVGLYRKALMEKNPPFTVDFVESWHDHPLLIQAFAENHRAGYEKARAEASHDLPRIFTAHSVPERTITEGDPYEAQTRETAALVAKGLGLKDAVWRFAFQSQGMSGGTWRGPTVESTLEGLAKEGHRGVFFQPIGFVCDHVEVLYDIDIGFRDFAEKLGMKIWRAESLNNSATFAQAIADIVRQRLAAQAVTV

SEQ ID NO: 7909 - protein, 343 aa, Neisseria gonorrhoeae FA 1090
MGIKVAINGYGRIGRQVLRAIYDYQIQDQLQIVAVNASGSLETNAHLTKFDTVHGRFEADVSHDGGNLIVNGDKIPFFSTRNPAELPWKELGVDLVMECTGAFTSKEKAKIHLESGAKKVLISAPGGDDVDATVVYGVNDSVLTADMTVVSNASCTTNCLSPVAKVLSESVGIVKGAMTTIHALTNDQTVTDVRHKDLRRARSGVENMIPTKTGAAKAVGLVLPELKGRLDGLAIRVPTVNVSLVDLSFQAARDTTVEEINALMKAVSEAGALKGVLGYNTLPLVSMDFNHTTEASHFDATLTKVVDGNMVKVFAWYDNEWGFSCQMLNTARRMFGLEVRPLK

SEQ ID NO: 7910 - protein, 499 aa, Arabidopsis thaliana
MYRTAASRAKALKGILNHNFRASRYASSSAVATSSSSSSWLSGGYSSSLPSMNIPLAGVSLPPPLSDHVEPSKLKTTTLPNGLTIATEMSPNPAASIGLYVDCGSIYETPQFRGATHLLERMAFKSTLNRSHFRLVREIEAIGGNTSASASREQMGYTIDALKTYVPEMVEVLIDSVRNPAFLDWEVNEELRKVKVEIGEFATNPMGFLLEAVHSAGYSGALANPLYAPESAITGLTGEVLENFVFENYTASRMVLAASGVDHEELLKVVEPLLSDLPNVPRPAEPKSQYVGGDFRQHTGGEAKHFALAFEVPGWNNEKEAIIATVLQMLMGGGGSFSAGGPGKGMHSWLYLRLLNQHQQFQSCTAFTSVFNNTGLFGIYGCTSPEFASQGIELVASEMNAVADGKVNQKHLDRAKAATKSAILMNLESRMIAAEDIGRQILTYGERKPVDQFLKTVDQLTLKDIADFTSKVITKPLTMATFGDVLNVPSYDSVSKRFR

SEQ ID NO: 7911 - protein, 197 aa, Ricinus communis
HEATAKLGLLTPLHSNNIKKEFPVFDFSLFCPELRHSRFSHFNTAVKRVRYAPVVPVINAQSSPDYIPDAKFYKVEAILRPWRVSQVSSALLKIGIRGVTVSDVRGFGAQGGSTERQGGSEFSEDKFVAKVKMEIVVSKDQVEDVIEKIIEEARTGEIGDGKIFLLPVSDVIRVRTGERGDKAERMTGGRSDMSTSA

SEQ ID NO: 7912 - protein, 432 aa, Raphanus sativus
ISFFLVFVVMILIHPALSIYFNTLSSTESLTISSNRTLVSPGDVFELGFFRTNSRWYLGMWYKKLSGRTYVWVANRDNPLSSSIGTLKISGNNLVLLGESNISVWSTNLTRGNERSPVVAELLANGNFVIRDSSGFLWESFDYPTDTLLPEMKLGYDLKTGLNRFLVSWRSSDDPSSGDFSYKLDIRRGLPEFYTFQDNTLLHRTGPWNGIRFSGIPEEQQLSYMVYNFIENSEEVAYTFRVTNNSIYSRLTINFSGFFERLTWTPSLVIWNPIWSSPASLQCDPYMICGPGSYCDVNTLPLCNCIQGFKPRNMQEWAMRDHTRGCQRRTRLSCRGDGFTRMKNMKLPETTMAIVNRSIGVKECKKRCLSDCNCTAFANADIRNGGTGCVIWAGEMEDIRNYAVSGQDLYVRLAAADVVEKGIANGKIVSLI

SEQ ID NO: 7913 - protein, 249 aa, Xanthomonas campestris pv. campestris str. ATCC 33913
MTRKLVLLRHGQSQWNLDNRFTGWVDVDLTEQGRQEAAAAGKLMKDEGLQFDVAYTSVLKRAIHTLQGALKELDQDWLPVHKSWRLNERHYGGLQGLDKAETAAKHGEEQVKIWRRSYDIPPPAMDVTDPGHPGHDRRYATLDRNALPGTESLATTLVRVLPYWHDAIAPQLKAGQTVLVTAHGNSLRALYKYLNDISNAQILELNIPTGIPLLFELDDNLQVQSYRYLGDPEAAKRAAEAVANQGKAK

SEQ ID NO: 7914 - protein, 115 aa, uncultured crenarchaeote
MKRIEAIIASEKISELNAALKQMGVGGCTILDAKGRGKGEKPMVEAQRGTARFAAEFSVRANVVTVVEDSQLEKVIKTILDTISTGSAGDGKIFVSTVIDAIDIGTKARGEEAIG

SEQ ID NO: 7915 - protein, 135 aa, Haemophilus ducreyi 35000HP
MRILHTMLRVGNLERSIKFYTEVLGMRLLRTSENEQYKYSLAFLGYADESENAVLELTYNWGVDHYDLGNAFGHIALGIDNIYTTVEAVRLAGGKITREPGPVLGGKTVIAFAEDPDGYKIEFIENKNAQVALGN

SEQ ID NO: 7916 - protein, 437 aa, Candida glabrata CBS 138
MDQYQQVTESTPTVETSNPYGPNPADFLSNVKEFQLIDSTLREGEQFANAFFDTEKKIEIAKALDDFGVDYIELTSPVASEQSFRDCKAICNLGLKAKILTHIRCHMDDAKVAVETGVDGVDVVIGTSKFLRQYSHGKDMNYIAKSAIEVIEFVKSKGIEIRFSSEDSFRSDLVDLLNIYKTVDKIGVNRVGIADTVGCANPRQVYELVRTLKSVVSCDIECHFHNDTGCAIANAYTALEGGAKLIDVSVLGIGERNGITPLGGLMARMIVAAPEYVKSKYKLHKIRDIENLVAEAVEVNIPFNNPITGFCAFTHKAGIHAKAILANPSTYEILDPHDFGMKRYIHFANRLTGWNAIKSRVDQLNLNLTDDQVKEVTTKIKKLGDIRPLNIDDVDSIIKDFHADLATPMVRPTEDGADNEEPLQLDEPAKKKSKLSQ

SEQ ID NO: 7917 - protein, 310 aa, Arabidopsis thaliana
PSNAKHPGHPSHPKHPSHAKHPDHANDPDHAIDPGHSSHPSNAKHPKTHLKKSPFVSFVAQTLDWAEEGGEGSVAVEETENSLESQDVSEGDESEGDASEGDVSEGDESEGDVSEGAVSERAEFPEPSEEAKLFVGNLAYDVNSQALAMLFEQAGTVEIAEVIYNRETDQSRGFGFVTMSSVDEAETAVEKFNRYDLNGRLLTVNKAAPRGSRPERAPRVYEPAFRVYVGNLPWDVDNGRLEQLFSEHGKVVEARVVYDRETGRSRGFGFVTMSDVDELNEAISALDGQNLEGRAIRVNVAEERPPRRGY

SEQ ID NO: 7918 - protein, 1177 aa, Magnetococcus sp. MC-1
MLMDIKRILLSAWLLASLLLLLIVGLLFHRFIQHEFNRRAEQHLQFAQQFLLDELGQRRKDLQQRAASLAQSPNISGPMHLINRYEDPTRRETLVFDQEKEQLIHEVLKHIHDLNNILVVLYDTKQRPIVWINREQTKTSVGYRGFGPDGAINLTLQRPEQPSPPPQRDLAGLSHWLSKHPLYHLIHFDQEIAQAELSPMLWQSKGGEPKQAGTLLLISRLDEHFTNHIQLRTHTQVQLLHHNSTLNQKQTGTHPFQKLDLQQALTKSLDLSQLSSVPASGHSHWIDHADARLSLLHAPLDNGDLALFGFALPKEQISTSFMAFQGAAALGGGLTALMLIPLGWWFIRRQLVSPLHTLLHEIQQFHQEGRIPPRQIRYGASEFRTLTLEFRTLAHSIIEREKRLRTLSTGLEQAPISVLISDTQGNIEYVNPYFEQLTGYYSHEVLGKNPNLLKSDLNPPELFRDLWRTISAGAPWRGEFINRKKNGALHWQMAHIAPVLDNDGQITHFIALSEEITARKQADAALNESNERFRTLAQVSPVGIFQTDHDGEYIYVNTTWESITGTTSPQALSSQWDIHLHPDDQPRVQQRWQETVLHGNAFHEEYRFLRGDGTIRWVIGSAAPQRDPDRVIQGFVGTLTDITERKQMELELGKERALLRSLIDSIPDLIFYKRADGTYMGCNRAFELFCKRPEAALIGHTDQALFSPELAQLLKSGDELVINKNSCFSHEATGLFGDGHQVPFLIQKSPMHGYQGELLGLIGVARDITQRLRVEQELQQAKEDAEAANRSKSEFLAAMSHEIRTPMNVVIGMGEILLETPLNAEQTRYINSMQHAGDALLELIDNILDLSKIEAGRMTLEERAFRLDTMVISITDFFRLQALNHNLSLVVEIAPELEQQYVLGDAGRVRQVLYNLLGNALKFTEEGGVSLHLSLDANQHIHTRVSDTGIGIAPQQLERIFDNFTQEDSSVTRRFGGTGLGLAICRRFTELMGGRIWVESIEGQGSTFHMTLPLVLSHTPLHETPTTAVITPYNQGIVEAPCAFTPEHPQRPLSILLVEDSEDNRTLFKAFLQHTPHALVMVENGADALERVIVERFDLIFMDMQMPIMDGYSATRAIRQWEQQRGVPPHIIYALTAHALSGDRERSLQAGCDDHLTKPIKKRKLLEIIQQHAQPVE

SEQ ID NO: 7919 - protein, 336 aa, Alkalilimnicola ehrlichei MLHE-1
MAIKVAINGYGRIGRNVLRALYEAGRTDEIQVVAINDLGNAETNAHLTRFDSVHGRFNGEVQVEGDSMIVNGDRVRVLAERDPARLPWGELGVDLVMECTGLFTTREKASAHLQAGAKKVLISAPGGKDVDNTVVFGVNHDTLTPEHTVVSNASCTTNCLAPLVKPLHEAIGVERGLMTTIHAYTNDQVLNDVHHKDLRRARSATMSQIPTSTGAAAAVGLVLPELNGKLDGYAIRVPTVNVSIVDLTFTAARETSVEEINQIVRGAAEGPLKGILAYNDAPLVSIDFNHDPASSTYDASLTKVNGNLVKVTAWYDNEWGFSNRMLDTALAMAQAG

SEQ ID NO: 7920 - protein, 1064 aa, Dechloromonas aromatica RCB
MKFDSISRGNRLWLVIGLTLLPLFLLTVKDYLSERQKALEKIEFEARLTLKGAEYAEAASVREIEIILKAMANADNMASLEPADCDGLARRLKSVHGDLLNLGAATPNGDVFCSTSPRTNVISVKDRAWFAEAQQKPGITQGHFQVGRISGKPGITFGYSVPGADGAPRTILFASTKNGWFDRFTNVAALPAGWSSQIRTRDGTTISRYPDPELGRDKELSPESRQRFIDAIADKRTTVVMRGVDDLEHIFVMAPLHVANDDLILSVGIPTASSLDLVEQEFRRRLIVLLLISLASVGLARLFLHEMLDRKFGATIKELTRLKKALDNVPAYIYLKDAAHHYRYANAKTLSLFGTDAESLKGKGDEHFFPPETVSRLRQVDAQVLAGKNTDEIITITDEHGQRAIYHEIKAPLWELDEKTPWGLCGISIDITQYRLAEEAVARLSRAVEQSPESIVFTDLEGNIEYVNAAFLAITGYLREEVIGRNPRILQSGNTPRERYDEMWATLKAGKVWRGELINKRKDGSEYLELATISPIRQPDGKISNYIAIKADITEQRKNQEELEKYRTGLERLVQQRTQELAVAKEAAEVASRAKSTFLANMSHEIRTPMNAIMGLGYLLEQSPLNTEQQDKVRKIHGAAKHLLSILNDVLDLSKIEAGKMTLDRCAYSPAEELTAVASMIGEDAQRKGLTVITETDDLPPFTIGDPTRLRQAILNFAGNAVKFTEHGSIRLRGEIAETQPDNYLLRFSVSDTGPGIAPELQARLFTAFEQADSSSTRRLGGTGLGLAISRHLSHLMGGDAGVDSTLGQGSTFWLTVRVDKTTETRSPVNATDNDGESLRHEPPWRVLVVEDSEINREIVAEILMEVGIVVDTAEDGVKAVEKAAQTHYNLILMDIQMPNMDGLEATRQIRRHAVNPNIPIIALTANAFDSTRRETRLAGMNDFVTKPMEPATLYTALLRWLPAARTPQAAAIPEQALSDAELTAQLHTLTEALSTGDIAANHRYQVLHPNIRRQMANNDLIELDLAMARYAYDDALAILERWRHNAPPPRPDSETRQDEATHE

SEQ ID NO: 7921 - protein, 416 aa, Wolinella succinogenes
MGNSLPAYHEQTLQNGLKVVAIPLHNGTGVITTDIFYKVGSRNETMGKSGIAHMLEHLNFKSTKNLKAGEFDEIVKRFGGMTNASTGFDYTHYYIKSSELNLEKSLELFGELMEHLSLQDEEFQPERNVVAEERLWRTDNNPMGYLYFRLFNSAYVYHPYHWTPIGFMEDIKNWSIEDIHAFHKTYYQPQNAIIIVAGDIEPERVFQAAKERFERIENCCEIPKVHTLEPKQDGARRVIVKKESEVEMLALAYKIPPFTHEDQVALSAISEILSSGKSSRLQRNLIDKKRLANQVYAYSMDLVDEGVFLFMGIANEGVSGEALEKELLKQIEKIKEGKIKESEIEKIKINVKADFIFQLESSSSVASLFGSYLARGDLSPLLEFEEKFSTLTKEKIIEVANRYFQPDNSTTLILKK

SEQ ID NO: 7922 - protein, 557 aa, Acinetobacter lwoffii
MNYKQPLIVKSQQQALSALRNLKMQTQDTHLNQFFSDDSGRFERFSVEQEQLVLDFSKHRIDQNVLNGLVDLAHAQDLTQWIQRLFSLEEINYTEQRAAMHWALRVPEQNQQVLPEITAQVHTQLERMYSLVEKIHAGQYRGATGEVIQDVVNIGVGGSDLGPLMVTHALSDFKVVTAKPLDVHFVSTMDGSQLSDLLHQLRPETTLFIISSKSFGTIDTLSNAQTVRQWLEKALGKNSHVLKHHFIGVSTKPDKMSEWGIAPENQLLLWDWVGGRYSLWSCIGLPIALTVGVDGFKQLLSGAYAIDQHFQTAPFAQNIPVLIGLLGVWNNNFLDIQTHAVLPYDGRLKYFAAYLQQLEMESNGKSTQRSGEKVDSATCPIVWGEVGPNAQHAFYQLLHQGTHKVSCDFIAPVKRYNANHFTYAENAEALIEQHHLALSNCLAQSRLLAFGNQALTADEIEDLPTYKQYEGNQPSSTILLKELNPYSLGMLIATYEHKVFVQSVLWNINPFDQWGVEKGKEIANQLLPILNREQDDLSTFDASTQGLLKILLGKNNG

SEQ ID NO: 7923 - protein, 363 aa, Geobacter sulfurreducens PCA
MARKVGILTGGGDCPGLNAVIRGVVKSSIIRRGWEVVGIRDGFDGLLYNNRIVPLGLNEVRGILPRGGTILGTSNRGNPFSYPVEADGKTVLTDVSDEVVANIKKQGIDALVAVGGDGSLKIALELMNKGIPVVGVPKTIDNDLMETDVTFGYNTALETATDALDKLHSTAESHHRVMIMEVMGRYAGWIALESGISGGADVILIPEIPYDISAVCRAVDERRRRGSSFSIIVVAEGAFPRGGNRVVQKRADETNTIERLGGIGQYVARQLGDCLDMDVRVMVLGHLQRGGSPSTFDRCLGSRFGVAAIDLIEQEQYGRMVCLRGRDIKSVSIERAVRKLKLVNPGGQMVTAAEELGIVVGRR

SEQ ID NO: 7924 - protein, 468 aa, Synechocystis sp. PCC 6803
MNPSSSPSQSTANVKFVLLISGVAALGGFLFGFDTAVINGAVAALQKHFQTDSLLTGLSVSLALLGSALGAFGAGPIADRHGRIKTMILAAVLFTLSSIGSGLPFTIWDFIFWRVLGGIGVGAASVIAPAYIAEVSPAHLRGRLGSLQQLAIVSGIFIALLSNWFIALMAGGSAQNPWLFGAAAWRWMFWTELIPALLYGVCAFLIPESPRYLVAQGQGEKAAAILWKVEGGDVPSRIEEIQATVSLDHKPRFSDLLSRRGGLLPIVWIGMGLSALQQFVGINVIFYYSSVLWRSVGFTEEKSLLITVITGFINILTTIVAIAFVDKFGRKPLLLMGSIGMTITLGILSVVFGGATVVNGQPTLTGAAGIIALVTANLYVFSFGFSWGPIVWVLLGEMFNNKIRAAALSVAAGVQWIANFIISTTFPPLLDTVGLGPAYGLYATSAAISIFFIWFFVKETKGKTLEQM

SEQ ID NO: 7925 - protein, 90 aa, Nostoc punctiforme PCC 73102
MEIQIEHQPRQERLNELGVYKWDIWRKEVSKFPWTYDSQETCYFLEGDVVVTPDGRQPVQMGKGDLVIFPAGMSCIWEITSDVKKHYYFD

SEQ ID NO: 7926 - protein, 543 aa, Agrobacterium tumefaciens str. C58
MWLKAKKDAEAGAVSFSNQNGKFAEVSSVNTEEFSFRIYQVFGGGHVELSYDTVTTAVSVIYWFTASDVLETGITVVHTKPDNAAPELPGSYHFRPPFGWMNDPNGFGRFEGRPHLFYQHYSHGLRWNTMHWGHAVSSDYLRWRHLPIFLFPSEDLTTRPDKRGGAYSGSTIPLVEGSGIRVFFTEQVQDRIPEQQIQLTATSSDLIMAGQADVILAHRPDGQGLTPDFRDPYVFRGPDGLWKMLLGSQSDGGGVILLYETLDPTAASGWTYVGKLWVETRYKTTAIECPCLLPLDGPANARSTRWVLIYGLMHSEDPETGRKNLTMADVGWFDGKVFTKEFGQELDFGTDNYAFQAFLDGDSIIGIGWLANWADANPEIDFPTSMTLPRRIHYANGELLTPPIGAAESLRSHILDRTRLAAGERVTFINGAVEILIELASSDAAFELALDHPTVTLGLVSDETGLWIRHEDGRDGASPHYIAKGARASRIRIFLDYGSIEVFANRGRYVGTKRIEGFEPVRSALLRADPGAVVHATSWALKP

SEQ ID NO: 7927 - protein, 340 aa, Mycobacterium sp. KMS
MTIRVGVNGFGRIGRNFFRALDAQKAEGKSTDIEIVAVNDLTDNATLAHLLKFDSILGRLPYEVSLEGDDTIVVGDTKIKALEVKEGPAALPWGDLGVDVVVESTGIFTKRDKAQGHLDAGAKKVIISAPASDEDITIVLGVNDDKYDGSQNIISNASCTTNCLGPLAKVLNDEFGIVKGLMTTVHAYTQDQNLQDGPHKDLRRARAAALNIVPTSTGAAKAIGLVLPELKGKLDGYALRVPIPTGSCTDLTAELAKPGTAEEINAAMKAAADGPLKGILKYYDAPIVSSDIVTDPHSSIFDSGLTKVIDNQAKVVSWYDNEWGYSNRLVDLVALVGKSL

SEQ ID NO: 7928 - protein, 224 aa, Pseudomonas aeruginosa PAO1
MQPFAIAPSILSADFARLGEDVDKVLAAGADIVHFDVMDNHYVPNLTIGPMVCSALRKYGVSAPIDVHLMVSPVDRIIGDFIEAGATYITFHPEASQHIDRSLQLIRDGGCKAGLVFNPATPLEVLKYVMDKVDMVLLMSVNPGFGGQKFIPGTLDKLREARALIDASGREIRLEIDGGVNVKNIREIAAAGADTFVAGSAIFNAPDYAEVIRAMHAELAQAHQ

SEQ ID NO: 7929 - protein, 350 aa, Medicago sativa
MLDAVNEPENTELRHHDRRKCTHDRFMGSNFQLKDSDRPSSSIDSITNRADQILDDADVGECEIPWEDLVIGERIGLGSYGEVYRADWNGTEVAVKKFLDQDFSGAALSEFKREVRIMRRLRHPNVVLFMGAVTRPPNLSIISEFLPRGSLYRILHRPNCQIDEKQRIKMALDVARGMNCLHASTPTIVHRDLKSPNLLVDNNWNVKECDFGLSRLKHNTFLSSKSTAGTPEWMAPEVLRNEPSNEKCDVYSFGVILWELATLRLPWSGMNPMQVVGAVGFQNRRLEIPKELDPLVARIIWECWQQDPNLRPSFAQLTVAFKPLQGLVIPSHQDQVASPLPQEISVNSTP

SEQ ID NO: 7930 - protein, 946 aa, Mycobacterium sp. KMS
MRRVRRTPILERMADLPEALEPIGSVTRTEVGREASEPMREDIRLLGAILGDTVREQNGEDVFDLVERARVESFRVRRSEIDRAELAGLFDGIGVRAAIPVIRAFTHFALLANVAEDIHRERRRAVHVAAGEPPQDSSLAATYAKLDSAQLDSDEVSAALSGALVSPVITAHPTETRRRTVFDTQHRITELMRLRAHGHETTDDGRDIELELRRHILTLWQTALIRLSRLKIQDEIETGLRYYRAAFFEVIPRVNAEVRSALQTRWPDADLLAEPILRPGSWIGGDRDGNPNVTAEVVRQATSRAAYTAFEHYFAELTGLEQELSMSARLVHVSDELAALADACHEAARADEPYRRALRVIHGRLTATALEILDNQPEHELDLGLERYATPAELLADLDVIDASLRGHGSAVLADDRLLRLREAVRVFGFHLSGLDMRQNSDVHEEVVAELLAWAGVHDDYASLPESDRIDLLVSELATRRPLTSQKAELSELARKELDIVRAGARAVRVFGPQAVPNYIISMCESVSDMLEAAILLKEAGLLDVSDDEPYAPVGIVPLFETIDDLQRGSSILEAALDLPLYRGMVTARGDSQEVMLGYSDSNKDGGYLAANWALYRAELDLVESSRKTGIRLRLFHGRGGTVGRGGGPSYDAILAQPPGAVNGSLRITEQGEVIAAKYAEPRIAHRNLETLVAATLESTLLDVEGLGDEAGPAYEVLDDLAARAQRAYAELVHETPGFVDYFKASTPVSEIGALNIGSRPASRKPTTSISDLRAIPWVLSWSQSRVMLPGWYGTGSAFEQYIAEGAAESEDRLGVLQDLYRRWPFFRTVLSNMAQVLAKSDLGLAARYSELVEDEDLRRRVFDKIADEHERTIRMHRLITGQDDLLADNPALARSVFNRFPYLEPLNHLQVELLRRYRSGEDDELVQRGILLTMSGLATALRNSG

SEQ ID NO: 7931 - protein, 450 aa, Zea mays
MASTVVLRNACSRRLFCYSTLRAAAILGPAAPPDAPAAASAQPPPMAGTLWARSMATFTRTKPHVNVGTIGHVDHGKTTLTAAITKVLAEAGKAKAVAFDEIDKAPEERARGITIATAHVEYETAKRHYAHVDCPGHADYVKNMITGAAQMDGGILVVSAPDGPMPQTKEHILLARQVGVPSLVCFLNKVDAVDDPELLELVEMELRELLSFYKFPGDEIPIIRGSALSALQGNNDEIGKNAILKLMDAVDEYIPDPVRQLDKAFLMPIEDVFSIQGRGTVVTGRVEQGTIKTGEDVEILGLTQSGPLKTTVTGVEMFKKILDHGEAGDNVGLLLRGLKRGDVERGQVVCKPGSLKTYKKFEAEIYVLTKDEGGRHTAFVTNYTPQFYFRTADVTGKVELLGETKMVLPGDNVTANFELISPVPLETGQRFAMREGGRTVGAGVVSKVIS

SEQ ID NO: 7932 - protein, 273 aa, Glycine max
MAQTMLLMSSVSSSYSVDLKKDLFLQLQSQSLRPKFSQLSFNPLPPSTSSFSSPRTFTTLALFKSKTKAAPAKTKVTKPKQKVEDGIFGTSGGFGFTKQNELFVGRVAMLGFAASLLGEGITGKGILAQLNLETGIPIYEAEPLLLFFILFTLLGAIGGLGDRGKFVDDEPTTGGVIPSGKGFREALGLGSGPLFGFTKANELFVGRLAQLGFVFSLIGEIITGKGALAQLNIETGVPINEIEPLVLFNVLFFFIAALNPGTGKFVTDDGEDD

SEQ ID NO: 7933 - protein, 827 aa, Burkholderia xenovorans LB400
MTLSRRAFIKQTAAATAASAAGVVLPGVDALAASDSLTWSKAPCRFCGTGCGVSVGVKNGKVVATQGDPQAEVNRGLNCVKGYFLSKIMYGQDRLTTPLLRMKDGKYAKDGEFAPVSWDQAFDVMADHFKRTLKEKGPTAVGMFGSGQWTVWEGYAAVKLMKAGFRSNNLDPNARHCMASAVTGFMRTFGMDEPMGCYDDIEQADTFVLWGSNMSEMHPILWTRITDRRLSTPTTRVVVLSTFEHRSFDLADQTIIFTPQSDLAILNYIANYIIRNGNVNRDFVNRHTVFKQGNADIGYGLRPDNPLQKTARNAGDPNGSQPITFDEFAKFVSKYDAAYVTKLSGVPQNKLDQLARLYADPKVKVMSFWTMGFNQHTRGTWANNMVYNLHLLTGKIATPGNSPFSLTGQPSACGTAREVGTFSHRLPADMVVTNPKHREEAEHIWKLPAGTIPDKPGYHAVLQNRMLRDGKLNAYWVQVNNNVQAAANINGEALPGYRNPQAFVVVSDVYPTVTAVAADLILPSAMWVEKEGAYGNAERRTQFWHQLVDAPAGARSDLWQLVEFSKRFKVEEVWPADLLAKKPEYRGKTLYDVLYRNGQVDRFALTETDSHYRNDEAKAFGFYIQKGLFEEYASFGRGHGHDLAPFDAYHKARGLRWPVVNGKETRWRYKEGSDPYVKTGTGWQFYGNPDGRAVIYALPYEPPPEVPDKEYPFWLATGRVLEHWHSGSMTRRVPELYRAFPNAVCFMHPDDAKAMGVRRGVEVKVMSRRGYILTRVETRGRDKPPRGLVFVPWFDSSQLINKVTLDATDPISLQTDYKKCAVKIVKV

SEQ ID NO: 7934 - protein, 200 aa, Oryza sativa (japonica cultivar-group)
MASPPPGDDEAARALALEQCERDFNAVIDRMLNLNLDGDDAAASSAASPEPPAPQAAPAPEVAAAAAVDGAARGDRGYWVETMMRELWAAASMDDARERGARVLDAFGAAVGAGTAARLDAASRQIGFLKRAVLFHHRLRTAQEKAQRELRWQLDDYREQVRRLEASNYALSLHLRQADLRRGGGGGGAMPHGPGNPEIF

SEQ ID NO: 7935 - protein, 388 aa, Saccharomyces cerevisiae
MNCTLTDNTRAINVASNLGAPQQRTIFAKERISIPGYYEIIQFLGKGAYGTVCSVKFKGRSPAARIAVKKISNIFNKEILLKRAIRELKFMNFFKGHKNIVNLIDLEIVTSSPYDGLYCYQELIDYDLAKVIHSSVQLSEFHIKYFLYQILCGLKYIHSADVIHRDLKPGNILCTLNGCLKICDFGLARGIHAGFFKCHSTVQPHITNYVATRWYRAPELLLSNQPYSKSVDIWAVGCILAEFYARKPVFMGRDSMHQIFEIIKVLGTPDKDILIKFGTIKAWNLGKNSNNPVYKKIPWSNIFPFASHEAINLIESLLHWDSTHRLNVEQAISHPFLNEVRKPDDEPVCLQGPFDFTYESELNSMSKLRDYLVEEVKNFKTDLSSSSL

SEQ ID NO: 7936 - protein, 346 aa, Yarrowia lipolytica CLIB122
MRSLYINVPGLFPSTSLARETVHHRTEMLRTIRSSSRLGVRAMSTAATRRAAQIGFHTRVPTVVTKAPTLRMQTTPFSSSAPAQTFGDKKYEHILTSTPVPKVALVTLNRPKALNALCTPLIKELNEALQAADADPTIGAIVLTGSEKSFAAGADIKEMKDKTVTSVLNENFIEEWGNMANIKKPIIAAVNGFALGGGCELAMMADIIYAGAKAKFGQPEIKLGVIPGAGGTQRLTRAIGLYRANHYILTGEMFTAQQAADWGLAAKVYEPAQLVDESVKAAAQIASYGQLAVQAAKASVHQSAEVGLRAGLEFERVRFHGLFGTHDQKEGMAAFAEKREPNFKNE

SEQ ID NO: 7937 - protein, 597 aa, Nocardia farcinica IFM 10152
MSPADAYVSGSRHITAPSKPAPADQPAWNAQKNSSMPAYRYRPFAEEVEPVTLPDRTWPDKVIDRAPGWCAVDLRDGNQALIDPMSPARKRRMFDLLVRMGYKEIEVGFPSASQTDYDFVREIIEDNAIPDDVTIQVLTQCRPELIERTFEACAGAANVIVHFYNSTSILQRRVVFRADREQVKKIATDAAKLCLEVEKRYPDTNWRYEYSPESYTGTELEYAREVCDAVSEIIAPTPEKPLIINLPATVEMATPNVYADSIEWMSRNLARRESIVLSLHPHNDRGTAVAAAELGYQAGADRIEGCLFGNGERTGNVCLVTLGMNMFSRGIDPQIDFSDIDEIRRTVEYCNQLPVHERHPYGGDLVYTAFSGSHQDAINKGLDAMKAAADAQNADVSDIVWEVPYLPIDPKDVGRTYEAVIRVNSQSGKGGVAYIMKTDHGLVLPRRLQIEFSQVVQKITDGEGGEVTPKEMWDVFHEEYLAPIRPLERIRQKVTAAETDGGVDSITAVVKVDGVEQEITGQGNGPLAAFVDAIATVGYDVRVLDYSEHAMSAGDDAQAAAYVECAIGDKVVWGVGIATSITTASLRAVVSAVNRAH

SEQ ID NO: 7938 - protein, 421 aa, Leuconostoc mesenteroides subsp. mesenteroides ATCC 8293
MFIKDDINHFEKYHLYPTQGLLNDPNGLIYFKGQYHVFFQWNPHACNHKYKEWGHFVSNDLKTWTRLETALKPSLPDMDSAGIYSGTAFVKDDKLYVFYTGNVRDESGRSVASHQMWAVSEDGIHFEKLGELFPHPEGFTKDVRDPKVWQGRNGRYYLMVGARSNENIGDILIYESENFSQWQLHGSLIEGELTDIRGYMIECPDLIEIDGKQILMFSPQGLPADEENYRYQNIHNTGYVVGTFDEETLHFKPETSFKEVDKGFEFYAPQTMHTNEGRKIMWGWAGMMTPEREASTPTIASNNWVHVLTIPRELHVTSDNLLTQTPISEILHTKPLTNFGAINVGQYTIDSHDNWTLSFGENMTLVRNKNQLILSRRQWENGEIEKRLVVGDINHTLLIVDTDIIEVFTNNNQSVMTARYF

SEQ ID NO: 7939 - protein, 350 aa, Listeria monocytogenes str. 4b H7858
MTYKITSLAGDGIGPEIMTSGLQVLEAVAKKYNHTFEIESHPFGGAGIDVAQDPIPSSTLKACRDADAILLGAIGGPKWDNAPKRPEDGLLALRKALGLFANIRPIQVPSSITHLSPLKKEIVENTDFVVVRELTGGLYFGEPKYWDNEAAVDSLTYTRAEIERIIEKAFEIAATRNKKVTSVDKANVLASSKLWRKIADEVASRHPDITLEHLYVDAAAMLMIQRPTTFDVIVTENLFGDILSDEASVITGSLGMLPSASHAENGPSLYEPIHGSAPDIANQNIANPMSMISSVSMMLRQSFSLFEEADATDAATARTMQAGFLTADLGGNTSTTDFTNEVLKQIEGGE

SEQ ID NO: 7940 - protein, 112 aa, Sinorhizobium meliloti
MKKIEAIIKPFKLDEVKEALQEVGLQGITVTEAKGFGRQKGHTELYRGAEYVVDFLPKVKVEVVLADENAEAVIEAIRNAAQTGRIGDGKIFVSNVEEVIRIRTGETGLDAI

SEQ ID NO: 7941 - protein, 330 aa, Escherichia coli
  misc_feature (40)..(40): Xaa can be any naturally occurring amino acid
  misc_feature (43)..(43): Xaa can be any naturally occurring amino acid
  misc_feature (118)..(118): Xaa can be any naturally occurring amino acid
  misc_feature (128)..(128): Xaa can be any naturally occurring amino acid
  misc_feature (172)..(172): Xaa can be any naturally occurring amino acid
  misc_feature (228)..(228): Xaa can be any naturally occurring amino acid
  misc_feature (267)..(267): Xaa can be any naturally occurring amino acid
TIKVGINGFGRIGRIVFRAAQKRSDIEIVAINDLLDADYXAYXLKYDSTHGRFDGTVEVKDGHLIVNGKKIRVTAERDPANLKWDEVGVDVVAEATGLFLTDETARKHITAGAKKVVXTGPSKDNTPXFVKGANFDKYAGQDIVSNASCTTNCLAPLAKVINDNFGIIEGLXTTVHATTATQKTVDGPSHKDWRGGRGASQNIIPSSTGAAKAVGKVLPELNGKLTGXAFRVPTPNVSVVDLTVRLEKAATYEQIKAAVKAAAEGEXKGVLGYTEDDVVSTDFNGEVCTSVFDAKAGIALNDNFVKLVSWYDNETGYSNKVLDLIAHISK

SEQ ID NO: 7942 - protein, 286 aa, Mesoplasma florum L1
MIILDGKKVASRRKEELTAKISKYHNKGLRKPKLVVIMVGNDPASEVYVSHKIKVANEVGIYSELLRFDKDIKKEELYNKINELNNDQNIDGILLQLPLPIDFIEEDYLQAITPSKDVDGFHYINQGKMLQGYDTVYPCTPLGIINLLEEYNISVKNKDITLIGTSNIVGKPLGMMLLNNQATITMCNKNTKNIKNHTINADIIISATGKQFIITEDMIKKDAVIIDVGIIRDPVTNKLVGDVDFEKVKLKSSYITPVPGGVGPMTVITLMENTFVLYEKHINKSK

SEQ ID NO: 7943 - protein, 330 aa, Escherichia coli
TIKVGINGFGRIGRIVFRAAQKRSDIEIVAINDLLDADYMAYMLKYDSTHGRFDGTVEVKDGHLIVNGKKIRVTAERDPANLKWDEVGVDVVAEATGLFLTDETARKHITAGAKKVVMTGPSKDNTPMFVKGANFDKYAGQDIVSNASCTTNCLAPLAKVINDNFGIIEGLMTTVHATTATQKTVDGPSHKDWRGGRGASQNIIPSSTGAAKAVGKVLPELNGKLTGMAFRVPTPNVSVVDLTVRLEKAATYEQIKAAVKAAAEGEMKGVLGYTEDDVVSTDFNGEVCTSVFDAKAGIALNDNFVKLVSWYDNETGYSNKVLDLIAHISK

SEQ ID NO: 7944 - protein, 1568 aa, Ustilago maydis 521
MSAATPTSPGFPLTMGTGVMAAHFAAPSSNAGSPRSRPTTPLSAGLTPSGPTYDDLGRWDDADVASWLNAARLGHYASIFAEHDIRGSVILDVDQAALKEMGITMVKDRVRISAAIKLLNKRCADSAVARRPSVVSISPLLPLASHPLYAHEGEIEYLQHDHTADPSADGSGSNFGLNSMGMRRGQMRPPPLTLKQSTSRGMPGYASPAGSINQSQGFGLSAARGLTPGAARGSVWNTASSSSATSKPGTPDGALHRKVNSIGGVAAPLAVGASSSLSSSRHPYGHAVHSNRPSTATGASGYSTVPASQSLRSNHTSSSPTATSFGSNINAASARPSTATGAQSYTTNVPGTSSARDGYSPLTPISESNSLGNTPTTPSGIQQQQQSAGYAVGRGPFASSQRYAASSVPSQQQPSSGHTLRHVDSGEGYNLAGYQNPNPPTLEDLKRRTIKFISEEDNTTRIVNVSDCRDAYDVMARVLKKFGKPPSGNSYTPTADQGPTGDELGATETWGIFATSADGQNTKALSDNELLAICHAPQPHDPLRERGLTLRRIPNHLPGEDARKVPVRSGRNKLEAFFGERMPVAQMQPAGPGSGVNADEEDAGSVTISGKKMKRASTVSIMSGLGDGPFSSSSHNTGAGHTHGSTRAEGKLLSKKESKHMSPPPVTSKPSKIRNFFGQRPPSELINTNLADFFPSTDSKALQRTARRSIYGRASASTRSKRNSTWSFVADPDAPPLPNKGSMDGHPTPLERSSISIRERGTTPVIQIGYDSRSEDDHQSNARRTSSGTHSHLHPSLTGPPTLPPVVSRDSLDEWSRDLKAVGSPVTEENAMFQSSRHGHASGSQQHHAAMKHYPSHASGYADRPSISRRASGESARSRRSLASQVRHGLSAARERNADTASLLTVDEITQEVENRRESISLAGAGGGWVVDEDGVPIPIPGSSSPFSSSAAASTRPSSGISSSYVHNGHLEHDDSEGHSDEEANQSSDLEEATRTRKARGVPSKAASIRTVASKRASSVLQAPGDESDRHLGDPMAVARSTTSRASSVSELRRSVHDHGDPSDGESGSDFTDSDLDSDGSETDEDEQANDVYLPSAKPAPIKWHKGALIGAGSFGNVFLGMNAKTGLLMAVKQVELPSGDSHLDQRKKGMLEALEREIKLLKSLEHENIVQYLDSFADDSHLNIFLEYVPGGSIVALLRNYGAFEEPLVRNFVRQILNGLSFLHNRGIMHRDIKGANILVDNKGGIKISDFGISKKVESDLVLATNKSGAGGGGAGGAAHRPSLQGSVFWMAPEVVKQTSYTIKADIWSLGCLVVEMISGTHPWAELNQMQALFQIGMGRKPSLPDEISNECRDFLEKTFELDYNNRPSADELLNHAFMGTEMTFPPSSGADGSGGGDDDAGGSGDAGDGDASTMGMTNDAETGTTRETRETKDGKRPTRSKSTRRLEREKRHKEAAAAAAAATALDTGTPNTPTSHTAAAAAAAAAAAASASASASASPAVASTSPAPGDAETGSPTNGKSAVPPAGSTGGTPESILTVSIATARGNSTSTALSAADAAFSEEADS

SEQ ID NO: 7945 - protein, 473 aa, uncultured crenarchaeote
MGTVTVMKFGGSTLGEDGVCIDKILQRIRNKIEGQNKVVAVFSAPLIRYRDKLSSMTDAAIHIGKNYAQSNPIEIDVLREVYETIASNNLSQEYRKNFSNDIDKFHKQVIVSLKQAAENRRFVDVTRSRTLAYSGEIPMAYLMDYVLRSNQIKSDHVDIEQWPIITDDNFEAANFLIEESRQRSNHFYELIEKNSVVTIGGFIGKTSDGLETTYERGGSDRSAADVAILLNEKYKAELDFEKDNAVLSADPKIVKEELDSIKFLSYNEARLAGMFGMKILDPLAIKEIDNNKMDIPIVITNMNDPSNTTTISKISVDQSDNLVKIVTGKRNCAIVRMETIAASHLLASLESYRQYHDFLKLSPFKKDGIEITRVLFLDGDYVRRNEHHFKAYYPKTEIVYDRGVVTLIGDNMWKMPKIASTTSSTVGEHGINILNLDAQEETSRILIIVDDSKVADAIRAIHDKRNRIDRDEI

SEQ ID NO: 7946 - protein, 330 aa, Nocardioides sp. JS614
MPTDNAIDVDLLVIGAGPTGLFATYYAGFRGFRVAVVDSLPELGGQITAMYPEKQILDVAGFPSVKGRDLVEGLVAQAATADPTYLLDRTATTLHEDDDAENGAVVVGLDDGTEVRAKAVLITAGIGKFSPRPLPAGDGWLGRGLEFFVPSFAPYAGKDVVIVGGGDSAFDWALHLEPVARSVTLVHRRDGFRAHQRTVEAVQASSVQIVTRAEVSAIRGNGVVESIEITVDGESTERPAQAIVAALGFVADLGPLQQWGLDVEKRHLVVDSSMRTNLARVFAAGDITEYPGKVRLIAVGFGEAATAVNNAAVVIDPSAHVFPGHSSEGS

SEQ ID NO: 7947 - protein, 529 aa, Burkholderia mallei ATCC 23344
MSQAIEVKVPDIGDYKDVPVIEVLVKPGDAVEPEQSLVTLESDKATMDVPSPSAGTVKEVKVKVGDAVSQGSLIVLLDGAQAAAQPAQANGAATSAAQPAAAPAAAPAPAAAAGGGTVDVKVPDIGDYKDVPVIEIAVKIGDTVEKEQSLVTLESDKATMDVPSPAAGVVKDIKVKVGDAVSEGSLIVVLEASGGAAASAPQAAPAAAPAPAQAPAPAASGEYRASHASPSVRKFARELGVDVSRVTGTGPKSRITKDDVTAFVKGVMTGQRAAPGAAAAPAGGGELNLLPWPKVDFSKFGPFEAKPLSRIKKISGANLHRNWVMIPHVTNNDEADITELEALRVQLNKEHEKAGVKFTMLAFVIKAVVAALKKFPTFNASLDGDNLVFKQYYHIGFAADTPNGLVVPVIRDADKKGLVDIAKEMAELSKAAREGKLKPDQMQGGCFSISSLGGIGGTHFTPIINAPEVAILGLSRGQMKPVWDGKQFVPRLTLPLSLSYDHRVIDGAEAARFNAYLGALLADFRRIIL

SEQ ID NO: 7948 - protein, 226 aa, Glycine max
MALVNKLGNLLKKATSSNPTLYQAIRCMSSSKLFVGGLSFNTDEGSLRDAFSHYGEIIDAKIIVDRDTGRSRGFGFITYAAEEQASSAIMALDGKDLHGRNLRVSAATERTAGFRNGAGYGGGGGGFGGGGYGGGGYGGGGYGGNSGGGGGFAPAGGDNFAAGNFGGDRGFGGNPAGNHGAPAGSTSGDEFSLGTPGSSFESAKNDDVMDDLFKDDEPDKYASKNF

SEQ ID NO: 7949 - protein, 498 aa, Nocardioides sp. JS614
MTTTIPHWIDGLPQPGAATRLGDVTNPATGQVTGQVVLADGADVDAAVASAKTASTAWARTSISARTQVVFRFRELLNERKAELAAIITAEHGKVLSDALGEVSRGQEVVEFACGIPHLLKGGNSPQVSTGVDVHSIRQPLGVVGIISPFNFPAMVPMWFFPIAIAAGNAVVLKPSEKDPSAAIWMARLWQEAGLPDGVFTVLQGDKVAVDGLLDHPDVAAISFVGSTPIAEYVYERASRTGKRVQALGGAKNHMVVLPDADLDLAADAAVSAGYGSAGERCMAISVVVAVGGTGDDLVERIAARTTGLRVGDGTRESDMGPLVTAAHRDKVASYVDAGEAEGAALVVDGRKVDADGEQDGHWLGPTLFDHVTPQMSIYTDEIFGPVLSVVRAETYAEAIELVNANRYGNGTAIFTGNGGAARAFEQDVEVGMIGVNVPIPVPMAYYSFGGWKASLFGDTHAHGIEGVHFFTRGKVVTTRWPDPGSAGGLELAFPKNH

SEQ ID NO: 7950 - protein, 406 aa, Pasteurella multocida subsp. multocida str. Pm70
MKRAVITGFGIISSIGNNKDEVLASLKAGKSGIEVMPEFVEIGMRSHVAGTVKLNPSELIDRKIYRFMGDAAAYAYLSMKEAIEDAGLTEDQVSNDRTGLVIGAGTGSAHNQLIACDAVRGPRGVKAVGPYAVTKTMASSVSACLATPYKIRGVNYSISSACATSAHCIGHALELIQLGKQDIVFAGGAEELSWECATEFDAMGAVSTKYNDTPEKASRAYDANRDGFVIAGGGAVVVVEELEHALARGAKIYAEIVGYGATSDGYDMVAPSGEGAERCMRQAMATVDTPIDYINVHGTSTPVGDVKELGAIKNVFGDKVPAISSTKSMTGHSLGAAGAHEAIYTLLMLDNDFIAPSINIETLDENAKGCNIVTETVENAGLKTVMSNSFGFGGTNAALIFKKYQA

SEQ ID NO: 7951 - protein, 507 aa, Brucella melitensis 16M
MPAVQETIDQVRGLDVDQYKYGFETTIEADKAPKGLNEDIIRFISAKKNEPEWMLEWRLKAYERWLTMEEPTWARVDYPKIDFQDAYYYSAPKNQSGPKSLDEVDPELLKTYEKLGIPLREQEILAGVRKQGEPSEIDGNPADNVYASGRVAVDAVFDSVSVVTTFKEELSKAGVIFCSISEAIREHPELVQKYLASVVPVSDNYYATLNSAVFTDGSFVYVPKGVRCPMELSTYFRINEKNTGQFERTLIIADEGAYVSYLEGCTAPQRDENQLHAAVVELVAMENAEIKYSTVQNWFPGNKDGKGGIYNFVTKRGDCRGDNSKISWTQVETGSAITWKYPSCILRGDNSRGEFYSIAVSNGHQQIDSGTKMLHLGKNTSSRIISKGISAGKSNNTYRGQVSAHRKAENARNFTQCDSLLIGNDCGAHTVPYIEAKNATAQFEHEATTSKISEDQLFYVMQRGIPEEEAIALIVNGFVKEVIQELPMEFAVEAQKLIGISLEGSVG

SEQ ID NO: 7952 - protein, 185 aa, Arabidopsis thaliana
MTMMSLPKMRLSCLQPHLHFTSSRSIAAALAFPSSSIRNRTSCLVRCGSARRRLTTKSSRNSKLERAQPPPLGLERHWRYAVVGGVSVGLMMVLVLGMDAEKAMALGPEGPLMEEFWDNVRRYGLYALTVSTGALSAVFEPIFELLKNPISAILILLILGGSFYIVSQVVSAMIGVNEFAYQYSY

SEQ ID NO: 7953 - protein, 142 aa, Glycine max
VAFTEKQDALVSSSFEAFKANIPQYSVVFYTSILEKAPAAKDLFSFLANPTDGVNPKLTGHAEKLFALVRDSAGQLKASGTVVADAALGSVHAQKAVTNPEFVVKEALLKTIKAAVGDKWSDELSRAWEVAYDELAAAIKAK

SEQ ID NO: 7954 - protein, 365 aa, Yersinia pestis biovar Medievalis str. 91001
MRLAMKKTYRIAAIPGDGIGHEVMPEGINVLQAAALRWDLDISFENIEWASCEYYQHHGQMMPNDWQRQLQCFDAIYFGAVGWPATVPDHISLWGSLLKFRRDFQQYVNLRPVRLFPGIPCPLVGKQPGDIDFYVVRENTEGEYSSVGGRLFEGTEQEMVLQASIFTRRGVDRILKYAFELAQMRPRKRLTSATKSNGLAFSMPYWDERFEVMAAQYPQISADKQHIDILCARFVLNPERFDVVVASNLFGDILSDLGPACAGTIGIAPSANLNPERDFPSLFEPVHGSAPDIYKRNIANPIAMIWAGAMMLDFLGQGDERYHAAHNGILNAIEQVIAQGPKTPDMCGDASTQQVGSAIVQVLSH

SEQ ID NO: 7955 - protein, 681 aa, Volvox carteri f. nagariensis
MALRFCPTAAPPRGCGTPIQHPVLLLPHKALLPYSTAASRQAARPARVCVTAYAKLADGSARRMQSEEVRRAKEVAQAALAKESPADWVDRFGSEPRKGADILIQCLEREGVDNVFAYPGGASMEIHQALTRSDRITNVLCRHEQGEIFSAEGYAKASGRVGVCIATSGPGATNLVTRLDDAMMDSITLIAITGQVPRRMIGTDAFQETPIVEVTRAITKHNYLVLDIKDLPRVIKEAFYLARTGRPGPVLVDVPKDIQQQLAVPDWDSPMSITGYISRLPPPVEEYKMIPVLRAIQSATKPIIYYGGGCLDARNELREFAARTGIPLASKFMGLGVVPAEDPNHLQMLGMHGTVAANYAVDQADLLVALGVRFDDRVTGRLDAFASRARIVHVDIDAAEISKNKTAHVPVCGDVKQALRHLNRMLEAEPLSDRFVAWRAELAAKRAEFPLRYPQRDDAIVPQYAIQVLGEETKGEVIITTGVGQHQMWAAQWYPYKEPRRWISSGGLGSMGFGLPAALGAAVAFDGKQGREKRIVVDIDGDGSFLMNVQELATVFIEKLDVKVMILNNQHLGMVVQWEDRFYKANRAHTYLGKREAEWHATGDEEDIYPNFVGMARSFGVPSMRVIRKEDLRGANRTMLDTPGPYLLEVMVPHIEHVLPMIPGGATFKDIITEGDGSVKY

SEQ ID NO: 7956 - protein, 204 aa, Bacillus cereus
  misc_feature (53)..(53): Xaa can be any naturally occurring amino acid
EKIRKKLLEDSESKTLKKRWAHFDLTMLGIGAIIGQEYLVLTGLVASRDAGPXSIFSFMIAAIVCGFAALCYAEIASTLPVSGSVYTYSYATIGEFVAHLMGWTLLSVYIVTTAAVAGGWTGYFHNLLNGFGFEIPRSLLTIPTQGGIVNLPAVIITLLLTWLLSKGTKESKRVNNAMVLIKIGIVVLFISVGIFYVKPENWID

SEQ ID NO: 7957 - protein, 112 aa, Acinetobacter sp. ADP1
MKLVTAIVKPFKLDDVREALSEIGVQGITVTEVKGFGRQKGHTELYRGAEYVVDFLPKVKIEIAISDEMVDAVIESITRVASTGKIGDGKIFVTNLEQVIRIRTGETGADAV

SEQ ID NO: 7958 - protein, 435 aa, Oryza sativa
MAGSRFGSFKSEKGDPAATAAQRRDPYEVLGVGRNATDQEIKSAFRRMALKYHPDKNGDDPVASDMFQEVTFSYNILSDPDKRRQYDTSGFEAIEADSQELELDLSSLNTVNTVFAALFSKLGVPIKTTVSATVLEEALNGSVMVSQLQLGNSVHRKVEKQSAHFYSVDITEKEAKMGLVCRVKSTDRSKFKLLYFELEENGGLSLALQEDSVKTGKVTSAGMYFLGFPVYRFEQNNLAAAAKDPDSAFFKRLDSFQPCDINELKPGTHFFAVYGDNFFRSVNYTIEVVCGESFPAEKEKLQSVEAKILTKRAELSKFETEYREVLAKFTEMTSRYTQEMQAIDNLLKERNEIHASYTNNSPLKRSSSRSKAKSPSKFSKGEEDNNQRKEKKVKDQPTGGCRSADEDSNEKKTKERFPRKKWLNIPFKIDRRKPC

SEQ ID NO: 7959 - protein, 422 aa, Streptomyces sp. AM-7161
MTRRVVVTGLGVRAPGGSGARQFWDLLSSGRTATRSITSFDASACRSQVAGEIDFDPVAEGLSPREIRRMDRAAQFAVVCSREAVADSGLSFEGVRPERIGVSVGSAVAAAMSLEKEYRVLSDQGREWEVDPTYLTPHMFDHMVPSVLGAEVAWTVGAEGPVTVVSDGCTSGLDSVGYACRLIQEGSVDVMLAGATDTPLTPIVAACFDAIKATTPRNDDAEHASRPFDLSRNGFVLAEGAAMFVLEEYESAVRRGARIYAEVTGYATRLNAHHMTGLKTDGREMAEAIRVALDESRIDPTAIDYVNAHGSGTKQNDRHETAAFKRSLGDHAYAVPVSSIKSMVGHSLGAIGSIEIAASLLALTHQVVPPTANLHTADPECDLRYVPLTAREAPVRSVLTVGSGFGGFQSAMVLRRPEEAAA

SEQ ID NO: 7960 - protein, 309 aa, Methanococcoides burtonii DSM 6242
MILGTRGSALAIAQADLVTKMLEEKGHELTRNVIKTSGDVFTDRPLHEVAGVGVFVRELDDRMIEGEVDIAVHSMKDLPTVRPPELAIAAVLKRDSPYDVLLTADGSTLDELPDGAIIGTTSMRRRAQLLRYRPDLNVEDLRGNINTRIQKLKAGQYDGILLAEAGLQRMGWDMDVQRLPAEAFCPSANQGTIVVVTRADDEAERACSVLNHERSRMETEVERLLITDVEGGCIVPIGSFAQMNEDGDEIHVLVEVLAVDGTREIRIEDDIPVKNYREHALSIGRMLVEMGGKELVQEAVCEMSGCDDE

SEQ ID NO: 7961 - protein, 320 aa, Xylella fastidiosa
MNHTSDTALLIVNLGTPEAPTAAAVRRYLGEFLSDRRVVSIPPLFWKPLLHMVILPIRGPRSASKYAKVWLQEGSPLSVYTRRIAEGLTQHLPDWRVAWAMRYGAPALTKALDALQAQQVRRIVILPLYPQYSTTTTASVQDVVEAWCKRTPQVQVECIQDYAEDSAWVAAVAASIRRHWQAHGRSEKLMFSFHGLPQRVANNGDPYPQRCQVSASLIAAALDLNESEWVLGYQSRFGAERWLQPYAEPTLWALAESGIRRFDLVCPGFSVDCLETLEEVALGFSETLAARGATMRYIPCLNDDPAHVQALAGLAQRALL

SEQ ID NO: 7962 - protein, 352 aa, Coxiella burnetii RSA 493
MKNKNLSMPSLKEKLLQETVEHIDITRFDARPIIDAMDHMSFTSRDLARATQIFNRMLQDEQCSIILSLAGSTSAGGCMKLYADLVKYNMVDAIVATGASIVDMDFFEALGFRHYQGSPAVEDRQLRDLYIDRIYDTYIDEEDLQRCDHTIYEIANSLEPRPYSSREFIHHMGAYLAQGKAKKEESLVQLAYEHDVPIFCPAFTDSSAGFGLVLHQVKNPDRHLTIDSIRDFRELTDIKIKAGTTGLLMIGGGVPKNFVQDTVVCAEVIGKTVDMHKYAIQITVADVRDGACSSSTLKEACSWGKVDTAYEQMVYAEATSGLPLLASDAYHRGYWKDRSPRQYANLFKSESK

SEQ ID NO: 7963 - protein, 243 aa, Medicago truncatula
MGKSLFQESLKALEADIQYANTLALGHPRDKEGGCFQMRLSYSPVAPLFLSLVQWTDYRLAGALGLLRILIYVTYGNGKTTISIYERKASIRQFYSIIFPALLQLQKGVTDLEERKQKEVYANRYQKKTDFKDRRESKIDIEREKECGVCLEVKAKVVLPNCCHQMCFKCYREWCLRSQSCPFCRDSLKRVNSGDLWIYTDTSDIVDVGTIFKENCKILFLYIEKLPLIIPDPRHVSYDPFFR

SEQ ID NO: 7964 - protein, 492 aa, Synechococcus sp. WH 7805
MASARTLFWHRRDLRLADNTGLQAAVALGPAVTGVYVLDPSIITPPPQLPPMAPARLWFLVESLIELQERWREAGSRLLVLQGDPLTLLPQLAALLDSSTVVWSRDVEPYARERDRGVAKALQADGRQVLVDWDQLLVAPELLKTGNGDPYRVYGPFLRNWRGQVERLRPSTVAAPTDLQDLTAEQQQAIRSTETALGRLWADGQQALQRLQTEHGFAGMDLCPCRPGEVAAVDQLAVFADGPLLGYEPDRNFPGTAGTSGLSAALSVGTLSPRQAWCAAQAAKDLARSDEQRQAIAVWEQELAWREFYQQALFHFPELADGPYREQWRRFPWENNEDWFDFWKDGQTGMPIIDAAMRQLQQSGWMHNRCRMIVASFLVKDLICDWRWGERAFMELEVDGDLAANNGGWQWSASSGMDPKPLRIFNPATQASKFDADGDYIRRWVPELRHVSTKDLLSGEIGALERRGYPEPLVNHKIQQAKFKVLYATIKA

SEQ ID NO: 7965 - protein, 403 aa, Dehalococcoides ethenogenes 195
MPNARVEDAIADIKAGRFVIVVDDYDRENEGDLVMASEMVTPDAINFMAKNARGLICVSLTAERLEQLKIPMMVTENTSPYSTGFTVSVEARKKVTTGISAADRAATVQVLIDPAATREDIAMPGHMFPLRAREGGVLVRAGHTEASMDLTRMAGLYPSGVLCEIMNDDGTMARLPQLEAKAAEWAIKIISVKDIISYRRRTEKMVKKITEAELPTSHGQFKAVAYKSQFDADEHIALVMGDISGPEPVLVRVHSECITGDVFGSKRCDCGEQLDMALNQIAKAGRGVLLYMRQEGRGIGLHNKLCAYALQDKGLDTVEANIELGFAPDLREYGIGAQILVDLGLSKIRMMTNNPKKVVGLEGYGIQVVETVPIIVEPNSFNRHYLETKQKKMGHLLNVDKTN

SEQ ID NO: 7966 - protein, 435 aa, Dehalococcoides ethenogenes 195
MKADYLIVGCSAGGIGAAEAIREVDRDGSIVIVGEEPYLAYSRPMIAKYLSGQKTVEKILFRRPEFYTNNNITCLTGVKAEAVDTTAHEVSLSNGEKVAYGKLLLAPGGKPIVPPIDGANKAGVFNFINMKDASLIDSYVKAENVKKAVIIGGGLIGMSAADALTKLGIEVDIIELKGHILNTILDEAAGKIAAQTVTSYGVKLNTGRTVSKVLGLHKVSGVELDNGHQIESQMLVIAIGVIPRTELCKAAGLEVNRGVVVNDNMRTSSPDVYACGDACESFDFIYNSRRVTPIWPNAYIGGRIAGYNMAGLETTYHGGTVMNSLNYFGMDIATAGMSVLPPDAGGLEVISTLTANGYKKLVLNEQGKIVGMLTLGETDTAGIIFGLMRDQSDVRPIKDNILNENFGLAYLPADSREEHLHGNTSGRVAPADFKH

SEQ ID NO: 7967 - protein, 351 aa, Acinetobacter sp. ADP1
MNKNTPILVTGATGYVAGWIIERLLNQGHTVHATVRDPSNTEKIKHLTDIAKKSEGSIHFFKADLLSEGVFDEAMQGCEIVIHTASPFVITNYKDAVKDIIEPAVNGTANVLESVNRTESVKRVVVTSSIAATYGDAIEIKATSNNEFDESCWNNTSNATHQPYSYSKVAAERKAWEMADQQNRWSLVCINPALVMGPSLTASSQSGSIELLQQFANGVTLFGVPSMWNGIVDVRDVADAHVAAALLPDASGRYIISGGSLSLLDMGKALTQRFGYRFPFPHFTVPKTAFSFVAPFLGYSREFVKLNMGYPIYFNAKRSQEELNIQYRDIRESVCDHFQQLLDDGVIKKWL

SEQ ID NO: 7968 - protein, 707 aa, Synechococcus sp. WH 7805
MVASSVAVKDDQASRAFPLAAITGHGTLKLALLLAAVDPGLGGVIIAGGRGTGKSVLARGLHALLPPIDVLDPEAAGLASGPGRNLDPSRAEEWDAATREQLSTEPPSRVIPAPFVQVPLGITEDRLVGAVDVTASLSSGSPVFQPGLLAEAHRGVLYVDELNLLDDGIVNLLLAAVGAGENQVEREGLSLRHPCRPLLIATYNPEEGNVRDHLLDRFAIALSANQLVSTEQRVEITNAVLSHGQCSRSFAERWKEETDALATQLLLARQWLPDVQISREQVEYLVTEAIRGGVEGHRSELYAVRVARAHAALSGRDQVEADDLQVAVALVIAPRASQLPPPDQQMEPPPPPEQPDDQTPPPPDSGEQTNDDTPPPPEGSGEDENDPPEDSDDDNNDDEDSEQDEAPPSVPEEFMLDPEAIAIDPDLLLFNAAKSKSGNSGSRSVVLSDSRGRYVKPMLPRGPVRRIAVDATLRAAAPYQKARRARQPDRTVIVEEADLRAKLLQRQAGALVIFLVDASGSMALNRMQSAKGAVIRLLTEAYENRDEVALIPFRGDQAEVLLPPTRSITAARRRLESMPCGGGSPLAHGLTQAARVGANALATGDLGQVVVVAITDGRGNVPLSTSLGQPELEGDEKPDLKQEVLDVASRYRMLGLKLLVIDTERKFIGSGMGKDLAEAAGGKYVQLPKASDQAIAAVAMEAINAVT

SEQ ID NO: 7969 - protein, 421 aa, Nocardia farcinica IFM 10152
MALVVQKYGGSSVASAERIRRVAERIVETKKQGHDVVVVCSAMGDTTDELLDLAEQVAPAPPAREMDMLLTAGERISNALVAMAIHSLGAQARSFTGSQAGVITTGAHGNAKIIDVTPSRLREALDEGTIVLVAGFQGVSQDSKDVTTLGRGGSDTTAVALAAALEADVCEIYTDVDGVFTADPRIVSDAQRLEQVSYEEMLEMAACGSKVLMLRCVEYARRYNVPVHVRSSYTDKPGTYVYGSMEDIPLEKAILTGVAHDRSEAKVTVVGLPDEPGYAAKVFRAVADAEINIDMVLQNISKVETGKTDITFTLPKTEGARAVEMLTKRQGEIGFSQVLYDDHIGKVSLVGAGMKSHPGVTATFCEALADAGINIDLISTSEIRISVLVKDTELDDAVQVLHRAFDLGGDEVAVVHAGTGR

SEQ ID NO: 7970 - protein, 359 aa, Dehalococcoides ethenogenes 195
MSHNVTLIPGDGIGPEISEATRRVLEATGVKFNWEIVNAGADVVAEYGTPLPDMVLESIRKNKVAIKGPVTTPVGSGFRSVNVGMRKALNLYTCLRPCKTYPGVPSRYDNVDIVIVRENMEDLYAGIEFEKGSPEALRLIEFIKENKKVEIRADSGISIKPISVFGTERIFRWAFKYARDNKRKRVTAVHKANIMKYSDGLFLAIGRKVAEEYPEIEFEDRIVDNMTMQLVKNPSQFDILVCPNLYGDILSDLCAGLVGGLGVAPGANIGDEYALFEPTHGSAPKYKGMNKVNPMAMMLSGVLMLRYLKEEKAADKLENAIAAVIAEGKSVTYDMLSPDKQAAAVGTSQVADAIIAKMK

SEQ ID NO: 7971 - protein, 213 aa, Leuconostoc mesenteroides subsp. mesenteroides ATCC 8293
DVHVTTPIQSYFRINTENEGQFERTLIIVDEGAHVDYVEGCSAPMYSGDALHAAVVEVIVKKDGYCRYTTIQNWSNNVYSLETKRAAAHENATMEWVDGNFGSKTTMKYPSVYLEGEGAKGTMLSIAVAGEGVNLDSGAQMIHNAKNTSSSIISKSIAHDGGSTDYRGTVKFGRESDGSFAHVECDTILVDDKSSADTIPYNTILNGNVSMEH

SEQ ID NO: 7972 - protein, 323 aa, Mesoplasma florum L1
MKRIGVLTSGGDAPGMNNAIAGVVKAAEAQGIEVYGVRDGYKGLINGWFEKLDSKFALEIISKGGTVLGSARLPEFKEESVRQKAVDQLKAHDIEALVVIGGDGSYMGAQRLTEMGINCIGLPGTIDNDIVSSDYTIGFDTALNTVIESVEKVRDTMQSHNRAAVIEVMGNGCGDLVTYAAIATQAEIFSPSESKLTVEQICEQAKKFAEANHRSLIILISEKQLDANELAKKVEEASGYVTRATILGHVQRGGRPSGMDRYLAFTAAIYAVEKLIEGKGGLYIGLSENKLVARDIESTLNMPKPDKTEFIEKIRLLNAKISK

SEQ ID NO: 7973 - protein, 171 aa, Arabidopsis thaliana
MILAILALVIATFLYGGATTVQAGCRDTLTSLSPCLYYLNGGSSSPSWSCCRQFSTVVQSSPECLCSVVNSNESSFYGFKFNRTLALNLPTACNVQTPSPSLCNTGGNVPTTLPANTPVGSPRSAPSPSGTTSPANTPSGSKKFPLSNESSSKSNVIILSFVSIALVLAII

SEQ ID NO: 7974 - protein, 157 aa, Glycine max
MEFVKRVLGSSKRLYPENSGGSGSYGRRLSTSKKKKKKAPQGCICVYVGAERERFVIKVKIANHPLFKALLDAAEREYGYRNNGPLWLPCDVDLFSEALKDMENSIQEEEETGSVGCAAFAAGHSFRRSPSSASNNYISCRYLLTGSVIHHYQTLVS

SEQ ID NO: 7975 - protein, 433 aa, Alkalilimnicola ehrlichei MLHE-1
MTAITRITLTGALLAAALLLAALQPARAETLDRIVAVVDDQVVLASELERELATIANQLRSRGQRLPPRDVFQRQVLERLITQRVQLSRAQRVGITVDDATLDAAMQRMARQNNMTLGQFRQAVEQEGFEYNYFREGIREEIAISRLRQAQVEEQVTVTPQEVEEVLETLDDENQEYRLGHILVATPEAASTAQLEEARERIEQLREQIIAGETDFEGAATAFSDAASAMEGGDLGWRLHSQLPSLFAEAIDEGLQAGEVSGVLQNSSGFHLVKLMDQRTQGGERVTETRARHILIRTDGDVITDEDARLRLRSLLERIEAGESFAELAEAYSEDPGSAARGGDLGWTQPGQLVPEFQGAMDALEEGQISAPFASPFGWHIVQVTDRRERDVSRERLRDQLAQQIHQRKVEEAFEQWIRRLRDEAYVDVRVEL

SEQ ID NO: 7976 - protein, 473 aa, Aeropyrum pernix K1
MERLNKPSAPRYSRLREWVVGCAPNDLVVVKFGGSVLNGSPGFLAAGRLVLGLLESGLEPVVVVSAVKGVTDALLSSFERRDPGVGGAVGKTYLSIARELGLPPESVRDVSLASAEVSKLLWAAEVLGQWTPRVRDLVVSYGERLSAALMAGLLRRLGVEARWLGGGEAGIVTDGEFGDATPLYGYTEGVIRERLEPMLEEGVVPVVAGFTGATREGDTTLLGRGGSDLTATLLASALGAGRVVLYTDVPGILSGDPRVVGEPRRVGYMSYEEAWEVARLGLRKFHPRTFEPLIAGGLGVEVVVSDLRGRSTRIGPGRGGPPLKVVSLSRGVARLVVRGPSMAGKRGFLSRLAGLLAGRGVNILAIRQPPSETAIELVVDERDLPAAVEELGARSGAAGVRLEVERGFDVVSIVGWGAVEALPEALSAAEKTGGRLLSTGELSPSISILARGRTSPELARLLHRRVVESWVTG

SEQ ID NO: 7977 - protein, 315 aa, Magnetospirillum magnetotacticum MS-1
MTAKLPILRIGTRGSPLALAQTHETRDRLAAAWAPLGQEGAIDIEVIKTTGDLIQDRPLAEIGGKGLFTKELDEAMLSGRIHLAVHSMKDVPTLLPDGIVLPCILPREDVRDAFISLKAASLADLPQGAVVGTSSLRRGAQILHRRPDLKVVNFRGNVQTRLRKLDEGVVDATMLAMAGLRRLGLAGHVTSALSEDDMLPAVAQGAIGITCRADDEAAHAFLAALNCPDSFVRVAAERAFLTRLDGSCRTPIAALAVLDGDHLSFRGLIVSPDGTAIHATSRSGSRSDAEAMGKDAAEELIKVAGPGFFDLIKPH

SEQ ID NO: 7978 - protein, 307 aa, Sorghum bicolor
MSAELKRDYEIGAEIGRGRFGVVHRCTSRATGEAFAVKSVDRSQLADDLDRELAELEPKLAQLAGAGNPGVVQTHAVYEDETWTHTVMDLCAGPDLLEWVRLRRGAPVPEPLAAAIVAQVAQALALCHRRGVAHRDVKPDNILIDTAPAGSDDGEDEEEDSGEAEEAETAPRARLADFGSAAWVGAGGLGRAEGLVGTPHYVAPEVVGGGEYGAKADVWSAGVVMYALLSGGALPFGGETAAEVLAAVLRGSVRFPPRLFSGVSPAAKDLLRRMICRDEWRRFTAEQVLAHPWIVSGGGARAIERPT

SEQ ID NO: 7979 - protein, 402 aa, Pseudomonas fluorescens PfO-1
MENLQSAVDTLVHSSNTLFILIGAVMVLAMHAGFAFLEVGTVRQKNQVNALSKILSDFAVSTLAYFFIGYWLSYGVTFLHPAAVLSADHGYGLVKFFFLLTFAAAIPAIISGGIAERARFVPQLCATALIVAFIYPFFEGMIWNGNYGLQAWLTAQFGAPFHDFAGSVVVHAMGGWLALAAVLLLGPRTGRYRDGKLVAFAPSSIPFLALGSWILIVGWFGFNVMSAQTLQGVSGLVAVNSLMAMVGGTVAALIVGRNDPGFLHNGPLAGLVAVCAGSDLMHPVGALVNGAIAGALFVWCFTAAQVKWRIDDVLGVWPLHGLCGVWGGIACGIFGSTTLGGLGGVSLISQLIGTALGVAVALIGGFAVYGSIKALHGLRLSQEQEYYGADLSLHKIGAVSQD

SEQ ID NO: 7980 - protein, 416 aa, Vibrio sp. Ex25
MSKRRVVVTGMGMLSPVGNTVESSWKALLEGQSGIVNIEHFDATNFSTRFAGLVKDFDCTEYMSKKDARKMDLFIQYGIAAGIQALDNSGLQITEENAARVGVAIGSGIGGLDLIETGHTALVEKGPRKVSPFFVPSTIVNMVAGNLSIMRGLRGPNIAISTACTTGLHNIGHAARMIAYGDADAMVAGGAEKASTPLGMAGFGAAKALSTRNDEPQKASRPWDKGRDGFVLGDGAGMMVLEEYEHAKARGAKIYAELVGFGMSGDAYHMTSPSEDGSGGALAMEAAMRDANITGTQVGYVNAHGTSTPAGDVAEIKGVKRALGEEGAKQVLVSSTKSMTGHLLGAAGSVEAIITVMSLVDQIVPPTINLDDPEEGLDIDLVPHTARKVEGMEYAICNSFGFGGTNGSLIFKKFAE

SEQ ID NO: 7981 - protein, 319 aa, Bacillus sphaericus
MKKIAVLTSGGDVPGMNAAIRAVVRKAAFHGINVVGIKHGYEGLVKGYLEELDLGSVGGIIQRGGTHLNSARCPEFKEDAVQQQGIENLRAAGIEGLVVIGGDGSYRGAMDLVKKGFPAVGVPGTIDNDVPGTEYTIGFDTALNTVVESIDKIRDTATSHENSFIVEVMGRDAGDIALWAGLAAGAETVLIPEEDYDLDDIVARLDRGAARGKKHSIIIVAEGVMSGNELAKLIKEKTGKETRVSVLGHIQRGGSPTARDRVLASQFGAHAVELLMEGKYGRAVGIRNHQVIDYDMPEAFEKNHEADVSLYTLMKELSI

SEQ ID NO: 7982 - protein, 589 aa, Desulfovibrio desulfuricans G20
MGNIKEIQQIKTLIAKGKVAGFLTFEEVNKALPAEVNTPEQIEEIIGIFDQLDIAIVDSEKDGKKISVSPAEADDEGGDGGLELTDEDDPADYSSRSTDPVRMYLREMGAVPLLDRDGEVNIAKKIETGEQDVLYALVEVPIAVEELISVGEDLKENRIKLKDVVKTIEEDDPSEDEMNQRQRVILLLDEIQSTFKKKRKVYQRLDECCTLERRVYGIQKEIIAYKEEIVSRLRDIKLEKTLIDRIIETVEDYVRQMHNCQRDLSAYILSTGKTQTEMRELFRQLDDREINPVVAADSLNLTVEELFSFKEMIMGKMEILNRLQEKCCHNVTDLEEVLWRIKRGNSHAMRAKQELIRSNLRLVVSIAKKYTNRGLQFLDLIQEGNIGLMKAVDKFEYQRGYKFSTYATWWIRQAITRAIADQARTIRIPVHMIETINKLIRTSRYLVQELGRDPTPEEIAERMDYPIDKVKKVLKIAKEPISLETPIGDEEDSSLGDFIEDKKAVAPAEEVVNTKLSEQIAAVLADLTPREEQVLRKRFGINEKSDHTLEEVGKLFNVTRERIRQIEAKALRKLRHPVRSQTLRSYYES

SEQ ID NO: 7983 - protein, 323 aa, Enterococcus faecalis
  misc_feature (1)..(1): Xaa can be any naturally occurring amino acid
  misc_feature (9)..(9): Xaa can be any naturally occurring amino acid
  misc_feature (215)..(215): Xaa can be any naturally occurring amino acid
  misc_feature (281)..(281): Xaa can be any naturally occurring amino acid
  misc_feature (285)..(285): Xaa can be any naturally occurring amino acid
  misc_feature (292)..(292): Xaa can be any naturally occurring amino acid
  misc_feature (306)..(306): Xaa can be any naturally occurring amino acid
XSLIVTVTXNPSIDISYLLDHLKLDTVNRTSQVTKTPGGKGLNVTRVIHDLGGDVIATGVLGGFHGAFIANELKKANIPQAFTSIKEETRDSIAILHEGNQTEILEAGPTVSPEEISNFLENFDQLIKQAEIVTISGSLAKGLPSDFYQELVQKAHAQEVKVLLDTSGDSLRQVLQGPWKPYLIKPNLEELEGLLGQDFSENPLAAVQTALTKPXFAGIEWIVISLGKDGAIAKHHDQFYRVKIPTIQAKNPVGSGDATIAGLAYGLAKDAPAAELLKWGXAAGXANAQERXTGHVDVENVKKHLXNIQVVEIAKEGHHHHHH

SEQ ID NO: 7984 - protein, 56 aa, Photobacterium sp. SKA34
MSKRDFYEVLGVAKTASEKEIKKAYKKLAMKFHPDKNPDDPTAADKFKEVKVAYEI

SEQ ID NO: 7985 - protein, 268 aa, Zea mays
LATPVGGGVSSLNMQLRKELDLYASLVHCSNLPGLPTRHEGVDIVVIRENTEGEYSGLEHEVVRGVVESLKVITKFCSERIAKYAFEYAYLNNRKKVTAVHKANIMKLADGLFLESCREVASKYPGIQYNEMIVDNCSMQLVSKPEQFDVMVTPNLYGNLVANTAAGIVGGTGIMPGGNVGQDYAIFEQGASAGNVGNENLVEQKKANPVALLLSSAMMLRHLQFPSFADRLETAVKRVVAEGTYRTKDLGGSSTTQEVTDAVVANLD

SEQ ID NO: 7986 - protein, 475 aa, Dehalococcoides ethenogenes 195
MTSQIKFGTDGWRGIIAKDFTFDNVSVCAQATAAYLKNTSPRNLSLVIGYDTRFASADFARSAAEVMAANGIKVYFCSCPTPTPVISHGVVNLKAAGAVIITASHNPARWNGFKVKSADGASAPTQMITGIEAEIAKLGDKPPVLNLDFDTAVSRGLIEHVDLAPAYFEKIGGLVDIEKLRDAGFNIAIDSMHGAGIGYFKQLLDGGCNRLNEINAEPNPNFPGMLQPEPITPNLAKLMRLVKDIRSDIGLATDGDSDRLGVVDEMGNFLNQLQVFSLLALYMLEVKGLRGPLVKTITNSSMIDKLGELYNVPVFETKVGFKYVSPVMLEQNALIGGEESGGYAFTGHVPERDAILAGAYFLDFMITTGKSPAEMLEYLYSKVGPHYYNRVDYTFAEARREEIIKHLTDQKPASLGETKVVSTDKLDGFRYKLEDGSWLLIRFSGTEPLLRVYAESPSQAKTAALLEDGRQLSGI

SEQ ID NO: 7987 - protein, 285 aa, Arabidopsis thaliana
MRFVPYLYEIERLWLSLVNYLSPRKNKNRRCGEIDKIRMVKKGGTKRKIAIETIQKSDYLRVTCTKRREGLFSKASQLCLLSDAQIAILATPPTSESNISFYSFGHSSVDAVVSSFLSGQRCVPLQEDTKEMREDVAICLSRTNLGLGFWWNNESLNKSENPQEISDAINSMLTLLSNLKELSGEEALVNDHKDLKKNERSDVVLQHGTQYETLNPNSNTTTICCVPDELPANSNEIVGISPNPLIMLEKKKSQIEEKFEKEWQVSVTRIENEATSSYAKRRRSI

SEQ ID NO: 7988 - protein, 311 aa, Mesoplasma florum L1
MIYTVTLNPALDHIIETDGFNIGETNYYKNEYVVIGGKGINVSIILNNLEAKVLSTGILGSNNKNSFLEKFDENNLKNKFFINKGVTRTNLKIKNLSKFEETELNGLGSTVSLEIINELKTFLNDNLKSGDILVAAGSIPAGVKNNIYEEIGNIANEKNALFILDTSKVNMLNGLKTKPYLIKPNIEEICEILNLPFKEYTFEETCEMVKKLKSLGARNVLLSRGSKGSYFFSEKGEIFETGIAKGKLVNSVGSGDSMIAGFTYGLYKNLSIEECLQFGAAAGGATAFTEWLGLKEDILKLKQEIKVNKIK

SEQ ID NO: 7989 - protein, 371 aa, Deinococcus radiodurans R1
MQAARIRVIGLGGAGNNAVNRMIESGLEGVEFIAGNTDAQVLAKSHAEVRIQLGDRLTRGLGAGADPKVGEEAAVEDRDRIKEYLDDTDMLFITAGMGGGTGTGSAPVVAEIAREMGILTVAIVTRPFKFEGPKRMRVAEEGMSKLADRVDGMIVVNNEKLLTAVDKKVSFREAFLIADRVLYYGVKGISDVINVEGMINLDFADVRNLLANSGTVLMGIGAGRGDKMAEEAAMSAIHSPLLERGIEGARRILVNVTGGYDLSMTDANEIVEKIREATGFDDPDILFGITPDEAAGDEVRVTVIATGFGDNTYAAPLGGVVSSGRGGYDQGGYGSGLVRPVRGGQGGLGGGSSYDPKDYDIPAFLRNVGGQ

SEQ ID NO: 7990 - protein, 181 aa, Kluyveromyces lactis NRRL Y-1140
MRQLTEEETKVIFEKLAGYIGRNIVYLVDNKDQPHVFRLQKDRVYYVPEHIANLATSVARPNLMSLGLCMGKFTKTGKFRLHITSLSVLAQYAKYKVWIKPNGEMPFLYGNHVLKAHVGKMSDDIPEHAGVIVFSMHDVPLGFGVSAKSTSESRDLQPTSIVAFRQADIGEYLRDEDTLFT

SEQ ID NO: 7991 - protein, 467 aa, Listeria monocytogenes str. 4b H7858
MTSVMWFRRDLRVNDNKALYHACKEDDLLLLFQVNPAQFITGSPSHQAFFASVAHFKQEIDKTAHLQIMFGEPIECFQQLKDSLPSWDKVYFNRDETGYGAKRDEAAQAFFDEQKIEVQAFHDSYLHSAEEVKKSPTEYYKIFTPYYKKWREEIKETPFKVTLKHENIRKESLFLKYEEQFAEMTSDLPILDIGERAANTRLANFIKHDVADYDKARDFPELDKTSHLSRYLRTGEISIRTIWQTLQETEATEGRATFEKELCWRDFYNMIYVSFPNQKNEPIQENYRFIEWENNREYFKAWQEGKTGFPLVDAAMRQLKETGWMHNRLRMITASFLTKDLLIDWRFGEKYFQQMLIDYDPASNIGGWQWAASTGTDAVPYFRIFNPTTQSQKFDSTGKFIRKYVKELANLPDKYIHQPEKMSETEQKEHGLLLGKDYPFPIVDHKERRKLAIARYEFSKEHSRGNI

SEQ ID NO: 7992 - protein, 334 aa, Deinococcus radiodurans R1
MTQPDMAYPNPAGIKRVAVLTSGGDAPGMNAAIRAVVRTGAQQGIEVVGVRRGFSGLHRGEVQLLGPRDVANTIQRGGTILLTARSHTWRSPEGRAKGAAVLREWGVDGLVVIGGDGSFHGGYFLQEEHGIPVIGVPGTIDNDLYGTDHTIGYFTAVETALEAVDKLRDTGASHERIFVIEVMGRHAGHIALDVAVAGGAEEVFIPEDKKPIGDVVNIVKDSIAKGKRGSIIIVAEGYDGGAEAVAQAIHAGTGLETRVSILGHIQRGGTPVSSDRILASRLGEAAVYALMDGKKGVMVGRIGGGIAYTPLHETWEKRKDVSRDLYRCAKMLSI

SEQ ID NO: 7993 - protein, 539 aa, delta proteobacterium MLMS-1
MASLAITFGSGAMTNSIADTTVTDLFMMIGSNPDTSHPTIGLRLHQALDRGAKMVVIDPRRTRFAERADLWLPIQPGTDVALLNAMMQVIIEEDLWAKQYVEERTEDFAELRTLVADYTPEKVAEVCRVPAADIRKAARMYAADGRHATYHGMGITHYATGTDRVKSIANLAMLCGKVGFEGGGSNPLRGQNNVQGACDMGALFNTLPGYGGLNDEELFDRYEKIWKVRLPRRPGKPATEVWENILEGNIRALYVFGEDPMLADTNINHVQQALEKTDFLVVQDLFLTETAKLADVVLPAACFAEKDGTFTCTERRVQRVRKAVEPPGEAKPDWQIFCELAKRMGYQMHYDTAEDIFAEIRQLLPQYKGITYQRLEQVGLQWPVPDEEHPGTPVLHVGQFTRGRGLFVPEKFIPPAEPVNGEYPMLFTTIREYARYNFSSMTGKTREIDVIAPEALAEVHPNDAGRMGITDGVMLRLTSRRGSVDIRAKVTDQTQEGTISAPYNFAETPVNRLTLDALDRLSRTPEYKLCAIRVEVLEQ

SEQ ID NO: 7994 - protein, 1053 aa, Gibberella zeae PH-1
MSATRIGQRLARQSRRSPITLQPRLTQTIRLNAVSSRAFSVTATTQAPRFVESQSSTKLHEHELFSRRHIGSESSEQTEMLKMLDPPVSSMEEFLEQTIPPQVRRKQKGLNLVEQWYEGGAETAVPVNGRTEHYIQKEMRKLAKNNKVYESFIGAGYYGTLVPAVIQRNVLENPAWYTSYTPYQAEISQGRLQSLLNFQTLITDLTGLDIANASVLDEATAAAEAMTMSMANAPKGKGQKTFVVSENCHPQTISVLQSRAEGFNIKLVIGDVLADNSKLVREVEGDLIGTLIQYPDTHGGVHDYQALADIVHEKKALLSASTDLLALTMLKPPGDFGADIAIGNSQRFGVPLGYGGPHAAFFATSEKYKRKIPGRLVGVSKDRLGKPALRLALQTREQHIRREKATSNICTAQALLANMSAFYAVYHGPKGLKTIAEDIWSKTRLAQSLILEKGEFKLHTEGLREDGSVLFDTVTLKGSPEAIAKVHEKADSQSINLRRVADDKVGFSLHEGVTLESLGNLVKIFGVSESDFNAALESDKAKFLNDEIPASLQRKSAYLEQPVFNQYHTETELLRYIYHLQSKDVSLVHSMIPLGSCTMKLNATTEMLPVSDPGINNIHPFAPVEQASGYQALISSLAKNLSEITGMDATTLQPNSGAQGEFAGLRCIKAYHEARSGEKRKVCLIPVSAHGTNPASAAMAGMKVVTVKCDGKTGNLDIEDLKAKCVKHADELAAIMVTYPSTFGVFEPEIKQVCDLVHEHGGLVYMDGANMNAQIGLCSPGDIGADVCHLNLHKTFCIPHGGGGPGVGPIAVKKHLAPYLPGHPEIDPQRIGAERDSTAVAPISAAPWGSASILPISHTYILMMGGDGLTKQTGTALLNANYIMSRLLPHYKVVYTNAQGRCAHEFILDVRPFKDTAGVEVADIAKRLADYGFHSPTMSFPVSGTLMIEPTESESRAELDRFCDALIQIRKEIADIESGKVPRKNNILTNAPHPQEDLLSSEWDRPYTREEAAYPLPWLREKKMWPSVGRVDDAYGDTNLFCTCPPVEGSEDL

SEQ ID NO: 7995 - protein, 339 aa, Lactococcus lactis
MKRIAVLTSGGDAPGMNAAIRAVVRKAISEGIEVYGINHGYAGMVAGDIFPLTSASVGDKIGRGGTFLYSARYPEFAQVEGQLAGIEQLKKFGIEGVVVIGGDGSYHGAMRLTEHGFPAVGLPGTIDNDIVGTDFTIGFDTAVSTVVDALDKIRDTSSSHNRTFVVEVMGRNAGDIALNAGIAAGADDISIPELEFKFENVVNNINKGYEKGKNHHIIIVAEGVMTGEEFATKLKEAGYKGDLRVSVLGHIQRGGSPTARDRVLASRMGARAVELLRDGIGGVAVGIRNEELVESPILGTAEEGALFSLTTEGGIKVNNPHKAGLELYRLNSALNNLNL

SEQ ID NO: 7996 - protein, 112 aa, Colwellia psychrerythraea 34H
MKIISAIIKPFKLDDVREAISEVGVEGITVSEVKGFGRQKGHTELYRGAEYQVDFLPKVKIEIAVNEELVERLVEAITKSAYTGKIGDGKIFVYNLEQAIRIRTGEQDSEAL

SEQ ID NO: 7997 - protein, 779 aa, Ustilago maydis 521
MLPASIRTFLSSNFLLLLALAYSVTAFTVTISDKDELRQTCSGMIAGDDSHIQAYFDKGSKGTVATMFYEFIDFDKLGKWSDDKDALGYQLKSYICTPKAVQKTLCMQEQLGNFIVDESGGKASTVQLQRMDFGAAGLSEVKTLLPDAQLTRQRYNVTKTGYYCFGATEVPLVSLEAAPSGSGDLSVHAEFSGRVEFFNKFKGNLPAAEYPKLNFYFAMTIAYIALGIYWISLCIKHRDEMLTVQYFISGTIAFLVVEMAAQWMYYYYLNGHLIDFFRIREVNNHTGVTAMARFLLVLTSILDAGRNSVSFFLLLIVAMGYGVIRPSIGPVMTRVRLLTAAHFIFGVLYSIGIVLIQLEQGGAWIFAFIFPLAMTLTAFLTWIMNSLNRSIEHLTQRKQTFKKSMFVKLHRILLGAVVVIFAFFIISSIAFSQSGGEGFAPNTWQYRWFLLDGWLALLYLAVFSAIAWVWRPTGNNMRLAMSDELATDDDPNAEGYEVDTFAARGPDGPDSDDEDDVEAKRTSQGPNGGRSAGAQPNSDVVFEIGDEDDEADHSKAAAADRREGRRGERQGLMSTSTNVSEETLVPVLLTITCRNHVYPRAFANAVTPLARLCTFALALTRFTMWTAASRSAAAQLQLTITLGRSTVFRVQVPSLFSTPSSLCSTFHPLTPALSTSQSAVSSSTASPSTWASDVGTLLWDGILRAVPKKKVSHSRKSMRAANKGLKDRTDLVHCSSCGKPKLHHHICASCYFELNRARKVALKQQHGGAPTNGGAQQHP

SEQ ID NO: 7998 - protein, 382 aa, Crocosphaera watsonii WH 8501
MIKSCDIFRITELGQTYVYGIQCLTQVRLVDNPYFTPQKDLIQIMIDMEDNIFKDNSTGYMDYKDYYATLGINKSSSADEIKKAFRKLAVKYHPDRNPDDKPAEERFKEISEAYEVLSDPEKRKKYDQFGQYWKQAGQSTWPGGGANVDMGNFDFSQYGNFEEFINELLGKFSTPGGGRTGNYGYGNQGTGYSGYSGGYGNQTPAPNREATLKLTFSEAFRGVQKRLNLGNEIIDVRIPAGAKNGSRIRVKGKGGNSPYSQNRGDLYLNVELTPHNFFAFEDDNLVCEVPISPDEAVLGSTIDVPTPDGMVTVKVPPGIRSGQCLRLRGKGWVNQKKGRGDQLVKIIIDTPQHITDTERNYYEKIRDSRSYQPRQHLQTISL

SEQ ID NO: 7999 - protein, 517 aa, Synechococcus sp. WH 5701
MESLETQVERHWQAFLSLRNDLERFRFAVALRQANLTLFHRFLADHIEAVMPIVYTPTVGAAIQRFSLDYRTPSGGVFLAAPDLERIESVLSQAATGPVDLILITDSQGILGIGDQGIGGIEICLGKLAVYTLCAGLDPARVLPLVLDVGTDRVELLENPLYPGWRHPRLDGLDYDRFLARSVEALQRQFPGALLHWEDFGTGHAHQLLERYRLQLPSFNDDIQGTRGVACAVVKAASHGAGLPLEDHRIVVFGAGTAGCGIAEGLVRLLTRAGLSEPEARRRIWAIDREGLVLADQPGLSPMALALARDPSERSLFEHDTQGRIGLLEVVRAIQPTVLIGTSTVTGAFSREVVDTMAAAVERPIILPLSNPTRLAEATPADLYAWTGGRALVASGSPFEPVSWQGSLRRIGQCNNCFLFPGLGFASVAVGATQVSEGMIDAGLDALADRIPAFRDPEAPLMPELTQVQAVSRAVAEAVALAAVHEGLASRAASAEEAIERLDQATWTAAYRELEAI

SEQ ID NO: 8000 - protein, 1126 aa, Solanum tuberosum subsp. andigena
MASSSSSSESNSQYSCPQRKYKYDVFLSFRGKDTRRNFTSHLYERLDNRGIFTFLDDKRLENGDSLSKELVKAIKESQVAVIIFSKNYATSRWCLNEVVKIMECKEENGQLVIPVFYDVDPSDVRKQTKSFAEAFAEHESRYKDDVEGMQKVQRWRTALSEAADLKGYDIRERIESECIGELVNEISPKLCETSLSYLTDVVGIDAHLKKVNSLLEMKIDDVRIVWIWGMGGVGKTTIARAIFDILSSKFDGACFLPDNKENKYEIHSLQSILLSKLVGEKENCVHDKEDGRHLMARRLRLKKVLVVLDNIDHEDQLKYLAGDLGWFGNGTRIIATTRDKHFIRKNDAVYPVTTLLEHDAVQLFNQYAFKNEVPDKCFEEITLEVVSHAEGLPLALKVWGSSLHKKDIHVWRSAVDRIKRNPSSKVVENLKVSYDGLEREDQEIFLDIACFLRGRKQTEIKQILESCDFGADDGLRVLIDKSLVFISEYDTIQMHDLIQEMGKYIVTMQKDRGEVTRLWLTQDFEKFSNAKIQGTKAIEAIWIPEIQDLSFRKKAMKDVEKLRILYINGFHTPDGSNDQYLPSNLRWFDCCKYPWESLPAKFDPDMLVHLDLQQSSLFHLWTGTKKFPFLRRLDLSSCANLMRTPDFTDMPNLEYLGLEECSNLKEVHHSLRCSKKLIKLNLRDCKNLESFSYVCWESLECLHLQGCSNLEKFPRIRGKLKPEIEIQVQRSGIRKLPSAIIQHQSSLTELDLSGMKNLATLSCSIGELKSLVMLKVSYCSKLKSLPEEIGDLENLEILKAGYTLISQPPSSIVRLNRLKFLTFAKQKSEVGLEDEVHFVFPPVNQGLCSLKTLNLSYCNLKDEGLPQDIGSLSSLEVLNLRGNNFEHLPQSLTRLSSLQSLDLLDCKSLTQLPEFPRQLDTIYADWNNDSICNSLFQNISSFQHDICASDSLSLRVFTNEWKNIPRWFHHQGKDKSVSVKLPENWYVCDNFLGFAVCYSGCLIETTAQFLCDEGMPCITQKLALPKHSEEFPESAIHFFLVPSAGLLDTSKANGKTPNDYRHIMLSFSEELKEFGLRLLYRDESKLKALFKMTENNDEPTEYCVVKRRGQYDEARCSSSKKQRSQL

SEQ ID NO: 8001 - protein, 633 aa, Magnetococcus sp. MC-1
MEVARLIEDLVFQCRERLGEEAAERVQRAADLAIYFHEGQFRKLDGSRYVLHCIQVATHCFSWGLVDAAGICAALLHDSIEDAPPEKQADQAIRALDPEVFSIVEALSKIRNLQTGGGDMPATYRRILLAASRDLRVLVIKSFDVLHNAETLEVHGPEKAKVKASLGLIYVGIARRLGMIVMADALIDRLLPHLMPVQYERARKNLRTLQNQCGESMDHMVKEVARINEDGLIRDVILEPRKVADYFLLAEKPGTGRLNRVGWPVYRLKLFVAKGSDAWQVLGRVHDHFEPLPRHIRDYMNAPRINGYQALTTRILWGGVPVNVLIVESGKDESNRYGILATWGEGSSPYTGRYMRLLSTLGDSDLRMSEVHAHVLPDLLDAYSPKGERYTFPAGSVVIDFAYAVHTEIGNRCAGAYVNGVKRAPDYPFKDGDVINVITAKSSCPLRGWLNVVKTARAKTVIKQALKNHEGGVHGVQHPQPGLFVLTALASSDIAWSNCCCPVPGDTVVGRSAADGRWIVHTSQCTKVHEGNDEVHWERGRWNLADACNQANINIILVVERSGGVLAEIYRLLEVSGVRIHHTEIKPRSPTRLLVMLQFGHEHINPLGVVLTQLRGLAGVVSLQEYSWSSRNN

SEQ ID NO: 8002 - protein, 1101 aa, Solanum tuberosum subsp. andigena
MASSSSSSESNSQYSCPQRKYKYDVFLSFRDDKRLENGDSLSKELVKAIKESQVAVIIFSKNYATSRWCLNEVVKIMECKEENGQLVIPVFYDVDPSDVRKQTKSFAEAFAEHESRYKDDVEGMQKVQRWRTALSEAADLKGYDIRERIESECIGELVNEISPKLCETSLSYLTDVVGIDAHLKKVNSLLEMKIDDVRIVWIWGMGGVGKTTIARAIFDILSSKFDGACFLPDNKENKYEIHSLQSILLSKLVGEKENCVHDKEDGRHLMARRLRLKKVLVVLDNIDHEDQLKYLAGDLGWFGNGTRIIATTRDKHFIRKNDAVYPVTTLLEHDAVQLFNQYAFKNEVPDKCFEEITLEVVSHAEGLPLALKVWGSSLHKKDIHVWRSAVDRIKRNPSSKVVENLKVSYDGLEREDQEIFLDIACFLRGRKQTEIKQILESCDFGADDGLRVLIDKSLVFISEYDTIQMHDLIQEMGKYIVTMQKDRGEVTRLWLTQDFEKFSNAKIQGTKAIEAIWIPEIQDLSFRKKAMKDVEKLRILYINGFHTPDGSNDQYLPSNLRWFDCCKYPWESLPAKFDPDMLVHLDLQQSSLFHLWTGTKKFPFLRRLDLSSCANLMRTPDFTDMPNLEYLGLEECSNLKEVHHSLRCSKKLIKLNLRDCKNLESFSYVCWESLECLHLQGCSNLEKFPRIRGKLKPEIEIQVQRSGIRKLPSAIIQHQSSLTELDLSGMKNLATLSCSIGELKSLVMLKVSYCSKLKSLPEEIGDLENLEILKAGYTLISQPPSSIVRLNRLKFLTFAKQKSEVGLEDEVHFVFPPVNQGLCSLKTLNLSYCNLKDEGLPQDIGSLSSLEVLNLRGNNFEHLPQSLTRLSSLQSLDLLDCKSLTQLPEFPRQLDTIYADWNNDSICNSLFQNISSFQHDICASDSLSLRVFTNEWKNIPRWFHHQGKDKSVSVKLPENWYVCDNFLGFAVCYSGCLIETTAQFLCDEGMPCITQKLALPKHSEEFPESAIHFFLVPSAGLLDTSKANGKTPNDYRHIMLSFSEELKEFGLRLLYRDESKLKALFKMTENNDEPTEYCVVKRRGQYDEARCSSSKKQRSQL

SEQ ID NO: 8003 - protein, 483 aa, Sulfitobacter sp. EE-36
MQTQPIASHFINGEYVEDTNGTPIEVIYPATGEVIATVYAATPEIVEKAITAARDAQAAWAAMTGTERGRILRRAADIMRERNHDLSILETYDTGKPYQETSVADATSGADALEYFGGLAASLTGEHIQLGEDWVYTRREPLGVCVGIGAWNYPTQIACWKGAPALACGNSIIFKPSETTPLCALKVAEILVEAGLPAGLYNVVQGMGEVGASLVTDPRVDKVSLTGSVPTGRKVYAAAAEGIKHVTMELGGKSPMIVFEDADIENAISGAILGNFYSSGQICSNGTRVFVHRDIKEAFLKRLAERLDTAVIGDPMDPDTSFGPMVSKRQMEIALGYVEKGKAEGARLVYGGAAIDRDGFYMQPTVFADVTDDMSIAREEIFGPVMSVLDFETEAEVMARANATEFGLAAGVFTKDLSRAHRVAAGFEAGTCYINTYNDAPVEAPFGGMKNSGVGRENSKAAIDHYSQLKTVYVRMGDMEAPF

SEQ ID NO: 8004 - protein, 381 aa, Klebsiella pneumoniae
MERVLINDTTLRDGEQSPGVAFRTSEKVAIAEALYAAGITAMEVGTPAMGDEEIARIQLVRRQLPDATLMTWCRMNALEIRQSADLGIDWVDISIPASDKLPQYKLREPLAVLLERLAMFIHLAHTLGLKVCIGCEDASRASGQTLRAIAEVAQNAPAARLRYADTVGLLDPFTTAAQISALRDVWSGEIEMHAHNDLGMATANTLAAVSAGATSVNTTVLGLGERAGNAAAWKPSALGLERCLGVETGVHFSALPALCQRVAEAAQRAIDPQQPLVGELVFTHESGVHVAALLRDSESYQSIAPSLMGRSYRLVLGKHSGRQAVNGVFDQMGYHLNAAQINQLLPAIRRFAENWKRSPKDYQLVAIYDELCGESALRARA

SEQ ID NO: 8005 - protein, 115 aa, Corylus avellana
MGSLKLVCAVLLCMMVAAPVARASLTCPQIKGNLTPCVLYLKNGGVLPPSCCKGVRAVNDASRTTSDRQSACNCLKDTAKGIAGLNPNLAAGLPGKCGVNIPYKISPSTNCNNVK

SEQ ID NO: 8006 - protein, 163 aa, Arabidopsis thaliana
  misc_feature (21)..(21): Xaa can be any naturally occurring amino acid
  misc_feature (50)..(50): Xaa can be any naturally occurring amino acid
  misc_feature (81)..(81): Xaa can be any naturally occurring amino acid
  misc_feature (140)..(140): Xaa can be any naturally occurring amino acid
MASSMLSYAAVATSPAQATMXAPFTGWKSSAGFPATRRTNTDITSIASNXGGRVSCMKGWPPIGKKKLETLSYLPDLNDVXLTKEADYLLRNTWIPCAEFKLQHGYAYREHGYTPGCYDGPYWTKWKLPLFGCTDCAQVXNEAEECKREYPGACIRIIGCDNT

SEQ ID NO: 8007 - protein, 251 aa, Zea mays
MSLPAISMYTSPPGAVYSSEFDPASRGSSPCTTAAPPPPAASYRLPSGGGGLSCLFSSPAAAAAPPRAPAHDDLGALWHNRSDDLSVPADGGGYSYSHSHSHSSSQLKRRDLHHHHHSPVSVFQGPSTSSPSRSPPASWLAARDRDRLFAGFVRNALGSCVDYAPPTSPRPEVGAGELAFELDENLAEASPACEPYARELLASAQDRHRIFHEELVVKAFLEAEKAHRGQTRASGDPYLQHCVETAVLLAK

SEQ ID NO: 8008 - protein, 398 aa, Burkholderia vietnamiensis G4
MEFEMLETETNGTIIKVVGVGGAGGNAVQHMINRGVQGVDFIVMNTDAQALSRARAPSVIQLGNTGLGAGAKPEMGKAAAEEARERIADALRGAHMVFITAGMGGGTGTGAAPVVAQIAKEMGILTVGVVSKPFEFEGGKRMRVAEAGSQQLEDHVDSLIVVLNDKLFDVMGDDAEMDKCFQCADDVLNNAVAGIAEIINVDGLVNVDFEDVKTVMGEQGKAMMGTATVAGVDRARLAAEQAVASPLLEGVDLSGARGVLVNITSSRSLRLSETREVMNTIKSYAAEDATVIFGAVYDDAMGDALRVTVVATGLGRAAKKQQSAPMTLLRTGTDNQPVSAVSHGYAQPQHVSTADYGALDTPAVWRNSRETAASHVQALQEKGVDTYDIPAFLRKQAD

SEQ ID NO: 8009 - protein, 290 aa, Vibrio vulnificus CMCP6
MSVLINKDTKVICQGFTGGQGTFHSEQALAYGTQMVGGVSPGKGGQTHLGLPVFNTVREAVEATGATATVIYVPAPFCKDAILEAIDAGIELIVTITEGIPTTDMIDVKVKLEQTGVRMIGPNCPGVITPDECKIGIMPGHIHKKGKVGIVSRSGTLTYEAVKQTTDEGFGQSTCVGIGGDPIPGSNFIDILKLFQEDPETEAIVMIGEIGGTAEEEAAAFIKENVTKPVVSYIAGVTAPPGKRMGHAGAIISGGKGTADEKFAALESAGVKTVKSLAEIGQALREVTGW

SEQ ID NO: 8010 - protein, 402 aa, Vibrio vulnificus CMCP6
MTIEILVPDLPESVADATVATWHKKPGDRVERDEVLVDIETDKVVLEVPASEAGILEAIVEEEGATVLSKQLIGRIKLAAVAGEPTADTTEESEPSPDKRHTASLSEESNDALSPAVRRLLAEHSLEASQVKGTGVGGRITREDIEAHLAAAKQAPAVAEAPAAVAPVAARSEKRVPMTRLRKTVANRLLEAKNSTAMLTTFNEVNMKPIMDLRKQYGDQFEARHGIRLGFMSFYVKAVTEALKRYPEINASIDGDDIVYHNYFDISMAVSTPRGLVTPVLKDCDTLGFADVEKGIKELAIKGRDGKLTVDELIGGNFTITNGGVFGSLMSTPIINPPQSAILGMHKIQDRPMAVDGKVEILPMMYLALSYDHRLIDGRESVGFLVTVKELLEDPARLLLDV

SEQ ID NO: 8011 - protein, 766 aa, Vibrio fischeri ES114
MTFRLKTIIGISIIQCIMLLILVFSSVKFISDSNEQRLIARANASVHMFSNAIKDSILNNQYDKVASLMDDFITLEKICYIRIFREDGSLIVEGGPKLHEVANPDSSILHNASDGTYDVILPIITNDKTLGKVEIGFGTHGENTFLSQAKSWIYAIASIELIFVIGLSFLLGNALTRNLHKLKKAVNTVASQGPGAQVDISSIGDLGDVAQAFNNMSLKLEQNYQDLQQARNEAEAANKSKSRFLASMSHEIRTPMNAVLGLLAILKDTTLKPNQKELVNTATDSSELLLSIINDILDFSRMEANTFYLENHIFNIHKSLNSVLKTFHPQAQNKQLELSLFIADNVPTYVQGDAHRLRQILLNLVGNSLKFTDDGQVQILVNAEEHEGRIQLHCSVQDSGIGIQQEQLEYLFDEFTMADNSFSRTHEGSGLGLAICQRLVHMMDGTITVNSQYGLGSEFSFNIQLDKATTKEINYLLSKEKIEQQKDIEQQKNCVFSDANILVVEDNHANQIVIKNTLNYAGYSIDIAQNGKEAITKAINTQYDLIFMDISMPEMDGMTATKKIRSLSDTHQNMPIIALTAHALSGDKERFIEAGMTDYLSKPFNRSDLLECLAKYLFKQGKQDPSFCQECDLCEFNESTEEPKSMDNELLLVDEQIIQQIIADTDASVMPELIRFYIIESKERVETISNAAKNKDLYALEFEAHTLGSSALTLGNVALSTLAREIEIHCINQQFDDALEKTAHLPDLATLSLDALEKRNKQGFSK

SEQ ID NO: 8012 - protein, 411 aa, Pinus sylvestris
MASATLSMAAVANCSSTHASLQVSGKGFSEYSGLKSSSGFPCLRKYNEELRFQLVAFQTNAVGSSGQKRGVVEAKIKVAINGFGRIGRNFLRCWHGRKDSPLDVVVINDTGGVKQASHLLKYDSILGTFDPDVQVAGNDGISVDGKVIKVVSDRNPVNLPWKDYEIDLVIEGPGVFVDREGAGKHLQAGAKKVLITAPGKGDIPTYVCGVNEDKYYPAEEIISNASCTTNCLAPFVKVLDQKFGIIKGTMTTTHSYTGDQRLLDASHRDLRRARAAALNIVPTSTGAAKAVALVLPSLKGKLNGIALRVPTPNVSVVDLVVQVEKKTFAEEVNAAFRETADKELKGILAVCDEPLVSIDFRCSDVSSTVDSSLTMVMGDDMVKVVAWYDNEWGYSQRVVDLADIVANNWKS

SEQ ID NO: 8013 - protein, 188 aa, Triticum aestivum
  misc_feature (26)..(26): Xaa can be any naturally occurring amino acid
  misc_feature (93)..(93): Xaa can be any naturally occurring amino acid
MSTSSGAKEAPANNPGLQAEADPATXKGYIMQQTMFRVKDPKVSLDFYSRVMGMSLLKRLDFPEMKFSLYFLGYEDLSAAPADPVQRTGWTFXQKATIELTHNWGTESDPEFKGYHNGNSDPRGFGHIGVTVDDVYKACERFERLGVEFVKKPDDGKMKGIAFIKDPDGYWIEIFDLKRIGEVTATAS

SEQ ID NO: 8014 - protein, 659 aa, Cryptococcus neoformans var. neoformans B-3501A
MTTASPFLFQSSLHDTGLIHEMLSNPLKFGAPVNKKSLGFEAGMKEVVSEPESPNLVKRQLKNVNDEVKYDTEGELAAKDKSQKQFNGNAKNPQRVNPEFINQSVTPLSPAKSQIPDTNEGDNTQGLFPSTFDLSWPEAIATAKRAAGLHNPSMACYANATLQVLLHTPPVLRIALTHDEGSCSQIKKKNFCMLCSLKHMAEGSHWSGRKAYAPGIHRSLSQIKKGFSKNRQEDTHEFFRFVTDALQNTALAKLPKCVLPYNHRKFAHTTSRDTPEKIKHTSWVYRIWGGRVRSRVVCSRCNNPSDTFDSFLDLSLDVNKQGKKSVLGMLAGFTKEDRLEGDNKYHCERCKRKANATKSFKIDQAPPILTLHLKRFSVNYNPYSGRARAEKFNQPIKFEQTLDIAPYMVDPASPGTKYRLFGVTCHRGTELRFGHYTSYVRGPSGQWFHADDDEVSPVQLEQVLNDKTAYLLSYIRVDNGNEGLCESPAVRDRVKGLVNGSAKGMRDDESESQSEAESSSHKSSSPIKRKSTYDPEDPPRMKIGAFVNNKAYAPSTNKSESPFSDGENKMPPELPKFGYKPKPTIRAPAPVEASSFYTSPVARPSNSLAGMSKKEKKKFKHKEKGKPRHSATPMPFAQGRVGNGRNRQPGVLSRMKGRA

SEQ ID NO: 8015 - protein, 114 aa, Glycine max
  misc_feature (33)..(33): Xaa can be any naturally occurring amino acid
MAAPIPREWVGLQQFPAATQTKLHELLGKLKEXNVSTLTILVMGKGGVGKSSTVNSIVGERVANVSAFQSEGLRPMMCSRTRAGFTLNIIDTPGLIEGGYINEQAVEIIKRFLL

SEQ ID NO: 8016 - protein, 112 aa, Dehalococcoides ethenogenes 195
MKKIEAIIREERLEPVRKALELAGFAGLTVTEVSGRGKQKGVPLQWRVGEYRVEFLPKLKLEMICHDDDCQVAVDAIVKAARTGRIGDGKIFIMPVEQVVRIRTGETGSEAV

SEQ ID NO: 8017 - protein, 188 aa, Oryza sativa (japonica cultivar-group)
MAVARGVALAVVLAAAAAILAASPVAAQGGGGGGGSGSCMTEIISLASCLGYMSGNSSAPKPSCCTALSSVVTSKPACLCAVLGGGASSLGVTINNTRALELPAACNVKTPPASQCSTVGVPMPSPATPATPAAPAVPSETPAGTGGSKATPTTATTTTGQSASGGSVGKAASMATVVVSVAFALIHV

SEQ ID NO: 8018 - protein, 292 aa, Desulfovibrio desulfuricans G20
MTAALYLLRSGVSVAWCEKLSPGGQMLMTEEIENYPGFPKGLKGYELVDLFAAHLDGWSFDKYTDEVAEIIPGNGVHRVRVGDEWVEGKTLIICSGARYKRLGLPNEERLTGKGISYCALCDGNFFRGQEVGVVGGGNSALEESLYLSKLVKKLHLIHRRDDFRAMKCYQDKVCIKPDIEVVRSTVVTEIHGENALEGVTLRNLKTGEEYFLKLDGLFVFIGFEPVTGFFPDQLGVDAQGFIITDVEMATNVPGIFAAGDVRSKLCRQVTTAVGDGATAANSAFLYLEQLDA

SEQ ID NO: 8019 - protein, 440 aa, Triticum aestivum
  misc_feature (187)..(187): Xaa can be any naturally occurring amino acid
  misc_feature (218)..(218): Xaa can be any naturally occurring amino acid
  misc_feature (228)..(228): Xaa can be any naturally occurring amino acid
  misc_feature (248)..(248): Xaa can be any naturally occurring amino acid
  misc_feature (309)..(309): Xaa can be any naturally occurring amino acid
MHPTPWEHSHMVDLQAAALVISVVAAEVGAGVKNYMSESGIDIREYDMVQLDVSLLASGQLKGSAVNGSLHMEKDINAAEHSKIWIDSNSCCLALYSKLRPDQALMLQSPIALPKAVKNPMELTGLRKAHIRDGAAVVQNRAGGDNQRQENYGGSGYFSGANGSQKKGHLGIKLTGVSVRDKLGAFXRAGKGQFKGLSFPTKSSVGPNAAIIHYSPEXANTCAELDAXKIYLCDSGAQYLDGTTDITXRTVHFGKPSEHQESCYTAVLKGHIALDAAVFPNGTTGHALDILARTPLWKSGLDYRHGTGXGIGSYLNVHEGPHLISFRPSARNVPLQASMTVTDEPGYYEDGNFGIRLENVLIVKEADTKFNFGEKGYLSFEHITWAPYQTKLINTALLTPAEIEWVNLYHSDCQKILESYLNVQEKEWLRKATEPITASS

SEQ ID NO: 8020 - protein, 107 aa, Desulfovibrio desulfuricans G20
MAVQVTDSNFEAEVIKSELPTLIDFWAPWCGPCRAMGPVIDELAAEFAGKVNIVKMNVDENPATPSKYGIRAIPTLILFKGGEVVEQITGAVSKSSIKDMITQKALG

SEQ ID NO: 8021 - protein, 260 aa, Bacillus halodurans C-125
MSETVGVEMLSSGVCKVTLIRPEAANALSVQLLEKLKDTLEALAFQKEVRAVVFTGAGDKVFCAGADLKERRRMEEEEVRRTVALIGETIEKVAKLPQPTIAAMNGTALGGGLELALACDLRVAAEESVYGLPETTLAIIPGAGGTQRLPRLIGVGRAKEMIFTGKRITGAEAYLIGLAQYACPLAKVETLALDLAKQMSANGPIALAQAKKAIDNGIETDLATGLELEKLAYERTISTKDRLEGLEAFKEKRKPQYIGE

SEQ ID NO: 8022 - protein, 358 aa, Sinningia cardinalis
METVAPLAPATTVCVTGAAGYVGSWLVMKLLERGYIVHATVRDPGNIKKVKHLLELPGAKTNLTLWKADMTVNGSFDEAIQGCQGVFHVATPMDFQCKDPENDVIKPTIEGVLSIIRTCAKAKTVRRLVFTSTAGALNVAEQRKSVYDENNWSDLDFIYSKKMTGWMYFASKVLAEKAAWEAAKEYNIDLVSIIPTLVVGQFNTPTFPPSLITALAPITGNESHYWIIKQGQYVHLDDLCEAHIFLFEEPKAEGRYICSSHDATIYDLANMIRDKWPEYNIPTEFEGIDKDIPLVRFSSKKLVEMGFTFKYTFEDMYRGAIETCREKGMLPYSTQICSNGDQEIDLVPSKGIPMIKTK

SEQ ID NO: 8023 - protein, 294 aa, delta proteobacterium MLMS-1
MSAKIISGTEVAKAIRAELQQEVAELKDKHGVVPGLVTILVGEDPASQSYVAAKNKTAKELGINSEQITLPADTPESELLQLVNKSNNDPKVNGILVQLPLPKHIDEAKVLDAINPDKDVDGFHPVNVGRMVLGEQCFLPCTPHGILEMLTRSGVETSGAEVVVIGRSNIVGKPIANLMLQKRDGGNATVTLCHTRTKDIAAHTRRADIIIAAVGVPRMLTADMVKDGVAVIDVGVNRMGVSESGKAILAGDVDFEAVKEKASCITPVPGGVGPMTITMLMKNTVQAARRAAGV

SEQ ID NO: 8024 - protein, 317 aa, Streptomyces avermitilis MA-4680
MARDYYEVLGVSRSASQDEIQQAYRKLARRHHPDVNKDPGAEERFKDLNEAYSVLSDPKTRARYDRFGEDFRKIPEDFDERVAAGAGGGFRGRRTAGGGGPRVRYAPGFGDDFGAEGIDIEDLFGSMFGAGAARGGVPGADQEAELPLTVEEAYRGGRRTVTLAGPDGQPRRYEVDVPPGVTDGQRIRLAGEGGRGSGDAAAGDLYLRVRIQPHPRFRLDGRDVHVQVPVAPWEAALGATVPVPTPGGGTAKVTVPAGSSSGRRLRLRGEGMPNPRGANGDLYAELRIVVPPTLGDQERELFEELAATSSFDPRRTR

SEQ ID NO: 8025 - protein, 372 aa, Sinningia cardinalis
MAPIATTLTALAEENSLHQKFIRDEDERPKVAYNQFSTEIPIISLAGIDETNGHHREEICKKIVEACEDWGIFQVIDHGIDSKLINQMTCLAREFFALPSEEKLRFDMSGGKKGGFIVSSHLQGEAVQDWREIVTYFSYPIKARDYSRWPDKPEGWKATTEAYSEQLIKLASKLLEVLSEAMGLEKDALTKSCVDMDQKVVVNFYPKCPQPELTLGLKRHTDPGTITLLLQDQVGGLQATKDGGKTWITVQPIEGAFVVNLGDHGHYLSNGRFKNADHQAVVNSNCSRLSIATFQNPAPEAIVYPLKIRDGENSIMEKPITFLEMYKRKMSNDLELARIKKLSKQNNVKEEELVENSHGSEKSSKDLEQILA

SEQ ID NO: 8026 - protein, 356 aa, uncultured crenarchaeote
MSDAHSFTGKKIEPPLISKNMTISQLVDFFGSTGYNARRLFEAANIMKQMIDAGSTICLTLAGAMTPIGMGNTIKTLIENGYIDWIVTTGANVYHDLHFAYDLPVRQGHFQVDDDVLFSKQIVRIYDVYIKEIGTLQAQDLIVQREIKKIEKSYSKSYSTADMSHGLGKATYENSTNPEKSFLASAYKNDVPVFIPAISDSSIGLNMLPLLFEDMTRFPNVIMDIAESTAILWKSKVSGGIELGGGVPKNFFQQTGPALYQILKLKDGGHDYVIQITDARPDTGGLSGATIQEGKSWGKIKTSHKNNVIVYGDSSICFPIIGAYVLSECKKRSSKRLYSKKNAWVEEMKKEYLKNK

SEQ ID NO: 8027 - protein, 591 aa, Streptococcus oralis
MTQGKITASAAMLNVLKTWGVDTIYGIPSGTLSSLMDALAEDKDIRFLQVRHEETGALAAVMQAKFGGSIGVAVGSGGPGATHLINGVYDAAMDNTPFLAILGSRPVNELNMDAFQELNQNPMYNGIAVYNKRVAYAEQLPKVIDEACRAAVSKKGPAVVEIPVNFGFQEIDENSYYGSGSYERSFIAPALNEVEIDKAVEILNNAERPVIYAGYGGVKAGEVITELSRKIKAPIITTGKNFEAFEWNYEGLTGSAYRVGWKPANEVVFEADTVLFLGSNFPFAEVYEAFKNTEKFIQVDIDPYKLGKRHALDASILGDAGQPAKAIPDKVNPVESTPWWRANVKTNQNWRDYMNKLEGKTEGELQLYQVYNAIHQHADQDAIYSIDVGDTTQTSTRHLHMTPKNMWRTSPLFATMGIALPGGIAAKKDNPNRQVWNIMGDGAFNMCYPDVITNVQYDLPVINVVFSNGKYAFIKDKYEDTNKHLFGCDFPNADYAKIAEAQGAVGFTVDRIEDIDAVVAEAVKLNKEGKTVVIDARISQHRPLPVEVLELDPKQHSEEAIKAFKEKYEAEELVPFRLFLEEEGLQSRAIK

SEQ ID NO: 8028 - protein, 418 aa, Schizosaccharomyces pombe
MSVSEANGTETIKPPMNGNPYGPNPSDFLSRVNNFSIIESTLREGEQFANAFFDTEKKIQIAKALDNFGVDYIELTSPVASEQSRQDCEAICKLGLKCKILTHIRCHMDDARVAVETGVDGVDVVIGTSQYLRKYSHGKDMTYIIDSATEVINFVKSKGIEVRFSSEDSFRSDLVDLLSLYKAVDKIGVNRVGIADTVGCATPRQVYDLIRTLRGVVSCDIECHFHNDTGMAIANAYCALEAGATHIDTSILGIGERNGITPLGALLARMYVTDREYITHKYKLNQLRELENLVADAVEVQIPFNNYITGMCAFTHKAGIHAKAILANPSTYEILKPEDFGMSRYVHVGSRLTGWNAIKSRAEQLNLHLTDAQAKELTVRIKKLADVRTLAMDDVDRVLREYHADLSDADRITKEASA

SEQ ID NO: 8029 - protein, 367 aa, Sinningia cardinalis
MAPSPRVEILASSGNQSIPMEYVRSKEELKSMCTDIFLEEKSNEGPQVPIIDLKAISAEDEDTRKKCHEELKKAAMEWGVMHLINHGVSEEIISRVKIAGKEFFELPVEEKEKYANDQAAGNLHGYGSKLANNANGMLEWEDYFFHCIFPEEKRDFSIWPENPTDYIPSVSQYGKQLRGLATKILSVLSLGLGLEEDRLENEVGGMEELLLQHKINYYPKCPQPELALGVEAHTDISALTFILHNMVPGLQLFYQGKWVTAKCIPNSIIMHIGDTVEILSNGKYKSILHRGSVNKEKVRISWAVFCEPPMEKIVLKPLPETVSQDKPPLFPPCTFAEHVKHKLFRNGSEDAAVDKKSIGDECKEARG

SEQ ID NO: 8030 - protein, 151 aa, Streptomyces avermitilis MA-4680
MGGMSTMQATTVSCPNCGRTNRVPVAAEGRPKCGHCKQPLPWMVDASDDDFTEVAERADVPVVVDLWATWCGPCRMVSPALEKVATDLAGRIKLVKVDIDKNPRLSRRFEVQAVPTLLVLDQGETVARQAGAAPAPVLRQWVEQSITAREG

SEQ ID NO: 8031 - protein, 192 aa, Ustilago maydis 521
MAAKVYVGNLSWNTTDDSLAHAFSTYGQLTDYIVMKDRETGRSRGFGFVTFATQAEADAAIAALNEQELDGRRIRVNMANSRPAGGMGGGYGGVTGQYGANAYGAQGGYGGYGGQPGGFQQPGGFQQQGGYPQQGGYGGYQQPGFQPQQGGYGAPQQGYGAPQQGGYGGYGAQQGFQQPAQQNSGSYNGQGY

SEQ ID NO: 8032 - protein, 616 aa, Streptomyces avermitilis MA-4680
MALVLRPRGVRLMSGDQPLPGEEPVPEEADEAVFLETPDIYGAYPRLTEDQIARLAEHGQRRSMAPNDVLIREGERCETLFVVLSGSVAVVEDHGTPEEHVLRVHGPGRFIGELGLLYGQVAFYTAVAREPGEVLVVSLDQLRRLVSQDSTLGDLVLRACLGRRALLVGQGAGFRIIGSRYSPDTRRLREFAVRNRLPHRWIDLETDEEAEDLLRRFGVGPEETPLVIWRDTTLLRNPSNAELARLIGLPSLPAGNRHGDVLIVGSGPGGLAAAVYAASEGLSTTVVEAMATGGQAGTSSRIENLLGFPAGISGAELTERAVLQADKFGARISIPVEASGLHPKDEDHYVVAFADGSEIAARAVVLATGARYRRLQVPGIERLEGTSVHYSATVYEAQQCRTDPVAVVGGGNSAGQAVLFLAGYAPKVHLLVRGPSLEANMSRYLVDQVERHPRVEVMLHTEVTEVIGQEVLEELDVVDNRTGGHRRLAVRGLFVFTGADPHTEWLAGIIALDSRGFVLTGPEAQEACAHPEVWHGRGRSCMTLETSLPGVFAVGDVRSGSVKRVASAAGEGAMAIHFVHRHLGHSAAPGPTGTSAAAGGSDVSPRIRHKESAWLA

SEQ ID NO: 8033 - protein, 329 aa, Candida glabrata CBS 138
MTRESINIGGRRSKLAVVQSNHVRDLVQAKFPQYDCTVFTLQTLGDQIQFKPLYSFGGKALWTKELEDYLYCEDQEKRLDLIVHSLKDMPTLLPDGFELGCVTKRVDPTDCIVMPRGSPHRCLADLPEGAVVGTSSVRRSAQLKRKFPHLKYQSVRGNIHTRLEKLDDPEGPFQCLVLASAGLVRMGLEDRITQRLHSDIMYHAVGQGALGIEIRQGDKKILQILDEIADLESTVCCLAERSLMRTLEGGCSVPIGVESSYDHKTKKLLLKGIVVNVEGTMAIEDQQEVVVNDIREDSIKCGVLLAHKMIKDGAKKILDEINLERVIQQ

SEQ ID NO: 8034 - protein, 674 aa, Oryza sativa
MNPKLLFFPLLATLLLLCHHAHAVCEPATCGDLTIKYPFWLSGPDLNRSSLAIAACGHPSFELWCSRDGVASLRGSQILVLGIDYTNSSFVAGHKRVADGGDGVCRTDFNISSSLALSPFTISSSNRAICFLYSCNGTEPPEIDGLVNATISNCSKPIYAYLGGSYDRDKPPAIKAGNCTYSYLPVLWPESPVNLTAGTNYSPLFKKGFVLEWQKNGFGDCDACNASGGQCRYNNDSAAAFACLCSDGELRGTICAGSKKTGRRTILIVLTAAAAGLLLPCIYVLIWHGKGKQLRYFLYTKTSSTSERNIEALIISYGSIAPTRYKYSEVTKITSFLNYKLGEGGYGVVFKGRLQDGRLVAVKFLHDSKGNGEEFVNEVMSIGRTSHINIVSLFGFCLEGSKRALLYEYMPNGSLDDYIYSENPKEILGWEKLYGIAIGIARGLEYLHHSCNTRIIHFDIKPQNILLDQDFCPKIADFGLAKLCRTKESKLSMTGARGTIGFIAPEVIYRSFGIVSTKSDVYSYGMMLLEMVGGRKNAKSMVENSSEKYFPDWIYDHFALDDGLQACEVTSEVEQIAKKMTLIGLWCVQVLPMHRPTITQVLDMFERSLDELEMPPKQNFSELLEHPAQEINTESTSSTINTKAAQALSEVLRVEETSLVNSKDPTVTTNYAKR

SEQ ID NO: 8035 - protein, 1128 aa, Magnetococcus sp. MC-1
MDFYAHFFMSPAQRGVAVYEGIYDPLLVTLSVLIAVFAAYTAFQLSSRLRDSENAKVLLAWRAGGALALGMGIWAMHFVGMLAFRLECGVAYDLWITFISILPGFGAAWLALGVLGRATLSWPLLVSRGVVMGAGIGTLHYTGMAALQMDAILRYDPWLFMLSVVVAILLAVVALSVKSFLQYRTALGPGHLSSLIGGVIMGGSISGMHYTAMEAAYFIPQGETGVAVYNSPLPLAISVAVATLTLLLIALGSALASRRIAHSRRWMNSILQNMSQGFVMMDLQGRILEANPALLSWVALSPSQVQGEPFQKLLSVQDHQPLQLALQQLLEGQPVRCALSLCCLDAPPIPVQMHGNTHRDEEGQIMGIYAILTDIRAEQAAAKALRDARDAAEQASQAKGEFLANMSHEIRTPMNAILGMTHLCLQTDLNERQRHFLEKVYAAGSALLRILNDILDFSKIEAGSLEIEKTSLKMDEVLASLADLMSIRADEKKIELLFHRDANLPEILVGDPLRLGQVLINLVGNALKFTEQGEVVVRIEVIQSAERQVKVRFSVKDTGIGLTNEQMSNIFQSFKQADSSTTRRYGGTGLGLAISHRLVQLMGGVLKVESTPGQGSCFSFTLDLGVTQPTSLLSRLQLPSGLQVLVVDDNVLSQHILHDILQGFGCQVQVASSGEEALLLLAQLEGPFDFILMDWQMPGLNGIETAQRIYQKFAKVEMPTIIMVTAHGREEVMQKAREAKLDGFLMKPVNPSMLLEVILQLQRKRHGTGPLLESRSEQKNFRIEVPNLQGKHILLAEDNDLNVEVVQEMLSPSGVTLSCVSNGLRAVEAVQKRSYDLVLMDLQMPVMDGREATKQILGLGLDQPPPIIALTANALSGDRERCMALGMVDHIAKPLVPELFYATIKRHLGDVTTRVVRSVAPAPELPSGAPPGVDLEQAWLGLNRNTLLLNKLLHGVCDQWPEQMRLLEGWLADPQSHHLAINQAHGLRGLASQLRMEKVATLAGRLEQGLKQGEANMEACLAPLQQAVMVVVNWLKENLDTPPPEPPRRDATALDMDKAALKTQVAEIMIHLDQDLAEGLRQLREVLNRMPSGEPEALLREALNHAEGFDVPEAKAALMALQAMLQKG

SEQ ID NO: 8036 - protein, 323 aa, Coccidioides immitis RS
MPPRVLIFSAPLRQLPFRQVRGNATLGTSAHGAVINVQQIPAPGAGHIRVLLLNRPEARNAISKQLLSSLGAHIDSISAERGVGPTRALIVASNVDASFCAGADLKERAKFTREETDAFLAQLRQTFANLEALQIPTISAISSMALGGGLELALSTHLRVFGSTSIVGLPETRLAIIPGAGGTHRLPRLIGQNRALDMILTGRRVSAPEAYFIGLCNRLVEISPEEQAQAGAAREKVLHESIKLALDICEGGPIALKQAVKAVTGYERGQEGENEAYLGVVDTEDRWQSTVLSHDTSPVATQQAKRNDVICETVMMFEAEWHS

SEQ ID NO: 8037 - protein, 515 aa, Candida albicans SC5314
MLEEISFESWYLYLIICGVLYFCTNYLYIQYLNKKLGAKSPGSCKSDGCFGFRSGFEMLKAKKIGRQVDLLHERFNDLSNPEVNDTFTSYNFGFPMIITKDPENIKALLATQFNDFSLGRRYDFFKPLLGKGIFTLDGEGWKHSRSMLRPQFAREQIAHVKALEPHFQLLKKHITKNKGQFFDIQELFFRFTVDSATEFLFGESVSSLKDESIGYNQDEFDFAGRKDFPEAFNKSQIYLSTRSLLQNLYWLVNPKDFQNCNAIVHKFSDYYVNKALNATPEELEKNSGYVFLYELVKQTRDPQVLRDQALNILLAGRDTTAGLLSFAVFELARNPQVWKKLREEIIERYADGATEISFETLKQCEYLKAVINETLRLYPSVPRNGRFANKNTTLPRGGGPDGMSPILIKQGQAVMYSIYSTQRDPKYYGKDADVFRPERWFEPETRKLGWAFLPFNGGPRICLGQQFALTEASYVLVRLAQCCENLQLTEGIEYPPAKLTHLTMCMFDGVPIKVD

SEQ ID NO: 8038 - protein, 389 aa, Oryza sativa (japonica cultivar-group); identical to SEQ ID NO: 412

SEQ ID NO: 8039 - protein, 631 aa, Vibrio sp. Ex25
MAIEINVPDIGADEVEVTEILVSVGDKVEEEQSLITVEGDKASMEVPASQAGIVKEIKVAEGDKVSTGSLIMIFEAEGAADAAPAPAAEAAPAAAPAPAAAAAELKEVHVPDIGGDEVEVTEIMVAVGDSIEEEQSLLTVEGDKASMEVPAPFAGTLKEIKVAAGDKVSTGSLIMVFETAGSGAPVAPAAAEAPATAAPAASAAKEVNVPDIGGDEVEVTEIMVAVGDTVEEEQSLITVEGDKASMEVPAPFAGTVKEIKIAAGDKVSTGSLIMVFEVAGAAPAPAAAPAQAAAPAAPAPKAEAPAAAAPAATGDFKENDEYAHASPVVRRLAREFGVNLSKVKGSGRKSRILKEDVQAYVKDALKRLESGAGAAASGKGDGAALGLLPWPKVDFSKFGETEVQPLSRIKKISGANLHRNWVMIPHVTQWDNADITALEAFRKEQNAIEAKKDTGMKITPLVFIMKAVAKALEAFPAFNSSLSEDGESLILKKYVNVGIAVDTPNGLVVPVFKDVNKKGIYELSEELMAVSKKARAGKLTAADMQGGCFTISSLGGIGGTAFTPIVNAPEVGILGVSKSEMKPVWNGKEFEPRLQLPLSLSYDHRVIDGAEGARFITYLNSCLSDIRRLVL

SEQ ID NO: 8040 - protein, 363 aa, Oceanicola granulosus HTCC2516
MSGKRLKLGILNGDDIGHEIVPASVEVARAAAGKAGLGIDWTDVPIGAAALESHGHTMPEGTMETLEGLDGWILGPIGHRDYPKVPGAINPHPILRKGFDLFANVRPTRSYPGIGCLFDDIDLVIVRENNEGFQPDRNVVAGSGEFRPTEDVTISVRVITVEGCRKVVRAALDIARSRPRKKLTLVHKNTVFKLGCGMFVDTAYEVAKEYPDVEVDECIVDTFAMRLLRDPWAYDTVVTTNMFGDILTDEAAGMVGGLGMAPGLCIGRGAKAMAQATHGSAPDIAGKGIANPYAMIESTRMLIEHLGRAHDLPEAVRAAAYMREGLDAALADPASRTGDIKGTGGTADMVAGIVAGIERAKAA

SEQ ID NO: 8041 - protein, 227 aa, Lycopersicon esculentum
MFRPEMPVVPLQRPDEGHGPSISWSQTTSGYEEPCDEQGVPTLISWTLDGKEVAVEGSWDNWKSRMPLQKSGKDFTILKVLPSGVYQYRFIVDGQWRCSPDLPCVQDEAGNTYNLLDMKDYVPEDIESIYGFEPPQSPDSSYNNLHLVSEDYAKEPPVVPPHLQMTLLNVSPSHMEIPPPLSRPQHVVLNHLYMQKDRSTPSVVALGSTNRFLSKYVTVVLYKSIQR

SEQ ID NO: 8042 - protein, 172 aa, Capsicum annuum
MASKGIALICMTLVTIMSTMISVEVMAQSDCTSTLITMASCLSFVTGSAKTPPASCCSSLSGVLQSNPRCLCVIVNGGGSSLGVQINQTQALALPSACNLQTPPVSRCYAGNAPVMSPEGAPTEGTPDSSTGVAVTGSKASGSSTSDGSSLKVPVRAAVAIVIFMASYISMI

SEQ ID NO: 8043 - protein, 311 aa, Mycoplasma gallisepticum R
MINNLFEEFLWNVLLCWWLWFNDQKRLIMFIKLDGTKLSQKLKEDLAKKVNNQKIKILIIISDPSEASRIYVRNKINYCDSLGIQTEVYDLSKIDDTNQFIVEMNQKISLSNPNGVLVQLPIKERLDTNKIIENIPIRLDVDAFLYHRFDQDQKEKVIPCVLNAVLELFKEYQLSFLDKKILLIGNGITSNQPIVNYLNEHQIKFDLITKENSQLLEEKTKVADLVISAVGKAKFLANYQFKRGVIFIDIGIDKYFDPEQSKYLICGDFDYDKLKEIASYGTPTPGGIGPLTIYSLVKNLINLSEIQKVNK

SEQ ID NO: 8044 - protein, 324 aa, Burkholderia xenovorans LB400
MSEADITAAPGELEVVVRVRTEEADGIASFELRTADGSALPSFDAGAHIDVHLPGPMIRQYSLCNPPGERHRYVIAVLREPSGRGGSARMHDLKVGDLLIISHPRNAFPLDAENGTKLLVAGGIGITPLKAMAHALTLRGIDFELHYFARSVSRAAFRDALATEPFAAAVRFHFDGDGASLPLADETLAPERIAHIYLCGPTGFIDKVREQAIARGFAAERIHVEHFSAENNASCGRSFVVEAVRSGATVTVGENESIARALERAGVQVLTSCEQGLCGACLTPVLEGIPEHRDEYQTAAEKAENAKITICCSRARTPVLRLDI

SEQ ID NO: 8045 - protein, 337 aa, Debaryomyces coudertii
  misc_feature (7)..(7): Xaa can be any naturally occurring amino acid
SRAGFPXIVGRPRHQGIMVGMGQRDSYVGDEAQSKRGILTLRYPIEHGIVKNWDDMEKIWHHTFYNELRVAPEEHPVLLTEAPMNPKLNREKMTQIMFETFNVPAFYVNIQAVLSLYSSGRTTGIVLDSGDGVTHVVPIYAGFSLPHGILRLDLAGRDLTDYLMKILSERGYTFTTTAEREIVRDIKEKLCYVALDFEQEMQTSSQSSAIEKSYELPDGQVITIGNERFRAVEALFRPSDLGLEAAGIDQTTYNSIIKCDLDVRKELYGNIVMSGGTTMFPGIAERMQKEITALAPSSMKVKIIAPPERKYSVWIGGSILASLSTFQQMWISKQKYD

SEQ ID NO: 8046 - protein, 358 aa, Ustilago maydis 521
MADFVKLSIFGTVFEVTTRYVDLQPVGMGAFGLVCSANDQLTSTSVAIKKIMKPFSTPVLSKRTYRELKLLKHIRHENIISLSDIFISPLEDIYFVTELLGTDLHRLLTSRPLEKQFIQYFLYQILRGLKYVHSAGVVHRDLKPSNILVNENCDLKICDFGLARIQDPQMTGYVSTRYYRAPEIMLTWQKYDVAVDVWSAGCIFAEMLEGKPLFPGKDHVNQFSIITELLGTPPDEVIKTICSENTLRFVQSLPKRERVPFSQKFKNADPMALDLLEKMLVFDPRTRISAAEALAHPYLAPYHDPTDEPEAEEAFDWSFNDADLPVDTWKVMMYSEILDFHNIDNSGQDEGPVPPVNN

SEQ ID NO: 8047 - protein, 409 aa, Acinetobacter sp. ADP1
MKRVVITGMGINSCIGNTLEDVTHSLQNGISGTRFNPTYAELNFKSHVSAAAEQNFDNIDRKLKRFMGVCAMYAYNSAVAAVEHAGLTAADLEGNPRYGIVGGSGGGSTASVVEMQELLETKGARKVGPFFVPRNMTNTITANVGVAFKLQGVSHSIASACATSADAIGYAYNLIQLGKQDLILAGGGEEDHWSQSLLFDAMGALCSKYNDTPETASRPYSKDRDGFVIAGGGGFLVLESLEHAQARGANILAEIVAYAANADGADMVAPSGEGATRCILMALEEAKQHGVDSLDYVNTHGTSTPAGDITELKAMERAFGEGKVPAFSSTKSMTGHSLGAAGVHEAIYSVLMLQNEFIAPNINVTELDEGAKGFDIVLEKRDTKLNAVMSNSFGFGGVNACLIFKKWDQ

SEQ ID NO: 8048 - protein, 1613 aa, Oryza sativa
MAMLTAKLTSPPAATTWLPGGGRRSAPPRRATVIRAAAVSYADELVSTAKSVASPGRGILAIDESNATCGKRLASIGLDNTEVNRQAYRQLLLTTAGLGEYISGAILFEETLYQSTTDGKKFVDCLKDQNIMPGIKVDKGLVPLPGSNNESWCQGLDGLASRRTVVSIPCGPSALAVKEAAWGLARYAAIAQDNGLVPIVEPEILLDGDHAIERTLEVAEKVWSEVFFYLAQNNVLFEGILLKPSMVTPGAEHKQKATPEAIAKHTLTMLRRRVPPAVPGIMFLSGGQSEVEATLNLNAMNQEPNPWHVSFSYARALQNSVLKTWQGRPENVEAAQKALLVRAKANSLAQLGRYTGEGESDEAKKGIRHALRPDPPTPRRRLSPESELSALNPPQTPAVQIPPEPSSRPPAAAAAAPEAEGAEALHEISGPAAAAARLVMLLASCLRGRLRLHRRPRPLIMPSPLFLSRNPNPSPPRSATATGTTILSPPSTSASASMSTSGVYVPPMRRLRSVIASTNGSLAPPPSAAAQAQPGGSTLDNIDEWKWKLHMLLRNEDEQEVISRERKDRRDFEQLSQLAERMGLYSRQYSRIVVFSKVPLPNYRSDLDDKRPQREVSIPSGLQREVDALLSDYLARKRTSSGSFPNAAFSRSSSTDSFATDESFLEQQDNQTSTSAVIERIQRRKSLQLRNQQESWQESHDGQSMMEFRRSLPAYKERQTLLEAIAQNQVVVVSGETGCGKTTQLPQYILESEIDAARGATCSIICTQPRRISAIAVSERVAAERGEKIGESVGYKVRLEGMKGRDTRLLFCTTGVLLRRLLVDRNLKGVTHVIVDEIHERGMNEDFLLIVLKDLLPRRPELRLVLMSATLNAELFSSYFGGAPMIHIPGFTYPVRSRFLEDILEITGHRLTPYNQIDDYGQEKSWKMQKQALRKRKSQIASVVEDTVQAADLRDYSARTRDSLSCWNPDSIGFNLIENVLCHICQKERAGAVLVFMTGWDDINALKEQLQANPLLGDPSKVLLLACHGSMASSEQKLIFDRPEPGVRKIVLATNLAETSITINDVVFVVDCGKAKETSYDALNNTPCLLPTWISKASARQRRGRAGRVQPGECYHLYPQCVYEAFADYQLPELLRTPLQSLCLQIKSLRLGSISEFLSRALQSPESLSVENAIEYLKVIGAFDRNEELTILGKHLSMLPVEPKLGKMLIFGAIFNCLDPILTIVSGLSVRDPFLTPFDKKDLAESAKLQFSCRDYSDHLALVRAYEGWREAERDRNGYDYCWKNFLSVQTLKAIDSLRRQFLFLLRDTGLVDENMTACNKWSRDENLVRAVICAGLYPGVSSVVNKEKSISLKTMEDGQVMLYSSSVNGKETKIPFPWLVFNEKVKVNSVFLRDSTAISDSILLLFGGNIKQGGLDGHLKMLGGYLEFFMSRDLASTYLSLKSELDNLIHCKLQNPRMDIQTSEELLSAIRLLVTEDPCNGRFVYGRQEQRSKKAKTMFSAAPMSHGGGGNGGDNAKNQLQTLLTRAGHDNPSYKTKQIKNSLFRSTVEFNGMQFVGQPCANKKLAEKDAAGEALNWLTGGAPSDSRDPQDMDHMSMLQKPPRRKRHHHRRG

SEQ ID NO: 8049 - protein, 579 aa, Zea mays
MGGGGAIVHGFRRWFHRRSEGSTSNSNQSSLAGEGEADDGSSDLEVIEDPDLLGLRAIRVPKRKMPLPVESHRKNSVEMEFFTEYGEASQYQIQEVIGKGSYGVVAAAVDTRTGERVAIKKINDVFEHVSDATRILREIKLLRLLRHPDIVEIKHIMLPPSRREFQDIYVVFELMESDLHQVIRANDDLTPEHHQFFLYQLLRALKYIHAANVFHRDLKPKNILANSDCKLKICDFGLARASFNDAPSAIFWTDYVATRWYRAPELCGSFFSKYTPAIDIWSIGCIFAELLTGRPLFPGKNVVHQLDIITDLLGTPSSETLSRIRNEKARRYLSCMRKKYPVPFTHKFRHADPLALRLLERLLAFDPKDRPSAEEALADPYFASLANVEREPSRHPISKLEFEFERKKLAKDDVRELIYREILEYHPQMLEEYMKGGEQISFLYPSGVDRFKLQFAHLEEHYSKGERGSPLQRKHASLPRERVVVSKDGNTEQQINDQERSADSVARTTVSPPRSEDADMDDVKPTSLSSRSYLKSASISASKCVVVRNKHPEPEDDGIPEEMEGTVDGLSEKVSRMHS

SEQ ID NO: 8050 - protein, 315 aa, Leuconostoc mesenteroides subsp. mesenteroides ATCC 8293
MNKKGLLLVNLGTPDSPHPDDVKAYLKEFLSDTNVIQMPRLLWQPILRGKILPKRSFKSAELYQKIWRKDGSPLMVYAKKQVEQVQQLQPNWIVRCAMTYRKPNIAETLKEMRLAGADDIVVLPLFPQYSVTSTQSVIDQVRKADKNINIVKSFYNDEAYLDLLARDIREAWAKNDYDRLIISYHGVPESYVRRGDPYVDHCTATTQGVLERVGPLTPDNTHQVFQSRFGPTEWVKPYLSDTLRSLPSQGIKRVLVATPAFVADCLETIEEIHVENHDIFKQAGGEVFDVVQPFNEHIDFSKYIASLANRHFAQN

SEQ ID NO: 8051 - protein, 119 aa, Brassica napus
  misc_feature (24)..(24): Xaa can be any naturally occurring amino acid
  misc_feature (67)..(67): Xaa can be any naturally occurring amino acid
RSTLRVEHASDETSRLFTMPYQKXSDGHEHLAGLSDDVGAGFITGHGNETASSSSELTVDQATDLPXQDETGLTGVSKLITADQKRFIIDRGNSIRSHFLKISEVDGSDRSSIILPLSG

SEQ ID NO: 8052 - protein, 375 aa, Spirochaeta aurantia
MAKQNFVRSKPHINVGAIGHVDHGKTTLTAALTMYGAKKHGGKVMNYDDIDNAPEEKERGITINTRHVEYESAARHYAHVDCPGHADYVKNMITGAAQMDGAILLVAADSGPEPQTREHILLAKQVGVANLVIFLNKMDLADPELVELVEMEVRDLLNLYGFDGEKTPFIRGSAFAAMSKPDDPAATKCLDELLDTMDKYFVIPERALDKPFLMPIEDVFSISGRGTVVTGAIAQGKVKVGDTVEIVGIKPTQTTVVTGVEMFNKLLDAGQAGDNIGALLRGIEKNQVERGQVLAAPKSITPHTNFKATIYCLSKEEGGRHNPFFSGYRPQFYFRTTDVTGTVTLPEGKQMVMPGDNTELVVELITPMDKGSRFA

SEQ ID NO: 8053 - protein, 147 aa, Arabidopsis thaliana
  misc_feature (72)..(72): Xaa can be any naturally occurring amino acid
  misc_feature (84)..(84): Xaa can be any naturally occurring amino acid
MASSMLSSATMVASPAQATMVAPFNGLKSSAAFPATRKANNDITSITSNGGRVNCMQVWPPIGKKKFETLSXLPDLTDSELAKXEVDYLYPEQSGIPLWLNSSLEQRDLCTREQRVNLTRVLLMDRYWTNVGGFPFVRVATGFRSKC

SEQ ID NO: 8054 - protein, 969 aa, Magnetococcus sp. MC-1
MSVHSHDDVGHFDRKLAVSFGAVVLLVMLTVSAVSWYAFDAIMKDQEARLARIIGSVVGEAVGRVSFSGKHHTRLLVKDLIAKNPQFSHIGVINLEDQIIAHSNDQLNDRPMLWPQGMSLQKALTEPNQVYHFSLFGRPTVRELFLPYHSGFNNRLAGIIHIGIRQDATTRALKSGFLSLLSMIALLTMGAMILVHRLSKRYSRPVKRLANQMAALLEHAPMLIAIQKGQQQPHVTSRLWHQFYRTHPLPDQPPLHPLLPTKQEDLTKINSSAQELNVTLDGHEYHFLFTRFILSEELQEHAQPQICTIALDISDHKLVERQLSESENRFHSLVSNLPGAVYRCNLDSAWSMLFISDGIERISGYPKESFIHNLERSFASIIHKDDLIMVEQKVFEGVNLNRSYHMEYRIIHQDGATRWVYEEGRAHFGKHGQALWLDGVIFDITDRKQMEHTLHQNRTRLQAAVVASRAGTFYYTIENDQNSWDARMLEIYGLEASQFDNNYAAWVRCIHPEDQHSTEQAFFRALSASYHTQTYDIEHRIVRPDGSIHHLRTQAWIQRDSQGKAEQVSGLVFDITEQKEVETTLRLAREQAESANRAKSDFLAAMSHEIRTPMNAVIGMGEVLLETKLDQEQRHYIETLQHAGEALLDLINAILDLSKIESGRMELVEQDFDLHKMVVETCQLFQVQCRKQGIELNLNWEESNPTYIHGDQARIRQILFNLIGNAVKFTDEGSVTVEIRSIEQEKTLLFKITDSGIGIPADKQETIFQKFSQADSSLSRRHGGSGLGLTICRHLVEHMKGRIWVDSEEGQGSCFSFTLPCRPTAPKAEIISNPHDAQQKQSKKARILLVEDSKDNQILIRTYLKREPHSLVVAWDGEEALTRFNEDGPFDLIFMDMQMPIMDGYAATAHIRALEQARHLTATPIVALTAHALQGDEQRSLQAGCNAHLTKPIRKAHLLAAIRDHANPS

SEQ ID NO: 8055 - protein, 584 aa, Fusobacterium nucleatum subsp. nucleatum ATCC 25586
MEINKRIEKARKVMKKYKVDAYIITSSDYHQSEYIDDYFKGREYLSGFTGSAGILVIFKDEACLWTDGRYHIQAEKQLKGSEVKFFKQGNLGVPTYQEYIISKLAENSKIGIDAKILLSSDINEILSKKKYKIVDFDLLAEVWDKRKKLPNGKIFILEDKYTGKTYKEKVKEIRATLKEKGANYNIISSLDDIAWIYNFRGCDVIHNPVALSFTIISEKKSTLYINEKKLDKKAQKYFKDNKVEIKEYFEFFKDIKKLKGNILVDFNKISYAIYEAINKNTLINSMNPSTYLKAHKNKTEIANTKKIHIQDGVAIVKFMYWLKNNYKKENITEFSAEQEINSLRKEIEGYLDLSFHTISAFGKNAAMMHYSAPEKKSAKIGDGVYLLDSGGTYLKGTTDITRTFFLGKVGKQEKIDNTLVLKGMLALSRAKFLFGATGTNLDILARQFLWNVGIDYKCGTGHGVGHILNVHEGPHGIRFQYNPQRLEVGMIVTNEPGAYIEGSHGIRIENELLVKEAYETEYGKFLEFETITYAPIDLDGIVKTLLTKEEKQQLNEYHSEVYKKLSPYLNKKEKEFLKEYTKSI

SEQ ID NO: 8056 - protein, 426 aa, Pichia pastoris
MSGDHKSFTVFNQEFIIDRDFELIKALGQGAYGVVCSAQYKGNEDGGKVAIKKVTNIFSKKILAKRALREIKLLRHFRGHKYITCLYDLDVIPDQNNNFNEIYLYEELMECDLHHIIKSKQPLTDSHYQSFIYQILGGLKYIHSADVLHRDLKPVNLLVNSDCELKICDFGLARGYSSDAEKNAGFLTEYVATRWYRAPEIILSFQTYTKAIDIWSVGCILAELLGGRPIFRGRDYVDQLNLILSTLGTVSEETLQSIRSERAQDYVRSLPFMPKIPFSQLFPGANPEAIDLLDRMLTVDPTHRITVTEALEHPYLKVWHDPNDEPVCSSKFDFSFEVVDDIETMKQMIVDEVLSLREFVRRPIQEQQLPFTEPDKHFDVSFDQPQIEPPAENYRDDHLPRPHELESQILDLEHELQYGLDRYGTQ

SEQ ID NO: 8057 - protein, 82 aa, Brassica napus
MSDKGRPLPKFGEWDVNDPASAEGFTVIFNKARDEKKTGGKPGSPGKSTDGHAKSGGGGGGDPSKPQPKKWLCCMQSPAVDS

SEQ ID NO: 8058 - protein, 822 aa, Leptospira interrogans serovar Copenhageni str. Fiocruz L1-130
MNMRFLLLYIIFLFHYSLMAESLSPVSGKISQLQKDSSLSFFVYYFSSDSDENFRERIFAKDSSLSFQNIPAEVFSLGFTSNTAWFYIPLKNDTKKDYRGEFEIFNPYLEEVDIFYRYGSKDSIHEILAGTSRVYEKSFPALNFYLRPGEEIQIVCKIKSGTPMRIPIVLESEENFNFTKLFRAILFGLTLGFGIAMGLYNFSLYMFFRTRSYLYYFIMILFSTVYLTSWDGLISPLFKPNYGRYYLPFILVLFYTSALFLFLFSMEFLYPEKKERYVKIIIFLYVVVNLLLIPLSIFYPTHLNRISYYLGLVNNLIIVYFCIVRIRGGFKSAKNFLIIHLVFPVAGILTNLSTFGAISIDYLSLHLLKLAFISQSVLFSVMLVQRIKELEFRLKDGLQSEIHKNIVLLKKEIQQRRETEWELIQAKEVAEKASKVKSNFLANMSHEIRTPMNGVLGMVQLLGTTKLNDEQKEYVEVLSVSAKSLLQIINDILDFSKIEAGKVILEREVFSIRSVLDEIHDLLYPLAKQKEINFRLEGKLEIQEYVYGDPLRLRQILWNLAGNGIKFTSRGEVVLKVTQKNISKSSVSIEFTVMDSGIGIPLEKQKQVFEAFSQNDTSTARKFGGSGLGLSITKQLVELQGGVLKLESKDGEGSKFTFTIDYDIPSALEIEKILEAEKTKDLEKSFQDVVAKSTRILVAEDNETNCLLIERALKKLGYDPTVVHNGREVIERMQLEAFDIILMDIHMPEVDGIEATKWIRSKNQNSEFPIIIALTADAIESSKEKYISKGMNDCLTKPLDLPILKSTLDLWSNRVDVSHWKL

SEQ ID NO: 8059 - protein, 316 aa, Leptospira interrogans serovar Lai str. 56601
MAHKIVIIGSGPAGHTAAIYAARANLNPVMYEGFMAGGIAAGGQLTTTTEVENFPGFPEGIDGTKLTQLFREQSIKYGTKIITQTITKVDFSSKPFKLWSDDELIEAQAVIIATGATAKRMNVIGEDIYWQRGISACAVCDGALPIYRNKELVVVGGGDSAVEEASHLTKFASKVYLVHRRDSLRASKIMQKRATTHPKIEIIWNSQVKEAKGDGKSLTSLTLENTTNGQKKELPVGGLFYAIGHKPNTDIFQGILDLDESGYIKTVPGSTKTNIEGIFAAGDVQDKIYRQAVSAAGSGCMAALDAERWLESREEE

SEQ ID NO: 8060 - protein, 481 aa, Porphyromonas gingivalis W83
MQENNNILDEVTGSEYKYGFVTDIETETIGRGLSEDTVRLISAKKEEPEWLLEFRLNAYRHWLSMKEPDWAHLNIPPIDYQDIIYYAAPKKKKGPKSLDEVDPELLKTFDKLGIPLEEQKILSGMAVDAVMDSVSVKTTFKEKLAEKGIIFCSFSEAVKDFPDLVKKYLGTVVSSKDNFFAALNSAVFSDGSFVYIPKGVRCPMELSTYFRINAANTGQFERTLIVADEDSYVSYLEGCTAPQRDENQLHAAIVEIIAETNAEVKYSTVQNWYPGDKEGKGGIYNFVTKRGVCKGDNSKISWTQVETGSAITWKYPSCVLRGDNSIAEFYSVAVTNNFQQADTGTKMIHLGKNTRSRIVSKGISAGSSQNSYRGLVKISKNAVNARNHSQCDSLLLSDHCGAHTYPYADVQNDTAIIEHEATTSKISEEQIFYCNQRGIGTEEAVGLIVNGYAKEVMNKLLMEFAVEAQKLLSISLEGSVG

SEQ ID NO: 8061 - protein, 320 aa, Oryza sativa (japonica cultivar-group)
MDMATGAKEVVVVEAYEYEFDLENPFTSPADEPIASLLDAEGHHSPSVSAAASAARREAAGFISKVRYDGELDVHPRVAYLALNYVDRYLSKRQLACERNPWAPRLLAISCLTLAAKMQRAAAISAADIQRGEEFMFDEAKIQRMEQMVLNALEWRTRSVTPLAFLGFFLSACFPQPRHPALLDAIKARAVDLLLRVQPEVKMAEFSPSVAAAAALLAAAGEVAGAHLLGFEAGVAACPFVNSEKLRECGEVMAAACGVGPSWAAAATSAETPVTVLGHHRSASSESERTTTVGSAANSADAKRRCMGPPRQWGVGGPDE

SEQ ID NO: 8062 - protein, 957 aa, Pseudomonas putida KT2440
MSQSPSLHQLQELNPFLRRHLGPDATEQQAMLNALGIASRNELIEQTVPPDIRLNRPLDLPAALDEQAALAKLAGYAEQNQVWTSLIGMGYHGTITPTVILRNVLENPGWYTAYTPYQPEIAQGRLEALLNFQQMVIDLTGLPLANASLLDEATAAAEAMALAKRVARNKSNAFFADEHCHPQTLSVLKTRAEGFGFELIVDSVDNLAKHSVFGALLQYPDTHGEVRDLRPLIDQLHSQQALACVAADLLSLVVLAPPGELGADVVLGSTQRFGVPMGYGGPHAAYFACRDDYKRAMPGRIIGVSRDARGNTALRMALQTREQHIRREKANSNICTAQVLLANIAGFYAVYHGPEGLQRIAQRVHRLTFILAAGLEAKGIKRLNQHFFDTLTLNVGGAQAAIIESAEAAHINLRILGRGHLGVSLDETCTEQTVLRLLDIFLGVDHGLEITALDQLALPEGIPASLVRRTPFLAHPVFNLHHSETEMLRYLKQLENKDLALNQSMIPLGSCTMKLNATSEMIPITWPGFAQLHPFAPAAQAAGYKAMIDELESWLCAITGFDAICMQPNSGAQGEYAGLMAITRYHCSRHQPMRTLCLIPSSAHGTNPASAQMAGMEVVIVDCDNDGNVDLADLKAKAHAAGERLSCLMITYPSTHGVYEEGIREICDVVHQYGGQVYMDGANLNAQVGLARPADIGADVSHMNLHKTFCIPHGGGGPGMGPIGIRAHLKPFVASHPVVPVPGLDPNNSAVSAAPWGSASILPISWMYIAMMGPQLADASEVAILSANYLASQLGAAFPVLYRGRNQRVAHECILDLRPLKALTGISEEDVAKRLMDYGFHAPTMSFPVPGTLMVEPTESESKAELDRFVEAMLAIRAEIDEVQQGNWPAENNPLKHAPHTLADVLGVWDRPYSLEQAVAPSAHVRQHKYWPAVNRVDNVYGDRNLFCACVPVEAYR

SEQ ID NO: 8063 - protein, 466 aa, Escherichia coli K12
MDQKLLTDFRSELLDSRFGAKAISTIAESKRFPLHEMRDDVAFQIINDELYLDGNARQNLATFCQTWDDENVHKLMDLSINKNWIDKEEYPQSAAIDLRCVNMVADLWHAPAPKNGQAVGTNTIGSSEACMLGGMAMKWRWRKRMEAAGKPTDKPNLVCGPVQICWHKFARYWDVELREIPMRPGQLFMDPKRMIEACDENTIGVVPTFGVTYTGNYEFPQPLHDALDKFQADTGIDIDMHIDAASGGFLAPFVAPDIVWDFRLPRVKSISASGHKFGLAPLGCGWVIWRDEEALPQELVFNVDYLGGQIGTFAINFSRPAGQVIAQYYEFLRLGREGYTKVQNASYQVAAYLADEIAKLGPYEFICTGRPDEGIPAVCFKLKDGEDPGYTLYDLSERLRLRGWQVPAFTLGGEATDIVVMRIMCRRGFEMDFAELLLEDYKASLKYLSDHPKLQGIAQQNSFKHT

SEQ ID NO: 8064 - protein, 465 aa, Geobacillus kaustophilus HTA426
MAKKAPEIGEYKYGFVDKDVSVFRAQRGLTREVVEEISRMKNEPQWMLEFRLKALDIFYSKPMPQWGGDLSSLDFDEITYYVKPTEKSGRSWDEVPAEIKATFDKLGIPEAEQKYLAGVSAQYESEVVYHNMKEDLEKLGVIFKDTDSALKENEDLFREYFAKVVPPTDNKFAALNSAVWSGGSFIYVPKGVKVDTPLQAYFRINSENMGQFERTLIIVDEGAHVHYVEGCTAPIYTTNSLHSAVVEIIVKKGAYCRYTTIQNWANNVFNLVTKRAVCEENATMEWIDGNIGSKLTMKYPAVILKGEGARGLTLSIAIAGKGQHQDAGAKMIHLAPNTSSTIVSKSISKQGGKVTYRGMVHFGRKASGSRSNIECDTLILDNQSTSDTIPYNEILNDNVSLEHEAKVSKVSEEQLFYLMSRGISEQEATEMIVMGFIEPFTRELPMEYAVEMNRLIKFEMEGSIG

SEQ ID NO: 8065 - protein, 973 aa, Oryza sativa
  misc_feature (915)..(915): Xaa can be any naturally occurring amino acid
  misc_feature (937)..(937): Xaa can be any naturally occurring amino acid
  misc_feature (952)..(952): Xaa can be any naturally occurring amino acid
MSAAGGGGGVGKVERLSSIDAQLRQLVPAKLSEDDKLIEYDALLLDRFLDVLHGLHGDDLKDLVQECYEVAAEYETKHDVQKLDELGNMITSLDPGDSIVIAKAFSHMLNLANLAEEVQIAYRRRIKLKKGDFADENSAMTESDIEETLKRLVFDLKKSPAEVFDALKSQTVDLVLTAHPTQSVRRSLLQKHSRIRNCLVQLYSKDITPDDKQELDEALQREIQAAFRTDEIRRTQPTPQDEMRAGMSYFHETIWKGVPKFLRRVDTALKNIGIDERVPYNAPLIQFSSWMGGDRDGNPRVTPEVTRDVCLLARMMAANLYCSQIEDLMFELSMWRCNEELRSRADDLHRSSKKDAKHYIEFWKKVPLNEPYRVILSDVRDKLYNTRERSRELLSSGYCDIPEEATLTNVEQLLEPLELCYRSLCACGDRAIADGSLLDFLRQVSTFGLSLVRLDIRQESDRHTDVLDAITTYLGIGSYREWSEERRQEWLLSELNGKRPLFGPDLPRTDEVADVLDTFHVIAELPADSFGAYVISMATAPSDVLAVELLQRECHVKTPLRVVPLFEKLADLESAPAALTRLFSISWYRQRINGKQEVMIGYSDSGKDAGRLSAAWQMYKAQEQLVKVAKDFGVKLTMFHGRGGTVGRGGGPTHLAILSQPPDTINGSLRVTVQGEVIEQSFGEEHLCFRTLQRFTAATLEHGMHPPSAPKPEWRALLDEMAVVATKEYRSVVFQEPRFVEYFRLATPETEYGRMNIGSRPSKRKPSGGIESLRAIPWIFAWTQTRFHLPVWLGFGAAFKHALQKDIRNLHMLQEMYNEWPFFRVTLDLIEMVFAKGNPGIAALYDKLLVSEDLQPLGEKLRANYVETQKLLLQVAGHRDLLEGDPYLKQRLRLRDAYITTLNVCQAYTLKRIRXDPDYHVTLRPHLSKEVMDGSKXAAELVKLNPGSEYAXGLEDTLILTMKGIAAGLQNTG

SEQ ID NO: 8066 - protein, 489 aa, Bordetella pertussis Tohama I
MTQLTQPLSRAELLRDACYIDGKWVGAGNGPSIPVDNPSTGKTIISVPKLGRKEAEQAIDAAEAALPAWSARTGKERAAILLKWAQLMMENQQDLAVIMTSEQGKPVPEAAGEIAYAASFLEWFAEEAKRIDGDILQSPKGGQRLMVLKQPIGVTAAITPWNFPAAMITRKVGPALAAGCTMVVKPAQQTPLTALALAVLAVLAGVPAGVFQVVTGSSREIGAALCESEVVRKLSFTGSTEVGRTLMEQCAPTIKKLSLELGGNAPFIVFDDADLDRAIDGILASKYRNAGQTCVCANRIYVQAGVYEEVAKRLVEKVNAMKVGDGFEQGVTQGPLIDTAAVAKVQEHIADATAHGAKVIAGGEPHALGGSFFQPTVVRDVTQSMRFAVEETFGPVAPLFKFDSEDEVIGMANNTIFGLAAYFYTRDYARIWRVSEALEYGIVGINTGIISNEVGPFGGVKQSGLGREGSKYGIEDYLELKYLCVDLGA

SEQ ID NO: 8067 - protein, 362 aa, Hordeum vulgare subsp. vulgare
MAEEGKGTGSNGGRGVRACVTGGAGFIGSWLVRKLLEAGYTVHATLRSIGDEGKAGLLRGLVPGGAPPERLVLFEADIYDAASFAPAIAGCHFVFLVANPSAHEPASKYKTSAEAAADAVRVILRLCAESRTVKRVIHTASVTAASPLTKSSSAAAAVYGDFISESCWTLLDVNYPLRSVHFDKYIESKVLSEKELLSYNDGENPAFEVVTLPLGLVGGNTVLGYLPETMESVVAPVTKQEPCFMLPRILQRLLGSVPLVHVDDVCAALIFCMEQPALSGRFLCAAAYPTIHDILDHYGSKYPHLDLLRETDEVARVQPDKNKLGELGFEYKYGLKEILDESIDCAVRLGSLDASKLIVQQG

SEQ ID NO: 8068 - protein, 489 aa, Lactobacillus johnsonii NCC 533
MEWTREQRYRKYKDWDAQTLLNLQAQAATSPYQMHYHIHPLSGLINDPNGFSYYNGEYHLFCQSYPFGPVHGVKSWIHYASPDLVHWHYLGSAIDPDSDLDNAGAYSGSAMEHDGKLLLMYTGNHRDKDWTRIPYQVIAEMDKDNHITKPKDPAILPPDHVSEHFRDPQLFEHDGKYYVLLGAQDAKTKKGHIDIYESTDLKNWHENGYLDLGKDEMGYMIECPNLVFINNYPVLIFCPQGLDKSVADYKNIYPNMYWIGKDINLSEAKFAPLQEKPANLDDGFDVYATQAFNAPDGNAYAISWVGLPDCTYPTDKENWANCYSQVKRLEIKDGALYQHPVDAIKKLRHNEKQLNNEKIISQAAGKQYELKLHLLAGQSGKLHLASNEDLSSSLVLDFNTDKNAKLTIDRASSGPAVNPDYGATRTIDLKDDQDLDLDIFIDGSLCEIFINNGRHVATLRFFAPTPNQKIAFDKDTKYTGRLWSMNSIL

SEQ ID NO: 8069 - protein, 258 aa, Oryza sativa
KREIKILRLFIHPHIIRLYEVIYTPTDIYVVMEYCKFGELFDYIVEKGRLQEDEARRIFQQIISGVEYCHRNMVVHRDLKPENLLLDSKYNVKLADFGLSNVMHDGHFLKTSCGSPNYAAPEVISGKLYAGPEVDVWSCGVILYALLCGTLPFDDENIPNLFKKIKGGIYTLPSHLSALARDLIPRMLVVDPMKRITIREIREHQWFQIRLPRYLAVPPPDTAQQAKMVLCVTFLTSCSLMYQTLYTNIIFLRYTYRV

SEQ ID NO: 8070 - protein, 69 aa, Arabidopsis thaliana
  misc_feature (40)..(40): Xaa can be any naturally occurring amino acid
  misc_feature (44)..(44): Xaa can be any naturally occurring amino acid
SSSEHTYYDYYVPSSLSLPKLLTYLRVTATQITFKLFIRXTPLXVIGGGPTCVAISYTLSQGGIETTLI

SEQ ID NO: 8071 - protein, 332 aa, Burkholderia vietnamiensis G4
MRSSRRNRRGRSRKWARCPEKPSGFRCPQRSRVEKRARRPHPEHIRTAENDMDTTLATFEKDVIEASLDTPVLVDFWAPWCGPCKTLGPLLEKLEADYAGRWKLVKVNVDENQELAAHFQTRSIPHVIAFADGRPVDQFIGVLPEGQLREFLDRLLPAPDEAERRAAQYALAESRFDDALAHLEAALALNPGFDDARLDLIELLLANNEVDAARAEAERLSPQTLQADPRYQAIKTRFDALDATADLPPTDALEARIAANPGDLDARFDLAQSLIARRAYEGALEQLLEIVLRDRAYGDDLGRRTMISVFELTGDRPELVAAWRRKLSMALN

SEQ ID NO: 8072 - protein, 172 aa, Capsicum annuum
MASKGIALICMTLVTIMSTMISVEVMAQSDCTSTLITMASCLSFVTGSAKTPPASCCSSLSGVLQSNPRCLCVIVNGGGSSLGVQINQTQALALPSACNLQTPPVSRCYAGNAPVISPEGAPTEGTPDSSTGVAVTGSKASGSSTSDGSSLKVPVRAAVAIVIFMASYISMI

SEQ ID NO: 8073 - protein, 610 aa, Pseudomonas aeruginosa PAO1
MCGLAGWVDYTRKLDDEFPAIFAMTDTLALRGPDAEGIWKHRNALLGHRRLAVIDLSGGVQPMSYRFPTGQEVTLVYTGEVYNHDALRERLRRAGHEFRTRSDTEVVLHAYLQWGERCCEYLTGMFAFAVFDGRDGHLLLVRDRLGIKPLYYARHREGLLFGSEIKSILAHPEFAARLDAVGLVDLLTLSRGTSQTPFREVQELLPGHLLSWRPNSQAKLRRYWEVRRQEHADDLQSTVQRTRELVTRALGAQLHADVPVCSLLSGGLDSTALTGIAQRIAKAEHGGDINSFSVDFVGQAEQFRSDDLRPDQDQPFALLAAQYIGSRHRTVLIDNAELVCERAREEVFRAKDVPFTFGDMDTSLHLMFGEIRRHSTVAISGEGADELFGGYGWFRDPQAVAAARFPWASRVRLPAGFIDAGFNRRCDLLQYQQASYDDGLRQVEHLAGDSPEERRMREFSHLHLKRWMVLLLERKDRLSMCNGLEVRVPYTDHELVEYVYNVPWSIKSRDGEEKWLLKRACADYVPEAVLKRRKSPYPTSANLGYERFLRGSVRRLLEDAVNPVFGIVSREFLAAELEHPEGYFNTQVSRHNLETALALEGWLRLYGLSA

SEQ ID NO: 8074 - protein, 409 aa, Acinetobacter sp. ADP1
MSDPHEQFIKEKLMAKAKFERNKPHVNVGTIGHVDHGKTTLTAAIATICAKTYGGEAKDYSQIDSAPEEKARGITINTSHVEYDSPIRHYAHVDCPGHADYVKNMITGAAQMDGAILVCAATDGPMPQTREHILLSRQVGVPYIVVFLNKCDLVDDEELLELVEMEVRELLSTYDFPGDDTPVIRGSALKALEGDAGQYGESSVLALVEALDTYIPEPERAIDKAFLMPIEDVFSISGRGTVVTGRVEAGIVKVGESVEIVGIRDTQTTTVTGVEMFRKLLDEGRAGENCGVLLRGTKREDVQRGQVLAKPGTIKPHTKFDAEVYVLSKEEGGRHTPFLNGYRPQFYFRTTDVTGAIQLKEGVEMVMPGDNVEMSVELIHPIAMDPGLRFAIREGGRTVGAGVVAKVTA

SEQ ID NO: 8075 - protein, 385 aa, Helicobacter pylori 26695
MVHQSEMENYNIGQASIEEVSDPAYKGAKIVVIGVGGGGSNMIKHLVEYGVHQDVTPIATNTDGQHLKNNPAPVKILLGKESTGGLGAGGIPDIGRKAAEESANEIKEAIKDAKLVIISTGLGGGTGTGATPTIVKIAKEVGALTIAIVTKPFKYEGNQKRKRAEEGLKELEQSSDSILVIPNDKILLTMKKNASTTECYREVDDVLVRAVSGISTIITKPGNINVDFADLKSALGFKGFALMGIGEATGEESAKLAVQNAIQSPLLDDASIEGAKSIIVFFEHHPDYPMMAYSQACDFIQDQAHQDVDVKFGQHTSDNIPIDHVRVTIIATGAERNSGGASLESIATPSQPVVKQTRKVGNGEYLKIPTEEELSIPTTMRIQQD

SEQ ID NO: 8076 - protein, 357 aa, Oceanicola granulosus HTCC2516
MTSNKLNIAVIAGDGIGKEVVPEGLRVLEAAAKRYDLSFDFKEHDFASCDYYGRTGEMLPEDWKTRLEGSDAIFFGAVGWPDVVPDHVSLWGSLLKFRREYDQYVNLRPVRLMPGVPSPLANRAPGDIDFYVVRENTEGEYSSIGGKMYEGTDREIVVQETVISRHGTDRILKFAFELAQSRPAKHLTSATKSNGISITMPYWDERVEEMAKNYGDVKVDKYHIDILTAQFVLNPDWFDVVVGSNLFGDILSDLGPACTGTIGVAPSGNIDPTGRFPSLFEPVHGSAPDIAGKGIANPVGQIWAGAMMLEHLGHKEAADGIVQAIETVLSEQKLRTGDLGGPLGTVDCGKAIADALS

SEQ ID NO: 8077 - protein, 400 aa, Clostridium perfringens str. 13
MNCIIAQSGGPTSVINASVYGLVKANKKLNLYENVYGGLNGIEGILNKKIINLSDLDELQLERFKNSPASGLGSCRYKLKPLSESEDEYLKLLDILNSLNIKAFFYVGGNDSMDTTAKLNAFAKAKNIDIKFFGIPKTIDNDLMHTDHTPGFGSAAKFISTAVLETYLDSKVYTNNGIFIIETMGRDTGWLAASGALATINGNKCADLVYLPERAFSVQSFLTDVARIFKEKKHVYIVASEGLKDENGKFLTETAPNDDSFGHAQLGGVGAYLKNLIIQASITHRVKSLELNTLQRCSMHASSKIDVNEAVMVGQAALEASINSEGGYMVAIRRDSSFPYKSSTFLIEADKIANNIKYFPSEWINEEGNNITEEGLLYLKPLISDFEDRDSLPLYHSFVL

SEQ ID NO: 8078 - protein, 315 aa, Acinetobacter sp. ADP1
MSARHSRLIILGSGPAGYSAAVYAARANLKPTLIAGLQLGGQLTTTTEVDNWPGDPEGLTGPALMERMQAHAERFGTEIVYDHINEVDLKTRPFVLKGDMDEYTCDALIIATGATAQYLGLESEAAFMGQGVSACATCDGFFYKNQKVMVVGGGNTAVEEALYLSNIASHVTLVHRRDSLRSEKILQDHLFAKEKEGKISIVWNHQVDEVLGDTTGVTSVRLKSTQDESTQTIDVQGLFVAIGHKPNTEMFKDQLELRDGYIQVQSGTKGNATATSVAGVFAAGDVADNIYRQAITSAGSGCMAALDADFYLDSI

SEQ ID NO: 8079 - protein, 581 aa, Kluyveromyces lactis NRRL Y-1140
MSADQFKQEGNQAFASKDYAKAIELFTKAIEVSEQPNHVLFSNRSACYASNKDFVKALDDANECVKINPSWAKGYNRLGAAHYGLGDLDEAEQSYKKALELDSANKAAQDGLSQVQQTQQQRTAQPDLGLGNMFKDPMMIEKLKKNPKTAEFMKDPQFVAKILQFQQNPQAMGQEMLSDPRLMTVLAALMGIDLSMDPNESNSIPKEEPAAKEAASATKSEPKAEPKAEPKAEPKVETKKPEPEPMEVDDDKSKAEAAKAEGNKLYKQRKFDEAIEKYNEAWETHNDITYLNNRAAAEYEKGDYEAAIETLTKAVEQGRELRADYKVISKSFARMGNSYHKLGDLKKAIDYYEKSLTEHRTPDILTKLRNTEKELKQKEAESYMDPEKAEEARLQGKEYFTKADWPKAVEAYTEMIKRNPNDARGYSNRAAALSKLMSFADAIRDCDKAIEKDPNFVRAYIRKATGQIAIKDYAGAIETLDSARTKDAEVNSGANTREIDQLYIKASQARFEPANANETPEEAYARATKDPEVASILQDPVMQSILSQAQQNPAALQEHMRNPDVFKKIQTLIAAGIIKTR

SEQ ID NO: 8080 - protein, 208 aa, Sorghum bicolor
MPSYSNPAAVVDSGSMSSVFTETESGWHVVKIERYSQTKGVLGVGACFKSTVFSAGGHRWRIGYYADGYADDTDDCIGFELFLVDHPDHDDAADDDVKAKFVFTLLDQAGQPVAAYTAASEVGTFSSAVPSWGFESFIERTELESKYLHDDDSFSVRCDVTVYKDSRRENLITATPPPPSRSCARVAVRLILWLILLVACRVVFGYIC

SEQ ID NO: 8081 - protein, 369 aa, Saccharomyces cerevisiae
MLRNTFFRNTSRRFLATVKQPSIGRYTGKPNPSTGKYTVSFIEGDGIGPEISKSVKKIFSAANVPIEWESCDVSPIFVNGLTTIPDPAVQSITKNLVALKGPLATPIGKGHRSLNLTLRKTFGLFANVRPAKSIEGFKTTYENVDLVLIRENTEGEYSGIEHIVCPGVVQSIKLITRDASERVIRYAFEYARAIGRPRVIVVHKSTIQRLADGLFVNVAKELSKEYPDLTLETELIDNSVLKVVTNPSAYTDAVSVCPNLYGDILSDLNSGLSAGSLGLTPSANIGHKISIFEAVHGSAPDIAGQDKANPTALLLSSVMMLNHMGLTNHADQIQNAVLSTIASGPENRTGDLAGTATTSSFTEAVIKRL

SEQ ID NO: 8082 - protein, 436 aa, Geobacillus kaustophilus HTA426
MATETKIPFDETYIRTFSSGRGEPDWLTARRLEALRLAERLPLPKPEKTKIDKWNFTEFARHTVDSAPYDGLDDLPEAVKALIEAGEGTKNLYVQRNHTPAYVSLSDELKEKGVIFTDIFTAAREHGDLLKNYLMTAVKPDEHRLAALHAALLNGGVFVYVPKNVEIETPLQAVYIQDEDDIALFNHVIIVAEDNSRVVFVENYISASREGKAVVNVAAEVFAQANASVFFAAVDHLAKGTTTYVNRRGIAGRDGRIEWALGLMNDGNTVSENITRLVGDGSFGDTKTVAVSRGEQVQNFTTSVVHYGRHTEGYILKHGVVRDSATSIFNGIGKIEHGASKSNADQESRVLMLSEKARGDANPILLIDEDDVMAGHAASVGRVDPIQLYYLMSRGIPRRDAERLIIHGFLAPVVEAIPLEGVKNQLIEVIERKVQS

SEQ ID NO: 8083 - protein, 583 aa, Solanum tuberosum
MANFKVSRVETTPFEGQKPGTSGLRKKVKVFIQPHYLQNFVQATFNALGADRVEGATLVVSGDGRYYSKDAIQIITKMAAANGVRRVWIGQNGLLSTPAVSAVVRERVGADGSKATGAFILTASHNPGGPHEDFGIKYNMENGGPAPEGITNKIYENTTTIKEYLIAEGLPDVDISTTGVSSFEGPKGKFDVDVFDSTSDYLKLLKSIFDFPAIQKLLSSPKFSFCYDALHGVAGVHAKRIFVEELGANESSLVNCVPKEDFGGGHPDPNLTYAKELVARMGLSKTHSEPNPPEFGAAADGDGDRNMVLGKRFFVTPSDSVAIIAANAVQAIPYFSGGLKGVARSMPTSAALDIVAKHLNLKFFEVPTGWKFFGNLMDAGMCSICGEESFGTGSDHIREKDGIWAVLAWLSILAYKNKDNLGEGNLVSVEDIVRQHWAIYGRHYYTRYDYENVNADGAKDLMAHLVKLQSSIDEVNKLIKGIRSDVSNVVHADEFEYKDPVDGSVSKHQGIRYLFEDGSRLVFRLSGTGSEGATIRLYIEQYEKDSSKIGRDSQEALAPLVEVALKLSKMQEYTSRSAPTVIT

SEQ ID NO: 8084 - protein, 205 aa, Zea mays
VFPSLKAATASAAPSVHPQCVRRRPFLLRSFAAAMVKYSQEPGNPTKSAKAMGRDLRVHFKNTRETAFALRKLPLTKAKRYLEDVIAHKQAIPFRRYCGGVGRTAQAKSRHSNGQGRWPVKSARFILDLLKNAESNADVKGLDVDNLYVSHIQVNQAQKQRRRTYRAHGRINPYMSSPCHIELILSEKEEPVKKEADNIVAARKQ

SEQ ID NO: 8085 - protein, 126 aa, Brassica napus
  misc_feature (31)..(31): Xaa can be any naturally occurring amino acid
IRLSSLRYAPPSPAPRGRFVAARVKAEAEAXATEKLGVRVERNPAESRLSELGVRQWPKWGCEKSKFPWTYSAKETCYLLQGKVKVYPDGEEGFVEIAAGDLVVFPKGMSCTWDVAEAVDKHYKFE

SEQ ID NO: 8086 - protein, 555 aa, Prochlorococcus marinus str. MIT 9313
MSEKMSRHFDRGSFRAVSDVHQLMSFPDFSASDAHVQWQRFNNLLWHHNDLGIWLDISRMHINAEDFERLGPRFDQAFKAMQALEQGAIANTDEQRMVGHYWLRQPQLAPDQEVCDHIAKEIDLIETFGSNVINGLIKAPNGKKFTDVLWIGIGGSGLGPLLMIRALQNAEQGLRFHFFDNVDPDGMSRVLGNLGDALSTTLVVTVSKSGATPEPHLGMEQARQRLEAMGGHWAGQAVAVTMLNSQLDQLAQKESWLKRFDMFDWVGGRTSITSAVGLLPAALIGCDIRAFLAGAAQMDEATRVSDLHSNPASLMAAAWFVAGDGLGRRDMVVLPYRDRLEVFSRYLQQLVMESLGKRLDRDGNVVHQGLAVYGNKGSTDQHAYVQQLRDGVDNFFATFIEVLEDVENIPAINNEHPGDFLDGFLQGTRAALSQGGRQSLTISMRRFDPRRLGALVALFERAVGLYGELVNINAYHQPGVESGKKAAAAILNLQSRVEDLLADGVERSAGEIHQVIGDGSEEAIFWIMRHLTANKRGYVAEGDWGIPTSLRFSKG

SEQ ID NO: 8087 - protein, 462 aa, Lactobacillus johnsonii NCC 533
MKLNPFRKESLKRYLGTDKHFVKTLGAFDLLTIGIGAVIGTGIFILPGTVAAKEAGPGVTLSFLIAALVCTLASMCYAELSSSIPVAGSAYSYGNILYGEVIGWILGWALILEYMLSVAAVSAGWASYFNSLLHSFGLHIPHHFEGPFDPLNGTYLNLWAVISVLLIGILLSRGMKASMKFNNAAVLIKIAIIFIFIGVGLFFIKPKNYQPFTPYGTTGVLRGATTVFFAFLGFDVVSSSAAEVKNPKKNMPIGIIGTLIVAALLYMGVSVVLTGMVNYKQLDVANPVAYALKVVNQGWVADLLSIGAIVGMSTMMLTMIYSSSRLIYSIGRDGLLPSFLGKIDKHGLPENALWIVTIVIAIMGGLFSLEELTSLVSIGTLLAFTFVSFGVILLRRRKDIPEGDFKVPFYPVIPILSGLACIGMMCFLSVKTYIFASVWFLFGLFIYCVYGYKHSKISKRNN

SEQ ID NO: 8088 - protein, 169 aa, Porphyromonas gingivalis W83
MKKNICSKAILLASLLLLSVGTMTASCTSKNDTRQEETVSADSKGEKDGKIIHITAEYMREHIYDYTANPQEWVYKGDKPAIIDFYADWCGPCRSLSPKLEEVAKKYAGKLTVYKVDVDKEKELAGIFGVRSIPMVLFVPVKGIPTQTMGNLPMENIEEAIAKIMQSDL

SEQ ID NO: 8089 - protein, 118 aa, Brassica napus
  misc_feature (71)..(71): Xaa can be any naturally occurring amino acid
  misc_feature (103)..(103): Xaa can be any naturally occurring amino acid
QHLSTNCGMLHYTSGGQFTISVVIRGPGGVGRQLGAEHSQRLESYLQSIPGIQMVACSTRYNAEWLMKAAXRSESPVIQFEHVLLYKLKENIPDEAYICSLEXAEMVMPGEHISILTY

SEQ ID NO: 8090 - protein, 1004 aa, Prochlorococcus marinus str. MIT 9313
MIMAKPESTSASMQQSSAQKTDCEQPRAIGEGQQAGRLLQNRLELVEDLWQTVLRSECPPDQAERLLRLKQLSEPLALEGADENSASRAIVLLIQEMDLAEAITAARAFSLYFQLVNILEQRIEEDSYLASMSSGKENNRQDKPYDPFAPPLATQTDPATFRELFERLRRLNVPPAQLETLLQEMDIRLVFTAHPTEIVRHTVRHKQRKVASLLQQFQSDPTKSTSEKESLRLQLEEEIRLWWRTDELHQFKPSVLDEVDYALHYFQQVLFDAMPQLRRRLITAMAESYPDVHIPQAAFCTFGSWVGSDRDGNPSVTPEITWRTACYQRQLMLERYVNAVQKLRDQLSISMQWSQVSTPLLESLEMDRLRFPEVYEERAARYRLEPYRLKLSYTLERLKLTQHRNQQLAEAGWQTPPEGLNPSPNLINAGEALHYKSVAEFRSDLELIRNSLVSTDLSCEPLDTLLNQVHIFAFSLASLDIRQESNRHSDALDELTRYLNLPKAYGDMAENERVQWLMEELQTRRPLIPSAVIWSPSTAETVAVFRMLHRLQEEFGSRICRTYVISMSHTVSDLLEVLLLAKEAGLVDPAAGHAELLVVPLFETVEDLQRAPAVMEALLSSPVYRNLLPRVSEQVQPLQELMLGYSDSNKDSGFLSSNWEIHQAQIALQDLANRQGVALRLFHGRGGSVGRGGGPAYQAILAQPSGTVRGRIKITEQGEVLASKYSLPELALYNLETFTTAVLQNSLVTNQLDATPSWNQLMTRLAGRSREHYRALVHNNPDLVAFFQQVTPIEEISKLQISSRPARRKSGAKDLSSLRAIPWVFGWTQSRFLLPSWFGVGTALAAEVESDADQLDLLRRLHQRWPFFRMLISKVEMTLSKVDLDLAHHYMTSLGREDYREAFNRIFEIIETEYSLTRRLVLNITGQPRLLAADPALQLSVDLRNRTIVPLGFLQVALLRKLRDQNRQPPMNDAGDGRTYSRSELLRGALLTINGIAAGMRNTG

SEQ ID NO: 8091 - protein, 444 aa, Cryptococcus neoformans var. neoformans B-3501A
MAKSAKSAPAATVKVDKKDKKSKKDEKPVPAPAPAKAAKSLQKDVKEKKEKKSKKAKTPTPPPESSTSESEDSEEDSSDSESSSSEDEKPAAKTAAPAAKAKEEEPSTEESSDSDSESEEEFKTETKKEVNEESESDSDSDSGSDSNSSEDEDEKVEETKEEAKPQANGNKRKAEEESIAPAKKARADGGDEEATTNVFVGQLSWNVDNDWLKSEFESCGEVVSARVVFDRDSQKSRGFGYVEFADLESSAKAIEKDGSEIDGRAIRVNYATQRKPNEAAEKRARVFNDKQSPPAETLWIGSLSFSVTEDQVYEAFGQHGDVQSVRLPTDRDTGAPKGFGYVQFSSVDDASAALKAMNGAEIAGRAIRVDFAPPKQDNGERGGFGGGRGGGGFGGRGGGRGGGRGRGGFDRGGRGGGRGRGGPPRGGARTGGIVKPEGQKVTFD

SEQ ID NO: 8092 - protein, 223 aa, Zea mays
MAMEEGSGAVEKGPAVGTVADASASVIGEGAVKEEAGGRRQPSAGYAAVVIGGTFDRLHQGHHLFLKAAAELARERIVVGVCDGPMLAKKQYADLIQPIEKRMQNAKDYIKSIKPDLDVHVEPIVDPFGPSIVDPGLEAIIVSKETLPGGHAVNRKRAERGLTQLQIEVIELVPEESTGDKISSTAFRKMEAERALQQQNKQEDTAVGTPVGVQNIAVQSHGA

SEQ ID NO: 8093 - protein, 554 aa, Vibrio vulnificus CMCP6
MCSVFGILDIKSDAAALRPIALEMSKKLRHRGPDWSGIYASDRAILAHERLAIVGLNSGAQPLYSPDKKLILAVNGEIYNHKEIRARYEGKYDFQTDSDCEVILALYQEMGADLLEELNGIFAFVLYDEEKDQYLIGRDHIGIIPLYQGYDEHGNYYVASEMKALVPVCKTISEFPPGSYYSSTDAGPQRYYIRDWNEYAAVQGNTSSKEELTAALEAAVKRQLMTDVPYGVLLSGGLDSSITSAVAKRYAAMRIEDDEQTEAWWPQLHSFAIGLDGAPDLKAAREVAAKIGTVHHEMTYTIQEGLDAIRDVIYHIETYDVTTIRASTPMYLMGRKIKAMGIKMVLSGEGADEIFGGYLYFHKAPNAQEFHEETVRKLLALNMFDCARANKSLAAWGVEGRVPFLDKEFIDVAMRLNPADKMCGNGKMEKHILRECFEHYLPDSIAWRQKEQFSDGVGYGWIDTLKAVAEEKVTDQQMEAAKFRFPYNTPTTKEGYVYREIFEELFPLTSAAECVPGGPSVACSSAKAIEWDESFKNCIDPSGRAVKAVHNEAY

SEQ ID NO: 8094 - protein, 480 aa, Cytophaga hutchinsonii
MFSSLFKTKSIQSILKEEKGELKKTLTATSLVLLGIGAIIGAGIFSLTGIAAAENAGPAVTISFVVAGLGCAFAGLCYAEFASMLPIAGSAYTYSYATLGEFIAWIIGWDLVLEYAVGAATVAISWSRYLIKLLEKLGVDHIPYQWMMSPFETHRVNGTELHGIVNIPAIFITCLMSLVLIRGMKESAKLNNVIVALKITVVIAFIILGWSYMDPINHADYVPDNTGVFEHFGWTGVMTGAAVVFFSFIGFDAVSTAAQEAKNPQRDMPIGILGSLVICTILYVLFSYVMTGLENYQNFKGEAAPVALAIAATPYAFFQELIIIAILAGYTSVIMVLLMGQSRVFFSMSKDGLVPAIFSEVHPKYQTPWKSNILFAILVSLFAGLVPVSVVGEMTSIGTLFAFVLVCIGVLVLRKKQPDAPRAFRTPWVPFVPIMGIVVCLYLMYALPIDTWIRLIVWMAIGIAIYFLYSRHHSKIRNSN

SEQ ID NO: 8095 - protein, 336 aa, Vibrio vulnificus CMCP6
MSPPFRKTTFSHYRRESMNNTKKRGVLLVNLGTPEEATAPAVKRFLSQFLHDQRVVDMTRWLWCPILHGIILPIRSPKVAKLYQTVWMKEGSPLMVYSKRQQVELQAKLNCPVEIGMTYGTPSVLDGVNKLQAQGVDEICVLPLYPQYSGTTTGAAYDALAHALRKVAVVPSIQFIRDYHDHPLYIKALAESVRQSWQVQGKGDYLLCSYHGIPQRYADNGDVYPLHCEMTTELLRLELGLDKSQIGTTYQSRFGREEWLQPYTDKTLESLPAKGIKSLDVITPAFSVDCLETLEEISEQGQESFLHAGGEQYRFIPCLNDAPSHIEMMARLVTER

SEQ ID NO: 8096 - protein, 170 aa, Vibrio parahaemolyticus RIMD 2210633
MEYNTSALCDIYLDQVDVVEPMFSNFGGRASFAGQITTIKCFEDNSLIRETLEQDGLGRVLLIDGGGSLRKALIDAEIAAIAEENEWEGIVVYGCVREVDELEDMNLGIQALASIPVGAANQGIGELDVPVNFGGVSFLPEDYIYADNTGIILSPEPLNIDLELDDTVEE

SEQ ID NO: 8097 - protein, 122 aa, Arabidopsis thaliana
  misc_feature (68)..(68): Xaa can be any naturally occurring amino acid
  misc_feature (80)..(81): Xaa can be any naturally occurring amino acid
  misc_feature (84)..(84): Xaa can be any naturally occurring amino acid
  misc_feature (87)..(87): Xaa can be any naturally occurring amino acid
  misc_feature (94)..(94): Xaa can be any naturally occurring amino acid
  misc_feature (97)..(97): Xaa can be any naturally occurring amino acid
  misc_feature (102)..(102): Xaa can be any naturally occurring amino acid
  misc_feature (104)..(104): Xaa can be any naturally occurring amino acid
MASSMLSSTAVVTSPAQATMVAPFTGLKSSASFPVTRKANNDITSITSNGGRVSCMKVWPPIGKKKFXTLSYLPDLSDVXXAKXVDXLLRNKWXPCXEFEFXHXFFVGRETNSRIMIYAKFW

SEQ ID NO: 8098 - protein, 329 aa, Saccharomyces cerevisiae
MLRSTVSKASLKICRHFHRESIPYDKTIKNLLLPKDTKVIFQGFTGKQGTFHASISQEYGTNVVGGTNPKKAGQTHLGQPVFASVKDAIKETGATASAIFVPPPIAAAAIKESIEAEIPLAVCITEGIPQHDMLYIAEMLQTQDKTRLVGPNCPGIINPATKVRIGIQPPKIFQAGKIGIISRSGTLTYEAVQQTTKTDLGQSLVIGMGGDAFPGTDFIDALKLFLEDETTEGIIMLGEIGGKAEIEAAQFLKEYNFSRSKPMPVASFIAGTVAGQMKGVRMGHSGAIVEGSGTDAESKKQALRDVGVAVVESPGYLGQALLDQFAKFK

SEQ ID NO: 8099 - protein, 428 aa, Oryza sativa
FGSEIDLQGRRSTMRRYDEMPPAMVLVPPPFTFPAAAARTRMAVPAYEVMFGKLQRRSLFDDYFDQVGSITSGMIMLRPLVDSHVDLTAKMTTTGGEALFRWQRYLDDPNTFMDLHLSTPKPMVQLRSCAYYPKYRIGAFGTFPLLKANRDCSEGDYGIMGLRYGSENLSIGASFLPFALSGQVPYGAWLVGRKGNISAGIQYKPLSGESMHPVPLTDLKNWNCAISYGMGSTSPLSPSFNFSLELVRNTQLVASFYQHFVVQRRVMNPREEEHIIGTTNFVDFGLELATSLDKDKAKENASNPSFQVAASWQASKNFLVKGKLGPSKSSMALAMKSWWRPFFTFSFTAMYDHLKGTGSYGFGISIEDLKEPSYQMAYSNYVIVTQNKEDVEPRFLKKLGKKYIFQPDIDSGNYDNLPTGLKPIDKIL

SEQ ID NO: 8100 - protein, 320 aa, Triticum aestivum
MPQDDASFLLCAEDAFFFVDAAASTCTTAEQDDGWCSSAEEESAASFVAELIGGEADYSPRSDYSDRLRSRSVDPAARADSVAWIVKVQEYYGFLPLTAYLAVNYMDRFLSLHRLPQEDGWAMQLLAVTCLSLAAKMEETLVPSLLDLQIESTRYIFEPRTILRMELLVLTALNWRLRSVTPFTFIDFFACKVDPRGRHMRYLIARATQMILAAIHDIEFLDHCPSSMAAAAVLCAAGETPSLTSLLNPRLAVNWCIGLAEEGVSSCYQLIQRLVGCKRAATAEAAVNLCSDEVLSCDYSSCTTPPPPKRRKRSPPPVIT

SEQ ID NO: 8101 - protein, 223 aa, Mesoplasma florum L1
MQKITIAPSFLSANFADLKNEIKRCKEANIEWIHYDVMDYDFVPNLTFGSKVLKDIVNSSDFKIDIHFMVKVKTKRFEDFFSEYIKCKPTMMTMHVESMSKKEINMFYNICKTNNIMFSLAVSPKTNIKVLNKWIDKLENILIMSVEPGFGGQSFIPEVLEKVKHLAELKKTNGYTYSIEIDGGINDETSKKAIDAGVEMIVAGSYLFESKNFLEKVESLKHD

SEQ ID NO: 8102 - protein, 341 aa, Desulfotalea psychrophila LSv54
MSEKSMGGGMSEKSMIQTTYREAVRAAMREAMQRDERVFLLGEDVGRYGGCFAVSKGLLEEFGPERIIDTPLSESAFTGAGIGAALGGMRPIVEIMTVNFSLLAADQIINNAATFLHMSGGLFNVPLVIRMSTGGGKQLAAQHSHSLEGWYAHIPGIKVLTPATLEDARGMLWTALEDPDPVLIFEHQGLLNMEGPLAADAGAVDIDRALIRRRGRDLTIITYGASLFKALDAAEALAGEGIEAEVIDLRTLRPLDEETFLSSIATTHRALIVDEGWRSGGISAEISARIMEGAFYDLDAPVERICGAEVPMPYAKHMEEAAMPQAETIVTTAKRMVGSND

SEQ ID NO: 8103 - protein, 366 aa, Pyrococcus furiosus DSM 3638
MRAIIIGIGQCGTKIADIFSLVDFEALAINTSRGDLEYLKHIPPDRRILIGESIVGGKGVNANPVLGREAMKRDLPMVMKKISSLVGFEDVDIFFLTFGFGGGTGAGGTPVLAEALKEEYPDSLVVAIGALPLKEEGIRPTINAAITIDKLSKIVDSIIAIDNNKLKESNEDISQAYERINYAIVERIASLLALIDVPGEQTLDASDLKFVLRAMGSFATVGYAKADATKIKSLSRLIIRSFENEGLYLDVNIESALYGLVAIHGPPEALKANEIFEALNELTQRIRGKQIFRGFYPDPREREVEVVTLLSGIYESKSIEEIVITAKKYAQEFLKAKEEGESKKKKLLSGLPDFDDIYPGEADDQS

SEQ ID NO: 8104 - protein, 591 aa, Methanothermobacter thermautotrophicus str. Delta H
MDNHYFPFTAIVGQELLKKALILNAINPSIGGVLIRGDKGTGKSTAVRSLRDVLPDRKMVEGCRFGCDPDGAEICMECRRKLEEQGSLPSRQVRMEVVDLPVSATEDMVVGSLDIKRALRDGIKALEPGILARANGNILYIDEVNLLDDYIVNVLLDAAAMGVNIIEREGISIQHPSRFILAGTMNPEEGDLRPQILDRFGLSVDVEAIKDPDERIEVIKRAMKFQEDPESFHSRFRRKQEELREKIIRARSLLEMVELDDETLGLIVEIAAALGIRTHRADIITARTARALAAFNGRRRVTGDDVMEAALLAMKHRLRQLPFQRQQELSQEIIEDIMNGEFEDDSEIDRERRLRRDLKIPDLKGSLQGQSSSTVTGRRGKYVRARENPEPSSVAVDATLRKAASAGTGTIEPEHLMEKVRIGKSRALYIIVLDTSSSMRLERKIKFAKTVSWLLLRDSYEKRNRIALIAFRGYEANLVVEPTSNLETVEEALEGLRSGGRTPLTPALRLAAEVASSSSDEACTAVVISDGRCNVFINSNLEEDMNMLETELRNLNLLFVNAEPEKRSLGILEDMASRFGSEIFYLDDILI

SEQ ID NO: 8105 - protein, 174 aa, Lactuca sativa
MASISSSAIATVNRTTSTQASLAAPFTGLKSNVAFPVTKKANNDFSSLPSNGGRVQCMKVWPPIGLKKYETLSCLPPLSDEALSKEIDYLIRNKWIPCLEFELEHGFVYREHHHSPGYYDGRYWTMWKLPMFGCTDSAQVMKEVGECKKEYAGTEFAKGSLKVKLLKWPRSPLQ

SEQ ID NO: 8106 - protein, 305 aa, Streptococcus pyogenes MGAS10394
MYDTLIIGSGPAGMTAALYAARSNLSVAIIEQGAPGGQMNNTFDIENYPGYDHISGPELAMKMYEPLEKFNVENIYGIVQKIENFGDYKCVLTEDASYEAKTVIIATGAKYRVLGVPGEEYYTSRGVSYCAVCDGAFFRDQDLLVVGGGDSAVEEAIYLTQFAKKVTVVHRRDQLRAQKILQDRAFANDKVDFIWDSVVKEIKGNDIKVSNVLIENVKTGQVTDHAFGGVFIYVGMIPVTGMVKDLKITDSEGWIITDDHMRTSIPGIFAIGDVRQKDLRQITTAVGDGAIAGQGVYHYLESFPS

SEQ ID NO: 8107 - protein, 329 aa, Nocardioides sp. JS614
MSDVRNVIVIGSGPSGYTAALYTARANLTPLVFEGSVTAGGALMNTTEVENFPGFRDGIMGPALMDEMRAQAERFGAELVADDVVEVDLTGDLKIVRTATDTYTARAVILAMGSGYRRLGLPRETELSGRGVSWCATCDGFFFRDQHIAVVGGGDSAIEEATFLTRFGSKVSLIVRRDELRASKIMQERAFADPKLEILWNSVVEEINGEDRLESLTLRDTVTGETRNLPATGLFIAIGHDPRSELLGGQVDLDENGYVIASHPSTGTNLPGVFAAGDLVDHHYRQAITAAGTGCAAALDAERYLAELDHAASGPLEAQARADAEMAGA

SEQ ID NO: 8108 - protein, 108 aa, Nocardioides sp. JS614
MGNIAAVTDAEFEAQVLKSDKPVLVDFWAEWCGPCRQVAPILDEIATSHGDKITFLKMNVDENPVTPSSYRVTGIPTINVYQGGEVVKSIVGARPKAAILNELSEFIA

SEQ ID NO: 8109 - protein, 396 aa, Burkholderia mallei ATCC 23344
MAKEKFERTKPHVNVGTIGHVDHGKTTLTAAIATVLSAKFGGEAKKYDEIDAAPEEKARGITINTAHIEYETANRHYAHVDCPGHADYVKNMITGAAQMDGAILVCSAADGPMPQTREHILLARQVGVPYIIVFLNKCDMVDDAELLELVEMEVRELLSKYDFPGDDTPIIKGSAKLALEGDKGELGEVAIMNLADALDTYIPTPERAVDGAFLMPVEDVFSISGRGTVVTGRVERGVIKVGEEIEIVGIKATAKTTCTGVEMFRKLLDQGQAGDNVGILLRGTKREDVERGQVLAKPGSITPHTHFTAEVYVLSKDEGGRHTPFFNNYRPQFYFRTTDVTGSIELPKDKEMVMPGDNVSITVKLIAPIAMEEGLRFAIREGGRTVGAGVVAKIIE

SEQ ID NO: 8110 - protein, 156 aa, Zea mays
MAATVMTTTTSKAGRKSLISRTLQRCKSGLSAGGGGGGGSCGRSSTSSPPGCFSVYVGAERERFVVRAECANHPLFRRLLDDTEREYGYAAQGPLALPGCDVDSFLDVLWQMERADGANEEVAAASSPMCGLHSGSKGRAAGYRMLSSPPMVGRRR

SEQ ID NO: 8111 - protein, 445 aa, Pisum sativum
GGFSVVRKGTRKSNNDDEKSQSQSKSQSQSQVAIKTLRRLGTSNNLPRKKDGGENSTETMMKFPTMRQVSVSDALLTNEILVMRRIVENVSPHPNVIDLYDVYEDTNGVHLVLELCSGGELFDRIVAQDKYSETEASTVVHQIVAGLEAIHRANIIHRDLKPENCLFLDVGKDSSLKIMDFGLSSVEEFTDPVVGLFGSIDYVSPEALSQGKITTKSDMWSLGVILYILLSGYPPFIAQNNRQKQQMILNGNFSFYEKTWKGISQSAKNLISSLLTVDPAKRPSAQELLSDPWVKGEKAKDDQMDPEIVSRLQRFNARRKLRAAAIASVWSSTIFLRTKKLKSLVGSYDLKEDEIENLRMHFKKICADRDNATLCEFEEVLKAMKMPSLIPFAARIFDLFDNNRDGTVDMREILCGFSSLKNSKGEDALRLCFQMYDTDRSGCIT

SEQ ID NO: 8112 - protein, 300 aa, Sulfitobacter sp. EE-36
MTATIIDGKAFAAQVRGQVAQHVTRLKDDHGITPGLAVVLVGADPASEVYVKSKGKMTKEVGMKSVEHRLADTTSEAELLALIDTLNNDDTIHGILVQLPLPDHLNEDLVISAIDPAKDVDGFHISNVGLLGTGQKSMVPCTPLGCLMMLRDHHGTLSGMDAVVIGRSNIVGKPMAQLLLNDSCTVTIAHSRTKDLAAVVRRADIVIAAVGRPEMVPGDWIKPGATIIDVGINRLDAPERGEGKTRLVGDVDFDSCAKVAGAITPVPGGVGPMTIACLLANTVTACCRAHDLPEPEGLTA

SEQ ID NO: 8113 - protein, 304 aa, Zea mays
MAFLNMEQQTWAFTFGILGNIVSLMVFLSPLPTFYRVYRNKSTEGFQSTPYVVTLFSCMLWILYALLKPGAELLVTINGVGCVVETVYLAMYLVYAPKAARVLAAKMLLGLNVAVFGLVALVTMLLSDAGLRVHVLGWICVSVSLSVFAAPLSIMRQVIRTKSVEFMPISLSFFLVLSAVVWFAYGALKKDVFVAFPNVLGFVFGLAQMALYMAYRKPAAALVIIPEQSKEEVAEGKASCGGAEVHPIDIAEVHDLQTVVVDVDVEPVTYAAASGMVDGSVGRPRAPEQLVIKPDMVTVIAAEA

SEQ ID NO: 8114 - protein, 465 aa, Lactobacillus johnsonii NCC 533
MKNFFKKVPVNTFLKADSRLTRHLNARDLVALGIGAVIGTGIFILPGHEAAQHAGPAVAISFLLAAIVSGMVGMAYAEFSSAMPVAGSAYSFGSVIYGEVVGWIIGWGLLLEYFLAVSAEATGFASYFNNNILAPIGIHLPKALEAGPMEGGVINISAVLIVLIVALILYQGANLSKRVENIAVIIKVAIIILFIVIGMFYIKADNYVPFYPKKFQTPPLGIGGISTAAATVFFAFIGFDALAANSAETKDPEKNVVKGIMGTVIIAVLLYVSFSLVLTGMVNYKQLNVDDPAAYALKVVGLTAWNKLITVGALVGIFTAMITMLLGGSRLLYALGRDGLLPDSMGSVHAKKMIPDHAVIVSTIVAAVFAGLVPLMELASLINAGTLIAFALISFGIIPLRHRKDIVNDGFKMPLYPVLPVIAGLLSVYFIWMLPNTTKIMVGIWLIVGIIVYATYGIKHSKLQN

SEQ ID NO: 8115 - protein, 563 aa, Xylella fastidiosa Ann-1
MCSIFGIFNLQPSDNLQILRHQALECSQRQRHRGPDWSGVYVDVGAILVHERLAIVDPAGGAQPLLSEDGTLALAVNGEIYNHAVLKGTLQQPYAFQTHSDCEVINALYREETPTSFLNRLNGIFAFVLWDKTTGRGLIARDPMGVVPLYWGHDQDGRLRVASEMKALVEHCSDVAQFPPGHWYDTTTGTLVKYYERPWKNYSAVEGVQVSLQELREAFERAVHRQLMTDVPYGVLLSGGLDSSLVAAVAARYARHRIETNDQSEAWWPRLHSFAIGLKDSPDLSAANVAAEALNTVHHRFEYTFQEGLDVLPEVIRHIETYDVTTIRASTPMFLLARRIKAMGVKMVLSGEGSDEIFGGYLYFHKAPNAREFHEELVRKLNALYYYDCLRANKAMMAWGVEPRVPFLDREFLDVAMRMDAQHKMVDKTSNGPQRMEKGILRAAFDGYLPPSILWRQKEQFSDGVGYGWIDGLKAHAETQVSDHALATAETRFQVNPPQTKEAYYYRSIFERFFPSPAAAETVPGGKSIACSSPAAIAWDASFATMADPSGRAVSGVHQQALL

SEQ ID NO: 8116 - protein, 170 aa, Arabidopsis thaliana
MKMEMGLVFLTVFMAVMSSTMVSAQSSCTNALISMSPCLNYITGNSTSPNQQCCNQLSRVVQSSPDCLCQVLNGGGSQLGINVNQTQALGLPRACNVQTPPVSRCNTGGGGGGSTSDSPAESPNSSGPGNGSKTVPVGEGDGPPSSDGSSIKFSFPLIAFFSAVSYMAIF

SEQ ID NO: 8117 - protein, 587 aa, Arabidopsis thaliana
MSAPKFGYVLLLIVLINISNNGVDAFHKVFKKLQSKSTSLESVSPLHRTAYHFQPPRHWINAPMLYKGVYHLFYQYNPKGAVWGNIVWAHSVSKDLINWEALEPAIYPSKWFDINGTWSGSATHVPGKGPVILYTGITENQTQIQNYAIPQDLSDPYLKTWIKPDDNPIVKPDNGENGSAFRDPTTAWFNKKDGYWRMLVGSKRKNRGIAYMYKSRDFKKWVKSKRPIHSRKKTGMWECPDFFPVSVTDKKNGLDFSYDGPNAKHVLKVSLDLTRYEYYTLGTYDTKKDRYRPDGYTPDGWDGLRFDYGNYYASKTFFDDKTNRRILWGWANESDTVQDDTVKGWAGIQLIPRTILLDSSGKQLVFWPIEEIESLRGKNVQMTNQKMEMGQRFEVQGITPAQVDVDVTFNVGNLEKAEKFDESFATKPLELCNLKGSNVNGGVGPFGLITLATSDLEEYTPVFFRVFKDAASNKPKVLMCSDAKPSSLKKDTGTDAKERMYKPSFAGFVDVGLLDGKISLRSLIDHSVVESFGAKGKTVITSRVYPTKAVGEKAHLFVFNNGSQPVTVESLNAWNMQKPLKMNQGAK

SEQ ID NO: 8118 - protein, 70 aa, Capsicum chinense
MASKGIALICMTLITIMSTMISVEVMAQSDCTSTLITMASCLSFVTGSAKTPPASCCSSLSGVLQSNPRC

SEQ ID NO: 8119 - protein, 165 aa, Triticum aestivum
MSLITPSYVGDTIEYSSYASNALGALPYGRPAGGRTSDCGRGRGIASLIEMARSAVAQVVLVAVVAAMLLAVTEAAVSCGQVSSALSPCISYARGNGASPSAACCSGVRSLASSARSTADKQAACKCIKSAAAGLNAGKAAGIPTKCGVSVPYAISSSVDCSKIR

SEQ ID NO: 8120 - protein, 130 aa, Dehalococcoides ethenogenes 195
MKEVMAIIRFNKINITKRALVDAGFASITMLKTMGRGKGNVDYLLLAGAEGGHEEAISQLGPSLKLVPKRLITLVVPDDQVKTVVNTVIEVNRTENHGDGKIFVMPVLEAVRLRTGERGEDAIDSVVNVL

SEQ ID NO: 8121 - protein, 70 aa, Capsicum chinense
MASKGIALICMTLVTIMSTMISVEVMAQSDCTSTLITMASCLSFVTGSAKTPPASCCSSLSGVLQSNPRC

SEQ ID NO: 8122 - protein, 257 aa, Pseudomonas aeruginosa UCBPP-PA14
MQTRVEAGIAWLVLNRPQQRNALDIPTLEALHVRLDACERDPAVRAVVLGGSGRSFCAGADLAEWAAAEARGELESYGWTEAAHALMGRLHALDKPTVAAVNGSAVGAGMDLALCCDFRIAAASARFKAGYTGMAYCPDAGASWHLPRLLGSEAAKRLLFLDEAWSAERALGAGLVGEVVADERLVEAVGAFAARLASGPTFAFAQTKRLLRDGAGRSLAEQLRAEQAAGLLCGRSEDAAEALRAVAEKRSPQFSGR

SEQ ID NO: 8123 - protein, 682 aa, Robiginitalea biformata HTCC2501
MEMDNITFDLPKNQSNVIKVIGVGGGGSNAINHMFQAGINGVDFVICNTDAQALQNSAVPNKIQLGVSLTEGLGAGANPEVGEQAALESMEEIKQMLQQTTKMVFITAGMGGGTGTGAAPIIAKQAKEMDILTVGIVTIPFLFEGKMRCEQAQRGIERLRNNVDSLIVINNNKLREVYGNLGFKAGFSKADEVLSTAARGIAEVITHHYTQNIDLRDAKTVLSNSGTAIMGSAAATGSARAQEAIMKALDSPLLNDNKITGAKNVLLLIVSGSQEITIDEIGEINDHIQIEAGHGANIIMGVGEDEGLGEAIAVTVIATGFNIDQQNDIVNTESKKIIHTLEDEQKAQQDLSEPGPQRVVHTLELDDADRNPGTENPAATPEAAREDVSRTPEAAREDASRTPEAAREDASRTPEAAPETAPPAEEGQQLIPTTQYIRNFNVFYEEVVAEGVAADEDFIIIDSKDLINDIEVVDPEVVMADAPEQDQISLHFDMPLDTQEDSEESAENVITFDLDEDVRDMEVREHVEITPVLEYKKEGETRYSLEDYMELEQQLTGATSKAEKYEPKIVEDELVFEKKTVEGSGSESPTPDADPTDRPISEILRERADERRRKLKDFNYKFQHNRTTIDDIEKEPAYKRQGVDLTDAKRGDSKVSRTTLSEDSNEEMRLRSNNSFLHDNVD

SEQ ID NO: 8124 - protein, 750 aa, Pseudomonas aeruginosa UCBPP-PA14
MSGRGGVLARRLLWRVLLFSLCFTVLAGAVQLFFEYRREMREIEARLELIRSGYLASFERSLWDLNQEQLNVQLRGLGDFPDIARVSLQSADFNLLQGDQRPRGLLRVERFPLSYQPPGGERRHLGELEIAIDLAAVYRRLASGGLASLLWMGSFLCGLAVALSWLFHSLVTRHLWRMSEFAGHIAEGDLQQPLRLDKADRERDEIDAVAAALEDMRQALRTDRRRRDADRDELRRQVERRTASLRRAKDQAEAADRAKSRFLATMSHEIRTPLNGILGMAELLREASLGERDRQRLRALATAGEGLLAILNEVLHFARLEEAADVPEAVDFSLRSLLEDVLTLLEPRARENATRLDLWLDPQVHDGHRGAEQFLRQVLTNLLGNAVKFTEAGEVRVRVERLARSAGSERLRLSVADDGIGIPEEMRERIFERFTQGGDAVTRRYGGTGLGLAISKRLVEALGGRIGVESRVGQGSTFWFEIELALASLSGATPPAASVSALEVLLVEDVALNREVAQGLLERDGHRVMLAEDAGPALALCRQRRFDLILLDMHLPGMAGLELCAGIRRQLDGLNRATPVFAFTASIQPDMVRRYFAAGMQGVLGKPLRMDELRRALGEVGTGVPALAADAALDRQMLETHRRLLGRHKLAGLLGNLLGSLDEQLPLLAEALDQVDLAEAANIAHRLSGSCHSMGLVALGAGLGELEREALGAAGVDPRAWGARLGSLRRDGAEALRRAGFLGEADSAAG

SEQ ID NO: 8125 - protein, 289 aa, Rickettsiella grylli
MKTPISDDKIKFKKNRQSWFSRFNVFKQAPKNRKQLIELLHYAKQRNLLNSQALKMLEGVLQISDSQVRDIMIPHAKITAISAKAPLSEILPLVIESAHSRFPVINDERQVIGLLMAKDLLKYNPLSQNDFNIHTILRPVVFIPESKRLDSLLKEFQRKHYHMAIVVDEYGAASGLVTIEDVLEEIVGEIEDEHDTDEEIFIQEQTPHQFIVKAIMPIEAFNAFFNSHLETDQFDTIGGVIANRFGYLPKRGASTTIYPFHFKVLRADNRVIRLLQVTIEPVNKPLKTQ

SEQ ID NO: 8126 - protein, 481 aa, Rickettsiella grylli
MKLKNPSLFQQQCYINGKWITTPKNITVNNPATLEIIGTVPDLESTHLQHAVTAAEAALPRWMSKTAKERSELLHQWYTLILENSDDLALLLTIEQGKPFSEAQEEIRYGASFIQWFAEEAKRIYGDIIPAGLPQQHLFVNKQAIGVVAAITPWNFPNAMITRKCAPALAAGCTLVLKPSTLTPFSALALGVLAEKAGIPPGVLNIVTGDSELIGNHFTDNPVIRKLSFTGSTAIGRLLMQKAAHSIKKISLELGGNAPFIVFEDADSDQAIQGAVASKFRNSGQTCICTNRFYIHEKMYESFTKKLTHAIQQLNVGNGQEPQVQIGPLINSAAIKKVEKHIADALDKGAELMCGGKKHALGGNFFQPTLLKNCSKDMLIAQEETFGPVAALFRFSKEKEVIEWANDTLYGLAAYFYTKNVDRIIRVTQALDYGIVGVNTGRTSNEVAPFGGFKQSGMGREGSKYGIEDYLEIKYICLNTD

SEQ ID NO: 8127 - protein, 379 aa, Stigmatella aurantiaca
IGHVDHGKTSLTAAITKVLAKTGGATFLAYDQIDKAPEERERGITISTAHVEYQTKNRHYAHVDCPGHADYVKNMITGAAQMDGAILVVSAADGPMPQTREHILLARQVGVPYIVVFLNKVDMLDDPELRELVEMEVRDLLKKYEFPGDSIPIIPGSALKALEGDTSDIGEGAILKLMAAVDEYIPTPQRATDKPFLMPVEDVFSIAGRGTVATGRVERGKIKVGEEVEIVGIRPTQKTVITGVEMFRKLLDEGMAGDNIGALLRGLKPEDLERGQVLAKPGSINPHTKFKAQVYVLSKEEGGRHTPFFKGYRPQFYFRTTDVTGTVKLPDNVEMVMPGDNIAIEVELITPVAMDKELRFAIREGGRTVGAGLVADIIA

SEQ ID NO: 8128 - protein, 106 aa, Streptomyces aureofaciens
GATVKVTNATFKSDVLESDKPVLVHFEGPWCGPCKMVAPVLDEIANEYEGKVKVAKVNTDENPQLASQYGVRSIPTRLMFKGGEVAANMVGAAPKTRLAAFLDASL

SEQ ID NO: 8129 - protein, 489 aa, Gibberella zeae PH-1
MALLSVNLRDGLILTAVITILLYIWEKKTAKITRNGEPLRKPPNTLPLVGNGIIFLQPRQKLFSWFHRCERLYGYETLHITVPSLPPGVIVNDPQNLDFIFRNEGVFEKGEFFKQRSWDLFGHGIINVDGEFWRLQRKAGLRFLSAAALKTLTNEKLPKYLDQAIGVLEAKTNTKEVVDLQAVVHEVTTQLMGRMAYNMEMHADDDFTVAFEHASGGTAERFQNPLWFVTEMFTGARMRRSITTVKAYGKRIVTSAVADRKEAEGKTQSDAPGSLIQSLLDSIGDETLVADAALNYLSAGRDTVAQALTWTLYLLMKNPHVATKLRQSVESLRDEDTSTGDDPELLTPVRLPYVLAVFYESLRLRPPIPFEIKQAQQATTLPDGTFLPAGAIVVWCAWAMGRSHTTWGPNADDFRPERWLTTSLAGDVTVAQRPAAEFPVFNGGPRTLARLVPLFKFEPAFEGERVSKSSLTLPMEGGLPVYVQHQTPS

SEQ ID NO: 8130 - protein, 109 aa, Pseudomonas putida KT2440
MSSDLIKHVTDASFEADVLKAEGAVLVDYWAEWCGPCKMIAPVLDDIASTYEGKLTVAKLNIDENQETPAKHGVRGIPTLMLFKNGNVEATKVGALSKSQLAAFLDAHL

SEQ ID NO: 8131 - protein, 168 aa, Vibrio sp. Ex25
MFEPMMEMSDDAVIKVVGVGGGGGNAVEHMVRESIEGVEFISVNTDAQALRKTSVGNVIQIGGDITKGLGAGANPQVGRDAALEDRDRIKDSLTGADMVFIAAGMGGGTGTGAAPVIAEVAKELGILTVAVVTKPFSFEGKKRLAFAEQGIDELSKHVDSLITIPNEK

SEQ ID NO: 8132 - protein, 332 aa, Thermotoga maritima
ARVAINGFGRIGRLVYRIIYERKNPDIEVVAINDLTDTKTLAHLLKYDSVHKKFPGKVEYTENSLIVDGKEIKVFAEPDPSKLPWKDLGVDFVIESTGVFRNREKAELHLQAGAKKVIITAPAKGEDITVVIGCNEDQLKPEHTIISCASCTTNSIAPIVKVLHEKFGIVSGMLTTVHSYTNDQRVLDLPHKDLRRARAAAVNIIPTTTGAAKAVALVVPEVKGKLDGMAIRVPTPDGSITDLTVLVEKETTVEEVNAVMKEATEGRLKGIIGYNDEPIVSSDIIGTTFSGIFDATITNVIGGKLVKVASWYDNEYGYSNRVVDTLELLLKM

SEQ ID NO: 8133 - protein, 621 aa, Magnetospirillum magnetotacticum MS-1
MCGIAGLSAARPEILDEMVRRLAHRGPDGHGTFVCERTGFGLAHARLAVIDLTEGGRQPMHSPCGRWTIAFNGEIYNHAELRLELEGRGHTFRSSSDTEVLLALLAEKGEAALERLVGMFALALLDRADGSVLLARDRVGIKPLVWAGLPGGGLAFASEIKALKAVPGVDLSLDREALSQFLACLYVPAPYSIHAGIRKLAPGHLLRWKPGAAPEIACWWRPAFTAERALSVDDATEELMPALRDAVRSCMVADVPVGCFLSGGIDSSVIAALMAEARREQGASAPASFTMTFDEAAYDERVAARAVSDHVGTLHTELPASARLVDGLERMIAAFGEPFGNPTALLIGDLSAKARQHVTVALVGDGGDEVFGGYPRYQGGLLAAKWRKIPAFLRNGLIEPIVALLPESTSGRHTWRRIREFVAGAGLSDAEMYASWVEYFDPAQRRALLGGGTPPRPVADIYRATGRVHPLDAMQETDLLSFLPGNLMAYGDAMSMMHALELRLPLLDHRLIERVQAISAATRFQAGKKTLLKAAARRLLPAEIVDRPKLGFNPPMGLWLKNELAPMVAERLIPARMADLGLEWKGVEALLAEHRAGRRDLSLPVWALLVLERWQGLEASA

SEQ ID NO: 8134 - protein, 369 aa, Vigna radiata
MAVQAASLVSGYFSVAKEGKPGMSLRNTTMFGLSLEDALKADFSSLSFSCKREFQKKVCPLRVQSVATTPGVTKASPEGKKTLRKGSVIITGASSGLGLATAKALAETGKWHVIMACRDFLKAERAAKSSGISKENYTVMHLDLASLDSVRQFVDNFRQSGRPLDVLVCNAAVYLPTASEPTHTADGFELSVGTNHLGHFLLSRLLLEDLNKSDYPSKRLIIVGSITGNTNTLAGNVPPKANLGDLRGLAGGLNGLNTSAMIDGGSFDGAKAYKDSKVCNMLTMQEFHRRYHEETGITFASLYPGCIATTGLFREHIPLFRLLFPPFQKFITKGFVSEDESGKRLAQVVEITNKRLWRWLYTKKVGMSV

SEQ ID NO: 8135 - protein, 259 aa, Zea mays
MASVASARCYGLLLPPSFAEARCCSRPSSSLRLRPRWGLRRPRTPLACVAPPDSAEPQTDEQAVKAESIQEEAPTSTPEDAGLPALPNKDLNRRVALLSTLGAVALFASQRLNLSEASLKDLASNSVPYEEALSNGRPTVVEFYADWCEVCRELAPDIYKVEQQYKDRVNFVMLNVDNTKWEQELDEFGVEGIPHFAFLDKEGNEEGNVVGRLPKQYFLDNVVALASGDPEIPHARVVGQFSSAESRKVHQVADPRSHG

SEQ ID NO: 8136 - protein, 357 aa, Nostoc sp. PCC 7120
MRKRIGILTSGGDCPGLNCVIRAVVSHATLTYDWEVLGIPYATQGLRERQAIALNMHGWDLRGIDPLLNMGGTILGTINKGDTLAHVDEMLASYQALALDALIVIGGDGSLGILHELASRGNWNLVAIPKTIDNDVALTERAVGFDTAVNTIVDALNRLTFTAASHDRVMIVEVMGRSAGHLALHAGIAGGADVILIPEISYTISGLCQHIAELRDRWQRKFAIVVVAEGAKLCLEDVQENIASSCAPSKCGRGQYIADQIAQCSKNLIDTRVSVLGHIQRGGIPSALDRLTATVFGKTAVDLIAQGKFGQMVAWQNGEAIPVPIQDVVAQSPLHVNPQGSLVQSARCLGIYVGEKT

SEQ ID NO: 8137 - protein, 541 aa, Agrobacterium tumefaciens str. C58
MQATIEKLKATASSTAATDLRAAFAADDQRFSRFSVKFDDLLMDYSKCAVNEEIVTLLEQLAREGGVEAKREEMFSGKAINFTEDRAVLHTALRNRSNTPVLVDDKDVMPDVNGVLAAMGKFADAIRSGSLKGATGKKITDVVNIGIGGSDLGPVMATLALAPFHDGPRAHFVSNIDGAHIADTLKLLDPETSLFIIASKTFTTIETMTNAATARRFIAEKLGEGAVKHHFAAVSTALDKVAAFGIESDRIFGFWDWVGGRYSIWSAIGLPLMIAIGPDNFGKFLDGAHAMDRHFREAPIRENLPMLLGLIGFYNRNVLDYPTRAILPYDQRLSRFPAYLQQLDMESNGKGVTIDGTPVEGQSGPVVWGEPGTNGQHAFYQLIHQGTSVIPAEFMIAANGFEPELRHQHQLLIANCLAQSEALMKGRTLAEAKAQLTSKGMEDSQADFIAPHRVFTGNRPSITFVYDKLTPFALGRLIALYEHRVFVEGVLFRINSFDQWGVELGKELATGLLPVVEGKESAAGHDSSTQGLVKALAGLAG

SEQ ID NO: 8138 - protein, 279 aa, Magnetospirillum magnetotacticum MS-1
MRGWLKGRRRPKGAETVRDALEELIEDRDSAEIPIDEHERQLLGNILHLRDVTAYDVMVPRADIVAVEAKISLEGLIALFIDCGHSRLPVYRRSLDDVIGMIHIKDLLEVMGEGKAFNLPRLARRVQFVAPSMRVTDLLLEMRLKRSHLALVVDEYGGIDGLVTIEDLVEQIVGEIEDEHDQDEEPELTLCDDGTVEADGRTPIAEFEDRMGAVLTEEEREEVETLGGLVSFVAGRVPSRGELITHSAGLEFEVLDADPRRVKRVRVRRVASLEPAATE

SEQ ID NO: 8139 - protein, 227 aa, Brucella melitensis 16M
MTSFSPFGKSFDAFLFDMDGTILSSIAATERVWSEWARRHGIDPVTFLPTIHGVRAVETVRRLALPGVDPIREAEILLEAEMADLDGIAPIEGAYKFLHSLPENRWAIVTSAPLELARRRIKAAGLPMPKTIVSAEDVERGKPSPECFELGAKRLGFAPRDCLVFEDAPAGIVAGETAGASVVVVTATHPHSPRTSHLSIESYRYLQLTIEESGKLSLSPTVPASVG

SEQ ID NO: 8140 - protein, 381 aa, Medicago truncatula
MVNTNLEEIKQEHEHVYDRQKELKLLDESKEGVKGLVDAGLTKVPKIFIHDKIHEHNNKQTSSTNLSIPIIDFGPLFTNTSSSSRLEIIEKVKHASEKWGFFQVVNHGIPSTVLDEMIDGVVRFHEQDTEMKKKFYSRDITKRAYFNTNFDLYVTPAVNWRDSLSCVMGPQPLDPQDLPTVCRDITVKYSDYVNKVGMILLELLSEALGLNSNYLKDIDCAEGLFLISHYYPPCPEPELTFGTSAHSDSSFFTVLLQDQLGGLQVFHGNQWVDVTPIPGALVINLGDMMQLITNDKFLSVKHRVLAPKIGPRISVACFFRQHLPPENSKLYGPITELLTPENPPVYKETSVKGLVSHYYGKGLDGNSALDHFRIQAVKQEE

SEQ ID NO: 8141 - protein, 620 aa, Microbacterium laevaniformans
MGRRPADGDRRRPPGGCARTRLTTTEGEGSDDAPALPARRRALAAGLALALAGSAALVAGPAAAEDDAPSLRARYHFTVPDHWMNDPQRPVVIDGVLHYYYLYNADYDANPRANFGTEWRLATSADGVAFADQGVAAPKGTNANYDLWSGSAVVDHAGTAGFGPGAVVMLVTQMDHPTAAQKLDASGQQAQFLWYSVDGGRTFRPDGDEPVIPGDGRRDFRDPKVVWDDERQRWVALIAERDRVSFYTSPDLHRWTRTGEYVNAGIGTIECPDLFRLRADDGTTHWVMGVSANGYATNEPATYAYWTGSFDGSTFVPDVAAPQWLDHGFDWYGAVTWEDPAAPLERRLAIAWMNNWDYAHGAPTWPRDGFTGTDSITREIRLARAGAGYSLLSAPVDALQDHATHTTALGDVRVDGFTELAYRGDAYEITTRISRQDADNVGFQLRRSADGSRHADAGLTRDYAYLNRAQTGRPDSWKVESRTPLDDADTVELRILVDRTTIEVFVGDGRYTHSSQVFAPSGDQGLALYTSGGPAVFRDLRITEFADLAHVPRASSRTSRATRGARGGRPPAPSPGSVRRRAICAGRRARAWPTRSPGRTPRPASSRRRPSRSTGTRCTS

SEQ ID NO: 8142 - protein, 661 aa, Sulfitobacter sp. EE-36
MTEDTGGHIAYILGAAMAQAKLPEVEEVTIVTRLFDAPELGAVFAQAEEEIAPRCRVVRLASDRAEYLEKGDLVGELPSLQNALLETLEAMGAARPDVIHAHFADAAELALAAREEFGIPVLYTAHSLGAEKLGPGEVASAELQARIGRETRALAEADAIIASSRDEVERQIPKLVPAAEGRAHRIGPGVCVEKKGDAARAREMLGGFLRDVSKPIILAIARPIRKKNLRRLVDAYASDRTLQDRANLVIIAGLRDGLGQGCSERDAVIADLFDGVDRYDLWGKVALPRQHSAQDISDLYALAAEGGVFCNPAFHEPFGLTLIEAAQAGVPLVATQSGGPSDILPELGFGALIDPYDTASLARGLRDVLMAPERELAARRAQRIARRTYDWRAWAKRTQAVMAGVVRRPQGQTVAVQQHEYLLACDIDNTLTGCRNGARAFAQWLEREGERYAFTVATGRSIAEAQRVLAEWDLPTPDTIISSTGTEIWRRTDSGFTLCEDYAALISQEWDAAAVRTALEDTNVHFQPVYDQRRWKVSLFGTISDVPAIEARLHQTGVLARIIPSHEKFIDIIPVQAGKAAAIRFEAARRGMSDDRVIVAGDSGNDLDMLSRFENAVLPANALAELDGLASVYRSSLKHAAGVLDGVQYYRTPQPMLMAGE

SEQ ID NO: 8143 - protein, 381 aa, Medicago truncatula
MVNTNLEEIKQDHEHVYDRQKELKLLDESKEGVKGLVDAGLTKVPKIFIHDKIHEHNNKQTSSTNLSIPIIDFGPLFTNTSSSSRLEIIEKVKYASEKWGFFQVVNHGIPSTVLDEMIDGVVRFHEQDTETKKEFYSRDNGKRVYYNTNFDLYVTPAVNWRDSLSCVMGPQPLDPQKLPTVCRDITTTYSEYVKKVGTILFELLSEALGLNSNYLKDIDCVEGLFLISHYYPPCPEPELTIGASAHSDSSFLTVLLQDQLGGLQVFHENQWVDVTPIPGALVVNLGDMMQIITNDKFLSVKHRVLAQSIGPRVSVACFFRQHLPPENTKLYGPIAELLTPENPPLYKETSVKGLVSKLYGKGLDGNSALDHFRIQAEQQEE

SEQ ID NO: 8144 - protein, 113 aa, Cytophaga hutchinsonii
MKKIEAIVKPSKLKAIQAGLIKIGIPCMTVVPVKGVGLQQGFPEIYRGTEKSIVLLSKVMIICVVSDENLEKCIDVIIETGSEGKVGDGKIFVYDVLDAIRMRTRTRGDDAIR

SEQ ID NO: 8145 - protein, 417 aa, Cytophaga hutchinsonii
MNEITELAAQQAELTHAVDTVWVAICAALIFQMEGGFALLESGFVRSKNAISIIAKVMIDIMFGGIAFYAVGFGIAYGASNGWWAFGFGIPEGDMGLGLTVSNKLFWFIQMGFAIAAISIVSGAVAERIKIWAYAFFVLFFCACMYPLAANWVWNPNGWLAQLGFNDFAGSAAVHAMGGFAGLAAAIVLGPRIGKYNADGSINPIPGHNLTLSAVGAFILWFGWFGFNPGSTLGAVGKWELIGSVATNTFLSSAMGGISTMVYTFLRYKRIDITMVINGVLAGLVAITAGCNVVSANSAIIIGLIAGILIDVAVVAIDKMKVDDPVGAVAVHGVNGFFGTVAVGLFATKGGLFTTGDAHLLGVQTLGVTVIAVCSFAVTYLVFIVLKKTTGIRLGEREELAGTDAVEFGIEAYTTIE

SEQ ID NO: 8146 - protein, 395 aa, Lactobacillus plantarum WCFS1 [sequence omitted]

SEQ ID NO: 8147 - protein, 494 aa, Salmonella enterica subsp. enterica serovar Typhi str. CT18
MSDVTLLAEVTTFLRQRHGQFIAGERQAGNGTNFSVTNPATGKIIADVVSTTPAQAKEAMQSARRAFDVWRKMPTLQRGALLLKLADTLAAHREELAQLESVCSGKTIMLSRGLELDQSVAFLRYFAGWAGKITGETLNVSLPSMGEERYTAFTQRQPIGVVVGIVPWNFSIMIAIWKLAAALVCGCTIVIKPSEYTPLTLLRVAELAKEAGFPDGVINVVNGAGGEIAQQLIAHPDCAKVSFTGSVATGEKVRRSATSSGKRVTLELGGKNAALFLNDLTAQAMVNGILEAGYLNQGQICAAAERFYLPQEKLDTVMTLLRQRLSEIVPGSPLDEKTVMGPLANQVQLEKVLRLIQRAREEGDTIVYGGETLPGEGYFLQPTAVKVRSKNSTLMHEETFGPVCSFIGYQNEKEALSHINDSPFGLAASVWSENISKALRYAEDIDAGMVWVNMHTFLDPAVPFGGMKGSGIGREFGSAFIDDYTELKSVMVRY

SEQ ID NO: 8148 - protein, 617 aa, Cynara scolymus
MRTTEPQTDLEHAPNHTPLLDHPEPPPAAVRNRLLIRVSSSITLVSLFFVSAFLLILLYQHDSTYTDDNSAPSESSSQQPSAADRLRWERTAFHFQPAKNFIYDPNGPLFHMGWYHLFYQYNPYAPFWGNMTWGHAVSKDMINWFELPIALAPTEWYDIEGVLSGSTTILPDGRIFALYTGNTNDLEQLQCKAVPVNASDPLLVEWVRYDANPILYAPSGIGLTDYRDPSTVWTGPDGKHRMIIGTKRNTTGLVLVYHTTDFTNYVMLDEPLHSVPNTDMWECVDLYPVSTTNDSALDVAAYGPGIKHVLKESWEGHAMDFYSIGTYDAFNDKWTPDNPELDVGIGLRCDYGRFFASKSLYDPLKKRRVTWGYVAESDSYDQDVSRGWATIYNVARTIVLDRKTGTHLLQWPVEEIESLRSNGHEFKNITLEPGSIIPLDVGSATQLDIVATFEVDQEALKATSDTNDEYGCTTSSGAAQRGSFGPFGIAVLAHGTLSELTPVYFYIAKNTKGGVDTHFCTDKLRSSYDYDGEKVVYGSTVPVLDGEEFTMRILVDHSVVEGFAQGGRTVITSRVYPTKAIYEAAKLFVFNNATTTSVKATLKVWQMSQAFVKAYPF

SEQ ID NO: 8149 - protein, 403 aa, Listeria monocytogenes str. 4b H7858
MKIIVQKFGGTSVQNEKSRLMAFNHIKQVLKEGYKVVVVVSAIGRYGDPYATDTLLELIGAKNTKLTAREQDTLLSVGETISASVFTNMLKEANIKAEAFSGGQAGIITSDDHLNAKITEVDTARLKDALTNLDVAVVAGFQGITANGDISTLGRGGSDTSAAALGVSLQADYIDIFTDVDGMMTADPRIVEHARSLPRVSYNEVSNMAYQGAKVIHPRAVEIAMTAKIPMRIRSTYLESTGTLVTSLTNDSDHFDVKERIVTGVAHVTNLTQISVQTDTVKAQQLAFEILADAGISLDFINISTNSVIFTVPEEKSHVVKQLLEDADLQTTVRQACAKVSIVGAGITGVPGVTAKIVGALSEKNIPILQSADSHTTIWVLVKEEDLISAVNALHDVFCLEIK

SEQ ID NO: 8150 - protein, 464 aa, Ustilago maydis 521
MTMPNATGSTWRSAHSSPRRVSMATPIRALVHVANLPATTTERALREMFGSLGQMQSARVVASRSAGGLAYGFVEYVDVASAERAIRTMNGWVWFGTPIKVCWAKHSMHPDAVNEWVEVDRPVGMRSGVHSHLFVGDLSPDVDDALLQSFFSRFTSLADVRVMYDAATGKSRGFGFINFRSKQDADDCIATCQGQWLRGRQIRVNWANQKNQPSQAPATLTPTATATATATCSAYSDTPLSLSHAGSGVSTKTSATPSELSSTSSLINDASLQVALPRRHTTLGSQPQLSTITRNPANILRYNYDRVVSEAPSSQTSVYVGNISPLTSQQDLVRIFSPFAHGHHLEARIPPGRGYGFVTLNTHEQAASAICTLSIQGVFMHSRWLRFGWQKNRPSPLPIQHRSESAPEHMLYTLHNQPRQHTPNQSSQSLPSQQNILSRTQPQPHQQKPPPPSSSSSSNEFQPF

SEQ ID NO: 8151 - protein, 321 aa, Burkholderia thailandensis E264
MQASFHLVRVDALQDEAQDIRSFRISRVDGQPFDAYEPGAHIDVTSPCGLIRQYSLCGDPAQRGSYQFAVKKEPRSRGGSRSLHDDVRVGTELEVGAPRNLFRIADDARAHLLIAAGIGVTPLLSMAYRLVERRAPFRLHYFVRSRAHAAFLDRLSSEPFAPHVALHVGIEPPDLAGALDACVADATPGTHVYTCGPAPFMDQVVARAAARIDEDAIHLERFAAEPPLPVARGDAFEVRLQRSGRSIRVDDSTSIVDALASIGVEVDTSCGEGVCGTCMVSVVSGEPDHRDHCLSKAERASSKVICCCVSRSRSPVLVLDL

SEQ ID NO: 8152 - protein, 166 aa, Mannheimia succiniciproducens MBEL55E
MRIDTSELCDVYLDQVDVVEPIFSSFGGVNEFFGKVTTIKCFENNGLIAEILEEQGEGRVLLVDGGGAVRRALIDAELAQLAADNGWEGIIVYGAVRQLSRLENINIGIHALAPIPVGADEDTQGESDIPVNFGGVTFFPEDYVYADLTGIILSQEPLELEELGEE

SEQ ID NO: 8153 - protein, 140 aa, Campylobacter jejuni RM1221
MTKEQIQIIKDCVPILQKNGEDLTNEFYKIMFNDYPEVKPMFNMEKQISGEQPKALAMAILMAAKNIENLENMRNFVDKVAITHVNLGVKEEHYPIVGACLLKAIKNLLNPDEATLKAWEVAYGKIAKFYIDIEKKLYDK

SEQ ID NO: 8154 - protein, 380 aa, Alkaliphilus metalliredigenes QYMF
MTKKIKLLDTTLRDGEQTAGVVFANEEKVFIAKMLDELGVDQIEAGIPVMGSDEKDVIKKIVKSNLKASIMGWNRAVIKDIEASIDCGVDAVAISISTSDIHITHKLNSTRDRVLEQMVKATEFAKFNGLYISVNAEDASRTDDLFLIDFFKAAKEAGANRVRFCDTVGILDPITTYNRIKLLKEAVDIDIEMHTHNDLGMATANAIAGAMAGATYLGATVNGLGERAGNASLEEVILSLKYAMNLEHANYHIEKIKDLCAYVAKASNREIPFWKAITGERIFYHESGIHADGALKNPLTYEIIKPEDLGLERKILIGKHSGSAAIKNRLSFHGIHIDDASSYELLIKVRNVSIALKRSLNDKELLSLYEEVLRERNLTA

SEQ ID NO: 8155 - protein, 667 aa, Pyrococcus furiosus DSM 3638
MSIGVRMSVKVVCPYCGFGCNLLVDTITKKVRPYRGEPNRGKLCPKGLFALEHVYSKDRLRYPLKREGSDFKRISWERAISEIAEKIREIIENYGPSSIAFIASSKITNEENYLLQKIARLLGTNNIDNCARLCHESSVHALKLTLGAGIQTNPYSDLEKFKALMIWGYNPAETHPVVMQYIMNAKKNGAKIIVVDVRETTTMKFGDYKVIIRPGTDITLANAIMNVIIENRWYNKDFIEKRTVGFSEIRMGVKKYTPEYAEKITGVPARLIKEIAEAFAKAGSGAILWGMGVTQQIAGVENVLALINIALLLGYFGEKGGLYPMRGQNNVQGAAYMGTLSEFLPGYVPLSDSEFRKKVAKLWGVEDLPTERGLYLTEYWDAILNGDLKVLYIVGENPAISDANVLKVRKALTKLELLVVQDIFLTRTARYAHYVLPAAAFCEKEGSYMNSERRIQWSHKACEPLGESKPDWEILTMLANALGLRGFNYKRVEEITEEYFKLFPELENRSVEELKNSEGIVIPSPRLYTDRFLTPGGRARFISVEQIMPWEEPNGEYPLILTTVRLITHYNTGEMTMRSPSLTKMIGEPFVLISREDAQEYGIKEGDYVVVETRRGNLTLKAKISNIQRGVIAIPFHFEANVLTNDALNKAGTPELKFSAARIRKVS

SEQ ID NO: 8156 - protein, 892 aa, Photobacterium profundum SS9
MYMDEFDVTKLRDGCDMNEKYSALRSNVSMLGHMLGNTIKDAHGEPLFDKVETIRKLSKSARAGNDSDRAKLIDELQNLPDDQLLPVARAFSQFLNLTNIAEQYHTISRHCEEQICSPDSIDSLFGKLNANSISQLDSIQAVRDLNIELVLTAHPTEIARRTMIHKLVQINKCLSNLELSELSHSERQRVEQRLEQLIAQAWHSDVIRKQRPTPLDEAKWGFAVVENSLWHAVPEFLRQFDEKLMRHLGEKLPLDASPVKFTSWMGGDRDGNPFVTSEVTREVMLLSRWKAADLFLGDIQELVSELSMVKCNDQVRELAGEEHEPYRAILKDLRTKLTNTRDVLAAKINKQDAPNLATIDDVDQLWTPLHACYQSLRECGMGIIADGLLLDVLRRIKCFGIHLVRLDIRQESTRHSDVISELTRYLGLGDYEQWNEQDKVAFLVRELASKRPLLPLAWQPSAEVQEVLDTCKAVAEQSREALGAYVISMARTASDVLAVHLLLKEAGCPFRLDVCPLFETLDDLNNGASVIKELMSIDWYRGFIQNHQMVMIGYSDSAKDAGVMAAGWAQYRAMEELVEVCEDASVELTLFHGRGGSIGRGGAPAHAALLSQPPRSLKGGLRVTEQGEMIRFKLGLPDVAVNSLSLYASATLEANLLPPPAPKKEWCDLMDVLSEVSCESYRNVVRGSEEFVPYFRAATPELELGKLPLGSRPAKRNPNGGVESLRAIPWIFAWSQNRLLLPAWLGAGEAIQYSIDKGHAQLLEDMCREWPFFSTRLGMLEMVYTKTNVGIAEYYDQRLTDKSLWPLGQKLRDQLQQDIKAVLNVENNAHLMEQNPWGAEAIRLRNIYVEPLNMLQAELLYRTRQQDEPSPILEEALMVSIAGIATGMRNTG

SEQ ID NO: 8157 - protein, 336 aa, Alkaliphilus metalliredigenes QYMF
MKTITLIPGDGIGVEVTTAVQRVIEAANVAIDWEVVNGGETAYLETGQYIPDELIDSISKNKIAFKGPITTPIGTGFKSINVTLRQKYNTYANVRPVKSMSGIKTPFDNIDLVIFRENTEGLYCGIEHLVTEGVAEAIKVITEKASKRIGKSAFEYARKHKRKKVTAVHKANIMKISDGLFLDCIRSVAKEYPEIEYEEVIVDNMCMQLVMYPERYDVLVLPNLYGDIISDLAAGLVGGLGLVPGANIGDDIAIFEAVHGSAPLIAGKNMANPTACILSATMMLDYIGEESAAKRIRQAVEFVIKEGRYTTSDIGGTATTKDMTEAICQYIKSKNH

SEQ ID NO: 8158 - protein, 1201 aa, Oryza sativa
MDDDGETPMPSLELHKLPTLAGAAIPNPIARHPLYHPSPSFFISPTDVVLRDILFDASPASAAGERRRRHVAAYHRAGPRREVAFDPATVRAAIFTCGGLCPGTNTVVRELVVGLSELYGVRGGVFGVRNGYHGFYSDEVVPLDPAGGEHWHKAGGAGLGTLRGGVYAVGGDGTMRGAARIHREVRRRGRLAVAVAGIPKTVDNDVGVVDRSFGFHTAVEAAQQAIAAGHVEAESAANGVGLVKLMGRSAGHIALHATLSSRDVDCCLIPEEDFYLRGAGGLFDFLYRRIKDNGHAVVVVAEGAGQRLIPRTTTTSASGACAGADESGNETFLDVGAWLKAEMRAWWEEEHAGEVFTVKYIDPTYMIRAVPANAGDNLYCTLLAHAAIHGAMAGYTGFVSGTINGNYAYIPMDEVAEAKNPVDTKDHKWAWSFVVYLGGHSHGRGGAALASSQERAKNSHHEFLGSFLGSKEKARDAIFYSYTKYINGFAATLEEEEAMEISKHPSVISVFPNRGHRLHTTRSWEFLGMEKDGRIRANSIWAKARFGEGVIIGNLDTGVWPEAGSFSDDGMGPAPVRWRGICQDQASDDAQVPCNRKLIGARYFNKGYLSTVGQAANPASTRDTDGHGTHTLSTAAGRFVPGANLFGYGNGTAKGGAPGAHVAAYKVCWRPVNGSECFDADIIAAFDAAIHDGVDVLSVSLGGAPAGYLRDGVAIGSFHAVRRGVTVVCSAGNSGPGAGTVSNTAPWLVTVGASTMDREFPAYLVLGNNKKIKGQSLSPVRLAGGKNYPLISSEQARAANATASQARLCMEGSLERGKVEGRIVVCMRGKNARVEKGEAVRRAGGAGLVLANDEATGNEMIADAHVLPATHVTYSDGVALLAYLNSTRSPSGFITVPDTALDTKPAPFMAAFSSQGPNTVTTQILKPDITAPGVSILAAFTGQAGPTGLAFDSRRVLFNAESGTSMSCPHVAGVAGLLKALHPDWSPAAIKSAIMTTARVKDNMRRPMSNSSFLRATPFSYGAGHVQPGRAADPGLVYDMNDTDYLGFLCALGYNSSVIATFMASGSGAQPPYACPPARRPEDLNYPSFALPHLSPSGAARTVTRRVRNVGAAPAAYVASVAEPRGVSVAVRPSRLEFTAAGEELEFAVTFRAKKGSFLAGEYEFGRLVWSDAAAGGRHRVRSPLVVRVVDKKGKNGLPIS

SEQ ID NO: 8159 - protein, 212 aa, Carica papaya
  misc_feature (212)..(212): Xaa can be any naturally occurring amino acid
IPEYVDWRQKGAVTPVKNQGSCGSCWAFSAVVTIEGIIKIRTGNLNQYSEQELLDCDRRSYGCNGGYPWSALQLVAQYGIHYRNTYPYEGVQRYCRSREKGPYAAKTDGVRQVQPYNQGALLYSIANQPVSVVLQAAGKDFQLYRGGIFVGPCGNKVDHAVAAVGYGPNYILIKNSWGTGWGENGYIRIKRGTGNSYGVCGLYTSSFYPVKX

SEQ ID NO: 8160 - protein, 462 aa, Platycodon grandiflorus
MKLLSPSMAIALLFALFVASSALDMSIINYDATHASKSSWRTDDEVMAMYESWLVKHGKSYNALGEKEKRFQIFKDNLRFIDEHNAEENLSYKVGLNRFADLTNEEYRSTYLGAKSKPKLSKVKSDRYAPRVGDSLPESVDWRAKGAVAPIKDQGSCGSCWAFSTVNAVEGINQIVTGELITLSEQELVDCDKSYNEGCDGGLMDYGFEFIINNGGIDTDKDYPYLGRDARCDQYRKNAKVVTIDSYEDVPVNNEEALKKAVASQPVSVGIEGGGRAFQFYDSGIFTGKCGTALDHGVNVVGYGTEKGKDYWIVRNSWGSSWGEAGYIRMERNLAGTSVGKCGIAMEPSYPLKNGQNPPNPGPSPPTPVRPPTVCDDYYTCPESSTCCCVYEYYGYCFSWGCCPLDGATCCDDHYSCCPHDYPVCNVQAGTCSMSKNNPLGVKAIQRILATPNRETGRNKAS

SEQ ID NO: 8161 - protein, 801 aa, Staphylococcus epidermidis RP62A
MAKQKLVMIGNGMAGLRTIEEILERSQSQFDITIIGKEPYPNYNRIMLSNILQKKMTVEDTIMNPYDWYQENNIELINNDPVEKVDKENKIVTTSKGIEVEYDICIFATGSKAFVLPIPGSNLPSVIGWRTIDDTNKMIEIAQTKKRAVVIGGGLLGLECARGLLDQGMEVTVLHLADWLMEMQLDRKAGEMLKADLEKQGMKIELQANSKEIIGDKDVEAIKLADGRVIETDLVVMAVGIRPYTEVAKDSGLDVNRGIVVNDYMQTSDSHIYAVGECAEHDGKVYGLVAPLYEQGKVLADYLTGKETKGYKGSTTFTSLKVSGCDLYSAGQIVEDEDVHGVEIFNSVDNIYKKVYLSQGQVVGAVLYGDTDDGSRFYNMMKKHETLEDYTLVSLLHKGDEDAGTSIADMSDDETICGCNGVDKGTIVNAITSKGLTSVDEVTKATKAGNSCGKCKGQIGELLQYTLGDDFIAAKPTGICPCTDLTRDQIVTQIRAKNLKSSKEVRHVLDFKDKDGCPKCRPAINYYLNMVYPFEHRDEKDSRFANERYHANIQNDGTFSVIPQMRGGVTDADQLIRLGEVAKKYNVPLVKVTGSQRVGLYGLKKEELPQVWKDLGMRSASAYGKKTRSVKSCVGKEFCRFGTQYTTRLGIRLEKTFEYIDTPHKFKMGVSGCPRSCVESGVKDFGVISVENGYQIFIGGNGGTDVTVGKLLTTVETEDEVIQLCGALMQYYRETGVYAERTAPWLERMGFENVKNVLLNQEKQKELYLRIMEAKKAVENEPWETIVENKEAQKIFEVEKV

SEQ ID NO: 8162 - protein, 439 aa, Fusobacterium nucleatum subsp. nucleatum ATCC 25586
MIIFCLLIFKEEFRMSKETLNPLESGQKQVKKACDALGLDPAVYELLKEPQRIIEITIPVKMDDGSIKTFKGYRAAHNDAVGPFKGGIRFHQNVNSDEVKALSLWMSIKCQVTGIPYGGGKGGITVDPSELSQRELEQLSRGWVRGMWKYLGEKVDVPAPDVNTNGQIMAWMQDEYNKLSGEQTIGVFTGKPLSYGGSQGRNEATGFGVAVTMREAFKALGKNLKGATVAVQGFGNVGKFTVKNIMKLGGKVVAVAEFEKGKGAYAIYKDSGFTFEELEAAKAAGSLTKVAGAKELSMDEFWALNVEAIAPCALENAITNHEAELIKAGIVCEGANGPITPEADEVLYKKGIVVTPDVLTNAGGVTVSYFEWVQNIYGYYWTEKEVEEKEERAMVDAFTPIWALKKEFDGKGQPISFRQATYMKSIKRIAEAMKIRGWY

SEQ ID NO: 8163 - protein, 316 aa, Methanosarcina barkeri str. fusaro
MIIGTRGSQLALAQAETVARLLKAKGVETSLKIIKTSGDRFTDRPLHAVSSGVGAFVRELDEVMLEGKIDIAVHSMKDMPTIRPPTLPTVAVLKRDTPFDLLLTYDGTPLDELSEQSIIGTSSLRRAAQIKRYRPDLVTQDLRGNIDTRLRKLKEGKYDGILLAKAGLERMGWELEGEILSPDFFCPSPNQGTIAVVTRAETEAEAAVSRLDHTDSRIATEIERILISELGGGCTTPIGSYAEIMPDRKKLHVRAEVLSLDGEETVGINEFIPMAGGIEKARELGSSLVHMGGKKLADEALMQLSRDSCDSNDLHE

SEQ ID NO: 8164 - protein, 137 aa, Deinococcus radiodurans R1
MRRARQREDRMKLITAVVRPERVQQVKEALFQAGISGLTLSRVSGHGGEQELVEHYRGNRVMIEFRDKVEFRMAVSEPFVQPAIDAICRGARTGEVGDGKIFVQPLERVIRIRTGEEDSLALTPVTETRLAPLGGHS

SEQ ID NO: 8165 - protein, 326 aa, Aspergillus fumigatus
MAEFVRAQIFGTTFEITSRYTDLQPVGMGAFGLVCSARDQLTGQPVAVKKIMKPFSTPVLSKRTYRELKLLKHLRHENIISLSDIFISPLEDIYFVTELLGTDLHRLLTSRPLEKQFIQYFLYQILRGLKYVHSAGVVHRDLKPSNILINENCDLKICDFGLARIQDPQMTGYVSTRYYRAPEIMLTWQKYDVEVDIWSAGCIFAEMLEGKPLFPGKDHVNQFSIITELLGTPPDDVIQTICSENKRIRAGEALAHEYLSPYHDPTDEPEAEEKFDWSFNDADLPVDTWKIMMYSEILDFHNIDQGNDAGQVLMEGGVAQAQQNYA

SEQ ID NO: 8166 - protein, 676 aa, Synechocystis sp. PCC 6803
MTTLTPFIPLNFPITAIVGQEAIKLALLLGAIDPGLGGIVIAGRRGTAKSVMARAIHTLLPPIEIIKGNRYQCDPKNPGSWDDDTLEKFADVPLDQLETQVIPAPFIQIPLGVTEDRLLGSVDVEKSVKQGEAVFQPGLLAQAHRGVLYIDELNLLDDQIANQLLTVLTEGKNQIEREGMSFQHPCQPLLIATYNPEEGPLRRHLLDRIAIALSADGILGLDQRVAAVDQVLAYADSPISFIDQYDAELDDLKTTIILAREWLKEVSLTPEQVSYLVEEAIRGGLQGHRGELFAMRVAKAIAALDGRSDVQADDLRQAVELVIVPRSVLMDNPPPPEQAPPPPPPPQNQDEGKDEQEDQQDDKEDDKDNEPEAEQDPPSIPEEFIFDPEGVSLDPSVLYFAQMAQKQGKSGSRSVIFSDDRGRYLKPILPKGKVRRIAVDATLRAASPYQKSRRLRHPDRQVIVEQGDIRGKKLVRKAGALIVFLVDASGSMALNRMQAAKGAVMQLLTEAYENRDQVSLIPFQGENAEVLLPPTRSIAMAKKRLETLPCGGGSPLSHGLMQAVNVGMNAKRSGDIGQVVIVAITDGRGNIPLARSLGDEIPEGEKPDIKAELLEIAAKIRGLGMQLLVINTEKKFVSTGFGKELAQKAGGKYYQLPKATDQGIASMARQAIADMQ

SEQ ID NO: 8167 - protein, 312 aa, Haemophilus influenzae 86-028NP
MNIVFTLDCNFASHLDTVLKSLCYHHNNINIYVIHDGIPAESLEKLKMHCAKFDNTLYDIQFNINQFSFPTVISPAHIQSTASLFRLYLHQILPQHIERVIYLDMDLIIHQAIDELWDINLEDSLIAGVSDFFSEYLWEHPFYEKQQYINAGVMLINLNKWRENNIEQYFIEYAAKYGEFFVYGDQDVINFSIPTNLIKLLPVKFNIQVKFIEYLWMEHKEKIKFTPHIIHYIGSNKPWLKEHSANSPRFYNEEYLFYHHLSWDNLRQTDRQTDRQTDRQTDRQTEKYNPIALYVKVRLILTAFFLLEGKLH

SEQ ID NO: 8168 - protein, 615 aa, Cytophaga hutchinsonii
MCGITGFISIKWGSDELHSMTRRLQHRGPDAEGFYINESVHLGHRRLSILDLSVAANQPFFSKDKRYVMVFNGEVFNYKELAVKYAIPTDTTSDTEVILELFALQGPAAFQEFNGMFAIAIWDTYEKKLTLLRDRFGIKPVCYYDGPDGFGFASEIKSLLELPIPRLINSEALADYLFLEYIPKPNTIFQNIKKLTNGCYLEVTDGVRVAVKAFYDIREKYDPKPLKEKEGLEEFHHLLSDAVKSRMISDVPIGAFLSGGVDSSLVVSKFQENSTLPVETFTIGFDEKQYDESAYAKKVSELLKTNHHEYRLPAEDVFSVLKDAIEFYDEPFAVSSVLPSLLISKVSRQHTTVALTGDGADELFMGYNTYYWYNRIETLKRIGGKASLKLAGNIFKMFGGKPAIKSRLFEGWADKHPYINLWSQEQQMFTQQEIGKLLNYRYTHETTIPYWESLEKISLNNEQAVSFFDIQHYLADDLMYKMDIASMRHGLEVRCPFLDYNLVEFAVNLPLELKINNGTQKYILKKALEKYIPQSLIYRTKWGFSAPSEEWLKRSHTYLIDHYLDPARISAQGIFNAQEIQKLIASFRSGHYYHGKRLWSLVIFQLWYEQYMVAK

SEQ ID NO: 8169 - protein, 646 aa, Cichorium intybus
MMASLSDVENSITTSTLPYSYAPLPNGEQPAGNDRPVHSSRKTALFLVSVFLAVASLVALFAGNGPVLPKNLNTSAVPSTAGMPEKVAPLSRGVEKGVSEKSFHPLLGADNSFPWSNNMLDWQRTAFHFQPKKNWMNDPNGPVFYNGWYHLFYQYHPDAPVWGKIVWGHAVSKDLINWRHLPIAMETDEWYDEQGVWTGSATILPNGELVVLYTGSTNESVQVQNLAYPADPSDPLLIKWVKYPGNPVLVPPPGIDNKDFRDPTTAWKTPEGKWRITIGSKINKTGISLVYDTEDFKTFELLDGLLHAVPGTGMWECVDFYPISKQGENGLDTSVDGPGVKHVVKASMDDDRNDYYAIGTYDAYKGKWTPDNPTLDVGIGLRYDYGIYYASKTFYDQNKQRRVLWSWIKETDTEASDIKKGWASLMGVPRTIVLDKKTQSNIIQWPVEEINLLRTNLTVFKTVVVESGSLVPLNLPSASQLDIVAEFEVDKKTVERLNGADIAYDCAKNGGAAQRGALGPFGFSVLAHEGLAEHTPVYFYVAKGVDGNLQTFFCADQSRSSNANDVDKSIYGSIVPVLKGEKLAMRILVDHSIVESFAQEGRTCITSRVYPTKAINNNAQLFLFNNATATKVTASVNVWQMNSAHV

SEQ ID NO: 8170 - protein, 298 aa, Helicobacter pylori 26695
MPFVEEEFEILKPTKALFFVRDVLKCSLKEAQRHLDKQRLKQNQQAVRKSQIIQGVVRLIHFKPNEKTQALVFETKDFGVFDKPHQVYTHPKGYFYHESLLDCIQSHFGKNAHPAHRLDYETSGLVLAGKTLQSVKDLKALFMQKKVKKTYLALAHGLVEKSMKIDKPILTPQNIQKDLHIRSKISPLGKQSITLVEPLSYNPFLDISLLKITPLTGRTHQIRLHLSSVDHRIVGEGLYGVADENAREYLQLKRENNAPLLMLHAASLEFEFKGAIYKIASPMPERFMPFLKDLSFFY

SEQ ID NO: 8171 - protein, 406 aa, Methanococcoides burtonii DSM 6242
MKDHYDVIVVGAGPGGSIAAKTAAKEGLDVLMIEKRQEIGDPIRCAEGVGKFHLKQHIEPDPRWICADVKGSYIISPDGTRIEMAEEMSGGEVGYVLERKIFDRALANESALAGAEVRVKTRATDLIIENDTVCGIKLMHLGKEYEVRSKIVIGADGVESKVGRWAGIETSVKPSDIETCAQYLVSNANIDQEFCYFYLGNEIAPAGYVWMFPKGGNKANVGIGILGSRAGKDKPIELLNDFIEKNMPDAKIIEMVIGGVPVCGTIERTIANGLMLVGDAARQSDPITGGGIINAMDAGKIAGEIAAKAIRKGDCSIDTLQEYEDLWRATIGKEINNSLIVKDTFINFTDEDLNSLAYSLRDINFTSMSLINLLKALFKANKKLLWDLRGIFKDVIKGEIDFKYKA

SEQ ID NO: 8172 - protein, 946 aa, Debaryomyces hansenii CBS767
MVAQLIDGKAIALQVRTKIHAEIDQIQSQHKDFKPTLTIIQVGSRADSSTYVRMKLKAAEEASVECNIINLPETITQFELINQIQKLNESQSVDGILVQLPIPDHLDEAVVTSAVLADKDVDGFGPFNAGELSKKGGNPHYLPCTPKGIMELLAQSQVQIAGANAVVLGRSDIVGKPIANLLTRANATVTTLHSQTPQNQVEAFLSHADIVVAAIGKAGFVRGEWLKEGAVVIDVGTNFISDASKKSGSRMVGDCDFESCSAKASKLTPVPGGVGPMTVATLLDNVIIAAKKHYAKNNETPKFTNPLKLNLQTPVPSDYEISRAQQPKKIDEVAYEAGILDNELELFGSYKAKVSLDILKRLENKKNGKYVLVTGITPTPLGEGKSTTTVGLAQALGAHLNKNVFANVRQPSMGPTFGIKGGAAGGGYSQVIPMDEFNMHVTGDIHAISMANNLLAAAIDTRMFHENTQKDGPLYKRLVPAKKGSRKFPTCMLKRLEKLGINKTDPNELTEEEVAQFVRLDIDPDTITWRRVVDCNDRFLRGVTIGEAPTERGMTRQTGFDISVASECMAILALANSLQDLRERLGNMVIASSKAGVPITCEDIGCAGALTALLKDAIKPNIMQTLEGTPVFVHAGPFANISIGASSILADKMALKLAGTSPSLSPEERKEQEGYVVTEAGFDFTMGGERFINIKCRSSGLVPDCIVIVATVRALKVHGGGPEVKAGAALAPEYTQENVELLRTGCSNLAKHISNAKAYGLPVVVAINKMSSDTDSEHEVIKEESLKAGAVDAIVSNHWEEGGKGAVELGQGIIEACNSQDKHFKFLYESEKSVEDKISAIAKEMYGAGEVEFLPEAQKKIETYTKQGFGNLPICIAKTQYSLSHDAALKGVPTGFKFPIRDVRASIGAGYLYALAAEIQTIPGLPTHCGFMNVEVNDDGEIEGLF

SEQ ID NO: 8173 - protein, 354 aa, Bacillus subtilis subsp. subtilis str. 168
MTMKQFEIAAIPGDGVGKEVVAAAEKVLHTAAEVHGGLSFSFTAFPWSCDYYLEHGKMMPEDGIHTLTQFEAVFLGAVGNPKLVPDHISLWGLLLKIRRELELSINMRPAKQMAGITSPLLHPNDFDFVVIRENSEGEYSEVGGRIHRGDDEIAIQNAVFTRKATERVMRFAFELAKKRRSHVTSATKSNGIYHAMPFWDEVFQQTAADYSGIETSSQHIDALAAFFVTRPETFDVIVASKLFGDILTDISSSLMESIGIAPPANINPSGKYPSMFEPVHGSAPDIAGQGLANPIGQIWTAKLMLDHFGEEELGAKILDVMEQVTADGIKTRDIGGQSTTAEVTDEICSRLRKL

SEQ ID NO: 8174 - protein, 289 aa, Aster yellows phytoplasma
MHTGIGTSPYHIKYKFNSTPKKIIDIAIEAVKYAKKFVEDVEFYAEDAGRTENIFLAQICEAVIKAGATVINIPDTTGYCLPEEYAEKIKFLKENVDSIDKVTISTHCHDDMGLSTANSIAGIINGAQQIECTINGIGERAGNTSLEEVVMIIKQHKDLNFYTKINTKLLYKTSKLVSECTSMFVQSNKAIVGANAFSHSSGIHQDGLIKKRETYEIIDPKDVGVNKSSIILTARSGRSALAYRYQKLGYSFNKSKLNVIYSLFLKYADKKKEIDDEDLKKILKKMKYS

SEQ ID NO: 8175 - protein, 195 aa, Chromobacterium violaceum
MIARNPIKQDPAMRNTQDDHSRFLSLVLRHQPETIGLQLDDQGWADIGELLARLAAKGRNLGRKQLEKIVLDNDKQRFAISEDGLRIRANQGHSIKIDLGLAACEPPDRLYHGTASRFLDAILAEGLRPGQRQHVHLSADGQTARKVGARHGKPVVLEIDARAMRQAGLAFYRSDNGVWLIDGVPPVFIRQTEAR

SEQ ID NO: 8176 - protein, 419 aa, Leptospira interrogans serovar Lai str. 56601
MSVEIKVPEMGESITEATIANWVKKEGESVKQDEILLELETDKATMEVPAPSSGVLQKIHKKAGETVKVKEIIGLIDSSATASSPSTSAPTNSAQTTQTSGNGTINETLPPAVRKLIEDNGLNPASITGSGKNGQITKEDVLKAIETKATSSVSNASVNVGTPAAVKATLTLPEIPKAVPAARRTDLPRENVVPMTRLRKVIAERLVSAQHNAAILTTFNEVDMSAVMELRNRYKDKFKEAHNVSLGFMSFFTKAAIHALKTIPAINAEIRGSDIVYKNYYDIGVAVGGPKGLVVPVVRDADLLSFAGVEQEIIRLANRVKDGKIELAEMEGGTFTISNGGIYGSMMSTPILNPPQSGILGLHNIVKRAVVVNDQIVIRPMMYLALSYDHRIVDGKEAVTFLVKVKEAIEDPSRLLLEL

SEQ ID NO: 8177 - protein, 420 aa, Streptomyces cinnamonensis
MTQRRVAITGIEVLAPGGLGRKEFWQLLSEGRTATRGITFFDPAPFRSKVAAEADFCGLENGLSPQEVRRMDRAAQFAVVTARAVEDSGAELAAHPPHRIGVVVGSAVGATMGLDNEYRVVSDGGRLDLVDHRYAVPHLYNYLVPSSFAAEVAWAVGAEGPSTVVSTGCTSGIDAVGIAVELVREGSVDVMVAGAVDAPISPIPCVLDAIKATTPRHDAPATASRPFDSTRNGFVLGEGAAFFVLEELHSARRRGAHIYAEIAGYATRSNAYHMTGLRDGAEMAEAIRLALDEARLNPEQVDYINAHGSGTKQNDRHETAAFKKALGEHAYRTPVSSIKSMVGHSLGAIGSIEIAASALAMEYDVVPPTANLHTPDPECDLDYVPLTARDQRVDSVLTVGSGFGGFQSAMVLTSAQRSTV

SEQ ID NO: 8178 - protein, 530 aa, Candida glabrata CBS 138
MAYSTSATSNWVVQKFGGTSVGKFPVQIVDEIVKYYSSSKQDGGFDNDVAVVCSARSSYTKQEGTTSRLLKCCDLASQDQEYSDIIETIRQDHVSNAERFLEDSPLVAKLIDDTNKELALVDKYLSASKVLGEVSNRTIDLVMSCGEKLSCLFITALCNDRGCKAKYVDLSNVVPSDYQTTTLDTSFYTFLVQALKEKLEPFVNSKERIVPVFTGFFGFIPMGLLNGVGRGYTDLCAALIAVALNADELQVWKEVDGIFTADPRKVPQARLLDSVTPEEASELTYYGSEVIHPFTMEQVIRAKIPIRIKNVQNPKGNGTIIYPDNVAKKGESTPPHPPEALSSTFFEKKRRGATAITTKNDIVVLNVHSNKKTLSHGFLAQIFTVLDKYKLVVDLISTSEVHVSMALPIPDSDSMKALRSAVEKLKPLGSVDIIKKMSIVSLVGKQMKQFIGIAGTMFTTLAEQGINIEMISQGANEINISCVIDEMDSIKALQSIHKKLLDELPENGSGSEQFEKAVDERLEQIKRLNL

SEQ ID NO: 8179 - protein, 809 aa, Rhodobacter capsulatus
MKQRLVVIGAGMASGRMLEHIFEAAPEAFDVTLFNAEPRGNYNRLMLSPVLSGEKTYAQIVTHDAEWYETQGITCRFGEPVVKIDRAAKTVTSAAGSVAYDKLVVATGSAPFILPVPGKDLPGVVAYRDLEDTNAMIAASAPGARAVVIGGGLLGLEAAAGMAARGAEVTVIHLMGHLMERQLDPAAGYLLQRDLERRGIRVHCKGATKAILGIDRVEAVLLDDGTTYPADLVCMAIGIRPETRLANDAGLEVNRGLVVSDQMQTSDPAIFALGECVEHQGQLFGLVAPLYDQAKVLAATLLGTEAAFRPVQTATKLKVTGVDLFSAGDFADAPGREEVVFRDPGRGVYKRLILEGERLIGAVMYGDTADGAWFFDKIKSGEDVTSARDTLIFGPAFAGGAAADPLAAVAALPPEAEICGCNGVCKGKITEAVAGGAVTLDAVRAVTKASASCGTCTGLVEKVMALTLGAAFKPVENPPMCKCTDHTHEDVRRLIKARRLKSIPAVMQELGWKTSGGCASCRPALNYYLLCDWPFDYKDDRQSRFVNERNHANIQKDGTYSVVPRMWGGVTTPSELRAIADAAEKYSVPMVKVTGGQRIDLLGVRKEDLPAIWSDLNAAGMVSGHAYSKGLRTVKTCVGEQFCRFGTQDSTGLGIKLEQLLWGSWTPAKLKLGVSGCPRNCAEATCKDIGVVCVESGYQISVAGAAGLEVRETELLVTVATEAEAMEAIAAFTQLYRENARYLHRVYKWVAKVGLDWCRAQIEDPQTRKALADRFEASQSIYRVDPWAELAAKPADWAPVADLTLRAAE

SEQ ID NO: 8180 - protein, 417 aa, Deinococcus radiodurans R1
MADIKVPVFSESVSEGTLLTWHKKPGEAVKRGELLAEIETDKVVLEVTAQQDGVLQSIAKNEGDTVLSEEVLGTMGEGDAAAPAPAAQDQASGPVASETTAGGTAQQPDSTGTQPAAQSGERREDLSPAVRKIVEEKGLDVSQVPATGPKNNITKADAMGASAPAPAAQPAPQAAKSAVVLPSGPRPEERVPMTRIRARIAERLKEVQNTAALLTTFNEVNMQPTMELRKKYQDQFVKKHGVKLGFMSLFVRAATEALKAFPMVNASVDGKDVIYHGYYDIGIAVASERGLVVPILRDTDNMSLADIEKQIAEFATRARAGKLTMEDMSGGTFSITNGGTFGSMMSTPIINAPQSAILGMHNIIERPIAQNGQVVIAPMMYLAVSYDHRLIDGKEAVQFLVMIKNLLEDPARMLLDL

SEQ ID NO: 8181 - protein, 438 aa, Pyrococcus furiosus DSM 3638
MRIVVIGSGTAGSNFALFMRKLDRKAEITVIGKEETMQYSPCALPHVISGVIEKPEDVIVFPNEFYEKQRIKLLLNTEAKKIDRERKVVVTDKGEIPYDKLVIATGSKAFVPPIKGVENEGVFTLKSLEDVRKIKEFIKKRNPKNAVVIGAGLIGLEGAEAFAKLGMKVTVVELLEHLLPTMLDKDIAKIVEENMRKYGVDFKFGVGVDEIIGDPVEKVKVGEEEIDADIVLVATGVRANVELAKEAGLEVNRGIVVNEYLQTSDPDIYAIGDCAEVIDAVTGKRTLSQLGTSAVRMAKVAAENIAGRNVKFRPVFNTAITEIFDLEIGAFGITEERAKKEEIEVVVGKFRGSTKPEYYPGGKPIVVKLIFRKEDRRLIGAQIVGGERVWGRIMTLSALAQKGATVEDVVYLETAYAPPISPTIDPITIAAEMAMRKL

SEQ ID NO: 8182 - protein, 479 aa, Bacillus anthracis str. 'Ames Ancestor'
MTTSNTYKFYLNGEWRESSSGETIEIPSPYLHEVIGQVQAITRGEVDEAIASAKEAQKSWAEASLQDRAKYLYKWADELVNMQDEIADIIMKEVGKGYKDAKKEVVRTADFIRYTIEEALHMHGESMMGDSFPGGTKSKLAIIQRAPLGVVLAIAPFNYPVNLSAAKLAPALIMGNAVIFKPATQGAISGIKMVEALHKAGLPQGLVNVATGRGSVIGDYLVEHEGINMVSFTGGTNTGKHLAKKASMIPLVLELGGKDPGIVREDADLQDAANHIVSGAFSYSGQRCTAIKRVLVHENVADELVSLVKEQVAKLSVGSPEQDSTIVPLIDDKSADLVQGLVDDAVEKGATIVIGNKRERNLIYPTLIDHVTEEMKVAWEEPFGPILPIIRVSSDEQAIEIANKSEFGLQASVFTKDINKAFAIANKIETGSVQINGRTERGPDHFPFIGVKGSGMGAQGIRKSLESMTREKVTVLNLV

SEQ ID NO: 8183 - protein, 553 aa, Methanothermobacter thermautotrophicus str. Delta H
MADFRCTVCNYIFHEEADGEFDSLPADWRCPVCNAPRTAFVRVPSTLEEGGRTVSEVFISQLAAWGLKYVFGIPGTSTLGLVDALRRNDEIRYIQVRHEAAAAFMASSYGKLTGQPAVCMAVAGPRASNLITGLLDAALDRAPVLAVTGHVETYRIGTGASQEIDQHSLFESFSVYNMTLVSPDEAAEIAREAVKHAILERGVSHVDVPRDVQTMECTAPVKPLRGMMAEAAVTPPRNRLRAAADLINRAERPVIIAGFGALEAADSVVELAERIGAAIVSTFRGKGIVDNDYPLYLGCHGSLGSAAAAEAVRKADLLLVIGSSFSDLTRIPPRRTLQVDIDPMMVARRHPVEQGLTGRSSLIVQELISMVEEKERGPYLAELGELRDEWLGLLESEADPSLRPIRPQYIISVLNRELDDDAIITLDVGENGWWFGRNFQMKSTRGFSFQVTWGSMGFGLPAAIAAQLEFPDRQVVCINNRNLAMIMQEQRVEGFPVWQTELQDCDFAGFAENCGGRGLRVDDPGELEDSVREALGTDGPVLVDIETDPRRFI

SEQ ID NO: 8184 - protein, 327 aa, Prochlorococcus marinus str. MIT 9211
MAGTLLFNALREAIDEEMAKDPHVCVMGEDVGEYGGSYKVTKDLYEKYGELRVLDTPIAENSFTGMAVGAAMTGLRPIVEGMNMGFLLLAFNQISNNMGMLRYTSGGNFTIPTVVRGPGGVGRQLGAEHSQRLEAYFHAVPGIKIVACSTPTNAKGLMKAAIRDNNPVLFFEHVLLYNLSEELPDGDYVCALDQADVVKEGKDLTLLTYSRMRHHCLKALPQLEEKGIDAELIDLISLKPFDMETICKSIKKTHRVIIVEECMKTGGIGAELIALINENCFDDLDSRPIRLSSQDIPTPYNGQLENLTIIQPHQIVESAEEIIKKGL

SEQ ID NO: 8185 - protein, 486 aa, Bradyrhizobium japonicum USDA 110
MLPRSAGAGRNKVAVARCPFGQPTGALVMSMQNVAAPALQFTAPRRNELTHIPGDEGWPVIGKTFQVLADPKGHIEANGAKYGPVYRTHVFGETNVVLLGPEANELVMFDQQKLFSSTHGWNKVLGLLFPRGLMLLDFDEHRLHRKALSVAFKSGPMKSYLSDLDRGISARVAQWKAKPGEMQLYPAMKQLTLDLAAASFLGADIGPEVDEINRAFVDMVAAAVAPIRRPLPGTQMARGVAGRKRIVAYFRQQIPLRRGNHGGDDLFSQLCRATHEDGALLSEQDIIDHMSFLMMAAHDTLTSSLTSFIGELAANPDWQDRLRAEVLALGLAPGAPSSFDDLEKMPLSEMAFKEALRIKPPVPSMPRRAMRDFTFKGFRIPAGTAVGVNPLYTHHMKDIWPEPDRFDPLRFTEEAQRNRHRFAWVPFGGGAHMCLGLHFAYMQAKCFARHFLQNIEVSLAPGYKPDWQMWPIPKPRDGLKVRVKAV

SEQ ID NO: 8186 - protein, 145 aa, Oryza sativa
SPLLVATCLLDLIQVHAGVCMLAISHLQVTDSLLHEVFQSVGAPVGRMQAHQEGKVILWVFVDYYDRRSAAIAIVSLNGRQLFGQPIKVNWAYASTQREDTSGHFNIFVGDLCPEVTDAALFAFFAGFTSCSDARVMWDQKTGRS

SEQ ID NO: 8187 - protein, 420 aa, Sulfitobacter sp. EE-36
MSLQQHRLSNGFRIVTEHMPGLASASIGVWVSAGARHETATQNGIAHFLEHMAFKGTAKRTSLQIAEAIEDVGGYINAYTSREVTAYYVRVLENDVSLGLDVIADILRNPVLDNGEIEVERGVILQEIGQALDTPDDVIFDWLQEKAYPNQPIGRTILGPSERVSNFSREDLSGFISQHYGPDQMILAAAGAVDHDEIVRLAEQLFGDMPPKPLFDVDAAKFSGGEVRQLKPLEQAHFALGFEAPGYRADDIYVAQIYASALGGGMSSRLFQEVRENRGLCYTIFAQAGAYADTGMMTIYAGTSGEQLPELAGITIDEMKRAASDMSPAEVARARAQMKAGLLMGLESPSNRAERLARLIQIWDRVPPLEETIAQIDAVTTGDVRDFAQNIAASAPAALALYGPVDGAPTLEELQERRAA

SEQ ID NO: 8188 - protein, 478 aa, Vibrio sp. Ex25
MMQQIKNETLKSVFKQWSSEEGIVVINPATEQELVRLKPSSLEELDTLIGQCKTEQVRWAKLSAKERSRRLKKWYQLLLDNAEDIATIITLEQGKPLTESKGEVMYGASFVEWFSEEAKRAYGEVIPAPTTDRRLSAIRQPVGVCAAITPWNFPIAMITRKAAPALAAGCGMLIKPSELTPLTAIAVVELAYQAGIPKELLPVVVSEQAAEFGQVLSTDPRIKKVSFTGSTRVGKILMKQASDSVKAVSMELGGNAPFIVFDDADLDAAAEGLVASKFRNAGQTCVCTNRLYVHEDVKQAFIEKVLSKLNKLQLGNGLEKGVTLGPVITMASKHRLEAVIDQAVQEGASIANSPQRRSGRFMEPVLLDSVKQYMSIVQQELFGPVLPIITFENDEQVLGMANDTEYGLACYFYTNNFKRIVAFSEGLEYGMVGVNEGIISTEVAPFGGVKESGVGREGAKQGLDEYLETKYICLGGLS

SEQ ID NO: 8189 - protein, 567 aa, Oryza sativa
MASSHIILPPDDDDEEQRRLEEEEDEDPWARSGPPPAAPEHAMKAALPFSATCVRISRDSYPNLRALRNASSVSLADAAYVKISEGDFGYVLDDVPHLVDHLPDAPTYPNPLQDHPAYSTVKQYFVNEDDTVPQKVVVQKNSRRGVHFRRAGPRQKVYFESDEVKACIVTCGGLCPGLNTVIRELVCGLAHMYNVSKIYGIQNGYKGFYSSNYLTLTPKSVDDIHKRGGTVLGTSRGGHDTKKIVDNIQDRGINQVYIIGGDGTQKGAYEIFKEIRKRGLKVSVAGIPKTIDNDIAIIDKSFGFDTAVEEAQRAIDSAHVEACSAENGIGLVKLMGRYSGFIAMYATLASRDVDCCLIPESPFYMDGEGGLLQYVERRLKENKHMVIVVAEGAGQDLIAKSLSTSEQQDASGNKLLLDIGLWLTHKIKDHFKSKKMEMTIKYIDPTYMIRAIPSNASDNVYCTLLAHSAIHGAMAGYSFTVGNVNGRHAYIPFYRVTSTRNKVKITDRMWARLLSSTNQPSFLSQKDIDEAKENDRTANKPPLPTGLSHHVANSFDQSASSSSNSQI

SEQ ID NO: 8190 - protein, 261 aa, Burkholderia vietnamiensis G4
MSNFQNIQYEKKSGIAYVTVDRPKSLNALNFQTLTEITAAFEDARDDDAVHGVIVTGSGNKAFVAGADISEIAALSAVAAEKFAGLGHSTMNLIETLGKPVIAAVNGFALGGGCELAMACTMRIASEHAKFGQPEVKLGIIPGFGGTQRLPRLVGKGIAMQLILTAALIDANEAHRIGLVNEVVEADKLIARAEQILNQIAANAPIATRLAITAVNQGVEASLEQALSLERALFAVCAATEDKAEGTAAFLDKRAPTFQSK

SEQ ID NO: 8191 - protein, 480 aa, Capsicum annuum [sequence omitted]

SEQ ID NO: 8192 - protein, 159 aa, Picea abies
MSDDDHQFESKGDAGASKTFPQQAGTIRKNGYIVIKARPCKVVEVSTSETGKHGHAKCHFVGIDIFSGKKLEDIVPSSHNCDVPHVTRTDYQLIDISEDGFVSLLTESGQTKDDLKLPTDDQLLAQIKAGFDEGKDLVVTVMSAMGEEQICSLKDIGPK

SEQ ID NO: 8193 - protein, 451 aa, Ipomoea trifida
MSSNTGGHRHCYRRLCSYYFLIFQILILPTLHAPLALNSITPTHPLAVDQTLVSSNALFELGFFTPENSGRWYVGIWYKDIEEKTVVWVANRNSPLTNSTGRGVLRIGDDGNIYLVDGDGNSIWGSSSTTRPGTTVAELLDSGNFVLRRENDRTEENYLWQSFDYPTDTLLPGMKLGCDSKTGLNRYISSWKTATDPAEGDFSFKLDTHGLPEAFLRKKNDVIYGSGAWNGIRFSGVPEMNPTAVITFSFVTTKSENYYTFSLHNETIFSKLQVSHGGYLERYMWIPTNKIWNKFWYAPADQCDYYKECGPYGICDTSISPVCECLVGFGPRNRQAWDLRDGRDGCVRVHDLECESDGFLAMNYMKLPESSSAFVDAGMSFDECTAMCKRNCSCAAYANSNITGDGSGCVMWTTELLDMRQYTAAEGGQVLYVRVAASDVGTFVLRSHLAF

SEQ ID NO: 8194 - protein, 393 aa, Saccharomyces cerevisiae
MLSRTIRTQGSFLRRSQLTITRSFSVTFNMQNAQKRSPTGIVLMNMGGPSKVEETYDFLYQLFADNDLIPISAKYQKTIAKYIAKFRTPKIEKQYREIGGGSPIRKWSEYQATEVCKILDKTCPETAPHKPYVAFRYAKPLTAETYKQMLKDGVKKAVAFSQYPHFSYSTTGSSINELWRQIKALDSERSISWSVIDRWPTNEGLIKAFSENITKKLQEFPQPVRDKVVLLFSAHSLPMDVVNTGDAYPAEVAATVYNIMQKLKFKNPYRLVWQSQVGPKPWLGAQTAEIAEFLGPKVDGLMFIPIAFTSDHIETLHEIDLGVIGESEYKDKFKRCESLNGNQTFIEGMADLVKSHLQSNQLYSNQLPLDFALGKSNDPVKDLSLVFGNHEST

SEQ ID NO: 8195 - protein, 451 aa, Ipomoea trifida
MRAAMESGSRLFWYFLILQILIPTTAIAVDTITPTQPLTQNQTLVSAGGVFQLGFFSPGGNSGGLYVGIWYKEIQDRTIVWVANRDKPLRNNSTGFLKIGEDGNIHLVDQTENSIWSSSNSNQSVPENTVAQLLDSGNLVLRRENDENPENYLWQGFDYPTDTLLPGMKLGWDSKTGRNRYISSWKTPTDPSEGDITFKLDINGLPEAFLRKKDNIITRSGGWNGIGFSGVTEMQTKEVIDFSLVMTKHEVYYTFEIRNKTLLSRLVANYTEILERYTWVPENRIWNRFWYAPKDQCDNYGECGTYGICDTDKSPVCGCLVGFEPRKQQAWSLRDGSGGCFRHDQLDCETDGFLTMNNMKLPESSTSFVDVTMSLDECKEMCVRNCSCTAYSNYNISNGGSGCVIWTAELLDMRQYTAEGGQLLYIRVPASDAGAFFSSFLFGTVKTIQKT

SEQ ID NO: 8196 - protein, 159 aa, Picea abies
MSDDDHQFESKADAGASKTFPQQAGTIRKNGYIVIKARPCKVVEVSTSKTGKHGHAKCHFVGIDIFSGKKLEDIVPSSHNCDVPHVTRTDYQLIDISEDGFVSLLTESGQTKDDLKLPTDDQLLAQIKAGFDEGKDLVVTVMSAMGEEQICSLKDIGPK

SEQ ID NO: 8197 - protein, 162 aa, Triticum aestivum
MAQRDHKQEEPTELRAPEITLCANSCGFPGNPATQNLCQNCFLAGPASTSPSSSSSSLPGVSAPTPVIDRPRPAPLEAELARPAVDRAPATEAKPARTSVNRCSSCRKRVGLTGFRCRCGDMFCGEHRYSDRHGCSYDYKAAARDAIARDNPVVRAAKIVRF

SEQ ID NO: 8198 - protein, 348 aa, Glycine max
MAVVGNPRTWIPYMNSKDCSQGFCSLYCPQWCYIVYPPPPPFEYPDDDSSPNFSPLVIAIIGILATAFLVVSYYTLISKYCGPRESARRDPNEDHLQDNQNHNDTLPEHDSNTGLDEALIKSIAVFNYKKGIGGSAGVTDCSVCLSEFQDDESVRLLPKCSHVFHAPCIDTWLKSHSSCPLCRAGIFTFTSSQVEVEAPSTNETSPDNESVESGNEFGVVVQEEVEENMHHTRAYPKPALRAFSDLSSFQGRHRVIEIRDDGRSVSMDHSFQNALSVAHVLQMSEDEDSTEAAGPSKRSHRESSKCIYKSRVLHCVLSPIAMKRSFSSGRFSVSKSGIRRHGNGSIPI

SEQ ID NO: 8199 - protein, 105 aa, Haemophilus somnus 129PT
MTLNITSKQMEITPAIRSHIEERLAKLGKWQTQLINPHFILNKVPHGFAVEVAIGTPYGDLFASSESDDMYKAINEVEEKLERQLNKLQHKGEARRASERLKDSF

SEQ ID NO: 8200 - protein, 148 aa, Magnetospirillum magnetotacticum MS-1
MLRFALGIRKPIAALATEAEGPALARNLSAFSLVCIGVGATVGAGIFVLTGTAAANFAGPGLMLSFVLGAVASGLVALCYAELAAMIPVAGSTYSYTYATLGALPAWIIGWDLVLEFAFAAATIAVGWRATPKASCRCRVSCRHAPPK

SEQ ID NO: 8201 - protein, 454 aa, Ipomoea trifida
MSSSSHCSLFSLFFFLLFHKISWAADTITATLSVKDGEGKTTIVSSNGTFELGFFSPGKSENRYVGIWYKNISVTTVVWVANRETPLNTTSGILKIIKPGILVLLNEDNATIWSTNTSRSVQNPIAQLLDSGNLVIKDAGDGNEEKNFLWQSFDYPTDTYLPGMKIGWNFVTGHETFLSSWKSSEDPATGEFKYSINRNGYPQNFLKRGSVVRYRSGPWNGFQFSGSLNSRQSPFYEIGFVFNPREAYFTNHLLQPVITKATLSWNGLLERTTWVDRTQRWVLYLNVPTDTCDIYKLCGAYGKCNIQTSPVCGCLDKFVPKNEADWLKADWSSGCERRTALSCNEGEGFLKYSGIKLPDTQSVWFNQTMTLEECKTRCLRNCSCMAYSNIEIRNGGTGCFMWFDELLDIRLVPNEGQDIYIRVAASELGKSFAPIHLLVISTLCFRTLCKVMIT

SEQ ID NO: 8202 - protein, 318 aa, Arabidopsis thaliana
MDGDELTEQETALYYRQIRVWGAGAQRRLSKSHVLVSGIKGTVAEFCKNIVLAGVGSVTLLDDRLVTTEVFNANFLILPDENAYVGKTVAEICCDSLKDFNPMVHVSIEKGDLSTLGVDFFEKFDVVVIGYSSRATKKAVNEKCRNLAKRVAFYTVDCRGSCGEIFVDLQNYKYTKLDETVECELTFPSFEEAVSVPWKPMPRRTAKLYFAMRVIELFEETEGRKPGECSLSDLPRVLKLKKELCEGNSVSENHIPDILLERLVSNNTEFPPACAIIGGILGQEVIKVISGKGEPLKNFFYFDAEDGKGVIEDLSHKL

SEQ ID NO: 8203 - protein, 345 aa, Thermus thermophilus
MKVAVLPGDGIGPEVTEAALKVLRALDEAEGLGLAYEVFPFGGAAIDAFGEPFPEPTRKGVEEAEAVLLGSVGGPKWDQNPRELRPEKGLLSIRKQLDLFANLRPVKVFESLSDASPLKKEYIDNVDFVIVRELTGGIYFGEPRGMSEAEAWNTERYSKPEVERVARVAFEAARKRRKHVVSVDKANVLEVGEFWRKTVEEVGRGYPDVALEHQYVDAMAMHLVRSPARFDVVVTGNIFGDILSDLASVLPGSLGLLPSASLGRGTPVFEPVHGSAPDIAGKGIANPTAAILSAAMMLEHAFGLVELARKVEDAVAKALLETPPPDLGGSAGTEAFTATVLRHLA

SEQ ID NO: 8204 - protein, 221 aa, Zea mays
KHEKPYSASPPPNCRLSSPLLHRREKPRRMPRITSVESPGCPPLRAITTDILGLIKVVEARARPAGVAKVVETWGEPDASRAILVASLADRAVDPVLAVARKNGVVELLNPLNGDALAVVKSSRTDQTVGAVENDPLVALHLFRKHAPDLTTLGTFLACTEKGKASVRSVAKENTVSDSDVGPSSTWEVCNKGTLAVSSVEVGENLCNGWREWYESELVGY

SEQ ID NO: 8205 - protein, 309 aa, Pseudomonas aeruginosa UCBPP-PA14
MHPWARRNIPQLAGRLALVTGANSGLGWQAARTLAGKGATVVMACRNREQAERARRAILDEYPQARLELADLDLADLASIRACAAGFRQRHERLDLLFNNAGVMFLPLRRTRDGFEMQMGTNHLGHFALTGLLLDSLLAAPRPRVVGMTSGFNQFGRLPLDDLNAERGYNRYLAYCHSKQANLLFSLELQRRAGQRGVLLQSLAAHPGYAATNLQYAAPAMSGSRLGRWAMKVANGAFAQSAEMGALPALSALTEQRWYGGAYVGPDRWLETRGYPAAARIPRNARDLGLAARLWALSEELTGVRFWSE

SEQ ID NO: 8206 - protein, 291 aa, Leptospira interrogans serovar Copenhageni str. Fiocruz L1-130
MAVLVDENTKVVVQGITGKEGSFHATQMLAYGTKVVAGVTPGKGGSKWEDKVPVFNTIKDSIKNEGVNAAVIFVPPAFAADAIIEGILAELPLVICITEGIPTHDMLKVYSVLRNSKTKLVGPNCPGVITPRAKQKLGIMPGFIHSPGSVGIVSRSGTLTYESVAQITKQGLGQSTCIGIGGDPVPGMNHTEAIKLLNEDPETKGIVMIGEIGGTSEEEAAEYIKNHVKKPVVGFIAGQTAPPGKRMGHAGAIISGGLGTATSKMKAMQEAGIQVCQSIAEVGEKMKKALG

SEQ ID NO: 8207 - protein, 596 aa, Pseudomonas fluorescens PfO-1
MTVTVGDFLVERLSQWGVTRIFGYPGDGINGVFGTLSRAGGKIEFVQARHEEMAAFMASAHAKFTGELGVCIATSGPGASHLITGLYDARLDHMPVLAIVGQQARTALGSHYQQELDLVSMFKDVAGAFVQQASAPSQVRHLLDRAVRTAIGERRVTALILPNDLQDLEYKAPARAHGTAHSGVGYSKPKVLPYDADLQRAADVLNAGEKVAILVGAGALHASEQVFAIAEKLGAGVAKALLGKAVLPDELPWVTGCIGLLGTEPSYKLMTECDTLLMIGSGFPYAEFLPKEGQARGVQIDLQPDMLSLRYPMEVNLAGDAAETLAALAPLLEHKPLRKWRKKIEGWRASWDKTLEKRAMAKADPVNPQRVVYELSPRLPEQAIITSDSGSCANWFARDLKIRKGMKCSLSGGLASMGAAVPYAIAAKFAFPQRPVIALVGDGAMQMNNMAELITVAKYWRQWDSPKWICAVFNNEDLNQVTWEQRVMEGDPKFGASQSIPDVPYHLFAISIGLKGIFVDREEDVAAAWEQALASEVPVVIEFKTDPNVPPLPPHIKLEQAKKFASTLLKGDPDEAGVIVQTAKQVLGTVLPGKRK

SEQ ID NO: 8208 - protein, 453 aa, Fusobacterium nucleatum subsp. nucleatum ATCC 25586
MKFWSIVLLTINSIIGTGIFLSPGAVAKLVGDKAATIYLAAAVFAAVLAVTFAAASKYVVKSGAAYAYSKAAFGDEVGSYVGITRVVSASIAWGVMATGVVKTTLSIFGQDSSNVKNVTIGFITLMFVLLIINLIGTKLLTLISNISTIGKIGALGITIIAGIFILVFSDGANLQGLTLLKDAEGNNLIPEFTTSVFVTALVGAFYAFTGFESVASGSADMEKPEKNLPRAIPLAIAIIAAIYFGIVFVSMYIDPVAMVTSKDPVVLASVFKNQLLQKIIVMGALMSMFGINVAASFHTPRVFEAMAKEKQVPDFFAKRTKSGLPLTSFILTAIIAVVIPLAFNYNMAGIIIISSISRFIQFIVVPVAVIVFFYGKSKEEILNTNKNFIIDVIIPIIALLLTILLLVKFNWAQQFSTKLDDGTVTVNLKAVVSMVIGYLILPIVLRIYMRTKK

SEQ ID NO: 8209 - protein, 506 aa, Arabidopsis thaliana
MFIAMADFKLLLLILILLSLFELDLLHFHHDFFSPFPVKIGLLLISIFFYAYSTTRSKPVYLVDFSCHQPTDSCKISSETFFNMAKGAQLYTEETIQFMTRILNRSGLGDDTYSPRCMLTSPPTPSMYEARHESELVIFGALNSLFKKTGIEPREVGIFIVNCSLFNPNPSLSSMIVNRYKLKTDVKTYNLSGISVDLATNLLKANPNTYAVIVSTENMTLSMYRGNDRSMLVPNCLFRVGGAAVMLSNRSQDRVRSKYELTHIVRTHKGSSDKHYTCAEQKEDSKGIVGVALSKELTVVAGDTLKTNLTALGPLVLPLSEKLRFILFLVKSKLFRLKVSPYVPDFKLCFKHFCIHAGGRALLDAVEKGLGLSEFDLEPSRMTLHRFGNTSSSSLWYELAYVEAKCRVKRGDRVWQLAFGSGFKCNSIVWRALRTIPANESLVGNPWGDSVHKYPTEINSHSNRSYYVDNETGGDAGSISHGAISVGYSQPPPPHKVMIENSSENF

SEQ ID NO: 8210 - protein, 241 aa, Lycopersicon esculentum
LHLFYQYNPKGSVWGNIIWAHSVSKDLINWIHLEPAIYPSKKFDKYGTWSGSSTILPNNKPVIIYTGVVDSYNNQVQNYAIPANLSDPFLRKWIKPNNNPLIVPDNSINRTEFRDPTTAWMGQDGLWRILIASMRKHRGMALLYRSRDFMKWIKAQHPLHSSTNTGNWECPDFFPVLFNSTNGLDVSYRGKNVKYVLKNSLDVARFDYYTIGMYHTKIDRYIPNNNSIDGWKGLRIDYGNF

SEQ ID NO: 8211 - protein, 341 aa, Bradyrhizobium sp. BTAi1
MRIPLAASSISPFFQRVIVPMQAPIHAKVVIIGSGPAGYTAAIYAARAMLEPVLIQGIQPGGQLTITTDVENYPGFADVIQGPWLMEQMEKQATHVGAQIKIDLVTRLELAQRPFRLTCDSGDVYLAETVILATGAQARWLGLPSEETFKGFGVSACATCDGFFYRGKEVIVVGGGNTAVEEALFLTNFASTVTVVHRRDHFRAERILQERLFKHPKIKVVWDSALDEICGASNPSKVTHVRLKNVKTGAVSELPADGVFVAIGHAPATELVAGQLKLKPSGYVEVVPGTTATSVPGVFAAGDVADETYRQAITAAGMGCMAALEAERFLAHAASERAAAE

SEQ ID NO: 8212 - protein, 244 aa, Coccidioides immitis RS
MSESRQELLAWLNNLLQLNITKVEQCGTGAAYCQVYDSIFMDVPMSRVKFNVNTEYAYIQNFKVLQNTFTRHQIDRPVPVEALVKCRMQDNLEFLQFTKRFWDQNYPGGDYDAVGRRKASGAPLASSTSRPGTTSATGARRGATPTTAARPRVGGGVSANTAALTQEINSQKEAIAGLEKERDFYFAKLRDIELLLQQAVEADPELEKDEDSLIKHIQAILYSTEEGFEIPADAEAVGEELETF

SEQ ID NO: 8213 - protein, 575 aa, Vicia faba var. minor
MISLTNCLCLIVFILVCVLCNNGVEAFHDIYPGLQSISAPSVNKLHRTGFHFQPNRNWINDPNGPMYYRGIYHLFYQYNPKGAVWGNIVWGHSVSKDLINWKELEPALFPSKPFDKYGCWSGSATILPGKGPVILYTGVVDKQSNEVQCIAIPANASVPLLTNWGKPDRLNPILTADHRMNGSVFRDPTTAWFGKDGHWRILIGGKTGDTGVAYLYRSKNFLKWIRAKHPIHSAKRTGMWECPDFYPVSLEGKNGLDLSMMMGNNVKHVLKNSLDITRYEYYTIGTYLQNQDKYIPDKTSEDGWGGLRYDYGNFYASKSFFDPTKNRRIIWGWANESDTKEDDVKKGWAGIQAIPRTVWLDSSRRQLRQWPVEELNRLRGKQVEMKNRKLKKGGYLEVKGITASQADVEVTFSFSSLDKAEAFDPNWENAEDLCAQKGSKVRGGVGPFGLLTLASKKLEEYTSVFFRVFKAANKHKILMCSDAKSSSLNRELYKPSFAGFVNVDLGNNKKLSLRSLIDHSVVESFGVGGKTNILSRVYPTLALKEKAHLFVFNNGTEHITVENLKAWSMKTASRN

SEQ ID NO: 8214 - protein, 244 aa, Lycopersicon esculentum
LHLFYQYNPNGSVWGNIVWAHSVSKDLINWINLEPAIYPSKPFDQFGTWSGSATILPGNKPVILYTGIIDANQTQVQNYAIPANLSDPYLREWIKPDNNPLIIADESINKTKFRDPTTAWMGKDGHWRIVMGSLRKHSRGLAIMYRSKDFMKWVKAKHPLHSTNGTGNWECPDFYPVSSKGTDGLDQYGEEHKYVLKNSMDLTRFEYYTLGKYDTKKDRYVPDPDSVDSLKGLRLDYGNFYASK

SEQ ID NO: 8215 - protein, 581 aa, Vicia faba var. minor
MTILSTIWLLPLFTFIYVNGVLPIEATHHVYRELESLSSDEYSTNQPYRTGYHFQPPKNWINDPNGPLIYKGVYHLFYQYNPKGAQWGNIVWAHSVSTDLINWIPLDPAIFPSQPSDINGCWSGSTTILHGNKPSILYTGINKLNHQVQNLAYPKDFSDPFLREWIKSPENPVIEPTSENKINASSFRDPTTGWLGKDGKWRGIVGSKRSTRGIAILYKSKDFVKWKKSKHPLHSAKGTGMWECPDFFPVLKNGIKGVDTSLNDDYVRHVLKVSLDDKKHDYYLIGSYDEEKDRFVPDRGFEEVEIEEVFRYDYGKYYASKTFFDYEKNRRILLGWVNESSSIPDDIKKGWSGIHTIPRTIWLHESGKQLVQWPVVEIEKLRVNHVNLPTKLLKGAELLQINGVTASQADVEIAFEVNKNTIGEAEVLEKLPDPQILCSQKGTSVKSGLGPFGLFVFASKGLQEFTSVFFRIFGFQNKNIVLFCSDQSRSSLNKDNDLTSYGTFIDVDVLHEKLSLRTLIDHSVVESFGGEGKACITARVYPTLAVNDKALIYAFNNGTTDVKITSLNAWSMKKARLNGKL

SEQ ID NO: 8216 - protein, 614 aa, Podospora anserina
MAPTIASGPAGTTVTVPGNSSLWDRISNWASENKGLVYTIAGVAVVVTGAGVVYYIRKGPDEESVPKPSKKERRKRKQAEKEAEKGAAAEKEAETSKTATVETADELPEIDEASVIGLSESQRKEYAAKLKEAGNKAYNQKDFNKAIELYSKAILCKPDPVYYCNRAACHNALSEWEKVVEDTTAALAFDNEYIKALNRRSNAYDHLGKYSEALLDITASCIIDGFRNEQSAQAVERLLKKFAETKAKEILETKPARLPSATFVGNYLQSFRAKPRPAGLEDDAELDEETGKGQLQKGLKAMESKIAPWYEEAAEAFEKALTLGDLGEYEAYAHNLRGTFQCLKGKHQEALADLSKSIELDPGLTQSYIKRASMNLELGAPDKAEEDFEAALAKNPEDPDIYYHRAQLHFIKGEFADAQKDYQKSIDLDPDFIFSHIQLGVTQYKLGSIASSMATFRRCIKNFPKIPDVYNYYGELLLDQTKFSEAIEKFDTAIELEKETKPMSMNVLPLINKSLALFQWKQDFSEAEKLCEKALIIDPECDIAVATMAQLLLQQGRVTEALKYFERAAELARTEGELVSAISYAEATRTQIQVQEKYPDLASKLSGMGGGVVR

SEQ ID NO: 8217 - protein, 642 aa, Vicia faba var. minor
MRNDSPYTPLLNASHNNHRRRELLLLFSGLLLLASIIAFSAYIAQPHADADVSSSSSILSDEATRPTTLSRGVSSGVSEKSNTFLLSGNLVGEGGSFPWNNTMLSWQRTAFHFQPEKNWMNDPNGPLYYKGWYHFFYQYNPNGAVWGDIVWGHAVSRDLIHWLHLPLAMVADQWYDSNGVWTGSATILPDGQVIMLYTGSTNEFVQVQNLAYPADLNDPLLVDWIKYPSNPVLVPPPGILPKDFRDPTTAWLTTEGKWRITIGSKINKTGVALVYDTVDFKTYERKDMLLNAVPGTGMWECVDFFPVSMKSENGLDTSFTGDEVKHVMKVSLDDDRHDYYALGTYDEKKVKFIADDFENDVGIGLRYDYGIFYASKTFYDQKKDRRVLWGWIGESDSEYADVAKGWASVQSIPRIVKLDKKTGSNLLQWPVAEVESLRLRSDEFQNLKVKPGAVVSVDIETATQLDIVAEFEIDKEALEKTAQSNVEYECNTSGGASRRGALGPFGLYVLADNGLSEYTPVYFYVVKGINGKLHTSFCSDQSRSSLANDVHKQIYGSVVPVLEGEKLSLRILVDHSIVESFAQGGRTCITSRVYPTRAIYGAARLFLFNNAIETNVTASLKVWQMNSAFIRPYHPDQKRQTS

SEQ ID NO: 8218 - protein, 818 aa, Medicago truncatula
MKMLLFIWFLIFSYTIRASTSLDTLAVGESIQDGKTLVSSNGIIEVGFFSPQNSTRRLRYLGIWYRNVSPLTVVWVANKEKPLQHSSGVLTLNEKGILMLLNDVNSTIWSSNASSIAWNSTTPIAQLLDTGNLVVKNRHETEKDVFLWQSFDYPGDTLMPGMKLGWDLETGLERFITSWKSVDDPAKGEFTTRVDLRGYPQVIMFNGSDIIFRSGPWNGHSLAGSPGPNSVLSQFFVFNEKQVYYEYQLLDRSIFSVLKLMPYGPQNLFWTSQSSIRQVLSTSLDECQIYAFCGANSVCTIDGNNHSNCECMKGYAPKFPEEWNLAFWSNGCIQKKNSSYIDGFLKYTLMKVPDTSSSWFSKTLNLEECRKWCLRNSSCVAYANIDIRNGGSGCLIWFNNLIDVRKFSQWGQDLYVRIPPSELDQLAEDGHRTNKNKIVGITLGVIIFGLITFLSIWIMKNPGVARKVCSKIFNTKQRKEDLDLTTFDLSVLVKATENFSSNNKLGEGGFGPVYKGTMIDGQEIAVKRLSKKSGQGLQEFKNEAALIAKLQHRNLVKLLGCCIEGGETMLIYEYMPNKSLDYFVFDEIKRKSLDWIKRFDIINGIARGLLYLHRDSRLRIVHRDLKASNILLDANLDPKISDFGLARTFFGEQVEENTNRVAGTYGYMPPEYARSGHFSTKSDVFSYGVIVLEIVSGKKNRDFSDSEYSNYLLGYAWRLWTEERALELLDESLGQQCTPSEVVRCIQIALLCVQQRPEDRPEISSVVLMLINGEKLLPKPKVPGFYTEKDVTPELDSSLANHELFSTNELSITEIVAR

SEQ ID NO: 8219 - protein, 485 aa, Magnetospirillum magnetotacticum MS-1
MIKHLINGKHVESASTIANLNPATNEVICQIAAGGEAEVARAVAAAKEAFPKWAGLAPAQRAKLLRKVGDLINQHVDEIAKLESLDTGQSYWRTKKMLVPRAADNFYFFADTCQHVDGETYPTNDHLNYTIYQPVGVVGLISPWNVPFMTATWKTAPCLAFGNTAVLKMSELSPLSADRLGQLILEAGIPAGVFNIVHGYGSAVGEALVKHPDVRGVSFTGSTATGNRIIQSGGLKKYSMELGGKSPNIVFDDCDFERAVDAAIVAVYGNNGESCTNGTRILVQDGIYDRFVAALAERTKKVVVGDPLDEATNVGPMITRDHWKKVTGYIELGIKEGARVVAGGLGEPEGLPAHLKNGNFVKPTVLADVDNSWRVAQEEIFGPVACVIRFKDEAEALKIANATTYGLASYVWTENGAKAIRMAEGIEAGLVFVNSQNVRDLRQPFGGIKGSGTGREGGHYSYEAFLEVKNVCVSKGNHHIPRWGV

SEQ ID NO: 8220 - protein, 478 aa, Clostridium perfringens str. 13
MKFNELNLSEDIIKALNNLGYKNPSEVQEASIPKLLKGEDIIVKSQTGSGKTASFGIPVCEKINIEEKKVQCLVLTPTRELAIQVKDELSNIGRIKKVRCAAIFGKQPFNEQIRELKQRVHIVVGTPGRVFDHMERGTLDLSEVNYVVIDEADKMLSMGFIDQIKDILGELRLNKTTALFSATFSKEIEEICEEYMRNPMLLEVKSKVFNRDRIEESAIEIEEKNKEKALWKCLYAYHPESAIVFCNTRNKVKSVYKMLKDEGITCNELHGDMEQKKRIEVMENFRDKHFKVLVCTDIAARGIHVDSIELVINYEVPMETESYVHRIGRTGRAGREGKAITFVNHYEKKYLENVEEYIGYEIKKVSLPSDEEVKAGRKIFKESQKVQLKESKKPKKEVHGDIVKIHVNGGKKKKIRAFDIVGCFSNLPGLTGEDIGIIDVQDGFSYVDILNGKGDKVLKSFKEVTIKGKKVKIQKARK

SEQ ID NO: 8221 - protein, 213 aa, Zea mays
MYADAGFAFAFAAAYSPTLTSSQPQPPPPPFDYAFSSEPPLLSMPAMDHDAYLGNLVQPSMVSEYDLGGEGDLFKAPEAIIEEPLLSLDPVAAAFSMMAGNGSAVMDQTIKDAGTGTIQNDPLLSEVLYECEKELMEKSTIEGELTANVCVTISDLKTEERKQKLSRYRKKKIKRNFGRKIKYACRKALADSQPRVRGRFAKIEECDLLKPSK

SEQ ID NO: 8222 - protein, 448 aa, Clostridium perfringens str. 13
MEVKKYVDNLMEDLKKNNPGESEFLAAAEEVLYSLVPVLEKNPKYMEEGILERIVEPERVIMFRVPWVDDAGNVRVNRGYRVQFNSAIGPYKGGLRFHPSVNLSIIKFLGFEQIFKNSLTTLPIGGGKGGSNFDPKGKSDREIMRFCQSFMSELYRHIGPNTDVPAGDIGVGGREIGYMFGQYKKLKNSVDAGVLTGKGLTYGGSLARKEATGYGLVYFVDEMLRDNGQTIEGKTVVISGSGNVAIYATEKVQELGGKVVALSDSSGYVYDENGIDLEVVKEIKEVKRGRISEYVNYVKTAKFTEGFRGIWNVKCDIALPCATQNEIDKSSAKTLIDNGVIAVGEGANMPSTLEAQKLFVDNKILFAPAKAANAGGVATSALEMSQNSLRMSWTFEEVDAKLKDIMKNIYYNSRNAASEYGHDGNLIVGANIAGFKKVADAMLDHGII

SEQ ID NO: 8223 - protein, 94 aa, Triticum aestivum
YGPSIVDECLEAIIVSKETLPGGHAVNRKRAERGLTQLQIEVVELVPEKSTGNKISSTAFRKMEAERELQQQETAIGSHSIQKIESSEGIAATE

SEQ ID NO: 8224 - protein, 386 aa, Coxiella burnetii RSA 493
MFELGETSPQNAQIKVIGIGGGGGNAIEHMIAENIDGVEFVCANTDSQALGRSNARVVLQLGDEITKGLGAGADPSVGRQAAEEARDRIREILEGTDMVFLTAGMGGGTGTGAAPIFAEVAKELGILTVAVVTKPFVFEGKKRMDVAEEGIKALGNYVDSLITIPNNKLLNVLGKNITLLNAFKAANNVLLGAVQGIADLITRPGLINVDFADVRTVMSEMGMAMMGTGVSSGENRAREAAEAAIASPLLEDVDFTGARGVLVNITAGMDLSIGEFEQVGEAVKAFASETATVVIGTVIDPDMSDELRVTVVVTGLGSHAGGGAGVPLKPVKNTKNDGTLDYHQLDRPTYMRNQEPSKRTVDLEEQRDRDFEYLDIPAFLRRLEED

SEQ ID NO: 8225 - protein, 560 aa, Turritis glabra
MASSTALICDTEAWKDLKGHVEDIKKTHLRDLMSDANRCQSMIMEFDGLLLDYSRQRATVETMDKLLNLAKAAQLTEKISRMFNGEHINSTENRSVLHVALRAPKDAVIKADGKNVVPEVWNVLDKIKEFSEKIRSGSWVGATGKPLKDVVAIGIGGSFLGPLFVHTALQTDPEALECAKGRQLRFLANIDPVDVARNINGLNPETTLVVVVSKTFTTAETMLNARTLREWITTALGASAVAKHMVAVSTNLALVEKFGIDPNNAFAFWDWVGGRYSVCSAVGVLPLSLQYGFSVVEKFLKGASSIDQHFQSTPFEKNIPVLLGLLSVWNVSFLGYPARAILPYSQALEKFAPHIQQGSMESNGKGVSIDGLPLPFETGEIDFGEPGTNGQHSFYQLIHQGRVIPCDFIGIVKSQQPVYLKGEVVSNHDELMSNFFAQPDALAYGKTPEQLQKENVSENLIPHKTFSGNRPSLSLLLPELTAYNVGQLLAIYERRVAVQGFVWGINSFDQLGVELGKVLATQVRKQLHSSRTQGTALEGFNYSTTTLLKRFLETSSKPQM

SEQ ID NO: 8226 - protein, 437 aa, Saccharomyces cerevisiae [sequence omitted]

SEQ ID NO: 8227 - protein, 161 aa, Shigella flexneri 2a str. 301
MKYDTSELCDIYQEDVNVVEPLFSNFGGRASFGGQIITVKCFEDNGLLYDLLEQNGRGRVLVVDGGGSVRRALVDAELARLAVQNEWEGLVIYGAVRQVDDLEELDIGIQAMAAIPVGAAGEGIGESDVRVNFGGVTFFSGDHLYADNTGIILSEDPLDIE

SEQ ID NO: 8228 - protein, 486 aa, Cyanophora paradoxa
MVNTQSPKNSGLENLVNQPYKYGLPLIFEIETISKGLTEETIRLISEKKNEPQFMLEFRLQAYRKWLEMSNEPEWAHLNYPKINYQDMVYYSAPKQKKKLQSLDEVDPTLLETFEKLGIPLTEQKRLANVAVDAIFDSVSVATTFKEELAKEGVIFCPISEAVQKYPDLIKKYLGSVVSTSDNYFSCLNAAVFSDGSFCYIPKNVRCPLELSTYFRINNGESGQFERTLIVADEGSYVSYLEGCTAPQFDTNQLHAAVVELVALDNAEIKYSTVQNWYAGDENGKGGIYNFVTKRGLCAGKNSKISWTQVETGSAITWKYPSCVLLGDNSIGEFYSVALTNRYQQADTGTKMIHIGKNTRSRIISKGISAGHSQNSYRGLVKIGPKAVGARNYSQCDSLLIGDNSQANTFPHLQIKNPTAKVEHEASTSKIGEEQIFYFLQRGINAEEAISLIISGFCREVFNNLPMEFALEADKLLGLKLEGSVG

SEQ ID NO: 8229 - protein, 223 aa, Pseudoalteromonas tunicata D2
MSKFLIAPSILSADFARLGQDVEAVLAAGADVVHFDVMDNHYVPNLTIGPMVCQALRNYGITAPIDVHLMVKPVDSLIPMFADAGASIITFHPEASEHVDRTLQLIKDHGCQAGLVLNPATSLSYLEHVMDRLDVILLMSVNPGFGGQSFIPHTLEKLRQVKALINASGRNIRLEVDGGVNVDNIKEIAEAGADMFVAGSAIFNQPDYKGVIDQMRAQLALVK

SEQ ID NO: 8230 - protein, 81 aa, Gaertnera brevipedicellata
TPQDEMRAGMSYFHETIWKGVPKFLRRVDTALKNIGINERVPYNAPLIQFSSWMDGDRDGNPRVTPEVTRDVCLLARMMAA

SEQ ID NO: 8231 - protein, 438 aa, Corynebacterium glutamicum
MTSPNNYLAKIKVVGVGGGGVNAVNRMIEEGLKGVEFIAVNTDSQALMFSDADVKLDIGREATRGLGAGANPEVGRASAEDHKNEIEETIKGADMVFVTAGEGGGTGTGAAPVVAGIAKKMGALTIGVVTKPFEFEGRRRTRQAEEGIAALKEVCDTLIVIPNDRLLELGDANLSIMERFRAADEVLHNGVQGITNLITIPGVINVDFADVRSVMSEAGSALMGVGSARGDNRVVSATEQAINSPLLEATMDGATGVLLSFAGGSDLGLMEVNAAASMVRERSDEDVNLIFGTIIDDNLGDEVRVTVIATGFDAARASAAENRRAGIPAAPAAEPVQQQVPTTNATLPPEKESIFGGAREENDPYLSRSAGARHRIEETRSGGGLFTTGNDRDYRRDERREDHRDERRDDRSYDRRDDRRDDRRDDRGDDLDVPSFLQ

SEQ ID NO: 8232 - protein, 151 aa, Brassica napus
MWGILGRRAVDGGFSASSFRRMRSGLVSARSYAAGSKEMTVRDALNSAIDEEMSADPKVFVMGKEVGQYQGAYKITKGLLEKYGPERVYDTPITEAGFTGIGVGAAYAGLKPVVEFMTFNFSMQAIDHIINSAAKSNYMSAGQINVPIVFR

SEQ ID NO: 8233 - protein, 107 aa, Porphyra yezoensis
MSVSQVTDASFKQEVINNNLPVLVDFWAPWCGPCRMVSPVVDEIAEEYESSIKVVKINTDDNPTIAAEYGIRSIPTLMIFKAGERVDTVIGAVPKSTLASTLNKYIS

SEQ ID NO: 8234 - protein, 81 aa, Gaertnera brevipedicellata
TPQDEMRAGMSYFHETIWKGVPKFLRRVDTALKNIGINERVPYNAPLIQFSSWMGGDRDGDPRVTPEVTRDVCLLARMMAA

SEQ ID NO: 8235 - protein, 297 aa, Desulfovibrio desulfuricans G20
MHTPLVIIGSGPAGLSSAIYTCRSGIDTIVFGSKPKVAGDYEIDNYFGFEETISGKELLEKGRAQAERFGARFKEDRVLSVHHNESGGFHIKTEHEEFDACAVILATGVGRVRPGISNLKDYEGKGVSYCVSCDGFFYKNRKVIVVGEGIYAANQALELLSYTPHVTIITQGKKSSITPEFQQRLSAAGITVSEQKIETLSGSPALSSVTLSDGTSLEAEGIFIAMGEASSLDFAYTLGLERSGVFLVADKEQKTNIPGIYAAGDCTGGFLQIAVAVGEGATAARSAIAHIKENCKG

SEQ ID NO: 8236 - protein, 137 aa, Brassica napus
  misc_feature (18)..(18): Xaa can be any naturally occurring amino acid
  misc_feature (53)..(53): Xaa can be any naturally occurring amino acid
  misc_feature (66)..(66): Xaa can be any naturally occurring amino acid
  misc_feature (110)..(110): Xaa can be any naturally occurring amino acid
QREVCNMRYRRKDENKSXEPSEIEMEREKKFGICMEMNSLVVLPNCTHSLCIXCYRDWRRRSQSCXFCRDSLKRVDSGDLWMFLEGTDTVNPSVIARENQKRLFVYIEKXPLVVPRQAFASSPYDLHVKVKKEKKGC

SEQ ID NO: 8237 - protein, 907 aa, Arabidopsis lyrata
MDFISSLIVGFAQVLCESMNMADRRGHNTDLRQAITDLETAIGDLKAIRDDLSLRIQQDDLEGRSCSNRAREWLSAVQATETKSASILVRFRRREQRTRMRRRCLGCFGCADYKLCNKVSATLKSIGELRERSEDIKTDGGSIQQTCREIPIKSVVGNTTMMEQVLGFLSEEEERGIIGVYGPGGVGKTTLMQSINNELITKGHQYDVLIWVQMSREFGECTIQQAVGAQLGLSWDEKDTGENRALKIYRALRQKRFLLLLDDVWEEIDLEKTGVPRPDRVNKCKMMFTTRSMALCSNMGAEYKLRVEFLEKKYAWELFCSKVGRKDLLESSSIRRLAEIIVSKCGGLPLALITLGGAMAHRETEEEWIHASEVLTRFPAEMKGMNYVFALLKFSYDNLESDLLRSCFLYCALFPEEHSIEIEQLVEYWVGEGFLTSSHGVNTIYKGYFLIGDLKAACLLETGDEKTQVKMHNVVRSFALWMASEQGTYKELILVEPNMGHTEAPKAENWRQALVISLIDNRIQTLPEKPICPKLTTLMLQRNSSLKKISTGFFMHMPILRVLDLSFTSITEIPLSIKYLVELCHLSMSGTKISILPQELGNLRKLKHLDLQRTQFLQTIPRDAICWLSKLEVLNLYYSYAGWELQSFGEDKVEELGFDDLEYLENLTTLGITVLSLETLKTLYEFGALHKHIQHLHIEECNGLLYFNLPSLTNHGRNLRRLSIRSCHDLEYLVTPIDVVENDWLPRLEVLTLHSLHKLSRVWRNPVSEDECLRNIRCINISHCNKLKNVSWVPKLPKLEVIDLFDCRELEELISEHESPSVEDPTLFPSLKTLKTRDLPELKSILPSRFSFQKVETLVITNCPKVKKLPFQETNMPRVYCEEKWWNALEKDEPNKELCYLPRFVPN

SEQ ID NO: 8238 - protein, 595 aa, Coccidioides immitis RS
MSGIDVEALLESTAEPGPTQQTEEAVSKTHDSDSKKDRSDRRDCDRDRDRDRDRDRIRDGSRDHDRDRRRRDRSRERRSEKDADGDEEMRSPRSDRASANGSYRSRKRSRSRDSDRRRSRRDRYGDDYRSSGGDYYRGGGRARTRSRSPHDDRYYRPSGRSRRDDDRDDDRRRSRRDKDGRKRSLSAKRRSKTPEPQLTEDERDKRTVFVQQLAARLRTKELIAFFEKAGPVKDAQIVKDRVSGRSKGVGYVEFKNEESVPLAIQLTGQKLLGIPIIAQFTEAEKNKAARNTEGHVSGNQNSIPFHRLYVGNIHFSITESDLQNVFEPFGELDFVQLQKDENGRSRGYGFVQFRDPNQAREALEKMNGFDLAGRPIRVGLGNDKFSSDPATNLMRLQAQGQQNSLYGQGGRGAATALGGNFDRAGGRDNDKGVGGASALDDTDVAGVNFNNYSRDALMRKLARTDEPAADTTADDKRKAPKARPEAKPLPVSVNMASRCVLLRNMFDPTEEEGDSWVKELEDDVRAECEEKYGHVVHIALDPNAQGDIYLKFDRVQGGENAIKGLNGRFFGGRQITAQPVVDAVYSSLFSRTKAI

SEQ ID NO: 8239 - protein, 337 aa, Wolbachia endosymbiont of Aedes polynesiensis
QALEKSLCDKKIQLGINLTKGLGAGALPDVGKGAAEESIDEIMEHIKDSHMLFITAGMGGGTGTGAAPVIAKAAREARAAVNDRAPKEKKILTVGVVTKPFGFEGVRRMRIAELGLEELQKYVDTLIVIPNQNLFRIANEKTTFSDAFKLADNVLHIGIRGVTDLMVMPGLINLDFADIETVMSEMGKAMIGTGEAEGEDRAISAAEAAISNPLLDNVSMKGAQGILINITGGGDMTLFEVDAAANRVREEVDENANIIFGATFDQAMEGRVRVSVLATGIDGRNNKSETSSISQSEDSEKEKFKWLYSHSESMQDKTLETKPTEQVSEGAKWSSNV

SEQ ID NO: 8240 - protein, 91 aa, Prunus armeniaca
ITCGQVSSSLAPCIGYVRGGGAVPPACCNGIRNVNNLARTTPDRRTACNCLKQLSGSISGVNPNNAAALPGKCGVNIPYKISASTNCATVK

SEQ ID NO: 8241 - protein, 666 aa, Oryza sativa (japonica cultivar-group)
MMDGAAPLLPETSPESRQQRDPERGKRRTPVLPAVVASAVVLLGLAALFLVYGFHDGGDGRAAVLAPGTVEVAASSSRGVVEGVSEKSTTPALRLGGGAVRDYAWTNSMLSWQRTAFHFQPPNNWMNDPNGPLYYKGWYHLFYQWNPDSAVWGNITWGHAVSRDLIHWLHLPLAMVPDHWYDINGVWTGSATQLPDGRIVMLYTGATEESVQVQNLAEPADPNDPLLREWSKAEANPVLVPPPGIGLTDFRDPTTAWRNPADSAWRITIGSKDRDHAGLALVYKTEDFLHYDLLPTLLHVVKGTGMWECVDLYPVSTSPAVEDGLETSTPPGPGVKHVLKASLDDDRNDYYAIGTYDGETDTWTPDNADIDVGIGLRYDYGKFYASKTFYDPVGRRRVLWGWIGETDSERADILKGWASLQVSMIIFILNANENKGEKSIPRTVMLDTKTGSNLLQWPVVEVENLRMRGKSFDGLDVSPGSVVPLDVGKATQLDIEAVFEVDTSAADGVVTEAGAAAYSCGTGGGAVGRGLMGPFGLLVLADDQLSERTAVFFYLVKGVDGNLTTFFCQDELRSSKANDLVKRVYGSLVPVLDGENLSIRILVDHSIVEGFAQGGRTCITSRVYPTKAIYESAKIFLFNNATNVRVTAKSLKIWELNSAYIRPYVD

SEQ ID NO: 8242 - protein, 497 aa, Chromobacterium violaceum ATCC 12472
MTTLQHLIHGEACDGGSRRAPVFNPSTGEAIAEVQLADAATVAQAVAAAQAAFPAWRDTPPAKRAQVLFRFKQLLEQHEAEIVPLISREHGKTLEDAAGELKRGIENVEYACAAPELLKGEYSRNAGPAIDAWSDFQPLGVVAGITPFNFPAMVPLWMYPLAIACGNTFILKPSERDPSSTLLIARLLHEAGLPRGVLNVVHGDKEAVDALLAAPEVKAVSFVGSTPIAEYIYAEGSRRGKRVQALGGAKNHAVVLPDADLDNTVSALMGAAYGSCGERCMAISVAVCVGDQAADALIAKLTPQIQALKVGPGTSPGLDMGPLVTRAHLDKVSGYIADGVAAGAELVVDGRGITVPGHEGGFFLGGCLFDRVRPDMRIYKEEIFGPVLCVVRVNSLEEAIALINAHEYGNGTCIFTRDGEAARLFADTVEVGMVGINVPLPVPVAYHSFGGWKRSLFGDLHAYGPDGVRFYTRRKAVTQRWPQRASHEASQFAFPSL

SEQ ID NO: 8243 - protein, 560 aa, Crucihimalaya himalaica
MASSTALICDTEAWKDLKGHVEDIKKTHLRDLMSDANRCQSMMVEFDGLLLDYSRQCATVETTDKLLNLAKAAQLSEKISRMFNGEHINSTENRSVLHVAPRAPKDAVIKADGKNVVPEVWNVLDKIKEFSEKIRSGSWVGATGKPLKDVVAIGIGGSFLGPLFVHTALQTDPEALECARGRQLRFLANIDPVDVARNINGLNPETTLVVVVSKTFTTAETMLNARTLREWITTALGASAVAKHMVAVSTNLALVEKFGIDPNNAFAFWDWVGGRYSVCSAVGVLPLSLQYGFSVVEKFLKGASSIDQHFQSTPFEKNIPVLLGLLSVWNVSFLGYPARAILPYSQALEKFAPHIQQVSMESNGKGVSIDGLPLPYETGEIDFGEPGTNGQHSFYQLIHQGRVIPCDFIGVVKSQQPVYLKGEVVSNHDELMSNFFAQPDALAYGKTPEQLQKENVSENLIPHKTFSGNRPSLSLLLPELTAYNVGQLLAIYEHRVAVQGFVWVINSFDQWGVELGKVLAAQVRKQLHSSRTQGKALEGFNYSTTTLLKRYLETSSEPQM

SEQ ID NO: 8244 - protein, 460 aa, Mycobacterium tuberculosis CDC1551
MSRSHPSVPAHSIAPAYTGRMFTAPVPALRMPDESMDPEAAYRFIHDELMLDGSSRLNLATFVTTWMDPEAEKLMAETFDKNMIDKDEYPATAAIEARCVSMVADLFHAEGLRDHDPTSATGVSTIGSSEAVMLGGLALKWRWRQRVGSWKGRMPNLVMGSNVQVVWEKFCRYFDVEPRYLPMERGRYVITPEQVLAAVDENTIGVVAILGTTYTGELEPIAEICAALDKLAAGGGVDVPVHVDAASGGFVVPFLHPDLVWDFRLPRVVSINVSGHKYGLTYPGVGFVVWRGPEHLPEDLVFRVNYLGGDMPTFTLNFSRPGNQVVGQYYNFLRLGRDGYTKVMQALSHTARWLGDQLREVDHCEVISDGSAIPVVSFRLAGDRGYTEFDVSHELRTFGWQVPAYTMPDNATDVAVLRIVVREGLSADLARALHDDAVTALAALDKVKPGGHFDAQHFAH

SEQ ID NO: 8245 - protein, 80 aa, Zea mays
MAEESGRPLPKFGDWDVNDPASADGFTVIFNKARDEKKGGNGQDTESPSKDTRTERVESYAAKPSTKKWFCCVTASPTQS

SEQ ID NO: 8246 - protein, 591 aa, Clostridium perfringens str. 13
MKVTERLEKLRKIMKDKGIDYYIIPSEDAHQSEYVCEHYRGRAYMSGFTGSAGTLLVGLENGILWTDGRYFIQALDELKGSGIEMFKMRIPGWPSLLEWLKENAKAGETIAFDGKVFSVGEYKDFKKLEEENNINIKIDEDLLDEVWKERPSLPKEKAFLHEVKYCGKSAREKLREVREEMKKLGANNYIIASLDDIAWLYNIRGNDVKCNPVVLSYALVKENEAYLYVDKSKFTSKMEEELLNEGVTLKSYDEIGNAISNLEGKILIDPNKISAYLYECIKDKNNIVEFGNITTKFKAIKNEVELDNLRKCQVRDGVAMVKFMKWLKDNIGKIEISEISASDKLEELRSLDKLFKGISFETIAGHKEHGAMMHYSATKESDYTLEPRGFLLIDSGGQYLDGTTDITRTFVLGELTEEERKDYTLVLKGHIGLMRAKFLKGATGSALDIKAREPLWNEGIDYKCGTGHGVGFFLNVHEGPQSISPVPNKVALEPGMIITNEPGVYREGKHGIRTENTMVVVKDTYSEEFGEFYKFDTISLCPIDLAGLDISLINEEEKAWLNNYHKKVYYLLSPYLDEEEKEFLKNETRAI

SEQ ID NO: 8247 - protein, 356 aa, Ralstonia sp. E2
MYSLTIEPIGQTIPIAPGQTVLDACLRSGVWLPHACCHGLCATCKVQVVEGEVDQGEASSFALMDFERDNGQCLACCATAQSDLTIEADIEEDADALGLPLADYEAEVVDVRALTPTIRGIWLRVKGGAKVAFQAGQYLNLQVPGCDQPRAFSLANAPDEELVELHVRKVEGGQATGYLHERLAVGDALRFSAPYGRFFVRRSAQAPMLFLAGGSGLSSPRAMIRELLAAGETLPITLVQGARNRAELYGEDEFRALAERHPNFRYVPALSDEPADSAWQGARGFAHEALAALYADGDGRADFRGHKAYLCGPPPMIEACIRTLMQGRLFEADIHTEKFLSASDAQNSARSPLFKI

SEQ ID NO: 8248 - protein, 123 aa, Brassica napus
MMMRKIQLPVTQTQKVRYERAIERLQSLSSTVNSDASVIVTDTIPVNHEDAFLKGHGTSEVDGELLATVCGVVERVDKLVYVRTLRARYKPEVGDIVVGRVIEVAQKRWRVELNFTQDGVLML

SEQ ID NO: 8249 - protein, 487 aa, Clostridium perfringens str. 13
MEFLNDEDINKKSKEYYNKTKDIWRDNFHFEPPFGLINDPNGLSYYKGEYYIFFQWNPYGCEHKNKHWGIVKTKNFKDFSIPKIALTPKEYFDKDGCYSGGSIVKDGNLQVFYTGNVKGEKGERISYQCKGILEENGQLKKLGPVISTLPKGYTAHFRDPYIWENNGYYYMILGIQTEKLKGRCVIYKSNDLDNWKFYGELKTSYEDFGFMWECPSFFKIDNKDILIFSPQGIKEEEFRYQNIYQSGYLIGNLNYDTLEFKNNNEFKELDMGFDFYAPQVFKDEKGRNILIGWMGLPEKEEFHCSRENGWIFSLTMPRELTLKNGVLHQNPIEEMRKLRGDKIVSLKNILIEDLNFNEVKENSYELKLDIERREASKIEINFMESNEEHTSLIYDFKKEICIIDRNSMINGEKGIRKFKLHSNGNLKINMFVDKSSVEIYFQDGIEVASLKLYPKKDSFNLSLKSEEGKIKINSLSIWEMNEVNYNE

SEQ ID NO: 8250 - protein, 216 aa, Helicobacter hepaticus ATCC 51449
MNKDILVAPSMLSADFAKLGQEVEDICKAGCDFVHIDVMDGHFVPNLTMGPMIVQSIAKSSSKPLDIHLMVKNVPFFVDLFLPLKPAFMSVHIEEVQHLHRLIWYIKESGVKAGVVLNPHTNEQSLEYILPDIDLVLLMSVNPGFGGQSFIPHSVKKLQNLKKMRDRLNPSCLLEIDGGVSDKNIDILKNAGIDIVVAGSFIFGSTDYAQAISALR

SEQ ID NO: 8251 - protein, 225 aa, Debaryomyces hansenii CBS767
MSSATFTQTRSQALNLEKQADTLLSRYSAFQNLSNTSSSDEENELSDSIFENLQKRENVINTLNRISETDTNLSTSKLQQLQRHKEILSEHKRSYAKIKGVIKEERNRNNLLFSVRSDIDAHRERSTNNSNNRDLNANDYILDESVRADNANSFAERLLQQAYNTRDELYSQRAHLSNAQLRMMGAVLLIPGINVLISRINTRRKRDTLILATVIAICILVLFFF

SEQ ID NO: 8252 - protein, 639 aa, Ustilago maydis 521
MPPTTHLRGPPDDPSAEWIIQKYGGTSVGKFLHTIAQQIVPSYLAGNKVAIVCSARSGQTKALGTTNLLLQAAGEALDEALTPAASLSNSVTSIANGAQTPVHRPGSAFSRKSSSRGTPLGRVESLSSTTLDNKLQQLTLNTTTTAAANTEQSTAAKSDAGSDSDTDIAIGFNATVDRILSDHLASARKAVINDRLLLEQLERDITEDCDRLRDFLLAAKIIEEISPKSKDIIIGVGERLSCRIAVGALRDAGVDAELVTLESIVDPSFSAHAVQDSQGEFTLDQTFYDSLSQALGQRLNACSGVPVVTGYFGNVPGSLLSQIGRGYTDLCAALCAVGVNAKELQIWKEVDGVFTADPRKVPTARLIPAITPEEAAELTYYGSEVIHPFTMEQAIKKAIPIRIKNVENPTGMGTVIFPDVPEGHDGSEDKLVDGHVDQPRPPMTPSASKSNFSAWGSSANAQATRPVMGERKLPTAVTIKDNVLVLNVHSNRKTVSHGFFAKIFGTLDKYGVVVDLISTSEVHVSMAMAAALRPRTLEKVKADLQKVGTVSVLTDMAILSLVGKHMRNMVGVAGRMFTVLADGNVNIEMISQGASEINISCVLHEKLAVKALNLIHYSVLEVSPKPSNSEAGAFGRSFF

SEQ ID NO: 8253 - protein, 324 aa, Burkholderia thailandensis E264
MIRRLTYREALRDALRDALSNDPRVFLMGEDVGRYGGSYAVSAGLLEAFGPERVRDTPLSELAFTGMGIGAALGGMRPIVEIMTVNFSLLALDQIVNTAALYHHMSGGQFSVPLVIRMATGAGRQVAAQHSHSFEGWYAGIPGIKVLAPATVEDARHMLAPALADPDPVLIFEHAGLYNMEGDLSAMTSVDIRSAKVRRDGGDVAILAYGGSLPKALEAADALAGEGISAEVVDLRVLRPLDDATIMASVIKCRRAVIVDECWRSASVASEIVARIVEQAFYELDAPLARVCAEDVPIPYARHMEEAALPQVDKIVAAVKQLLS

SEQ ID NO: 8254 - protein, 81 aa, Gaertnera lowryi
TPQDEMRAGMSYFHGTIWKGVPKFLRRVDTALKNIGINERVPYNAPVIQFSSWMGGDRDGNPRVTPEVTRDVCLLARMMAA

SEQ ID NO: 8255 - protein, 141 aa, Triticum aestivum
  misc_feature (73)..(73): Xaa can be any naturally occurring amino acid
  misc_feature (84)..(84): Xaa can be any naturally occurring amino acid
  misc_feature (88)..(88): Xaa can be any naturally occurring amino acid
  misc_feature (91)..(91): Xaa can be any naturally occurring amino acid
  misc_feature (94)..(94): Xaa can be any naturally occurring amino acid
  misc_feature (96)..(96): Xaa can be any naturally occurring amino acid
  misc_feature (106)..(106): Xaa can be any naturally occurring amino acid
  misc_feature (111)..(111): Xaa can be any naturally occurring amino acid
  misc_feature (126)..(126): Xaa can be any naturally occurring amino acid
  misc_feature (133)..(133): Xaa can be any naturally occurring amino acid
  misc_feature (139)..(139): Xaa can be any naturally occurring amino acid
MAKKRKRTDAPAEAAGAEKPDDSAPARPERTLFGFKDLVPDAEPASAGAEAAVAPFRNREKVLITCSRRITYXYRHLMQDFCRXSPHXKKXSKXEXKQTKGNALNXSFNSXSCSNCFSSNARKKRXYLWMGNXLGGPSXNF

SEQ ID NO: 8256 - protein, 363 aa, Coccidioides immitis RS
MAKFNIVVFAGDYCGPEVTAEAIKVLKVVEKKTDIEFNFQEHLLGGASIDATGTALTDEALQAAKNADGVILGAVGGPKWGTGAVRPEQGILRLRKEMGTFGNLRPCNFAAPSLVDISPLKADVCRGVDFNIVRELTGGIYFGERKEDNGDGTALDTEPYSRAEIERVTRLAGHLALQHSPPLPVWSLDKANVLATSRLWRKVVTEIMEKEFPQVKFGHHLIDSAAMLMVKDPRKLNGIIVTSNLFGDIISDEASVIPGSLGLLPSASLSGIPDGKSRVNGIYEPIHGSAPDIAGKGIVNPVAAILSMAMMLQYSLNRPVEAKAIEDAVSKVIEAGIRTGDIGGKATTSEVGDAVAAELEKSL

SEQ ID NO: 8257 - protein, 353 aa, Geobacillus kaustophilus HTA426
MEKLEKLRELLDEQHIDGLLVTNGYNRRYLTGFTGTAGAVLVSRQGAVLVTDFRYVEQASRQAQGFEVVQHSGPIIEEIANQVKRLGIKRLGFEQEHVTYAAYKSYEEAIRAELVPTSWLVEKLRLIKSEAEIKILKEAAEIADAAFSHILSFIRPGVKEIEVANELEFFMRKQGASSSSFDTIVASGYRSALPHGVASEKTIERGELVTLDFGAYYKGYCSDITRTVAVGDISVELRTIYDIVLEAQQRGMNGLKAGMTGKEADALTRDYIREKGYGDYFGHSTGHGIGLEIHEGPTLSFRSDVVLEPGMVVTVEPGIYIPGLGGVRIEDDTVITADGNEALTHSPKELIIL

SEQ ID NO: 8258 - protein, 245 aa, Oryza sativa
MKAAASPLRAALLLFLSSSPSPRLALPMNPSSSSSSRGAASYHSKAAAFASPQPRGGGGGRGGRRGGGRGRGGDGSDRIDALGRLLTRILRHMASELNLEMRTDGYVRVRDLLKLNLQTFAKIPLKSHTVDEIKEAVRRDNKQRFGLLEEDGELLIRANQGHTVTTVTSESLLKPILSADEVSGMRQSVNILIYLDVSMALQDGMKLYISDNKVILTEGFDGVVPVKYFEKIETWPGRAPIPFEK

SEQ ID NO: 8259 - protein, 420 aa, Sulfolobus solfataricus P2
MMEEVLSSSLYTQQVKKLYKVGELLGLDNETLETLSQPERIIQVKIQIRGSDGKLKTFMGWRSQHNSALGPYKGGIRYHPNVTQDEVEALSMIMTWKNSLLLLPYGGGKGGIRVDPKKLTKEELEQLSRKFIQAIYKYLGSELDIPAPDVNTDSQTMAWYLDEYIKITGNVDFAVFTGKPVELGGIGVRLYSTGLGVATIAKEAANKFIGGIEEARVIIQGFGNVGYYAAKFLSDMGAKIVGISDSKGGVINENGIDVGKAMEIKEKTGSVTNYPEGRKVTNEELLISDCNILVPAALENVINKFNAPKIKAKLIVEGANGPLTADADEIMRQRGIVVVPDILANAGGVVGSYVEWANNKMGQIISDEEAKKLIVDRMNNAFNTLYDYHQKKLEDHDLRTAAMALAVDRVVRAMKARGLL

SEQ ID NO: 8260 - protein, 165 aa, Arabidopsis thaliana
EAIKRNPNDHKAYSNRAASYTKLGAMPEGLKDAEKCIELDPTFSKGYSRKAAVQFFLKEYDNAMETYQAGLEHDPSNQELLDGVKRCVQQINKANRGDLTPEELKERQAKGMQDPEIQNILTDPVMRQVLSDLQENPSAAQKHMQNPMVMNKIQKLISAGIVQMK

SEQ ID NO: 8261 - protein, 149 aa, Prochlorococcus marinus str. MIT 9313
MDVRFREVDPFNCWLWLHFADVPSQGEQNYVDGIFDSWYVIGRLGGFNAENLQVHEEGADLSWITYDNEDARSVIPALMHNMGQLEYQGCWARCWVDLGTSDAVALDVLINALQQIDSDVVQLDEVLIGGVNDDWPVEPHPDSIFPVEA

SEQ ID NO: 8262 - protein, 539 aa, Arabidopsis thaliana
MASRIINHSKKLKHVSALLRRDHAVAVRCFSNSTHPSLVGREDIFKARLNYSSVERISKCGTGNVTMLSGISTTSTKLSSPMAGPKLFKEFISSQMRSVRGFSSSSDLPPHQEIGMPSLSPTMTEGNIARWLKKEGDKVAPGEVLCEVETDKATVEMECMEEGFLAKIVKEEGAKEIQVGEVIAITVEDEDDIQKFKDYTPSSDTGPAAPEAKPAPSLPKEEKVEKPASAPEAKISKPSSAPSEDRIFASPLARKLAEDNNVPLSSIKGTGPEGRIVKADVEDFLASGSKETTAKPSKQVDSKVPALDYVDIPHTQIRKVTASRLAFSKQTIPHYYLTVDTCVDKMMGLRSQLNSFQEASGGKRISVNDLVIKAAALALRKVPQCNSSWTDEYIRQFKNVNINVAVQTENGLYVPVVKDADKKGLSTIGEEVRFLAQKAKENSLKPEDYEGGTFTVSNLGGPFGIKQFCAVINPPQAAILAIGSAEKRVVPGTGPDQYNVASYMSVTLSCDHRVIDGAIGAEWLKAFKGYIETPESMLL

SEQ ID NO: 8263 - protein, 292 aa, Glycine max
MAQIIDGKAIAAEIRHEIGAEVAALSSAHNIVPGLAVVIVGSRKDSQTYVQMKRKACAEVGIRSFDVDLPEDISEAALVAEVHRLNADPAVHGILVQLPLPKHINEENILNQISIEKDVDGFHPLNIGKLAMKGRDPLFVPCTPKGCMELLSRSGVTVKGKHAVVVGRSNIVGLPVSLLLLKADATVSIVHSRTPNPETIVRQADIVIAAAGQAMMIKGDWIKPGAAVIDVGTNSIDDPTRKSGYRLVGDVDFSEASKVAGHLTPVPGGVGPMTVAMLLKNTVDGAKRGIVS

SEQ ID NO: 8264 - protein, 145 aa, Arabidopsis thaliana
  misc_feature (114)..(114): Xaa can be any naturally occurring amino acid
  misc_feature (128)..(128): Xaa can be any naturally occurring amino acid
  misc_feature (130)..(130): Xaa can be any naturally occurring amino acid
  misc_feature (133)..(133): Xaa can be any naturally occurring amino acid
MASSMLSSAAVVTSPAQATMVAPFTGLKSSASFPVTRKANNDITSITSNGGRVSCMKVWPPIGKKKFETLSYLPDLTDVELAKEVDYLLRNKWIPCVEFELEHGFVYREHGNTXPGYYDGGYWTIWKXPXFGXTDPSSVGVKRPG

SEQ ID NO: 8265 - protein, 450 aa, Zea mays
MASTVVLRNAGSRRLFCYSTLRAAAILGPAAPPDAPAAASAQPPPMAGTLWARSMATFTRTKPHVNVGTIGHVDHGKTTLTAAITKVLAEAGKAKAVAFDEIDKAPEERARGITIATAHVEYETAKRHYAHVDCPGHADYVKNMITGAAQMDGGILVVSAPDGPMPQTKEHILLARQVGVPSLVCFLNKVDAVDDPELLELVEMELRELLSFYKFPGDEIPIIRGSALSALQGNNDEIGKNAILKLMDAVDEYIPDPVRQLDKAFLMPIEDVFSIQGRGTVVTGRVEQGTIKTGEDVEILGLTQSGPLKTTVTGVEMFKKILDHGEAGDNVGLLLRGLKRGDVERGQVVCKPGSLKTYKKFEAEIYVLTKDEGGRHTAFVTNYTPQFYFRTADVTGKVELLGETKMVLPGDNVTANFELISPVPLETGQRFAMREGGRTVGAGVVSKVIS

SEQ ID NO: 8266 - protein, 261 aa, Cytophaga hutchinsonii
MSDNLSLLVVREDAGILIITVNRPDKLNSLNRAVLQAIDEQIEYAYTSPSVKGIIITGSGEKAFAAGADISEFSSLQPHEAQLLSKEGQLIFEKIDMLTKPVIAAVNGFALGGGFELALACHIRMASENALFGLPEATLGLLPGYGGTQRLPQIIGKGRAIEVMLSADKIPAPKALEWGIVNAVTTQAALIPSAIALLNKFFSKAPTSIAEVLRCTHLSMETSGTAFDQEAKSFGRCAGTQDFKEGVQAFLEKRPATFTGK

SEQ ID NO: 8267 - protein, 157 aa, Arabidopsis thaliana
MKADPRKETGIKLVAVEISLTFGNRKWQPHKNSGAKDEEAKFNKRTKYKMRIRPRSSISKRRRLIGGKTLTCVSNSGLSAYTTDQSLRQLFAPFARLIKDQQTQRPKGFGFITFESEDDAQKALKALNGKIVNGRLIFVETAKEVEAPTTSLKSNKD

SEQ ID NO: 8268 - protein, 412 aa, Rickettsia prowazekii
MKENFNVSKLKNGLTILTYNMPYVHSVAINLIAKVGARYENEEEEGISHFLEHMAFKGTKTRTAQQIAEEFDSIGGYFNAYTGHENTVYYARVLSENCHKALNILADIIQNSIFADEEIAKEYQIIMQEIAHHHDNPDDLIYETFYNTVYKGQPLGKSILGTTKTLVTFTKEHFLNFIGKHYNAENLYLSIAGNIEHNKIVMIAEELFASLKQGVKSSFIPAKYIGGKGFIHKELEQTSLVLGFECTSYINLGQLYQTYLLSIIFGGGMSSRLFQSIREKLGLAYVVGSYNSAYFDSGVFTIYASTAHNKLELLYREIKNEIIKITETVSTEEIIRAKMQLRSNLQMAQEQNTYKSEEIGKNYSVFGKYILPEEIIEIITNIRADDIINTANKIFSGTTTLAIIGPNDLNGF

SEQ ID NO: 8269 - protein, 500 aa, Oryza sativa
MAPPPVNSGDAAAAATGEKSKLSPSGLPIREIPGGYGVPFFSPLRDRLDYFYFQGAEEYFRSRVARHGGATVLRVNMPPGPFISGNPRVVALLDARSFRVLLDDSMVDKADTLDGTYMPSRALFGGHRPLAFLDAADPRHAKIKRVVMSLAAARMHHVAPAFRAAFAAMFDAVEAGLGAAVEFNKLNMRYMLDFTCAALFGGEPPSKVVGDGAVTKAMAWLAFQLHPIASKVVKPWPLEELLLHTFSLPPFLVRRGYADLKAYFADAAAAVLDDAEKSHTGIPRDELLDNLVFVAIFNAFGGFKIFLPHIVKWLARAGPELHAKLATEVRATVPTGEDDGITLAAVERMPLVKSVVWEALRMNPPVEFQYGHARRDMVVESHDAAYEVRKGEMLFGYQPLATRDEKVFDRAGEFVADRFVAGGAAGDRPLLEHVVWSNGPETRAPSEGNKQCPGKDMVVAVGRLMVAELFRRYDTFAADVVEAPVEPVVTFTSLTRASSG

SEQ ID NO: 8270 - protein, 487 aa, Porphyra yezoensis
MVNTQNQISQTSELDYIVNQPYKYGFKTSVESEQFPRGISEDIVRLISKKKDEPEYLLNFRLKAYKKWKKMSSPSWAHIKHPNIDFNTIIYYAVPKLKKELKSLDEVDPEILDTFNKLGISLNEQKRISNVAVDAVFDSVSIATTFKKELSEAGVIFCSISEAIRDYPELIKKYLGTVVPAGDNYFAALNSAVFSDGSFCYIPPNTVCPLELSTYFRINNEESGQFERTLIIADRGSKVSYLEGCTAPQFDTNQLHAAIVELVALEGAEIKYSTVQNWYAGNKEGKGGIYNFVTKRGLCSGNNSKISWTQVETGSAITWKYPSCILAGENSQGEFYSVALTNNYQEADTGTKMIHIGNNTKSRIISKGISAGRSKNSYRGLVKVGPQSFNSRNYSQCDSLLIGQSSQANTFPYIQVQNPTSKVEHEASTSKISEDQIFYFLQRGINLEESIALMISGFCKDVFNELPMEFATEADRLLSLKLEGTVG

SEQ ID NO: 8271 - protein, 1037 aa, Arabidopsis thaliana
MERARRLAYRGIVKRLVNDTKRHRNAETPHLVPHAPARYVSSLSPFISTPRSVNHTAAFGRHQQTRSISVDAVKPSDTFPRRHNSATPDEQTHMAKFCGFDHIDSLIDATVPKSIRLDSMKFSKFDAGLTESQMIQHMVDLASKNKVFKSFIGMGYYNTHVPTVILRNIMENPAWYTQYTPYQAEISQGRLESLLNFQTVITDLTGLPMSNASLLDEGTAAAEAMAMCNNILKGKKKTFVIASNCHPQTIDVCKTRADGFDLKVVTSDLKDIDYSSGDVCGVLVQYPGTEGEVLDYAEFVKNAHANGVKVVMATDLLALTVLKPPGEFGADIVVGSAQRFGVPMGYGGPHAAFLATSQEYKRMMPGRIIGISVDSSGKQALRMAMQTREQHIRRDKATSNICTAQALLANMAAMYAVYHGPAGLKSIAQRVHGLAGIFSLGLNKLGVAEVQELPFFDTVKIKCSDAHAIADAASKSEINLRVVDSTTITASFDETTTLDDVDKLFKVFASGKPVPFTAESLAPEVQNSIPSSLTRESPYLTHPIFNMYHTEHELLRYIHKLQSKDLSLCHSMIPLGSCTMKLNATTEMMPVTWPSFTDIHPFAPVEQAQGYQEMFENLGDLLCTITGFDSFSLQPNAGAAGEYAGLMVIRAYHMSRGDHHRNVCIIPVSAHGTNPASAAMCGMKIITVGTDAKGNINIEEVRKAAEANKDNLAALMVTYPSTHGVYEEGIDEICNIIHENGGQVYMDGANMNAQVGLTSPGFIGADVCHLNLHKTFCIPHGGGGPGMGPIGVKNHLAPFLPSHPVIPTGGIPQPEKTAPLGAISAAPWGSALILPISYTYIAMMGSGGLTDASKIAILNANYMAKRLEKHYPVLFRGVNGTVAHEFIIDLRGFKNTAGIEPEDVAKRLMDYGFHGPTMSWPVPGTLMIEPTESESKAELDRFCDALISIREEIAQIEKGNADVQNNVLKGAPHPPSLLMADTWKKPYSREYAAFPAPWLRSSKFWPTTGRVDNVYGDRKLVCTLLPEEEQVTAAVSA

SEQ ID NO: 8272 - protein, 118 aa, Arabidopsis thaliana
  misc_feature (22)..(22): Xaa can be any naturally occurring amino acid
RPTRPVVTSPAHATMVAPFTGXKSSAAFPVTRKTNKDMTSIASNGGRLNCMKGSPPIGNKKLETLSYLPDLNDVEWAKEVDYLLRNKRSPCVEFELQHGYVYREHRDTPGYYDGLYWT

SEQ ID NO: 8273 - protein, 490 aa, Colwellia psychrerythraea 34H
MQEHQELGLQDNQLVRSFSYINGRWHSSDSYISVTNPANGKVIAQVSNAGVVETELAVKAAKDALKMWSAKSANERATLMRNWFNLIMENQDDLGRILTLEQGKPLAEAKGEIGYGAAFIEWFAEEGKRVYGDTIPAPSGDKRIIVIKQPVGVVASVTPWNFPNAMIARKAAAALSAGCTFVVRPATQTPLSALAMAELAERAGIPAGVFNVVVGEDAHGIGKVLTQHPDIAKFTFTGSTPVGKALISQCATSVKKVSMELGGNAPFIVFDDADIDAAVQGALVSKYRNAGQTCVCTNRIFVQKGVIEQFTKKFTSAVAALAIGDGLTDGVSIGPMISSDAVCDVELLVKDSITAGAILALGGERDQAGDAFYQPTILTNVTNDMPIAKNEIFGPVTPIISFEDEDEVIAMANDTEYGLASYFYARDIGRIWRVAEGLEYGMVGINEGMISNAAAPFGGVKQSGNGREGSKYGLDDYLEIKYLCMGGLGK

SEQ ID NO: 8274 - protein, 415 aa, Burkholderia thailandensis E264
MTEQASADASAAPRTVVVIGGGQAAGWVMKTLRGEGFAGRIVMIADEAHLPYERPPLSKAVLAGEADISTVRVVQPDEFGALGVEAWQPERAVSIDRARRVVRAASGREIEYDRLVIATGGAPRRLPDAIVATPRLHYLRTLDEAVALGERLRASRRVLVIGGGWIGLEVAATARKLGVDAVVVEGAPRLCARSVPGAVSDFLLELHRANGVDIRLNASLASLGAHPADANRVRATLADGTAVDADFAVAGIGLALNTSLATEAGLHVDDGIVVDEYGATSDPAIFACGDVANHPNAWLKRRVRLESWANAQNQAIAAAKAVLGVRAPYAEIPWFWSDQYDVNLQILGDLPADAQLVVRGDIAAKRATLFFVTHGALRGVIAINSARELKLARKWMNQGRAIDVAALADTTRALA

SEQ ID NO: 8275 - protein, 167 aa, Triticum aestivum
GLFGIGLATTNAGASSSGVASDAPVMNAPTNSTEWVELIVKEMSAASDLADARNRAFRILEMFGKSTANCSTPDEEQKLREENKILKQMLGALLQQASILKRAVVIQDNRLKDYQNMVQERSQFNEIVAKYQQQIKELQDVNYALSTHIRQANQPRVISGRRNPDVF

SEQ ID NO: 8276 - protein, 137 aa, Hypocrea lixii
MVAAKKHVPIVKKHKTTFARHQSDRFDRVGSSWRKPKGIDGRVRRRFRGTIRMPKIGYGSNKKTRFLTPSGHNAFLHNARTLSCAAGCSMQSTDPSAAEIATPVSSRKRIASSPARQADRCSRSRRSKFRPRRLRAS

SEQ ID NO: 8277 - protein, 170 aa, Arabidopsis thaliana
MANTAAGWSPVLAPIYSPVNTKPINFHFSASFYKPPRPFYKQQNPISALHRSKTTRVIEVVTPKQRNRSFSVFGSLADDSKLNPDEESNDSAEVASIDIKLPRRSLQVEFTCNSCGERTKRLINRHAYEKGLVFVQCAGCLKHHKLVDNLGLIVEYDFRETSKDLGTDHV

SEQ ID NO: 8278 - protein, 284 aa, Alkaliphilus metalliredigenes QYMF
MGEIIKGKPVADKISEDLIQEIEGLKGKGIQPKLAIVRVGANSSDLAYEKGALGRSKKVGVETEVHELPEDITQDDFIKELKKLNEDKAVNGILIFRPLPEQLDESVIKYVIAPEKDIDCLSPINVGKMTEGDKTGFPPCTPTAVVEILKFYGVELQGKDCAIIGASMVVGKPAALLLLNENATISVCHIFTKDSAKIASQADVVVVGVGVPRLVKENWIANGAVVIDVGINVDKEGNMCGDVDFDGVKDKVSMITPVPGGVGSVTTSILAKHVVKACKQQNNL

SEQ ID NO: 8279 - protein, 112 aa, Magnetospirillum magnetotacticum MS-1
MKKIEAIIKPFKLDEVKEALHEVGLQGLTVTEAKGFGRQKGHTELYRGAEYVVDFLPKVKIELVIEDNLVERAVEAIQQAAHTGRIGDGKIFISTVEEAIRIRTGERGSDAI

SEQ ID NO: 8280 - protein, 666 aa, Rhodobacter sphaeroides
MAVKDTDDGKPEDQDAETSLDMSQAAVKRMIAEAERGYITYDQLNTVLPQDQVSSEQIEDVMAMLSEMGINVIENEEAEEGEPAGELVEQGSGSREIAVAGTQGETLDRTDDPVRMYLREMGSVELLSREGEIAIAKRIEAGRNTMIAGLCESPLTFQAITIWRDELLSEDILLRDVIDLEATFGRSLDGDGDDEIDGPEIDEVEVAAARAAPRRSTSSEPELDADGNPISRAEEEDEDDEASAMSLAAMEAALKPRVLETLELIARDYGKLAEMQNRRMSATLNDHIRFTTEDEAAYQKLRSEIVLLVNELHLHNNRIEALIDQLYGINRKIMSINSAMVKLADAARINRREFIDEYQGYELDPMWAERMAAKVGRGWQTLMEKSRDRVEDLRGEMAQVGQYVGVDISEFRRIVNQVQKGEKEARQAKKEMVEANLRLVISIAKKYTNRGLQFLDLIQEGNIGLMKAVDKFEYRRGYKFSTYATWWIRQAITRSIADQARTIRIPVHMIETINKLVRTGRQMLHEIGREPTPEELAEKLQMPLEKVRKVMKIAKEPISLETPIGDEEDSQLGDFIEDKNAILPLDSAIQENLKETTTRVLASLTPREERVLRMRFGIGMNTDHTLEEVGQQFSVTRERLRQIEAKALRKLKHPSRSRKLRSFLDQ

SEQ ID NO: 8281 - protein, 660 aa, Arabidopsis thaliana
DALLPISAREEEPLCPYTRLPMADPNQETHGPRRRRPFKGLLAVSFGLLFIAFYVALIATHDGSRSNDEGIDETETITSRARLAGVSEKRNDGLWKLSGDRNTPAFEWNNSMLSWQRTAFHFQPEQNWMNDPNGPLFYKGWYHFFYQYNPNAAVWGDIVWGHAVSRDLIHWVHLPIAMVADQWYDSNGVWTGSATFLPDGSIVMLYTGSTDKAVQVQNLAYPEDPNDPLLLKWVKFPGNPVLVPPPGILPKDFRDPTTAWKTSEGKWRITIGSKLNKTGISLVYDTIDFKTYEKLDTLLHRVPNTGMWECVDFYPVSKTAGNGLDTSVNGPDVKHIVKASMDDTRFDHYAVGTYFDSNGTWIPDDPTIDVGMTASLRYDYGKFYASKSFYDQNKGRRVLWSWIGESDSEASDVQKGWSSLQGIPRTVVLDTKTGKNLVQWPVEEIKSLRLSSKQFDLEVGPGSVVPVDVGSAAQLDIEAEFEINKESLDKIIGNASVVAEAEEFSCEKSGGSTVRGALGPFGFSVLATESLSEQTPVYFYVAKGKDSELKTFFCTDTSRSSVANDVVKPIYGSVVPVLKGEKLTMRILVDHSIVEAFGQGGRTCITSRVYPTTAIYGAAKLFLFNNALDATVTASFTVWQMNSAFIHPYSDEAVRALSRT

SEQ ID NO: 8282 - protein, 416 aa, Bordetella bronchiseptica RB50
MSQLNDLLMPKLGLTMTEGMLIEWSVTSGAEVKAGDSLFVVETDKVANEIVAQADGTLAEILVAAGETVPVGTVVARWTGPGQGADDLADAPPAPAPQPPQPAAEAAPAAAREPARGGRVVATPLARRLAREAGLDLAQVSGSGPGGRIKAADVRQAPPALPVAPRDAASPAPAARASLAPAAGEQRIEASALVQSMARRMTQAKQVPHFYLSAEAEVSALLALRQRLNAQADAPRLTLNHFVIAAVARALAAMPHQNRIWNDDHIVQFQGIDVGVAVSTERGLMAPVLHGLDHASLDDIAAQSGALLGRVRAGKATREDMSGGAISISNAGMFNVTYMAPIINPPQSAILGVGSIRELFRPDEQGAPALRREMGLVLAADHRLHDGASALAFLNHVIDLLQDPYRLLRNRPHTKG

SEQ ID NO: 8283 - protein, 261 aa, Bordetella bronchiseptica RB50
MSEQSILTEVRDHVGIITINRPKLHNALDTPTLLELERALTTLEADPECRVIVVTGAGEKSFVAGGDLVDLNSRQGLAHYQEFAEDIHRVFRRFETSDKPTIAAVNGWALGGGTELLLCLDLRIVAENAAIALTEVNLGLFPGAGGTQRIIRQISPCQAKEMMFTGGRISAADAVRIGLANRAVPAADLMAETLALAGQIAAKSPLVLKLLKRTLRDGADMPLANALAHEQAMIGLVLDTRDAHEGIGAFLEKRAARFTGQ

SEQ ID NO: 8284 - protein, 123 aa, Arabidopsis thaliana
MAGLMKLGCLVFVFVIAAGPITAKAALSCGEVNSNLKPCTGYLTNGGITSPGPQCCNGVRKLNGMVLTTLDRRQACRCIKNAARNVGPGLNADRAAGIPRRCGIKIPYSTQIRFNTKCNTYIC

SEQ ID NO: 8285 - protein, 324 aa, Bordetella bronchiseptica RB50
MAELRFAHAINRALAECMEEDPMVFLFGEDIAEAGGPFGVTRGLHDRFGPDRIRDTPISEATMANAAVGAALSGLKPVLEIMFMDFMTLTMDALVNQAAKARFMFGGQASVPMVVRTPHGGGISAGPQHSQCLEAWFAHIPGLKVVCPSNPADAYGLLKSAIRDPDPVVFVENKALYAAKGEVPDDAGPIPLGQARVARAGRDLTVVSYGAMVHKVERAAEALARDGIEAEVLDLRSIQPWDEAAVLASLQRTHRLLIVHEAVEAFGVGAEIAARMADIGFDELDAPIVRVAAPFVPVPFAPSLEAQYQPQEADIIAAARKLCA

SEQ ID NO: 8286 - protein, 274 aa, Methylobacterium extorquens
MNADAETASTDELLFAVDAAGIARITLNRPKARNALTFAMYRGLVELCERIEADHAIKAVIITGAGDKAFAAGTDIAQFRSFSKPEDAIGYERFMDRVLGGLERLRVPTIAAVAGACTGGGAAIAAACDMRIASRDARFGIPIARTLGNCLSQNTLRRLANLIGAPRVKDILFTARLVEAQEALAIGLVNEVVEDAAAVAARADALATLLASHAPLTLQATKEGLRRIGEEGVAEAAEGERPGDDLIVMTYMSEDFREGMEAFLGKRPPSFKGR

SEQ ID NO: 8287 - protein, 348 aa, Ustilago maydis 521
MASYTSIVRDMLRPSTSSSSSTAWWDPNTSMPVLDDRIVIITGPTSGIGYETLRQLVLSSAHVYLFGRSLGRLEQTRATLCVECSAALDALEPRSLRYGAKVGSMHLIQCDLSDLHSIQRAVTEFLQSETHVDLVFANAGVMLSGKTAQGYEQMFGTNVLGHHALVRLLLPALRRSATLRNSASTGETRIVLTASDTHRWVNHRDHVTLSDDATNAKLGHMHLYGRSKLGNIYTAAHLAHLSHKHAWGLTVCSVHPGGVKSQLGSTNRILTAIKNMFLVPATLGAVTQLWAGAGAQAAQVNARYLVPYATVGTESELASNKLVRDNVWTWCEQQCLKHGLTQPQDLIL

SEQ ID NO: 8288 - protein, 308 aa, Lactobacillus acidophilus NCFM
MADKYDVIVIGAGPGGMTAALYATRANLNVLVLDRGPYGGQMNNTDAIDNYPGFTEVKGPELSQKMYDTLMKFEPDYKYGNVQSVELDGDEKVIKTDDEEYRAPVLIIATGADHRHLNVPGEEEYSGRGVSYCAVCDAAFFKDEDVVVVGGGDSAIEEGIYLSQMAKSVTVIHRRDQLRAQPTLQKRAFANEKMKFIWNAQTEEILGDGNRVTGVKYLDKENGETKEVSAAGVFIYVGVLPQTEPFKKLGILNEQGWIPTNEHMETKVSGIFALGDVRDKDLRQIANAVGEGSVAGQAAYNYFQDLKN

SEQ ID NO: 8289 - protein, 357 aa, Xylella fastidiosa Ann-1
MSKQILILPGDGIGHEIVAEAVKVLEHVNVRHTLNMRLSFDALGGAAYEKYGSPLADETLARAREADAVLLGAVGGPQWDTIDPALRPERGLLKIRAQLGLFANLRPALLYPQLADASTLKPEVVAGLDILIVRELTGGLYFGQPRGSRISKNGEREAFDTLPYCESEIRRILKVGFEMARLRGKKLCSVDKANVLASSQLWRTVAGEMAKDYPDVTLSHMYVDNAAMQLVRHPKQFDVIVTENMFGDILSDQASMLTGSIGMLPSASLDANNKGMYEPCHGSAPDIAGQGVANPLATILSVAMLLRYSMGYIKTADAIEYAVGVVLDSGLRTADIWSEGMTKVGTVAMGDAVVAAL

SEQ ID NO: 8290 - protein, 174 aa, uncultured marine gamma proteobacterium EBAC31A08
MNKFYIFGLLFFTLNAFSCSDLLDTDMRVLDSAESRNLCEFEGKALLVVNVASRCGYTYQYAGLQKLYESYKDEDFLVIGIPSRDFLQEYSDESDVAEFCSTEYGVEFPMFSTAKVKGKKAHPFYKKLIAESGFTPSWNFNKYLISKEGKVVSTYGSKVKPDSKELISAIEGLL

SEQ ID NO: 8291 - protein, 268 aa, Bordetella bronchiseptica RB50
MSDYVLRERRGATFVITLNRPERRNAFDLEVRQSLAEAIFEARDDDGVKAVIITGTQGVFCAGGDLKSLSDGKRPIYQDRDRIRRLHTWFHELVNLEKPVIAAVDGPAFGAGFNLALACDFILGTPAARFCAVFGRIGLVPDLGGFFLLPRIVGLQQAKELVFTAREVDADEARALGILYRVVPAPSLLDEALALAARFHSASTLALGMSKNILNRSFNLDQNTLAELESHAQALAIHSEYHEAAVARFLDKQPLPFSWPGEGKDGQS

SEQ ID NO: 8292 - protein, 110 aa, Streptomyces coelicolor A3(2)
MAGTLKHVTDDSFEQDVLKNDKPVLVDFWAAWCGPCRQIAPSLEAIAAEYGDKIEIVKLNIDENPGTAAKYGVMSIPTLNVYQGGEVAKTIVGANAKAAIVRDLEDFIAD

SEQ ID NO: 8293 - protein, 532 aa, Oryza sativa
MMLVSWATRLVEAPKTDLDFWKVLFPVAVAHTIGHVAATVRFMGAMISNLAFVFRNIFSKRGMKGKSVSGMNYYACLSIMSLVILTPFAIAMEGPQMWAAGWQKALAEVGPNVVWWVAAQSVFYHLYNQVSYMSLDEISPLTFSIGNTMKRISVIVSSIIIFHTPVRPVNALGAAIAILGTFLQSSEFKKMVMFRAMDEEGIQMKNVSAKPVASTEANFACATYLTLPRTREAKRRAIELAMYAMTPRCHLPPPCRAASTTPATSTALSTPPPSRAGPDELRSTWAHRAWTLAGSAAVLSSLSTSATLAAADADANGAAAAFAAPLAAALAAYSLADLATGVYHWLVDNYGDADTPVLGPQIAAFQGHHRHPSTITRREPCNNLHALARAVALALPPAGAALAAAGAPASAHAFAAVFAACVVLSQQFHAWAHGNPRRLPPGVGAMQRAGVLVSRAQHGAHHRAPYDNNYCIVSGMWNATLDRHRVFEAMEMVVFLRTGVRPRSWDEPDAAWTEDYDDTAAVAGGDTSLDTQ

SEQ ID NO: 8294 - protein, 575 aa, Schizosaccharomyces pombe 972h-
MSISSKDFQNVTSAGFADDTFAADTFAADKKSPFESSVFENKTQVLPVDSVSRLSNGARSRSNSNISLSEPHALNDTVEDQPVSKWVWVLAFAAGIGGLLFGYDTGVISGALVVIGTSLGGHELTNGGKEFITSATSLGALLGGIIAGALADFFGRKPVIAIASIIIIVGSIVQVTAHHLWHMIVGRFVIGWGVGIASLIIPLYLSEIAPSKIRGRLVIIYVLLITAGQVIAYGIDTAFEHVHNGWRWMVGLAMVPAAFQLFILIWLPESPRLLVKKERSQEAYNTLARIYPTAHPYEIKTKLYLIQEGVRDPFSGSRWQKIVKTFKELYFNPSNFRALILACGLQAMQQLSGFNSLMYFSSTIFEVVGFNNPTATGLIIAATNFVFTIVAFGVIDFFGRRILLLLTVWGMIAALIVCAVAFHFLPKDENGNYTSGQSNAWAIVVLISMIVYVASYASGLGNLPWQQSELFPMSVRGLGTGMSTAVNWAGNLGIGASFLTLMSEITPTGTFALYGGLCFLGWLGALFCYPDLTDYTIEEIGELLKHGFGVRESMRHLKRVRQERAWSREDKEQNN

SEQ ID NO: 8295 - protein, 157 aa, Zea mays
MASPLRRSFPSLGRALLTPAPARMLSAEASDALVEIKPREIGMVSGIPEEHLRRKVVIYSPARTASQQGSGKVGRWKINFLSTQKWENPLMGWTSTGDPYANVGEAGLTFNSAESAKAFAEKHGWNYVVRKRHTPLLKPKAYAENFKWKGPPKAEQA

SEQ ID NO: 8296 - protein, 238 aa, Arabidopsis thaliana
  misc_feature (31)..(31): Xaa can be any naturally occurring amino acid
  misc_feature (39)..(39): Xaa can be any naturally occurring amino acid
  misc_feature (84)..(84): Xaa can be any naturally occurring amino acid
  misc_feature (116)..(116): Xaa can be any naturally occurring amino acid
  misc_feature (128)..(128): Xaa can be any naturally occurring amino acid
  misc_feature (135)..(135): Xaa can be any naturally occurring amino acid
  misc_feature (157)..(157): Xaa can be any naturally occurring amino acid
AKEEEKQREEEVAPSMLYSAGVVTSPTQATXMVAPCTGXKSYAAFPVTRKTNKDITCIASYGGRVICMKVWPPIGKKKFETLSXYLPDLSDVELAKEVDYLFRNKWIPCVEFELEXHGFVYREHGTTXPGYYDGXRYWTMWKLPIVRDAPDSAQVLXKEVEECKKEYPGAFIRIIGFDNTRQVQCISFIAYKPPSFTEALISFLKHSYELSLLISFPIVCVLFLFMRQFLSDCQMSDL

SEQ ID NO: 8297 - protein, 368 aa, Mesorhizobium sp. BNC1
MLRTETYMPYDQKHVVEALRAFERGEIVVVMDDDGRENEGDLIVSAVHCTPEKMAFIVRHTSGIVCAPMPREEARRLNLAPMVAENDAPHQTAFTVSVDFRHGTTTGISAEDRTLTVRNLANPNVGAQDFVRPGHIFPLVAREGGVLMRSGHTEAAVDLCRLAGLPPVGVICELVNDDGTVMRGPQVTAFAEKHGLKQVSVADLIAYRQRKETLVERVASFPVSTAAGQATAYAYTLPWEVMQHLAIVFGDIRDGQDVPVRLHTENVVQDVFGMERRLQQIMERMGSRGVLVYLRAGSVGVAHQQRRLAGGEDHEEAVRRENEWREIGLGAQILKDLGITSIRLLASRERHYVGLEGFGIEIASTEIL

SEQ ID NO: 8298 - protein, 883 aa, Shigella flexneri 2a str. 301
MNEQYSALRSNVSMLGKVLGETIKDALGEHILERVETIRKLSKSSRAGNDANRQELLTTLQNLSNDELLPVARAFSQFLNLANTAEQYHSISPKGEAASNPEVIARTLRKLKNQPELSEDTIKKAVESLSLELVLTAHPTEITRRTLIHKMVEVNACLKQLDNKDIADYERNQLMRRLRQLIAQSWHTDEIRKLRPSPVDEAKWGFAVVENSLWQGVPNYLRELNEQLEENLGYKLPVEFVPVRFTSWMGGDRDGNPNVTADITRHVLLLSRWKATDLFLKDIQVLVSELSMVEATPELLALVGEEGAAEPYRYLMKNLRSRLMATQAWLEARLKGEELPKPEGLLTQNEELWEPLYACYQSLQACGMGIIANGDLLDTLRRVKCFGVPLVRIDIRQESTRHTEALGELTRYLGIGDYESWSEADKQAFLIRELNSKRPLLPRNWQPSAETREVLDTCQVIAEAPQGSIAAYVISMAKTPSDVLAVHLLLKEAGIGFAMPVAPLFETLDDLNNANDVMTQLLNIDWYRGLIQGKQMVMIGYSDSAKDAGVMAASWAQYQAQDALIKTCEKAGIELTLFHGRGGSIGRGGAPAHAALLSQPPGSLKGGLRVTEQGEMIRFKYGLPEITVSSLSLYTGAILEANLLPPPEPKESWRRIMDELSVISCDLYRGYVRENKDFVPYFRSATPEQELGKLPLGSRPAKRRPTGGVESLRAIPWIFAWTQNRLMLPAWLGAGTALQKVVEDGKQSELEAMCRDWPFFSTRLGMLEMVFAKADLWLAEYYDQRLVDKALWPLGKELRNLQEEDIKVVLAIANDSHLMADLPWIAESIQLRNIYTDPLNVLQAELLHRSRQAEKEGQEPDPRVEQALMVTIAGIAAGMRNTG

SEQ ID NO: 8299 - protein, 504 aa, Desulfotalea psychrophila LSv54
MAEKLQYWVDNQWRRSKTTSYADLYNPSTGEVTAQVAHCTAEEVEEAIASAAAAYPGWAATPVGKRVQIFFRMKMLVDQHLEELTDILCREQGKNRAESMGDVLKVNEVIEFACGAPHLMKGPSLFNVSNGYDTVQQMRPLGVFAGIVPWNFPAMIPHGWMAPICMVTGNTMVLKAASYVPRTAMRLMELWQEAGLPPGVLNLVTANRTEAEILLRHPEIKGVSFVGSTTVGRHIYETATANGKRVQALCAAKNHALVLEDCNLERTAQGIINAFCGCAGARCMALPVIVVQESIADKLVERITYHAKKLTMGKAWLPETGMGPIVNAGHKKSILDWIARGITEGADLVLDGRRPVVAAGCENGYFIGPTIFDNVTPEMSIGSEEIFGPVLSVKRVKDFAEGIALMNANPYANGSVIYTESGFHARNFVAQTDGGMVGINVGIPVPVGIFGFTGQKKSFYGDLHTMGQDGFRFYTEQKTVTSTWFSKAKTTAKVDTWDGTMNMG

SEQ ID NO: 8300 - protein, 180 aa, Zea mays
MASSMLSSATMVASPAQATMVAPFNGLKSSAAFPATRKANNDITSITSNGGRVNCMQVWPPIGKKKFETLSYLPDLTDSELAKEVDYLIRNKWIPCVEFELEHGFVYREHGNSPGYYDGRYWTMWKLPLFGCTDSAQVLKEVEECKKEYPNAFIRIIGFDNTRQVQCISFIAYKPPSFTG

SEQ ID NO: 8301 - protein, 312 aa, Robiginitalea biformata HTCC2501
MSEEMRRDESIYLMGEEVAEYNGAYKASKGMLDEFGPKRVIDTPISELGFAGIGVGSAMNGNRPIIEFMTFNFALVGIDQIINNAAKMRQMSAGQFNIPIVFRGPTASAGQLAATHSQAFESWYANCPGLKVVVPSNPKDAKGLLKASIRDDDPVIFMESEQMYGDKGEVPEGEYTIPIGVAEIKREGTDVTIVSFGKIIKEAYAAAEKLDSEGISCEIIDLRTVRPMDHETILESVKKTNRLVILEEAWPFGNVATEITYQVQQKAFDYLDAPIIKLNTADTPAPYSPVLLQEWLPNSEDVIAAVKKVLYK

SEQ ID NO: 8302 - protein, 112 aa, Porphyra yezoensis
MKKIEAIIRPFKLNEVKLALVKEGIGGMTVIKVSGFGRQKGQTERYKGSEYSIDIIDKIKIEIIISDDKVEKIVETIIKASKTGEIGDGKIFISSIERVIRIRTNDLNFEAL

SEQ ID NO: 8303 - protein, 335 aa, Bacillus megaterium
MAVKIGINGFGRIGRNVFRAALKNDNVEVVAINDLTDANMLAHLLKYDSVHGKLDAEVVVDGSNLVVNGKTIEISAERDPAQLSWGKQGVEIVVESTGFFTKRADAAKHLEAGAKKVIISAPASDEDITIVMGVNEDKYDAANHNVISNASCTTNCLAPFAKVLNDKFGLKRGMMTTVHSYTNDQQILDLPHKDYRRARAAAENIIPTSTGAAKAVSLVLPELKGKLNGGAMRVPTPNVSLVDLVAELDKEVTVEDVNNALKEAAEGDLKGILGYSEEPLVSGDYNGNINSSTIDALSTMVMEGNMVKVISWYDNESGYSNRVVDLAQYIAAKGL

SEQ ID NO: 8304 - protein, 496 aa, Zea mays
MVLSHASSGRDDDAVASTFASRYVRERLPRYRMPERSIPREAAQQIISDELMLDGNPRLNLASFVTTWMEPECDKLIMDSINKNYVDMDEYPVTTELQNRCVNMIAHLFNAPIKEDETAIGVGTVGSSEAIMLAGLAFKRKWQNKRKEQGKPCDRPNIVTGANVQVCWEKFARYFEVELKEVKLSEGYYVMDPVKAVEMVDENTICVAAILGSTLTGEFEDVKQLNDLLTDKNKETGWDVPIHVDAASGGFIAPFLYPELEWDFRLPLVKSINVSGHKYGLVYPGVGWVIWRSKEDLPEELIFHINYLGTDQPTFTLNFSKGSSQIIAQYYQLIRLGFEGYRNIMQNCQDNAAILREGIAATGRFGVLSKDAGVPLVAFSLRDSSRFSVFDVSENLRRFGWIVPAYTMPADAEHVAVLRVVVREDFSRSLAERLVSDVRKILRELDARATHAVRVATATAEQSGDGVVAKKSVLEIEREVAARWMNAVNKKKTGVC

SEQ ID NO: 8305 - protein, 398 aa, Wolbachia endosymbiont of Drosophila melanogaster
MSIDLSLPELPILHPRITVVGVGGAGGNAVNNMIQSNLQGVNFVVANTDAQALEKSLCDKKIQLGINLTKGLGAGALPDVGKGAAEESIDEIMEHIKDSHMLFITAGMGGGTGTGAAPVIAKAAREARAAVKDRAPKEKKILTVGVVTKPFGFEGVRRMRIAELGLEELQKYVDTLIVIPNQNLFRIANEKTTFSDAFKLADNVLHIGIRGVTDLMVMPGLINLDFADIETVMSEMGKAMIGTGEAEGEDRAISAAEAAISNPLLDNVSMKGAQGILINITGGGDMTLFEVDAAANRVREEVDENANIIFGATFDQAMEGRVRVSVLATGIDGRNNKSETSPISQSEDSEKEKFKWPYSQSESTQDKTLETKPAEQVSEGAKWGSNIYDIPAYLRRKK

SEQ ID NO: 8306 - protein, 266 aa, Azoarcus sp. EbN1
MADTVLLDVSNRVATLTLNRPAQLNALSIEMMQDLLGVVRELRDLKDVDVVVIVGAGDHFMAGGDLKDFATQFHLAPQARMVAFRAIIEKHINPAVEILQSLHQPVIAKVRGACAGFGLSLMLGCDLALCADSAKFTTAYSSIGLAADGGLTYFLPRVVGSRKALELLLLAERFDAAEALRLGLVNRVLPPAELDGETDKLVARLQAGPREAYGEIKRLVASSYDAQIESQLESEAEAFGRCSATDDFVEGITAFLEKRKPAFRGM

SEQ ID NO: 8307 - protein, 286 aa, Staphylococcus epidermidis ATCC 12228
MVAKILDGKQIAKEYRQRLKNQVNDLKEYGFTPKLSVILVGNDGASQSYVKSKKKAAEKIGMISEIIHLDESTSEEVVLSELNRLNNDDTVSGILVQVPLPKQVSEQKVLEAINPEKDVDGFHPINIGKLYIDEQTFVPCTPLGIMEILKHADINLEGKNAVVIGRSHIVGQPVSKLLLQANATVTILHSRTKNMNAHLKQADVIVSAVGQPGLVTKENVKKGAVIIDVGNTPDENGKLKGDVAYDEVKEIASAITPVPGGVGPLTITMVLNNTLLAEKLRRGLTK

SEQ ID NO: 8308 - protein, 411 aa, Asparagus officinalis
MNALAATSRNFKQAAKLLGLDPKLEKSLLIPFREIKVECTIPKDDGTLASFVGFRVQHDNARGPMKGGIRYHSEVDPDEVNALAQLMTWKTAVANIPYGGAKGGIGCSPGDLSLSELERLTRVFTQKIHDLIGVHTDVPAPDMGTNAQTMAWILDEYSKFHGYSPAIVTGKPVDLGGSLGRDAATGRGVLFATEALLAEYGKGISGQRFVIQGFGNVGSWAAQLITKAGGKVVAVSDVTGAIKHSNGLDIENLLKYSVKNRGIKGFSGGDAIDSNSLLTEDCDVLIPAALGGVINRENANDVRAKFIIEAANHPTDPEADEILSKKGVCILPDILANSGGVTVSYFEWVQNIQGFMWDEEKVNSELKTYMTKGFKHVKEMCKTHNCDLRMGAFTLGVNRVARATLLRGWEA

SEQ ID NO: 8309 - protein, 467 aa, Methanosarcina barkeri str. fusaro
MSEHESASLVKTLRPFHVWALGVGIVLVGEYMGWNFTVAKGGVLGSLLAMLVAGTMYVIISLCASELGSATKLAGGPYDWARLFIGPGAAASVGLAVYMEYIALEAADAIVVASISQSIFPELQVYPVTLLVIALLTFINYRGVVAALTLNFVLTMIAFIAILAFFFSTAFGIGDIHPEYLLQGALPNGMIGLFAALQFGPWFYLGIEGAAMCAEECKHPSRAVPLGQQAGMITLLIGAAMTLYLCSVLIPADLLGVSVYPLFEAAQNSGIFIFVALLGLGTFLTCVASANGCVCDSSRSWFALSRDNYVSSWFSAVHPKYNTPYRAVIFTVPVAIGFAFSGYLDQVITFSIVSGLLCYVLIPFSLIRFRKLFPETTSKVRPFVGPLQPYIAYFAIAIAITILSTLFWGYKYNLIFAFVFYGIAYFYFSHKHKKSNIENNWAEMGWPLPKGSGNKRIKKEATGIGDE

SEQ ID NO: 8310 - protein, 367 aa, Burkholderia thailandensis E264
MKIFKLPDLGEGLQEAEIVEWHVKAGDTIDADRPLVSVETAKAIVEIPSPQSGRVAKLFGQPGDIVHLGAPLVAFEGEGGGEDAGTVVGRMTVGEHVVQEPPTALGAGAGALKAIPAVRALARKLDVDLAMVTPSGADGVITAADVQRVAKVLAELGPPEVLRGVRRAMAQNMARAQSEVAAATVIDDADIHAWPAGADVTMRLVRALVAGCRAEPGLNAWFDGQAGRRHVVAKIDVGIAVDLPDGLFVPVLRDVAHRDAADLRRGLDRMRADIRARRIPPDELRGNTITLSNFGMIGGKYAAPVVVPPTVAILGAGRVHDAVVAADGAPAVHRVLPLSLTFDHRVVTGGEAARFLAAAIADLQLAQ

SEQ ID NO: 8311 - protein, 216 aa, Archaeoglobus fulgidus
MEEIRFCPEHGFYRGEKCRCGAEGELILPKEKVEKLGKFISGVLRHFPDKFGLNMDENGWVNLESLARVVKRRYKWANIWLIKALVYSDEKQRYELKGDKIRARYGHSIDVKLSDFPEAKEDVLYYGTSEEEAHRMLEIGIKPVNQRYVHLSTTIEKSKEVASIRTDTPIVLEIDAKKAREDGIRIIKANDLIALAEEIPAKYIKRQIVFNQYSSS

SEQ ID NO: 8312 - protein, 299 aa, Chlorobaculum tepidum
MRQLKISKQITNRESLSLDRYLQEIGKYDLLTARRRGEAHEGHKEGYDMPVDTVEYKRAKRALDKLIKGNLRFVVSVAKQYQNQGLTLGDLINEGNLGLIKAAKRFDETRGFKFISYAVWWIRQSILQALAEQSRIVRLPLNRVGTLNKISKAYSQLEQEYERDPNTKELADLLDMDSQDVADTLKIAGRHVSVDAPFAQGDDNRLLDVLQNDGHMPDYTLNRDSLSLEVERSLSVLAPREADVIRSYFGIGMDNPLTLEEIGEKFKLTRERVRQIKEKAIRRLRQSAYNKVLKEYIGS

SEQ ID NO: 8313 - protein, 558 aa, Trifolium pratense
MGCHGSKEAKKSAAEHSRHRHQSSAAAGGAATGGTNFQYQIVQPSSSHVQTSPPPKPKPESHSHSHSHASTVTTTTTSNPKPSASENVRTVQKPDTTILGKPFEDIKKFYTLGKELGRGQFGITYFCTENSTGLNYACKSILKRKLVSKADREDIKREIQILQHLSGQPNIVEFKGAYEDRFSVHLVMELCAGGELFDRIIAQGHYSERAAASICRAVVNVVHICHFMGVLHRDLKPENFLLSSKDEGAALKATDFGLSVFIEEGKVYRDMVGSAYYVAPEVLRRNYGKEIDIWSAGIILYILLSGVPPFWAETEKGIFNAILEGELDFVSEPWPSISDSAKDLVRKMLTQDPKKRITSTQVLEHPWMREGGEASDKPIDSAVLSRMKQFRAMNKFKKLALKVMAENLSEEEIKGLKAMFANMDTDGSGTITYEELKSGLARIGSRLSEPEVKQLMEAADVDGNGSIDYLEFISATMHRHRLERDEHLYKAFQYFDKDNSGHITREELETAMTKHGMGDEATIKEIISEVDTDNDGRINYEEFCAMMRSGMPHQAQLF

SEQ ID NO: 8314 - protein, 131 aa, Brassica napus
  misc_feature (54)..(54): Xaa can be any naturally occurring amino acid
  misc_feature (60)..(60): Xaa can be any naturally occurring amino acid
  misc_feature (72)..(72): Xaa can be any naturally occurring amino acid
MAGVLKLACLVLAWMIAVGTITENAALTCGTVNSNEAPRIDYLTQCGPLPRACXCTGVSXLNFIDRSNPDRXRTCPCLKTAVIALWPNHNAGRADRIPKACGVSVTFPIRTNTHCNNVNLPAGRCSCEGHC

SEQ ID NO: 8315 - protein, 319 aa, Solibacter usitatus Ellin6076
MHYDAILFVSFGGPEKVADVIPFLENVLRGRNVPRERMLQVAEHYYHFGGRSPINDQCRDLIAALRPAIDLPIYWGNRNWHPLLADTMRQMAADGVRRALAIATSAYSSYSGCRQYIENLACASAAAGPNAPAIDKLPPFWNQPGFVEANADRVSDALARLPHDRRDAARLVFTAHSIPLAMATTCRYEEQLVETARAVAARIAHDEWDLVWQSRSGPPTQPWLEPDILDHLRALAENGVRDVIVSPIGFLSDHMEVLYDLDEEAAALARELGLNFIRAATAGTHAAVIAMLADLIARRQASPETPLCAPDCCPALRRP

SEQ ID NO: 8316 - protein, 112 aa, Xanthomonas campestris pv. campestris str. ATCC 33913
MKMIMAIVKPFKLDDVREALAGCGVAGITVTEVKGFGRQKGHTELYRGAEYVVDFLPKVKLEVAVTDDQAEQVVEAIVKAAGTGKIGDGKVFVYDLGSVVRIRTGELDGDAL

SEQ ID NO: 8317 - protein, 550 aa, Solibacter usitatus Ellin6076
MSMLPPETPEQHTLRFPKLSAAQIAQLAPWCVRRHANAGEVVYDVGSAAHGVYIVESGSLEIIGVTSGVETVVAVLEPGEFTGETNLLSGRRALVRCRARSASALLEIERANLRRVMQSDATLGDLFLRAFLLRRVFLIANSVGDAVLIGSKHSADTLRLRTFLGRNGHPYAYLDVDADADVQNVLDHFSVRIDEIPVLICRGELVLRNPTNAEAAVCFGLNAGIEAEGVYDLIVIGAGPGGLAAAVYGASEGLSTLVVECNAPGGQAGSSSRIENYLGFPMGISGQELADRAFLQAEKFGAQISVARTATELKCRRPPYAVQLDDGSVVQGRTMIVASGSRYRRLDLPNIGKFEGSGIYYGATTVEAPLCQSEVVAVVGGGNSAGQAAVFLSGYASHVHLLVRAPGLAATMSRYLIARIEASPEITVHTFTNVEALEGDTRLERIRWRNTKTGMTESHEIHHLFLMMGADPNTGWLSECVALDGKRFIKTGPELADDWPLQRAPFPLETSLPGIFAVGDIRANSIKRVASAVGEGSMAVQFVHQVLAGT

SEQ ID NO: 8318 - protein, 189 aa, Brassica napus
NVTKIRQEVNINLLKICGQERPSNDYSIECLNKLGDLRGALYESMRLYPPVPFERMTPVRPDVLPSGHKVDASMKILIFIYALGRMEAVWGEDALEFKPGRWVSETGGFREEPSYKFFAFFGGPRSCLGKLLAMTLMKTVVVEILQNYDFQLVKGQTIEPATGPILRMKHGLRVKLTKRCSSYETNENT

SEQ ID NO: 8319 - protein, 330 aa, Arabidopsis thaliana
MHIGQAAAKEGESQMIVMMGNNLSLTSIILNGDPSIEHKGKLPCLDEQVKISQFYHCEGLLLCILKDDSRFVVCNPYLEQTRWIEPRYSHRPHGWDRFSYALGYVNTDSCCYYKLLGLIDYYYNAHEKQFFWYGIYDFDSDLWTTLDVTPHWRIAFCNRGVSLKGSTYWCAAERNVDVDEVLADRLICFDFTSERFGPLLPLPFSGGHIDCMTLSCVREEKLAVLLQHDESNPYELDLWITTKIETGEEKKVAFGFDGRNRERVIVIGEAGYLRGLDLVGDFGDQECRTDLCSYVPSLVQIKQPEGGESKQQSDLEKCRYDENMLRLVSL

SEQ ID NO: 8320 - protein, 238 aa, Brassica napus
  misc_feature (181)..(181): Xaa can be any naturally occurring amino acid
  misc_feature (196)..(196): Xaa can be any naturally occurring amino acid
  misc_feature (201)..(201): Xaa can be any naturally occurring amino acid
  misc_feature (206)..(206): Xaa can be any naturally occurring amino acid
  misc_feature (209)..(209): Xaa can be any naturally occurring amino acid
  misc_feature (213)..(213): Xaa can be any naturally occurring amino acid
  misc_feature (217)..(217): Xaa can be any naturally occurring amino acid
  misc_feature (229)..(229): Xaa can be any naturally occurring amino acid
CSLGSLSRSLRPARYASSSAVATSSSSSSPGFFSWLTGGSSSSLTSLDMPLQGVSLPPPLADLVEPSKLKITTLPNGLKIASEMSPNPAASIGLYVDCGSIYEAPYFHGATHLLERMAFKSTRNRSHLRLVREIEAIGGNTSASASREQMSYTIDAREAYLPKAAEGRIDSAWFPAFLGWXEPNADLRLSCPHIAXELAKXPMGLXMEXVHSXGYSXALANPLYAPESXFGTDMGEPL

SEQ ID NO: 8321 - protein, 540 aa, Synechococcus elongatus PCC 7942
MASASSNDRILIFDTTLRDGEQSPGASLNLEEKLAIARQLARLNVDIIEAGFAFASPGDFEAVQRIAAEVGTPDGPTICSLARATRQDIKAAAEALAPAAKGRIHTFIATSDIHLEYKLKKTRAEVLAVIPEMVGYAASLVDDVEFSPEDAGRSDPEFLYECLEAAIAAGAKTINIPDTVGYTTPSEFGALIGGIKQNVCNIDQAIISVHGHNDLGLAVANFLEAVKNGARQLECTINGIGERAGNAALEELVMALHVRRQYFNPFLGRAADSEAPLTQVNTREIYKTSRLVSNLTGMLVQPNKAIVGANAFAHESGIHQDGVLKNKLTYEIVDAETIGLSTNRITLGKLSGRNAFRTRLQELGYDLGEDDLNRAFLRFKELADKKREVTDRDLEAIVNDETQQAPELFKLELVQVSAGDHARPTATVTLRTPEGEELTDAAIGTGPVDAIYRAINRVVNIPNELIEFSVKSVTAGIDAIGEVTIRLRHEDRIFSGHSANTDILVASAQAYIHALNRLAEALQKDKPLHPQEPIVAGMGR

SEQ ID NO: 8322 - protein, 594 aa, Arabidopsis thaliana
MAKLNRSNIGLSLLLSMFLANFITDLEASSHQDLNQPYRTGYHFQPLKNWMNDPNGPMIYKGIYHLFYQYNPYGAVWDVRIVWGHSTSVDLVNWISQPPAFNPSQPSDINGCWSGSVTILPNGKPVILYTGIDQNKGQVQNVAVPVNISDPYLREWSKPPQNPLMTTNAVNGINPDRFRDPTTAWLGRDGEWRVIVGSSTDDRRGLAILYKSRDFFNWTQSMKPLHYEDLTGMWECPDFFPVSITGSDGVETSSVGENGIKHVLKVSLIETLHDYYTIGSYDREKDVYVPDLGFVQNESAPRLDYGKYYASKTFYDDVKKRRILWGWVNESSPAKDDIEKGWSGLQSFPRKIWLDESGKELLQWPIEEIETLRGQQVNWQKKVLKAGSTLQVHGVTAAQADVEVSFKVKELEKADVIEPSWTDPQKVCSQGDLSVMSGLGPFGLMVLASNDMEEYTSVYFRIFKSNDDTNKKTKYVVLMCSDQSRSSLNDENDKSTFGAFVAIDPSHQTISLRTLIDHSIVESYGGGGRTCITSRVYPKLAIGENANLFVFNKGTQSVDILTLSAWSLKSAQINGDLMSPFIEREESRSPNHQF

SEQ ID NO: 8323 - protein, 471 aa, Legionella pneumophila str. Paris
MTIALVWFRQDLRLTDNPAFIEACSHHEIVIPLYIYDDKCSVLGQAQAWWLHHSLIALGKSLNQQGLSLVLRKGDPQEIILELVAQYGVESVYWNRCYEPQVIARDKKIKLALGEREIKVQSFNGNLLHEPWTIKNKNGDFFKVFTPYWKQCRQILNIPSPFMLTKRPRGIEITSDDLGKWKLLPAINWAARFSEYWTPGEEGAQKKLDEFIVHHLSGYKRERDFPAKNATSRLSPHLHFGEISPWVILRALELAKLEQTCDLASVEHFLSELGWREFSVYLLYHFPKLDCENFRKEFDAFPWQNDEQLLTCWQKGMTGYPIIDAGMRELWATGYMHNRVRMIVASFLTKDLLIDWRSGAQWFLDTLVDADLANNSASWQWVAGCGADAAPYFRIFNPVLQSQKFDPDGIYIRQWIPELAQLNSQSIHQPWTDADANSIFLGKKYPKPIIDHQEARTKALSYYQQIKKGMD

SEQ ID NO: 8324 - protein, 379 aa, Dunaliella salina
MDSGDVGSVSALVCDNGSGMVKSGFAGDDTPRSVIPSIVGRPRHTGVMVGMGHKDSYVGDEAQSKRGILSLRYPIEHGIVSNWDDMEKIWDHTFFNELRVAPEEHPVLLTEAPLNPKGNREKMTQIMFETFNVPAMYVAIQAVLSLYASGRTTGIVLDSGDGVTHTVPIYEGYALPHAILRLDLAGRDLTDYLMKILMERGYSFTTTAEREIVRDIKEKLAYVALDFEQEMATAQSSSALDKNYELPDGQTITIGNERFRCPEVMFNPNTVGMEAVGVHDTTFNSIMKCDVDIRKDLYNNIVLSGGTTMFPGIADRMSKEITALAPSAMKIKVVAPPERKYSVWIGGSILASLSTFQQMWIAKSEYDESGPSIVHRKCF

SEQ ID NO: 8325 - protein, 223 aa, Zea mays
ILSPSGRFTSILSIGIGGSALGPQFVAEALAPDNPPLKIRFIDNTDPAGIDHQIAQLGPELATTLVIVISKSGGTPETRNGLLEVQKAFRDAGLQFSKQGVAITQENSLLDNTARIEGWLARFPMFDWVGGRTSEMSAVGLLPAALQVKANPAALLALCWYWASEGIGKKDMVVLPYKDSLLLLSRYLQQLVMESLGKEFDLDGNRVNQGLSVYGNKGSTDQH

SEQ ID NO: 8326 - protein, 335 aa, Schizosaccharomyces pombe 972h-
MSIREDRNQDATIYLGNLDEKVTDSILFELCLQAGPVVNIHIPRDRVRNSHNGFGFCEFLHEQDVEYACQILNQVKLFGKPIRVNRASQDRGVNTLIGANLFVGNLDPLVDERVLYDTFSALGQLVKAPQVARDENGRSKGYGFVSYDSFETADAAIEAMNNQFLMNKPITVSYAFKREGKGERHGDIAERKLAAAAKKNKVAVTPQSTLPPGFSPATPAPTSAANTPATIAATSIPPVPNVPLVGATTAVPPLSIPNVLPFTAAQHFPGMPAMPMMNVPMGPGGAPLVPPPPPGMVMASPSPAAATIPGAPVMPNIPFYQTINAQNGYSQQQRR

SEQ ID NO: 8327 - protein, 1049 aa, Polaromonas sp. JS666
MSTSTPSSGSPVKILIVEDSPTQAQQLQHILEQEGYEVGIARNGRLALKMLPQFRPALIISDVIMPEMDGYELSRRIKTQPDLRNIPVILVTTMSDPQDVIRGLECGADNFVLKPYDERYMLARVRYVLVNREMHREQDMGLGVEIYFNDQRHFITADRLQILNLLLSTYDAAIQRNKDLTQTQESLGQRSAEVAAVNRFLDSVIETIPDMIFVKDAADLRFVRFNRAGEELLGYSRDELVGKNDYDLFPEAEADAFTSKDQEVLTRGMVLDIPEEPIHTRNKGDRILHTKKIPIFDSKGRPLYLLGISRDVTEKKKLEDALRKRNEELSKSQEDLQWSNSELNKLRLALEARVNQRTQQLTAVVEALRESEARTRLTIDTALDAVVAMDAHGLVREWNAQAETIFGWKRDEAIGKPLAGLVIPRQHREGHARGLERFLATNEGPILSQRLELTALHREGREFPVELSITPMLLQGEWTFSAFLRDITDRKQMEERTLNLNRELEQRVAQRTTELVAAREAADTANRAKSTFLATMSHEIRTPMNGMFGMLELLGLTELDTDQRATLAIVRESSQSLLCIIDDILDFSKIEAGKLTVRPEVASIKDVIEHVRNMYAGNASGRGLLLKHGTDPQISPALMFDPLRLGQILNNLVSNALKFTSRGSIEIKAELIARTNGEDQVRFVVTDTGMGVSAEDQQRLFQPFTQGGGDTARWAGGTGLGLTICRRLAGMMNGTVEMVSELGKGTTMILTLSLPIADPKELAKIRRAQMQDSARTTHTARRDAPTVARAETEGTLVLLVDDHPVNRMLLMRQVHVLGYAAESAKNGVEALAKWQSRRFGIVITDCNMPEMNGYDLARSIRGLESGNEGKHVPIIACTANALSGEAESCFAAGMDDYLVKPVELSQLREKLDQWLPIPDATVMPEATSGTSSKHMAATAAAVPVDRSVIAEFSGGDASTERHIFTEFRSANDEDAAMLKRAVAASDGVQITRTTHRMLGASRMIGARDFARVCESIEHASRTSDWAAVEAHMSAFQHELQRLNAYLDAL

SEQ ID NO: 8328 - protein, 532 aa, Oryza sativa
MEVGTWAVVVAVAAAYMTWFWRMSRGLSGPRVWPVVGSLPGLVQHAENMHEWIAANLRRAGGTYQTCIFAVPGVARRGGLVTVTCDPRNLEHVLKSRFDNYPKGPFWHAVFRDLLGDGIFNSDGETWVAQRKTAALEFTTRTLRTAMSRWVSRSIHHRLLPILDDAAAGKAHVDLQDLLLRLTFDNICGLAFGKDPETLAKGLPENAFASAFDRATEATLNRFIFPEYLWRCKKWLGLGMETTLASSVAHVDQYLAAVIKARKLELAGNGKCDTVAMHDDLLSRFMRKGSYSDESLQHVALNFILAGRDTSSVALSWFFWLVSTHPAVERKVVHELCAVLAASRGAHDPALWLAAPFTFEELDSLVYLKAALSETLRLYPSVPEDSKHVVADDYLPDGTFVPAGSSVTYSIYSAGRMKTVWGEDCLEFRPERWLSADGSKFEPHDSYKFVAFNAGPRICLGKDLAYLQMKNIAGSVLLRHRLAVAQGHRVEQKMSLTLFMKNGLRMEVRPRDLAPVADELRGADVRATAPCA

SEQ ID NO: 8329 - protein, 618 aa, Zea mays
MSSFFAVAVALVLSSLIHGTTMATASSEESFFQKCPASSCSEGGPEIRFPFRLATSPLSCGAPGMELVCSKADTVLVHPNLGLCKVTAIWYGGSTITIVPLAAEPEPKCPFQKIISTNLSTDVYRPYGDRATLVSCSAEFIVPSHPASLAGPISCLTNASRRFAYLVPSFRPMDFLPLDCTVLSNSISVPYPASVNAGFNGTARGAIAFGETMLEWRVPNITDVCRDCEAEGRLCGFSSESRQAFCKSKNHSSRLKVIAVTTPVAAVLVLSAMAGAALLHLALKSKYDDEIHRKVEMFLETYRTLKPRRYTFSEVRKMTRRFSSRLGQGGFGSVYKGELPNGGVPVPVAVKMLEDSTGEEEFISEVATIGTIHHANVVRLLGFCSERSRRALVYEFMPNASLEKYIRCSSQEQSLIPTASKMLEIATGIARGIEYLHQGCDQRILHFDIKPSNILLDYNLNPKISDFGLAKLCARDQSVVALTAARGTMGYIAPELYSRNFGTVSCKSDVYSFGMVVLEMVVVSAKRRKYSPAETEDQNDDVCVPEWIYEEIVTGQEPREMARGERDMVRKLAIVALWCIQWNPPNRPSMTTVVNMLTDSLQSLKIPPKPFVSSFVGQ

SEQ ID NO: 8330 - protein, 481 aa, Haemophilus somnus 129PT
MNIQHLLKTQAYINGEFISAKNHRTFPVINPANQQVICEIACCGKEETELAIKSAKQAQVHWKKYTAKERSKILKKWFELIMQHQESLAYLLSLEQGKPLSESRAEIAYGASFVEWFAEEAKRAYGEIIPQVREDHRLLVIKQPVGVVAAITPWNFPNAMITRKAAPALAAGCAIIIKPAPETPLSALALAALAEQAGIPKGIFNVLPTVYAEEVGSVLTRSTDVRKLTFTGSTKIGKILMQQCADTVKKISLELGGNAPSLIFNDADLDRTVDSVIASKFRNSGQTCICTNRIYVQSEIYRAFADKLKQKVRSFIVGDFQQEAVNIGPLINESAVRKIERHIEDALSKGAILTLGGQRHSLGGTFFEPTILENVSQDMLVCHEETFSPLAALIPFDTEEQAISMANDSEFGLAAYVYTQDFSRIWRLSEELECGLVGVNEGIISNEVSPFGGVKQSGLGREGSRHGLDEFLEMKYLCMKV

SEQ ID NO: 8331 - protein, 408 aa, Pirellula sp.
MLSEKTIRIVKEITPLVAANAETITRRFYERMFEANPEVKAFFNQAHQHSGGQQKALAGAICAYFTHIDNPAVLMPAVELIAQKHVSLGIKPEHYPIVGSNLLAAIGDVMGDAATPEIVEAVSEAYGFLADIFIGREGAIYEEQASMPGGWNGTRTFVVTKKVRESEIVTSFYLKPEDEGPLPPFKPGQYITVHMDHPHTPTSPRNYSLSDCASQPHYRISVKREERLVPDAPDGLISNHLHDGIEEGHRIELGPPCGEFTVDPATIAKPIVLIAGGIGVTPLLSMAKSIVHANPNAELHFIQAARNSKVHAFADELRRLAQAGPNVHTKVIYDSPLPGDVEEGKCDEAGFVTENQIRESTPFTDADFYFCGPKPFMKNVHSCLRELGVDEHRVRYEFFGPKEELVAV

SEQ ID NO: 8332 - protein, 358 aa, Pseudoalteromonas tunicata D2
MSQSNYNIAVLAGDGIGPEVMAAAEQVLDAVSQKFSFTLNRTHHAIGGAAIDQFGQALPDATLAACEQADAILFGSVGGPKWEKLPPAEQPERASLLPLRKHFGLFCNLRPAQLLPALSAASPLRADISEKGFDILCVRELTGGIYFGEKGRSGEGESESAFDTQTYSRKEIARIAHFAFSAARLRRNKVTSVDKANVLASSVLWREVVTEVSKDYPDVALEYIYVDNAAMQLVKNPGQFDVLLCDNLFGDILSDECAMITGSMGLLPSASLNQSGFGLYEPAGGSAPDIAGKGIANPIAQILSAALMLRYSLKQEEAARTIEKAVAEAVAAGVGTPDIYPQAGCTTADVAAAIVARI

SEQ ID NO: 8333 - protein, 262 aa, Polaromonas sp. JS666
MTTTTYAGLQLELRGHTAVLTLANPPANTWTAQSLAALTQLVSELNARREIYSLVVTGQGEKFFSAGADLKLFADGDKAVAREMARRFGEAFEALAGFRGLSIAAINGYAMGGGLECALACDLRIAEEQAQLALPEAAVGLLPCAGGTQWLSWAVGEAWAKRMVLCGERVDAATALRIGLVEEVVPRGQALAQALLLAARVEQQSPTSVAACKRLIQGARTQSPAATLVAEREAFVDLFDSQDQREGVSAFLAKRAPVWRNA

SEQ ID NO: 8334 - protein, 515 aa, Pseudoalteromonas tunicata D2
MSDKVWIFDTTLRDGEQALKASLTEDDKLQLAHTISRLNVDVMEVGFPVSSPADFRSVQRIATEVKGPIICGLARAVVKDIEACGEALRPAEQRRIHTFIATSPLHLEHKLRMSLDQATEMAVKSIKLARNYTDDVEFSCEDAGRTPHDDLCRIVERAIAAGASTINLPDTVGYVTPQEYAAMISHLMNNVPNIDKARLSVHCHNDLGLAVANSIAAVQAGARQIECTINGIGERAGNCSMEEVAMILKMRHDYLNLHTDINSEEIYRASRQVSQICNMPVQPNKAIVGENAFAHSSGIHQDGVLKAQNTYEIMSPETVGVPSNQLNMTSRSGRHVIQHRLSELGYQTGDYDMESLYESFLALADQKGTVYDYDLEAMIHFNKISDKDDYYQLDFVNSTSNSQSVASSTVGLVIGGEKVSEAATGNGPVEASYKAIKRITAMDVEVIEYNLDATGAGESSLGQVDIIAKFDGKQYHGAGLAADIVEASVRAMVRVYNLIYRAQQVSDIKQQRKAG

SEQ ID NO: 8335 - protein, 331 aa, Porphyra yezoensis
MSKIFMFDALRAATDEEMAKDPTVCVIGEDVGHYGGSYKVTKDLHSKYGDLRVLDTPIAENSFTGMAIGAAITGLRPIVEGMNMSFLLLAFNQISNNAGMLRYTSGGNFTLPLVIRGPGGVGRQLGAEHSQRLEAYFQAIPGLKIVACSTPYNAKGLLKSAIRDNNPVVFFEHVLLYNLQEEIPQEEYFLPLNKVEFVRKGKDITILTYSRMRHHVIQALPALLKEGYDPEVIDLISLKPLDIDSISISVKKTHKVLIVEECMKTAGIGAELIAQINEYLFDELDAPVVRLSSQDIPTPYNGSLEQATVIQPSQIVDSVKSIITSVKAIIT

SEQ ID NO: 8336 - protein, 249 aa, Nitrosomonas europaea ATCC 19718
MKKLVLLRHGESIWNQENRFTGWTDVDLTPKGLKEAEEAGRLLRENGFSFDIAYTSLLKRAIRTLWIALDEMDQMWTPIELNWRLNERHYGALQGLNKAETAKQYGDEQVLVWRRSYDIRPPSITINDERYPGFDLRYRNMSSGDIPLAESLKDTVARFLPYWNQSIAPQIKAEKKVIIAAHGNSLRALIKHLDNISDQDILNCNIPTGIPLVYELDDDLKPLNSYYLGDAGQIGEAISAVANQGKSGA

SEQ ID NO: 8337 - protein, 203 aa, Ananas comosus
ACENWGFFEILNHGITREMMDEVERLTKDHYRRSREQRFEEFANKALEDGTNGVDVSSNLDWESTFFVRHLPVSNISELSDLNDHYRNVMKEFAVELEKLAERLLDLLCENLGLEKGYLKKAFCGSNGPTFGTKVSSYPPCPRPDLIKGLRAHTDAGGIILLFQDDRVSGLQLLKDGEWVDVPPTPYSIVVNLGDQLEVITNG

SEQ ID NO: 8338 - protein, 264 aa, Zea mays
MAMEPNMARRLWRVVRAVLFMLRKGMPKRKLAMDLHLLIHRGKIAGKALGNLMTAHGHNSDKAAAAEAAPPPQHFSCGRRGHDPSLAVYDPRGTREVEFSCSNTPSYPSLHLVPTGKRRRRNNNNNNSSRRRGTHRGANGAEPGWYNYDASDIARAFEVLNNNEQLLSGGDGNSSDQPSPLALVATPSPALWASFGRTPAHARQLRITDSPFPLGDDDGDCGQVDLDAEDFIKKFYDQLRTQQALATATPDYCGGYARPVSGIA

SEQ ID NO: 8339 - protein, 396 aa, Bradyrhizobium sp. BTAi1
MAKAKFERNKPHCNIGTIGHVDHGKTSLTAAITKILAETGGATFTAYDQIDKAPEEKARGITISTAHVEYETQNRHYAHVDCPGHADYVKNMITGAAQMDGAILVVSAADGPMPQTREHILLARQVGVPALVVFLNKCDMVDDPELLELVELEVRELLSKYEFPGDKIPIIKGSALAALEDSDKKLGHDAILELMRNVDEYIPQPERPIDQPFLMPVEDVFSISGRGTVVTGRVERGVIKVGEEIEIVGIRPTQKTTVTGVEMFRKLLDQGQAGDNIGALLRGTKREDVERGQVLCKPGSVKPHTKFKAEAYILTKEEGGRHTPFFTNYRPQFYFRTTDVTGVVHLPEGTEMVMPGDNIAMEVHLIVPIAMEEKLRFAIREGGRTVGAGVVASIIE

SEQ ID NO: 8340 - protein, 423 aa, Wolbachia endosymbiont of Drosophila melanogaster
MNIPRVTKLDNGLRIITEQVRDIDSVALSIRVGVGSRAESAKQNGISHFLEHMAFKGTKTRTAFEIAKAFDDIGGVFNASTGRESTTYYAKVLKKDIKTGIDILIDILMNSTFPEDELEREKGVVIQEIFQTNDSPSDIIFDKYFEAAYKDQPFGRSILGTQNTVKSFTRGDLDNYINEHYFGENMLFAVAGNVEHEEVVALTKDFLSKIHSKKLKKSQNASCTGGEYLEHRKLDQVHLLIGLPSVSRHDDKYHTFQVLDSILGSGMSSRLFQEVREKQGLAYSVYSFNSSYTNTGMFSIFAGTDSSNLDKLLKSITTELKKLSTDDLKEEEVNRVKERVKSQILMSRESVSSRAETLGHYYGNYNRYISKNELIEKISAVTTANVKKAAEELLSQHEKTTLAAIGEIESLPSYDKVVSMLKA

SEQ ID NO: 8341 - protein, 479 aa, Coccidioides immitis RS
MASRRLASSLNGALRSRAALQAVRPAKRGFATPVSTAATTQSTTLSNGLTIATEYSPWAQTSTVGVWIDAGSRAETDKTNGTAHFLEHLAFKGTNRRTQHQLELEIENMGGHLNAYTSRENTVYYAKSFNADVPKAVDILSDILQNSKLEPAAIERERDVILREQEEVDKQLEEVVFDHLHATAFQNQPLGRTILGPKENIQSIQRQDLVDYIKTNYTADRMVLVGAGGIPHEQLVKLAEQHFGSIPSQPPTSAASAIAAEQKRLPDFIGSDVRIRDDTVPTAHIALAVEGVSWKDDDYFPALVTQAIVGNWDRAMGNSPYLGSKLSTFISHNNLANSFMSFSTSYSDTGLWGIYLVSENKTALDDLVHFTLREWSRLSFSVTPAEVERAKAQLKASILLSLDGTTAIAEDIGRQIVTTGRRMSPQDIERAIDKVTEKDVMDFAQRKLWDQDVAVSAYGSVEGMLDYQRIRNDMSRNAA

SEQ ID NO: 8342 - protein, 152 aa, Wolbachia endosymbiont of Drosophila ananassae
TAVEEAIFLTRFAKEVILIHRRDKLRAEKVMQDRLFKNDKIKVMWNHTVEQILGEENPKRVAGIAIKSAETQELKVDGVFIAIGHAPNTGIFKGFVEMDEQGYIITKPGTTLTSRAGVFAAGDVQDKVYRQAVVAAGTGCMAALDAEKFLES

SEQ ID NO: 8343 - protein, 119 aa, Triticum aestivum
MMFPSKITTCILVLAVYTAAPSESTITCGTVTSTLARCIGYLTNSGSLPSDCCVGVKSLNQMAQTTPDRRQVCECLKSAAKDITGLNTDLVATLPTTCGVSVPYPIRFSTNCDTISTAV

SEQ ID NO: 8344 - protein, 402 aa, Trifolium pratense
QPGHGIAPPNIGQQPPQQYHQAPPQQPYVMMPPQAPQALWAQSAQPPQQPASADEVRTLWIGDLQYWMDENYLYTCFGNTGEVTSVKVIRNKQTSQSEGYGFIEFNTRASAERVLQTYQGAIMPNGGQSYRLNWATFSAGERSSRQDDGPDHTIFVGDLAADVTDYLLQETFRARYNSVKGAKVVIDRLTGRSKGYGFVRFADEGEQMRAMTEMQGVLCSTRPMRIGPATNKNPAATTQAKASYSNTPGGQSENDPNNTTIFVGNLDPNVTDDHLRQVFSQYGELVHVKIPSGKRCGFVQFSDRSSAEEAIRVLNGTLLGGQNVRLSWGRTPSNKQTQQDPNQWNAAAAGGGGGYYGYPQGGYENYGYAAAPAGQDPNVYGSYPGYAGYQHPQQQQQQMGYS

SEQ ID NO: 8345 - protein, 358 aa, Solanum pinnatisectum
MASTLTALANEKTLQTSFIRDEEERPKVAYDKFSDEIPVISLQGIDDINGSRRSEICEEIVNACEDWGVFQVVDHGVDAELLSQMTKLAKEFFELPPDEKLRFDMSGGKKGGFIVSSHLQGEVVQDWREIVTYFSYPIRARDYSRWPDKPQGWIAVTEKYSEKLMDLACKLLEVLSEAMGLEKEALTKACVDMDQKVVVNFYPKCPEPDLTLGLKRHTDPGTITLLLQDQVGGLQATKDNGKTWITVQPVEGAFVVNLGDHGHYLSNGRFKNADHQAVVNSNSSRLSIATFQNPAPDAKVYPLKIREGEKAIMDEPITFAEMYRRKMSKDLELARLKKQKKQTEEAQLESKPIEEILA

SEQ ID NO: 8346 - protein, 908 aa, Serratia plymuthica
MTKYSLRARMMILILAPTLLIGLLLSTFFVVHRYNELQEQLVDAGASIIEPLAVASEYGMTFRSRESVRQLVSLLHRRHSDIVRSITVFDAQNNLFVTSNYHHNFAQLQLPKGVPMPTDLMLTRRGNSLILRTPILSESQYPDQNATDPVPQDNNLGYVAIELDLQSVRLRQYKEVFISTLLLLLCMCIAILFAYRLMRDVTGPIRNMVNTVDRIRRGQLDSRVEGFMLGELHMLKNGINSMAMSLTAYLEEMQQNIDQATSDLRETLEQMEIQNVELDLAKKRAQEAARIKSEFLASMSHELRTPLNGVIGFTRQMLKTEMSVTQTDYLQTIERSANNLLTIINDVLDFSKLEAGKLVLEHIPFSLRETLDEVIVLLAPSAHEKGLELTLDVHNDVPEQVIGDSLRLQQIITNLLGNAIKFTETGNIDIRVELRGQQDHQVELEVQIHDTGIGISERQQSQLFQAFRQADASISRRHGGTGLGLVITQKLVKEMGGDICFHSQLNRGSTFWFHITLELHEGMLSLPSSLPDLRGKTLGYIEANPMAAEATLNMLSVTSLVITHSPTLAQLPKKNYDFLLVGVPIPFRDNLAQHESKLKAALNIAGRVILALPCQSQINAEQLKQQGAIGCLIKPITSNRLFPLLRMEPPQRLLAAPERKRLPLTVMAVDDNPANLKLIGTLLAEQVEKTLLCESGEEALALARDNVLDLILMDIQMPNIDGIRTGELIRQLPHHNSTPIVAVTAHAVSGEREHLLQAGMDDYLAKPIDEAMLTRVLARYYSGEPAAEPLLSLDWPLALRQAANKEDLARDLLQMLLDFLPQVSERVQAVLDGTPDDSILDLIHKLHGSCSYSGVPRLKQLCFYLEQQLRKGVGNEELEPEWLELLDEIELVSQAARSHLESDRPTTS

SEQ ID NO: 8347 - protein, 171 aa, Oryza sativa
MGKYSTEPSNPTKSAKAMGRDLRVHFKNTRETAFALRKLPLVKAKRYLEDVIAHKQAIPFRRYCGGVGRTAQVKSRQSNGQGRWPAKSARFILDLLKNAESNADVKGLDVDNLFVSHIQVNQAQKQRRRTYRAHGRINPYMSSPCHVELILSEKEEAVKKEPETTIAPRRQ

SEQ ID NO: 8348 - protein, 404 aa, Lactobacillus plantarum WCFS1
MDTMKKVAAALAALKRGELIIVADDETREAEGDMVGLAAKATTATVNRMITSARGLLCVPMAPSIATRLHLTPMTSEHDAFGTAFTVSTDHHTTSTGISAADRATTIQALANPNSQAADFYHPGHVFPLIARTGGLLARRGHTEAAVTLAQLAGVTPAAYICEVIKKNGLMARRRDLKALAEGLQLPLITIEDITTYVIQTGAAQLTTTPSVNLPTKDGQFTMTGFEVPGHTALPVALQAGDISGDEPVLVRLHSECFTGDVLGSRRCDCGDQLHAALQKISQAQRGVFVYLRQEGRGIGLANKLAAYALQEHGVDTYDANVQLGFQPDERRYDIAALVLRQMGITRVRLLTNNPDKVEQLRAAGIDVVERVPLEIPANQYDQAYLKTKRDRFHHQLTLTEGHE

SEQ ID NO: 8349 - protein, 158 aa, Clostridium perfringens str. 13
MEIYDISVKDINGENVSLERYRGKVLLIVNTASKCGFTKQFDGLEELYEKYKDEGFEVLGFPCNQFKEQDPGSNSEIMNFCKLNFGVTFPMFEKIDVNGENESLLYSYLKEQKSGMFGSKIKWNFTKFLVDREGNVIKRFSPQTTPKSIEKDIEELLA

SEQ ID NO: 8350 - protein, 582 aa, Carica papaya
MSTASKFYSVLTSTLFCYLAVITFIGTAINGVEASHRIYPQFQSLSVDIVDQIHRTAYHFQPPKHWINDPNAPMYYNGVYHLFYQYNPKGAVWGNIVWAHSVSTDLINWIPLKPAIVPSEPFDIKGCWSGSATVLPNNIPIILYTGLDSNETQLQNYAVPANISDPHLENWIKPANNPLVAPDHTVNRTAFRDPTTAWLGSDGWWRMLVGSKNKRRGIAHLYKSKDFMNWVKAKHPIHSRPDTGMWECPDFFPVPKSGENGLDVGITGRDVRHVLKVSLDLTRYEYYTIGRYYPEIDRYIPYDTLVDGWAGLRPDYGNFYASKSFFDPKTNRRILWGWANESDSRQDDVDKGWAGIQTIPRKVWLDPSGKQLRLWPVEEVEKLRKDPVLMENTAVELGQHVEVTGVTAAQCDVEVSFTIPSLEKAEPFDPEWVNAQDLCAPMGAKKQGGVGPFGLLTLASEDLEEATPVFFRVFKADTKYVVLMCSDASSSSLKEGLYKPSFAGFVNVDIEAEKRISLRSLIDHSVVESFGAGGKTCITSRVYPTKAVDGEAHLFVFNNGTEAVHVEKLSAWSMNRPLRMNN

SEQ ID NO: 8351 - protein, 228 aa, Glycine max
MGMTPKIAPSMLSSDFANLASEAQRMLHFGADWLHMDIMDGHFVPNLTIGAPVIESLRKHTKAYLDCHLMVTNPLDYVEPLAKAGASGFTFHVETSKDNWKELIQRIKSHGMIPGVALKPGTPVGEVYPLVEAGNPVEMVLVMTVEPGFGGQKFMPEMMDKVRILRKKYPSLDIEVDGGLGPSTIDVAASAGANCIVAGSSVFGAPEPVQVISLLRNSVEKAQQTSIQ

SEQ ID NO: 8352 - protein, 513 aa, Actinobacillus pleuropneumoniae serovar 1 str. 4074
MSNIIIFDTTLRDGEQSLKASLTVKEKLQIALALERLGVDVMEVGFPVSSAGDFESVKTIAQHIKNSRVCALSRAVDKDIDVAAEALKVAEAFRIHTFIASSAIHVESKLKRSFDDVVEMAVHAVKRARNYTDDVEFSCEDAGRTGIDNICRIVEAAINAGATTVNIPDTVGYCLPYQYGEIIANVMNRVPNIDKAVVSVHCHNDLGMATANSLTAVLNGARQIECTINGIGERAGNTALEEVVMAIKTRQDMFNGRDTRINTQEIHRVSQMVSQLCNMPIQPNKAIVGSNAFAHSSGIHQDGMVKNKNTYEIMSPETIGLKKEKLNLTARSGRAAVKNHMSEMGYQENDYDLDKLYDAFLKLADKKGQVFDYDLEALAFIDMQAGDEGRLHLDVITSQMISHLPASAFVQVELDGEKLSQVSSGGNGPVDAVFNAILAITGMDIKMLHYNLTAKGEGAEALGQVDIVVEHEGRRFHGVGLATDIVESSARALIHVINAIYRAHKVADLKAKK

SEQ ID NO: 8353 - protein, 139 aa, Triticum aestivum
  misc_feature (90)..(90): Xaa can be any naturally occurring amino acid
MATSIMASMALKSSPSPFSGQSQLQRIQPSARSSSFRVMSKKAKKVQTSQPFGPGGGLELKDGVDASGRLAKGKGVYQFASKYGANVDGXSPIYNPEEWSPSGDYYAGGKTWLLLWVATLAGILLGGALLVYNTSALAS

SEQ ID NO: 8354 - protein, 409 aa, Odontella sinensis
MAREKFERTKPHVNIGTIGHVDHGKTTLTAAITATLALDGNAKVKDYPDIDGAPEERARGITINTAHVEYETENGHYAHVDCPGHADYVKNMITGAAQMDGAILVVSAADGPMPQTREHILLSKQVGVPDIVVFLNKEDQVDDAELLELVELEVRELLSAYDFQVMTFRFAPGSALQAIEAISSNPAIKRGDNPWVDKIFALMDAVDEYIPTPERDIEKTFLMAIEDVFSITGRGTVATGRIERGVVKVGDTVEIVGVGDTQTTTITGIEMFQKTLDEGFAGDNVGILLRGVTREDIEAGMVLSEPGTITPHTNFESEVYVLTKDEGGRHTPFFTGYRPQFYVRTTDVTGAITQFTADDGSIVEMVMPGDRIKMTAELIYPVAIEEGMRFAIREGGRTIGAGVVSKIIQ

SEQ ID NO: 8355 - protein, 548 aa, Pseudoalteromonas tunicata D2
MSNRTALPSWQSLQLLAKNIQGVHLKQLFSDDAERFERYSIAIDGLLFDYSKNLITPEIHEQLLALAKDVNLIEWREKMFRGERINFTENRSVLHTALRQRADNPFMLDGENINQAVHTELKKMSVFVEQVRSGAWLGYDNQAITDVVSIGVGGSNLGPQMATEALKPYADDRLNVHYVSNADGVQIHQVLARLNPATTLFVVSSKTFTTSETMTNARTALAWLNAATDVEGAVAKHFVAVSSNLTKTAEFGIDSANVFAMWDWVGGRFSLWSAIGLPIALYLGFDTFTELLAGAADADEHFFNTELSQNIPVIMALLSVWNTSFLGAKAQAILPYDQTMHMLPAYLQQAEMESNGKSVTFAGDSVDYTTVPLIWGMTGINGQHAFYQYLHQGTTIVPADFIGSIEPSVAVGHHHQVLMSNFFAQTQALMNGVDANEVRAALGKKGLSDTEIEQLVAHKVHQGNRPTTSIILDKIDARGLGRLIAFYEHKIFCQGILLEICSFDQWGVELGKGLASNIEAELATNNIVLGHDSSTNGLVNYFKQKRTI

SEQ ID NO: 8356 - protein, 133 aa, Mercurialis annua
MAVPLLTKKIVKKRVKKFKRPQWDRKISVKENWRRPKGIDSRVRRKFKGVTLMPNIGYGSDKKTRHYLPNGFKKFVVHNVQELELLMMHNRTYCAEIAHDVSTRKRKDIVERAAQLDVVVTNKLARLRSQEDE

SEQ ID NO: 8357 - protein, 402 aa, Bacillus cereus ATCC 14579
MLSAKTIEIVKSTVPLLQEKGVEITTRFYQILFSEHPELLNIFNHTNQKKGRQQQALANAVYAAATYIDNLEAIIPVVKQIGHKHRSLGIKAEHYPIVGTCLLRAIKEVAGAPDEVLNAWGEAYGVIADAFISIEAEMYEEAAHKEGGWKDFRNFVIVKKVKESDVITSFYLKPEDGGKVSSFIPGQYVTIQINIEGETYTHNRQYSLSDAPGKEYYRISVKKEKGVDTPDGKVSNYLHGHVKEGDVLPVSAPAGDFVLNMDSTLPVVLISGGVGITPMMSMLNTLIEQDSKRNVYFVHAAINSNTHAMKEHVKAVENEYEQVKAYTCYSAPTEKDLEMKNFDKEGFIESEWLKTIIPTTEAEFYFCGPVAFMKHINAALTDLSVKQEHIHYEFFGPATSLQ

SEQ ID NO: 8358 - protein, 165 aa, Oryza sativa
MAAEKRTIGLGMDYSPSSKAAAKWAVDNLVKAGDRIILVHVLPKGADASHKELWKSTGSPLIPLLEFMEMNVQARYGINPDKEVLEILQAESKSKQVEVLAKVYWGDAREKLCEAVDDLKVNTFVLGCRGLGPLKRALLGSVSNYVVNNATCPVTVVRAPTVSNA

SEQ ID NO: 8359 - protein, 335 aa, Anabaena variabilis ATCC 29413
MVAATDFKDYYEILGVSKNATPEDIKKAYRKLARKYHPDLNPKDKQAEARFKEINEANEVLSDPEKRQKYDQYGQYWQQAAAGTPPPRGAGTQGYDFSQYGNFNDFIDELLGGLGRSGGRTRQRTANYRTTTRPEGFREYADFGYGEDPFGRFTEVPAQDTEAAIALTFSEAFHGTQKQLQIDGETITVRIPPGVKSGSRIRVKGKGQMSPFIQQRGDLYLTIELLPHPFFKFEGDNLACEVPVSPEEAVLGAQIDVPTPDGKVTMTIPAGVDSGQALRLRGKGWRDPKGNRTALIVRLKIVTPKDLSPQERECYEKLRQVSSFNSRQGLTEVRL

SEQ ID NO: 8360 - protein, 392 aa, Methanosarcina barkeri str. fusaro
MQSIVQEAMKFSEKEKEFRKNSSSDDDFEDFGQPRIMIVGCGGAGNNTVNRLYNMGIEGAETVCINTDKQHLDNVRADKKILVGKTLTRGLGAGGYPETGKKAAELARGTLEEVLKDVDLVFITAGLGGGTGTGVAPVVAEVAKEQGAIVVGMVSSPFRVERARIYKAEEGLEDLRRAADTVIVLDNNRLLNYVPNLPIDQAFSVMDQLIAETVKGITETITVPSLINLDYADIRTIMSCGGVAVMLVGESKSQDKSTEVVRTALNHPLLDVDYKGATGSLVHVTGGPDLSLKEAEEIASMLTYELSPSANVIWGARIREDYEGKVRVMAIMTGVQSAQILGPQAAGGILESRSEADPMKERRFGKMTAERLRNSTGSFRKNHDESIIDFIN

SEQ ID NO: 8361 - protein, 456 aa, Arabidopsis thaliana
MEIDSEKIHERKQSDYNSLVRTLLLYRLVQDERFEIQKEMYRGQQYSQIYFARLHLMRTLLYSLAPTWKSHLPVCKVLGLEKGKECIIVGTLFKHMKLKPCVLDEYSKERSVTPLVKPHNFMHPDDNLILEDESGRVKLAGSALSPAIYVTGVVVALHGKETNAGEFFVEDVLEAGLPPQIERPIDLQEDKYVVLLSGLCIGSKSANPLQFQLLVDHITGHLGDEEEQGLAAQIVHVVIAGNSFEFPRKLINGQVLITFNLASKDQSTLYEPIKELDIMLSQIAAGVSVDIMPGTNDPANFALPQQPLNRCLFPGSSPYNTFRSCTNPHSFDVDNIRFLGTSGQNIDDLGKYSEAKSKLDFVERTLRWRHLAPTAPNTLGCYPFTDRDPFLIETCPHVYFVGNQDKYDNRLIKGSEGQLVRLICIPKFCETGIAVAVNLRNLECHTLSFSTQINQS

SEQ ID NO: 8362 - protein, 109 aa, Brassica napus
MASSMLSSAAVVTSPAQATMVAPFTGLKSSSAFPVTRKANNDITSIVSNGGRVSCMKVWPPVGKKKFERRLISVLKEMVRLQSEFLKPMRPRPKLLKKRLQYQQQEEEE

SEQ ID NO: 8363 - protein, 959 aa, Yersinia pestis biovar Medievalis str. 91001
MTQNLSQLEHNDAFIQRHIGSSVEQQQQMLAAVGASSLSTLIQQIVPADIQLPGPPPVGEAATEHQALAELKGIASQNQCYKSYIGMGYSPVLTPPVILRNMLENPGWYTAYTPYQPEVSQGRLEALLNFQQLTQDLTGLDLASASLLDEATAAAESMALAKRASKLKDANRFFVADDVHPQTLDVVLTRAETFGFDVIVDRAEKVLELDGIFGVLLQQVGTTGELHDYSALLAELKKRKIITSVAADIMALVLLTAPGAQGADVVFGSAQRFGVPMGYGGPHAAFFACRDEFKRSMPGRIIGVSRDAAGNTALRMAMQTREQHIRREKANSNICTSQVLLANIASLYAVYHGPQGLQRIAGRIHRMTDILAAGLQHAGLTLRFKHWFDTLTVEVKDKAAVLARALSFGINLRTDIHGAVGITLNETTSREDIQTLFALFVGDNHGLDIDQLDAAVSQHSQSIQDSMLRRDPILTHPVFNRYHSETEMMRYMHRLERKDLALNQAMIPLGSCTMKLNAAAEMIPITWPEFAELHPFCPPEQAAGYQQMIGQLSQWLVQLTGYDAVCMQPNSGAQGEYAGLLAIRRYHESRNQANRHICLIPSSAHGTNPASAQMAGMSVVVVACDKQGNIDLHDLRQKAEHAGDELSCIMVTYPSTHGVYEETIREVCQIVHQFGGQVYLDGANMNAQVGITTPGYIGADVSHLNLHKTFCIPHGGGGPGMGPIGVKAHLAPFVPGHSVVQIDGMTTQQGAVSAAPFGSASILPISWMYIRMMGADGLKQASQVAILNANYIATRLKNAYPVLYTGHDGRVAHECILDIRPLKEATGISEMDIAKRLIDFGFHAPTMSFPVAGTLMVEPTESESKVELDRFIDAMLAIRAEIEKVAQGEWPLEDNPLVNAPHTQAELVGEWTHPYSRELAVFPVAGVLENKYWPTVKRLDDVYGDRNLFCSCVPISDYE

SEQ ID NO: 8364 - protein, 508 aa, Schizosaccharomyces pombe 972h-
MPVRPCIHFTPPEGFMNDPNGLVYSNGKWHLFFQWNPTGNQAGNQHWGHAVSKNLYKWKLLPTALAPGDDHGLMFSGSAVIDKTNSSGFFESGFFSRKSVDPEERIVLIYTTHYDNRETQNIAYSLDGGITFIKYKKNPILDIKESQFRDPKVFWHEESRAWIMVVVLAQKYKVLFYHSLNLRDWVKLSEFGSAGVLGYQYECPDFVRLPIEGTDEFRWVLIVSINPGSSINGGSMVQYFIGDFDGQTFTPIDSASRILDCGHDCYATQTFGNAPDGRVISISWASNWNYTNDVPMRMKHRGMFTIPRELTLCYTHLNQETRGLVLRQRPVNLHHLYYPDSLPAPLLLNRVCEFPTVWTSATVFYLAVSIPKSIVLESPMEFLCLTWSTTPDVETSKEYFELGYRFHDGAVYVERGVCSSSWKYPLYPERCTSSVPPSSYEDNYILEIEAVVDHSIIEVYLQGGIMCLTNAYYFKGDEPLQYYYLRVPTGASLAKSGMQPLLNNRPHS

SEQ ID NO: 8365 - protein, 145 aa, Brassica napus
  misc_feature (134)..(134): Xaa can be any naturally occurring amino acid
AKGRQLRFLANIDPVDVARNISGLNPETTLVVVVSKTFTTAETMLNARTLRNWITTALGAPAVAKHMVAVSTNLALVEKFGIDPNNAFAFWDWVGGRYSVCSAVGVLPLSLQYGFSVVEKFLKGASSIDKHFQXTPFEKNIPVLL

SEQ ID NO: 8366 - protein, 472 aa, Methanosarcina barkeri str. fusaro
MKIVMKFGGTSVGDGKKIRHVAQLLKRYREEGNQIVVVTSALGGVTDELLENALFASTKGKVSLVKEFKTEITNKHHKAVKDAIDDPTVAKEVIQTLDLRIDELEKALVGICYLGELTSRSIDYICSYGERLAAPIVSGAIRSLGIESTEFTGGEAGIITSSDYGNARPLEKTYELVNKRLGCRLETQILVVTGFIGENEEGIITTLGRSGSDFTASILGAALKADEIWLWKEVNGIMTTDPRIVPEAKTIPQISYAEAMELSYFGANILHPRTIEPAMREHIPVRVKNTFEPKLPGTLVVAEKFQCKNVVKAVSLIKNVALINISGAEMVGAIGTVARLFAVLAKSGVNVIMISQGSSESNISFVISEAHVKTALKALHEEFNRGIVKEITSDKNVCVVAVVGAGMAGTPGVAKRVFGALGNSLINIIMISQGSSQYNISFVVRENDAFAAVKTLHDEFELYNGNGIEKQL

SEQ ID NO: 8367 - protein, 637 aa, Thermococcus litoralis
MQIITCPYCGAGCRAYVKKELSHPFIIEYVTDINVPNDRGKLCPKGNAMFEYLLSKERLKTPLKAIERGKFVKISWKEAINEIASFIRGYMKDDPNRLMFIAGGKVSNESAYLFQKLARNIGTNNVDNTSHLCHGVSVRAILDANFERNWATYDDIEESNVIILWGANLAETAPLIFRRVLKAKNRSAKIIVIDPRKTKTTKFASIHVRPFPGTDIVLINALINLLLKRRNIKSAHFKASDLEIISKNTPEYAERITGVPVRDIEEIAREIGLARRGIILWGSGIAMHSNGYDVIRSIITLASIVDFKVLPLAGQNNSQGVMDMGVVPNFLPGYRTYDNVYIFREAWKNEELPTEVGLDIPKSIKEAQKRNVSAFYVMGANIALSFPEAEKALRRAEFVIVQDIFPTQTTELADIVLPAAAFLESNGSTTNAERRIQWSSRVKWPPGDAKPDWAILCELGNALGLRGFDFYFPEEILREISTLVPQYANANPRTLMRTPEGVMWNIVPDSQPTKVYVSNKMPLLEPPVMITVRYVGQFQTGTMTKRSPPLNIRWQDLLILVSEEDAQKWGIKDGDRVKLVSENGKYIGTVKVSKTVIPGTIKAPWHEGVNRIMGLKIDEKTGLPQLKACSCKLERVE

SEQ ID NO: 8368 - protein, 604 aa, Oryza sativa (japonica cultivar-group)
MAERLTRIAIVSEDKCKPKKCRQECKKSCPVVKTGKLCIEVTPASKLAFISEELCIGCGICVKKCPFDAIEIINLPKDLEKDTTHRYGPNTFKLHRLPVPRPGQVLGLVGTNGIGKSTALKVLAGKLKPNLGRFKNPPDWQEILTYFRGCELQNYFTRILEDNLKAIIKPQYVDHIPKAVQGNVGQVLDQKDERGVKAELCVDLELNQVIDRNVGDLSGGELQRFAIAVVAVQNAEIFMFDEPSSYLDVKQRLKAAQVVRSLLRPNSYVIVVEHDLSVLDYLSDFICCLYGKPGAYGVVTLPFSVREGINIFLAGFVPTENLRFRDESLTFKIAETQESAEEIETYQRYKYPTMSKTQGNFKLTVVEGEFTDSQIVVMLGENGTGKTTFIRMLAGLLKPDTVEGTEIEIPEFNVSYKPQKISPKFQHSVRHLLHQKIRDSYTHPQFVSDVMKPLQIEQLMDQEVINLSGGELQRVAICLCLGKPADIYLIDEPSAYLDSEQRIVASKVIKRFILHAKKTAFIVEHDFIMATYLADKVIVYEGRPSIDCTANAPQSLVSGMNKFLSHLDITFRRDPTNYRPRINKLDSTKDREQKSAGSYYYLDD

SEQ ID NO: 8369 - protein, 906 aa, Enterococcus faecalis V583
MKTKLHTQTVTLSIDNQEVTVPKGTTILEAAKGLGVEIPTLCHLKELAPDGSCRMCVVEVEGGRRGGLTTACTAHCQEDMVVATHSEKVADSRRFILDLLLSNHKLECFSCGKNGDCQLQQYALDYGIDVTSFTEGKRMPCHQEDTSNPFFSYDPEKCIMCRRCARVCQLRQGRDVLSIANRGFETKMMPSYGQAFDQSICESCGNCVSSCPTGALTAKDTKEYRKWETQKIPTTCPHCGTGCQMNLLVKNNRLVGVEPLDGPANKNLLCVKGKFASYKFVGSGDRLTEPLIKRNGIFEPASWEEALTLVSSKFNEIKAENGPDALAGFSCSRATNEDNYVFQKMVRAAFGTNNVDNCARVCHSASVHGLAQTLGSGAMTNPIADITEDVDMILLVGSNPEEAHPVIGAQIRQAIQRGTQVVVVDPRKINLVKDSALHLQVQAGTNVAFANGMMHVILKEGLADRHFIEERTEGFLDLEKMVADYTPEKVAEICHIHPEDLIQAARMYAKAEKAPIIYCLGVTEHSTGTEGVMSMSNLAMLVGKVGKPGCGVNPLRGQNNVQGACDMGCMPYDFPGYQKVNNPEVIDKFEKAWHVPLNRNTGLTSTKVLPAATAGSVKGLYIFGEDPIVTDPDTGHVRQALESLDFLVVQELFMTETAAYADVVLPGISYAEKDGTFTNTERRVQRVRKAVEPRGQAREDYEIFCEVMTRMGYPCAYESAKEIMEEISAVTPSFGGINYERLEKESLQWPCRSLTDPGTPIMHVGSFARGKGLFKAIPYKQAQELPDEEYPYLMSTGRMLYHYNTRAMTGRTEGINQIANHSYIEINAVDAQALGIQEGDKVEVHSRRGKIETYAAVGNRVFPQEVFMTFHFPDGNVNEITNAVFDDIATIPEYKVCAVAIKPVNK

SEQ ID NO: 8370 - protein, 514 aa, Oryza sativa (japonica cultivar-group)
MDLLRDRRLGALLVVVLVLVSGAAVEASIHTYDREPFREVGNAFLLSGGSEGVVADGADLAAPASSFIKFTNVTFWRTPESAESHAKMAHSTGLVQAILFEAADRDNIGGSAYGGQRSICCTPDLAKLEGCKQGEVIRRPSSDDPDWPYVLDTHFSGSHLSVKLEDEVVRITKTGMYNLFFISCDPKLRGLSMSGKTVWRNPGGYLPGRMAPLMKFYVFMSLAYLLVMVVWSSQYIRFWRDIMPIQNWITLIIALGLFEMTLWYFEYLNFNSSGVRPIGITTWVVTVGAIRKTISRLLILSISMGYGVVRPTLGGLTSKVLLLGLTYFLASELLDIAENVGTINDISGKARLFLVLPDAFLDAFLILWIFTSLSRTLEKLQARRSSVKLDIYRKFTNALAVSVIASVAWIGYEVYFKATDPFSERWQSAWIITAFWDVLAFVLLLVICYLWAPSQSSQRYAYSGEAADDDDEESQSLTKGTDGDVGMVKVDKDRSGGVSSAFSLEDEAEEDKRE

SEQ ID NO: 8371 - protein, 57 aa, Arabidopsis thaliana
  misc_feature (46)..(46): Xaa can be any naturally occurring amino acid
MAVPLLTKKVVKKRSAKFIRPQSDRIITVKESWWRPKGIDSRVRFXFKCVTLFPNVV

SEQ ID NO: 8372 - protein, 318 aa, Hevea brasiliensis
MEFPVINLGKLNGEERAATMAKIKDACENWGFFELLNHGIEPEFMDTVERMTKGHYRKCMEQRFKEMVASKGLEGVQTEIKDMDWESTFFLRHLPESNIAQVPDLDDEYRKVMKDFAAKLEKLAEELLDLLCENLGLEKGYLKKAFYGSRGPNFGTKVSNYPPCPKPDLIKGLRAHTDAGGIILLFQDDKVSGLQLLKDGQWIDVPPMRHSIVINLGDQLEVITNGKYKSVEHRVVAQTDGTRMSIASFYNPGNDAVIYPAPALVEKEAEEKKQVYPKFVFEDYMKLYAGLKFQPKEPRFEAMKAVESNVNLGPIATA

SEQ ID NO: 8373 - protein, 1055 aa, Coccidioides immitis RS
MSTAASQASPVVVRNPATQHPHPSYRPPAADTPQRTRTSGGGAAQYSHSQSRSGSRSYGHDRSASNKGPPSGHPRRDYESLKAATAPRSASRDRTQEPNLPYRTDSRAHRRQSSKPTYSRNSTDMTGPSSGVADGYGSVHASHHPPNGSGITNQTRRRTTITASSGQWALGKTIGAGSMGKVKLAKNVETGEQVAVKIIPRHSTEEHRSTRESERADRSKEIRTAREAAIVTLLNHPYVCGMRDVVRTNHHWYMFFEYVNGGQMLDYIISHGKLKEKQARKFARQIASALDYCHKNNIVHRDLKIENILISKTGDIKIIDFGLSNLFSPKGQLKTFCGSLYFAAPELLQARQYTGPEVDVWSFGIVLYVLVCGKVPFDDQSMPQLHAKIKRGVVEYPQGLSSEDDCRNIISRMLVTDPKQRASLTEIMNHPWMTKGFSGPPENYLPHRDPLQLPLDSEVIRRMTGFDFGPPEFISAQLTKVIESEDYQSAVRAFVKEHHTPNPVNDKKRGVFDFYKRRNSTSKDTLSNTSLEAMPHGLDPANGYHPLIAVYNLVKEKLNREKQEVHPGGLAIPHSPGEAPVKFPDISAPEAAHTNQRSYEIPGERDTGGRSRPRARTHGDDEISEGIKNLKLAKPSGPASPAIVTPQIEQPPRKENAAVGLLRRLSTRRTRDKGREEKTTAHHAQTLNVQSPDSLPPPRKSFSMRRTRRGEASPATIHHGGSQPQQQEVSRGELSSRAINLLGRSTSVNSADFRSRKNPSRGGTDTLSPATAHDPPLTSGSDRSSLNVQRSKASDNANSDSRSGYKPQTLRTKSLGHARRESIQARRARREEAREANVPEETDAELAQASTNIENGTTAEESLKPVYLKGLFSVSTTSNKPLPFIRSDIIRVLRQLGVEYVEIRGGFSCRHAPSIDLKRVIDARPPSPEQQGMVAGHRRKISFGGLRGHEREENKDDAKSQQRSSRRHADQSFISNSDGSEDYAANREHNAGERVLGETTTRVQSDTGENLVLRFEILIVKVPLFSLHGIQFKKVSGGMWQYREMAKKILDALRL

SEQ ID NO: 8374 - protein, 408 aa, Arabidopsis thaliana
MATANPGRGGGRRGGGAMDDDKLVFETTDGIEPITSFNDMGIKEDVLRGVYEYGFEKPSAIQQRAVMPILQGRDVIAQAQSGTGKTSMIALSVCQVVDTSSREVQALILSPTRGLATQTEKTIQAIGLHANIQAHACIGGNSVGEDIRKLEHGVHVVSGTPGRVCDMIKRRSLRTRAIKLLILDESDEMLSRGFKDQIYDVYRYLPPDLQVCLVSATLPHEILEMTSKFMTEPVKILVKRDELTLEGIKQFFVAVEKEEWKFDTLCDLYDTLTITQAVIFCNTKRKVDYLSEKMRSHNFTVSSMHGDMPQKERDAIMNEFRSGDSRVLITTDVWARGIDVQQVSLVINYDLPNNRELYIHRIGRSGRFGRKGVAINFVKSDDIKILRDIEQYYSTQIDEMPMNVADLI

SEQ ID NO: 8375 - protein, 644 aa, Nitrosomonas europaea ATCC 19718
MCGITGVFDTRSTSEIDRNLLHRMNETLTHRGPDEGEVYVESGLGLGHRRLSIMDVSSGQQPLFNEDGSVVVVFNGEIYNFQKLVGELTALGHRFRTHCDTEVIVHAWEEWGERCVERFSGMFAFGVWDRNRQTLFMARDRLGIKPFYYTLLDNGLFLFASELKALLVHPDFDKTFDHRAIEDYFAYGYIPEPKTIFKNAFKLNPGHLLSLQRGQQTVQSREYWDIPFTPHGSLSEEEAAEELILRLRNAVDSHLMSEVPLGAFLSGGVDSSAVVAMMGGLMKEPVNTCSIAFSDPAFDESDYARLVAERYQTRHFTEQVQQDDFDLIDRLAALYDEPFADSSAIPTYRVCELARKRVTVALSGDGGDENFAGYRRYRWHMIEERLRSKLPLGLRKPLFGLLGSVYPKADWAPKFLRAKTTFESLARDSVEGYFHSVSILDNKLRMQLFTRDFYRDLQGYRAVEVLRDYADKSPTKDALSLIQYLDMKTYLVGDILTKVDRASMAHSLEVRVPLLDHELVEWVSGLPASMKLRQQEGKYILKRSLEPYLPNEVLYRNKMGFSVPLASWFRGPLRERVRTALLGNTLAGTGIFDMGFIKKMLDQHQSGRRDYSAPIWTLLMFEAFLRNILSMGNMSYTGQDKKVA

SEQ ID NO: 8376 - protein, 163 aa, Oryza sativa
MEHQGQHGHVTSRVDEYGNPVGTGAGHAQMGTAGMGTHGTAGTGRQFQPMREEHKTGGVLQRSGSSSSSSSEDDGMGGRRKKGIKEKIKEKLPGGNKGEQQHAMGGTGTGTGTGTGTGGAYGQQGHGTGMTTGTTGAHGTTTTDTGEKKGIMDKIKEKLPGQH

SEQ ID NO: 8377 - protein, 117 aa, Helianthus annuus
AVVEAYGEEGKNVLGGLKVKNVVSGEVSDLKVNGLFFAIGHEPATKFLDGQLELDSDGYVVTKPGTTISSVKGVFAAGDVQDKKYRQAVTAAGSGCMAALDAEHYLQEIGSQEGKSD

SEQ ID NO: 8378 - protein, 505 aa, Zea mays
PNRHSGLEELCFGFNYFNTFYTTRNCIIPREQKVCYLNSGSYGLPLVGAVRDRLDFYYFQGQDKYFESRVERYGSTVVRMNVPPGPFMARDPRVVAVLDAKSFPVLFDMDKVEKRDLFTGTYMPSTSLTGGHRVCAYLDPSEPTHAKVKQLLFSLLLSRKDDVIPVFRSNFSSLLATVESDLAEGGKAEFNKLNDVTSFDFIGEAYFGVRPSATDLGKGGPTKAAKWLIWQLHPLLTLGLPMVLEEPLLHTFHLPPFFVKGDYGALYKYFSTVAKQALDTAEGLGLSREEACHNLLFATTFNSYGGLKVLFPGILANVASAGEKLHERLVAEIRGAVAEAGGKVTLAAVEKMELAKSVVWESLRLDPPVKFQYGHAKKDLQVQSHDAVFQVKKGEMLFGYQPCATKDPRVFGATAKEFVPGRFLGEEGSKLLQYVYWSNGRETENPTVDNKQCPGKNFVVLVGRLFLVELFLRYDTFTADIGKDLLGSSVVFTSVTKATSGPGSE

SEQ ID NO: 8379 - protein, 419 aa, Chlamydophila caviae GPIC
MMKSEGDASASCFVPIEKAIADISEGKFVIVVDEASREDEGDLIIAGEKITVEKMAFLLKYTTGIVCASLEQERIRDLEFPPMVEDNRCRYRTAFTVSVDAAKGITTGVSAADRTKVVELLSNPNSRPEDFVRPGHFFPLAGTPGGVLKRAGHTEAALDLMRLANMQPCGVLSELVNEDHTMMRLAQIIEFAKEHEISVISISDLIAYRMLSERLVIPVSSARLPTEYGDFNIHVYESLLDGIQHIALVKGDVSGKENVLVRVHSECLTGDIMGSMRCDCGHQLRSAMEYIGLEGEGVIVYLRGQEGRGIGLGHKVRAYALQDRGYDTVDANLEIGFPVDSREYGIGAQILVDLGLTKIKLITHNPHKYFGLQGFGLEIVDRIALPIHVSEENEHYLRTKKERMGHWIDLPYAEEVNIR

SEQ ID NO: 8380 - protein, 336 aa, Bacteroides fragilis NCTC 9343
MKIGILTSGGDCPGINATIRGVCKTAINHYGMEVVGIHSGFQGLLTKEVESFTEKSLSGLLNLGGTMLGTSREKPFRKQGIISDVDKPALIQRNIAELGLDCVVCIGGNGTQKTAAKFAAMGINIVSVPKTIDNDIWGTDISFGFDSAVSIATDAIDRLHSTASSHKRVMVIEVMGHKAGWIALYSGMAGGGDVILVPEIPYNIKNIGDTILNRLKKGKPYSIVVVAEGIQTDGRKRAAEYIAQEIEYETGIETRETVLGYIQRGGSPTPFDRNLSTRMGGHATELIANGQFGRMIALKGDEISSVALEEVAGKLKLVTEEHDLVVQGRRMGICFG

SEQ ID NO: 8381 - protein, 175 aa, Arabidopsis thaliana
  misc_feature (17)..(17): Xaa can be any naturally occurring amino acid
  misc_feature (101)..(101): Xaa can be any naturally occurring amino acid
  misc_feature (136)..(136): Xaa can be any naturally occurring amino acid
MASSMLSSAAVVTSPAXQATMVAPFTGLKSSAAFPVTRKTNKDITSIASNGGRVSCMKVWPPIGKKKFETLSYLPDLSDVELAKEVDYLLRNKWIPCVEFXYSTDFVYREHGNTPGYYQWTDWTRWKLPLFPCTDXSAQGVEGKLKKCRKEHPGRPSLRSWGIRQHPVQVQCRQV

SEQ ID NO: 8382 - protein, 401 aa, Actinobacillus pleuropneumoniae serovar 1 str. 4074
MTDFQFSKVEDAIEAIRQGKIILVTDDEDRENEGDFICAAEFATPENINFMATYGKGLICTPISTEIAKKLNFHPMVAVNQDNHETAFTVSVDHIDTGTGISAFERSITAMKIVDDNAKATDFRRPGHMFPLIAKEGGVLVRNGHTEATVDLARLAGLKHAGLCCEIMADDGTMMTMPDLQKFAVEHNMPFITIQQLQEYRRKHDSLVKQISVVKMPTKYGEFMAHSFVEVISGKEHVALVKGDLTDGEQVLARIHSECLTGDAFGSQRCDCGQQFAAAMTQIEQEGRGVILYLRQEGRGIGLINKLRAYELQDKGMDTVEANVALGFKEDEREYYIGAQMFQQLGVKSIRLLTNNPAKIEGLKEQGLNIVAREPIIVEPNKNDIDYLKVKQIKMGHMFNF

SEQ ID NO: 8383 - protein, 326 aa, Zea mays
MAATLLHAATASLQSSSQPARAGAATAFHPLASTPSIRLARSSFSSNRRLEVSLRAVSAGHCFAGRGAPRGRRVVAALAGEQTEGSEVGDDKDNSNEEIKPEEAQEAWKVMLEQFKAEALRMQALSMQAYDVYSKRAREVLLEASEKLKIQADKAQKDLSVIATEVSQEGQEYLVMAARNSPDSIKDITTTFRALGRLNWPSEYEDYHVGIPFGTFLTVGGFLNFMLTGSTSALRFGIVLGLALLTLGISSLRSHREGDRRPRLLVKGQAAIALVIFFREFSVLLQNGWFPKIFIVLLSGVVAAFYFYRIATGNPKDLSSKNDSAN

SEQ ID NO: 8384 - protein, 227 aa, Chlamydophila caviae GPIC
MAFLILLRHGKSVWNEKNLFTGWVDIPLSQQGIDEAIHAGQVIKDLPIDCIFTSSLVRSLMTALLAMTHHSSKKIPYIIHDDEQQKLMSRIYSDEEKSMIPLYRSSALNERMYGELQGKNKKETAEEFGEEQVKLWRRSYKISPPGGESLYDTGLRTVPYFQETIFPLLKNSKNVFISAHGNSLRSLIMDIEKLSEEEVLSLELPTGKPIVYLWTGHTFERHPEPLG

SEQ ID NO: 8385 - protein, 67 aa, Arabidopsis thaliana
FYRSNPAREAFVEMCNDDYVQKMTFDTYLYNPVAPGSPLEDIQLAVNTLGNLVRANALRREIEKLSV

SEQ ID NO: 8386 - protein, 248 aa, Clostridium perfringens str. 13
MEKKVLATVGNTEITSDYIDEIIARYPAQQQAMLASDEGKRQVLEQAIAFELMSEFAKETGLDKTEEFKDQLNKFAKELLAQMVMKKTLSSVTVTDDEAKAFYEEHKENFVELETVTAKHILVASEEEAKKVEEEIASGSITFEDAANKYSSCPSKEQGGNLGSFSKGMMVPEFEEAAFNLELGVVSAPVKTQFGYHLIKVEDKTEAKTKAFEDVKEQVVNMLIQERQQKKYLELIKELREKYGVKLA

SEQ ID NO: 8387 - protein, 108 aa, uncultured marine gamma proteobacterium EBAC31A08
MSNVIEIRDEESFNSDVLNSEKPVLVDFWAEWCGPCKQLAPTVETVAAEKSETLKVCKMDVDSNREIAAKYGIRSIPSLIIFKNGEPAGVEVGALTKQQLEDFISTVV

SEQ ID NO: 8388 - protein, 371 aa, Arabidopsis thaliana
  misc_feature (330)..(330): Xaa can be any naturally occurring amino acid
MGYEPDPDALRWGLHDLEVCTLTNAGSCSSVTRYESGGGGTQGYVREGYNQPVTGYVDNDAVIAQFYQDELSRVARAEASGINSLSPTSVVAQDWPHPHQGQENQGEAIDITQESDILHNHNGNMEDKNVARIRFEGGQSSPSRDDDSVCSVEIEEESWSEVGKRLNQMIPIAHVPKINGELPSEDEQISDHERLFQRLQLYGLVENKIEGDGNCQFRSLSDQLYRSPEHHNFVREQVVNQLAYNREIYEGYVPMAYNDYLKAMKRNGEWGDHVTLQAAADLFGVRMFVITSFKDTCYIEILPHFQKSNRLICLSFWAEVHYNSIYPEGXAADTRRQEEEEILGILSSLSADGGTKLKKSAYRYVYSFYLT

SEQ ID NO: 8389 - protein, 260 aa, Magnetospirillum magnetotacticum MS-1
MSTPYLTRRSQLETYFDRTAVEAWSRLTSDAPVSKIRATVRAGRDTMRATLLDWMPEDLTGKRLLDAGCGTGALAVEAARRGAEVVAIDVSPTLIGLARERLPAISGPGSVEFRVGDMLDPWLGRFDHIVAMDSLIHYQAPDIVRALAELSLRTDASLLFTVAPRTALLTLMHAAGKLFPKADRAPAIVPVTEGGLRRRIARESALKRFAVGRTRRVNSGFYLSNAFELSKVASSHPRPQPELRHLRMRVEDGNEGGRLP

SEQ ID NO: 8390 - protein, 223 aa, Glycine max
MCRASDFPREYDGACLQMRMSYSPAAHLFLFLVQWTDCHLAGALGLLRILIYKVYVDGTTTMSTHERKASIREFYAVIYPSLLQLEKGVTDTEDKKQKVVCMERYRRRDDEEHRQPSDIDIEREDECGICMDMNSKIVLPDCNHAMCLKCYREWRTRSQSCPFCRDNLKRVNSGDLWVFTDNRDVVDMATVTRENLRRLFMYIDKLPLVIPDFLFDTYDSHLR

SEQ ID NO: 8391 - protein, 307 aa, Zea mays
MVFVSLFLVLYFMETILSLVLLFLLLRRSDCIPIPWTPNCLPPLPVRLSRLQHFHPRAAVAGASRAAGRPVGSAAAKMNDADVAKQIQQMVRFIRQEADEKANEISVSAEEEFNIEKLQLVEAEKKKIRQEYERKEKQVEVRKKIEYSMQLNASRIKVLQAQDDLVNKMKDDAMKELLLVSHNHHEYKNLLKDLIVQGLLRLKEPAVLLRCRKEDHHHVESVLHSAKHEYASKADVHEPEIFVDHDVYLPPAPSHHDAHGQFCSGGIVLASRDGKIVFESTLDARLEVVFRKKLPEIRKLLFGQTAA

SEQ ID NO: 8392 - protein, 503 aa, Oryza sativa (japonica cultivar-group)
MENLEPSCGYLAMIPVSWTPASGKKYQYFAELMRKGFSVRFPFVLDHPTAFELIKQCLNRSIRGFREEPFSTTAHVKNRIADIVFMDLIFWACIIGKTSQTSDYFETPLYMVEMLHGKRIFYSGFVLQFVMWTVKWIYVICRFVLAPLALLTFLAQRYWKTRITIDAVEKFLRMQLMLGPTRYTYTDIIAMTSHFRDKLGQGGYGSVFKGVILPGDVYVAIKMLDNYNCNGEEFISEVSTIGSIHHVNVVRLVGFCAEEMRRALVYEYMPHGSLDKFIFAPEKSFSWDKLNEIALGIARGINYLHQGCDMQILHFDIKPHNILLDSNFVPKVADFGLAKLCPRDNNYVPVSAARGTVGYIAPEMISRSFGVISSKSDVYSFGMLLLEMAGGRRNSKQNMSSSTQVYYPSLVYNQLIQQEMGEITNTLNMHELERKLCVVGLHCIQVKPPDRPTMSEVIEMLEGDVDGLQLPSRPFFCDDEPLPLLVDSYRFSSELTEISEEDG

SEQ ID NO: 8393 - protein, 430 aa, Mesorhizobium sp. BNC1
MGVEVSRLSNGLTVATETLPHLESVALGVWVKSGSRNEREDEHGIAHLLEHMAFKGTTKRTALQIATDIEDVGGEINAATSVETTAFYARVLRDDMSLAIDILADILTDSKFDPHELEREQHVILQEIGAAHDTPDDAVFDRFTETAFRHQAIGRSILGTPDTVASFTSQQLRRFMERQYGADRMVVVAAGGVTHDEFVREVEARLGSFRDKADTAVPQYSNYVGGDYREHRDLMDAQIILGFEGRAYHVRDFYASQMLSMILGGGMSSRLFQEVREKRGLCYSVYAFHWGFSDTGVFGVHAATGQSDLGELMPVILGELQKAGERIDQAELDRARAQYRAGLMMSRESPASRASQVARQLLLYGRPIETEELMDRLAGITVERLADLSNRLFSSKPTVTAIGPVGSLAPFEAIRDTLVTSRPVLRKLAV

SEQ ID NO: 8394 - protein, 231 aa, Triticum aestivum
MDSGDAWGRSSSTSSAAAAAARRLQSRYDLYMGFDDADAGGDEVEARGAEAYNCPFCGEDFDFVGLCCHIDDEHAVEAKSGVCPICATRVGADLIGHLTMQHGSYFKMQRRRRVRKVSSGSHSLLSLLRKDLRDGSLQSFLGGSSYVSNPPAAAPDPFLQSLICSLPVAEPSKDFRSESSDKTFLLNKFPDEKIVERAETSLSDKDQKERAQRSAFARGLVLSTIFDDDTM

SEQ ID NO: 8395 - protein, 636 aa, Oryza sativa (japonica cultivar-group)
MSKVIATTLLLSVISHGAYPAMGSAWEEEDFARNCPPSWCSDSGPEIRFPHQLESSNSSSSSSCSASCARLACSGPDTILHHPFLGPCKVTAIDYKKAVFQIIPLVDSLSSYPLQKLIIDNLPEPDYHSSRCSLYNAQPGKIVCCSKVLTPSMSPTNDYDGNIADHAVVGPISCLSDPSHFSYLVDAYEDIYSLPLDCKAVSKGIVPISGAVTADGPTFKQLAERILNFAETTVSWSEGGIPDNCVQCEQQGQRCAFSSQRNQTFCMGHKPHGSRVKVIAATSSVAAFVVISLVVATAIYLSLKLSYNEEVHLKVEMFLRTYGTSKPTRYTFSEVKKIARCFKEKVGQGGFGTVYKGKLPNGVPVAVKMLENPTGDGEEFINEVATIGTIHHTNIVRLLGFCSEGTRRALVYELMPNESLEKYIFLRDPNTQELLSPDKMLDIALGIARGMEYLHQGCNQRILHFDIKPHNILLDYNFSPKISDFGLAKLCPRDQSIITLTKARGTMGYIAPELYSRNFGEISYKSDVYSFGMVVLEMVSGRRSWDPSIENQNEVYFPEWIYEKVITEQDFILSREMTEEEKQMVRQLALVALWCIQWNPRNRPSMTKAVNMITGRLQNIQVPPKPFVSYESHPMP

SEQ ID NO: 8396 - protein, 472 aa, Ureaplasma parvum serovar 3 str. ATCC 700970
MSKKLEKITTRKENFADWYTSIVNNAKLIQYTDIKGMMVFQPNAWAIWEAIKNQIDVEFKKHGVRNLAMPTLIPLSEFQKEKDHIEGFAPELFMVNQIGDKKLDNSYAIRPTSEILFCNYFKNIVNSYNDLPIKNNQWCSVMRAEKTTRPFLRNAEFHWQELHAIFASENEADSFAKVILDVYTDFVQNYLCIPVIKGLKTPWERFAGAQKTYTIEAMMQDGQALQSATSHYLGQFFAKAYDIKFQGQDNQMHYVHQMSAGLSTRIIGALIMVHADDQGLILPPDIAFNQIAILTIFSNKNPQLLKISQQICEQLNNYRLFEDHSDKGIGYKLAQQEIEGTPICILVGAKELVNQQVVIVRRDTHEKINVDLTDLKLIIPKLLADIKRNIYEKAKKDLEDSIVFVNNIEELKQVIAQNKMAKAFFDGTKEDDEQIKLLTNASTRCIFDETQNGQCFYTNKKTNKLTLFARAY

SEQ ID NO: 8397 - protein, 403 aa, Deinococcus radiodurans
MLTPEQKAIVKATVPALEAHGETITRTFYASMFAAHPELLNIFNPANQQTGKQARSLAASVLAYAAHIDHPEALGGMVGRIAHKHVSLEVLPEHYPIVGQYLLGAIAGVLGDAAKPEILDAWAAAYGELADLMIGIEKGMYDAGAGQPGGWRDFRPFRVARKVAESRVITSFVLEPVGGGALPAYQPGQYLSLKVKVPGQERWQIRQYSLSDAPSPDHYRISVKREGGGLVSEYLHGAVQEGDELLVHVPAGDFVLQQSERPVVLISAGVGITPMLAMVQTLAQAGSQRPVTFIHAAQNGSVHAFRDDVARLTHEYPHFRKVVFYDEAGPDDQLGTHHDVAGRLSLDAVRGALPAGEAEFYYCGPAGFAGAVEAILDDLQVPAERRFTETFGPSQSFAPVILG

SEQ ID NO: 8398 - protein, 407 aa, Clostridium perfringens
MRYIVVGASAAGISGAKTLRELDKDAEIILVSKDENVYSRCILHHYISGHRDIEALDFTDRDFFEKYNIEWKKGLEVKAIDDREHVIVLSNGESLKYDKILLATGASAFIPPVENLREAKNVVGLRNLEDAIKIKEEAEKVKNVVVLGAGLVGIDAIAGLAFKDLNVTLVEMGDRVLPIQLDKYASSKYEKRFEDAGVKLKLGVRAEKVLIDENKNPKALLINTGEEIPCELIIVATGVRSNVAFLKDSSIETDRFGLIINEKGETNARDVYGAGDITGRNPIWPTAVKEGIIAANNMVGNEIFMEDFFGSKNTMNFLGLTTMSLGVVNAPDDSYTEEIDISGENYKKIIHKDGKIYGAIIQGDLSYAGVLTQLIKEKIHVSKVKKPLFEIDYADFFNIKENLEYTY

SEQ ID NO: 8399 - protein, 524 aa, Capsicum annuum
MGNCCAVPKTSDTEEKKRGKNKPNPFSVDYAHGNGHKSYVLDNPTGCDIEATYELGRELGRGEFGVTYLSTDKATGDVYACKSISKKKLRTRVDIEDVRREVEIMKHLPKHPNIVTLKDTYEDDNAVHIVMELCEGGELFDRIVARGHYTERAAAAVTRTIVEVIQMCHKHGVMHRDLKPENFLFENKKETAPLKAIDFGLSVFFKPGERFNEIVGSPYYMAPEVLKRDYGPEVDVWSAGVILYILLCGVPPFWAETEQGVAQAIIRSVVNFKRDPWPKVSDNAKDLVKRMLNPDPSKRLTAQEVLDHPWIQNAKKNPNVSLGETVKARLKQFSMMNKLKKRALRVIAEHLTVDEVAGIKEGFQLMDIGNKGKIDINELRVGLQKLGHQIPESDVQILMDVGDVDKDGFLDYGEFVAISVHLRKMANEEHLKAAFEFFDKNQNGYIEIDELREALDDEIETNSEEVINAIMQDVDTDKDGRISYDEFSAMMKAGTDWRKASRQYSRERYNSLSLKLMKDGSLQS

SEQ ID NO: 8400 - protein, 601 aa, Oryza sativa (japonica cultivar-group)
MQAFVFIFAVLALLAGDVEGRQGCYPFSCGHLQNISHPFRRRGDPQRCGVPSYELDCRDSKATIRINTGTYYVTSINYTTSVFWVVDASLKDTNSSCPLPRSDQLPFVSGGIQGSHGGWDLALDPGPGATWVSFVNCSQAVRNNSVYVPVDCLSTSSSFVYVFGSWIMPPSVFPIIGNLETSCRYLAMIPLGGWDSPLPHNASFSDIVRSMRNGFAVHFPIIHRWSRIGHIKDCLMGSIRFVIAPLTLLTFLAFKYWKTRIKIDAVEKFLQMQLMLGPTRYAYTDIIAMTSHFRDKLGQGGYGSVFKGVILPGDVHVAIKMLSNYNCNGEEFISEVSTIGSIHHVNVVRLVGYCAEEMRSALVYEYMPHGSLDRFIFSPDKSLSWDKLNEIALGIARGINYLHQGCDMQILHFDIKPHNILLDSNFVPKVADFGLAKLYPRDNSFMPVSAARGTVGYIAPEMISRSFGIISSKSDVYSFGMLLLEMAGGRRNSKQNMSSSSQSYYPSWVYNQLVQQKMGEIANAFNMHELEKKLCVVGLHCIQMKSHDRPTMSEVIEMLEGDVGGLQLPSRPFFCDDEPLPLLVDSCRFSSELTEISEEDE

SEQ ID NO: 8401 - protein, 382 aa, Candida albicans SC5314
MVAPALIYSNHELSTAIDSTHAFEGPEKLLEIWFYESKELSPINLRDIKFDTWIEILNLVHCEVLSKVSSNLCDAFLLSESSLFVFPHKIILKTCGTTTTLACLDLLFETVNKELLQNEGLKATFQSKNIYQIFYSRRSFMFPDRQIHVHGNWQEEVKLLNQYFNNGKSYIVGNNTNWHLYVGGNGKTKNPVASTTTTTTTPVVNDCTLEIIMTQLSLEASQQFYTTRKPGDTAIDSNHDLGHDLGQEILKQTGLNELFKFKKQPTMPGLSSSPIKEIHDGFAFTPCGFSSNSINESNYYTIHVTPEPGWSYASFETNMIGDYKAIVDKCINVFQPGQFMVTFLTNTDMEKFECCLDDYKVNHREELDVEDYKLYFVEFVRQ

SEQ ID NO: 8402 - protein, 328 aa, Pseudomonas putida
MKLLIQPNNRLISFSPGANLLEVLRENGVAISYSCMSGRCGTCRCRVTDGSVIDSGTGSGLPHLVDEHYVLACRSVLTNNCAIEIPEADEIVTHPARIIKGTVVAIESPTHDIRRLRVRLAKPFEFSPGQYATLQFSPEHARPYSMAGLPDDQEMEFHIRKVPGGRVTEYVFEHVREGTSIKLSGPLGTAYLRQNHTGPMLCVGGGTGLAPVLSIIRGALKLGMTNPILLYFGVRSQQDLYDAERLHNLAADHPQLTVHTVIAMGPINESQRAGLVTDAIEKDISSLAGWRAYLCGAPAMVEALCTVTKHLGISPEHIYADAFYPGEI

SEQ ID NO: 8403 - protein, 957 aa, Lotus corniculatus
MANRNLEKMASIDAQLRQLAPAKVSEDDKLIEYDALLLDRFLDILQDLHGEDLKETVQEVYELSAEYERKHDHEKLEELGKVITSLDAGDSIVVAKSFSHMLNLANLAEEVQISRRRRNKLKKGDFADENNATTESDIEETLKKLVFKLKKSPQEVFDALKNQTVDLVLTAHPTQSVRRSLLQKHARIRNSLSQLYAKDITPDDKQELDEALQREIQAAFRTDEIKRTPPTPQDEMRAGMSYFHETIWKGVPKFLRRVDTALKNIGINERVPYNAPLIQFSSWMGGDRDGNQVTPEVTRDVCLLARMMASNLYYSQIEDLMFELSMWRCNDELRVHADELHRNSKKDEVAKHYIEFWKKVPPNEPYRVVLGEVRDRLYKTRERSRYLLAQGYSEIPEEATFTHVEEFLEPLELCYRSLCDCGDRAIAGSLLDFLRQVSTFGLSLVRLDIRQESDRHTDVMDAITKHLEIGSYQEWSEEKRQEWLLGELSGKRPLFGPDLPQTEEIRDVLDTFHVIAELPSDNFGAYIISMATAPSDVLAVELLQRESHALRVVPLFEKLDDLEAAPAALARLFSIEWYRNRINGKQEVMIGYSDSGKDAGRFSAAWQLYKAQEDLIKVAKKFGVKLTMFHGRGGTVGRGGGPTHLAILSQPPDTIHGSLRVTVQGEVIEQSFGEEHLSFRTLQRFTAATLEHGMNPPFSRKPEWRALMDQLAVIATEEEEYRSIVFKEPRFVEYSLATPELEYGRMNIGSRPAKRRPTGGIEIRAIPWIFAWTQTRFHLPVWLGFGAAFRQLIEKDVRNLHTLQEMMYNQWPFFRVTIDLVEMVFLKGDPGIAALNDRLLVSEDLWPFGEQLRNKYEETKKLLLQVAGHKEVLEGDPYLKQRLRLRDSYITTMNVFQAYTLKRIRDPNYDVKHISKEKSKPADELVRLNPTSEYAPGLEDTLILTMKGIAAGMQNTG

SEQ ID NO: 8404 - protein, 131 aa, Debaryomyces hansenii CBS767
MSGGKGKAGSSEKASTSRSAKAGLTFPVGRVHRLLRKGNYAQRVGSGAPVYLTSVLEYLAAEILELAGNAARDNKKSRIIPRHLQLAIRNDEELNKLLGHVTIAQGGVLPNIHQSLLPAKKAKAGNASQEL

SEQ ID NO: 8405 - protein, 315 aa, Wolbachia endosymbiont of Drosophila melanogaster
MKNYKFSTKVLIIGSGAAGYAAAIYAARANLEPIVVTGMQPGGQLTITTDVENYPGFVSIQGPELMEQMRFHAEKVGAKIIDDEIKSVEQLEDFNEYRFRSSGNINDYYSDAIIIASGAQAKWLGLESEKKFQGYGVSACATCDGAFFRNKVVAVIGGGNTAVEEAIFLTRFAKEVILIHRRDKLRAEKVMQDRLFKNDKIKVMWNHTVEQILGEENPKRVAGIAIKSAEIDKTQELKVDGVFIAIGHAPNTGIFKGFVEMDEQGYIITKPGTTLTSRAGVFAAGDVQDKVYRQAVVAAGTGCMAALDAEKFLES

SEQ ID NO: 8406 - protein, 189 aa, Leptospira interrogans serovar Copenhageni str. Fiocruz L1-130
MKEGASFMYSKYFIWFMTLGIFLPLAGIFAKGSFYDFKVKDIKGNEVSLSKYKGKVVMVVNVASKCGYTYQYEHLEKVYKKYKDQGFAVVGFPANNFGGQEPGTDQEIETFCRIQKGASFDMMSKISVKGKDIHPLYFYLIQNSPNPGEVEWNFEKILISKSGTIEARYRSSVEPDSSAVTQKIETLLK

SEQ ID NO: 8407 - protein, 534 aa, Lycopersicon esculentum
MASTSLSLPSLKLQFPSHTSSSSRKNSSSYRVSIRPIQASVSEIPPYISSPSQSPSSSSSPPVKQAKLPAQKVPGDYALPLVGPWKDRLDYFYNQGKNEFFKSRIQKHQSTVFRTNMPPGPFISFNPNVVVLLDGKSFPVLFDVSKVEKKDLFTGTFMPSTDLTGGYRVLSYLDPSEPNHAKLKKLMFYLLSSRRNEVIPEFHNSYSELFETLENELSTKGKAGLNAANDQAAVNFLARSLYGINPQDTELGTDGPKLIGKWVLFQLHPLLILGLPKVLEDLVMHTFRLPPALVKKDYQRLYNFFYENSTSVLDEAEKIGISREEACHNLLFATCFNSFGGIKIFFPNMLKWIGRAGAKLHSQLAQEIRSVISSNSGKVTMAAMEKMPLMKSVVYESLRIEPPVASQYGRAKHDMVIESHDASFEIKEGELLYGYQPFATKDPKIFDRSEEFVADRFKGEEGEKLLKHVLWSNGSETENASINNKQCAGKDFVVLVSRLLLVELFLRYDSFEIEVGASPLGAAITLTSLRRASF

SEQ ID NO: 8408 - protein, 120 aa, Glycine max
KCSLRGLPFLSRNSSSFRVVASGGKKIKTDKPYGINGGMALREGVDASGRKGKGKGVYQFVDKYGANVDGYSPIYDTKDWSPTGDVYAGGTTGLAIWAETLLGLLAGGALLVYNTSALAQ

SEQ ID NO: 8409 - protein, 238 aa, Festuca arundinacea
MCGIKREMSGESGLSCSGEYHSPSTSPEQQQGHSQKQTAWMKRPAGRTKFRETRHPVFRGVRRRGNAGRWVCEVRVPGRRGSRLWVGTFDTAEIAARAHDAAMLALAAGDACLNFADSAELLAVPASYRNLAEVRHAVTEAVEDFERRQELGEKDSLSGTSSSTPSSSSLTDDEEASSQADNSPFELEVLSDMGWDLYYSSLAQGMMLMAPPFLAASAAFGDYGEVNLADVPLWSYQS

SEQ ID NO: 8410 - protein, 311 aa, Bacteroides fragilis NCTC 9343
MIHIACNIDSNFTIHCAVTLTSLFANNRNSEFCVHIIASTLPEADQKALSSIAESYGNKICFYFPEKDLLNNFSIKKSGNRISIATYYRCLLSRILPVNIDKILYIDCDIVVLNDISEFWNTDITQYAIGCIEDIGSDEEEYYSRLQYDKKYSYFNAGVLLINLKYWREHKIDEMCEQYFLAHSDRIRFNDQDLLNALLYKDKLFVPFRWNVQDTFYRRTYSHKVKEHSGLKEALLHPAILHYTNKKPWNYDSMHPLKQEYFKYLDMTPWKGTRPIIDFQTRVITGFKRLLYITGIKKSKYINLKDYELAQ

SEQ ID NO: 8411 - protein, 112 aa, Mycobacterium tuberculosis CDC1551
MKLITAIVKPFTLDDVKTSLEDAGVLGMTVSEIQGYGRQKGHTEVYRGAEYSVDFVPKVRIEVVVDDSIVDKVVDSIVRAARTGKIGDGKVWVSPVDTIVRVRTGERGHDAL

SEQ ID NO: 8412 - protein, 365 aa, Oryza sativa (japonica cultivar-group)
MASSAAAAAATGRAALVKAFDETRTGVRGLVESGVSAVPDIFRHPDPYASVPLAPPGVSIPVVDLSLPAPLAAEAAAGAAREWGFFYLVNHHALVPPGFTDGLLAATRAFNELPATERAAHYGRSVDGGVDYFSNFDLYRSGAASWRDTIEVTFGPSRPDTGRIPAACRAEVVGWDAHATAVSRAVMALLCEGLGLAADALEEASCLEGRVMVCHYYPVCPEPERTMGVVPHTDPVVLTILAQDDVGGLQVKHTNEDGESYWVDAKPVPGALMINVGDLLQIMSNDKYKSVEHRVVMNSHEEARVSSAIFYNPGKRGDSVFYGPLPELVSSENPPKYRNFTMPEFLGTFFKRELASNALIEHFKI

SEQ ID NO: 8413 - protein, 425 aa, Nitrosomonas europaea ATCC 19718
MLIEVKVPALSESVAEATLINWHKQPGEYVERGENLIDIETDKVVLELPAPQSGILAEIIRNDGATVTSGEIIARIDTAAKETKTAAQQPAPIDSGHLEITESTVASMHPAQPLMPSAKKAAEENGLTMEEIAAIHGTGRGGRITRQDVLAHVRNKNSAVTDQQSDSRTDQSAAGIPQADTSPIPVDQTEKPDRLEKRVPMTRLRMRIAERLVQSQSTAAILTTFNEVNMQAIMDLRARYKDSFEKEHGIKLGFTSFFVKAVVAALKKFPIINASVDGNDIIYHDYYDIGIAVASPRGLVVPIIRDADKLTFAGIEKQIADLARRAQEGKLTLEELTGGTFSITNGGVFGSMLSTPIINPPQSAILGIHATKQRPVVENGQIVIRPINYLALSYDHRIIDGREAVLSLVAIKEALEYPVSPLFEG

SEQ ID NO: 8414 - protein, 295 aa, Nitrosomonas europaea ATCC 19718
MAILINEQTRIIVQGFTGRIGTFHAQEMIDYGSNVVGGVTPGKGGQKHLGLPVFNTVREAVEQAGAEASIVFVPPAFAADSIMEAADAGIKYCVSITDGIPTQDMMTVKNFLRLFPEEDRMMLTGPNCSGTISPGRAMLGIMPGHIYSRGVVGVVGRSGTLGYEAADQMRRLNIGISTSVGIGGDPIIGSSHRNVLQKLEEDPETKVTLMIGEIGGPMEVEAGLFAKENMSKPLVAYIAGLTAPPGRRMGHAGAIISSAGESAAEKVERLKELGVTICPTPSLMGETVAKVLAGL

SEQ ID NO: 8415 - protein, 561 aa, Synechococcus elongatus PCC 7942
MTLPEDFQFDAIADAIAEIKAGRSVVVVDDENRENEGDLICAAQFATPEMINFMAVEARGLICLAMTGDRLDQLDLPLMVDRNTDSNQTAFTVSIDAAPHLGVSTGISAEDRARTIQATINPLTKPHDLRRPGHIFPLRSREGGVLKRAGHTEAAVDLARMAGLYPAGVICEIQNPNGSMARLPDLIDYARQHRLKLISIADLISYRLQHERFVIRETIATLPSEFGQFTIFAYRNSLDGSEHVALVKGDPSRFSQQPVMVRVHSECLTGDAFGSLRCDCRMQLQAAMKMIENAGQGVIVYLRQEGRGIGLINKLKAYSLQDLGLDTVEANARLGFPADLRNYGVGAQILNDLGVTRIRLITNNPRKIAGLKGYGLEVVDRVPLLIEATPYNSSYLATKGEKLGHLLLKTHLAAIALHLTPELQNNPYRQTLIGQIRSLVQGEGLFLQEELRSVASALFGPQVLTLQVGLAQSEAIAADWYRSPDSPLADQLQHCLEQMAAIDGLEDLEFLLADGHDPLTSLQVQLDRQSLPLPDLSRQFKTLKLQQIYHLQLQERPSFVS

SEQ ID NO: 8416 - protein, 630 aa, Solibacter usitatus Ellin6076
MKGYASLRRKLATLIAGGGVVTALIAAAGFSWLDLQRFQQQANAQVTAIANIVAGQVEPSIALGDRRVAAEILQSLRGDRMIRDAILYDGEGECFAVARALLAACPPRPRDGLKREREAIVLVRPVLSGGERVGTLVLAASVPSIREVLGQYLGGAALIMALTLLVAGVLAMVLQARVSAPILAIARVAERITQTHQFDDRVAVDSSDELGVLARSFNTMLEEIARSGAELEQQIMERNRVNAELLAAKERAEDAARQKTQFLANMSHEIRTPMNGVMGMISLVLDHELDSQDREHLLMAQSAAQSLIIILNDILDLSKIEAGKMTFETVDFDLHRLIGDAMGIFSSAAIAKGLDLGIDLAPDSPRWVRGDPVRLRQILINLVGNAVKFTAAGSVRLTLAPHLDNLVRFAVRDTGIGVPKDQMEAIFEAFVQADGSHTRQFGGTGLGLAITRRLVALMEGTLWAESQSGCGSTFFVELPVQPGSAVQSLVAMAESAPGELPPVLRVLVAEDNVINQKVICSMLRRQGWTVTLALNGEEAYRRFLESRFDLILMDVQMPEVDGLESSRRIRQAERNHKLGRIPILALTAHAATAQHKQCLAAGMDAVITKPVNFPAMLAQIAAVLPEGQTA

SEQ ID NO: 8417 - protein, 288 aa, Agrobacterium tumefaciens str. C58
MKGWCRPVVRHSIAPPARNSGAANYGEGEIAVDYEMILVEKRDEVGVITLNRPKVLNALNSVLLKELRHILSSFSADDSIGAIIITGSEKAFAAGADIKEMQGLDFVDAYVGDFLGGWDEVAATRKPVIAAVSGFALGGGCELAMMCDFIIASDTAKFGQPEITLGVIPGMGGSQRLTRAVGKAKAMDLVLTGRMMDAAEAERAGLVSRIVPAADLMEVAVEAATRIASLSRASVLMAKESVNRSFEVPLAEGLRYERRAFQSLFATEDQKEGMAAFVEKRKPAFRNR

SEQ ID NO: 8418 - protein, 228 aa, Pinus taeda
MAFNALIIMATCCRAFVGILLVSLMVINSVHADPEALQDLCVADTKSSIFMNGSPCLNPMEASPEHFMTSALRKPGNLSDNPLGFSVIVTTPANLPGLNTLGLSMGRIDMAPGSAIPPHIHPRGSETVFVVRGALNVGFVDTSNRLFSHKLVTGDVFVFPKGAVHYLQNIGKITAFIVSAFNSQNPGTVIVSLATFASTPAIPYEVLSKAFVISVQEVSQIRKSLGGT

SEQ ID NO: 8419 - protein, 982 aa, Geobacter sulfurreducens PCA
MHEAAKVDARAQFEKDIVYRRWNAGHGGVYVPVTERAQPNPWLAGLKDRDVETTTGKRLTLINPAYMTRQVHELNFESSGIRGHITSLRPIRQANAPDNWETRALESFERGQQEYSSVELMDGVPHLRLMRPLMVEQSCLRCHPGPSYSVGDVRGGISVSVPLAPYSALARNKMAATGAGHLTFWAAGLGGIILAARRITRDDRSLLLQQARLAESEERNRLLSEVALEGIVIHDRGIVQDMNARFAKLFGYPREELEGINVISLLFHPDDIGSMIDKMSRAHSEPYQVRGVKKDGTVFDVEIEGYNLQHGDKSVRVVSVRDITERRRAEEALRQSEALFRNLFEHHAAVKLIIDPVSGAIVDANNAAVSFYGWSREQLRAMNIRDINMLSPEELVSELENTKNMERIHFFFRHRRADDSVRDVEVFSSRIEVKGREYLHSIVHDVTERKRAEEELLLAKEQAESANRAKSEFLANMSHEIRTPMNGVIGMTGLLLETGLADEQRRYAEIVRTSAASLLQVIDDILDFSKIEAGRLEMETIGFDLRTLLDDLAESLAFKANEKGLTFTCLLRPEVPRFLMGDPVRLKQVLVNLAGNALKFTHQGEISVEVGSLTKTGDSVKLRFAVRDTGIGIPPEKTELLFEKFTQADASITRKYGGTGLGLAICKRLVQMMGGEIGVTSRPGVGSEFWFTASFGTQNLRDSSPEPDGGDGPLQLLSDLGHDDVRILLVEDNATNRQVALGIIKRLGLRGDAAANGAEALDLLATTPYDLVLMDVQMPVMDGFEATRHIRDVRSPVLNHEIPVIALTAHAMKGDRRKCLDAGMNDYLAKPIFPDALAEMLVKWLPRRCRISNDGDGERANAVPAVPDGTPVFDRPGLEARLMGDESLVTEVVAAFLADMPDLIERLRAAVADGEPATVAHWAHTIKGGAASVGGERLRAAAAALEYAAVAGGMGGVACCMNMLEIEFGRLCEIMRQDYVKE

SEQ ID NO: 8420 - protein, 559 aa, Ustilago maydis 521
MVNEVPLSIIHDSRFEIRTDLRLAALFSVVKAGRIDPSPTLTCHSRETNTSRVFGSLARSLPPPLVLFDPPRFGQAFLQPITCRPVRDYDFFLILTLLLPTRRTTCPSRFRSASAFSPVSIHWNRLRRSFAITQLCLLLPHTFRIQILTHSLGCLAMPPMNFIFKSKSRTPQELVRHLRDTILRLDSVSQLGGSNSSNSLHNHYSNGASCSSSSSSAASTAIGSSAITSSNSSASSSSSEAKRKAVDDISKTLCQIKAILFGDGDADPQPELVAQLAQEVYSHHVLQLLVAHIAKFEFEAKKDVSQIFNVLLRRQIGSRSPTVEYLATRPDVIFLALRGYENPDVALNTGMILREMLRHEALAKILLYSDRFYTFPDYIETTTFGISCDAFSNFKETLTRHKSMVASYLESNYDRFFATYTTLLQSPNYVTKRQSLKLLGEILLDRTNFSVMTRYISSDENLKMMMNLLRDRSKNIQFEAFHVFKVFVANPKKPASIENILRRNSERLVKFLSDFHNDKDDEQFVDEKQYVLQIIDATAKSHPPPPGSASHGAAPIGAK

SEQ ID NO: 8421 - protein, 115 aa, Triticum aestivum
MAHSAVAQVVLVAVVAAMLLAATEAAVSCGQVSSALSPCISYARGNGANPSAACCSGVRSLASSARSTADKQAACKCIKSAAAGLNAGKAAGIPTKCGVSVPYAISSSVDCSKIR

SEQ ID NO: 8422 - protein, 465 aa, Edwardsiella ictaluri
MEYYKMTLKPLLIKNPYTGETIHELEVDSISAISEIIDTSYNYRSHLSRSQRADILKKCAMYLEKDKDEAASLITSETGLSKKDTCYEIGRTINVLLSGVNEILSSEESIMDCDLYEGFKERKIISIREPLDGIIYAITPFNHPINQVAHKVIPAIATNNRIILKPSEKTPLSAIYFRDLLYKCGLPKEMFSLVIGNPKILYERMISDLRISMVTFTGGVDVGKSIACTAGYRKIVLELGGNDPLIIMPDADLERATDLVVRGSYSNSGQRCTAVKRVLAHKSIVHDLNYLVAEKSKAWVTGDPMQSATMMGTVIDEEAAIRIQNVVNGAIDQGARLLSGNQRNGALLSPTVLTNVDPKMQLVTQETFGPVTPIITFETISEAIAIANSTAYGLSSALCTNRLDWIKEFSSRLNVGTMNVWEVPGFRTELSPFGGIKDSGLGLKEGVRESMKNYTNIKTISLPWD

SEQ ID NO: 8423 - protein, 104 aa, Enterococcus faecalis V583
MTQAITDKDFATETDEGLVLIDFWATWCGPCRMQAPILEQLSEEYDEDEVKIVKMDVDENPATPASFGIMSIPTLLLKKDGEVVEKAVGVHTKDQLQAMIAKHL

SEQ ID NO: 8424 - protein, 857 aa, Brassica oleracea
MKGARNIYHHSYMSFLLVFVVMILIHPALSIYINTLSSTESLTISSNKTLVSPGSIFEVGFFRTNSRWYLGMWYKKVSDRTYVWVANRDNPLSNAIGTLKISGNNLVLLDHSNKPVWWTNLTRGNERSPVVAELLANGNFVMRDSSNNDASEYLWQSFDYPTDTLLPEMKLGYNLKTGLNRFLTSWRSSDDPSSGNFSYKLETQSLPEFYLSRENFPMHRSGPWNGIRFSGIPEDQKLSYMVYNFIENNEEVAYTFRMTNNSFYSRLTLISEGYFQRLTWYPSIRIWNRFWSSPVDPQCDTYIMCGPYAYCDVNTSPVCNCIQGFNPRNIQQWDQRVWAGGCIRRTQLSCSGDGFTRMKKMKLPETTMATVDRSIGVKECKKRCISDCNCTAFANADIRNGGSGCVIWTERLEDIRNYATDAIDGQDLYVRLAAADIAKKRNASGKIISLTVGVSVLLLLIMFCLWKRKQKRAKASAISIANTQRNQNLPMNEMVLSSKREFSGEYKFEELELPLIEMETVVKATENFSSCNKLGQGGFGIVYKGRLLDGKEIAVKRLSKTSVQGTDEFMNEVTLIARLQHINLVQVLGCCIEGDEKMLIYEYLENLSLDSYLFGKTRRSKLNWNERFDITNGVARGLLYLHQDSRFRIIHRDLKVSNILLDKNMIPKISDFGMARIFERDETEANTMKVVGTYGYMSPEYAMYGIFSEKSDVFSFGVIVLEIVSGKKNRGFYNLDYENDLLSYVWSRWKEGRALEIVDPVIVDSLSSQPSIFQPQEVLKCIQIGLLCVQELAEHRPAMSSVVWMFGSEATEIPQPKPPGYCVRRSPYELDPSSSWQCDENESWTVNQYTCSVIDAR

SEQ ID NO: 8425 - protein, 659 aa, Oryza sativa (japonica cultivar-group)
MRVIYVLCVLGVLVPDAAGGRRHHRRHDCPPFTCGHLSDVSFPFRRRGDPPECGVQSYELTCADDKATIQIDKETYSVSDINYGDSTLWVVDASFLDSRSSCLLPRWNPLLRDPRLQAKSHHIIELAPPVGVTWASFVNCSQEIRNSSWMYMPVACLSTSRSFVYVFTGQQSAYIQNLEPSCGYLATTPLGGSKLNSTSALQNVSYQDVVKLMMTGFAVRFPFTVSGWNFKECLALSIRQTGTGSKERIANIAIIDFYFWSCFLLGDRSHNNLIYTYMVVDTALLILKWTAVLCRFVLAPLAVFIFLAHKYWRNKITIDAVEKFLQMQLTLGPTRYAYTDLTAITGHFGEKLGQGGYGSVYKGVLPGYVNVAVKVLENANCNGEEFISEVSTIGRIHHVNVVRLVGFCSEELRRALVYEYMPRGSLDKYIFSSKRSFSWDKLNEIALGIARGINYLHQGCDMQILHFDIKPHNILLDDNFVPKVADFGLAKLYPRDNSFVPLNALRGTIGYIAPEMISRSFGVISSKSDVYSFGMLLLEMAGGRRNSDMHAGNSSQAYYPSWVYDRLIEQQVGVGEISAATVANMHELERKLCIIGLHCIQMKSHDRPTMSEVIEMLEGGVVGLQMPPRPFFCDDESMSPMMDSYQFSSGLTEILEEDE

SEQ ID NO: 8426 - protein, 407 aa, Yersinia pestis biovar Medievalis str. 91001
MFEPMELTNDAVIKVIGVGGGGGNAVEHMVRERIEGVEFFAVNTDAQALRKTAVGQTIQIGSGITKGLGAGANPEVGRNSAEEDREALRAALDGADMVFIAAGMGGGTGTGAAPVVAEVAKELGILTVAVVTKPFNFEGKKRMAFAEQGIAELSKHVDSLITIPNDKLLKVLGRGISLLDAFGAANDVLKGAVQGIAELITRPGLMNVDFADVRTVMSEMGYAMMGSGVACGEDRAEEAAEMAISSPLLEDIDLSGARGVLVNITAGFDLRLDEFETVGNTIRAFASDNATVVIGTSLDPEMNDELRVTVVATGIGMDKRPEITLVTNKKTQPVMDHRYQQHGMSPLPQEVKPAAKVVNDTTAQTNKEPDYLDIPAFLRKQPINFRIFGISALCAKLSHRSCYKLGR

SEQ ID NO: 8427 - protein, 126 aa, Zea mays
MAARSSSQQLVAAAVLAAALLLLAAGAGTASAAVSCGEETSSVAPCLDYAMGSAASPSAACCSGERSLNRRTSSAVYRQDTCNCLKSMTGRLDGGVSMGNAANIPGKCGVSDEVPINPTGDCTKSN

SEQ ID NO: 8428 - protein, 396 aa, Mycobacterium sp. KMS
MAKAKFERTKPHVNIGTIGHVDHGKTTLTAAITKVLHDKYPELNESRAFDQIDNAPEERQRGITINISHVEYQTEKRHYAHVDAPGHADYIKNMITGAAQMDGAILVVAATDGPMPQTREHVLLARQVGVPYILVALNKADAVDDEELIELVEMEVRELLAAQDFDEDAPVVRVSALKALEGDEKWVKSVEELMDAVDESIPDPVRDTDRPFLMPVEDVFTITGRGTVVTGRVERGVVNVNEEVEIVGIRPGTTKTTVTGVEMFRKLLDQGQAGDNVGLLLRGIKREDVERGQVVVKPGTTTPHTEFDGQVYILSKDEGGRHTPFFNNYRPQFYFRTTDVTGVVTLPEGTEMVMPGDNTDISVKLIQPVAMDEGLRFAIREGGRTVGAGRVTKIHK

SEQ ID NO: 8429 - protein, 108 aa, Escherichia coli
SDKIIHLTDDSFDTDVLKADGAILVDFWAEWCACAKMIAPILDEIADEYQGKLTVAKLNIDQNPGTAPKYGIRGIPTLLLFKNGEVAATKVGALSKGQLKEFLDANLA

SEQ ID NO: 8430 - protein, 104 aa, Leptospira interrogans serovar Copenhageni str. Fiocruz L1-130
MALAEVNDTNFKSETSGGLVLIDCWAEWCGPCRMVAPVLEELSGELDGLVKIKKLNVDDNQDTAQSLGISSIPTLLLYKDGQLVDKVIGALPKAQIKNFIERHK

SEQ ID NO: 8431 - protein, 483 aa, Methanosarcina barkeri str. fusaro
MRDGEQTPGVALTKDKKLLIARALDEMGVSIIEAGSAITSKGERESIRAVANAGLNAEICSYCRIVKSDVDRALECDVDSIHLVAPVSDLHIKTKIKKGRDAVRQIAVDVIEYAKDHGLIVELSGEDASRADPEFLKTIYADGIDAGADRLCFCDTVGLLVPERTTKIFRDLSSSLKAPLSIHCHNDFGFATANTVAALAAGAKQAHVTVNGLGERAGNASLEEVVTSLEWLYKYNTGIKHEMIYRTSRLVSRLTGIPVSPNKALVGGNAFTHEAGIHVHGLLADKATYEPMTPEYIGRQRQIVLGKHAGRSSITLALKEMGLVADDAQTEEIFNRVKQMGDQGKHVTDADLHTIAENVLDIYKEPLVKMEEFTIVSGNRVTPTASIKLNVKDKAIVQAGIGNGPVDAVINAIRRAVRSCAEDIILEEYHVDSITGGTDALVEVRVKLSKDGKEVTASGARTDIIMASVEAVMNGMNRLIRAE

SEQ ID NO: 8432 - protein, 147 aa, Triticum aestivum
HFKNTRETAFAIRKLQLSKAKRYLEDVIAHKQAIPFRRYCGGVGRTAQAKSRHSNGQGRWPAKSAKFILDLLKNAESNAEVKGLDVDTLYVSHIQVNQAQKQRRRTYRAHGRINPYMSSPCHIELMLSEKEEPVKKEAETQIAPRKA

SEQ ID NO: 8433 - protein, 600 aa, Arabidopsis thaliana
TEHFSSRRDTNIVTFAAMASALECWTTRNAAGGCADDDFVDQVLMSSEDRSESLTAPPPSDQTSSAMQKRFQRLGRNVSDAIASLKNSLNLDSSRDNQNAATGGGRKLVWATVVRNLAKMYPGSQLPDKLVSNLRKHYDSLPLSYSQTGFDMKDVFVHIKLIEQAFGDDNPVFVIQEVCDEEADDQGSVFKLTFACTCSLPWSTISGSLDGALICCKKVQIFEKKGLTLGVVLLLVESGQEKMFKVKVVNALRSAVRKPKSTSVKLPFGLCGCEEQNAGVGEFGDVDVESIDQCYRHELDDLNTRIQLQMPPPSSSFSVSVDEWQTIQSGGDDIRKWLLNSDDLEFSGQLGPNSFKGVYRGTKVAIEKLKGCEKGNSYEFAIRKDFLELMTCGHKSILQFYGVCIDENHGLCVVTKLMQGGSLRELVLKKKKLQTKLIFQIAVDIAEGMKFINDHGVAYRDLNTQRILLDKQCNACLGDLGIVTACKSVNEAMEYETDGYRWLAPEIIAGDPEKTRESWMSNAYSFGMVLWEMVTGEEAYGSCSPVQAAVGIAACGLRPDIPKECPQVLKYLMIKCWNTCPSTRLNFSQIHCILLRAISR

SEQ ID NO: 8434 - protein, 403 aa, Haemophilus ducreyi 35000HP
MSIEILTPVLPESVADATVATWHKNIGETVKRDEVLVEIETDKVVLEVPAPNDGLLTEIIQPTGSSVVPKQLLGKLSTIQAGDMAQITAKQPPQRQTTEPRTDTHNDIDSQGPSIRRLLAEHNIEAHAIQGSGVDGRITREDIQQFLATQSSQQVASTDLTDSLNTIAYEDRSEKRVPMTRLRKRIAERLLEAKNSTAMLTTFNEVNMQPIMQLRKQYGEKFEKQHGVRLGFMSFYIKAVVEALKRYPEINASIDGEDVIYHNYFDISIAVSTPRGLVTPVIRDCDKLSMAEIEKAIKLFADKGRDGKLTVEELTGGNFTITNGGVFGSLMSTPIINPPQSAILGMHAIKDRPIAMNGEVVIRPMMYLALSYDHRLIDGKESVGFLVSIRDLLEDPTRLLLEI

SEQ ID NO: 8435 - protein, 308 aa, Triticum aestivum
  misc_feature (41)..(41): Xaa can be any naturally occurring amino acid
  misc_feature (236)..(237): Xaa can be any naturally occurring amino acid
  misc_feature (264)..(264): Xaa can be any naturally occurring amino acid
HYRTSLYKKAGWYRSGIPGISSTHASGYFSEANGSQKKEHXEIKLTEVSVSDKLEAFRAEKEHFKGLSFPTISSVGPNAAIIHYSPEANTCAELDADKIYLCDSGAQYLDGTTDITRTVHFGKPSEHQKLCYTAVLKGHIALDAAVFPNGTTGHALDILARTPLWKSGLDYRHGTGHGIGSYLNVHEGPHLISFRPSARNVPLQASMTVTDEPGYYEDGNFGIRVENVLIVKEADXXLILGEKGYLSFEHITWAPYQTKLINTXLVTPAEIEWVNLYHSECQKILESYLNVQEKEWLRKATEPITASS

SEQ ID NO: 8436 - protein, 409 aa, Sphingomonas sp.
MRSADVVIVGAGHAGAQCAIALRQAGYEGSIALVGRENEVPYERPPLSKEYFSREKSFERLYIRPPEFWREKDIHLTLGIEVSAVDPGSKVLTLSDGSAFAYGQLVWATGGDPRKLACPGAELSGVHAIRTRADCDRLMAEIDRGLTQVVVVGGGYIGLEAAAVLTKLNCHVTLLEAMPRVLARVAGTELSTFYENEHRGHGVDLRTGITVAALEGQESVTGVRLGDGSVLPAQAVIVGIGIVPAVAPLIEAGAAGDGGVTVDEYCRTSLPDVFAIGDCASFSCSFADGRVLRVESVQNANDQASCVAKTICGDPQPYRAFPWFWSNQYDLRLQTAGLSLGYDQTVVRGDPAVRSFSVLYLKQGRVIALDCVNMVKDYVQGRKLVEANVCVSPEQLVDTGLALKDLIPV

SEQ ID NO: 8437 - protein, 553 aa, Trifolium pratense
MQINTQTITTDFHNTRVRVLPEYDVFIHTSDGTRIPAHTSILASVSPVFENILEQPRKQRSSERIIKINGVPSTAVTAFISFLYSSRCTEDEMDKYGIHLLALSHVYNVPQLKQKCIKGLVQRLTVENVVDVLQLARLCDAPDLRLRCMKLLANHFNAVQKSEGWKFLTKHDPWLELDILHFMDESETRREKLRRHREEQGLYAELSEAMECLEHICTEGCTDVGPYHVEVDRERKPCSKFSTCQGLQLLIRHFATCKRRVKGGCWRCKRMWQLFRLHSYVCQQIDDSCNVPLCRNTFFMENLQQWIYSNLSKGAKGRIDSAWCDYWATACHCFWTWRNKEIHDAEFTRPIYAMQHVYRRVNDYYQANKTNRLMRIKNDMLVYISWKPPCGSYVKLNTDGACKDQNRGGCGGIIRGSQGEWLGGFARGLGNCSAIIAELWGVAEGLSYARRLGFTAVELNVDSVVVVQAIKTGRFSSSVGLPLVKHIRRMLDLDWEIKIEHAYRESNKCADAMANIGCHLDRETIFYDSCPISIKELLLADELGITTPRIISM

SEQ ID NO: 8438 - protein, 365 aa, Buchnera aphidicola
MKIKKYKIAVLPGDGIGPEIIKEAYKIISVIKKENDINLQTKEYDVGGIAIDKYNIALPEHTLIGCQNSDAILFGSVGGPKWNHLKLEKKPEISSLLSLRKIFNLFINLRPVKLHKKLLHFSPLKTNIIKKGFDILFIRELTGGIYFGVPKGRNELDPNNICAFDTAIYNTYEITRIAQFAFQQAQKRKKKLVSIDKSNVLESSKLWREVVTKISYTFPEVQIEHLYVDNAAMQLIQNPSQFDVILCPNLFGDILTDESASLIGSLGMLPSASLNQKNFGLYEPAGGSAPDLKGKNLANPIAQILSLAMLFKYSLGFLDISEAIEHAVITVLKQGHHTYDISDKINFISTDMMGTKISENLMKIL

SEQ ID NO: 8439 - protein, 497 aa, Propionibacterium acnes KPA171202
MKTIRQWVGGEYYEGSPLGVIPVENPATGEVTAELLQASKEDLDHTVEVTRDAQKEWANYSLSKRVAIMFKMRQLVLDHQDEMARLIVEEHGKNYSDAIGEIQRGRETFDFATAINVALKGEYSHDVSTGVDIHTTRQPVGVVAGICPFNFPAMVPMWMHPLAVATGNAFILKPASPTPSASLLTAELYKEAGLPDGVFNVLSGDRRSVQDILVHPGIDAISFVGSTPVAHIVQDTGVSHGKRVQALGGANNHAIVMPDSDLDFAAQHISASAFGAAGERCMALPVVVAVGGCGPQVAEKVKKHAEAIKVGEGMGEGVEMGPVISAKAKDRIVGLIDDAEKRGSKVVLDGRGLTVPGYENGHFLGPTVLDDVPLDAPVYTEEVFGPVLAIVHADTYEEALKIVNAQPFGNGSAIFTNDGGVARRFTLDVEAGMVGVNVPIPTPVAFYSFGGWKESLLGDTHIHGPEGVTFYTRAKAITERWPTEKTYAATMSFQREE

SEQ ID NO: 8440 - protein, 500 aa, Burkholderia sp. 383
MSTTNFVAVSDTVRTFVARDFGLFIDGEMQPAHAAARLDVYDPATGERLATVADADERDVDRAVASAKHAFDTRVWSGLRPADRERILLKLADLIERDAETLAQLETLNQGKSIHVSRAIEVGASVEYVRYMAGWATKITGQTLDVSIPFPPGARYTAYTRKEPVGVVAAIVPWNFPLMIAVWKLIPALAAGCTIVLKPSPETPLTALRLAELALEAGVPPGVFNVVTGGRVCGAALASHPSIAKISFTGSTATGKLVGAAAVQNMTRFSLELGGKNPIVMLDDIDVAQALDGVAAGAFFNQGQVCAAASRIYVHRSKFAQLADGLAGVAQSMKLGAGLDTTAQINPLVSAHHRDKVVQHIEGARRAGLTFLAGGTPADDLPGYYVKPAVIADPHPDSAIVRDEVFGPVIVVVPFDDAADAVRLANASPYGLAASIWSNDLKRVMNLVPQIEAGTVWVNCHIPLDPSMPFGGYKQSGIGREFGQYAIEGFTETKSVCIAH

SEQ ID NO: 8441 - protein, 483 aa, Zea mays
ARKSRRTQKWQSQCDRLPRPAASFRRYLRRALDMFEDWRASVPVVVLSAMGKTTNNLLLAGEKAVGCGVIHVSEIEEWNMVKSLHIKTVDELGLPRSVIQDMLDELEQLLKGIAMMKELTPRTSDYLVSFGECMSTRIFSAYLNKIRVKARQYDAFDIGFITTDEFGNADILEATYPAVAKRLHGDWIQDPAIPVVTGFLGKGWKSGAVTTLGRGGSDLTATTIGKALGLREIQVWKDVDGVLTCDPNIYPHAKTVPYLTFEEATELAYFGAQVLHPQSMRPAREGDIPVRVKNSYNPKAPGTLITRQRDMDKVVLTSIVLKSNVTMLDIVSTRMLGQYGFLARVFAIFEDLCISVDCVATSEVSVSVSLDPSKIWSRELIQQELDHVVEELEKIAIVRLLQQRAIISLIGNVEQSSLILEKTGRVLRKSGVNVQMISQGASKVNMSLIVHDSDAKALVEALHQAFFEDDVLSQVEAENLLVG

SEQ ID NO: 8442 - protein, 515 aa, Buchnera aphidicola
MNQKVIIFDTTLRDGEQALQASLSINKKIQIAQSLERMGIDIIEVGFPISSPGDYKAVQMISQKIKNSKICSLARCLKEDIEIAAKAMKNAISPRIHLFLGTSTLHIQSKLKKNFSEIVDMMLMSIKWAKRYTDDVEFSCEDAGRTSLDDLCYIVEKAIHAGAKTINIPDTVGYTIPTQFKNIIQTLFLKVPNIHKAIISVHCHNDLGMATGNSISAIEAGDVKIEGTINGLGERAGNTALEEIIMALKIHEKTLNVYTNIKYQEISRTSKIVSHLCNTPIALNKSIVGKNAFSHSSGIHQDGVLKNRENYEILDPNSIGLKSCPLNLTSRSGRAAIKHRMKELGYLETDYNLDILYIDFLKLADKKGQIFDYDLEALAFINQQQVKTEFFKLEYFHVESKLSGLATASIILLCGKKINIQKSTTYNGPVDAIYQALNKAALYPIVLKKFHLEANGEGKDALGKVDIVVKYKCRNFHGIGLATDIIEASAQALINVFNGIWKSQQVDKKLEKLCK

SEQ ID NO: 8443 - protein, 129 aa, Triticum aestivum
  misc_feature (123)..(123): Xaa can be any naturally occurring amino acid
TRPPTRPKGISAGKSRNCYRGLVQMNSGAENAYNSSQCDSLLIGDNAAANTYPTIQVGCTSGRVEHEASTSKIGEDQLFYFQQRGIDHEKAVAAMIGGFCRAVFEHLPYEFAQEVDALMNLKXLEGSVG

SEQ ID NO: 8444 - protein, 409 aa, Trifolium pratense
MGVCLSAQIKAESPYNTGLNSKNSNSAGNDLSSTNSKVSTGSVPQTPRSEGEILKSTNVKSYTLAELKSATRNFRPDSVLGEGGFGSVFKGWIDENSLAPAKPGTGIVIAVKRLNQESFQGHREWLAEVNYLGQFSHPHLVRLIGYCLEDEHRLLVYEFMPRGSLENHLFRRGSYFQPLSWSLRLKVALDAAKGLAFLHSSETKVIYRDFKTSNILLDSDYNAKLSDFGLAKDGPTGDKSHVSTRVMGTYGYAAPEYLATGHLTTKSDVYSYGVVLLEMLSGKRAVDKNRPSGQHSLVEWAKPYLANKRKVFSVLDSRLEGQYSSDESYRVATLALRCLSTESKYRPNMDEVVRILEQLKVPNVNVGNQRRYRRKSADDVTHARTHKKSCASARAHTSYPRPSASPLYA

SEQ ID NO: 8445 - protein, 396 aa, uncultured marine gamma proteobacterium EBAC31A08
MAREKFERTLPHVNVGTVGHVDHGKTTLTAALTKVAAEVFGGDAVDFANIDNAPEERERGITIATSHVEYVSTARHYAHVDCPGHADYVKNMITGAAQMDGAILVVSAADGPMPQTREHILLCRQVGVPYIVVYMNKADQNDDPEMIELVEMEIRELLNEYDFPGDDTPIIVGSALKALEGDTSEIGIPSVTKLIETLDSYVPEPERPVDGAFLMPIEDVFTISGRGTVVTGRIETGIVNTGDPLEIIGIKDTTTTTCTGVEMFRKSLDEGRAGENCGVLLRGVEREAVERGQVLSKPGAISPHTKFEAEIYVLSKDEGGRHTPFMNNYRPQFYFRTTDVTGACELPSGVEMVMPGDNIKMNIELIAPIAMDEGLKFAIREGGRTVGAGVVSKIIE

SEQ ID NO: 8446 - protein, 256 aa, Bordetella bronchiseptica RB50
MTVLTTFRDQLAVIELNRPQAMNALNEQMLADLNAALDRIEASDCRGMVFTGAGDKAFCAGADITQLQARSPAQHRANVRLAQSTFDRIEQSPLPSVAVVHGFAFGGGLELALACTFRIASAKARMGLPELKLGLIPGYGGTQRLPRLIGPSRAAELILSGGVVGAEEALRVGLLNRIVDAGAPAELGCAYMAPFTAHGKVAMAMAREAIRRGLDGTLQAGLDIEADLFTLCARSQDAAEGMAAFLEKRPAVFTDR

SEQ ID NO: 8447 - protein, 488 aa, Legionella pneumophila str. Paris
MEIYEMYIDGKFTLAKSGTTRDIFDPANGELIARVPESAKEDAILAIKAARKAFDEGEWRKSLALDRGKLLFKLADLIRANAKMLAELETRNCGKPLPEAEFDVTDAANCFEFYGGLATKIHGETMSVPANSFSYVVREPIGVCGQIIPWNFPLLMAAWKLAPALAAGNTAVLKPSELTPITALELFKLIDQCGFPAGVVNLITGTGIGVGEELANNAMVDKVAFTGGSATGRKIMQAATGNLKKISLELGGKNPNIVFADCDLEMAIDGALFGAFANQGEVCSAGSRLLVERSIHKKIVEGMLKKIPNIKLGHGLDAGVKMGPLVSSAHREKVESYVKLGMEEGAKLLCGGKRPTGSEFAKGNFFEPTIFDEVKSTMRIAREEIFGPVLVVIPFDTEEEAIRIANDTDYGLSGAVWTKSVTRAHRVTSQIRAGILWVNHYHPTYNEMPWGGYKQSGAGRELGLYGIESYLEVKQVNINLDETPIGWY

SEQ ID NO: 8448 - protein, 133 aa, Arabidopsis thaliana
  misc_feature (66)..(66): Xaa can be any naturally occurring amino acid
  misc_feature (85)..(85): Xaa can be any naturally occurring amino acid
  misc_feature (88)..(88): Xaa can be any naturally occurring amino acid
  misc_feature (98)..(98): Xaa can be any naturally occurring amino acid
  misc_feature (109)..(109): Xaa can be any naturally occurring amino acid
  misc_feature (118)..(118): Xaa can be any naturally occurring amino acid
  misc_feature (129)..(129): Xaa can be any naturally occurring amino acid
MALSAIGFEGYEKRLEVTFFEPSIFQDSKGLGLRALTKSQLDEILTPAACTIVSSLSNDQLDSYVXSESSFFVYPYKVIIKTCGXTKXLLSIPPLLKXAGEVSLSVKTXRTLAVVPLXGGSLFLPKFFXEGVG

SEQ ID NO: 8449 - protein, 448 aa, Enterococcus faecalis V583
MDAKQYVKNIQEKIHQLDQGQTEYLQAVDEFLPTVEGFLEKNPQYIEANVLGVLIEPERIFQFRVPWQDDQGNWHVNRGYRVQYNSAIGPYKGGLRFHPSVNLSVMKFLAFEQIFKNSLTGLPIGGGKGGSDFDPKGKSDAEVMRFCQSFMTELQKHIGPSTDVPAGDIGVGAREIGYLFGMYKRLRNYDAGVLTGKPLGYWGSQARTEATGYGTVYFVKHLLADKNDTFEGKKVAVSGSGNVAIYAMEKATELGATVITCSDSSGFVYDPEGIDVALVKELKEKNRERISKYVETRKGATYYDKESVWNFETAYDIALPCATQNEINEKQAAILVKNGVKVVAEGANMPCTLEAVAVFAKSAVIYCPGKAANAGGVAVSALEMSQNAERLAWSFEKVDGMLDQIMQNIYETCRDTANEYQARDNFVLGANIAGFEKVAAAMLSQGLV

SEQ ID NO: 8450 - protein, 321 aa, Desulfotalea psychrophila LSv54
MIFFRAQLCSLFFTEREKMDYYGKLEIDKSATAAEIKKSYRKLAQKYHPDKNSGDKAAEEKFKEISEAYAVLSDPEKKELYDTHGSTDFHQRYSQEDIFKNFDINDIFSQFAGGGRTSSFRGGGGGDPFSSFRGGGGGCGGGGCPTPTPGRDITYQITVTLQEVLEGAERTVALRKNGEHQNVTVKIPQGIVEGKKLRLRDKGEPSQTGGANGDLYLKVSVAADERFTRDEDDLIVQHAVSYSEACLGTKITVETIDGKKIAVKIAPGMASGKRLRLKGFGLPQGPNSTRGDLYVQVAVSVPQELSEEQKVLIESLAEAGL

SEQ ID NO: 8451 - protein, 401 aa, Mycobacterium sp. KMS
MYNDHVSTSGGIVIVGGGLAAARTAEQLRRSNYSGPVTIVSDEDHLPYDRPPLSKEVLRSETDDVTLKPAEFYQENDITVLLGAGAASVDTVGKKVTLTDGREIGYEELVIATGLVPKRIPSFPDLTGIHVLRNFDESLKLREEAGSARSAVVIGAGFIGCEVAASLRKLGVDVVLVEPQPAPLASVLGTQIGELVARLHRAEGVDVRCGVGVAEVKGQDVDGQEKVQSVVLSDGAEVDADLVVVGIGSRPSTDWLEDSGITLDNGVVCDAEGRSSAPHVWAIGDVASWLDTIGNQVRVEHWSNVADQARVLVPAMLGQDVPGVVSVPYFWSDQYDVKIQCLGEPEADDTVHIVEDDGRKFLAYYERDGVVAGVVGGGMPGKVMKTRNKIANGAPIADVLG

SEQ ID NO: 8452 - protein, 502 aa, Thermococcus kodakarensis KOD1
MFHQAKWDEPTIFELSRPGRIGYTLPKPIEDVDVDIPEKLRRKSPLNLPELSEPEVVKHYTRLSEMNYGVDSGIYPLGSCTMKYNPKINEEIASHPGVAYVHPYQDEGTVQGALKIMWELEQWLKEITGMDRFTLQPAAGANGEFTGVSIIRAYHIDRGETQRTEMLVPDSAHGTNPASAAMAGFKVIEIPSNENGTVDLEALENAVSERTAGLMLTNPNTLGIFEDEILEIAKIVHKAGGLLYYDGANLNAVLGKIRPGDMGFDVVHLNLHKTFSTPHGGGGPGSGPVGVKDFLKDYLPVPLVSYDAENDRYYLDYNVPRSIGKVKELYGNFAVIVRALTYLKIMGREGLKEVSEVAVLNANYLTQKLKGTRGYELPGKELRKHETVFSAEPMKKETGVKALDVAKRLLDFCMHAPTIYFPLIVHEALMIEPTETVSKEELDAYVEALKRISEEAYSNPEVVTSAPHNTAVRRVDDVLAAKKPVITWRMYRELKERGEIDY

SEQ ID NO: 8453 - protein, 470 aa, Lactobacillus casei subsp. casei ATCC 393
MYQSKTHNHRFTGHLASAKTRLRLVALISTMGGLLFGYDTGVINGALPFISSELKLAPGSQGWVTSSLTLGAAFGAILVGRLSDRYGRRRLITMLAGLFFLATVASSLSPSAGWLIGARLILGLAVGGVSVLVPSFLAEIAPTSHRGRLVTQNELMVVTGQLLAFVLNAFLGTTFGNVPGIWRWMIVLAVIPAIILGIGTYFVPESPRWLMMKGRPAAARSSLEVLRSAAEVPAEIDHLKQNLAEDAKHKQASVRALKTKWIRRLVLIGIGLGVIQQIAGINVMMYYGTSILQMTGFGRDSALIANIANGVTAVAATIVTLQLLKHVPRRPMLIVGLIGSTVAITGVTFASRLPAGSPFRAFATIGMMMLFLAFFQGAISPMTWLLMSEIFPEQVRGIGMGAATFCLWLANFGVGVLFPIGLAQIGMFWTFVCFIGTNLISLLFVLIFVPETAGRSLETLHREEKARLNH

SEQ ID NO: 8454 - protein, 451 aa, Thermococcus kodakarensis KOD1
MGKHYIPNSAHKDEMLKEIGFSSIEDLFSDVPKGMVKEFNLPEGKSEYEVFTELNETLSKNKTVLEMPSFLGAGTYFHYVPAHVKYLIERSEFLTAYTPYQPEISQGMLQALFEYQSLIAELVGLPIVNSSMYDWGTAMAEAALMSARVTKRNKFVVPKHLSPEKKLVLKTYTAGPGLETVEVPWDERGQMDIEKLKEAVEGAAGVYIEMPNFFGLLEENIREIGEIAHDAGALFVVGVDPTILGIVEAPGELGADIVVGEAAYFGNPMNFGGPRAGIFAVRNDRKLIRQMPGRIIGMTKDADGKRAFVMTLQTREQHIRRAKATSNICSNEALVAVAAAIHLATLGPKGVRELGEVILKNTAYLKKRLAEVGEIVFDGVNFKDVPVRFEVPYSVIHERLLERNIHGGYYIGKHFQELGETALFAATETTRKEWVDGLVDALREIIGEAEL

SEQ ID NO: 8455 - protein, 404 aa, Pseudoalteromonas tunicata D2
MKRAVITGIGIVSSIGNDKQQVLESLQTGRSGIKYNEEFAEYKLRSHVCGAIEIDIAEHVDRKALRFMGDAAAFSYIAMAQAIADSGLTEDQVSNPRTGLVVGSGGGSSKNQVEAADILREKGVKRVGPYMVPRTMASTASACLATPFKIKGVNYSISSACATSAHCIGNAVEQIQLGKQDVVFAGGGEELHWTLAMEFDAMGALSTKYNETPEKASRTYDANRDGFVISGGGGIVVVEELEHALARGAHIYAEIVGYGATSDGYDMVAPSGEGAVRCMQQAMATVEGPIDYLNTHGTSTPVGDVKELGAIQEVFGGKSPAISATKAMTGHALGAAGVHEAIYSLLMLEHGFVAPSINIDTLDEQAVGLDIVTQKRDVALTTVMSNSFGFGGTNATLVMQKYKG

SEQ ID NO: 8456 - protein, 485 aa, Mesorhizobium loti MAFF303099
MLQKTSHFMRQANLINGEWVQADSGQTVDVNNPATGLKIGTVPKSGKAETRRAIEAADAAFKTWRKTTALERSKLLRKLHDAMMDNQDVLAELLTIEQGKSLFESKGEIGSAAAYILWFAEEGRRTYGDVVPSPWADRRILVTKEPVGVIAAITPWNFPSSMLARKLGPALAAGCTAVVKPASQTPYSGLAWGALAEEVGFPKGVVNILTGSASEIGDEICANPLVSKITFTGSTEVGKLLIQKSSVTVKKVSMELGGNAPFIVFDDADIERAVAGAITAKYRNSGQTCVCTNRFLVQAGVYDKFVEKLAAASNGLKVGSGLEEGVQQGPLIDEKAVEKVEELIADATSKGGKIVAGGKRHALGGSFFQPTVIANATPKMRFMKEEIFGPVAPVFKFETEAEAIALANDTEFGLACYFYTGDLGRAFRVMEGLKYGMVGVNEGLITTPEAPFGGVKESGLGKEGGHQGIEDYLDTKYVCIGGLGL

SEQ ID NO: 8457 - protein, 212 aa, Oryza sativa
MAATTTSSSSGGGNRIWTSSLAVLALAVALVSLLSLRAPPPAAPSMADDLPTSVHDISVKDIKGNDVKLSEYEGKVLLIVNVASKCGLTNSNYKELNVLYEKYKEKGLEILAFPCNQFAGQEPGSNEEIEQTVCTRFKAEFPIFDKIDVNGKEAAPLYKFLKSQKGGFLGDGIKWNFTKFLVGKDGKVVERYAPTTSPLKIENDIQKLLGTS

SEQ ID NO: 8458 - protein, 482 aa, Glycine max
AYKYYADGEWKKSASGKSVSIINPTTRKTQYKVQACSQEEVNKVMDLAKSAQKLWAKTPLWKRAELLHKAAAILKEHKTPIAECLVKEIAKPAKDAVMEVVRSGDLVSYTAEEGVRILGEGKFLVSDSFPGNERTKYCLTSKIPLGVILAIPPFNYPVNLAVSKIAPALIAGNSIVLKPPTQGAVSALHMVHCFHLAGFPKGLINCVTGKGSEIGDFLTMHPGVNCISFTGGDTGISISKKAGMIPLQMELGGKDACIVLEDADLDLVAANIIKGGFSYSGQRCTAVKVVLVMESVADALVEKVKAKVAKLTVGPPEDDCDITPVVSESSANFIEGLVLDAKEKGATFCQEYKREGNLIWPLLLDNVRPDMRIAWEEPFGPVLPVIRINSVEEGIHHCNASNFGLQGCVFTKDVNKAIMISDAMETGTVQINSAPARGPDHFPFQGIKDSGIGSQGITNSINMMTKVKTTVINLPSPSYTMG

SEQ ID NO: 8459 - protein, 539 aa, Bacillus halodurans C-125
MNEAMIKFNELQIGEEIKKAIIEMGFEEPSPIQAKAIPAILAGGDVIGQAQTGTGKTAAFGIPVVEKVSTGRHVQALILTPTRELAIQVSGEIQKLSKHKKIRTLPIYGGQSIVHQIKALKQGVQVVIGTPGRIIDHLRRKTLILDHVNTVILDEADEMLDMGFIDDIESILRQVKNERQTLLFSATMPPAIKKLSRKYMNDPQTVSINRREVTAPSIDQFYYKVLERNKLDSLCRIIDSEQIDLGILFCRTKKGVAELTEALQARGYIADGLHGDLTQSQRDAVMRKFRDSSIEFLIATDVAARGIDVGNVSHVINYDIPQDPESYVHRIGRTGRAGRKGLALTLVTPREMKHLRSIEQEIKMSIPSQEVPTIEDVVEKQKESWKKQIAHRIEKGSNQKHLFEQMTEELMAEYDSKEVISALLQLNYAMDTAPEDAGYSFGETGGAKGMVRFFINVGRNVNMSPKILVEEIAELVGIPGKAIGRIDIFEKFTFVEVPEEVAPFVYEALRYSRINGARVNLEPAKPRPKRESQRRTFQK

SEQ ID NO: 8460 - protein, 583 aa, Arabidopsis thaliana
MVFKVSTVSTSPIDGQKPGTSGLRKKVKVFKQPNYLENFVQATFNALTAEKVKGATLVVSGDGRYYSKDAVQIIIKMAAANGVRRVWVGKNTLLSTPAVSAVIRERSGADGSKATGAFILTASHNPGGPTEDFGIKYNMENGGPAPESITDKIYENTKTIKEYPIAQDLPNVDISAVGVTSFEGPEGKFDVEVFDSADDYVKLMKSIFDFEAIRKLLSSPKFTFCYDALHGVAGAYAHRIFVEELGAQESALLNCTPKEDFGGGHPDPNLTYAKELVARMGLGKSDTGGEPPEFGAAADGDADRNMILGKRFFVTPSDSVAIIAANAIGAIPYFSSGLKGVARSMPTSAALDVVAKSLNLKFFEVPTGWKFFGNLMDAGMCSVCGEESFGTGSDHIREKDGIWAVLAWMSILAHKNKGNIDGNAKLVSVEDIVRQHWATYGRHYYTRYDYENVDAGKAKELMEHLVKLQSSIPEVNKIVKGIRSDVASVASADEFEYKDPVDGSISKHQGIRYLFEDGSRLVFRLSGTGSEGATIRLYIEQYEKDASKTGRESQEALSPLVDLALKLSKMEEFTGRSAPTVIT

SEQ ID NO: 8461 - protein, 110 aa, Arabidopsis thaliana
MSGVWVFKNGVIRLVENPNQSGSDTQNRRKVMVYLPTGEVVSSYSTLEQILQSLGWERYFGGGDTDLLQFHKRSSIDLISLPRDFTKFNSVYMYDIVVKNPNYFHVRDSH

SEQ ID NO: 8462 - protein, 396 aa, Pseudomonas syringae pv. phaseolicola 1448A
MTAQISRKRICILPGDGIGIEVMEAALPVIAALHLPFDLIPADIGWECWKREGETVPAQTWEVMASCDATLLGAITSKPLAEAEAELPLALQGRNRRYVSPVIQLRQNLDLYANVRPVTDMTGEDRFRFVVIRENTEGLYAGLDFGHVPDALVPLLEEREALGAPWQREGQEDATVTLRLQTRSGLTRIFEYAFDYARKNNFTRVTFVDKPMVLRHSSAFARGIFEEIAQRYPDITGVIENVDAVALWMVQRPERFGVIVAENMFGDILSDLGAGVMGGLGFAPSGNFGNSGAYFEPVHGSAPAHAGLNKANPSAMFMAIALMLEHLGYPAQAACITHAVSLVSQSGVRSYDLGGSHTTDQVGEAIVLQGIELQAGSVGYRAEQASVQGERYVSAL

SEQ ID NO: 8463 - protein, 335 aa, Cytophaga hutchinsonii
MSKIKVGINGFGRIGRLVFRAAVNNPNIQIVGINDLIDVDYMAYMLKYDSTHGRFSGTVDVTDGKLVVNGNAIRVTAERDPANLKWNEVGAEYVVESTGLFLTMDTADKHIAAGAKRVVLSAPAKDDTPTFVMGVNNKSYTKDMTIVSNASCTTNCLAPVAKVLNDNFGILEGLMTTVHAATATQKTVDGPSAKDWRGGRGAYQNIIPSSTGAAKAVGLVIPQLKGKLTGMSFRVPTPDVSVVDLTCRLEKAASYETIKAAMKAASEGDMKGILGYTEDEVVSTDFLGDARTSIFDAKAGISLNDNFVKVVSWYDNEWGYSNKLVDLIVHMDTVK

SEQ ID NO: 8464 - protein, 368 aa, Oryza sativa
MLWAARVSGFFSAAMVMVVLSPSLQSFPPAEAIRSSQFDSHVRFPGQIAGGARGLAFRRAPAFRNAADCGNATGNVCDPSLVHIAITLDEEYLRGSVAAVHSVVQHATCPESVFFHFLVSDPALGDLVRAVFPQLQFKVYYFDPDRVRGLISTSVRQALEQPLNYARNYLADLLEPCVRRVIYLDSDLVVVDDVAKLWRTDLGGRTVGAPEYCHANFTKYFTDRFWSDKQFAGTFAGRRPCYFNTGVMVLDLARWRRTGYTRRIERWMEIQKSPAGRIYELGSLPPFLLVFAGHVAPIEHRWNQHGLGGDNVFGSCRDLHPGPVSLLHWSGSGKPWARLGAGRPCPLDALWAPFDLYGPADSAAEGSR

SEQ ID NO: 8465 - protein, 133 aa, Lupinus albus
VHRSDSSSSSSSDEEEIGEDGEKKKKKKEKKGLKEKIKEKITHDDDKEEKKHEDTTVPVEKIEVDPEHQKGFLEKIKDKLPGQHKKTDEVAVPPASSTVYGDAHTETDAAVAHEGEAKEKKGLLEKIKEKLPG

SEQ ID NO: 8466 - protein, 195 aa, Zea mays
  misc_feature (154)..(154): Xaa can be any naturally occurring amino acid
VSGVPVEDCLVWDSRFLAPVPETTLDDEVSAAAARRVAEMKARKRSERRTYLVAAVMSRLGVTSMAVAAVYYRFSWQMEGGAVPVSEMFGTFALSVGAAVGMEFWAHRALWHASLWHMHESHHRSCEGPFELNDVFAIVNAVPAISLLGDVASXIHHMDNFEGVPYGLFLGPKELEEVGGLDELEKELARIGQTI

SEQ ID NO: 8467 - protein, 115 aa, Triticum aestivum
  misc_feature (14)..(14): Xaa can be any naturally occurring amino acid
MARGAATQLVLVAXVAAMLLVASDAAISCGQVTSALSPCISYARGNGANPPAACCSGVRSLAGAARSTADKQAACKCIKSAAGGLNAGKAAGIPSKCSVSVPYAISSSVDCSKIR

SEQ ID NO: 8468 - protein, 91 aa, Legionella pneumophila str. Paris
MKQKKIYVGNLPFGTTEEALSIQFSQYGKIEEMFLIKDRLTGQMKGFGFITFSAQQEAESALEMNGQPFDGRSLKVCMAQKKINSVSRSRW

SEQ ID NO: 8469 - protein, 256 aa, Ralstonia eutropha JMP134
MSLQSRIEGAVGWMTMDRPAAMNSLNREMAAAMTAQLKAWREDPQVRAVVLTGNGRAFCAGADLKEVAEPVVTGEPDFLDVVVGFVDTLRVFPKPVIAAVNGLALAGGLETVMACDLVLAAESAKLGDAHSDFGVFPGAGGAAVLPRKIPANVARWLLFTGATFTAAQMERYGLVNEVVADAELLARAQAVAELLATKSPLVLARMKRVVAEAADKSLADALRHELLELRNHQRSHDMKEGLTAFAEKRQPVFKGC

SEQ ID NO: 8470 - protein, 424 aa, Streptomyces murayamaensis
MTTPRRVVITGMEVLAPGGIGTKNFWSLLSEGRTATRGITFFDPTPFRSRVAAEIDFDPYEHGLSPQEVRRMDRAGQFAVVASRGAVADSGLELAGLDPYRVGVTVGSAVGATMGLDEEYRVVSDGGRLDLVDHQYAAPHLYNHLVPSSFAAEVAWAVGAEGPSTVVSTGCTSGIDSVGYAVELIREGSADVMIAGSSDAPISPITMACFDAIKATTNRYDEPETASRPFDNSRNGFVLGEGTAFFVLEELESAVKRGAHIYAEIAGYATRSNAYHMTGLRPDGAEMAEAIRVALDEARMNGDEIDYINAHGSGTKQNDRHETAAVKRILGDHAYRTPMSSIKSMVGHSLGAIGSIEIAASALAMEYNVVPPTANLHTPDPECDLDYVPLTARDRKTDAVLSVGSGFGGFQSAVVLARPERKLA

SEQ ID NO: 8471 - protein, 814 aa, Mesorhizobium sp. BNC1
MTQKLVVVGAGMASGRMLEHLFEAAPGAFDVTLFGAEPRGNYNRIMLSPVLAGEKTYDQIVTHDAEWYAANDVHCRFGETVTKIDRKAKVVFSRSGETPYDKLVVATGSAPFIIPIAGKDLPGVRAFRDLDDVDAMVAAAGRPGAKAVVIGGGLLGLEAAAALRLRGMDVVVLHLMGHLMERQLDPAAGYLLQKELEGRGIKIHCKAQTKAILGDAQVEAVLLEDGTIYPADIVVMAVGIRPEVRIAVDAGLYVERGIVVNDQMVTSDPDILAIGECVEHESICYGLVAPLYEMAKVAAKTLVKQDAAFRPVETATQLKVTGVTLYSAGDFADAEDREEIVLRDASAGVYKRLVLKENRILGAVLYGETSDGAWFFDMLRKGTDVSEMRETLIFGQAYQGGGQLDPMAAVAALPDDAEICGCNGVCKSKITGTIQEKGLTTLDAVRAHTKASASCGTCTGLVEQLMKLTLGDAFNPAAVTPMCGCTDLGHDDVRRLIKASRLKTIPAVMQELEWKTSCGCAKCRPALNYYLVCDWPDEYADDYQSRFINERVHANIQKDGTYSVVPRMWGGVTSAAELRAIADVVDKFNIPTVKVTGGQRIDMLGIKKEDLPEVWADLGKAGFVSGHAYAKGLRTVKTCVGSDWCRFGTQDSTGLGIRIEKFMWGSWTPAKVKMAVSGCPRNCAEATCKDVGVICVDSGFEIHFAGAAGLDIKGTEKLGLVRSEDEALEVIVALTQMYREQARYLERIYKWAKRIGYDEIRRQILDDPEKRKAYYDRFVFSQKFAQVDPWSERASGKDKHEFKPMATLTLEAAE

SEQ ID NO: 8472 - protein, 249 aa, Triticum aestivum
MASTNGGFVSPLAVTVPVEAVLFDIDGTLCDSDPLHHVAFQELLLAIGYNNGVPIDDEFFINNIAGRSDAEAAQNLFPDWPLEKGLKFLEDKDVKYRSLAMERLEPVKGLHKVVQWVKDHGYKRAAVTNAPRINAELMIKLLGLSDFFQAVIVGGECEQPKPAPFPYLKALKELEVSAAHTFIFEDSASGTRAGVAAGMPVVAVSTRNPVKSLQEAGAALIVSDYEDQKLWNALEEIDREEAKLKTGGA

SEQ ID NO: 8473 - protein, 632 aa, Pasteurella multocida subsp. multocida str. Pm70
MSKQIQVPDIGGDEVTVTEVMVKAGDTVAVDQSVINVEGDKASMEVPSPEAGVIKEVLVKVGDKVSTGSPMFVLETGDAKPAETPKAETAPVSAPAPAASAVVEVHVPDIGGDEVNVTEIMVKVGDKVEVEQSIINVEGDKASMEVPAPIAGVVKEILINVGDKVSTGSLIMKFETGDAPAVATPAQAPTAAPSAPAQSAVKDVNVPDIGGDEVNVTEIMVNVGDTITEEQSLITVEGDKASMEVPAPFAGVVKEILVKSGDKVSTGSLIMRFEVAGAAPSAAPAQPAPAAQAAAPQAATPAPVASAPAGDAEVTGSSVFAYATPVVRRLAREFGVNLDKVKGTGRKGRILKEDVQAYVKAAIKAVESGSVSAAPAGSGVANGAGLGLLPWPKVDFSKFGEVEEVELTRINKISGANLHRNWVMIPHVTHFDRADITDLEAFRKEQNVLAEKQKWGVKITPVVFIMKAAAKALEAYPRFNSSISEDGQRLTLKKYVNIGVAVDTPNGLVVPVFKDVNKKGIIELSRELMEVSKKARDGKLTASDMQGGCFTISSLGGLGTTHFAPIVNAPEVAILGVSKSEMAPVWNGKEFTPRLMLPLSLSFDHRVIDGADGARFISYINGVLSDLRRLVM

SEQ ID NO: 8474 - protein, 80 aa, Glycine max
MSEESGRPLPKFGEWDVNDPASADGFTVIFNKARDEKKAGNGQDTESPCKDARTERVESYATKANSKKWFCCVTPSPTQS

SEQ ID NO: 8475 - protein, 472 aa, Wolbachia endosymbiont of Drosophila melanogaster
MSTLITVAYGDGIGPEIMEAVLSILREAEAEISIDIIEIGERVYSKEWSHGISPSGWESIERTKILLKSPTTTPQGKGNKSLNVALRKNLGLYANIRPCISYHHVIENKFDKFDIVVIRENEEDVYTGIEHRLTGDSYQCTKIITRSGSEKICRYAFEYAKKHNRKKVTCLTKDNIMKMTDGTFHAAFDRIAKEYPDIKAEHYIVDIGMARVATEPENFDVIVTENLYGDILSDIVAQTSGSVGLAGSSNIGNEYAMFEAVHGSAPDIAGKNIANPSGLLNAAVHMLIYIGQVGTAKLIYDAWLKTLEDGIHTADLYKEKRSKQKVGTKEFAEAVIDNLGKKPKTLSELIIGSDPNSKVDKIQDNYEQDYKIKKLVGSDITLAWSKPADFDQIVKLFETSNPQIIAIYSKGLAIWPGSSKSSSDQITCRFIANNEITNSDVNNLLIKFEEHNFDVVRMDKLYLYDGKEGFFS

SEQ ID NO: 8476 - protein, 335 aa, Mycoplasma hominis
MKKTRIAINGFGRIGRLIFREIFNDPEFEIVAINDLTDAATLAHLLKYDTAHGKMNENIWHTENSIVVNGKEYRVYSEKDPLNLPWKELNVDIVIEGTGRYVTKEGAELHIQAGAKKVFITAPAKSEGVKTVVYSVNEDIITPEDKILSGASCTTNCLAPIANVLEKNFGIEKGFMTTVHSYTADQRLQDAPHKDLRRARAAASNMVPTTTGAAIAIGKVIPSLDKKLNGLSLRVPTITGSFVDLTVELKKDATVQEINEAMKKSASESLEYSTEPIVSSDIIGAKAGSIFDSLLTSVLEVEGKKLYKVYAWYDNESSFVAQYVRTLRHIGKLTK

SEQ ID NO: 8477 - protein, 233 aa, Arabidopsis thaliana
MAFSYASFSIPFNGFAANPSPITSAFLGPSLRFSTRTSKTRNPSNGVSVKSSNSHRFLVKSKNFSVYARAAAEKSVHDFTVKDIDGNDVSLDKFKGKPLLIVNVASRCGLTSSNYSELSQLYEKYKNQGFEILAFPCNQFGGQEPGSNPEIKQFACTRFKAEFPIFDKVDVNGPSTAPIYKFLKSNAGGFLGDIIKWNFEKFLVDKKGKVVERYPPTTSPFQIEKDIQKLLAA

SEQ ID NO: 8478 - protein, 418 aa, Xanthomonas campestris pv. campestris str. ATCC 33913
MTNGNLLYAQSGGVTAVINATAAGVIGEARARKIKVLAARNGILGALREELIDTSKESAAAIAALAQTPGGAFGSCRYKLKSLEQDRAKYERLLEVLRAHDVRWFLYNGGNDSADTALKVSQLAKAFGYPLHCIGVPKTIDNDLAVTDTCPGFGSAAKYTAVSVREAALDVAAMADTSTKVFIYEAMGRHAGWLAAAAGLAGQGPDDAPQIILLPERAFDQPAFLAKVRQVVERVGWCVVVASEGIQDAQGKFVADAGGATDSFGHAQLGGVASFLAAQVKQELGYKVHWTLPDYLQRSARHLASKTDWEQAQAVGKAAVQYALKGMNAVIPVIERVSDAPYRWKIVPAPLHKVANHEKKMPPSFLRKDGFGLTERARRYFAPLIKGEAPLAYGSDGLPKYVTLKNVAVAKKLPAWEG

SEQ ID NO: 8479 - protein, 229 aa, Spinacia oleracea
MNDTDVQKQIQQMVRFIRQEAEEKANEISVAAEEEFNIEKLQLVEAEKKKIRPEYERKEKQVQVRRKIEYSMQLNASRIKVLQAQDDLVNSMKEEAAKELLRVSGDHHHYKRLLKELVVQSLLRLREPGVLLRCREDDVHLVEHVLNSAKEEYAEKAEVHTPEIIVDSIHLPAGPSHHKEHGLHCSGGVVLASRDGKIVFENTLDARLEVAFRKKLPQIRKQLFAVAAA

SEQ ID NO: 8480 - protein, 189 aa, Lupinus luteus
RVFTQKIHDLIGTHVDVPAPDMGTGPQTMAWILDEYSKFHGYSPAVVTGKPIDLGGSLGRDAATGRGVLFAAEALLNEYGKSVSGQSFVTQGFGNVGSWAAQLISEKGGKVVAVSDVTGAIKNSNGIDIPSLLKHSSEHKGVKGFRGADPIDPKSILVKDCDVLIPAALGGVINKENANEIKAKFIIEA

SEQ ID NO: 8481 - protein, 609 aa, Arabidopsis thaliana
MPTWWGRKSCKNKDDNHRGIISTDRDIKSSAVVVDPPLTPTRGGTPRCSREFAGASSAFSGFDSDSTEKKGHPLPRPLLSPVSIHHQDHVSGSTSGSTSVSSVSPSGSADDQSQLVASRGRGDVKFNVAAAPRSPERVSPKAATITTRPTSPRHQRLSGVVSLESSTGRNDDGRSSSECHPLPRPPTSPTSPSAVHGSRIGGGYETSPSGFSTWKKGKFLGSGTFGQVYLGFNSEKGKMCAIKEVKVISDDQTSKECLKQLNQEINLLNQLCHPNIVQYYGSELSEETLSVYLEYVSGGSIHKLLKDYGSFTEPVIQNYTRQILAGLAYLHGRNTVHRDIKGANILVDPNGEIKLADFGMAKHVTAFSTMLSFKGSPYWMAPEVVMSQNGYTHAVDIWSLGCTILEMATSKPPWSQFEGVAAIFKIGNSKDTPEIPDHLSNDAKNFIRLCLQRNPTVRPTASQLLEHPFLRNTTRVASTSLPKDFPPRSYDGNFSLQPTREPYPGRLSHDNYAKQPLSRTIKSPSRENVRAITSLPVSPCSSPLRQLGPAYKSCFLSPPHPSYAFPGQDSGYNLAEFAASPFRMKKDAMMEPSSFRTQTPNSPLRSRLV

SEQ ID NO: 8482 - protein, 485 aa, Bacteroides fragilis NCTC 9343
MMQQEEPNKYVKELTQEKYKYGFTTEVHTDIIEKGLNEDVVRLISSKKNEPEWLLEFRLKAYRHWLTLEMPTWAHLRIPEIDYQAISYYADPTKKKEGPKSMDEVDPELIKTFNKLGIPLEEQMALSGMAVDAVMDSVSVKTTFKETLMEKGIIFCSFSEAVREHPDLVKKYLGSVVGYRDNFFAALNSAVFSDGSFVYIPKGVRCPMELSTYFRINAANTGQFERTLIVADDDSYVSYLEGCTAPMRDENQLHAAIVEIMVHDRAEVKYSTVQNWYPGDAEGKGGVYNFVTKRGNCKGVDSKLSWTQVETGSAITWKYPSCILSGDNSTAEFYSVAVTNNYQQADTGTKMIHLGKNTRSTIVSKGISAGKSENSYRGLVRVAEKADNARNYSQCDSLLLGDKCGAHTFPYMDIHNETAVVEHEATTSKISEDQIFYCNQRGISTEDAIGLIVNGYAKEVLNKLPMEFAVEAQKLLTISLEGSVG

SEQ ID NO: 8483 - protein, 333 aa, Triticum aestivum
FFFVPVSAVAIIVLVATCSIIALKIHRSGRSPFPSLTGKDYNDRRDNIKKILGNYGSLAPRRYQFSHLKKVTKSFGEKLGQGSYGMVYKGTLANGRHVAVKFLHDTTGNGEEFVNEVISIRRTSHVNVVTLLGFCLEGSKRALIYDYMPNGSLDKFIYTENSKQALGWETLYGIATGIARGLEYLHRGCNTRIIHFDIKPQNILLDQDFVPKIADFGLAKLCNPKESYLLSMDGMRGTVGFIAPEVFSRRFGVVSTKSDVYSFGMVLLEMVGGRRNLRASVERESEVYFPDWAHSHLAQFGSLQPFDLGFDGPEEIAKKMATIGLWCIQISPA

SEQ ID NO: 8484 - protein, 458 aa, Trifolium pratense
MDQQNKQSFQNPKHIIFDKYEMGKVLGQGNFAKVYHCRSLSTNESVATKVIKKEKLRKERLVKQIKREVSVMRLVRHPHIVDLKEVMATKGKIFLVMEYVKGGELFAKVAKGKLKEDVARKYFQQLISAVDFCHSRGVTHRDLKPENLLLDENEDLKVSDFGLSALPEQHREDGMLLTPCGTPAYVAPEVLKKKGYDGSKADLWSCGVILYALVCGYLPFQGENVMRIYKKAFKGEYEFPEWISPQAKILISNLLVADPKKRYSIVDIMNDPWFRIGFVRPIAFSMNGSSIEDNDKDINIDFNEVGEDNVDVPELIMVKPSRPFYNAFEIISSLSHGFDLRNLFETRKKLPSMFISKFSASTVLEKLEVMAKKLNFRMTGKKEFVVRFEGTKDGRKGKVAVTMEVFGVAPDVAVVEFSKCGGDTLEYVKLCDEQLRPSLKDIVWSWQGDDNHNDNNSQ

SEQ ID NO: 8485 - protein, 185 aa, Zea mays
LVHHLQRVTDEDIEALLSDEIFQPKVIWSLADVQATCGTLGLSTATVKLIAPDGEERIACSVGTGPVDAAYKAIDQIIQEKSNSTYYLQIPTVLREYGMPSVTEGIDAIATTRVVVTGNVANNSKHALTGHSFNRSFSGSGAAMDIVVSSVRAYLSALNKMCSFAGAAKPSSPEVPGSASVQRAE

SEQ ID NO: 8486 - protein, 189 aa, Lupinus luteus
RVFTQKIHDLIGTHIDVPAPDMGTGPQTMAWILDEYSKFRGYSPAVVTGKPIDLGGSLGRDAATGRGVLFATEALLNEYGKTVSGQRFVIQGFGNVGSWAAQLISEKGGKVVAVSDVTGAIKNSKGIDIPSLLKHSREHKGLKGFHGADPVDPNSILVEDCDVLVPAALGGVINRENANEIKAKFIIEA

SEQ ID NO: 8487 - protein, 108 aa, Escherichia coli
SDKIIHLTDDSFDTDVLKADGAILVDFWAEWCGPCKMIAPILDEIADEYQGKLTVAKLNIDQNPGTAPKYGIRGIPTLLLFKNGEVAATKVGALSKGQLKEFLDANLA

SEQ ID NO: 8488 - protein, 189 aa, Lupinus luteus
RVFTQKIHDLIGVQRDVPAPDMGTNAQTMAWILDEYSKFHGHSPAVVTGKPIDLGGSLGREAATGLGVIFATEALFAEYGMSISGMTFAIQGFGNVGTWAAKSIYDRGGKVVAVSDISGAITNPNGIDIPALLKHKESNGNLTEFSGADAMDPNDLLVHECDVLIPCALGGVLNKENAADVKAKYIIEA

SEQ ID NO: 8489 - protein, 140 aa, Cryptococcus gattii
DLTPIIPVVERIAHKHTSLHITANLYGIVGKHLIQAIVDILGDAVTPEIGDAWYNGYWNLALIFINRERQLYDSAIEAGGWEGWRQFKVAKRVKESHEITSFYLKPVDDSKPLPKFKPGQYIGVQIDIPALGHKQARQYS

SEQ ID NO: 8490 - protein, 566 aa, Zea mays
  misc_feature (210)..(212): Xaa can be any naturally occurring amino acid
  misc_feature (435)..(436): Xaa can be any naturally occurring amino acid
  misc_feature (460)..(460): Xaa can be any naturally occurring amino acid
MAIPVRSAAAPRRLVPSIPPASSGHVRGLACFGTRTGPRGARGLSMVVADSTSRRAKQADGGDGVLGAPVLGGLGMEGLGDQLSVVMKFGGSSVSSAARMAEVAGLILTFPEERPVVVLSAMGKTTNNLLLAGEKAVGCGVIHVSEIEEWNMVKSLHIKTVDELGLPRSVIQDMLDELEQLLKGIAMMKELTPRTSDYLVSFGECMSTRXXXAYLNKIRVKARQYDAFDIGFITTDEFGNADILEATYPAVAKRLHGDWIQDPAIPVVTGFLGKGWKSGAVTTLGRGGSDLTATTIGKALGLREIQVWKDVDGVLTCDPNIYPHAKTVPYLTFEEATELAYFGAQVLHPQSMRPAREGDIPVRVKNSYNPKAPGTLITRQRDMDKVVLTSIVLKSNVTMLDIVSTRMLGQYGFLARIWSRELIQQASVSIPSLNXXIPILYASTLLTNFQELDNFPVLHXLLTIFQELDHVVEELEKIAIVRLLQQRAIISLIGNVEQSSLILEKTGRVLRKSGVNVQMISQGASKVNMSLIVHDSDAKALVEALHQAFFEDDVLSQVEAENLLVG

SEQ ID NO: 8491 - protein, 161 aa, Brassica napus
MGEIVFTEKQEALVKESWEILKQDIPKYSLHFFSQILEIAPAAKDMFSFLRDTDEVPHNNPKLKAHAVKVFKMTCETAIQLREKGKVVVADTTLQYLGSVHFKSGVLDPHFEVVKEALVRTLKEGLGEKYNEEVEGAWSKAYDHLALAIKAEMKQEDSQKP

SEQ ID NO: 8492 - protein, 378 aa, Glycine max
MGVSGNNEVLVTTKVVVDYDRASELKAFDDTQDGVMGLTDAGVTKIPLIFHNPKNSHHDESDDGSGSTQLSVPSIDLVGVAEDPATRKVVVEKIRQACETWGFFQVVNHGIPLSVLEEMKSGVNRFYEQDSEVKRELYTRDPLRPLVYNSNFDLFTSPAANWRDTFYCFMAPHPPKPEDLPSVCRDILLEYAKEVKKLGSVLFELLSEALELNPNYLNDIGCNEGLTLVCHCYPACPEPELTLGATKHTDNDFITVLLQDHIGGLQVLHENRWVDVSPVPGALVINIGDLLQLITNDKFKSVEHRVVANRVGPRVSVASFFSTSLQPSTKLYGPIKDLVSEDNPPKYRETTVQGYVSYSLGRGLDGTSPLPHFRIKDF

SEQ ID NO: 8493 - protein, 520 aa, Yersinia pestis biovar Medievalis str. 91001
MSQQVIIFDTTLRDGEQALQASLSVKEKLQIALALERMGVDIMEVGFPVSSPGDFESVRTIAQQVKNSRVCALARCVDKDIDVAAEALRIAEAFRIHVFLATSTLHIESKLKRSFDDVLAMAVHSVKRARNYTDDVEFSCEDAGRTPIDNLCRVVEAAITAGATTINIPDTVGYTTPYQFGGIITDLYERVPNIDKAIISVHCHDDLGMSVANSITAVQAGARQVEGTINGLGERAGNCSLEEVIMAIKVRHEMLGVHTNINHQEIYRTSQLVSKICNMPIPGNKAIVGSNAFAHSSGIHQDGVLKNRENYEIMTPESIGLKEVQLNLTSRSGRAAVKHRMEEMGYQDKDYNLDSLYDAFLKLADKKGQVFDYDLEALAFINKQQEEPEYYRLDYFSVQSGSSVMATASVKLVCGEEIKSEAATGNGPVDAVYQAINRITDYPIELVKYQLSAKGQGKDALGQVDIVVDHKGRRFHGVGLATDIVESSAKALVHVLNNIWRAHQVEKEKQRLQQNNQEMV

SEQ ID NO: 8494 - protein, 365 aa, Yersinia pestis biovar Medievalis str. 91001
MNMTKTYHIAVLPGDGIGPEVMAQASKVLDAVRQRFGLKISTSVYDVGGAAIDRHGSPLPAATVAGCEQADAILFGSVGGPKWEHLPPAEQPERGALLPLRKHFKLFSNLRPARLYQGLEDFCPLRSDIAARGFDILCVRELTGGIYFGQPKGREGQGMHERAFDTEVYHRFEIERIARIAFESARKRRSKVTSIDKANVLQSSILWREVVNGIAADYPDVALSHMYIDNATMQLIKDPSQFDVLLCSNLFGDILSDECAMITGSMGMLPSASLNEQGFGLYEPAGGSAPDIAGKNIANPIAQILSLTLLLRFSLGKDDAADAIERAINQALEQGYRTADLAGDGHAIGTHEMGDIIAKFVVEGV

SEQ ID NO: 8495 - protein, 527 aa, Pirellula sp.
MNQSAEAPSSENVATRQIRIFDTTLRDGEQSPGASMNLAEKLEVASALVDLGVDIIEAGFPIASPGDFESVRQIATTIRGATICGLARCAEKDIDRAWEALKTAPQARIHVFLATSAIHREFKLRMTPDEIVERAVAGVRRAASHCDDVEFSPEDACRTEHDFLCRVVEAAIDAGATTINVPDTVGYTTPGEIYDRFKMLRDRVPNMDKAVLSTHCHDDLGMAVANSLAAVDAGAGQIECTINGIGERAGNAALEELVMAMKTRQDFYHCQTNINSKRLVPVSRLVSKTTGINVQRNKAIVGRNAFAHESGIHQDGMLKERTTYEIMSPEEVGFTKTDLVLGKHSGRAALADRAKQLGMTLTGEQLQEVFEAFKELADKKKEIYDGDIVALVQQKISETVAPEWTLVDYEVTSGKNQTPNVRVTLRRDEQDITEQVAQGDGPIDAAFWAVEKITGIQVVCKDFRVRSATLGRDAIGEVNLEVEHEGKTYRGTGVSTDSVESTILAMLNAINRIVAGIASDPGELPQP

SEQ ID NO: 8496 - protein, 265 aa, Alkaliphilus metalliredigenes QYMF
RISDFAGSTVVHSLGGWAALMGAMIIGPRIGKYTKDGKSKAIKGHSLTLGALGVFILWFGWFGFNGGSTLSGVDYNDIAHIFITTNLSAAVGAIAAMIVSWRRYKKPDVSITLNGALAGLVAITAGTDIVSPVGAVVIGAIGGVVVVFAIEFIDNVLKIDDPVGAVSVHGVCGAVGTIAVGIFATDGGLLYGGGVELLGVQILGVIAVALWTMGTTFILFKAIELTVGLRVTKEEEIEGLDKCEHGTESYADFQPRPVYLATEKN

SEQ ID NO: 8497 - protein, 284 aa, Pseudoalteromonas tunicata D2
MTANIIDGKAIAKQVRTSVAHRVEQRIAEGLRAPGLAVVLVGADPASQVYVGSKRKACEEVGFVSKSYDLPGDTSETELLTLVDTLNNDPEVDGILVQLPLPAGLNAEKILERITPLKDVDGFHPYNIGRLAQRMPALRPCTPKGIITLLDSTGVRYKGMDAVVVGASNIVGRPMALELLLAGCTTTICHKFTQNLEQHVRRADLVVVAVGKPAFIPGEWIKEGAIVIDVGINRLEDGKLVGDVAYDVAEQRASFITPVPGGVGPMTVASLIENTLEACEKYHS

SEQ ID NO: 8498 - protein, 120 aa, Alkaliphilus metalliredigenes QYMF
MADKITKVEIITRPSKFDELKEALNDIGVTGMTLTRVQGCGVQKGRKENYRGITYIPELIEKIKIETVICEVPVDLVVETAKKVLYTGEVGDGKIFITEISNVIRIRNGDEGKVALDNEK

SEQ ID NO: 8499 - protein, 646 aa, Oryza sativa (japonica cultivar-group)
MAIPGSFCHPTALQVFVSVQFVFAVLVPHAAGRHHRHGCAPFSCGHLSDVSPPFRRRGDPPECGVASYELTCTDDKPATIQIDNGTYLVMDIKYKDSTFWVIDANISDSRNNCPLPRWNRDFGYYDQMLYERHGEDSRRRSIQAELMPPYQSTTATFVTCSQEILKSNGKYRPVACMSTNSSFVYVLTGMNSDSIGSLEPSCGYLAMTPLGAGDRPLVLENASYADVVKLMRGGFAIRFPYTSRFYVYSSKIKQCIAQSFHCPTDRGCNTTGHVDFEVDCWFILVPLVILTFLARNYWKIRITTDAVEKFLRMQLMNGPTRYAYTDLIAITGHFREKLGQGGYGSVYKGVLLPGNAHVAVKVLGNSNCNGEEFISEVSTIGRIHHINVVHLVGFCSEEIRRALVYEYMPRGSLDKYIFSSERSFSWDKLNEIALGIARGINYLHQGCDMQILHFDIKPHNILLDVNFVPKVADFGLAKLCPRDQSFVPLSALRGTIGYIAPEMISRSFGIISSKSDVYSFGMLLLEMAGGRRNSDMYAENSNQTYFPSWVYDQLTEQQVGVGEIPAGTVANMHELERKLCIIGLHCIQMKSHDRPTMSEVIEMLEGGVVGLQMPPRPFFCDDEPVSLAVNSHQFSSELSEILEEDE

SEQ ID NO: 8500 - protein, 554 aa, Pseudomonas fluorescens Pf-5
MAYYRTPHDVTALPAWQALKDHRQAMQDFSMREAFNADPQRFSQFTLSSCGLFLDYSKNLITSETRDLLVNLAKEVGLSDAIKSMITGELVNASEGRPALHTALRRPVGDKLSVNGVNVMPEVHKVLNQITELVGRIHDGLWRGYTEKPITDVVNIGIGGSFLGPELVSEALLSYAQKGVRCHYLANIDGSEFHELSAKIRAETTLFIVSSKSFNTLETLKNAQAARAWYLAQGGSEAELHRHFIAVSSNNAAAVAFGIREENIFPMWDWVGGRYSLWSAIGLPIALAIGMSNFKELLSGAYTMDQHFQSAPFEQNMPVLLALLGVWYGNFWGAQSHAILPYDHYLRNITKHLQQLDMESNGKSVRQDGTPVATDTGPVIWGGVGCNGQHAYHQLLHQGTQLIPADFIVPIVSFNPVADHHQWLYANCLSQSQALMLGKTRAEAESELREKGLSEAEIAKLAPHKVIPGNRPSNTLVVERISPRRLGALVALYEHKVFVQSVVWGINAFDQWGVELGKELGKGVYNRLVGSDETLADDASTQGLINYFRGRHRG

SEQ ID NO: 8501 - protein, 118 aa, Zea mays
NGSACCVKKIEAIIKPFKLDEVKEALHEVGVSGITVTEAKGFGRQKGHTELYRGAEYVVDFLPKVKLEVVVEDSLAERVVEAIAAAAQTGRIGDGKIFVIPVETALRIRTGERDEDAI

SEQ ID NO: 8502 - protein, 273 aa, Panax ginseng
PYYVAPEVLLKHYGPEADVWTAGVILYILLGGVPPFWAETQQGIFDAVLKGHIDFESDPWPLISDSAKDLIRKMLCSRPSDRLTAHEVLCHPWICENGVAPDRALDPAVLSRLKQFSAMNKLKKMALRVIAESLSEEEIAGLKEMFKAMDTDNSGAITFDELKAGLRKYGSTLKDTEIRDLMDAADVDNSGTIDYGEFVAATIHLNKLEREEHLMAAFQYFDKDGSGYITVDELQQACAEHNMTDVFLEDIIREVDQDNDGRIDYGEFVAMMK

SEQ ID NO: 8503 - protein, 310 aa, Dehalococcoides sp. BAV1
MIATVTLNPCLDKHIDVHGLVLYETNRWHRMSKYAGGKGIDVSRAVYEMGFDTIACGLLGGEEGREIETLLTEQGLKYHFTPISQPTRSCFIIYDTKTRRQTNLNAPGPRIAPPELKMFYEDLLRESAASSLIVMSGSVPPGVPSSVYFTLISHARKLGKQTILDTAGKYLREGLKAKPCLVKPNIREAEELLGRKLETEAEIILAAKEIVRMGAGIAVISMGKKGLIACDGKQVIKASSAYVRVKSTVGAGDSTVAGFAISLRRGDSLEEACRLGVAMGTAAVMTPGTELCHREDVQYWLPRIKIRRLA

SEQ ID NO: 8504 - protein, 338 aa, Methanosarcina barkeri str. fusaro
MRLAVIEGDGIGREIIPAAVKVLDAFGLEFEKVPLELGYTRWERTGTAISNNDLETIKGCDAVLFGAITTVPDPNYKSVLLTIRKELDLYANVRPVKPLPGITGVTGRNDFDFIIVRENTEGLYSGIEEIGPELSWTKRVVTRKGSERIAEYACKLAKKRKNKLTIVHKSNVLKSDKLFLDVCRQTASANGVEYEDMLVDSMAYNLIMRPERYDIVVTTNLFGDILSDMCAALVGSLGLVPSANIGEKYAFFEPVHGSAPDIAGKGIANPLAAILCVKMLLEWMGEPRSQIIDEAIAYVLQKKIITPDLGGTASTMEVGNAVAEYVLSNIQDRRSPPW

SEQ ID NO: 8505 - protein, 110 aa, uncultured prokaryote
WTMVAGGGASVVYADTIADFAGIDDLANYGEYSGGPTTGETKFYAETLLDLMTREKDAQGREKILIIGGAIANFTDVAKTFTGIIQAFENYAYKMKEIGVKIYVRRGGPN

SEQ ID NO: 8506 - protein, 110 aa, uncultured prokaryote
WTMVAGGGASVVYADTIADMAGIDDLANYGEYSGGPTTGETKFYAETLLDLMTREPDPQGRGKVMIIGGAIANFTDVAKTFTGIIQAFEVYADKMKAVDLKIYVRRGGPN

SEQ ID NO: 8507 - protein, 641 aa, Rhodospirillum rubrum ATCC 11170
MCGLVGIYHPTASRPVDRALVEAMNQRQFHRGPDDGGVFIGPGIGLGHRRLSIVDLGGGRQPMTNDGGGVVLVYNGELYNNAELVAELKAAGHVFRTASDTETVIHAWEEWGEDSVRHLRGMFAYALWDDRSQTLFLARDRLGIKPLHYTCLADGRVMFGSELKSLTGVEDIPKVVDPLAIEDFLAYGYVPDPRSIFKDILKLEAGHTLTFRRGEAPGRPHCYWDVSFTTPSRPAKTDDLCAEVIDRLDEAVRCHLVADVPVGAFLSGGVDSSAMVALMAGATDRPVETCSIAFSEARFDESAYAKTVAERYGTHHRVHTLPAQALSEVGPLTAIYDEPFADSSALPTLKVCQAARETVTVALSGDGGDELFAGYRRYRFHTAEEAVRRILPQAARGPLFGALGRVYPKLDWAPQVLRAKSTFQALGRDRVEGYFNAVSVIPDGLRRGLYSKTMRAELAGYGASEVLRRHMTRAPADHPLSIAQYVDLKTWLPGDILTKVDRASMATSLEVRVPMLDHRFVEWTAGLSPDLKLSGGTGKYLLKRALRPLLPDEVLYRRKMGFSIPLTDWLRGPWSGRTRALAGRSALVTSGLFDGAAVAKLVEQHLGGNWDHGAALYALIVLDDFLTAHVGAACLPARMSA

SEQ ID NO: 8508 - protein, 506 aa, Brucella melitensis 16M
MVMSTIVKPQPLTGLEVREFSMLIDGKWVGSDSGKSIERVAPGHGVTVSRYPAGNKANVERAVSAARKAFDDGRWSSKTASQRSLVLLKAADLIEARAEELAYLDAIEAGKPISQVRGEISGSVDIWRYAAALARDLHGESYNTLGDGTLGVVLREAIGVVSIITPWNFPFLIVGQKLPFALAAGCTAVVKPSELTSGSTLLLGEILAEAGVPDGVVNIVTGTGADVGQHMSTHPHVDMVSFTGSTGVGKLTMANAAQTLKKVSLELGGKNPQILFPDADMDAFIDAAVFGAWFNAGECCNAGSRLIVHRSVVDAIVGRVADLSKKVIVGDPLDASTQVGAIITPQHLTKVGAYVDQARKAGAAIAHGGEVLDLGLGQYMGPTILAGVKADMAVAREEVFGPVLSVLSFDTVEEAISIANAVDYGLSAGVWSRDFDTCMTIGRKVRAGTVWMNTFMDGTPELPFGGYRQSGLGRELGRHAVEDYTETKTLNMHIGARTGWWMPQAK

SEQ ID NO: 8509 - protein, 411 aa, Bacillus halodurans C-125
MKIIIQKFGGTSVKTAEVREMAAKHVEKAVEGGYKVVVVVSAMGRSGDPYATDTLLQLVDTKTIAKREQDLLVSCGEIISSVVFTELLLKKGIQATAMTGAQAGFRTNEEFTNAKIVDMKVDRLKKTLVHQDVVVVAGFQGQSPTGETTTLGRGGSDTSATALGAALDAEWVDIFTDVEGIMTADPRIVSEARPLDTMTYNEVCNMAYQGAKVIHPRAVEIAMQAKIPIHIRSTYSDGKGTLVTSMLTEAGARDVQDRIITGIAHMSGVTQIKVHAKDGEFDLQEKVFRAMAAEKISVDFININLTGVVYTVMDEVADRAIEVLRELGFDPEVKRHCAKVSAVGAGMTGVPGVTAKIVAALSQENIRILQSADSHTTIWVLVSEDDLTKAVNALHRMFHLEQSEQTKQKQV

SEQ ID NO: 8510 - protein, 324 aa, Sulfolobus solfataricus P2
MRQITFTEAINEALRQEMERDPSVILIGEDIGVYGGAFGVTKGLIEKFGSDRVIDTPISEAGFIGAAVGAALAGLRPVVELMFVDFFGVAMDQIYNQMAKLRYMSGGQLKVPLTLRAPIGAGISAAAQHSQTLYSIFAHVPGLKVVVPSTPHDAKGLLISSIRDDNPVVFLEHKVLYGIKGEVPEEEYTIPLGKAEIRREGDDVTVIGIARTVWHSLEAAEQLSKESISVEVIDVRSIVPFDKETVIKSVKKTGRVVIVDEDYDRCGFASWVSSIIADEAFEYLDAPIKRITTPNVPIPFSPPLEQYILPDSKKIVNTVKSILG

SEQ ID NO: 8511 - protein, 318 aa, Musa acuminata
MDSFPVIDMEKLLGRERGAAMEILRDACEKWGFFEILNHGISHDLMDEVEKVNKEQYNKCREQKFNEFANKALENADSEIDHLDWESTFFLRHLPVSNISEIPDLDDQYRKAMKEFAAAIEKLAERLLDLLGENLELEKGYLKKAFSNGSKGPTFGTKVSSYPPCPRPDLVKGLRAHADAGGIILLFQDDQVSGLQFLKDGEWLDVPPMRHAIVVNLGDQLEVITNGKYKSVVHRVVAQTDGNRMSIASFYNPGSDAVIFPAPALVEKEAEEKKEVYPRFVFEDYMKLYVGHKFQAKEPRFEAMKAMEAVATHPIATS

SEQ ID NO: 8512 - protein, 350 aa, Trifolium pratense
MASSSIFNPPSSTTALLLRRTRHPIHVGPTSLRFLTSQSAPPSSHLVSFAASATEASVAKVIDGKLVAKQIRDEIAAEVSRMKEAVGVIPGLAVILVGDRKDSATYVRNKKKACESVGINSLEVNLPADTTEEQVLNYISGYNDDPSVHGILVQLPLPSHMNEQNVLNAVRIEKDVDGFHPLNIGRLAMRGREPLFVPCTPKGCIELLHRYGISIKGKRAVVIGRSNIVGMPAALLLQREDATVSVVHSRTSNPEEITRQADIIIAAVGQPNMVRGSWIKPDAVIIDVGINPVDDPSSSRGYKLVGDVCYEEAIKVASAITPVPGGVGPMTIAMLLQNTLTSAKRINSFQ

SEQ ID NO: 8513 - protein, 293 aa, Schizosaccharomyces pombe
MDSADIRSAKAALEKAIQGKNIETIINIMTRLKNEVVATEELLKETRLGLVVGKLRSHPNEKVGEQAREIVKKWKADVSKGRPLKTTTTTSSTPSKHADVGSQAQKQVQKQSSSGQRTFKSDNVNVNVTDDKIRNNCIGLMYNALVIDSDESSSLIIAKAKEIDAQVLARAAGKTGSEYRNRMRSLYMNLKDKNNPKLRASVLRNEITPQRLSTMTSAELASEDRRKEDAKLEQENLFHAQGAKPQKAVTDLFTCGKCKQKKVSYYQMQTRSADEPMTTFCECTVCGNRWKFS

SEQ ID NO: 8514 - protein, 365 aa, Xanthomonas axonopodis pv. citri str. 306
MLRQPSDAEAAHCLGMTPDIDPDKRYDVAIVGAGPAGLATAVYAASEGLSVLVLDQRAIGGQAGASARIENYLGFPTGISGQALAGRAYNQALKFGAELAIPIEAAMLECGRDDGALKLDLADGKQLLASTVVIASGARYRRPEIEGLDRFEGHGVSYWASPVEARLCEGGVVALVGGGNSAGQAVAFLAPRVKELHLIIRGDGLESSMSQYLIERIAALPNVQLHTGTEVAALEGDPERGLQAAVLRTRKDGATARVELRHLFLFVGADPNTGWLQDCVDTDKRGFVMTGTARGDGVPACLPLETNRPGVFAIGDVRAGSVKRVAAAVGEGAAVVAQIHQYLAHQANPVPVSELASATQESTSA

SEQ ID NO: 8515 - protein, 404 aa, Sinorhizobium meliloti
MAKKKVAMLTAGGLAPCLSSAVGGLIERYTDIAPDYELVAYRSGYQGLLLADRIEITPAMREKAHVLHRHGGSPIGNSRVKLTNTADCVKRGLVKEGENPLRVAAERLASDGISILHTIGGDDTNTTAADLAAYLGANGYDLTVVGLPKTVDNDVVPIRQTLGAWTAAEYGARFFDHVSNEQSAAPRTLVVHEVMGRHCGWLTAATARAYIHLAGNKEYVDGFMMNAQLKNIDGLYLPEMAFDLEAEAARLREVMDRAGFVTLFVSEGACLDAIVAEREAAGETVKRDAFGHVKIDTINVGNWFSKQFAALLGAERSMVQKSGYYARSAPANVDDLRLIQSMVDLAVESALNKVSGVTGHDEDQGGRLRTIEFPRIKGGKHFDTSAKWFGEVMDVVGQKWQTAD

SEQ ID NO: 8516 - protein, 185 aa, Lycopersicon esculentum
MASESKDSPSNNPGLHATPDEATKGYFLQQTMFRIKDPKVSLEFYSKVLGMSLLKRLDFPEMKFSLYFMGYEDTASAPSDPVERTAWTFSQKSTLELTHNWGTESDPNFTGYHNGNSEPRGFGHIGVTVDDVYKACERFESLGVEFVKKPLDGKMKGIAFIKDPDGYWIEIFDTKIIKDAAGSAS

SEQ ID NO: 8517 - protein, 413 aa, Bacillus halodurans C-125
MINTMTLDNGVRIITEKMSTVRSVSIGIWVGTGSRYESAEENGISHFLEHMFFKGTNTRSAQEIAEFFDSIGGQVNAFTSKEYTCYYAKVLDDHAGQAIDTLSDMFFHSTFQKEELEKERKVVFEEIKMVDDTPDDIVHDLLSSATYGKHSLGYPILGTVETLNSFNEGMLRHYMDRFYTGDYVVISVAGNVHDELIDKIKETFSQVKPTTYNYQGEKPMFLPNRIVRKKETEQAHLCLGYPGLPIGDKDVYALVLLNNVLGGSMSSRLFQDIREKRGLCYSVFSYHSSFRDSGMLTIYAGTGHDQLDDLVYSIQETTSALAEKGLTEKELENGKEQLKGSLMLSLESTNSRMSRNGKNELLLKKHRSLDEMIEQINAVQKQDVSRLAKILLSASPSISLINANGELPKALIH

SEQ ID NO: 8518 - protein, 451 aa, Haemophilus ducreyi 35000HP
MSHFSVAKFGGTSVADFNAMNACANIVVKDNHTRVVVLSASAGITNYLVELANGCAPLRRVEILQNVRSVQYNIIQQLQQPEAISAEIDRLLQHISVLAESASVTTSATLTDELIAHGELMSSKIFTQLLIEREIPAIWVDVRDVIATNSHHGKATPDDKKTQQQADAIVKPLLEANKIIITQGFIARDQQGNTTTLGRGGSDYSAALLAEVLSAKDVLIWTDVPGIYTTDPRIVPNAQRIATIAFNEAAEMATFGAKVLHPATLLPAVRSNIPVYVGSSKAPEQGGTWVTRDPTCRPIFRAIALRRNQTLVTLSSLAMLHAQEFLASVFSILAKYQVSVDIITTSEVSITLTLDKTDSTASTAQILSDALVHELSQFCHIKIENDLSLLAIIGNDLHLQQGIAKELFQTIEPFNIRLINYGASTNNIYMLVKNSDADHILLALHYDLFES

SEQ ID NO: 8519 - protein, 69 aa, Zea mays
MADWGPVLIGLVLFILLSPGLLFQIPGKGRIIEFGNFQTSGLSILIHAVIYFALLAIFLLAVGVHIYLG

SEQ ID NO: 8520 - protein, 356 aa, Chlamydophila caviae GPIC
MFQDRVARAQAALADYGIEGFIVERGEDLAYFLGDKVTTGTLLIGKDEVVFFVYRMDKELYADLQGPSLVFCDRNIAEFLLPYLKTTAYQTLGFDSLHTSYQRYQERENASCSWVPITLFTEKLRSIKSADEIEKMRQAATLGSEGYDYVLSVLQEGITEQEVVRLLRVFWAKAGAEGPSFSPIVAFGHHAAFPHAVPTDRELRKGDIVLIDIGVLYQGYCSDMSRTVAWGRPDTRLIESYPAVVKAQQAGMKLCRAGALCLDIHNEAARVLREYGLEEYFCHGVGHGVGRNIHEYPQLSPKSDTATLETGMTVTVEPGVYFPGIGGIRIEDTVLIDGNKNFSLTSRPVSTELVFL

SEQ ID NO: 8521 - protein, 411 aa, Pseudomonas fluorescens
MIKSIVIIGAGLAGATATRYLRAQGYQGKIHLVGEELHVAYDRPSLSKDTLSGKVVEPPAILDPCWYASADIDLHLGVRVTGIDVVNHQVLFESGDILAYDRLLLATGARARRMAITGSELAGIHTLRDRADSQALRQALEPGQSLVIVGGGLIGCEVATTAINAGAHVTVLEAGDELLLRVLGRSTGAWCRNELERLGVRVELNAQAAHFEGEGHVHAVVCADGRRIAAGTVLVSIGAEPADELARAAGIACERGVVVDATGASSCPAVFAAGDVAAWPLRSGELRSLETYLNSHMQAETAAAAMLGKSIPALQVPTSWTEIAGHRIQMVGDIEGPGEVVLRGNVENGQPLVQFRVLDGRVEAATAINAPEDFPVATRLVADHIPVSATKLQDASSNLRDFMKAKAERCE

SEQ ID NO: 8522 - protein, 143 aa, Brassica napus
  misc_feature (135)..(135): Xaa can be any naturally occurring amino acid
GNAASFETSEILRKTGVMYRHLVCKRNMTSIKDRGVHQRNTALEHIELHKLDGIVYFADDDNVYSLELFQSLREIRRFGTWPVAMLAPSKNKAILEGPVCNGSQVIGWHTNEKSKRLRRFHVDMSGFAFNSTILXDPKRWKRS

SEQ ID NO: 8523 - protein, 522 aa, Sulfolobus tokodaii str. 7
MFTKSVEVLDTTLRDGSQSANVSFTLNDKIRVALALDELGVDYIEAGWPGSNPKDEEFFKEIKKYSLAHARIAAFGSTRRKEFNAKEDPNLNAIIKSDVDVAVLFGKSWLLHVTDVLRIKPEDNLEIVYDSISYLKSHGLKVIFDAEHFYQGFKDNREYALKVLKTAEEAKVDVIALADTNGGTLPHEVYEITKVVVGEVRTKIGLHMHNDSGCAVANSLMGILAGARHVQGTINGIGERTGNADLIQIIPNLALKMGFNVLKGKESLKKLREVSRLVYELAGLHPNPYQPYVGDFAFTHKAGVHADAVMKVSRAYEHIDPSLVGNTRRFVISELSGTSNLVTYLENLGLKVDKKDERLKNALKKIKELENKGYSFDLAPSSAILVALKELGIYEKKINVEYWKVINESGNLSIAVVKVNGQLEVSEGVGPVNAVDLALRKALQKVYPEISNVKLTDYRVILPGEIKNTESVVRVTIEFTDGNVTWKTVGVSSSVIEASILALIDGLDYYLQYKKLKTLKNN

SEQ ID NO: 8524 - protein, 353 aa, Odontella sinensis
MVTQDLKKFSTPVFPFTAIVGQEEMKLALQLNVIDPKIGGVMIMGDRGTGKSTTIRAIADLLPEIEVVKDDPFNSHKSDLDLMGNEIKLAIQNGESLETELIKIPMVDLPLGATEDRVCGTIDIEKALTEGVKAFEPGLLAKANRGILYVDEVNLLDDHLVDILLDSAASGWNTVEREGISIRHPARFVLVGSGNPEEGELRPQLLDRFGMHAEIRTVKDPILRVKVVEERTSFDQTPMVWIENYEKQQQELRDRIVLAQKVLPTVELDYDLRVKISEVCSQLDVDGLRGDIVTNRAAKAHAAYHGRDKVTVEDIAKIITLCLRHRLRKDPLETIDSGNKVSKVFNEIFEIEE

SEQ ID NO: 8525 - protein, 355 aa, Cryphonectria parasitica
MSRSQAPNPAGSRKISFNVSEQYDIKDVVGEGAYCVVCSAIHKPSGQKVAIKKITPFDHSMFCLRTLREMKLLRYFNHENIISILDIQRPRNYESFNEVYLIQELMETDMHRVIRTQDLSDDHCQYFIYQTLRALKAMHSANVLHRDLKPSNLLLNANCDLKVCDFGLARSAASQEDKSGFMTEYVATRWYRAPEIMLTFKEYTKAIDVWSVGCILAEMLSGKPLFPGKDYHHQLTLILDVLGTPTMEDYYGIKSRRAREYIRSLPFKKKVPFKTLFPKTSELALDLLEKLLAFNPVKRITVEEALKHPYLEPYHDPDDEPTAPPIPEEFFDFDKHKENLSKEQLKQLIYQEIMR

SEQ ID NO: 8526 - protein, 396 aa, Salmonella typhimurium
MLDAQTIATVKATIPLLVETGPKLTAHFYDRMFTHNPELKEIFNMSNQRNGDQREALFNAIAAYASNIENLPALLPAVEKIAQKHTSFQIKPEQYNIVGTHLLATLDEMFNPGQEVLDAWGKAYGVLANVFIHREAEIYHENASKDGGWEGTRPFRIVAKTPRSALITSFEFEPVDGGTVAEYRPGQYLGVWLKPEGFAHQVFRQYSLTRKPDGKGYRIAVKREDGGQVSNWLHHHASVGDVVHLAAPAGDFFMNVAADTPVSLISAGVGQTPMLAMLDTLAKEQHTAQVNWFHAAENGDVHAFADEVSELGRTLPRFTAHTWYREPTEADRAQRLFDSEGLMDLSKLEAAISDPAMQFYLCGPVGFMQFAAKQLVSLGVNNENIHYECFGPHKVL

SEQ ID NO: 8527 - protein, 339 aa, Glycine max
MGVDYYKILQVDRSAKDEDLKKAYRRLAMKWHPDKNPNNKKEAEAKFKQISEAYDVLSDPQKRGIYDQYGEEGLNGVPPGAGGFPGGGDGGPTSFRFNPRSADDIFSEFFGFSRPFGGMGDMGGRAGGSGFSRGGPFGEDIFAQFRSAAGESCGHMQRKGAAIERQLPCSLEDLYKGTTKKMKISRDVSDASGRPSTVEEILTIEIKPGWKKGTKITFPEKGNEQRGVIPSDLVFIIDEKPHSLFKRDGNDLVVTQKISLVEALTGYTVQLTTLDGRNLTFPINSTISPTYEEVVKGEGMPIPKEPSKKGNLRIKFNIKFPSRLTSEQKSGIKRLLTSP

SEQ ID NO: 8528 - protein, 217 aa, Yersinia pestis biovar Medievalis str. 91001
MNQTLLSDFGTPVERVERAIDALRNGRGVMVLDDESRENEGDMVFAAEAMTLEQMALTIRHGSGIVCLCITDERRQQLDLPMMVTHNSSQFQTAFTVTIEAAEGVTTGVSAADRLTTIRKAIADNAKPADLNRPGHVFPLRGQPGGVLSRRGHTEASIDLATLAGYKPAGVLCELTNDDGSMAHAPEVIAFAKLHDMPVVTIDDLAAYLQSRAKKAS

SEQ ID NO: 8529 - protein, 526 aa, Candida albicans SC5314
MSSTTFNDIIDSVLPYLTKWYTILIGAGLIFVLSTNLKNAYYSYKLGCKNPVHLKRAGWTGIPALIDAIKAKNSGKLAEFGGDTFDELNSKNFYLNVAGVLKIIFTIEPENIKAVLATQFNDFSLGTRHAHFYPLLGDGIFTLDGEGWKHSRAMLRPQFAREQIAHVKSLEPHIQILAKQIKLNKGETFDLQELFFRFTVDTATEFLFGESVHSLYDDKLGIPPPNDIPGRDNFATAFITSQHYLATRSYSQTFYWLTNNKEFRDCNAKVHHLAKYFVDKALNSTEKEIEEKSQGGYVFLYELVKQTKNPKVLQDQLLNIMVAGRDTTAGLLSFAMFELARNPKVWNKLREEIEANFGVGEEARVEDITFENLKKCEYLKAILNETLRLYPSVPINFRTSTKDTTLPTGGGPNGTSPIFVPKGSTVAYTVFKTHRLEEYYGKDSHDFRPDRWFEPSTKKLGWAYLPFNGGPRICLGQQFALTEASYVISRLAQLFPVLESRDEQYPPNKCIHLTMNHDEGVFVSMN

SEQ ID NO: 8530 - protein, 371 aa, Glycine max
MEVSITDEIAGTMELNPDRLGELKAFDDTKAGVKGLVDEGVAKIPRLFHHPPDEFVMASKLGNTEYTIPVIDLAEVGKDPSSRQEIIGRIREASERWGFFQVVNHGIPVTVLEDLKDGVQRFHEQDIEEKKELYTRDHMKPLVYNSNFDLYSSPALNWRDSFMCYLAPNPPKPEDLPVVCRDILLEYGTYVMKLGIALFELLSEALGLHPDHLKDLGCAEGLISLCHYYPACPEPDLTLGTTKHSDNCFLTVLLQDHIGGLQVLYQNMWIDITPEPGALVVNIGDLLQLITNDRFKSVEHRVQANLIGPRISVACFFSEGLKSSPKPYGPIKELLTEDNPPKYRETTVAEYVRYFEAKGLDGTSALQHFKI

SEQ ID NO: 8531 - protein, 423 aa, Streptomyces sp. WP 4669
MSAKRVVITGVGVTAPGGVGTKNFWNLLSEGRTATRGITFFDPSSFRSRVAAEIDFDPEEHGLGPQEIRRMDRAAQLAVVTAREALADSGLDLSGADPHRVGVTIGSAVGATMGLDQEYRVVSDGGRLELVDHAYAVPHLYNYLVPSSFAAEVAWAVGAEGPATVVSTGCTSGLDSVGHAAELIREGSACAVVAGATDAPISPITLACFDAIKATTPRNDDPEHASRPFDGTRNGFVLGEGSAVFVLEELEGALRRGAHIYAEIAGYASRCNAFHMTGLRPDGVEMAEAITVALDEARMNPEAVDYVNAHGSGTKQNDRHETAAFKKSLGEHAYRTPVSSIKSMVGHSLGAIGSIEIAASVLAMEHGVVPPTANLHTPDPECDLDYVPLTAREHRTDAVLTVGSGFGGFQSAMVLARPERSAA

SEQ ID NO: 8532 - protein, 413 aa, Pyrococcus abyssi GE5
MVFDKLLEQAGINLDLDGKDMMDSEMLGDVSDLIKIAVIGVGGSGNNTITRLYDLGVQGADLIAMNTDAQHLHYVKAHKKLLLGRSITHGKGSGGDPRVGYRAAEASASEIAEVVKGYDLIFLTAGMGNGTGTGATPVIARIIKETARNNGLPQEPLVISVVTFPFKMEGRVRIEKAKAGIEMLLEYSDTVIIIQNDKLKELVPKLPIQIAFRFADEIIARMVKGIVETIKLPSMVNIDYADIYSVMKGGGPALIGIGESDSNNRAVDAVMEALNNKMLDVEFGSGDKALVHFTVGPDVSLEEITKAMEIVYERLGEKSEIKWGAMIEEDMGKTVRAMVIMTGVKSPQILGNIEPNALTYSSSSIVVPRSKRLTESKVDEIFDSIDPRTSKLKKMKDNSRVNKIFRDLGFYEL

SEQ ID NO: 8533 - protein, 1014 aa, Polaromonas sp. JS666
MGRPCAAHVRLSVFYRNKHMLMPSAKPLGELENPSEFIPRHIGIDEADEVHMLSVVGSASRRDLIDGIVPRSIARTSTMAIPAPVTEAAALKQLKAIAAKNQVFKNFIGQGYYGTYTPGVILRNILENPAWYTAYTPYQAEISQGRMEALINFQTMVCDLTGMPIANASMLDEATAAAEAMTLARRSVKSKSNVFIVAGDCHPQTIEVIQTRARPLGIEVKVSTAVTTLPQLMAEGNYFGVLAQYPATTGSIHDLRPLAGQAHVDGAALCVAADLLALTLLTPPGEWDADIVLGNTQRFGMPMGNGGPHAAYLACRDEFKRSLPGRLVGVSVDVHGNPTYRLALQTREQHIRREKATSNICTAQVLPAVIASMYAVYHGPQGLRRIAERVAAYTAIFVRGLQELGYEITDLGAFDSVTVKTGDATNLIAERARQSGANLRCRLNNHLGVSLDETTSRKDIELLWSFFAQPGQTVPVVSAFEEGIESLIPADLRRTSAFLTHPVFNTHHSETGMLRYIRMLSDKDLALDRSMIPLGSCTMKLNATSEMIPITWPEFANIHPFAPQEQLQGYAELDKQLRDWLCQATGYKGISLQPNAGSQGEYAGLLVIKAFHEAHGQGHRNICLIPSSAHGTNPASAQMAGMTVVVTACDAQGNVDMEDLKAKCEKHSANLACMMITYPSTHGVFETHVQDLCQLVHSHGGRVYVDGANMNALVGVAAPGEFGGDVSHLNLHKTFCIPHGGGGPGVGPVCVVADLVPYLPGHATAGYAGGGRAFGEGTSFSAGPPQGKEAPSGGSALHEVKSVGAISAAPLGNAAVLPISWMYCRMMGAEGLKQATEIAILSANYISSRLKDHYPTLYASENGHVAHECILDLRPLKETSGVTAEDVAKRLIDYGFHAPTLSFPVAGTLMVEPTESETLDELDRFIDAMIAIRQEIRRIEKGEWPQDDNPLKAAPHTAASLLKGEWMHAYTRDVGAAILSKTQHAKYWPPVGRVDNVYGDRNLFCSCVPVSDYA

SEQ ID NO: 8534 - protein, 110 aa, uncultured prokaryote
WTMVAGGGASVVYADTIADMAGIEDLANYGEYSGGPTTGETKFYAETLFDLMTREKDAEGRGKVLIIGGAIANFTDVAKTFTGIIQAFEEYQEKLKEVGVKIYVRRGGPN

SEQ ID NO: 8535 - protein, 109 aa, uncultured prokaryote
WTMVAGGGASVVYSDTVADLGAVKELANYGEYSGNPTRAETREYVKTVFDLMTRSRHPQGDKILIIGGAIANFTDVAKTFEGIIDAMKEYADKLKEVGVKIYVRRGGPT

SEQ ID NO: 8536 - protein, 226 aa, Oryza sativa (japonica cultivar-group)
MDSEHWISRLAAAKRFYAAQLGHADRAGMEEVDMDEEVRPEFACPYCYEDHDVVSLCAHLEEEHPFEPHAAPCPICSDKIAKDMLNHITVQHGYLFKNRRRLRRFVIPGSQALSLLSRDLREAHLQVLLGGGGHRSNNSSNTTNISADPLLSSFGLSFPTSDTEETSKPPISIPDDASVIKETPAQPWDSSIDSSLTREEREQKRKQASVRATFVQDLLLTTLFGD

SEQ ID NO: 8537 - protein, 111 aa, uncultured prokaryote
WTMVAGGGASVVYADTIADFAGIEDLANYGEYSGGPTTGETRFYAETILDLMTREKDPKGRDKILIIGGAIANFTDVAKTFTGIIQAFEEYADKMKEVGVRVYVRRGGPNY

SEQ ID NO: 8538 - protein, 146 aa, Rhodospirillum rubrum ATCC 11170
MRFLHTMVRVADLDASLDFYCAKLGLREISRQDNEKGRFTLVFLAAPADEETARETKAPLVELTYNWDPEVYTGGRNFGHLAYKVDDIYATCQKLMDAGVTINRPPRDGNMAFIRSPDGISIELLQEGAPLAPAEPWASMANTGSW

SEQ ID NO: 8539 - protein, 610 aa, Photobacterium sp. SKA34
MSTPLETPQLSQLNVFPVKSIAGISQSKVWVEKQGISFDRRFMVATLSGDMITARKSPKMVKVKAALIADGIVLSYEDKACLVLKYAQFDMAEASSTVWGDTFIAYTTTEQANSWFSDVLGQPVQLLFTGEQSNRLRPKISQNVSFADGYPLLVISEASLQALNERSSEHHTMDQFRTNLVVSNTEAFAEDGWKRIRIGEVEFEAVKPCARCILTTVDPKSATFSESKEPLVTMAKFRADEKGNVYFGQNLVARNEGIISVGDTIEILETKPKEIYADNSEQKLQLTCVEREDIAQDFTTFWLESHQENQALPTYLPGQHLPIQLEVNGEYISRRYTLSSSPSRPGRYAISVKRVDDGRISNWLHEHFQVGDTLVSESPSGDFHLGVHTDKLLLLSGGSGVTPMMSMLRYLSDHDLVRDVVFYHQCRTEADIPYLEELRAIEEKHPSLDLRIVLTQPKRDWQGESGRLSIGHLAMMSDLDKRQVFVCGPDEFMSSAKKLLLNMGMAPSRYHQEAFGPIRHTLEEKKTVELSIDGQLFQGNNQATLLEQAETAGINMDYSCRAGFCGACKVTVKSGEVEQPEVPALSAKERAEGKVLACCCVPRSDLEIIK

SEQ ID NO: 8540 - protein, 881 aa, Mycobacterium sp. KMS
MTSTESRIHQVALSFEDGVTRFISCRDDQTVADASYRQRINIPLDCRDGACGTCKALCESGTYDGGTYIDDALPADEAAAGYVLPCSMRPRSDLVLQIASSSKVAKTAAATFEGTLVELHRLSPTTVAFGVEIPNREDLAFLPGQYVNVAVPGTDVTRSYSFSNAPHEQRLTFLVKLTPGGAMSTYLAERAAVGDAITFTGPHGSFFLRETERPVLLLAGGTGLAPVLSMLRTLRAAGSPRKAHLVYGVSSDADLVELDTLRAVAADLPGFTWDHCVADPASTAANKGPERAYVTSLIRPEHLYDGDVAVYLCGPPPMVESVRKHVAAEGIEPFGFYYEKFALAAPAAATSAAAAPASVAPAPREELRFAPDARSVAGRTVFRDASIGPAPGNVTAADDGDTARRIAGQLIGVSGGGTAPATPLDDDTALIGGADRAVAGQHLFPAQTAPAPPEVAPDGYQIGEEHPELHESDAIFQAREALELGALELTIGRLSPSQLSGYRLLAESTLAYVDGDRFVDAAQYTETNAAFHDHLFTLTGNDHLLQAYQALGVKARMSDVLRNATWCHPLCAQDHVDIVAAFEAGDRVAARSLIAAHAERSKQTMRRAMADARAARRPRFVTPGRFAGKVVLVTGAAQGIGEQTARRISAEGGRLVLADRSELVKELADELAAGGPDTLPVTTDLEHPDGAESMVAQALSAFGRIDVLINNVGGAINFKPFTEFTDREIRAEVDRSLMTTLYACRAALPSMVSRGAGVIVNISSAATRGIHRIPYSAAKGGINAITASLAVEYAGDGIRVVAAAPGGTAAPPRRISRGTPDFAGETERAWFQAHVDQTVDSSLMKRYGTLDEQAAAICFLASDEASYITGSVLPVAGGDQG

SEQ ID NO: 8541 - protein, 110 aa, uncultured prokaryote
WTMVAGGGASVVYSDTVADLGYVKELANYGEYSGNPSRAETREYVKTVFDLMARSKHPKGHKILIIGGAIANFTDVAKTFDGIIDAMKEYADKLREIGIRIYVRRGGPNY

SEQ ID NO: 8542 - protein, 110 aa, uncultured prokaryote
WTMVAGGGASVVYADTVADLGAVKELANYGEYSGNPSRTETREYVKTVFDLMTRERHPQGDKILIIGGAIANFTDVAKTFDGIIDAMNEYADKLKEVGVKTYVRRGGPNY

SEQ ID NO: 8543 - protein, 406 aa, Zea mays
NLQVDHHDEENLSLLRFGALWESVYCEDSLLVFSTGRSPTLYKELRKEKPMLTPDITIMSVGTEITYGEAMVPDDGWEEYLNNKWDRNIVVAETVSFSELKLQPETEQRPHKVSFFVDKKNAQEVIKSVAERLDKCGLDAKIIYSGGQDLDILPQGAGKGQALAYLLKKLSSCGKPPNNTLVCGDSGNDAELFSIPGVHGVMVSNAQEELLQWYTENAKDNPKIIHSNERCAAGIIQAIGHFKLGPNISPRDLQFPYAKEASFKPTDAVVKFYVLYEKWRRAEVPKSDSVIKYFKNITHANGVTIHPAGLELSLHASIDALGSCYGDKQGRKYRAWVDRLFITQTGSDSWVGRFDLWESEGDVRACSLSSLALILKAESPEGFVLTHIQKTWLNGYSSGVEQAFKL

SEQ ID NO: 8544 - protein, 484 aa, Vibrio alginolyticus
MSLNNRWTVEQRYRRLEQIPQCDIEEMTLSRQQDKGFPSFHIAPKFGLLNDPNGLCYFNGEHHIFYQWTPVGPVHGMKYWYHLSTKDFIHFTDHGVGLHPDQDYDSHGVYSGGALVENNQVLLFFTGNKRDQNWNRIPTQCFATMDSDGSIEKHGVVIENEHYTEHFRDPKVWKKGDDYLMVVGAQTKTEHGSMALYQSKDLKTWQHKGPIKTKFSDLGYMWECPDFFEINGQSVMLFSPQGVSSSNPYDFKNIYSVAYIVGDQLNLESMTLENHQDILQPDYGFDFYAPQTYLDESGRRILIAWIGLPEIDTPSVTHQWAGMLSLPRELTLKDGFLVQTPLPELKSLRKEEVVFAQSHTLESTSCLIQLDLVGDGFELELSNLKGDNIVFSATEHEFMLDRRYMSHLYAEEFGGIRKAPRLDAKQTIDIYIDNSVIEIFINGGKHTMTSRFFIDDLNKVTLKGLEQARLFPLKGITGLFESAK

SEQ ID NO: 8545 - protein, 113 aa, Streptococcus thermophilus
MKKIEAIIRSDKLEDLKNTLTGSGLTKGMTVSQVLGHGTQRGFAEFVRGQRIVPTLLAKVKVEIVVKDLAVDEVVDTIRSAVATGEVGDGKIFIVPIDDVIRIRTGERGGDAI

SEQ ID NO: 8546 - protein, 284 aa, Leptospira interrogans serovar Copenhageni str. Fiocruz L1-130
MNPVLLDGKKLSEKIKEEIRSAIEERKTKNFRIPKLATILVGNNPASETYVSMKVKACHSVGMGSEMIRLREQTTTKELLDVIDKLNSDPNVDGILLQHPTPSGIDERAAFDRIALHKDVDGVTTLSFGKLSMGVETYLPCTPYGMVLLLKEYGIDVAGKNAVVVGRSPILGKPMAMLLTEMNATVTLCHSKTQNLPDIVRNADIIIGAVGKPEFIKADWISNGAILLDAGYNPGNIGDIEISKAKDRSSFYTPVPGGVGPMTIAVLLLQTLYSAKEHFTPPVK

SEQ ID NO: 8547 - protein, 141 aa, Zea mays
MAASVMLSSVTLKPAGFTVEEMSARGLPSLTRASPSSFKIVASGVKKIKTDKPFGVNGSMDLRDGVDASGRKGKGYGVYKFVDKYGANVDGYSPIYNEDEWSASGDVYKGGVTGLAIWAVTLAGILAGGALLVYNTSALAQ

SEQ ID NO: 8548 - protein, 99 aa, Glycine max
  misc_feature (13)..(13): Xaa can be any naturally occurring amino acid
SMALAFKSWWKPXFTFSISATRDRADGKMQYGFGIQSESLREASYQRADPNYVMLTQSKEHLAKGIVWKAGKRPMLKSDIDAGHFDGLPRELQPLDKIL

SEQ ID NO: 8549 - protein, 970 aa, Pisum sativum
MEEHSVGPLVPAVVKPEPSKNFSTDTTAAGTFLLVPTMSDLDKDFLCPICMQIIKDAFLTACGHSFCYMCIITHLRNKSDCPCCGHYLTNSNLFPNFLLDKLLKKTSDRQISKTASPVEHFRQAVQKGCEVTMKELDTLLLLLTEKKRKMEQEEAERNMQILLDFLHCLRKQKVDELKEVQTDLQFIKEDIGAVEKHRMDLYRARDRYSVKLRMLDDSGGRKSRHSSMDLNSSGLASSPLNLRGGLSSGSHTKKNDGKSQISSHGHGIQRRDPITGSDSQYINQSGLALVRKKRVHTQFNDLQECYLQKRRQAADKPHGQQERDTNFISREGYSCGLDDFQSVLTTFTRYSRLRVIAEIRHGDIFHSANIVSSIEFDRDDDLFATAGVSRRIKVFDFSALLKKTSDRQISKTASPVEHFRQAVQKGCEVTMKELDTLLLLLTEKKRKMEQEEAERNMQILLDFLHCLRKQKVDELKEVQTDLQFIKEDIGAVEKHRMDLYRARDRYSVKLRMLDDSGGRKSRHSSMDLNSSGLASSPLNLRGGLSSGSHTKKNDGKSQISSHGHGIQRRDPITGSDSQYINQSGLALVRKKRVHTQFNDLQECYLQKRRQAADKPHGQQERDTNFISREGYSCGLDDFQSVLTTFTRYSRLRVIAEIRHGDIFHSANIVSSIEFDRDDDLFATAGVSRRIKVFDFSAVVNEPTDAHCPVVEMTTRSKLSCLSWNKYAKNQIASSDYEGIVTVWTMTTRKSLMEYEEHEKRAWSVDFSRTDPSMLVSGSDDCKVKVWCTNQEASVLNIDMKANICCVKYNPGSGNYIAVGSADHHIHYYDLRNISRPVHVFTGHKKAVSYVKFLSNDELASASTDSTLRLWDVKQNLPVRTFRGHANEKNFVGLTVRSEYIACGSETNEVFVYHKEISKPLTWHRFGTLDMEDAEDEAGSYFISAVCWKSDRPTILTANSQGTIKVLVLAA

SEQ ID NO: 8550 - protein, 188 aa, Triticum aestivum
  misc_feature (156)..(156): Xaa can be any naturally occurring amino acid
MCGILAVLGVGDVSLAKRSRIIELSRRLRHRGPDWSGIHSFEDCYLAHQRLAIVDPTSGDQPLYNEDKTVVVTVNGEIYNHEELKAKLKPHKFQTGSDCEVIAHLYEEYGEEFVDMLDGMFSFVLLDTRDKSFIAARNAIGICPLYMGWGLDGSVXFSSEMKALSDDCKRFISFPPGPLYSSKNGGPK

SEQ ID NO: 8551 - protein, 98 aa, Triticum aestivum
  misc_feature (12)..(12): Xaa can be any naturally occurring amino acid
  misc_feature (22)..(22): Xaa can be any naturally occurring amino acid
  misc_feature (24)..(24): Xaa can be any naturally occurring amino acid
  misc_feature (27)..(28): Xaa can be any naturally occurring amino acid
  misc_feature (32)..(32): Xaa can be any naturally occurring amino acid
  misc_feature (36)..(36): Xaa can be any naturally occurring amino acid
  misc_feature (42)..(42): Xaa can be any naturally occurring amino acid
  misc_feature (46)..(46): Xaa can be any naturally occurring amino acid
  misc_feature (54)..(54): Xaa can be any naturally occurring amino acid
  misc_feature (63)..(64): Xaa can be any naturally occurring amino acid
  misc_feature (69)..(69): Xaa can be any naturally occurring amino acid
  misc_feature (73)..(73): Xaa can be any naturally occurring amino acid
  misc_feature (92)..(92): Xaa can be any naturally occurring amino acid
MASGAETCSDVXFAIAPCMSYXTXQAXXPSAXCCSXVRTLNXKASXSADRQAAXCRCLKNLAXXFNGIXMGNXANIPEKCGVSVSFPINNNXNCNNLH

SEQ ID NO: 8552 - protein, 98 aa, Glycine max
MEWKLRKPLLRSEAMAGSGSSMLYSFLLFTVILSLQEMYRGKLASSELYTILGGFVSSILFLVLLTFIGNLQETIGARTGWGAVIVAEAVALIAASTV

SEQ ID NO: 8553 - protein, 81 aa, Zea mays
MAIGNDRVTGVGEWFRDRQLFVGAALAKCRLSIVAIAGWMGSLWSALLGFPCPYPCRLLGAVLSVHGWWRVCVFAVTGFKV

SEQ ID NO: 8554 - protein, 416 aa, Nocardia farcinica IFM 10152
MTTPSTLNGNFPNVVVTSMAATTSIAGDVDATWKGLLNGESGIDVLEDSFIEEYDLPVRIGGHLKVNPDTLLSRVEIRRMAYVERLATVLGREVWKNAGSPEVDPDRLAVAIGTGLGGGDALIDSVDKLKNGGYRKISPLAVQMVMPNGPSACVGLELKARAGVVTPVSACSSGSEAIANAWRMIVMGDADVVVTGGVEGYIDSVPIAAFSMMRAMSTRNDDPKGASRPFDKDRDGFVFGEAGALMVLETEEHAKARGATIHARLLGAGITSDGYHLVAPDPEGTGAARAMTRAMQSAGLTKQDITHINAHATATPIGDTAEANAINKAVGNHPSVYAPKSALGHSIGAVGALESVLTVLSIRDGIVPPTLNLDNQDPEIDLDVVKGEARRQEIEYAINNSFGFGGHNVALAFGRA

SEQ ID NO: 8555 - protein, 382 aa, Solanum pinnatisectum
MASEAHPVVDAHSFPKTPTVCVTGAAGFIGSWLVMRLLERGYNVHATVRDPENQKKVKHLLELPKADTNLTLWKADLAVEGSFDEAIQGCQGVFHVATPMDFESKDPENEVIKPTVRGMLSIIESCAKANTVKRLVFTSSAGTLDVQEDQKLFYDETSWSDLDFIYAKKMTGWMYFVSKILAEKAAMEEAKKNNIDFISIIPPLVVGPFITPTFPPSLITALSLITGNEAHYGIIKQGQYVHLDDLCEAHIFLYEYPKAEGRFICSSHHAIIYDVAKIVRQKWPEYYVPTEFKGIDKDLPIVFFSSKKLMDMGFQFKYTLEDMYKGAIETCRQKQLLPFSTRSTADNGKDKEAIPISTENYSSGKENAPVANCTGKFTNGEI

SEQ ID NO: 8556 - protein, 322 aa, Paenibacillus macquariensis
MTIKKIAVLTSGGDSQGMNAAVRAVVRSGLFYGLEVYGIQRGYQGLLNDDIFSMDLRSVGDIIQRGGTVLQSARCKEFMTPEGQQKGADILRKRGIDGLVVIGGDGSYHGANKLSKLGINTMALPGTIDNDISYTDFTIGFDTSVSIVVDAINKLRDTMSSHERSSIVEVMGRHCGDIALYAGLASGAETIIVPEVPFDMDEIAERMKQNFAHGKRHSIVVVAEGAGNGENVAKQLVERCETLEPRVTVLGHIQRGGTPTPADRNLASRLGDFAVRMLIAGESAKACGIISNELVLTDIDKVVNSKKEFNMELYELAARLSQ

SEQ ID NO: 8557 - protein, 259 aa, Bordetella bronchiseptica RB50
MAGTIDITHEGAVSTMTINAPPLNVFSVEMLHALLEGLQALEQREQTRAIVIRGAGSRAFSAGANLNDQADFSEHDARMLRVIGREVVERIETLEKPVITAIEGWCIGGGTGIAWIGDIRIASDTAKFRAGDAYLGIIPTWSIGMVRLVHFLGRNRTLDLLLLGEDIDAAAALELGLVTRVVPAGEFNEQVAQIAARLATAAPMSVKAIKLAVRAQYRDNTDRAAQLEEEWCTRIWASEDKNEGIAAFKEKRQPRFKGR

SEQ ID NO: 8558 - protein, 557 aa, Solibacter usitatus Ellin6076
MPSKPVLLAVDDDTDVLRSVESDLRKHYARKFRIVSASSGKAALDVVARLRTRNEAIALFLVDYRMPQMNGIEFLSQAIAQSPDAKRVLLTAYADTEAALRAINEIHLNHYLLKPWNPPDQNLFPVLDDLLEDWMANYHPPFEGIRVVGPRWSPHTYELRAFLAKNSVPYRWLDADTADRDPEVKRALDSLPAGTALPVLICEDGTQLSQPTPGAVAARIGLRTHSETPFYDLVIVGGGPAGLAAAVYGASEGLRTVIIERDAPGGQAGLSSRIENYLGFPSGLSGGDLARRGVAQARRFGAEILSPQQAVGIRQEGPYRYIKLADGNELSCHALLIATGVQWRKLDVPGMAALNGAGVYYGAGPYEANSCDGEDVYVVGGANSAGQAAINFARHARRVIMLIRGQSLNATMSQYLIDEISHTPNIEVHVQSRVVEVQGKERLESISIACLGGEVQNVAASALYIFIGAEPSTEWLAGFVERDERGYLITGSDLMHNGKRPSGWTLDRDPGLLETSVPGVFAVGDVRAGSVKRVASGVGEGSIAIQFVHQYLAKVAA

SEQ ID NO: 8559 - protein, 320 aa, Borrelia burgdorferi
MLEFETIDINLTKKKNLSQKEVDFIEDVIIVGSGPAGLTAGIYSVMSNYKAAILEGPEPGGQLTTTTEVYNYPGFKNGISGRNLMLNMREQVVNLGAKTFPETVFSIKRKGNIFYLYTENYIYKSKAVIIAVGSKPKKLETLKNSGLFWNKGISVCAICDGHLFKGKRVAVIGGGNTALSESIYLSKLVDKVYLIVRKNNLRAIAMLRDSVAKLPNIEILYNSEAIEVDGKSSVSSVKIFNKKDNVVYELEVSAVFMAVGYKPNTEFLKGFLDLDEEGFIVTKDVVKTSVDGVFSCGDVSNKPYAQAITAAAEGLLHLLS

SEQ ID NO: 8560 - protein, 453 aa, Rhodopirellula baltica SH 1
MNSRSRTSTSKQPSPLLTGRRNSKDSIGSWKIHAFASLELSEPILMSIKRVGILTAGGLAPCLSSAIGALIEAYTEQAPEIEILCYRSGYKGLLLGDSFVVDAHSRKNAAILHQHGGSPIGNSRVKLTNVADCVKRGLVSEGQDPLQVAAERLQSDEVDVLHTIGGDDTNTTAADLAAYLAKHEYQLTVVGLPKTIDNDVIPIKQSLGAWTAAEEGAKFFENVVGEHNANPRMLIIHEVMGRNCGWLTAATAAKYRERLQKLNFLPEMGLSQERRDVHGVFVPEMSFDLEEEAKRLRAIMDEIDCVNIFISEGAGVDTIVKEMESRGESVPKDAFGHYKLDAVNPGKWFGKQFADMLGAEKTLVQKSGYFSRAAAANAEDIALIGRCAKKAVECAMQGIGGVVGEDEDQNNELRAIEFERIAGGKPFDINVEWFGDLLSQMGQPKGEVLETSH

SEQ ID NO: 8561 - protein, 470 aa, Arabidopsis thaliana
MASLFAIGFSKFSPQPTSDYSKLLKVFHPKPYSLKFLFLKTLNPTRFFKVRANDGTEPSDKLQQYFQNQDYDKKYGFLENIDSFTIPKGLSEETIRLISKLKKEPAWILEYRLKAYAKFLKLEEPKWSDNRYPLLDLQDMCFYSAPKKKPTLNSSDIADEADDPKLLEEFDRLDVPLTKKKKCSPKVAVDAVYNSESIAITNKEPLEKSGVIFCSISEAIRKYPDLIKKYLGRVVPSDDNYYAALNTAVFSDGSFCYIPKNTRCPMPLSSYFRMNSIENTGQFERTLIVAEEGSFVEYSEGCTAISHDKNQLHAAVVELYCAEGAEIKYSTRGLCAGDRSKISWTQVEKGFAITWKYPSVVLEGDDSVGEAENARNTSTCDSMLIGDNAAANTYPYIQVKNPSARIEHEASTSKIGEDQIFYFQQRGIDHERALAAMISGFCRDVFNKLPNEFGAEVNQLLSIKLEGSVG

SEQ ID NO: 8562 - protein, 491 aa, Bacillus thuringiensis serovar konkukian str. 97-27
MKNQDQALIFEVSKEGRIGYSLPKLDVEEVKLEDVFESDYIRVEDAELPEVSELDIMRHYTALSNRNHGVDSGFYPLGSCTMKYNPKINESVARFAGFANIHPLQDEKTVQGAMELMYDLQEHLIEITGMDTVTLQPAAGAHGEWTGLMLIRAYHEANGDFNRTKVIVPDSAHGTNPASATVAGFETITVKSNEHGLVDLEDLKRVVNEETAALMLTNPNTLGLFEENILEMAEIVHNAGGKLYYDGANLNAVLSQARPGDMGFDVVHLNLHKTFTGPHGGGGPGSGPVGVKADLIPYLPKPILEKTENGYHFNYDRPEAIGRVKPFYGNFGINVRAYTYIRSMGPDGLRAVTEYAVLNANYMMRRLAPFYDLPFDRHCKHEFVLSGRRQKKLGVRTLDIAKRLLDFGYHPPTIYFPLNVEECIMIEPTETESKETLDGFIDKMIQIAKEVEENPEVVQEAPHTTVIKRLDETMAARKPVLRYAKPAPVQV

SEQ ID NO: 8563 - protein, 109 aa, uncultured prokaryote
WTMVAGGGASVVYADTIADLAGVEDLANYGEYSGGPTTAETQFYAETIFDLMTRYEDPRGKVLIIGGAIANFTDVAKTFTGIINAFEKYADKLKAHNTKIYVRRGGPNY

SEQ ID NO: 8564 - protein, 110 aa, uncultured prokaryote
WTMVAGGGASVVYADTVADLGQVKELANYGEYSGNPSRAETREYVKTVFDLMTRSKHPAGHKILIIGGAIANFTDVAKTFDGIIDAMKEYADKLKEIGIRIYVRRGGPNY

SEQ ID NO: 8565 - protein, 447 aa, Erwinia carotovora subsp. atroseptica SCRI1043
MAQIVSLASFLDSVQQRDPHQPEFLQAVNEVLSTLWPFLEQNPHYADYSLLERLVEPERVIQFRVAWTDDKGQVQVNRAWRVQFSSAIGPYKGGMRFHPSVNLSILKFLGFEQTFKNALTTLPMGGGKGGSDFNPKGKSQGEVMRFCQALMTELYRHLGADTDVPAGDIGVGGREVGFMTGMMKKLTNNTACVFTGKGLSFGGSLIRPEATGYGLIYFTEAMLKRHGLGFEGMRVAVSGSGNVAQYAIEKAMELGARVVTVSDSNGTVVDENGFTPEKLALLEEIKNKRYGRVEDYAREAKLTYLAGKTPWEVPVDIALPCATQNELDLPAAQTLIANGVKAVAEGANMPTTIPATDAFLDAGVLFAPGKAANAGGVATSGLEMAQNAARLGWKAEKVDARLHHIMLDIHTACVQYGGEDSQTNYVRGANVAGFVKVADAMLAQGVV

SEQ ID NO: 8566 - protein, 125 aa, Thermococcus kodakarensis KOD1
MATFKLVISNPKNGVAKQVEISGPEADKLIGRRIGEEIPASELGLNLSEIFGEEIPADAKLKITGGTDKDGFPMRPDVHGPRRVKILLSRGPGFRPRERGERRKKTVHGNTISPNIVQVNMKIVF

SEQ ID NO: 8567 - protein, 129 aa, Arachis hypogaea
RPLRPGFLAKVFSIFEDLGIYVDVVATTEVSISLTLDPSKLWSRELIQEELDYVVEELEKIAVVNLLQNRSIISLIGNVQKSSLILEKAFRVLRTLGVNVQMISKGASKVNISLIVNDSEAEQCVRALH

SEQ ID NO: 8568 - protein, 110 aa, uncultured prokaryote
WTMVAGGGASVVYSDTVADLGYVKELANYGEYSGNPSRAETREYVKTVFDLMTRSKHPKGHKILIIGGAIANFTDVAKTFDGIIDAMREYADKLREIGIRIYVRRGGPNY

SEQ ID NO: 8569 - protein, 365 aa, Phaeosphaeria nodorum
MPSHNIVVLAGDGVGPEVVAEAFKILKVVEKHTDNTFNFQEHLFGGCSIDAHNNPLTDEALAAAKGADAIILGAVGGPKWGTGKVRPEQGILKLRKELGTFGNLRPCFFASDSLVDSSPLKAENVRGVNFNIIRELTGGIYFGERKEDEGDGKAMDTEPYSVEEIERVVRLAGSLASAENPPVPVWSLDKANVLATSRLWRKTFERIMKDEYPHLKSGTHLIDSAAMLMIKNPRALNGVVVTSNLFGDIISDEASVIPGSLGLLPSASLGGIPDGKTKLNGIYEPIHGSAPDIAGQGIVNPIATILSISMMFKYSLCLPELALKIDEATKITIDKGVRTGDIGGTSKTAEVGDAIAAELETLLKK

SEQ ID NO: 8570 - protein, 455 aa, Pseudomonas aeruginosa PAO1
MIRVIDCTLREGCQARQCSFDSAQSVQLAREIAALGVDMIECGHPRISADERERVRAVVAAVSTPVLAHARARREDIDAVLETGAQWVGLFASINAISLETKFKGMNREEVLELFHDAIRYARERGLRVRATVEDAARTSVSDLVSMIATARDAGADRICFADSVGILLPDETFDVLSLLRHEFPDVVFEYHVHNDRGLALGNTLAAIQAGVQWHSASCNGIGERAGITDTFQLLTLLHTKFAADRFNLKNVLAVSELVEAHSRIKRSPMHPVVGENAFVHVARLHQLAMQENQDAYSAFDPELINGRVSLQRYTPMHRQSLFLTPFEKSASELKYHRHGPGKRFVMLDRRLLDGSPFYFIARQFHDVGDGGPGHVDSHVHNCDSVFLFLGSDEDYRGLEVEVLLGGQLRRLQSPASVFIPAGVEHSYRYLGGSGTYINFVHKGDYHESLLEITQ

SEQ ID NO: 8571 - protein, 405 aa, Haemophilus ducreyi 35000HP
MKRVVITGLGIISSIGNNKEEVLASLKEGKSGIEFVPEFAEVGMRSQIAGTVKLNPAELIDRKIYRFMGDAAAYAYLAMKEAIEDSALTETQVSNDRTGLVIGAGTGSAHSQLVACDAVRGPRGIKAVGPYAVTKTMASSVSACLATPYKIRGVNYSISSACATSAHCIGHAMELIQLGKQDIVFAGGAEELSWECATEFDAMGAVSTKYNDTPTKASRAYDANRDGFVIAGGGAVVVVEELEHALARGAKIYAEIVGYGATSDGYDMVAPSGEGAERCMRQALATVNGEIEYINVHGTSTPVGDVKELAAIKNVFADKKPAISSTKSMTGHSLGAAGAHEAIYSLLMLDNNFIAPSINITTLDEQAEGLNIVTECQHTPLTTVMSNSFGFGGTNAALVFQKYKG

SEQ ID NO: 8572 - protein, 110 aa, uncultured prokaryote
WTMVAGGGASVVYADTIADFAGIDDLANYGEYSGGPTTGETKFYAETLLDLMTREKDAQGREKILIIGGAIANFTDVAKTFTGIIQAFENYADKMKEIGVKIYVRRGGPN

SEQ ID NO: 8573 - protein, 167 aa, Triticum aestivum
  misc_feature (87)..(87): Xaa can be any naturally occurring amino acid
MAARRAHAAATLALLVAALVLSAAPAPAEGAVANCGQVVSYLAPCISYAMGRVSVPGGGCCFGVRGLNAAAATPADPPATCACLKQXATGMGGIQPEFVAGIRNKSGVNIPLGHGPRNGCLQGGRDRERPEPSSNAHRGRATFIRGHPRRTIACNVPPRAVGLYRAL

SEQ ID NO: 8574 - protein, 465 aa, Lycopersicon esculentum
MGSGAIDDSSKFDDDGRPKRTGTVLTTSAHIITAVIGSGVLSLAWATAQLGWIAGPVALIAFSAITWFASILLADCYRAPDGSRSYTYMDAVRAHLGGRKVQLCGLAQYSNLFGVTIGYAITTSISMVAIKRSNCFHRKGHDAGCHESNNPFIIIFGVMQILLSQIPNFHKLSFLSIIAAAMSFAYSFIGLGLSIAKIAKDGVSANTSLTGTIVGKDVSSRDKMWNTFSALGDIAFAYAFSIVLIEIQDTLKSHPPENKSMKKATFTGISVSTIFYLLCGLLGYAAFGNKAPGNFLTGFGFYEPFWLIDFANVCIVIHLVGAYQVFCQPIFGFVEGWSRQKWPESKFITKEYMINLSHLGLFNFNFYRLVWRTLYVVFTTILAMLFPFFNDFVGFIGAASFWPLTVYFPIQMYIAQAKIPKYSFTWIWLNILSFVCLIISLLAAAGSVRGLIKSLQEFEPFQSRS

SEQ ID NO: 8575 - protein, 111 aa, uncultured prokaryote
WTMVAGGGASVVYADTIADFAGIDDLANYGEYSGGPTTGETKFYAETIFDLMTREPDPQGRGKVLIIGGAIANFTDVAKTFTGIIQAFENYQDKLKEVGTKIYVRRGGPNY

SEQ ID NO: 8576 - protein, 166 aa, Glycine max
MAQKTEKEETDFKVPETITLCVNNCGVTGNPATNNMCQKCFTASSTATTSGAGGAGIASPATRSGVSARPQKRSFPEEPSPVADPPSSDQTTPSEAKRVVNRCSGCRRKVGLTGFRCRCGELFCAEHRYSDRHDCSYDYKAARTEPIARENPLSRAAVHRQILTIK

SEQ ID NO: 8577 - protein, 137 aa, Physcomitrella patens
MRWIVGGGVQRTIASPGRGILAIDESNATCGKRLASIGLENNEVNRQAYRQLLCTTPGLGEYISGAIMFEETLYQSTSDGKKMVDCLVEGGIVPGIKVDKGLVPLAGSNEESWCQGLDGLASRTAAYYKQGARFAKW

SEQ ID NO: 8578 - protein, 315 aa, Oryza sativa (japonica cultivar-group)
MSSWLFRRSGPSGFSWASTADQVTAGLSAAGLTAIVTGASSGIGAETARVLAIRGAHVVMAVRNLAAAQPVRDAILADAPAASLDLMELDLASMDSVRAFASDFAAKGLPLNILINNAGVMATPFSLSKDGIELQFATNHVGHFLLTHLLLETMKKTSRESNVEGRIVNVSSEGHRFAYREGIRFAKINDESEYNSIGAYGQSKLANILHANELARRFKDEGVNITANSLHPGSIITNLLRHHSILDVLHRTLGKLVLKNAQQGAATTCYVALHPQVKGVSGKYFSDSNVNEASEKGNDMELAKRLWEYSIELIT

SEQ ID NO: 8579 - protein, 447 aa, Arabidopsis thaliana
MATHAALAVSRIPVTQRLQSKSAIHSFPAQCSSKRLEVAEFSGLRMSSIGGEASFFDAVAAQIIPKAVTTSTPVRGETVAKLKVAINGFGRIGRNFLRCWHGRKDSPLEVVVLNDSGGVKNASHLLKYDSMLGTFKAEVKIVDNETISVDGKLIKVVSNRDPLKLPWAELGIDIVIEGTGVFVDGPGAGKHIQAGASKVIITAPAKGADIPTYVMGVNEQDYGHDVANIISNASCTTNCLAPFAKVLDEEFGIVKGTMTTTHSYTGDQRLLDASHRDLRRARAAALNIVPTSTGAAKAVSLVLPQLKGKLNGIALRVPTPNVSVVDLVINVEKKGLTAEDVNEAFRKAANGPMKGILDVCDAPLVSVDFRCSDVSTTIDSSLTMVMGDDMVKVVAWYDNEWGYSQRVVDLAHLVASKWPGAEAVGSGDPLEDFCKTNPADEECKVYD

SEQ ID NO: 8580 - protein, 397 aa, Tropheryma whipplei str. Twist
MAKAKFERTKPHVNIGTIGHVDHGKTTLTAAISRVLSERLPSNTNVKQDFDAIDSAPEERQRGITINISHIEYETEKRHYAHVDAPGHADYIKNMITGAAQMDGAILVVAATDGAMAQTREHVLLAKQVGVPYLLVALNKADMVSDEEILELVELEVRELLSNHGFDGENVPVVRVSGLKALEGDQKWGDAVMELMKAVDESIPDPVRDRDKPFLMPIEDVFTITGRGTVVTGRAERGVLAVNSEVEIVGIRPTQKTTVTGIEMFRKQLDEAWAGENCGLLLRGTKREDVERGQVVVKPGSVTPHTKFEGKAYILSKDEGGRHNPFYSNYRPQFYFRTTDVTGVITLPEGTEMVMPGDTISITVDLIQPIAMEEGLGFAIREGGRTVGAGTVVKILE

SEQ ID NO: 8581 - protein, 436 aa, Bacteroides fragilis NCTC 9343
MDEIVQFDFPTDSPKIIKVIGVGGGGGNAVNHMYREGIHDVTFVLCNTDNQALAESPVPVKLQLGRSITQGLGAGNRPERARDAAEESIEDIKTLLNDGTKMVFITAGMGGGTGTGAAPVIARIAKEMDILTVGIVTIPFIFEGEKKIIQALDGVERIAQHVDALLVINNERLREIYSDLTFMNAFGKADDTLSIAAKSIAEIITMRGTVNLDFADVKTILKDGGVAIMSTGFGEGENRVTKAIDDALHSPLLNNNDIFNAKKVMLNVSFCPASELMMEEMNEVHEFMSKFREGVEVIWGVAMDNSLDTKVKITVLATGFGVEDVPGMDDLHEKRSQEEEERQLQLEEEKEKNKERIRKAYGESASGIGTRNLRKRRHIYLFNAEDLDNDDIIAMVEDSPTYLRDKTTLGKIKAKAALEEEIATEEAIDDSGVITF

SEQ ID NO: 8582 - protein, 593 aa, Nocardioides sp. JS614
MTTTVADQLLARLREWGVAQVFGYPGDGINGILGAFSRADDQPRFIQSRHEEMSAFQAVGYAKFSGRPGVCMATSGPGAIHLLNGLYDAKLDHVPVVAIVGQTNRTAMGGSYQQEVDLISLFKDVAGDYVQMVTVPEQLPNVLDRAIRVATARRAPTAIIVPNDVQELEYAAPQHAFKMVPSSLTPTQRPTVTPDPAALRQAADVLNSGRKVALLVGQGARGADAEIAEVVDLLGAGVAKALLGKDVLSDELPWVTGSIGLLGTRPSYELMMGCDTLLTVGSSFPYTQFMPELDQARAVQIDLDGTMIGMRYPYEVNLVGDAQATLRALIPLLEKQQDRSWHDEICANVTDWWEVMDAEAHVAADPVNPMRIFNEFSKVAPTDAIISSDSGSAANWYARHVKMRGRMRGSLSGTLATMGPAVPYAIGAKFAHPDRPAIAFEGDGAMQMNGLAELLTIARYWPEWADPRLVVAVLHNNDLNQVTWELRAMGGTPTFVESQALPDVSYADFARSCGLGATTVTDPDQLADAWQVALSSDRPHLLDVHCDPDVPPIPPHATLEQMTAMAKALIKGDTSRWGVMKEGIRTKAQELLH

SEQ ID NO: 8583 - protein, 339 aa, Hordeum vulgare subsp. vulgare
MENILHATPAHVSLPESFVFASDKVPPATKAVVSLPIIDLSCGRDEVRRSILEAGKELGFFQVVNHGVSKQVMRDMEGMCEQFFHLPAADKASLYSEERHKPNRLFSGATYDTGGERYWRDCLRLACPFPVDDSINEWPDTPKGLRDVIEKFTSQTRDVGKELLRLLCEGMGIRADYFEGDLSGGNVILNINHYPSCPNPDKALGQPPHCDRNLITLLLPGAVNGLEVSYKGDWIKVDPAPNAFVVNFGQQLEVVTNGLLRSIEHRAMTNSVLARTSVATFIMPTQECLIGPAKEFLSEENPPCYRTIMFRDFMRIYNVVKLGSSLNLTTNLKNVQKEI

SEQ ID NO: 8584 - protein, 460 aa, Clostridium perfringens str. 13
MEIFKKQSLKRILSEANENKERTLSALDLTLMSVGSVIGTGVMVLTGIVAAKQSGPATSIAFIGGGIAAAIIVLCYAEFSSSIPSAGGSYSFTYVSLGEIIAYISGLCIVIGYTLSTATVASGWGAYLLSLLDILGIKLPKTFTAIPSEGGIVNLPAMISILFIVFVISLGTKESKKVNDIMVFIKIVVIALFIGVGAFHVNTSNWHPFAPFGVKGIVTGTASLFFAYCGFDATASAAEEVKNPQKSLPLGLISSLVICTIIYIAVSLVLTGVTSYTNLNVGDALSYALKLVGQRGVAFVVSLGTVIGILAVIFAGNFTTSHILLAMSRDGLLPKFFSKVDKKDVPYTALWTVGIIGALLAGFFNLGQLANFANIAFLLTYTLVCISLIAFRKKYPHVKRGFKTPLVPFIPLLGAFSCLFLMSNLSEETWKIFIVVLVLLITSYLVYGRKHSLINKNNDN

SEQ ID NO: 8585 - protein, 449 aa, Lactobacillus acidophilus NCFM
MTITINTLTFSYEKDPIIYQLNTEIPAGFSLLIGPTGCGKSTLLKIIAGLYPKYAGKMTGSINLHQQKAAMMFQNAAEQFTMATPREEIIFALENLQTTPDQFQVKLNKAVEFTQIADLLDQKINTMSGGQQQRVALAVLLAMDVDVLLLDEPFASCDPETRSFLIDKLALLAKSGKTIILSDHVLKGYDSVCDYVFKFENKIIKELSVSEKEKLFTENKKVHDQHYSFSLPQGEPVFKLKNTQIFQNRRLLNQTELFIYPKATLITGPNGVGKTSLFKAMTQMIPYSGSFTYYDQEIAKLRPRKYLMHVAQIFQKASDQFLMVSVKDEIELSKKDRNSFFTDEKIDGWLTKLGLADHLDQVVYTLSGGQQKKLQILLMLMTKHNVLLIDEPLSGLDQQSIYLVLTLMRESQKQLNQTFLIISHQIDTLAKFCPYRLVFDQQQLKYVER

SEQ ID NO: 8586 - protein, 181 aa, Brassica napus
MASSMLSSAAVATSPAQATMVAPFTGLKSSAAFPVTRKSNTDITSIASNGGRVSCMKVWPPVGKKKFETLSYLPDLTDVELAKEVDYLLRNKWIPCVEFELEHGFVYREHGSTPGYYDGRYWTMWKLPLFGCTDSAQVLKEVQECKTEYPNAFIRIIGFDNNRQVQCISFIAYKPPSFTGA

SEQ ID NO: 8587 - protein, 342 aa, Spinacia oleracea
MVVQGEIVCVTGAAGFIGSWLVKRLLEHGYIVRATVRDPGNVKKVQHLLDLPNANTHLTLWKADLNEQGSFDEAISGCAGVFHVATPMDFDSNDPENEVIKPTINGMLDIMRSCAKAKIRRLVFTSSAGTVNVEEIQKPVYDETCWSDMEFCSSKKMTGWMYFVSKTLAEKAAWKFAAENNLDFISIIPPLVVGPFITPTMPPSLITALSPITRNEAHYSIIKQGQFVHLDDLCMAHIYLYEHPNAKGRYIASACDATIYDIGKMLREEYPEYNIPTKFKDFEEDMEHVHFSSEKLMGLNFKFKYELKDMYKGAVDTCRTKGLLPPSYGENENNENPNTIID

SEQ ID NO: 8588 - protein, 320 aa, Xylella fastidiosa Temecula1
MNHTSDTALLIVNLGTPEAPTAAAVRRYLGEFLSDRRVVSIPPLFWKPLLHMVILPIRGPRSASKYAKVWLQEGSPLSVYTRRIAEGLTQHLPDWRVAWAMRYGAPALTKALDALQAQQVRRIVILPLYPQYSTTTTASVQDVVEAWCKRTPQVQVECIQDYAEDPAWVAAVAASIRRHWQAHGRSEKLMFSFHGLPQRVANNGDPYPQRCQVSASLIAAALNLNESEWVLGYQSRFGAERWLQPYAEPTLWALAESGIRRFDLVCPGFSVDCLETLEEVALGFSETLAARGATMRYIPCLNDDPAHVQALAGLAQRALP

SEQ ID NO: 8589 - protein, 340 aa, Phytolacca americana
MVAQGETVCVTGAAGFIGSWLIKTLLDRGYVVRATVRDPDNTKKVQHLLDLPNAKTYLTLWKADLNEEGSFDDAINGCTGVFHVATPMDFDSKDPENEVIKPTINGLLDIMRSCVKAKIRRLVFTSSAGTVNVEEVQKPVYDESCWSDMEFCRSKRMTGWMYFVSKTLAEQAAWKFAAENKLDFVTVIPPLVVGPFITPTMPPSLITALSPITRNEAHYSIIKQGQFVHLDDLCMAHIFLYEHPNAQGRYIASACDATIFNIGKMLREEYPEYNVPTKFKDFKEDMERVHFSSKKLTDLGFEFKYGLKEMYTGAVESCRAKGLLHDHAANSLDNDVNGTT

SEQ ID NO: 8590 - protein, 317 aa, Geobacter metallireducens GS-15
MSEKTAVLLLQMGGPDSLDAVEPFLVNLFSDRDIIRIGPAFLQPFIARLIAKKRATPVERKYEEIGGKSPIRELTEAQAKALEEVLGDGYCCFTAMRYWKPTTVEALAAIRREGITRIIALSLYPHYSRATTGSSVNELKRVLAQSGATFDVTYVDRFFDHPRYIEALAEKIKEGLDDFHPLAEVQILFSAHSLPQSFIDEGDPYLSHIEETVRLVMERFEGVTYHLAFQSRAGPVKWLEPSTEEILEYLAAHQVKNLLMVPLSFVSDHIETLHEIDIEYAMLAHRLGYAKFRRSPSLNTSPLFIDCLADLVRKAGM

SEQ ID NO: 8591 - protein, 373 aa, Thermococcus kodakarensis KOD1
MLKLIEDAIERTSAAPQASAPEVRTQSDIDEELKKLLEQIQAKIYVVGVGGAGCNTINRMMQVGIQGAKIIAMNTDAQDLLKVRAHKKILLGKELTRGLGAGNNPKIGEEAAKESEREIREALEGADMVFITCGLGGGTGTGAAPVVAEIAKKMGALTVAVVTLPFTVEGIRRIKNAEYGLERLKKNTDTVIVIPNDKLMEVAPNLPIHMAFKVADEILVQAVKGITELITKPGLVNLDFNDVRAVMKDGGVAMIGIGESDSEKRALEAAQQALNSPLLDVDISGAKGALISISGSDVKLEEAQQIIELVTSKLDPEAQVIWGIQLDEELGKMIRILLVVTGVSSPYSVAEEEEESYFGEEERRPIKLDLDEL

SEQ ID NO: 8592 - protein, 334 aa, Pasteurella multocida subsp. multocida str. Pm70
MAIKIGINGFGRIGRIVFRAAQHRDDIEVVGINDLIDVEYMAYMLKYDSTHGRFDGTVEVKDGNLVVNGKTIRVTAERDPANLKWNEIGVEIAVEATGLFLDDATARKHITAGAKKVVLTGPSKDATPMFVSGVNFDTYAGQDIVSNASCTTNCLAPLAKVINDKFGIKDGLMTTVHATTATQKTVDGPSAKDWRGGRGAAQNIIPSSTGAAKAVGKVIPALNGKLTGMAFRVPTPNVSVVDLTVNLEKPATYAEICAEIKRASENEMKGVLGYTEDAVVSTDFNGCALTSVFDAAAGIALTDTFVKLVSWYDNETGYSNKVLDLVAHVYNYKG

SEQ ID NO: 8593 - protein, 783 aa, Aspergillus niger
MAPPQAPVQPPKRRRIGVLTSGGDAPGMNGVVRAVVRMAIHSDCEAFAVYEGYEGLVNGGDMIRQLHWEDVRGWLSRGGTLIGSARCMTFRERPGRLRAAKNMVLRGIDALVVCGGDGSLTGADVFRSEWPGLLKELVETGELTEEQVKPYQILNIVGLVGSIDNDMSGTDATIGCYSSLTRICDAVDDVFDTAFSHQRGFVIEVMGRHCGWLALMSAISTGADWLFVPEMPPKDGWEDDMCAIITKNRKERGKRRTIVIVAEGAQDRHLNKISSSKIKDILTERLNLDTRVTVLGHTQRGGAACAYDRWLSTLQGVEAVRAVLDMKPEAPSPVITIRENKILRMPLMDAVQHTKTVTKHIQNKEFAEAMALRDSEFKEYHFSYINTSTPDHPKLLLPENKRMRIGIIHVGAPAGGMNQATRAAVAYCLTRGHTPLAIHNGFPGLCRHYDDTPICSVREVAWQESDAWVNEGGSDIGTNRGLPGDDLATTAKSFKKFGFDALFVVGGFEAFTAVSQLRQAREKYPEFKIPMTVLPATISNNVPGTEYSLGSDTCLNTLIDFCDAIRQSASSSRRRVFVIETQGGKSGYIATTAGLSVGAVAVYIPEEGIDIKMLARDIDFLRDNFARDKGANRAGKIILRNECASSTYTTQVVADMIKEEAKGRFESRAAVPGHFQQGGKPSPMDRIRALRMATKCMLHLESYAGKSADEIAADELSASVIGIKGSQVLFSPMGGETGLEATETDWARRRPKTEFWLELQDTVNILSGRASVNNATWSCYENA

SEQ ID NO: 8594 - protein, 272 aa, Thermococcus kodakarensis KOD1
MKVVMTTKVDLASMNIREKLIENFGFKEDELLFDGNPVYQKDDVVILTTNQEMIYYDGLDRAIERQTGIKPEIIAFASRHSSKQKLPALTTHVTGNWGGALYGGKDESLAIAQPSAMKLALLKMNELNDLGWTVCYEATHHGPSELDVPSFFIEIGSSEEEWVNDRAGEIVAETIIYVLENYQNSKFKVAVGIGGGHYAPKQTKRALQTDLAFGHIAPKYAHPLSKELLLKAIERTAERVDAIYVDWKGSKGETRQMARAVAEELGLEFIRD

SEQ ID NO: 8595 - protein, 407 aa, Emiliania huxleyi
MAREKFERSKPHVNIGTIGHVDHGKTTLTAAISATLAVYSGSKKDISLIDSAPEEKARGITINTAHVEYETETRHYAHVDCPGHADYVKNMITGAAQMDGGILVVSAADGPMPQTREHILLAKQVGVPHLVVFLNKADQVDDEELLELVELEVQELLENYDFPGDDIPFVSGSALLALQAVEGGPKAKGDDKWVDRIFDLMESVDNYIPAPERDTEKTFLMAVEDVFSITGRGTVATGRIERGILKIGDTIEIVGLKDTQTTTVTGIEMFQKTLDEGMAGDNVGILIRGVQKTDIERGMVLAQPGTISPHKKFEAEVYVLGKDEGGRHTPFFTGYRPQFYVRTIDVTGTIVQFTGDDGSAAEMVMPGDRIKMTAELINPIAIEQGMRFAIREGGRTVGAGVVSKILE

SEQ ID NO: 8596 - protein, 656 aa, Burkholderia cenocepacia
MCGIDGFLNSVAFDEETARGTLARMTASLAHRGPDGQGIWVDPEAGIALGHRRLAIVDLSVHGRQPMASACGRYVLVFNGEIYNHRELRAELERAGRAPAWRGHSDSEVLIAAIVAWGVEATLRRATGMFAFALWNRASRVLTLARDRIGEKPLYYGRIGDALVFASELKALRGYPGFDGTVDRDALCLYLRQSSVPAPYTIYRGIRKLPPGTYIQFEHARDTPRLRAYWTLEQVIEAGRAQPFEGTPDEAVGQLDAILRQAVARQMEADVPLGAFLSGGVDSSAIVALMQAQSATPVDTFTIGFHEAGYDEAGYAKAVARHLGTRHTELYVTADHALGVVPKLPSIYDEPFSDASQIPTFLVSELTRRHVKVSLSGDGGDELFGGYTRYFLTPRLWRKLHRVPGAVRARIAAALHALRPDHADQLAAVAQGAWGGGVEARESTSRIGDRLHKLGHVMTAESRIGLYRLLMSSVHHPERIALSGQEPPTPLDTVSAWPAHLSFAEQAMAIDTLTYLPTDILAKVDRAAMAVSLETRMPFLDHHVVEFAWRVPASVRLPEGQSKALLRRLLDRYVPSALIDRPKQGFCAPVDHWLRGALRDWAEALLRPSRLREEGFFDAAAVERLWRQHQTGRMNWQHQLWTVLMFQAWLEAQRAA

SEQ ID NO: 8597 - protein, 378 aa, Triticum aestivum
  misc_feature (202)..(202): Xaa can be any naturally occurring amino acid
  misc_feature (286)..(286): Xaa can be any naturally occurring amino acid
  misc_feature (313)..(313): Xaa can be any naturally occurring amino acid
MLGAARRQLGSGPMLGQVLRRLRPAAGASTEAARGYSSAAKEITVRDALNSALDEEMSADPSVFLMGEEVGEYQGAYKITKGLLDKYGPDRVLDTPITEAGFTGIGVGAAYQGLRPVIEFMTFNFSMQAIDHIINSAAKSNYMSAGQINVPIVFRGPNGAAAGVGAQHSQCYAAWFAHVPGLKVLTPYSSEDARGLLKAAIXRDPDPVVFLENELLYGESFPVSDEVLDSSFALPIGKAKIEREGKDVTITAFSKMVGYALQAAEILSKEGISAEVINLRSIRPLXDRAAINASVRKTNRLVTLEEGFPQHGXGAEICMSVVEESFEYLDAPIERIAGADVPMPYAANLERLAVPQIEDIVRAARRACYRALPMAATA

SEQ ID NO: 8598 - protein, 180 aa, Arachis hypogaea
MALENCLRLSTTVGTARIQCLSPLSSWKKLVFSSYRGFNKSMLYSTVSNSNPSLYSTAGTSRKSSFVCNAREKVNEVQVVTDSSWNKLVIGSETPVLVEFWAPWCGPCRMIAPIIDELAKEYAGKIACYKINTDDCPNIATQYGIRSIPTVLFFKNGEKKESVIGAVPKSTLSATLDKYV

SEQ ID NO: 8599 - protein, 415 aa, Dehalococcoides sp. BAV1
MGKIFIIDVTNRDGVQTARLGLSKLEKTLINIYLDEMGIFQSEFGFPTTKHERGYVEANLELAKMGVIKNLRLEGWIRAIVADVDLAFRRAPSLKHLNLSISTSEQMINGKFQGRKVFKDIIEDMTIAVNAAYAKGAETVGVNAEDASRTSIVNLIEFAKAAKEVGATRLRYCDTLGYDNPFTIYETARTLAEKVGMPIEIHCHGDLGMAIGNSLAGAKGVIDGGQDVYVNTTVNGIGERAGNADLVAFLLAILKSKGFGEKYQLGHEVNLSKAWKIARFASYAFDVEIPINQPGVGRNCFAHASGIHADGVIKDSQNYELYGYEELGRGEALMVETGREICAGQYSGISGFRHVMGNMSVELPEDKDEANKILELVRYANVEAHKPLVEDELIFIAKYPEISRRLLTLTPLMND

SEQ ID NO: 8600 - protein, 694 aa, Oryza sativa (japonica cultivar-group)
MASSISSSSITYTLQTALVISSSLLVAADVGGGQSNNHYCPPSSCGDLHNISYPFRLQGDSRDCVAAPRPWYDLSCSNTGKATIQINTRTYYVSSINYTDLSFLVTDATMQDDDSSCPLPPSDHPPYSTDDLLDRTTTDSYGFLDLATSSDSAWACFVNCSRPIQDTTSPWYRPVSCLPTNNSFVYLNEFYGCTIGELQPSCRYLSMIPFDTQHISVSQLQNASYTDIIGFIGKGFRVRFPMDHSSLRPCLDGTKTYFNEHITGASIPNIARAIFWSELYFTRCRVAGHAYTTKFMTLMVIIVSAIVIIKFCKVLFRLMLAPLVVFIFLAHKYWKTRITIDAVEKFLQMQQMIGPMRYAYTDIIAITSHFRDKLGQGGYGSVYKGVLLPGNVHVAIKMLSGNSNCNGDEFISEVSTIGRIHHINVVRLVGFCSEEMRRALVYEYMPRGSLDKYIFSLEKCFSWDKLNEIALGIARGINYLHQGCEMQILHFDIKPHNILLDDNFVPKVADFGLAKLYPRDKSFVPVSAARGTVGYIAPEMISRSFGTISSKSDVYSFGMLLLEMAGGRRNADPNAANSSQAYYPSRVYKQLTRRETCEISDIVDMHELEKELCVVGLRCIQMRSSDRPTMSEVIEMLEGGSDDLQVPPKPFFCDDEQPLGVEPYHLSSDLTAISEAEEDDDDESISLFQSFSYQ

SEQ ID NO: 8601 - protein, 515 aa, Penicillium purpurogenum
MISLRIALAINALSYICALVELAVADDYRPTFHFCPAENWMNEPNGLIKIDSTWHLFYQADPTANVWGNECWGHATSSDLLHWDHLPVAIPVENGIESFTGTSYYDANNTSSLGTSTNPPYLAFFTGYTSSNGTQDQRLAYSTDLGTTWLKFSGNPIISAALEAPHDVTGGLESRDPKVFFHEPSGKWVMVLAHGGQDKLTFWTSLDAKSWTWMSDLLASQIEGFPSSVTGWEVPDMFQLPIQGTNETTWVIIFTPAQGSPAGGNGVVALTGSFDGETFLANPVDSSTLWLDYGRDFDGAMSWENVPASDGRLIIAAVMNSYGSNPPTNTWKGMLSFPRTLTLEKIGSKQYFLQQPIAELSTVDNALASIQNQTIAPKQTLLSSIHGSSLDVRIAFSVDSGATLSLAVRKGGSEQTVIRYSQSNSTLSVDRTASGDISYDPAAGGIHSAQLARDNTELVYLRVLVDTCSVEVFGGQGEAVISDLIFPSNSSDGLSLEVIGGTATLQSVEVFSVSL

SEQ ID NO: 8602 - protein, 112 aa, uncultured prokaryote
WTMVAGGGASVVYADTIADMAGGVEDLANYGEYSGGPTTDETRFYTETVLDLMTREKDPRGRDKILIIGGAIANFTDVAKTFTGIIQAFEKYADKMKDVGTRIYVRRGGPNY

SEQ ID NO: 8603 - protein, 383 aa, Geobacter metallireducens GS-15
MESATKNTVIIDDTTLRDGEQTAGVVFSKREKLAIARLLDDIGVQELECGIPAMGEEEREVIRALVDLGLNARLITWNRAVIPDIEASLACGVAAVDISLSVSDQMIAHKLRTSRDGVMEQLKRALGFAKEHDLYVSVGGEDASRADLGFLAELMEITCSMGGDRFRFCDTLGILDPFTMYEKVKALRAAAPGLDIEVHTHNDLGMATANALAGIKAGARFVNTTVNGLGERAGNAALEEVVMGLKLACGIDPGIDTHRFHEISRFVGRASQRPVPPWKAVVGERVFSHESGLHADGVIKDARNYEGFDPAEVGLCRHIVVGKHSGTSGLVERFRQMGIELSRQEAGALMDGVRAMAQRLKRPLSDGELRALHAAGRCALRAA

SEQ ID NO: 8604 - protein, 445 aa, Mycobacterium sp. KMS
MPTLLWFRRDLRLHDLPALVDAAQGDGQVLACYVLDPRLHRSAGPRRLQYLHDALRDLRDQLDGRLLVTRGRPEQRIPALAKSIDASAVYVSGDFTPFGRRRDDAVRKALGEVPLQPSGSPYLVSPGRVTKGDGTPYKVFSPFFDAWRRHGWRAPAQSGPDSATWIDPADLTGRDLRTEIPDDGATLDIPAGERAAAQHWRAFVADELDGYADNRNRPDLDVTSRMSAHLKFGTIHPRTMVDDLGRGKGAQAYLRELAFRDFYAAVLHEWPRSVWWNWNTGFDGIRVDEGAVAEQRFDAWKRGRTGFPIVDAGMRQLAGIGWMHNRVRMIVASFLVKDLHLPWQWGARWFLEQLVDGDMANNQHGWQWTAGCGTDAAPFFRVFNPSTQGAKFDPDGTYVRRWVPELKGVADVHKMGDDRPADYPAPIVDHAAERAEALRRYAEIS

SEQ ID NO: 8605 - protein, 671 aa, Zea mays
  misc_feature (278)..(278): Xaa can be any naturally occurring amino acid
MVSSHGFLLSLQALTMVSTIMTNTGVIATQGQAFCPSSSCAHASAHASAFRMQGDPQGCGFPEYELVCIDSKAIIHINNGRYFVTSISYSNSTFWVVDANLDNSSCPIPASNQRPYVNGLPSEGRTLLDPDTVTWAAFVSCSEMLSDVSSPFLSCCSGIYQPVNCRSTKNSFAYVFTTTFFPMVGDIKPSCRYLPMIPFGSRHVKRPDNASYDDIVKFMKNGFAVNFPYRNGRSYHLVINTCLERCKWVTSTIKYSNFPPWGTKTLAWRFLGSTFVSXRCVNDYSYRSKLFWAMVAMISTVVIVKFVIVFGILSRFVFAPLTVLTFLAYKYWKTRISIDAVEKFLQMQQALSPARYAYTDITAITGHFREKLGQGGYGSVYRGVLPGDVSVAVKMLSNSLCNGDEFISEVSTIGSIHHVNVVRLVGFCSEETKRALIYEYMPRGSLDKHIFSSEQSFSWDKLNGIALGIARGINYLHQGCEMQILHFDIKPHNILLDNSFTPKVADFGLAKLYPRDNSFVPVSAARGTIGYIAPEMISRNFGVVSCKSDVYSFGMLLLEMAGGRRNLDQHAERRSQTYYPAWVYSHLTRQEVGEICEAFDVHEVERKLCVVGLWCIQMKPHDRPTMAEVVGMLEAGADGLQIPPQPFFCGGELTGSTSYFSSELSAISENG

SEQ ID NO: 8606 - protein, 129 aa, Arachis hypogaea
LKPAPFTAERSSVRGIPSLSRASSSFKVVASGGKKIKTDKPYGINGGMNLRDGLDASGRKGKGKGVYQFVDKYGANVDGYSPIYDQKDWSPTGDVYTGGTTGLAIWAVTLVGLLAGGALLVYNTSALSQ

SEQ ID NO: 8607 - protein, 112 aa, Geobacter metallireducens GS-15
MKLIEAIIKPFKLDEVKDALTEIGVEGITVSEVKGFGRQKGHTELYRGAEYVVDFIPKVKIEIAVADEVVAKVVETIENTAKTGRIGDGKIFILPLDEAVRIRTGEKGAEAI

SEQ ID NO: 8608 - protein, 723 aa, Oryza sativa (japonica cultivar-group)
MANSIAIFRRSTTYGPLQKAALTTICCMLAVAAGPNPQECLPFSCGDLGNISYPFRLQGDSRQCVSTPRPWYNLSCSRGKATIHINTRKYYVISINYTRENFLVVDATMQLDDDTNGTSCPLPRSDHLPYMIYWSDLSSIDSYGFKDLVTASDTWACFVNCSRAITNDSRYKPVTCLSGNNSFPYVYVYIYDDYGCCPVKRLQPSCRYLGMIPFDYVYQPGSYDDDIMSNVLQSASYRDIVGFIRKGFRVNFPLYNNDQRAPTIVERCLNNSMSYFKDQISGASIPHLTRALFWTEIHFVQCVSTNHDYTIKLFSVVITIVSAIDVTKLLFVLCRFVLAPLVVLTFLAHKYWKTRIAIDAVEKFLRMQEMLGPKRYAYTDIIAITSHFRDKLGQGGYGSVYKGVLLPGDIHVAIKMLDGKSDCNGEDFISEVATIGRIHHINVVRLVGFCSEEMRRALVYEYMPRGSLNRYIFSSERSFSWDKLNEIALGIARGINYLHQGCEMQILHFDIKPDNILLDDNFIPKVADFGLAKLYPREKSFVSDRALRGTFGYMAPEMACRSFGVISSKSDVYSFGMLLLEMAGGRKNADPNANSNSSRAYYPAWVYDQLIVDQQVDEISSAIDMHEKERKLWLVVFWCIQMKSYDRPTMSEVIEMLEGDVDALQVPPRPFFCDGDSTPPPPVPVMDSICLYSSELTAISEEEDVDGITQLDSSCLLGYERSI

SEQ ID NO: 8609 - protein, 109 aa, uncultured prokaryote
WTMVAGGGASVVYADTIADLAGVKDLANYGEYSGGPTTAETQFYAETIFDLMTRHKDPRGKILIIGGAIANFTDVAKTFAGIINAFEKYADKLKEHKTKIYVRRGGPNY

SEQ ID NO: 8610 - protein, 111 aa, uncultured prokaryote
WTMVAGGGASVVYADTIADMAGIDDLANYGEYSGGPTTGETKFYAETLLDLMTREPDPQGRGKVMIIGGAIANFTDVAKTFTGIIQAFEVYANKMKEVDLKIYVRRGGPNY

SEQ ID NO: 8611 - protein, 573 aa, Debaryomyces hansenii CBS767
MCGIFAAFRQPEVEQFKSKALQYSKRIRHRGPDWSGNVIQNSTILCHERLAIVGLDSGAQPITSEDGNYTLAVNGEIYNHIQLRDEFPSYPYKSLSDCEPIIPLFEKYDVDAPKYLDGMFAWVLYDKKNDRIVASRDPIGITTLYMGKSSKNPKTRYFASELKCLTDECDEIFAFPPGHVYDSNTDEITRYFNPSWWEESSIPSKRVDLKEVRETLELAVRKRLMAEVPYGVLLSGGLDSSLIAAIAARETQKAAAGISKDGIDANKELSGVDEKGSLHSSGWNQLHSFAIGLPGAPDLIAAEKVAHFIGTIHHSHTFTLDEGLDALDDVIYNLETYDVTTIRASTPMYLLSRKIKAQGVKMVLSGEGSDEIFGGYLYFANAPSPKDFHEECVKRVKNLHYADCLRANKSTMAWGLEARVPFLDKQFLEVCMNINPEDKLIKPAEGKIEKYILRKAFDTSDDPNAKPYLPEEILWRQKEQFSDGVGYSWIDGLKDAAEAAISDEQFANPKAEWGTDVPTTKEAYWYRCKFDEIFHSKAAASTVMRWVPKAEWGCHADPSGRFATIHEQKVDQD

SEQ ID NO: 8612 - protein, 395 aa, Aspergillus oryzae
MTHIQLSSVSLENSNLYNIKNEPNMTMPSNNQSAVAKSSNSNTSGEPGKFKKMGIRWAPLNIGLERRLQTFVVLCHTLTIAIFLTSFFFACAIPLSWPILLPYLIYISLFSTAATSGTLSGRCNYLRSLRIWSIYASYFPARLHRSERLLPTRKYIFGYHPHGIISHGAFAAFATEALGFSKLFPGITNTLLTLDSNFRIPFYREYALAMGVASVSRESCENLLTRGGTDGEGMGRAITIVIGGARESLDALPHTLRLVLKRRKGFIKLAIRTGADLVPVLAFGENDLYEQVRSDQHPLIHRFQMLIKHTMGFTIPLFHARGVFNYDVGLMPYRRPLNIVVGCPIEVVQQQNRDKIDDDYIDYLHAKYVQELARLWEQWKDVYARDRTSELEIVA

SEQ ID NO: 8613 - protein, 493 aa, Glycine max
NVKLPETTYVFANGSMNLRECQDLCLRDCSCTAYANIQITNGGSGCVTWSGELEDMRLYPAGGQHLYVRLAASDVDDIVGGSHKKNHTGEVVGITISAAVIILGLVVIFWKKRKLFSISNVKTAPRGSFRRSRDLLTSERMFSTNRENSGERNMDDIELPMFDFNTITMATDNFSEANKLGQGGFGIVYRGRLMEGQDIAVKRLSKNSVQGVEEFKNEVKLIVRLQHRNLVRLFGCCIEMDEKLLVYEYMENRSLDSILFDKAKKPILDWKRRFNIICGIARGLLYLHHDSRFRIIHRDLKASNILLDSEMNPKISDFGMARLFGTNQTEANTLRVVGTYGYMSPEYAMDGNFSVKSDVFSFGVLVLEIITGKKNRGFYYSNEDMNLLGNAWRQWRDGSTLELIDSSIGDSCSQSEVLRCIHVGLLCVQERAEDRPTMSSVLLMLSSESAIMPQPRNPGFSIGKNPVETDSSSSKKDQSWSVNQVTVTLLDAR

SEQ ID NO: 8614 - protein, 216 aa, Physcomitrella patens
NVKDMYNASCFVECIESGGDCYTTSCNILEQFKVKSKPKDIKEAQKMLKSFLEENKTILVFDDVKNQNQIEDVVPMDDIFANNGSTLIATTRDSKAMKHCGKEVYKMNVEELDEGASMKLFITYSCGQENLPNELNEIAKKIVRACNGLPLSLKVMGAFLKENKRLRCWERALQKLKKGRELDGDEDNSNYKIWKILRVSFENLKVKEKSMFLDIC

SEQ ID NO: 8615 - protein, 486 aa, Photobacterium sp. SKA34
MTFINNVQVEKSLYIAGEWQSGINTIANINPSDISENLGDFAQASEAQVEQAIQAAKVAQPEWEKTPIERKQAVLQAIGDELIARCDELGTLLSREEGKPFAEGRGEIYRAGQFFHYFAAEVLRQIGDNAASVRPGVFVEVTREAVGVIAIISPWNFPTATAAWKIAPALAFGNSVVWKPANLTPASAVALTEVIHRQGLPAGTFNLVLGSGSQVGNTLIHSKDVNGVSFTGSVDTGRKVAAATASNFVRCQLEMGSKNALVVANDADIQIAVEATIAGSFSGAGQKCTASSRLVVMDGIHDAYVEALIKRMSELKVGHALEEGIFMGPVVDGNQLEANFVWIDKACQSGAELAFGGERLNLKNEGFYMSPTLFLNTQNSWEVNQEEVFAPMASVIRVSDLDEAIAVANDTRFGLTGGIITQSLRNSAIFKQQIQTGCVMVNLPTAGTDYHVPFGGRKESSFGPREQGQYAKEFYTVVKTAYQRPY

SEQ ID NO: 8616 - protein, 496 aa, Acidobacteria bacterium Ellin345
MSVVSAVELNSNVSQFITKPRKMLIGGNWIDSASGKFFETLNPATGEVLARVAEGDRADIDLAVAAARKAFESGPWSKMSPSQRGRLLWKLADLLEQHLEEFAELESLDNGKPLSVARVADVPLAVDLFRYMAGWATKVEGNTIPLGPQFHAYTYREPVGVIGQIIPWNFPLLMAAWKLGPALAVGCTVVLKPAEQTPLSALRLGELIMEAGFPDGVVNVVPGFGETAGAALAAHPDVDKIAFTGSTEVGKLIVQAAAGNLKKVSLELGGKSPNIVLADADLDIAISGSANAIFFNHGQCCCAGSRLFVHKSQFDKVVEGVAEAAKNIRLGSGLDPATNMGPLVSQEQLDRVCGYLESGVQQGAKPLVGGKKQTGPGYFVEPTVLVDVKPTMKVVCEEIFGPVVTAIPFNSVDEVLNSANASSYGLAAAVWTRDINKAHSLAAKLRAGTVWVNCYNVFDAALPFGGYKQSGWGREMGHDALELYTETKAVCVRLEN

SEQ ID NO: 8617 - protein, 337 aa, Triticum aestivum
  misc_feature (159)..(159): Xaa can be any naturally occurring amino acid
  misc_feature (268)..(268): Xaa can be any naturally occurring amino acid
MKGLFKSKPRTPADVVRQTRELLIYVDLHAGSRGADPKREEEKMAELSKNIRDLKCILYGNGEHEPVTEACVQLTQEFFRENTLRLLIMCVPKVNLETRKDSTQVVANLQRQQVNSRILASEYLEANKDLLDTLISGYEDTEVALHYGAMLRECIRHQXFARYVLESDHMKKFFDYIQIPNFDIASDASATFKELLTRHKATVAEFLSKNYDWFFAEFNSRLLSSSNYITKRQAIKLLGDLLLERSNSAVMMRYVSSKDNLMILMNLXRDSSKNIQIESFHVFKLFAANKNKPAEVVNILVTNRSKLLRFFAGFKTDKEDEQFEADKEQVIKEISAL

SEQ ID NO: 8618 - protein, 216 aa, Physcomitrella patens
NVKDMYNASCFVECIESGGDCYTTSCNILEQFKVKSKPKDIKEAQKVLKSFLEENKTILVFDDVRNQNQIEDVVPMDDIFANNGSTLIATTRDSKAMKHCGKEVYKMNVEELDEGASMKLFITYSCGQENLPNELNEIAKKIVRACNGLPLGLKVMGAFLKENKRLRCWERALQKLKKGRELDGDEDNSNYKIWKILRVSFENLKVKEKSMFLDIC

SEQ ID NO: 8619 - protein, 183 aa, Arabidopsis thaliana
  misc_feature (96)..(96): Xaa can be any naturally occurring amino acid
  misc_feature (117)..(120): Xaa can be any naturally occurring amino acid
  misc_feature (125)..(125): Xaa can be any naturally occurring amino acid
  misc_feature (134)..(134): Xaa can be any naturally occurring amino acid
  misc_feature (136)..(136): Xaa can be any naturally occurring amino acid
  misc_feature (139)..(140): Xaa can be any naturally occurring amino acid
  misc_feature (150)..(151): Xaa can be any naturally occurring amino acid
  misc_feature (155)..(155): Xaa can be any naturally occurring amino acid
  misc_feature (162)..(162): Xaa can be any naturally occurring amino acid
  misc_feature (166)..(166): Xaa can be any naturally occurring amino acid
  misc_feature (176)..(176): Xaa can be any naturally occurring amino acid
MASSMLSSAAVVTSPAQATMVAPFTGLKSSAAFPVTRKTNKDITSIASNGGRVSCMKVWPPIGKKKFETLSYLPDLSDVELAKEVDYLLRNKWIPXCVEFELEHRICVPVSPGTLPXXXXGRDWXMGKLSLVGXPXFPXXVKGSGKCQKXXPGPXIKDIGFXNTPXVPWLKFIGYXPQALPEA

SEQ ID NO: 8620 - protein, 216 aa, Physcomitrella patens
NVKDMYNASCFVECIESGGDCYTTSCNILEQFKVKSKPKDIKEAQKMLKSFLEENKTILVFDDVKNQNQIEDVVPMDDIFANNGSTLIATTRDSKAMKHCGKEVYKMNVEELGEGASMKLFITYSCGQENLPNELNEIAKKIVRACNGLPLSLKVMGAFLKENKRLRCWERALQKLKKGRELDGDEDNSNYKIWKILRVSFENFKVKEKSMFLDIC

SEQ ID NO: 8621 - protein, 520 aa, Xanthomonas campestris pv. campestris str. ATCC 33913
MNTTVSNQTPHIRIFDTTLRDGEQSPGCSMTPQQKLVMARALDALGVDIIETGFPASSYSDREAVAMMGRELRRPTLAVLSRCLQADIEISARALEAAANPRLHVFLSTSPLHREHKLRMSREQVLESVHKHVTLARGYIDDIEFSAEDATRTEEDFLAEVTRVAIAAGATTINLPDTVGFTTPEEIRGMFSRLIASVEGAEKVIFSTHCHNDLGLAAANSLAAIEGGARQVECTINGIGERAGNCALEEITMALKVRGAFYNLDTAINTPRIVSTSQLLQRLVGMPVQRNKAVVGGNAFAHESGIHQHGMLRHRGTYEIMRPEDVGWESSQMVLGRHSGRAAVEQRLRALGYLLEEDEAKLVFEQFKALCEKQRVVTDADLQALMQDATVQEGYRLASMTISDVGSRANALVELSDPDGNRVAETAQGNGPVDALFGALASATGVKLELDSYQVHSVGIGADARGEASLSVRHDGVEYEGTGTSKDIIEASALAWLDVANRLLRQRERGVVAGKTAAVA

SEQ ID NO: 8622 - protein, 249 aa, Xylella fastidiosa Temecula1
MTRKLVLLRHGQSQWNSMNRFTGWVDIGLTEQGHQEATMAGHLMKKEGLEFDVAHTSLLKRAIHTLQDALKALDQDWLPIYKSWRLNERHYGALQGLDKIDTAAKHGEEQVNIWRRSYDIQPPPIDLDDPSHPMRDRRYAALDRKVLPVRESLKNTLERVLPYWNDAIAPQLNDNKTVLISAHGNSLRALYKYLNKESDEKILNVNIPTGIPLLFELSDTLQVVSYRYLGDPDAAQRAAEMVANQGKAK

SEQ ID NO: 8623 - protein, 357 aa, Xanthomonas campestris pv. campestris str. ATCC 33913
MSKQILILPGDGIGPEIMAEAVKVLTRIDTQHTLGVTLVYDELGGAAYDKYGSPLADETLERARAADAVLLGAVGGPQWDTIDPALRPERGLLKIRSQLGLFANLRPALLYPQLADASTLKPEVVSGLDLLILRELTGGIYFGQPRGTRTLDNGERQAYDTLPYSESEIRRIAKAGFEMARLRGKKLCSVDKANVLASSQLWRAVVEEVAKDYPDIALSHMYVDNAAMQLVRAPKQFDVIVTDNMFGDILSDQASMLTGSIGMLPSASLDANSKGMYEPCHGSAPDIAGQGIANPLATILSVAMMLRYTFAQAAAADAIEAAVGKVLDQGLRTADIWSEGTTKVGTAAMGDAVVAAL

SEQ ID NO: 8624 - protein, 332 aa, Zea mays
MGADGGLNRAAEKPRDGEGGEARVFRCTDYSLPRTTLALALWLGGIHFNVLLVLASLFLLSGRAAAIVVAFQLLFMFAPVNDRDKWGQSVARFICRHAMGYFPITLHVEDYKSLDPSRAYVFGYEPHSVLPIGLSALADLVGFLPLTKIKVLASSAVFYTPFLRQIWTWLGLVPATRKNFYCYLGAGYSCIVVPGGVREMLHMNNDSEVAFLKSRKGFVKIAIQSGCPLVPVFCFGQSYAYKWWRPGGKLFIKIARAVKFTPIIFWGRFGTPFPFPKPMHVVVGKPIEVNKIPHPTIDEINEVHEQFIIAMRDLFEKYKAKAGYPGLHLRVL

SEQ ID NO: 8625 - protein, 504 aa, Kluyveromyces lactis NRRL Y-1140
MFRNSNTLRTLNLLRKMSSKIENDYLIQTKAFINGKWTETDDKFAVTNPSTGDTIREVTNCGVSDFNKAIEIAHDAFGTFRQTNVRERAQILDNIYNLMLENKQDLAKILTLENGKPYKDSLGEIVYSAMFFKWFAEEAPRIYGDIIPSAVSSDQKIFTIRQPLGVIGILTPWNFPSAMIARKLAPVIATGNTCVIKPAHETPLSALALGVIAEKAGLPAGVCNILPTNHTSEIGEYVCEHELVKKITFTGSTKIGQLLMGQSSKGKNIKKFSMELGGNAPYIVFKDADLDRALDGIIGCKFRQSGQTCICANRIFVHEDLYDEFSKRLVDKIDKTFKLGDGFQDGVTHGPLIHDKSIDKVASLVQDAKTKGADVLIGGSRASSLGPLFYQPTVLGNVTESMDIFYEEIFGPVAPLIKFKDVDEVIKRANDTDVGLAGYFYSQNISTIFDAAEKLNVGMVGVNTGEISEPAVPFGGVKNSGLGKEGSKYGIDDYTELKAIIVAP

SEQ ID NO: 8626 - protein, 444 aa, Zea mays
MGKRSGGRKLPFFTRSSSSSSKRNRSARRLPSLPKQDNATRALLASPSAASPSATPGSAAAGQTAQLPPPLSVTAGGGVAVSGKVNKKKAGTRLWMRLDRWSASEIVELDKASIIRRAGLPPRDLRILGPVFSRSSSILAREKAMVINLEFIRAIVTAEEVLLLDPLMHEVLPFVDQLRQHLPLRSRVGENGECAPDGNGEKQKGSLNEATGAEHELPFEFHVLEVALEVVCSSLDLSVSDLERHATPVLDELTKNVRDEIEHLLDDNEDMEHLYLTRKQVQNQQVEALMSSAASNSIVLAGTGVPRLNSSFRRSLSIATSMHLDNDVEDLEMLLEAYFMQLDGIRNRILSVREYIDDTEDYVNIQLDNQRNELIQLQLTLTIASFGIAANTFIAGAFAMNIPGSLFNTDGSLFWPFVGSTSSGCFVITVLLLGYAWWKKLLGP

SEQ ID NO: 8627 - protein, 331 aa, Coccidioides immitis RS
MASTERKTFTIGTRKSQLALVQTDLVRNALQAAFPDCEFKVHSRDAAGDLNKVTPLRAFTTKNLWTEELEELLIAKQVDLVVNSLKDIPTQIPSACVLAAVMKRENPRDVLVLKKGLPSMTLAELPPGSVVGTSSVRRIAQLARHYPHLKVQDVRGNIDTRLAKLDAQDGPFSCLILAAAGLLRTGREDRISQYLDSTNGKMLHAVGQGGLGIEIRTDDEVMRDMLNKIGDVKTTYTCLAERSLLRILEGGCSAPLGVETEWIQDDNGKDLLRLRSIVTSVDGKEAVEIEEDGNVQSDEAAETFGKEVALKLVARGAGKILEDIQNQKKEQ

SEQ ID NO: 8628 - protein, 168 aa, Xylella fastidiosa Temecula1
MSSIYTFTFTRLDGRPQALADWRGQVLLLVNVASRCGFTPQYAGLEMLWQRYRDAGLIVIGFPCDQFAGQEPGDEAKIAEFCTLTYGVDFPMAAKIKVNGADAHPLWQWLKHRRRGLFGVAAIKWNFTKFLIGRNGQPIARYSPIKSPEQLEVHIVRALGEEGGGNTH

SEQ ID NO: 8629 - protein, 70 aa, Oryza sativa (japonica cultivar-group)
MSDETGRTIPKFGAWDVNNPASADGFTVIFSKARDEKKGPVNVDASTRRSGFAVCRPAPPNLEEAKEYQI

SEQ ID NO: 8630 - protein, 335 aa, Achromobacter xylosoxidans
  misc_feature (154)..(154): Xaa can be any naturally occurring amino acid
TIRVAINGYGRIGRNILRAHYEGGKSHDIEIVAINDLGDPKTNAHLTRYDTAHGKFPGTVSVNGSYMVVNGDKIRVDANRNPAQLPWGALKVDVVLECTGFFTTKEKAGAHIKGGAKKVIISAPGGADVDATVVYGVNHGTLKSTDTVISNASXTTNCLAPLVKPLNDKLGLQDGLMTTVHAYTNNQVLTDVYHEDLRRARSATMSMIPTKTGAAAAVGDVLPELDGKLNGYAIRVPTINVSIVDLSFVAKRNTTVEEVNGILKAASEGELKGILDYNTEPLVSVDYNHDPASSTVDASLTKVSGRLVKVSSWYDNEWGFSNRMLDTTVALMSAA

SEQ ID NO: 8631 - protein, 290 aa, Triticum aestivum
  misc_feature (129)..(129): Xaa can be any naturally occurring amino acid
  misc_feature (244)..(244): Xaa can be any naturally occurring amino acid
MMMPRYLVAYYRILKLCIQRVRSSPIWSTCRRPRLVISSGRPGRWAGFTLNIIDTPGLIEGGYINEQAVEIIKRFLLEKTIDVLLYVDRLDTYRMDTLDEQVIRAITNSLGKAIWRRTLVVLTHAQLSXPPDGIDYNDFLARRSESLLRYIRSSAGIGKREYADFPLPIALAENSGRCKTNENGAKILPDGTPWIPNLMKEITIVVSNGSKSIHVDQKLIDGPNPNNRWKKYIPLILAVQYFLXVKGIRRAIHSDISNGKLDDWEQRYRDLVGSGNPVDQKVSSSRNPKA

SEQ ID NO: 8632 - protein, 432 aa, Rhodopirellula baltica SH 1
MLSTQSPPIQTRTLDNGLTVVVQPMPWLRTAAYTLWLPAGITTELVGLSESQLADPEYLACRDGLASLTCEMVQRGAGAYNSRQLVAAEDNLGIDSGNSAATSVAGYSARMPAESLLPAIELLADVVRRPHLPGNQFDDAKMILRQELAAFQDEPTQRLMRRLRERQYGPSLGRGGYASEASLEALSMDDVRQFYTDQYHAGGSVLAVAGNFDANQIFDSIEQSFGDWKSGKRPALPSPAPIDGNEHIELPSSQTHIGFSFDSIPYGSDDYFVMRAGIGILSDGMSSRLFDRVREQRGLCYSVWASTHTIGQHGAVFGYAGTTPARAQETLDVSLREIQHLADDLEQEELSRWKVRIESGLIMEQESAGSRASSLASDQYQLGRVIPTEELEAKIEAITLDQVASYFRQHGPRQFRIVTVGPEALQGGETLA

SEQ ID NO: 8633 - protein, 420 aa, Rhodopirellula baltica SH 1
MNELKSTTLANGLRIVADIDLRGYSAAVGYFVRAGARDETDIESGLSHFLEHMMFKGTARRSAADVNRELDELGGQSNAYTSEEQTVYYSSVLPKYQDRMVDLLTDMLSPSLDADDFATERNVILEEIAKYEDQPPFGAFERVMECAYGPRGLGRRVLGTTHSIESMQVESMRAYFNRRYRPENIVLAASGNVDFDGLVAQAEKMTQHWLDRPAPSDLASDDLGTTPEGIELTQHLSVPDASQSYRVTLGDGPSMQSELRYAMRLLASIVGDDGGSRLFWDLIDTGRAEVATLWPQEFTDTGALFTYLVCAADDMDSNVRLMNEVFGRVARDGVEQSELDQVINKTVAGCIMQSERPSNRLFGLGSRWLCCGDYLSLDELLDAYRGVTIESVAEAARTYLGQSATEVVASSAEPQSNLVG

SEQ ID NO: 8634 - protein, 444 aa, Bacillus thuringiensis serovar konkukian str. 97-27
MNYVIIGGDAAGMSAAMQIVRNDENANVVTLEKGEIYSYAQCGLPYVISGAIASTEKLIARNVKTFRDKYGIDAKVRHEVTKVDTEKKIVYAEHTKTKDVFEFSYDRLLIATGVRPVMPEWEGRDLQGVHLLKTIPDAERILKTLETNKVEDVTIIGGGAIGLEMAETFVELGKKVRMIERNDHIGTIYDGDMAEYIHKEADKHHIEILTNENVKAFKGNERVEAVETDKGTYKADLVLVSVGVKPNTDFLEGTNIRTNHKGAIEVNAYMQTNVQDVYAAGDCATHYHVIKEIHDHIPIGTTANKQGRLAGLNMLDKRRAFKGTLGTGIIKFMNLTLARTGLNEKEAKGLHIPYKTVKVDSTNMAGYYPNAKPLYLKLLYRSDTKQLLGGQVIGEEGVDKRIDVIAMALFNKMSIHDLEDVDLSYAPPYNSVWDPIQQAARRAE

SEQ ID NO: 8635 - protein, 290 aa, Rhodopirellula baltica SH 1
MSILVDKNTKVICQGITGNAGKFHSLGCRDYGTQMVGGVTPGKGGQDVEGIPVFDTVEEAVQKTGADATMIFVPPPFTADAILEAVDAGIRVIAAITEGVPVIDMVRVYEKVKASGSTLIGPNCPGLITPGECKIGIMPGYIHNPGKVGVMSRSGTLTYEAVWQTSSLKLGQSTCVGLGGDPIVGTNYIDLFKMYQEDDQTEAILMIGEIGGSAEEEAAAFVKEHVTKPVAAFIAGRTAPPGKRMGHAGAIISGGKGTAEEKVAALEDAGIVVAPSPAEMGEAVVKAMSK

SEQ ID NO: 8636 - protein, 537 aa, Nanoarchaeum equitans Kin4-M
MVKKSENPKEWYNEIVRKANIIDDAYPVKGMPVYKPYGYKAFKFLMSLLENKLESIGAEPAWFPIVIPYSIFKKESEHIKGFEEEVFWIERAGNDKLEDPLILRPTSETEMYYMFAKWIESYRDLPLIIYMTNTVYRYETKSTKALIRGREVLWNETHSVHRSEEDAREHMAKAKEVYDYIFWDVLYLPYIWVRRPEWDKFPGGEETYAADAIMPDGRFLQVGTIHLLGQKFAIPFEIKFLDYHPFYKKYGDPNIYIKDKNGNEYKVHAPKEFWEELEKGKLTKTYTIKIGDKEYTISSIEEINEKLKEYDFRKYVWQTSYGISMRAFGGALYWLGDDLGLVMPYKIAPIQIVIIPILGKDDTKVIEYSKKVYELIKDKYRVYLDSDDTKTPGYKYYYYDLIGVPLRIDIGLKEVENNSITIVRRDNKKKYTISLNELEKIDQIFKEMEEDLKQKAKSFVNDMVVRVKTFDELKEAIEQNKIAKAPFCMRESCANQIKELLHAEVRGTDINPENAEKERCVYCGEPAKYWVYIGKTY

SEQ ID NO: 8637 - protein, 347 aa, Arabidopsis thaliana
SEIQQRALVPILKGRDVIAQAQSGTGKTSMIAISVCQIVNISSRKVQVLVLSPSRELASQTEKTIQAIGAHTNIQAHACIGGKSIGEDIKKLERGVHAVSGTPGRVYDMIKRGSLQTKAVKLLVLDESDEMLSKGLKDQIYDVYRALPHDIQVCLISATLPQEILEMTEKFMTDPVRILVKPDELTLEGIKQYYVDVDKEEWKFDTLCDLYGRLTINQAIIFCNTRQKVDWLTEKMRSSNFIVSSMHGDKRQKERDDIMNQFRSFKSRVLIASDVWARGIDVQTVSHVINYDIPNNPELYIHRIGRAGRFGREGVAINFVKSSDMKDLKDIERHYGTKIREMPADLV

SEQ ID NO: 8638 - protein, 421 aa, Thermococcus kodakarensis KOD1
MVEIDPFEMAVQQLERAAQFMDISEEALEWLKRPMRIVEVSVPVEMDDGSVKVFTGFRVQHNWARGPTKGGIRWHPAETLSTVKALATWMTWKVAVVDLPYGGGKGGIIVDPKKLSEREQERLARSYIRAVYDVIGPWTDIPAPDVYTNPKIMAWMMDEYETIMRRKGPAFGVITGKPPGVGGIVARMDATARGAAFTIREAAKALGWDDLKGKTIAIQGYGNAGYYLHKIMSEEFGMKVVAVSDSKGGIYNPDGLPPADEVLKWKKEHGSVKDMPGTQNITNEELLELEVDILAPSAIEGVITKENADNVKAKIVAEVANGPVTPEADEILHEKGILQIPDFLCNAGGVTVSYFEWVQNINGFYWTVEETRKRLDDKMTKAFWDVFNTHKEKNIHMRDAAYVVAVSRVYEAMKHRGWVKK

SEQ ID NO: 8639 - protein, 486 aa, Bordetella pertussis Tohama I
MEDLRNHEFKNYIGGQWVACAAGKTYPNVNPADTDDIVGRFQASQAEDAAAAVAAAQAAFDGWRNLAVSKRAALMQRAADYLEAHAEQFGRELTREEGKALNLAKDEVLRSAQTIRFYAAEGQSFSGETFVNDDPDMVVYSQREPLGVVTVISPWNFPVSIPARKIAPALITGNTVVFKPSSDAPLSGLRLVEAFEQAGLPPGVLNLVTGSASAIGAAITQASQVRAVSFTGSTAAGEQIHRSVDMTTRTQMELGGKNPLIVMADADLDRAVDLVVKGGFSLSGQACTGTSRVLVDAPVKAAFTEKLLAKVKALKVGNSLEGSFDLGPLATARQLESVMRYIEVGKQEARLLCGGERLEGPGYERGYYLTPAVFADVTQQMRIAREEIFGPVIALIEVNGYEDAIAKANDTEYGLAAAIATTNAQYAHRFARDIQAGTVKINRTTTGNLINAPFGGLKRSSTSTFRESGRIGLEFYTQIKTVYRAG

SEQ ID NO: 8640 - protein, 488 aa, Geobacter metallireducens GS-15
MKFKLSFVALLATVALSLPVALLAEEVKTAAPAQAALSSAQTAALAPAVTAAPAAAPATPAAPKNVDPVLNTGDTAWMLVSAAMVLFMIPGLAFFYGGMVRGKNVLSTIMHSFVAMGIVGVQWAVIGYSLSFGPDIGGGLLGNLSKALLNGLITFKDGNPVYALFQNVPTAPGAIPEYVFAMFQCMFAMITVALISGALAERVKFSAYCVFVLLWTTLVYDPLAHWVWMSDGWLFKKGALDFAGGTVVHLSSGISALAFLIFLGKRHGFPHERMAPHSLPLTMLGVGMLWFGWFGFNAGSAIVGANCSDAAGGLAGLAFATTTIAPAAGGLSWMIAEWIHAGKPSALGFGSGVVAGLVVITPAAGFVQPGAAILMGLAAGVVCYGGVLLKAKLKYDDSLDAFGVHGVGGTFGALTTGIFATVGATGLLSGNVSQFLTQVIAVVAAGAYAFIVTLVIAFVLHKTIGLRVEKEDEIMGLDQTQHSESAYN

SEQ ID NO: 8641 - protein, 334 aa, Pseudomonas fluorescens Pf-5
MTLRIAINGFGRIGRNVLRALYTQGYRQDLQIVAINDLGDSAINAHLLKYDTVHGTFDAQVEHDQESLTVNGDRIAVSAIRNPAELPWAAEKIDVVFECTGLFTDRAKAAAHLTAGARKVIISAPAKGADATVVYGVNHDILRQSHQIISNASCTTNCLAPVAQVLHRELGIDNGLMTTIHAYTNDQNLTDVYHSDPYRARSATQNMIPSKTGAAEAVGLVLPELAGKLTGMAVRVPVINVSLVDLTVTLKRDTTAEEVNALLKSASQHSTILGYNTLPLVSSDFNHNPLSSIFDANHTKVSGGRLLKVLAWYDNEWGFSNRMLDNCLALCNAE

SEQ ID NO: 8642 - protein, 224 aa, Pseudomonas syringae pv. tomato str. DC3000
MQPFVIAPSILSADFARLGEEVDNVLSSGADFVHFDVMDNHYVPNLTIGPMVCSALRKYGVTAPIDVHLMVSPVDRIIGDFIEAGATYITFHPEATQHIDRSLQLIREGGCKAGLVFNPATPLNLLEYVMDKVDMILLMSVNPGFGGQKFIPGTLNKLREARALIDASGRDIRLEIDGGVNVNNIREIAAAGADTFVAGSAIFNAPDYREVIEKMRAELALSRA

SEQ ID NO: 8643 - protein, 363 aa, Candida humilis
MSTTKTIVVLPGDHVGTEITEEATKVLNAIAEKRPNIKFDFQHHLIGGAAIDATGVPLPDEALEASKKADAVLLGAVGGPKWGTGDVRPEQGLLKIRKELGLYANLRPCNFAFDSLLDMSPLKPEYARGTDFTVVRELVCGIYFGKRKEDTGDGVTWDSEQYSVPEVQRITRMAASLALQHNPPLPIWSLDKANVLASSRLWRKTVEETIKNEFPTLSVQHQLIDSAAMILVKNPTKLNGLVITSNMFGDIISDEASVIPGSLGLLPSASLASPPDTNKAFGLYEPCHGSAPDLPKGKVNPVATILSVAMMLKLSLDMVEEGIAVEKAVRKVIDNGIRTADLRGTNSTTEVGDAIAAAVKEFL

SEQ ID NO: 8644 - protein, 853 aa, Ralstonia metallidurans CH34
MKIIIVGHGMVGHKFLECLADAGAKDLDVTVLCEEPRPAYDRVHLSEFFAGKSAEDLSLVPEGFFAQHNNMLLRLNAKATAIDTAAKTVTTATGETLGYDKLVLATGSYPFVPPLPGKDRKDTFVYRTIEDLEAMLECGQRATSGVVIGGGLLGLECAKALRDMGLQTHVVEFAPRLMAVQVDDGGGRMLRQKIEELGVTAHTGKNTLEIVDGTEGTHRMNFADGTHLDTDMIVFSAGIRPRDELARASGLTIGVRGGIVIDNNCLTSDPHVYAIGECALWDGKIYGLVAPGYDMARVAARHLRGEASEFAGADMSTKLKLMGVDVASIGDPHGNEPGSRSYQFTDERKQIYKKLVVSECGKFLLGGVLVGDAAEYGTLLQMMLNRIELPESPEFLILPASDGKARPALGADALPDTAQICSCNNVSKGEICGAVCDGATTIGALKSCTKAGTACGGCVPLVTQIMKAEMKKQGMAVNNHVCEHFPYSRQELYHLVRVGKFKSFDDLLAAHGSGLGCDICKPTVGSILASCWNEFVLKEEHASLQDSNDYFLANIQKDGTYSVVPRMPGGEVTPDGLIAVGQIAKKYGLYTKITGGARVDMFGARLEELPLIWEELIAAGFESGHAYGKSLRTVKSCVGSTWCRYGVDDSVGLAIDIENRYKGLRAPHKIKFGVSGCTRECAEAQGKDVGIIATERGWNLYVCGNGGMKPRHAELLAGDLDRETLIRYVDRFLMFYVRTADRLQRTSTWRDNLEGGLDYLKSVIIDDKLGIGAELEAEMQHVVDTYEDEWKRAVTDPETRKRFRHFVNSDLRDDNLMFLEERGQVRPATQEERNLQRSRLSHIPVVAVPAKAA

SEQ ID NO: 8645 - protein, 105 aa, Thermococcus kodakarensis KOD1
MKKVEAVLRPEDFETVKKALKSAGYVSLTAYPVQGRGVQGGIPPYDLLPKMKIEIVVPDKDVDDVIGIIVRHARRGIPGDGKIFVLPVYDVVRIRTGERGEEALH

SEQ ID NO: 8646 - protein, 319 aa, Thermotoga maritima MSB8
MVLTVTLNPALDREIFIEDFQVNRLYRINDLSKTQMSPGGKGINVSIALSKLGVPSVATGFVGGYMGKILVEELRKISKLITTNFVYVEGETRENIEIIDEKNKTITAINFPGPDVTDMDVNHFLRRYKMTLSKVDCVVISGSIPPGVNEGICNELVRLARERGVFVFVEQTPRLLERIYEGPEFPNVVKPDLRGNHASFLGVDLKTFDDYVKLAEKLAEKSQVSVVSYEVKNDIVATREGVWLIRSKEEIDTSHLLGAGDAYVAGMVYYFIKHGANFLEMAKFGFASALAATRRKEKYMPDLEAIKKEYDHFTVERVK

SEQ ID NO: 8647 - protein, 706 aa, Oryza sativa (japonica cultivar-group)
MAKSNASRASATRRKFYFLQKSLLVSSLLAVVAADVVGAGPNQQCFPSSCGDLGNISYPFRLASDSRPCVGTLRPWYNLSCSSGRATIQINTRTYYVTSINYTGEIFSVVDATLQDDDTNGTSCPLPRSDHLPYIDYWPPYLGESSTDSYGFVYLATASDTWACFVNCSRARTDTMPWYRPVTCLLPNNSFVFVSFDDCAVGELQPSCRYLAMIPVDRWNLPDNSSQLQNASYTDIIGFIRKGFSVRFPYRPDQYQSPRMSARECLKDSNRYFKERISHPSILNLTRAIFWSETNSEVDCGYEVAPQKDRIFLGTIVSAIDIIKFHFVLFRLVLGSLVVFIFLAHKYWKTRITIDAVEKFLRMQQMIGPTRFAYTDIIAITSHFRDKLGQGGYGSVYKGVLLPGNVHIAVKMLTGSSSCNGDEFISEVSTIGRIHHVNVVRLVGFCSEEMRRALVYEYMPRGSLDKYIFSSEKSFSWDKLNEIALGIARGINYLHQGCEMQILHFDIKPHNILLDDNFVPKVADFGLAKLYPRDKSFVPVSAARGTVGYIAPEMISRSFGVISSKSDVYSFGMLLLEMAGGRRNADPNAANSSQAYYPSRVYRELTRRETSEISDIADMHELEKKLCIVGLWCIQMRSCDRPTMSEVIEMLEGGSDELQVPPRPFFCDDEQFPGVESYNMPSDLTAISEEHEDDDDESICLFESYQ

SEQ ID NO: 8648 - protein, 413 aa, Ralstonia metallidurans CH34
MTPPVSSHAKPRLVVVGNGMAGMRTVEELLKLAPDLYDITVFGAEPHGNYNRILLSPVLAGEKTVDDIMLNTRAWYGQHGIELLAGDPVVAIDRPRRLVRSASGKEVRYDRLLLATGSKPFIIPVPGHTLDGVIAFRDIQDVETMLHAARNHRHAVVIGGGLLGLEAANGLMRQGMDVTVVHLADSLMERQLDKPAAELLKAALERKGLRFLLSAQTAAVLGSERVTGVLFKDGTQIPADLVVMTAGVRPNIELAASAGLRCERAIVVDDTLQTFDPRIYAVGECVQHRQATFGLVAPIWDQARVCAAHLAGAGHRRYVQQATATKLKVTGVDLYSAGDFIGGDNSEDLVLRDPRRGVYKRLVLQGGRLVGAVLYGDVQDGPWYFDLIQTGQPVAALRQRLLFGKAQCEALAA

SEQ ID NO: 8649 - protein, 109 aa, uncultured prokaryote
WTMVAGGGASVGYSDTVADLGAVKELANYGEYSGNPTRAETREYVKTVFDLMTRSRHPQGDKILIIGGAIANFTDVAKTFEGIIDAMKEYADKLKEVGVKIYVRRGGPN

SEQ ID NO: 8650 - protein, 450 aa, Pasteurella multocida subsp. multocida str. Pm70
MSHLSIAKFGGTSVANYAAMSASAKIVVNDPNTRVVVLSASAGVTNLLVALANGCDNEERTKLINEVRQIQENILSELKDDSLVRNKVEKLLANIESLAEAASLATSPALTDELISHGEMMSSLIFVEILREFNTPSTWIDVRNIIATDSHFGKAVPNDHKTQENSTHILKPLIDRGELIITQGFIGRDEQGKTTTLGRGGSDYSAALLAEVLNAEDVLIWTDVAGIYTTDPRIVPNAKRIDTMSFSEAAEMATFGAKVLHPATLLPAVRSNIPVYVGSSKAPEAGGTWVTRDPQHRPIFRAIALRRDQTLLTLSSLNMLHAQGFLANVFTILAKHKISVDVVTTSEVSIALTLDKTGSASSGLSLLSSALIDELSQLCSVKVDSDLALVALIGNDLHITSGIAKRIFDTLAPYNIRSISYGASTNNVCLLVTNAHADAVVSALHKNLFE

SEQ ID NO: 8651 - protein, 447 aa, Bordetella pertussis Tohama I
MKLQSLDDFLRRVAARDPQQAEFMQAVQEVMLSLWPFIEKHPHYAEHALLERLVEPERVIQFRVCWTDDQGQAQVNRAFRIQHSSAIGPFKGGMRFHPTVNLSVLKFLAFEQTLKNALTTLPMGGGKGGSDFDPKGKSDAEVMRFCQALMLELHRHLGPDTDVPAGDIGVGAREVGFMAGMMKKLSNSAASVFTGKGLCFGGSLIRPEATGYGTVYFAQEMLQRAGLSFDGMRVSVSGSGNVAQYAIEKAMALGAKVVTISDSCGTVIDEAGFTHEKLLALMHIKNDLRGRLDTYASQFGLRYEAGVRPWHVPVDVALPCATQNELDENDARTLIRNGVKCVAEGANMPATLDAAKAFIAAEVLYAPGKASNAGGVAVSGLEMSQNSARLPWTREQVNARLHAIMRDIHENCVRHGHGAGNYVNYVDGANIAGFVKVADAMRQQGLY

SEQ ID NO: 8652 - protein, 343 aa, Glycine max
  misc_feature (173)..(173): Xaa can be any naturally occurring amino acid
MDADPPQLDDHLEPFRVSVNQILTTVNKLEKQVTEVEQFYESTDNVQGNNSKGGSLAKEKGREKHITGTKKPLQDASHTEASSAKRMQELMRQFSTILRQITQHKWAWPFMDPVDVEGLGLHDYYEIIDKPMDFGTIKSKMEAKDGTGYNNVREIYADVRLIFKGKMAATFYXNDVHVMAKTLLEKFEEKWLQLLPKVAEEEKRQLEEEAQAQLDIQLALETTYANKAKDISTELCEIDMHLKSLKEMVIQQCRALDIIAETNPMFQPSSTEDVVLDLDAQSDYTLWRLKAFVKDSLEEQVKVNAGAGINPNDNPDDKKNKKRRDSGDSSGKTNPKRKKLSTL

SEQ ID NO: 8653 - protein, 109 aa, uncultured prokaryote
WTMVAGGGASVVYADTIADFAGVKDLANYGEYSGGPTTAETQFYAETIFDLMTRHKDPRGKILIIGGAIANFTDVAKTFTGIIKAFEKYADKLKEHGTKIYVRRGGPNY

SEQ ID NO: 8654 - protein, 258 aa, Triticum aestivum
  misc_feature (242)..(242): Xaa can be any naturally occurring amino acid
MSATCAADLAPLLGAAAMNATDYLCNRFADTTSAVDSTYLLFSAYLVFAMQLGFAMLCAGSVRAKNTMNIMLTNVLDAAAGALFYYLFGFAFAFGTPSNGFIGKHFFGLKDMPQTGFDYSFFLFQWAFAIAAAGITSGSIAERTQFVAYLIYSAFLTGFVYPVVSHWIWSVDGWASAARTSGPLLFKSGVIDFAGSGVVHMVGGIAGFWGALIEGPRIGRFDHAGRSVALKGHSASLVVLGXFLLWFGWYGSTGVLRH

SEQ ID NO: 8655 - protein, 269 aa, Mucor hiemalis f. corticola
HTFYNELRVAPEEHPVLLTEAPLNPKSNREKMTQIMFETFNAPAFYVAIQAVLSLYASGRTTGIVLDSGDGVTHTVPIYEGYSLPHAILRLDMAGRDLTDYLMRILAERGHSFTTTAEREIVRDIKEKLCYVALDFEQEMQTAAQSSALEKSYELPDGQVITVGNERFRAPEALFQPSLLGLESAGIHETTYNSIMKCDVDIRKDLYSNIVMSGGTTMYPGIADRMQKEITALAPSSMKIKIVAPPERKYSVWIGGSILASLSTFQQMW

SEQ ID NO: 8656 - protein, 175 aa, Oryza sativa
LIDMQHQQRMKQAAAAAQQQQMMQQALLMQQQQAAAVAAAAQQQQAPLFPPHHPHPGLLAAPQIEPIVSGNLPPGFDSSTCRSVYVGNIHLQVTDSLLHEVFQSIGPVEGCKLIRKEKSSFGFVDYYDRRSAAIAIVSLNGRQLFGQPIKVNWAYASTQREDTSGHFNIFVGDLL

SEQ ID NO: 8657 - protein, 110 aa, uncultured prokaryote
  misc_feature (92)..(92): Xaa can be any naturally occurring amino acid
  misc_feature (96)..(96): Xaa can be any naturally occurring amino acid
  misc_feature (100)..(100): Xaa can be any naturally occurring amino acid
WTMVAGGGASVVYADTVADLGAVKELANYGEYSGNPSRTETREYVKTVFDLMTRERHPQGDKILIIGGAIANFTDVAKTFDGIIDAMNEYAXKLKXVGVXIYVRRGGPNY

SEQ ID NO: 8658 - protein, 53 aa, Arabidopsis thaliana
  misc_feature (22)..(22): Xaa can be any naturally occurring amino acid
  misc_feature (29)..(30): Xaa can be any naturally occurring amino acid
  misc_feature (34)..(34): Xaa can be any naturally occurring amino acid
  misc_feature (36)..(36): Xaa can be any naturally occurring amino acid
  misc_feature (38)..(38): Xaa can be any naturally occurring amino acid
  misc_feature (42)..(43): Xaa can be any naturally occurring amino acid
MAVPLLTKKVVKKRSAKFIRPXSDRRITXXESWXRXKXIDSXXFGCGSLSLGS

SEQ ID NO: 8659 - protein, 251 aa, Magnaporthe grisea 70-15
MPKSKRAKVVHMTNVAKKTREQKELLFTNIRECVPQYQHLFVFSVDNMRNNNLKDVRRELSGDSRMFFGKTKLMARALGQTAEDEQAEGLHKLTSHLAGTVGLIFTNRPASELLSYLDSITSVDFARAGAVAPRDFSIPPGVVYSTGGEVPQEYDVPLAHSIEPELRKLGVPTRLIKGRVVLGGENGEGSTGYDVCREGDVLDSRQTRLLKLFSVCFSEFKIQVLAYWSAATGEVTEVNPGSAGDAIDDSD

SEQ ID NO: 8660 - protein, 110 aa, uncultured prokaryote
WTMVAGGGASVVYSDTVADLGAVKELANYGEYSGNPSRTETREYVKTVFDLMTRERHPQGDKILIIGGAIANFTDVAKTFDGIIDAMNEYADKLKEVGVKIYVRRGGPNY

SEQ ID NO: 8661 - protein, 351 aa, Thermotoga maritima MSB8
MGFDLDVEKKKENRNIPQANNLKIKVIGVGGAGNNAINRMIEIGIHGVEFVAVNTDLQVLEASNADVKIQIGENITRGLGAGGRPEIGEQAALESEEKIREVLQDTHMVFITAGFGGGTGTGASPVIAKIAKEMGILTVAIVTTPFYFEGPERLKKAIEGLKKLRKHVDTLIKISNNKLMEELPRDVKIKDAFLKADETLHQGVKGISELITKRGYINLDFADIESVMKDAGAAILGIGVGKGEHRAREAAKKAMESKLIEHPVENASSIVFNITAPSNIRMEEVHEAAMIIRQNSSEDADVKFGLIFDDEVPDDEIRVIFIATRFPDEDKILFPEGDIPAIYRYGLEGLL

SEQ ID NO: 8662 - protein, 373 aa, Oryza sativa (japonica cultivar-group)
MPSGYDDDRLRELKAFDDTKAGVKGLVDAGVTAVPRIFHHPPDPTPVASAADAADADAIPVIDLARADADRDRVVAQVRSAAESVGFFQVVNHGVPARLTDGMLAAVRRFNERPAAAKAAFYTRDAARRRVRFNSNFDLFESPAANWRDTLFCQAAPDPPAPEELPADVRGVLPEYAGAARRLASSVLELLSSALGLETGRLGGMGCADGVSVVSNYYPPCPEPEATVGTARHSDPAFLTVLLQDGMGGLQALLGGRWVDVPPVAGALVVNVGDLLELVSNGRMRSVEHRVVANRSRDAARVSVAAFCNVDLGRESSRSGRLYGPIAELTAGGDPPRYRSTTVAEFLAHYDGKGLDGRPALHHFRLPAAASLD

SEQ ID NO: 8663 - protein, 131 aa, Yarrowia lipolytica CLIB122
MAASNPHPKIVKKHRKAFKRHQSDRFDRVGESWRKPKGIDSCVRRRFRGTIRMPKIGYGSAKATKHMMPSGHKAFLVSNTEEVELLLMHTKVFAAEIAHNVSSRKRLAILERAKALGVKVTNPAGRLSLQA

SEQ ID NO: 8664 - protein, 977 aa, Xanthomonas axonopodis pv. citri str. 306
MSQTPSSLRDLEHHSAFVERHIGPNDAEIAQMLDVVGHASLDALTDAIVPGNIKSPAPLALPEAITEEEALAKIRAIASKNQVQRNFIGQGYYGTHTPKVILRNILENPAWYTAYTPYQAEISQGRMEALINFQTLCADLTGMQIANASLLDEATAAAEAMTLAKRSAKSKSNTFFVHDAVHPQTLELLRTRAEPLDIVLRVGTPEEALQAECFGVLLQYPDSFGHIGDHAALADAVHAQGGLVAVATDLLALTLIAAPGEWGADIVVGNSQRFGVPFGFGGPHAAFMACRDAYKRSMPGRLIGVSIDAAGNPAYRLTLQTREQHIRREKATSNICTAQVLLAVMASMYAVYHGPDGLVRIARRTHRLAAILAAALRSAGVSVGDRFFDTLHVKAIDADAIHARARAAGINLRAIDSEAVGISLDETTTRADVVALAQLFGATADVDALDAATADALPQGLLRTTPFLTHPVFNTHHSEHELLRYMRSLADKDLAMDRTMIPLGSCTMKLNATAEMIPVTWPEFGAIHPLAPAEQSAGYAQLIDELEAMLVECTGYDAVSLQPNSGAQGEYAGLLAIRAYHRSRGQAHRDICLIPESAHGTNPASAQMCGMTVVVTKCDANGNVDVDDIRAKAEKYSDRLAALMITYPSTHGVFEEDVVAICEAVHAHGGQVYTDGANMNALVGVAKPGKWGSDVSHLNLHKTFCIPHGGGGPGVGPCAVKSHLAPYLPRAGIHAGEGQTAAIHGGGFNSESGNGHSSRIGGMVSAAAYGSASILPISWMYVTMMGSAGLRKATQVALLNANYIAKRLAPHYKTLYTGRNGLVAHECILDVRPLEKTSGIGAEDIAKRLIDFGFHAPTLSFPVAGTLMVEPTESESQHELDRFIDAMIQIREEIRAIEDGRLDREDNPLKHAPHTATQVSASEWTHAYPRELAAFPLPSLKQQKYWPPVARVDNVYGDKNVMCACIPVDAYKEDAEA

SEQ ID NO: 8665 - protein, 258 aa, Helianthus annuus
MANYGGDKQYARETRHTGDYESPIHSTGGQYEQEVLQTDEYGNPVRRTGQTDEYGNPVRRTDEYGNPVHSTTGGTMGDYGSTGLGQGTGTGGIGTGGYGTTGHHGLGTGVGHTTGGTGTDYTSGGRSTGQTGYQGLGTESEFGGKTGTFQNQPSATPVGGVGLSSGTGAGVGGTGTGTGILHRSGSSSSSSSEDDGQGGRRKKCDAKVKESLPGGHRQEDHYQSQTTTTTTGGGPGYGETHEKKGMMEKIKEKLPGHH

SEQ ID NO: 8666 - protein, 335 aa, Brucella suis 1330
MAVRVAINGFGRIGRNILRAIVESGRTDIQVVAINDLGPVETNAHLLRYDSVHGRFPKEVKVAGDTIDVGYGPIKVHAVRNPAELPWKEENVDIALECTGIFTSRDKAALHLEAGAKRVIVSAPADGADLTVVYGVNNDKLTKDHLVISNASCTTNCLAPVAQVLNDTIGIEKGFMTTIHSYTGDQPTLDTMHKDLYRARAAALSMIPTSTGAAKAVGLVLPELKGKLDGVAIRVPTPNVSVVDLTFIAKRETTVEEVNNAIREAANGRLKGILGYTDEKLVSHDFNHDSHSSVFHTDQTKVMDGTMVRILSWYDNEWGFSSRMSDTAVALGKLI

SEQ ID NO: 8667 - protein, 584 aa, Astragalus sinicus
MCGILAVLGCADASRAKRVRVLELSRRLKHRGPDWSGLHQHGDCYLAHQRLAIVDPASGDQPLFNEDKSVIVTVNGEIYNHEDLRKQLPNHTFRTGSDCDVIAHLYEEYGEDFVDMLDGIFSFVLLDTRDNSYIVARDAIGVTSLYIGWGLDGSVWISSEMKGLNDDCEHFECFPPGHLYSSKNGGFRRWYNPLWYSEAIPSAPYDPIVLRQAFEKAVIKRLMTDVPFGVLLSGGLDSSLVASITSRYLATTKAAEQWGSKLHSFCVGLEGSPDLKAGKEVADYLGTVHHEFTFTVQDGIDAIEDVIYHVETYDVTTIRASTPMFLMSRKIKSLGVKWVISGEGSDEIFGGYLYFHKAPNKEEFHRETCRKIKALYQYDCLRANKSTFAWGLEARVPFLDKEFINVAMNIDPANKMINLDEGRIEKYILRKAFDDEEHPYLPKHILFRQKEQFSDGVGYSWIDGLKAHAAKHVTDKMMRNAANIYPHNTPSTKEGYYYRMIFERFFPQNSARLTVPGGPTVACSTAKAVEWDAAWSKNLDPSGRAALGVHASAYENQNNSVNKSIEFEKIIPLEASSVGVAIQT

SEQ ID NO: 8668 - protein, 120 aa, Helianthus annuus
TNVHSTTEGYNVGGTGTTIGTGGYEEGKHGGAGGILHRSGSGSSSSSEDDGEGGRRKKKGLVEKIKEKLPGGDHGSDEHKTSATATTVGGGEYGYKEGEEGHEKKGLMDKIKEKLPGSHQ

SEQ ID NO: 8669 - protein, 175 aa, Triticum aestivum
  misc_feature (134)..(134): Xaa can be any naturally occurring amino acid
MAPTVMASSATSVAPFQGLKSTAGLPVSRRSNGASLGSVSNGGRIRCMQVWPIEGIKKFETLSYLPPLSTEALLKQVDYLIRSKWVPCLEFSKVGFIFREHNASPGYYDGRYWTMWNLPMSGCTDATQVINEVXEVNKEYPDAYVRIIGFDNMRQVQCVSFIAFKPPGCEESGKA

SEQ ID NO: 8670 - protein, 315 aa, Manihot esculenta
  misc_feature (303)..(303): Xaa can be any naturally occurring amino acid
MASASLLKSSPVLDKSEFVKGQSLRQPSASIIRCHPTAPSALTIRAGSYADELVKTAKTIASPGRGILAMDESNATCGKRLASIGLENTEANRQAYRTLLVTAPGLGQYISGSILFEETLYQSTTDGKKMVDVLVEQNIVPGIKVDKGLVPLPGSNNESWCQGLDGLASRTAAYYQQGARFAKWRTVVSIPNGPSALAVKEAAWGLARYAAVSQDNGLVPIVEPEILLDGEHGIDRTFEVAQKVWAEVFFYLAENNVMFEGILLKPSMVTPGAECKDRATPQQVADYTLNLLKRRIPPAVPGXMFLSGGQSEVEA

SEQ ID NO: 8671 - protein, 232 aa, Brassica napus
MASSSYAPFSAVFSGFAATKPNPPPTCSAFLVPKRRSNSRNLKNGVSLKSWNKHGFQFTSRNLSVYARATEEKTVHDFTVKDISGKDVSLDKFKGKPLLIVNVASKCGLTSSNYTELSQLYDKYRNQGFEILAFPCNQFGGQEPESNPDIKRFVCTRFKAEFPIFDKVDVNGPSTAPIYQFLKSKSGGFLGDLIKWNFEKFLVDKKGNVVQRYPPTTSPLQIEKDIQKLLVA

SEQ ID NO: 8672 - protein, 115 aa, Brassica napus
MATGSEASKAAEAVVDWHKHDSKRMLHAVYRVGDLDRTIKYYTECFGMKLLRKRDVPDEKYTNAFLGFGPENTNFAVELTYNYGVDKYDIGTGFGHFAIANDDVYKLAENIKSGG

SEQ ID NO: 8673 - protein, 116 aa, Helianthus annuus
MAKMAMMVLCAGVTCMVVGAPYTEALSCGQVSSSLAPCISYLTKGGAVPPACCSGVKSLNSAAKTTPDRQAACGCLKSAYNSISGVNAGNAASFPGKCGVSIPYKISPSTDCSKVQ

SEQ ID NO: 8674 - protein, 127 aa, Streptococcus suis 89/1591
MASKKMLHACLRVENLEASQKFYEEAFGFKETRRKDYPEHKFTLVYLALEGDGFEIELTYNYDHGPYIVGDGFSHLALSSDDLEGDNAKHKELGYPTTDIKSLPGSPGRYYFVTAPDGYRVEVIRAD

SEQ ID NO: 8675 - protein, 230 aa, Streptococcus suis 89/1591
MVKLVFARHGESEWNKANLFTGWADVDLSEKGTQQAIDAGKLIKEAGIEFDLAFTSVLKRAIKTTNLALEAADQLWVPVEKSWRLNERHYGGLTGLNKAEAAAEFGDEQVHIWRRSYDTLPPEMAKDHEHSAHTDRRYAHLDDSVIPDAENLKVTLERALPFWEDKIAPALKDGKNVFVGAHGNSIRALVKHIKQLSDDEIMDVEIPNFPPLVFELDENLNIVKEYYLEA

SEQ ID NO: 8676 - protein, 305 aa, Glycine max
MSITSSTSFKSLTMAESCLLSSPSSLFNNKTKPSLFSPPSKPLTLQFSCINSSVSLSLAARAHRSPLVTRVAQTSDWAQQEEDDTATFQDEEQGLSETQAGLSSWEPNGEDAGEESFAEPPEEAKLFVGNLPYDVDSQKLAMLFEQAGTVEIAEVIYNRETDQSRGFGFVTMSTVEEAENAVEKFSRYDFDGRLLTVNKASPRGTRPERPPPRHSFEPSLSIYVGNLPWDVDNTRLEQIFSEHGNVVNARVVYDRETRRSRGFGFVTMSDETEMKDAVAALDGQSLDGRPIRVSVAEDRPRRGSF

SEQ ID NO: 8677 - protein, 422 aa, Sulfolobus tokodaii str. 7
MNSAVQETLTSNLYDQQVKKLYHVGGILGLTEDVLQVLSTPERVIQVKIEIKGADGKVKTFVGWRSQHNSALGPYKGGVRYHPDVTQDEVIALSMMMTWKNSLLQLPYGGGKGGIRVDPSKLTKEELEALSRRYVDALYKYIGSDIDIPAPDVNTNPQIMAWYLDEYIKITGKADFAVFTGKPIELGGLPARIYSTGLGVATIAKASAKKFLGGIEGATVIIQGFGNVGTYTAKFLQEMGAKIIGVSDSKGGVIDPNGIDVQKIIEIKESTGSVINYPSGKKVTNDELLISECDILIPAALENVINKFNAPKVKAKLIVEGANGPLTADADAIMKERGIPVVPDILANAGGVVGSYVEWANNKMGEIMSEEEARKLIIQRMENAFEGVYQKYNKLGDQDLRTAAMAISIERVVNAMKARGML

SEQ ID NO: 8678 - protein, 161 aa, Pseudomonas fluorescens PfO-1
MSDNLLNIPCTTIKGEQKTLADFAGKAVLVVNTASKCGFTPQYKGLEELWQTYKDQGLVVLGFPCNQFGKQEPGNEGAISEFCELNYGVSFPLFKKIEVNGTGAHPLFVQLKKRAPGVLGSQGIKWNFTKFLIGKDGQLVKRFAPATKPQDLSREIEALLK

SEQ ID NO: 8679 - protein, 232 aa, Ralstonia eutropha JMP134
MSTQAKASPAIRRDFERVSPELVERASRFQAAILADVVGRRGTLNGRVQGLSPSMKVAGPALTVEVRPGDNLMFHVALAIAKPGDVIVIDAKGDQTAAMCGEIMATQAQASGIAGFVVDAAVRDSRELANGSFPIFAAGTNPCGPTKALGGLVNWPASVAGVAVNPGDLVVGDADGVVVIPREDVPAILELAQKKLDSETQRIAAIKAGDLRPGWLEGELRKAGVLAEGEVL

SEQ ID NO: 8680 - protein, 115 aa, Oryza sativa
  misc_feature (14)..(14): Xaa can be any naturally occurring amino acid
  misc_feature (27)..(27): Xaa can be any naturally occurring amino acid
  misc_feature (47)..(47): Xaa can be any naturally occurring amino acid
  misc_feature (54)..(54): Xaa can be any naturally occurring amino acid
  misc_feature (56)..(56): Xaa can be any naturally occurring amino acid
  misc_feature (58)..(58): Xaa can be any naturally occurring amino acid
  misc_feature (60)..(60): Xaa can be any naturally occurring amino acid
  misc_feature (66)..(66): Xaa can be any naturally occurring amino acid
  misc_feature (68)..(69): Xaa can be any naturally occurring amino acid
  misc_feature (81)..(81): Xaa can be any naturally occurring amino acid
  misc_feature (84)..(84): Xaa can be any naturally occurring amino acid
  misc_feature (88)..(89): Xaa can be any naturally occurring amino acid
  misc_feature (91)..(93): Xaa can be any naturally occurring amino acid
  misc_feature (97)..(99): Xaa can be any naturally occurring amino acid
  misc_feature (104)..(104): Xaa can be any naturally occurring amino acid
  misc_feature (107)..(108): Xaa can be any naturally occurring amino acid
  misc_feature (111)..(112): Xaa can be any naturally occurring amino acid
  misc_feature (114)..(114): Xaa can be any naturally occurring amino acid
MARAQLVLVAVVAXLLLAAPHAAVDIXCGQVNSAVGPCLTYARGGAXPSADCCXGXRXLXAAPTTXAXXRTACNCLKNAAXGIXGLNXXNXXXIPSXXXVSVPXNIXXSIXXSXV

SEQ ID NO: 8681 - protein, 260 aa, Clostridium tetani E88
MDFKNLILEKDGKIAVLTINRPDALNALNSELLKELDYAIDCLAEDDEVLAVVLTGAGKAFVAGADIGEMKDLTVSEGRKFGVLGNRVFRKLETLEKPVIAAVNGFALGGGCEISMACDIRIASEKAKFGQPEVGLGITPGFGGTQRLPRLVGPAVAKELIYTADIIGAEEALRIGLINKIVEKDELLDKAKEMANKIANNAPIAIKLCKSAINRGVQCDIDTGIAFEAEVFGECFSTEDQKEGMTAFLEKRKDKCFKNR

SEQ ID NO: 8682 - protein, 320 aa, Nicotiana glutinosa
MESFPIVDMEMLNTEQRAVIMEKLKDACENWGFLELVNHGISHELMDTVEKLTKEHYNKSMEQRFKEMVTNKGLEVVQTEIDDLDWESAFFLKHLPVSNISDIPDLDHDYRKVMKEFAQKLEKLAEDLLDLLCENLGLEQGYQKKAFYGTFGPTFGTKVANYPPCPKPELIKGLRAHTDAGGIILLFQDDKVSGLQLLKDGKWIDVPPMSHSIVVNIGDQLEVITNGKYKSVEHRVIAQPDGNRMSIASFYNPGSDAVIFPAPELAEKEEKENKLKYPKFVFEDYMKLYAALKFQAKEPRFEAMNKAMKTTVNLGPIATA

SEQ ID NO: 8683 - protein, 487 aa, Mycobacterium sp. KMS
MTATPDTTSVTPEHTIGEPLSQEEAIASLGRYGYGWADSDVAGASAQRGLSEAVVRDISAKKNEPEWMLDIRLRALRTFDKKPMPNWGSNLEGIDFDNIKYFVRSSEKQAATWDDLPADIKNTYDKLGIPEAEKQRLVSGVAAQYESEVVYHSIREDLEAQGVIFLDTDTALKEHPDLFKQYFGTVIPAGDNKFSALNTAVWSGGSFIYVPPGVHVDIPLQAYFRINTENMGQFERTLIIVDEGAYVHYVEGCTAPIYKSDSLHSAVVEIIVKPGGRCRYTTIQNWSNNVYNLVTKRARAEAGATMEWVDGNIGSKVTMKYPAVWMTGEHAKGEVLSVAFAGEGQHQDTGAKMLHLAPQTSSNIVSKSVARGGGRASYRGLVQVNKGAHGSRSSVKCDALLVDTISRSDTYPYVDIREDDVTMGHEATVSKVSEDQLFYLMSRGMTEDEAMAMVVRGFVEPIAKELPMEYALELNRLIELQMEGAVG

SEQ ID NO: 8684 - protein, 521 aa, Candida maltosa
MAIEQIIEEVLPYLTKWYTIIFGAAVTYFLSIALRNKFYEYKLKCENPVYFQDAGLFGIPALIDIIKVRKAGQLADYTDTTFDKYPNLSSYMTVAGVLKIVFTVDPENIKAVLATQFNDFALGARHAHFDPLLGDGIFTLDGEGWKHSRAMLRPQFAREQIAHVKALEPHVQILAKQIKLNKGKTFDLQELFFRFTVDTATEFLFGESVHSLYDEKSGIPNDIPGRENVREAFNTSQHYLATRTYSQIFYWLTNPKEFRDCNAKVHKLAQYFVNTALNATEKEVEEKSKGGYVFLYELVKQTRDPKVLQDQLLNIMVAGRDTTAGLLSFAMFELARNPKIWNKLREEVEVNFGLGDEARVDEISFETLKKCEYLKAVLNETLRMYPSVPINFRTATRDTTLPRGGGKDGNSPIFVPKGSSVVYSVYKTHRLKQFYGEDAYEFRPERWFEPSTRKLGWAYLPFNGGPRICLGQQFALTEASYVIARLAQMFEHLESKDETYPPNKCIHLTMNHNEGVFISAK

SEQ ID NO: 8685 - protein, 526 aa, Zea mays
METATVVVTPAPVSITHPPQHKFMKSSPARKPAKKKLASGRGGYVLEDVPHLTDYLPELKSYRNPLQDHPAYSVVKQYFVGPDDTVAKKIVVHRSSARGTHFRRAGPRKRVYFEPDEVRAAIVTCGGLCPGLNTVVRELVCGLHDMYGVTSIYGIEGGYKGFYARNTVELTPRSVNDIHKRGGTVLGTSRGGHDTAKIVNSIQDRGINQVYIIGGDGTQKGAASVHEEVQRRGLKCAVVGVPKTIDNDIAVIDRSFGFDSAVEEARRAIDAAHVEAESAENGIGVVKLMGRNSGFIAMHATLASRDVDCCLIPESPFYLDGKGGLLEFAEKRLRDNGHMVIVVAEGAGQDLVAESTRFADTHDASGNKALLDVGLWLSQKIKDHFKKKPSFPITLKYIDPAYMIRAVPSNASDNVYCTLLAHSALHGAMAGYTGFTVGPVNGRQAYIPFYRITEKQNKVVITDQMWALVLCSTNQPCFLTHEDDVERALMMDEEEPHMPLVEGENALFANPSMCNGNGHLCNGHKA

SEQ ID NO: 8686 - protein, 385 aa, Dehalococcoides sp. BAV1
MAVVVHKYGGTSVGDAERIKHVAKRIIAARQKGNDVVAVVSAMGDTTDDLIELAHKLNDCPEPREMDVLLSTGEIVSSTLLAMALKNMGQDAISLSGQQAGIRTDSVHSKARITGIDPKRIHDELDKGRVVIVAGFQGISDCQDVTTLGRGGSDTTAVALAASLGASICERYTDVDGVYTADPRLIPDARRLSEISYEEMLELSSYGAKIMHPRAVEIGQVYNIPILVASSFNENPGTLIHGGEKMEIRNKVSGIAHDFEVAKITILGVPDKPGIAAGLFAPLAKAGVSVDTIVQNSSQDHITDLTFTVTKSDLGKALEVIGPIAKELQAREVLSDSKIGKVSIIGTGMLNAPGYAARMFKALSDAGINILLISTSEIRITCIIE

SEQ ID NO: 8687 - protein, 663 aa, Oryza sativa
MRGFLAATLLVLSLLLNLHTAASVSAWEDKDFFSYCPPSRCGEHGPEIRFPFKLESKNTPSSCGVPCMKLSCSGQYTILHNKYLGRPYKLTAIDYKHALLTAVPLADEDNYSSPSPCPLLKSISIRPNLITGPGYGYYNTGYQNPCQTYDTYYAALVSCSTEFALASVPGTATDNDYIAGPISCLSNQTHFSYLVAYRVTMSLLPLDCEVISDGPIPIPAFYYSGYIPSMFTTSADRILDYPSGYVLSTFRESAERILNSSETMIWWYFYKYDGRHCEQQGRRCAFSSQRNQTFCMGRGSHVKVIAATSSVAAFVILLLMVATALYLSLRTRYNEEIHLKVEMFLKTYGTSKPTRYTFSEVKKIASRFKVKVGQGGFGSVYRGELPNGVPVVVKMLENSKGEGDEFINEVATIGRIHHANIVRLLGFCLEGTRRALIYEYMPNDSLEKYIFSHDSDTSQEVLVPNKMLDIALGIARGMEYLHQGCNQRILHFDIKPHNILLDYNFSPKISDFGLAKLCARDQSIVTLTAARGTMGYIAPELYSRNFGEISYKSDVYSFGMLVLEMVSGRRNSDPSVESQNMVYFPEWIYEQVTAGQDLALGREMTEEEKATTRQLAIVALWCIQWNPNNRPSMTKVVNMLTGRLQNLQVPPKQFFSADSHPTL

SEQ ID NO: 8688 - protein, 514 aa, Yarrowia lipolytica CLIB122
MSSNTGQGPGIASPAPLTNGHTSQPSNTHQDAPVRPTLENGRSYINLDNLSKEKHLRTGSSSTIQEEEPSTRARRSASTSKPPLLVNQNQIQNHQHQQSQYNPQYQPPRVATPKRTPLFDSGQSYSQRFHNRSSSFSVRSARARSLSASSQEALKHLAPPVSVPLVVCCLMWYLSSAMSNTLGKAILTKFGYPVTLSQIQFLVAVCCGATTIQLSQMSPKFRQALPPGMVGPQGLIFPPTRDMLKTTAPMGCFQLSGHILSHMATGMIPVSLVHTIKALSPLFTVAAYRLLFNVQYSPSTYLSLIPLVTGVILTCSTSFRAQFMGIIYALLAALVFVSQNMFSKKLLTSGTTAGPGGPASATHTRKLDKLNILCYCTALAFLFTSPLWFFSEGWTLLKLFFRGEALVKDDSSLFVLMIQLLLNGVVHFAQNLLAFQVLSMVSPVTYSVASLLKRIVVIVWAIIWFGQSVSGIQGFGIFLTFTGLYLYDRCGGDKKKGGQGSSVDGTEKDAQLPK

SEQ ID NO: 8689 - protein, 947 aa, Debaryomyces hansenii CBS767
MTVPVVNGSSCLSLYGKNRDLILQAINFYTNVVGLTKDSEESGSVYLRSNNSKVVIKLEESDEALSGSEVKQFTEGLVSLLGVNDWRSIESCITLMVKDLNQLVVALEENNYPVQISPNELYPDEVYTVDPLGNVVGFTVCFNPLTVNPPVKKLAPWNPEQDTMSASTSEFSKIGENGGSSKKRRNIAVMTSGGDAPGMNAVVFAVVRAAIFRGSKAFCVMEGYEGLIRGGSEYIKEMHWQDVRSYLSEGGTNIGTARCMAFKERQGRLTACKHLIESGIDALIVCGGDGSLTGADLFRKEWPSLIKELKDTNAINEEKYETYKHLNICGVVGSIDNDMATTDATVGAYSSLARICQAIDYIDATANSHSRAFVVEVMGRHCGWLALMAGIATSADYILIPEKPASSKDWQEQMCEIVQKHRAKGKRKTIVIIAEGAITLDLKPISSNDVKDILVNRLGLDTRVTVLGHVQRGGTAVAYDRIIGTLQGVEAVKAVLDCTPQTPSPLIAITENKVVRKSLVEAVEITKSVATAIEERDFEKAMSLRETEFVEHLNNFMSMNSANHNEPTLPIEKRKKIAIINIGAPAGGMNSAVYSMATYCMSRGHIPYAIYNGFTGLSRHESVRLMDWLDIEGWTSVGGSEIGTNRATPDETDIGMIAYYFEKYQFDGLILVGGFEAFVSLDQLEKARSMYPAFRIPMVLIPATISNNVPGTEYSLGSDTCLNALMEYCDVVKLSASATRGRVFIIEVQGGNSGYIATFASLVSGAQASYVPEEGIALGQLEMDISSLKEAFSIERGISKAGKLLLKSTNASKVLTTQVLANVINQEANGEFDAKTAIPGHVQQGGLPSPIDRTRGARFAIKAVQYIEDTFDDIRPYRYEMNFPTDNKKVQATAAVLGVESSHLKFRSIRKLYDFETELNKRMPKKISWNEVRDIADQLVGRTRIQK

SEQ ID NO: 8690 - protein, 109 aa, uncultured prokaryote
WTMVAGGGASVVYADTIADLAGVKDLANYGEYSGGPTTAETQFYAETIFDLMTRHKDPRGKILIIGGAIANFTDVAKTFTGIINAFEKYADKLKEHKTKIYVRRGGPNY

SEQ ID NO: 8691 - protein, 236 aa, Oceanicola granulosus HTCC2516
MGAHPRRRGGPSRGGDGLMPALLFDLDGTLLETDPLHAAVFVDIFAEHGRDVDEAFYMKHIHGRLNAEIFEEYFPDSHTQEMADDKEARFRERLGGSAEPLPGLLALLERAEAAGWPMAVVTNAPRENAEAMLSAIGLDGRFATIVLGDDCPRGKPDPYPYAHAMRLLGVTPGQTLAFEDSRAGIASAAGAGATVLGVTTGLDADTLRAAGATATIRDYTDPALETEIRRIEGATA

SEQ ID NO: 8692 - protein, 316 aa, Colletotrichum gloeosporioides f. sp. malvae
MPAPFSARPCLAPFPPKQLFGVSQVLLQIRHPGCRGPGRLWTGLIRTHRISPGPATRILMASMSSAIRIHRDLKPGNLLVNADCELKICDFGLARGFSVDPEENAGYMTEYVATRWYRAPEIMLSFQSYTKAIDVWSVGCILAELLGGRPFFKGRDYVDQLNQILHILGTPNEETLSRIGSPRAQEYIRNLPFMPKKPFPQLFAQANPDALDLLDRMLAFDPSSRFSVEQALEHPYLHIWHNASDEPDCPTTFNFDFEVVEDVGDMRKMILEEVYRFRQLVRPSRQHPTGAQAAGQAGAGQVPFLWKPRLDSSDPD

SEQ ID NO: 8693 - protein, 109 aa, uncultured prokaryote
WTMVAGGGASVVYSDTVADLGAVKELANYGEYSGNPTRAETREYVKTVFDLMTRSRHPQGDKILIIGGAIANFTDVAKTFEGIIDAMKEYADKLKEVGVKIYVRRGGPN

SEQ ID NO: 8694 - protein, 498 aa, Nostoc punctiforme PCC 73102
MTTPLSCRNYINGQWLNAVGEATLESRNPADKTEIVATYPRSQVNDVDTAVASARKAYRSWRTVPAPARAEYIFRVGEILLQHKEELAQLISREMGKPLTEARGDVQEGIDCAFYSAGEGRRLFGQTTPSEMSNKFAMTVRMPIGVCALITPWNFPVAIPCWKAMPALVCGNTVILKPAEDTSACATKLIEIFQQAGLPPGVINLVHGVGEEAGKALVEHPNVDLVSFTGSSETGAFVGATCGRTHKRVCLEMGGKNAQIVMEDADLELALDGAVWGAFGTTGQRCTATSRLILHRDIKEKFTTMLYERTSKLRLGAGNDTDTDIGPIINEKQLQQVSKYLDIAREEGAKVLIGGEIASEGSLKNGYFFQPTILDRVTPDMRVAREEIFGPVVALIEVSSFEEAIAILNDSNYGLSSSVYTRDINRAFTAMRDIEAGITYINGPTIGAEVHLPFGGVKQTGNGHREAGTTALDVFTEWKSVYVDFSGSLQRAQIDNRS

SEQ ID NO: 8695 - protein, 586 aa, Astragalus sinicus
MCGILAVLGCSDDSQAKRVRILELSRRLKHRGPDWSGLHQHGDNYLAHQRLAIVDPASGDQPLFNQEKSIIVTVNGEIYNHEELRKQLPNHKFRTDCDCDVIAHLYEEYGENFVDMLDGIFSFVVLDTRDNSFLVARDAIGVTSLYIGWGLDGSVWIASELKGLNDECEHFEVFPPGHLYSSKEREFRRWYNPKWFSETVPSSPYDPLVLRHAFEKAVIKRLMSDVPFGVLLSGGLDSSLVASVTARYLEDTKAAKQWGAKLHTFCVGLKGAPDLKAGREVADYLGTVHHEFEFTIQDGIDAIEDVIYHTETFDVTTIRASTPMFLMSRKIKSLGVKMVLSGEGSDEIFGGYLYFHKAPNKKEFHEETCRKIKALYKYDCLRANKSTYAWGLEARVPFLDKDFINVAMDIDPEEKMIKRDEGRIEKWVLRKAFDDENKPYLPRHILYRQKEQFSDGVGYGWIDGIKDHAAKHVTAKMMLNASHIFPDNTPTSKEGYYYRMIFERFFPQNSARLTVPGGASIACSTEKAIEWDASWSNNLDPSGRAALGVHVSAYENQVNSSVGKGVEPEKIIPKMKVSPLGVAILG

SEQ ID NO: 8696 - protein, 351 aa, Polaromonas sp. JS666
MPKIIRDFRICQDCLRKATMSVNPDVTASAGGTPAEPDFFNLKVVRKEAVAQGIYLFELGHPEGLDLPAFTAGSHLTVQVPNGARRNYSLCSDPADTGCYQIAVKRDAAGRGGSISMADDVQVGQLLAVSAPRNNFELHPRASSFLFIAGGIGITPVLSMMRHLKRQGRNPFKLIYCTRDADSTAFVQELTGPEFAAHVQLHHTQGDASQALDLWPVFETPGSAHVYCCGPRGLMDAVADMSGHWPSGSIHFESFGVDASTYAADTAFTVRLHKTGINVPVDAGQTILQALRACGHHVSSSCESGTCGSCRTTLLAGEAEHRDMVLSDDDKTHQIMVCVSRAKSAELVLDL

SEQ ID NO: 8697 - protein, 111 aa, uncultured prokaryote
WTMVAGGGASVVYADTIADLAGGVEDLANYGEYSGGPTTDETRFYTETVLDLMTREKDPQGRDKILIIGGAIANFTDVAKTFTGIIQAFEKYADKMKDVGTRIYVRRGGPN

SEQ ID NO: 8698 - protein, 111 aa, uncultured prokaryote
WTMVAGGGASVVYADTIADLAGGVAELANYGEYSGGPTTDETRFYTETVLDLMTREKDPQGRDKILIIGGAIANFTDVAKTFTGIIQAFEKYADKMKDVGVRIYVRRGGPN

SEQ ID NO: 8699 - protein, 490 aa, Pseudomonas syringae pv. phaseolicola 1448A
MARFELQKLYIDGGYVDASNTETFDAINPANGEVLAQIQRAGKEDVERAVVAAEKGQKIWAAMTAVERSRILRRAVDILRERNDELAALETLDTGKAISETRYVDIVTGADVLEYYAGLVPAIEGEQIPLRDSSFVYTRREPLGVVAGIGAWNYPIQIALWKSAPALAAGNAMIFKPSEVTSLTTLKLAEIYTEAGVPNGVFNVLTGSGREVGTWITEHPRIEKVSFTGGTDTGKKVMASASSSSLKEVTMELGGKSPLIVFDDADLDRAADIAMMANFYSSGQVCTNGTRVFVPNALKAEFEAKILERVKRIRAGNPEDENINFGPLVSFEHMESVLGYIAKGKEQGARLLCGGDRLTGGVFDKGAFVAPTVFTDCTDEMTIVREEIFGPVMSILGYDTEEEVVRRANDTDFGLAAGIVTRDLNRAHRVIHLLEAGICWINAWGESAAQMPVGGYKQSGVGRENGISSLAQYTRIKSVQIELGDYASVF

SEQ ID NO: 8700 - protein, 110 aa, uncultured prokaryote
WTMVAGGGASVVYADTVADLGAVKELANYGEYSGNPSRTETREYVKTVFDLMTRERHPQGDKILIIGGAIANFTDVAKTFDGIIDAMNEYADKLKEVGVKIYVRRGGPNY

SEQ ID NO: 8701 - protein, 507 aa, Ashbya gossypii ATCC 10895
MSKNAEGNNKENGSESDLSVTIKLPNGVEYEQPTGLFINNEFVRSKLGGMMEVIAPATEEVVTRVYEGTSEDVDIAVSAAQKAFKSGKWFGADPMVRVKALSKLADLIEEDLEVIASIEFLDNGKVFSHARFDIGMVVNYLRCCAGLADKVDGRSIDTGSSHLTYTRREPIGVCGQIIPWNFPLLMWAWKVGPALATGNTVVLKTAEFTPLSALYVSNHVRKAGIPAGVVNIISGYGKTVGEAIIRHPGVKKIAFTGSTATGRHIYEVAAKDLKKVSLELGGKSPNIIFADADLKKAAQNVLNSIFFNGGEVCCAGSRMYIEEPIYEEFLQEIKAVAESVKVGDPSWKDTFQGAQTSQMQLDKILSYIEIGKQEGARVVTGGERLGEKGYYVKPTIFADVREDMRIVKEEIFGPVVTVTKFTNIDDLLEMANDTQYGLAAGVYSSSMKKAIDVANRLDAGTVWINTYNDFHCSVPFGGYKGSGFGREMGAEVVENYTQVKAVRALLL

SEQ ID NO: 8702 - protein, 603 aa, Lactobacillus plantarum
MVMKQTKQTNILAGAAVIKVLEAWGVDHLYGIPGGSINSIMDALSAERDRIHYIQVRHEEVGAMAAAADAKLTGKIGVCFGSAGPGGTHLMNGLYDAREDHVPVLALIGQFGTTGMNMDTFQEMNENPIYADVADYNVTAVNAATLPHVIDEAIRRAYAHQGVAVVQIPVDLPWQQIPAEDWYASANSYQTPLLPEPDVQAVTRLTQTLLAAERPLIYYGIGARKAGKELEQLSKTLKIPLMSTYPVKGIVADRYPAYLGSANRVAQKPANEALAQADVVLFVGNNYPFAEVSKAFKNTRYFLQIDIDPAKLGKRHKTDIAVLADAQKTLAAILAQVSERESTPWWQANLANVKNWRAYLASLEDKQEGPLQAYQVLRAVNKIAEPDAIYSIDVGDINLNANRHLKLTPSNRHITSNLFATMGVGIPGAIAAKLNYPERQVFNLAGDGGASMTMQDLATQVQYHLPVINVVFTNCQYGFIKDEQEDTNQNDFIGVEFNDIDFSKIADGVHMQAFRVNKIEQLPDVFEQAKAIAQHEPVLIDAVITGDRPLPAEKLRLDSAMSSAADIEAFKQRYEAQDLQPLSTYLKQFGLDDLQHQIGQGGF

SEQ ID NO: 8703 - protein, 508 aa, Bacillus cereus G9241
MILDADIKTQLSQYLQLMENDILLKVSAGDDDVSKDMLALVDELATMSSKITVEKVELERTPSFSVNRPGEDTGVVFAGIPLGHEFTSLVLALLQVSGRAPKVEQKLIDQIKNIQGEYHFESYISLSCHNCPDVVQALNVMSVLNSGITHTMIDGAAFKEEVESKDIMAVPTVFLNGESFGSGRMTLEEILAKMGNGPDASELSDKDPYDVLVVGGGPAGASAAIYAARKGIRTGIVAERFGGQVMDTMGIENFISVKRTEGPKLVASLEEHVKEYDIDVMNLQRAKRLEKKELIEVELENGAILKSKSVIVSTGARWRNVGVPGEAEFKNKGVAYCPHCDGPLFTGKDVAVIGGGNSGIEAAIDLAGIVKHVTVLEFMPELKADAVLQERLNSLPNVTVLKNVQTKEITGTDKVNGISYIDRETEEVHHIELQGVFVQIGLVPNTDWLGETVERVRGEIVTDKHGATNVPGVFAAGDCTNNPYKQIIISMGSGANAALGAFDYLIRN

SEQ ID NO: 8704 - protein, 612 aa, Saccharomyces cerevisiae
MAEMKNSTAASSRWTKSRLSHFFPSYTNSSGMGAASTDQSSTQGEELHHRKHCEEDNDGQKPKKSPVSTSTMQIKSRQDEDEDDGRIVIKPVNDEDDTSVIITFNQSISPFIITLTFVASISGFMFGYDTGYISSALISINRDLDNKVLTYGEKELITAATSLGALITSVGAGTAADVFGRRPCLMFSNLMFLIGAILQITAHKFWQMAAGRLIMGFGVGIGSLISPLFISEIAPKMIRGRLTVINSLWLTGGQLIAYGCGAGLNHVKNGWRILVGLSLIPTVLQFSFFCFLPDTPRYYVMKGDLKRAKMVLKRSYVNTEDEIIDQKVEELSSLNQSIPGKNPITKFWNMVKELHTVPSNFRALIIGCGLQAIQQFTGWNSLMYFSGTIFETVGFKNSSAVSIIVSGTNFVFTLIAFFCIDKIGRRYILLIGLPGMTVALVICAIAFHFLGIKFNGADAVVASDGFSSWGIVIIVFIIVYAAFYALGIGTVPWQQSELFPQNVRGVGTSYATATNWAGSLVIASTFLTMLQNITPTGTFSFFAGVACLSTIFCYFCYPELSGLELEEVQTILKDGFNIKASKALAKKRKQQVAEGAAHHKLKFEPTQEIVES

SEQ ID NO: 8705 - protein, 139 aa, Ashbya gossypii ATCC 10895
MAFPNASKKNRPTLKVGDLCYARVSSAEKDLEAVLECMDSSTGRDAGFGQLDGGMVAEVSLGFARELLLNEAFPLLPEMARHAQFEVAIGVNGKIWVKAETVRTTLCCIRAIEACQERPQAEFKTTVKRVFKELREGTE

SEQ ID NO: 8706 - protein, 133 aa, Medicago truncatula
MILDKKNIEETHYEVLNVKEDANYEEIRASYRSAALNLHPDKLLKTSDASRSNQTTSERFLKVHKAWEILSNSTSRLIYDKELKSSRREDFLASEVAEELRLQDMTVEDAGETLELFYQCRCGDYFSVDSLEL

SEQ ID NO: 8707 - protein, 458 aa, Arabidopsis thaliana
MEEGLLRHENDRDDRRITACVILSTFVAVCSSFSYGCANGYTSGAETAIMKELDLSMAQFSAFGSFLNLGGAVGALFSGQLAVILGRRRTLWACDLFCIFGWLSIAFAKNVLWLDLGRISLGIGVGLTSYVVPVYIAEITPKHVRGAFSASTLLLQNSGISLIYFFGTVINWRVLAVIGALPCFIPVIGIYFIPESPRWLAKIGSVKEVENSLHRLRGKDADVSDEAAEIQVMTKMLEEDSKSSFCDMFQKKYRRTLVVGIGLMLIQQLSGASGITYYSNAIFRKAGFSERLGSMIFGVFVIPKALVGLILVDRWGRRPLLLASAVGMSIGSLLIGVSFTLQEMNLFPEFIPVFVFINILVYFGFFAIGIGGLPWIIMSEIFPINIKVSAGSIVALTSWTTGWFVSYGFNFMFEWSAQGTFYIFAMVGGLSLLFIWMLVPETKGQSLEELQASLTGTT

SEQ ID NO: 8708 - protein, 441 aa, Kluyveromyces lactis NRRL Y-1140
MSSNQDFQPVTESASSVTKFQQNPYGPNPADYLSNVNNYQLIDSTLREGEQFANAFFDTEKKIEIAKALDDFGVDYIELTSPVASEQSRRDCEAICKLGLKAKILTHIRCHMDDARVAVETGVDGVDVVIGTSKFLRQYSHGKDMNYIAKSAIEVIEFVKSKGIEIRFSSEDSFRSDLVDLLNIYKTVDKIGVNRVGIADTVGCANPRQVYELVRTLKSVVSCDIECHFHNDTGCAIANAYTALEGGARLIDVAVLGIGERNGITPLGGLMARMIVAAPEYTKSKYKLHKIRDIENLIAEAVEVNIPFNNPITGFCAFTHKAGIHAKAILANPSTYEILDPHDFGMKRYIHFANRLTGWNAIKSRVDQLNLNLTDDQVKEVTAKIKKLGDIRPLNIDDVDSIIKDFHAEVSTPQLRAVRRDDNDVNDIDIQEPSNKKTKVE

SEQ ID NO: 8709 - protein, 416 aa, Nocardioides sp. JS614
MSKRVVVTGLGTTSPVGGDVPSTWDALVNGRSGVRFLTDDWAEQMPVKIAGRIAVEPTEILERVKARRLDRSSQFAMVAAMEAWKDAGLEGSDVDRDRLGVAMASGIGGVTTLLDNYDALREKGPRRVSPLAVPMLMPNAPAAQLSLYVGARAAVNTPVSACASGNEAISLAVDQIRLGRADVVLAGGTEAAIHPLPMAAFANMMALSKTASGPDGGDPTAVSRPWDVARDGFVLGEGAGVLVLESEEHARARGARIYATVLGAGITADSHDIAQPDPEGRGGSRAILRALAEADISPGDIAHVNAHATSTPQGDIAEGLMLHATLGAHATDVVVTSTKSMTGHLLGGAGALEAIATVLALHHRVAPPTINLDNQDPQVELDIATKARDLPLGDIAALNNSFGFGGANVAVAFGSV

SEQ ID NO: 8710 - protein, 251 aa, Triticum aestivum
  misc_feature (170)..(170): Xaa can be any naturally occurring amino acid
MHKLGRGSRDKVQQFMAITGASEKVALQALKASDWHLEGSFDYFYSQPQISVTNSRHLEDLYSRYKERDADMIMVEGTSQLCNDLLVDPQDVVMLVISWHMKAATMCEFTRQEFIDGLQSIGVDSIEKLREKLPSLRAEIKDDNKFREIYNFAFAWAREKGQKSLPRETXPIGMWRLLFAERHWPLIDHWCQFLQVRHNKAISRDTWSQLLEFVKTIDPQLSNYDEEGAWPYLIDEFVEYLTENGCVQRNK

SEQ ID NO: 8711 - protein, 951 aa, Pseudomonas fluorescens Pf-5
MTVNLSTANEFIARHIGPRQGDEQAMLNSLGFDSLEALSASVIPESIKGTSVLELGHGLSEAQALASIKAIAARNQLFKTYIGQGYYNCHTPSPILRNLLENPAWYTAYTPYQPEISQGRLEALLNFQTLISDLSGLPIANASLLDEGTAAAEAMTFCKRLSKNKGSHAFFASQHCHPQTLDVLRTRAEPLGINVVVGDERKLTDVSPFFGALLQYPASNGDLFDYRELTERFHAANALVAVAADLLALTLLTPPGEFGADVAIGSAQRFGVPLGFGGPHAAYFATRDAFKRDMPGRLVGVSVDRFGKPALRLAMQTREQHIRREKATSNICTAQVLLANIASMYAVYHGPKGLTQIAQRIHQLTAILAKGLVQLGLTVEQESFFDTLSLHTAGRTAALHDKARAQGINLRVIDAERLGLSLDETTTQADVETLWSLLADGKPAPDFAALAAAVTSGIPAALARQSAILSHPVFNRYHSETELMRYLRKLADKDLALDRTMIPLGSCTMKLNAASEMIPITWAEFGALHPFAPAEQSAGYQQLTTELEAMLCAATGYDAVSLQPNAGSQGEYAGLLAIRAYHQSRGDERRDICLIPSSAHGTNPATANMAGMRVVVTACDARGNVDIEDLRAKAIEHREHLAALMITYPSTHGVFEEGIREICGIIHDNGGQVYIDGANMNAMVGLCAPGKFGGDVSHLNLHKTFCIPHGGGGPGVGPIGVKSHLAPFLPGHAALENKKGAVCAAPFGSASILPITWMYISMMGGAGLKRASQLAILNANYISRRLEEHYPVLYTGSNGLVAHECILDLRPLKDSSGISVDDVAKRLIDFGFHAPTMSFPVAGTLMIEPTESESKEELDRFCDAMIRIREEIRAVENGALDKDDNPLKNAPHTAAELVGEWSHPYSREQAVYPVASLVEGKYWPPVGRVDNVFGDRNLVCACPSIESYQDA

SEQ ID NO: 8712 - protein, 735 aa, Brassica oleracea
MEVCNCIEPQWPADELLMKYQYISDFFIAVAYFSIPLELIYFVKKSAVFPYRWVLVQFGAFIVLCGATHLINLWTFTTHSRTVALVMTTAKVLTAVVSCATALMLVHIIPDLLSVKTRELFLKNKAAELDREMGLIRTQEETGRHVRMLTHEIRSTLDRHTILKTTLVELGRTLALEECALWMPTRTGLELQLSYTLRQQHPVEYTVPIQLPVINQVFGTSRAVKISPNSPVARLRPVSGKYLLGEVVAVRVPLLHLSNFQINDWPELSTKRYALMVLMLPSDSARQWHVHELELVEVVADQVAVALSHAAILEESMRARDLLMEQNVALDIARREAETAIRARNDFLAVMNHEMRTPMHAIIALSSLLQETELTPEQRLMVETVLKSSSLLATLMNDVLDLSRLEDGSLQLELGTFNLHTLFREVLNLIKPIAVVKKLPITLNLAPDLPEFVVGDEKRLMQIILNIVGNAVKFSKQGSISVTALVTKSDNRAPPDFFVVPTGSHFYLRVKVKDLGAGINPQDIPKLFTKFAQTQSLATRSSGGSGLGLAISKRFVNLMEGNIWIESEGVGKGCTAIFDVKLAISNESKQSGIPKVPANPQHVNFAGLKVLVMDENGVSRMVTKGLLVHLGCEVTTVSSNEECLRVVSHEHRVVFMDVCTPGVENYQIALRIHEKFTKRHQRPLLVALTGNTDKSTKEKCMSFGLDGVLLKPVSLDNMRNVLSDRLEHRVLYEAM

SEQ ID NO: 8713 - protein, 432 aa, Geobacter metallireducens GS-15
MTTITPSLTTLPNGLRVVAVEMPHLNSAEIAVYLRVGGRHDSREKAGLAHFLEHMLFRGTAEHPSSLELEADFEAIGGCINAATDAETTCYYTRVHPDHVAEGVRLLSVMLLSPLLTGLEIEKKIITEEALEDINEQGEEVNPDNLASRLLWPGHGIGMPTIGYLDTIAGFTEEDLRGHMARHYVPENAVVVAAGRVSVEEVFAAAGRAFASWSGPPAPVQESVSDVQDAPVSLFVKDSDSQVNLQLAFRSFPREDQRLAAARLIRRILTGGGCSRLHLNLRERLGIVYSVDAQLAAYDDTGCFAVELSTAPENLAVAVTEVLRETLRLATEPVGDEELDRVRQGYFFDLDYSRDSTFDMQVRYGWGELMGMVRSIEEDQAEAGAVDAAAVMATARELFAPARLNLVAVGPVKAAVKREIAGIVRRYEAEFR

SEQ ID NO: 8714 - protein, 462 aa, Zymomonas mobilis subsp. mobilis
MAIELKMPALSPTMEEGTLTRWLVKEGDSIKAGEILAEIETDKAIMEFEAVDEGVITKILIPEGSENVKVGTAIAYLGTDANDVTLEGASAETKAEESAPVASPAKTEAAALEEAATPSLGKVINSAPEIPEGTEFFQQTLREALRDAMAEEMRRDDRVFVMGEEVAEYQGAYKVTQGLLQEFGARRVVDTPISEYGFSGIGVGAAMEGLRPVIEFMTMNFSMQAIDHIINSAAKTHYMSGGQVRCPIVFRGPNGAAPRVGAQHTQNFGPWYAAVPGLVVLAPYDAIDAKGLLKAAIRSDDPVVFLECELLYGKTFDVPKMDDFVLPIGKARIIREGKDVTIVSYSIGVSFALTAAEALAKEGIDAEVIDLRTLRPLDKETILQSLAKTNRIVTVEDGWPVCSISSEIAAIAMEEGFDNLDAPVLRVTNADTPTPYAENLEKKGLVNPEAIIEAVRKVCYRK

SEQ ID NO: 8715 - protein, 300 aa, Mycobacterium sp. JLS
MTKWTTADIPSQSGRTAVVTGANTGLGLETAKALAARGAHVVLAVRDTEKGKRAADEIAAAHPEAAVSVQSLDLGSLRSVRAAAEALKADFPRIDLLINNAGVMYPPKQTTEDGFELTFGTNHLGHFALTGLLLENVLAAPNSRVVTVSSQGHRIRAAIHFDDLQWERSYSRVGAYGQSKLSNLLFTYELQRRLDTRDAIAVAAHPGVSNTELMRHLHLPSVFNPLVGVLTQSPTMGALPTLRAATDPTVRGGQYFGPSGLGEIRGYPELVTSSAQSRDVDLARRLWTVSEELTGVAFPL

SEQ ID NO: 8716 - protein, 414 aa, Chondrus crispus
MAFVAPVATVRATTKSSVCQVQGRSTFAQFSGMKKVNQSSRLQPAQSGSAFGGYSDANDAFYTRVSGIVAATFGPTMKVRVAINGFGRIGRNFIRCWAGRSDSNMEVVCINDTSGVKTASHLLKYDSILGTFDADVSAGEDTISVNGKTIKIVSNRNPLQLPWKEMNIDIVVEATGVFVDAPGAGKHIEAGAKKVLITAPGKGDGIGTFVVGVNEKDYSHDKYDIVSNASCTTNCMAPFMKVLDDEFGVVRGMMTTTHSYTGDQRLLDAGHRDLRRARSAALNIVPTTTGAAKAVALVVPSLKGKLNGIALRVPTPNVSVCDVVMQVNKKTFKEEVNGALLKASEGAMKGIIKYSDEPLVSCDHRGTDESTIIDSSLTMVMGDDMIKVVAWYDNEWGYSQRVVDLGEVMARQWK

SEQ ID NO: 8717 - protein, 454 aa, Vibrio vulnificus CMCP6
MTITNPFNDEVIGTVPNMGEKETQEVIAGADKAFQQFKALTAQERANLLHRWHQLILEHSDELAHIMTLEQGKPLAEAKGEVLYAASFIEWFAEEARRAYGTLVPSHKANAKILVTKEPIGVVAAITPWNFPAAMITRKCGPAFAAGCPVILKPAPDTPFTALALAVLAEKAGFPAGVFNVITGDAVAIGGELTSNKRVRKLSFTGSTPVGKLLMRQSADNIKKLSLELGGNAPFIVFEDADLDAAVEGAMIAKFRNAGQTCVCANRLYVQRSVYSEFCQKLVAKVSALKVGNGFDQGVHIGPLINDAAVAKVVQHVEDAQSKGAQIECGQLPTAGSRLVQPLVLSGVTDEMLVAQEETFGPMAPLFVFDSEEEVLARANNTDFGLAAYFYTQSLSRAWRMSEALEAGIVGINEGLISTTVAPFGGVKESGLGREGSFLGMDDYMESKYILMGL

SEQ ID NO: 8718 - protein, 562 aa, Pyrococcus abyssi GE5
MSGARALVKALEKEGVKHTFGIIGGSIMPVFDELLESSIRHITTRHEQGAAHAADGYARVSGKPGVAITTSGPGATNLVTGIANAYMDSSPIVAITGQVPTHMIGKMAFQETDIISITKPITKWNYQIRNPREVPKAVKMAFTIATLGRPGPTLLDFPKDAQTGEDEINFDVDVSRLVTPWRPPKLDACPEEVKKAVDMILSAERPVFIVGGGVVWSGATEEVLAIAEYLMIPIMSTFMGKGAVPENHPLYIGNLGMHGKIAANKLLPQTDLIIAVGMRWSDRTVSEFENFAPEAKIIHIDIDPKEVGKNVKVDLGIVGDAKRVLRSIYSEITRGVKKREDWPWLKKVREFQEKYKEELIPLDGNYLRPPEILKELRKILPEDAIVATEVGQNQMWVALYFPILKPRTFLTSGGLGTMGFGFPAAIGAKVAKPDKVVIDIAGDGSFMMSERELATAVNENLPVIVVILNNSSLGMVAQWQRMFFNRRYVATYFKKNPDFVKLAEAYGAQGFRAETMEELLKAVKEGMNSEVPTVIDVPIHPEDDVLPMVPPGEHISKVVTRY

SEQ ID NO: 8719 - protein, 486 aa, Pyrococcus abyssi GE5
MRKVYIFDTTLRDGEQTPGVSLTVEEKVEIAKQLAKLNVDVIEAGFPIASEGEFKAVKKIATEVEDPTIAALARAVEKDIDRAGEALRNAEKNRIHTFIATSPIHMKYKLRKEPEEVKKLAVKAVEHATKYTEDVEFSAEDATRSDWDFLVEVYEAVIDAGATVINVPDTVGYATPEEFYELVRYLRRNISNIKGVQISVHCHDDLGLAVANSLSAIRAGADQVEVTVNGIGERAGNAALEEVIVALDVRRDFYKVKTDVNLKEIARTSKLVSHLTGIEVPPNKAIVGGNAFAHESGIHQDGVLKERTTYEIIDPKKLGFSGSKIVLGKHSGRHAFRKKLEELGYSLTEEHLERAFKKFKDIADRKRWITDTDIEAIIQEELTKSNGKLKVEIIHVTSGKVSTATVRISMNGEERIEVAWFKNGPIDALFSAINKALGEEFKLREYRVSSVTSGKDSLGEVLVRVEVNGEIFVGRGLSTDIIEASA

SEQ ID NO: 8720 - protein, 460 aa, Staphylococcus aureus subsp. aureus NCTC 8325
MKVSKFGGSSVSNATQIKKVLNIVNSDPERKIVIVSAPGKRHDNDIKTTDLLIRLYEKVINHLDYHDKKREIIQRYDDIVKELQMDESILRTIDVTLEHYINQLKNEPKRLLDALLSCGEDFNAQLIALYNNSQGIPTKYISPKEAGIFVTDVPQEAQILDSAYSEIKKLRDYDEKLIIPGFFGVSHEGYIVTFPRGGSDITGAIISSGVRATIYENFTDVSGIYKANPNIIKDPELIEEITYREMRELSYAGFSVFHDEALQPLYKDRIPVVIKNTNRPQDKGTFIVHDREINAKNVISGISCDKDFTVINIKKYLMNRQVGFTRKILGVLEDNNISFDHMPSGIDTISIVMRSKQIQNKETKVLNEIRQKCDVDELSIEHDLAILMIVGEGMNKVIGTANKITHALAESKINLKMINQGASEISMMFGIHVDDAEKAVLSTYEFCYHGVALKNLCDKN

SEQ ID NO: 8721 - protein, 130 aa, Brassica napus
  misc_feature (87)..(87): Xaa can be any naturally occurring amino acid
  misc_feature (113)..(113): Xaa can be any naturally occurring amino acid
RPVKSQKSPFQAIQIIKLPKELEKDTIHCYNSNGFKLHRVPVPRPGKVLGLVGTNCILKSTALQILAGKIKPNLGRYNNPPDWHEIXAHFCGSELQSFIRIVEEKLKTAIVLXKPQYVDAMKKFLKVRLG

SEQ ID NO: 8722 - protein, 450 aa, Frankia sp. EAN1pec
MSKPTQRSRPDDAHGPASRDGGPRRTAVTGVGVVAPGGSNRKEFWTLLTDGRTATRRLSFFDPSPFRSQVAAECDFDPLAAGLTRQEIARNDRFVQFALAAAAEAVADSGLDLGLGVGGTEREPGDGPVVGVSMGSAVGATTRLENEYVVVSDGGKHWEVDPRYASSFLYHALVPSCLATEIACRFGAHGPSFVVSTGCTSGIDAVGYGHQLIVDGEADIVIAGASDAPLSPISIACFDAIRATSARNDDPEHASRPFDASRDGFVMGEGSAVLILEELESARARGAHIYCEVGGYASRSNAFHMTGLRPDGVEMAEAIRIALDQARLDPSAVDYVNAHGSGTKQNDRHETAAFKRSLGAHAHEVPVSSIKSMVGHSLGAIGSIELAACALAIEHNVVPPTANWSTRDPECDLDYVPNTARDHTVDAALSVGSGFGGFQSAIVLTSADRA

SEQ ID NO: 8723 - protein, 374 aa, Nierembergia sp. NB17
MASEAVHASPTVCVTGAAGFIGSWLVMRLLERGYNVHATVRDPENKKKVKHLQELPKADTNLTLWKADLAVEGSFDEAIKGCQGVFHVATPMDFESKDPENEVIKPTVQGMLSIIESCVKANTVKRLVFTSSAGTLDVQEQQKLFYDETSWSDLDFINAKKMTGWMYFVSKILAEKAAMEEAKKNNIDFISIIPPLVVGPFITPSFPPSLITALSLITGNEAHYCIIKQGQYVHLDDLCEAYIFLYEHPKAEGRFICSSHHAIIYDVAKMIREKWPEYYVPTEFKGIAKDLPVVAFSSKKLTDMGFQFKYTLEDMYKGAIETCRQKQLLPFSTNRPSENGLDKEAISISSENFASGKENAPVANHKVKLTSVEI

SEQ ID NO: 8724 - protein, 347 aa, Camellia sinensis
MKDSVASATASAPGTVCVTGAAGFIGSWLVMRLLERGYIVRATVRDPANLKKVKHLLDLPKADTNLTLWKADLNEEGSFDEAIEGCSGVFHVATPMDFESKDPENEVIKPTINGVLSIIRSCTKAKTVKRLVFTSSAGTVNVQEHQQPVFDENNWSDLDFINKKKMTGWMYFVSKTLAEKAAWEAAKENNIDFISIIPTLVVGPFIMPTFPPSLITALSPITRNEGHYSIIKQGQFVHLDDLCESHIFLYERPQAEGRYICSSHDATIHDLAKLMREKWPEYNVPTEFKGIDKDLPVVSFSSKKLIGMGFEFKYSLEDMFRGAIDTCREKGLLPHSFAENPVNGNKV

SEQ ID NO: 8725 - protein, 228 aa, Triticum aestivum
MTSVWKTKVLPGLNKIFDKDGKKAAAAEFLKSFNKEEIDKEIEDKKTELEPKVVETIEASPPEIKGLIKDKKTSKIRKNSVAVTKFLDDLAKIDFPGAKLVSDAVAKSGTTPLSPAIVFILDKVAPFVPAPKEEPKVEPEVAAAAPAEETTTREVAVEEEKKEEAKPSAAPAEAAAPAEAAAPAEVVEEKKEEKPVEAAAPARRGAREEVIGRRRPDSKSNPSHHLAC

SEQ ID NO: 8726 - protein, 304 aa, Xanthomonas axonopodis pv. citri str. 306
MTTLRIATRKSPLALWQSEHVADALRQHHPGLEVVLVPMSTRGDEVLDRSLAAIGGKGLFLKELELAMLRGEADCAVHSLKDVPMELDEPFVLPAILERGDPADALVSNLYASLQALPLGARVGTSSLRRQAQLRAARPDLELIDLRGNVNTRLAKLDNGGYDAIVLACAGLQRLGLEARISARLDAPEWLPAPAQGAVAVECRGDDARIHSLLAVLDAGRTRVCVEAERAMNRALHGSCHVPVAAFARWEGQDLFLQGMVGSASDGRLIHADAHGSADDTEALGRRVAQGLFDKGAAQLLAEL

SEQ ID NO: 8727 - protein, 499 aa, Deinococcus radiodurans R1
MTKDGGKKDNQGQDKKAQQYGVTPQSVDFNDWYNEVVKKADLADNSPVAGAMVVRPYGSALWENIQRWLDDRFKASGHESLIFPTLIPMNFIMKEADHVEGFAPELFTVNKIGTEELAEPYVMRPTSETIIGHMWSGWLNSYRDLPFLHYQWGSVFRAELRTKAFLRTSEFFWHEGHTAHADEAEARAEVRQQLDLYHEFCRDVLALPVVRGEKTASERFAGAVATYSIEGMMRDGKALQSGTSHYLGQNFSRAFDVKYQTREQKEEFAHTTSWAISSRIIGAIIMTHGDDSGLMMPPRIAPIQVVVIPVGRKDNFDQMVQEGEKLAAELRAQGLRVKVDGRDGVTNGFKYNDWELKGVPVRIELGPRDLESGVLVVKNRHSEDKETLPRAEAVSGMSARLDTIHDFLMKRATDFLLANTAEVDSYDAFQREIEAGHWVRAYHCGEPACEKSIKEDTKATARNVPFDDAEFFAERGEGQCVKCGQPSAYGKRVLFGRQY

SEQ ID NO: 8728 - protein, 523 aa, Oryza sativa (japonica cultivar-group)
MACVLRLASRSRSRSGLRPTLAAPRPSPVPPPPPRVGPTPVAPSPAPLRGLLLPLSPLRLASPDAFSSSSPSPAWLLDGLNWRRAGIGRRWFATEASAASTAAELVDVPLAQTGEGIAECELLRWFVTEGDQVDEFQRLCEVQSDKATIEITSRFKGKVHQIHFGPGDIVKVGETLLKMMVGDSQTVSHDSIASSTDHSHAVDAANPSGEGSVPSGTLSTPAVRHLAKQYGLNISDIQGTGKDGRVLKEDVLSYAASKGLCKEPTSALEENIDQVELLEGRGSLPDANSYEDRRISLRGYQRSMVKSMTLAAKVPHFHYLEEINCDALVELKASFQNANKDHTIKHTFLPFLIKSLSKALSKYPLLNSCFVEETNEVIFKGSHNIGVAMATEHGLVVPNIKNVQSLSILEITKELSRLHEMASHNRLSTEDIAGGTITLSNIGAIGGKFGSPLLNLPEVAIIALGRIQKLPRFDDDENVYPSSIINVTVGADHRVVDGATVARFCNEWKSLVEKPERLLLHMR

SEQ ID NO: 8729 - protein, 991 aa, Medicago truncatula
MASRHIDGVREIQRYSEGKVYRRKVFKGIKINPNIEETVLKDENIPTTIVTSDTDNNNGTTLENIDEAPEFAVLGDGNLAKAEGSSRLEDGSSIQQQLGDQNLVEEHASSRTGDRNSPQQQLEELNSAQPHASFQLADGNSPQQKVENQDSAHPQASLRIGDGNSPQQQLVEPNLAQPQASLRAGDGNSPQRQLEEENSAQPQASSRTGDGNLPHQQLEDQYSAQPPASLRIGDGNSLRQKVEGHNLVQPQASSIIEDGNSPRQKTEDQSLAQPPVSSRTDDGDSAQQQVEDQNLAQTHVSSRTEDVNSPRPQNSTQKDGDSPQILENSRPEDASLTQPEVNSRLEDRSFPQPELNSKLEDMTSQQQDNSILEDGNSSQPQLNLRLEGSSLQPVANSTSEDLNLAQPLSQSVFDDLHINQQAEPSNLNVRQEDDRPSSPIHRQGAISDNLHSHQQVEPSNPNVLLEDDGPSSPIHRHKAVPSTEYRHSENVTEEPNLEDRIKINLASTSKQEKQEMCLKLESELDAVRSLVKRIEVKQGYVGGYGNSNVVLGGGITNGGGAQRAHSEAGSVGVSRQPTRPLHQLSFPMFQNSRRASEGVEKEKRMPKANQFYHNSEFLLANDKFPPAESNKKSKLNWKKQGGGDMGLGLQMGSKFFKSCSSLLEKLMKHQYAWVFNTPVDVDGLGLHDYFTIITNPMDLGTVKTRLNKNWYKSPKEFAEDVRLTFHNAMTYNPKGQDVHAMAEQLSKIFEDRWAIIESDYNREMRYGMDYGAPSPLSRRVPAFTPPPPLDMRRILDRQEPFARTPRSMNNTPSSRTPAPKKPKAKDPNKRDMTYDEKQKLSTSLQSLPVEKLDAVVQMMRKKNLELNQQDDEIEVDFDAVDAEILWELDRFVLNYKKSLSKNKRKAEQARERAEALQNSVQSSQPPATAQIPREKQADERNVPPSLPMQGGSQADNKSRSSSSSSDSGSSSSDSDSDSSSSSGSDAGSRGT

SEQ ID NO: 8730 - protein, 242 aa, Chlamydophila caviae GPIC
MLSDCYTDPFLSDFCSGRRPLRIASRRSTLAQAQAHECVCLLRSWFPKLWVQIHTVHTLGDKDKKTPLHLVENSQFFTDAVDKLVLRGNCHLAVHSAKDLPNPSKTSIVAITNGLDPSDLLVYGERYLWKRFPKNPRLGSSSLRRGEMLKNLFPKGQILDIRGTIEERLKQLESGKYDAIVVAKAAVIRLHLRLPYTKTLPPPYHPLQGRLSITAAKNIEAWKKLLLPLNASDLTQDKHGLV

SEQ ID NO: 8731 - protein, 364 aa, Kluyveromyces lactis NRRL Y-1140
MAFWWKKSPKTPSDYVRHLIEQLDKLESSSIGSDNRKKAQDECGRHIAGTKHFLLKETDPVPTQEALDELYYSIYQSDLFFMLLHSFPNLDFEARKDVAMIYCICLGRSKDNKLPTVDYLLAKPKFMSTLLKTSETCITKPGGSDIFLTASGMILETIKQEQLCRIIIRDPQIWKYFDFTRLGSFEISSSSLQVLTELFTAHPKLVSTEFFCNEENLTRFIDKINKLMAHGNYVTKRQSVKLLGTLIFNRINKTLMTTYINNSDNVKLVMILLSDRSKNLQLESFNIFKVVVANPRKSKPVLDVLVKNRDKLLNFFEQFGTDNKDSTFLDEKEFIVEQIEALPRIVAANGEYALGTSPQKNLVM

SEQ ID NO: 8732 - protein, 106 aa, Synechococcus sp. WH 5701
MAVAVFTDANFEADVLAASGTVLVDVWASWCGPCRLMAPLMDWAAAEYGDRLLVGKLEADPNPAARDSQKIQGLPTLILFREGQELARHEGAMAKPQLKAFLDAHL

SEQ ID NO: 8733 - protein, 500 aa, Schizosaccharomyces pombe
MAKKDKTSVKKSVKETASKKGAIEKPSKSKKITKEAAKEIAKQSSKTDVSPKKSKKEAKRASSPEPSKKSVKKQKKSKKKEESSSESESESSSSESESSSSESESSSSESESSSSESSSSESEEEVIVKTEEKKESSSESSSSSESEEEEEAVVKIEEKKESSSDSSSESSSSESESESSSSESEEEEEVVEKTEEKKEGSSESSSDSESSSDSSSESGDSDSSSDSESESSSEDEKKRKAEPASEERPAKITKPSQDSNETCTVFVGRLSWNVDDQWLGQEFEEYGTIVGARVIMDGQSGRSKGYGYVDFETPEAAKAAVAANGTKEIDGRMVNLDLPNPRPANPQPYAQQRAGNFGDQLSEPSDTVFVGNLSFNATEDDLSTAFGGCGDIQSIRLPTDPQSGRLKGFGYVTFSDIDSAKKCVEMNGHFIAGRPCRLDFSTPRTGGGSRGGRGGFGGRGGFGGRGGFGGGRGRGRGGARSGNPNRGSVAPFSGNKVTFD

SEQ ID NO: 8734 - protein, 213 aa, Ustilago maydis 521
MNAPPPQQGPPAPTAEQLAITDAEFQQVPLALDPESHTLHTPVPELDLTVLNALIRSLQGLPPNVAFPPPPNAIAPQRSMAINQAKEQGNAAYRNRDWAEAVKMYTLAIDVAASRPLWEANQVARDELSLCLANRSAAFASCEDWIGALCDAEAVTQLKKPWAKGHYRKGKALLGLKRWKEARDAFELGLQFDPDNADLKTALNELPRDKNQL

SEQ ID NO: 8735 - protein, 80 aa, Solanum tuberosum
EDDHAIATILAEEEENARKYGGKLGKRLSHLDSIPHTPRVIGEIPDPNDATLDHGRLSSRLATYGLFEMQIEGDGNCQFR

SEQ ID NO: 8736 - protein, 263 aa, Sinorhizobium meliloti
MTPMTGPILTRREGGILEVTIDRPKANAIDLKTSRVMGEIFRDFRDDPELRVAIITGAGEKFFCPGWDLKAAAEGDPVDGDYGVGGFGGMQELRDLNKPIIAAVNGICCGGGLEIALSTDIILAAEHASFALPEIRSGTLADAASIKLPKRIPYHIAMDMLLTGRWLDVVEANRWGFVNEILPAGRLMDRAWELARLLESGPPLVYAAIKEVVRDAEGRDFQTTMNKVTRRQFRTVDVLYSSEDQLEGARAFAEKRDPVWKGR

SEQ ID NO: 8737 - protein, 399 aa, Propionibacterium acnes KPA171202
MAVKKVALLTAGGFAPCLSTAISGLIQRYTEVAPEVEIIAYKHGYEGLLKGDFLEVTDTVRKNAEILKRFGGSPIGNSRVKLTNAADLVKRGLVAEGDDPLKVAADRLVADGVDILHTIGGDDTNTTAADLAAYLAENNYGLTVVGLPKTIDNDVVPIRQSLGAWTAAEQGSRFAQNIVGEHNSGSRMLIVHEVMGRNCGWLTAATAAKYREWLDTQQWLPEIGLSKKAWDVHAVYVPEAHIDLEAEAARLNKVMDEVGNVTIFLSEGAGLDAIIEEMEKDGQEVPRDPFGHVKLDKVNLGAWFGKQFADKLGAEKVMVQKSGYFSRSAASNEADLELIGRCTDLAVDCALAGKTGVIGQDEENGDTLTNIAFDRIKGGKPFDTTQPWFTAMLSEIGQA

SEQ ID NO: 8738 - protein, 169 aa, Zea mays
  misc_feature (144)..(144): Xaa can be any naturally occurring amino acid
NFEMAAATSSSPKSVHDFTVKDAKGNEVDLSIYKGKVLLIVNVASQCGLTNSNYTELAQLYQKYKDHGFEILAFPCNQFGNQEPGSNEEIVQFACTRFKAEYPIFDKVDVNGDKAAPIYKFLKSSKGGLFGSGIKWNFSKFLVXKDGNVVDRYAPTTSPLSIEKDLKKL

SEQ ID NO: 8739 - protein, 302 aa, Bacillus halodurans C-125
MSILINKDTKVIVQGITGATGLFHTKQAVEYGTNIVGGVTPGKGGTEVEGIPVFDTVSQAVEATGANASVIYVPPAFAADAIMEAVDAELDLAICITEGIPVMDMVKVKRYMEGKKTRLVGPNCPGVITPEECKIGIMPGYIHKKGHVGVVSRSGTLTYEAVHQLSTAGIGQSTAVGIGGDPVNGTNFIDVLKLFNEDPDTYAVIMIGEIGGTAEEEAAEWIKANMTKPVVGFIGGQTAPPGKRMGHAGAIISGGKGTAAEKIKTLESCGVKVAETPSVMGETLISVLKEQGLLEKCTTHQV

SEQ ID NO: 8740 - protein, 489 aa, Agrobacterium tumefaciens str. C58
MRERSMIKLKNAALLRDACLVNGRWLKAADGKTIAVENPANSMIIGHVPSLSADEVKAAVESAGKAFSEWSRRSAKDRAAILRRWFDLMVANADDLGALMTAEQGKPFAEAKGEALYAASFVEWFAEEAKRVYGDTIPSPTTDKRITILKQPIGVCAAITPWNFPAAMITRKAAPALAAGCAMIVKPAEQTPLTALALGVLAEEAGVPAGVFQVVTGAARDIGKVFTESDTVRKISFTGSTEVGRLLMAQSAPTIKKLSLELGGNAPFIVFDDADLDAAVEGAIVSKYRNAGQTCVCSNRIYVQDGVYDAFAEKLVKRVESLSVGEGTEPGVLIGPLIDQEAVAKVEDHVADALGKGAKIVIGGKRHALGGTFYEPTVLTGATQAMKVAREETFGPVAPLFRFGTEDEAVAMANDTEFGLAAYFYTENVRRTWRVAEALEYGMVGHNTGLISNEVAPFGGVKQSGLGREGSHYGIDEYLEIKYLCSAIG

SEQ ID NO: 8741 - protein, 260 aa, Bacillus subtilis
MGESILFTAKTEHITVITLNRPHAANALSAEMLRDLQSTLQEVEFNTKIRCVILTGAGEKAFCAGADLKERIKMKQDQVLKSVSLIHRTAALLEALPQPVIAAINGSALGGGLELALACDIRIAAENATLGLPETALAIIPGAGGTQRLPRLIGRGKAKELIYTGRRITAHEAKEINLVEHVTASCELMAKAEELAEAISANGPIAVRQAKFAINKGLETNLATGLSIEQKAYEHTIPTKDRTEGLQAFQEKRRAVYTGE

SEQ ID NO: 8742 - protein, 592 aa, Bacillus thuringiensis serovar konkukian str. 97-27
MAETLAKRGPDDNKVWIKGNVAFGHKRLIVVDPEGGKQPMTCLKDEANYAICYNGELYNTEDIRKELLRRGYTFKGHSDTEVLLASYIEWKEECVDHLNGIYAFAVWDEQKEQVFIARDRLGVKPLFYKYDSGRLLFGSELKAILAHPDVKAEVTLEGLSEIFGLGPSRTPGHGIYAGIKELRPGHAMTFSKNGLCIWRYWNVESKKHEDSFEETVEKTRFLLQDAITRQLVSDVPLCTFLSGGVDSSAITAIAAKEYERSGKGQLHTYSVDYEDNDKYFKANAFQPNSDAPFIHLMTETFQTIHHRCVISNEQLAQYLTEAVLVRDLPGMADIDSSLLWFCREIKQDFVVGLSGECADEIFGGYPWFYREDDLQSSAFPWMRSTEAREQLLKKEWRNKLNLQQYVQQRYEESIQEVPILDGESPLEAKRRQLFYLNMVWFMTTLLDRKDRMSMGASLEVRVPFADHRLVEYAWNIPWEMKMYKNREKGLLRKALEGLLPNEILYRKKSPYPKTHNPHYTKAVTVWIQDLLTDKGSILHELFDKEQLSGLIESGGSAFQTPWYGQLMTGPQLLAHLAQIHVWFKEYGVNIKE

SEQ ID NO: 8743 - protein, 319 aa, Bacillus thuringiensis serovar konkukian str. 97-27
MKKKKIGLLVMAYGTPDSLDEVEAYYTHIRHGRKPSEEALQDLIGRYKAIGGISPLAKITKEQAHKLTDSMNNMFTEYEFNCYLGLKHTAPFIEDAVEEMKRDGIEQAISIVLAPHYSTFSIKAYNERAIRLSEEIGGPVIEPIDQWYDEPKFISYWADQIKETFTKIEDNEKAVVIFSAHSLPEKIIAAGDPYVEQLQYTADLIAAAANIQNYTIGWQSAGNTSDSWIGPDVQDLTRDLFEEHRYESFIYCPVGFVAEHLEVLYDNDYECKVVTDELNAAYFRPTMPNAQSTFIDCLATIVSRKMKEIVDKELILNNN

SEQ ID NO: 8744 - protein, 335 aa, Debaryomyces castellii
APRAVFPSIVGRPRHQGIMVGMGQKDSYVGDEAQSKRGILTLRYPIEHGIVTNWDDMEKIWHHTFYNELRVAPEEHPVLLTEAPMNPKSNREKMTQIMFETFNVPAFYVNIQAVLSLYSSGRTTGIVLDSGDGVTHVVPIYAGFSLPHGILRIDLAGRDLTDYLMKILSERGYAFTTTAEREIVRDIKEKLCYVALDFEQEMQTSSQSSAIEKSYELPDGQVITIGNERFRASEALFRPADLGLEAAGIDQTTYNSIIKCDIDVRKELYGNIVMSGGTTMFPGIAERMQKEITALAPSSMKVKIIAPPERKYSVWIGGSILASLSTFQQMWISKQ

SEQ ID NO: 8745 - protein, 306 aa, Mycobacterium sp. JLS
MSANTKWTAADVPDQEGRVAVITGANTGIGYEAAAVLAAKGAHVVLAVRNTDKGGAAAERIRSALPHADVTVRELDLTSLDSIRAAADGLRADYPRIDLLINNAGVMMTQKGTTKDGFELQLGTNHLGHFALTGQLLDNLLPVEGSRVVTVSSNAHRWGRVNFDDLQSERSYNRVTAYGQSKLANLLFTYELNRRLSAKGAPTIAVAAHPGTSSTELTRNLWPVARRPVELVWGLVSQTPEMGALPTLRAATDPDVRGGQYYGPDGIGEQRGHPKLVQSNARSYDEAAQRGLWSVSEELTGVTFPV

SEQ ID NO: 8746 - protein, 537 aa, Zea mays
MSATQLLRRSRKLQSLQNAVGCENFFRHFSSGSGSFIAKENGVGKRTRGTRFSQQYQPTKELEPFSLGVNGNCTWRRASNSLTPSAASWLNGSFSCGQVVSARTFSSSADLPPHQEIGMPSLSPTMTEGNIAKWLKKEGDKVSPGEVLCEVETDKATVEMECMEEGYLAKIIHGDGAKEIKVGEVIAITVEEEGDIEKFKDYKPSSSAEPVAPAESKAQPEPSQPKVEEKKLTQAPEVKAPKIEEASQSGDRIFASPLARKLAEDNNVPLSSVKGTGPDGRIFKADIEDYLAKGGLREAFAAPGLGYVDIPNAQIRKVTANRLLASKQTIPHYYLTVDARVDKLVKLRGELNPLQDASGGKKISINDLVIKAAALALRKVPQCNSSWMNDFIRQYHNVNINVAVQTEHGLFVPVIRDADKKGLGTIAEEVKQLAQKARDNSLKPADYEGGTFTVSNLGGPFGIKQFCAIINPPQSAILAIGSAEKRVIPGSADGLYEFGSFMSATLSCDHRVIDGAIGAEFLKAFKGYIENPTSMLL

SEQ ID NO: 8747 - protein, 311 aa, Acinetobacter sp. ADP1
MISILMQTLKIATRQSPLALWQAEHIRDRLQALYPELKVELVKFVTQGDKILDTPLAKIGGKGLFVKELEAALLDGRADLAVHSMKDVPMHLPEGLSLAVICEREDPLDAFVSNHVMSFDQLPLGARVGTSSLRRKCQILKQRPDLEIIDLRGNVGTRLAKLDDGQYDAIVLASAGLKRLGLISRIRHSINAEISLPAVGQGALGLECRANDKKILDLIAPLAHQPTSACVRAERAFNAYLEGGCQVPIAGFATLTQECLTLEGRVGSVDGKTLLKDHVEGHADQAEVLGVQLAKQLLAQGAGELLRDLYQ

SEQ ID NO: 8748 - protein, 328 aa, Debaryomyces robertsiae
GRPRHQGIIGGMGQRDSYVGDEAQSKRGILTLRYPIEHGIVKNWDDMEKIWHHTFYNELRVAPEEHPVLLTEAPMNPKLNREKMTQIMFETFNVPAFYVNIQAVLSLYSSGRTTGIVLDSGDGVTHVVPIYAGFSLPHGILRLDLAGRDLTDYLMKILSERGYTFTTTAEREIVRDIKEKLCYVALDFEQEMQTSSQSSAIEKSYELPDGQVITIGNERFRAVEALFRPSDLGLEAAGIDQTTYNSIIKCDLDVRKELYGNIVMSGGTTMFPGIAERMQKEITALAPSSMKVKIIAPPERKYSVWIGGSILASLSTFQQMWISKQEYD

SEQ ID NO: 8749 - protein, 346 aa, Mycobacterium sp. KMS
MLFDALLVLSFGGPEGPDQVMPFLENVTRGRGIPRERLASVAEHYLHFGGVSPINGINRALIAEIEAELGDRGETLPVYFGNRNWDPYVEDAVTAMRDDGVRRAAVFATSAWGGYSSCTQYNEDIARGRAAAGDGAPQLVKLRHYFDHPLLVEMFAESISVAAQSLPADVRDEARLVFTAHSIPVAADDRHGPNLYSRQVAYATRLVAAAAGYSEFDQVWQSRSGPPRIPWLEPDIGDHVTALAERGTKAVIICPIGFVADHIEVVWDLDSEVREQAADLGIAMARARTPNADRRYARLALDLVDELRGDRDPLRVAGVDPAPGCGYSVDGTTCADSPRCVARITG

SEQ ID NO: 8750 - protein, 285 aa, Bacillus thuringiensis serovar konkukian str. 97-27
MRGKHIFIITALISILMLAACGQKNSSATVATATDSTITKSDFEKQLKDRYGKDMLYEMIAQDVITKKYKVSDDDVDKEVQKAKNQYGDQFKNVLKNNGLKDEADFKNQIKFKLSMNKAIKQSVTEKDVKDHYKPEIKASHILVSDENEAKEIKKKLEAGASFEELAKQESQDLLSKEKGGDLGYFNSGRMAPEFETAAYKLKIGQISNPVKSPNGYHIIKLTDKKELKPYDEVKDSIRKNLEEERIADPTFSHKLLQKELKKANIKINDSELEDTFTIVSSQGN

SEQ ID NO: 8751 - protein, 337 aa, Debaryomyces nepalensis
KAGFAGDDAPRAVFPSIVGRPRHQGIMVGMGQKDSYVGDEAQSKRGILTLRYPIEHGIVTNWDDMEKIWHHTFYNELRVAPEEHPVLLTEAPMNPKSNREKMTQIMFETFNVPAFYVSIQAVLSLYSSGRTTGIVLDSGDGVTHVVPIYAGFSMPHGILRIDMAGRDLTDYLMKILSERGYTFSTSAEREIVRDIKEKLCYVALDFEQEMQTSSQSSAIEKSYELPDGQVITIGNERFRASEALFRPADLGLEAAGIDQTTYNSIMRCDVDVRKELYGNIVMSGGTTMFPGIAERMQKEITALAPSSMKVKIIAPPERKYSVWIGGSILASLSTFQQ

SEQ ID NO: 8752 - protein, 354 aa, Pyrococcus abyssi GE5
MKLRIAVIPGDGIGKEVVAEGLKVLKKLEELSRVSFEFKEYPFGAEHYLKTGETLPDWAIEEFKKFDAIYFGAIGDPRVKPGILERGILLKMRFELDLYVNLRPVKLYHPRLTPLKGKNKIDIVFVRENTEGLYAGAGGFLRKGTPQEIAVQEMINTRFGVERVIRFAFEYAKRSGRKKVTLVDKANVLTYAHDLWERVFAEVSQEYDLETDHYYVDAMAMKMIRSPESFDVVVTPNMFGDILTDLGAEIVGGLGIAASGNINPETTGMFEPVHGSAPDIAGKRIANPLAAILSASMMLEYLNLEKESKWIEEAVKRAIAENKVTPDMNGNLKTYEVGDWVVKFLEVVANEEEG

SEQ ID NO: 8753 - protein, 848 aa, Yersinia pseudotuberculosis IP 32953
MSKIKIAIIGNGMVGHRFIEDLLDKADKDQFDITVFCEEPRIAYDRVHLSSYFSHHTAEELSLVREGFYEKQGVKVLVGERAITINRAEKVIHSNSGRSLYYDKLVMATGSYPWIPPIKGSEGQDCFVYRTIEDLNAIEACTRRSKRGAVIGGGLLGLEAAGALKSLGVETHVIEFAPVLMAEQLDPMGGDQLRQKIERMGVRVHTGKNTQEIVHSGQNSRKTMLFADGTQLEVDFIVFSTGIRPQDKLANQCGLATARRGGIAINDYCQTSDPDVYAIGECASWQERTFGLVAPGYKMAQVAADHLLGRENAFLGADMSAKLKLLGVDVGGIGDAHGRTEGARSYVYLDESKEIYKRLVVSADNKTLLGAVLVGDTTDYGNLLQLALNNITLPENPDSLILPAHAGNKPAIGVDSLPDSAQICSCFDVTKGDIIRAIGQGCQTVAALKSATKAGTGCGGCIPLVTQVLNAELSKQGIEVNNHLCEHFAYSRQELYHLIRVEGIKTFTELREKYGKGYGCEVCKPTVGSLLASCWNEYVLEPQHTPLQDTNDNFLGNIQKDGTYSIIPRSPGGEITPDGLLVVGQIAKEYNLYTKLTGSQRIGMFGAQKDDLPAIWARLIDAGFETGHAYAKALRMAKTCVGSTWCRFGVGDSVGFGVALEHRYKGIRAPHKIKFGISGCTRECAEAQGKDVGIIATENGWNLYVCGNGGMKPRHADLLAADLDEETLMRYLDRFMMFYIRTADKLQRTSVWLESLEGGIRYLQSVILEDKLGINDQLEAEIARLRDKVACEWKATVENPAAQVRFAHFINSSLRDPNVQVVREREQHRPARPDERIPVRVLELEDNA

SEQ ID NO: 8754 - protein, 526 aa, Pyrococcus abyssi GE5
MLMKRRVELYDTTLRDGSQMEGISFSLEDKLKITEKLDEFGIHYIEGGWPGSNPKDIQYFKAVRDLPLENAKIAAFGSTRRPRLRPEEDPNLNALVESEAPIATIFGKSWDLHVTEALRTTLENNIQMIIDSIEYLRDHGMVVFYDAEHFFDGYRENPEYAMKTIKAAEEAGAERIVLADTNGGSLPSFIKEVVEKVKEEVKTPLGIHAHNDSELAVANSLIAFEAGVVQIQGTINGYGERCGNANLISIIPALELKYGVEVVGKERLRKLKELAHFVAELANMEIPRNQPYVGDSAFAHKGGVHVSAVLKNPRTYEHIDPELVGNRRKVVVSELSGRSNLIYKAKELGIELEERDIKRIVEEIKKLEFEGYHFEAAEASLELLIERLRGRYKPFFELERARVITEIFQGQPPISEANVVVRVNSRRVHTTAEGNGPVNALDLALRKALTKFYPELKEIKLVDYKVRVLGSEKGTAAKVRVLVQTSDGKKTWGTVGASTNIIEASLNAIMESMEYWLMKEREKDEK

SEQ ID NO: 8755 - protein, 562 aa, Zea mays
  misc_feature (246)..(246): Xaa can be any naturally occurring amino acid
  misc_feature (308)..(308): Xaa can be any naturally occurring amino acid
MPSIAPPSSSVAALTRQPVQFFKGCSVSKETKGPVRSFFTANSKSTKVKSAGLKVASSFKNDGGYPAGGVSWKDDTLLPKSTTIRGQDHPVADPVLPMDSMITPEILSANVERVIDMFADDDTDTELDLDSPTEGFASIAEAIEDIQQGKLVIVVDDESRENEGDLIMAASLVTPEAMAFIVRHGTGIVCVSMKEDDLERLSLPLMVTTKENEEKLCTAFTVTVDAKEGTTTGVSAKDRAKTVMTXLKRAGHTEASVDLAMLAGLPPVAVLCEIVDDADGSMARLPKLHVFAEKENLKIISIADLIRXELNYQNFSFWYRRKRDRLIERASVARLPLKWGNVHAYCYKSVIDGIEHIGMVKGDIGDGQDILVRVHSECLTGDIFGSARCDCGDQLAMAMEMIEKAGRGVLVYLRGHEGRGIGLGHKLRAYNLQDDGRDTVEANEELGLPVDSREYGIGAQILRDLGVRSMKLMTNNPAKYSGLKGYGLSIAGRVPLITPITSENRRYLETKRTKMGHVYGLANAQANQANKWQPEHRRESLGPQACFHYYSSNPAWCGGTKE

SEQ ID NO: 8756 - protein, 673 aa, Oryza sativa
  misc_feature (191)..(191): Xaa can be any naturally occurring amino acid
MAIPGSFCHPTALQVFVSVQFVFAVLVPHAAGRHHRHGCAPFSCGHLSDVSPPFRRRGDPPECGVASYELTCTDDKPATIQIDNGTYLVMDIKYKDSTFWVIDANISDSRNNCPLPRWNRDFGYYDQMLYERHGEDSRRRSIQAELMPPYQSTTATFVTCSPGKHLEGANGKVQAWLLAWSTNSSLRLRAXTGMNSDSIGSLEPSCGYLAMTPLGAGDRPLVLENASYADVVKLMRGGFAIRFPYTSRFYVYSSKIKQCIAQSFQIFYTVIFDYHFWGCLLPHPVVQLIVGVIPLAMWTLKWIAVFCRFILVPLVILTFLARNYWKIRITTDAVEKFLRMQLMNGPTRYAYTDLIAITGHFREKLGQGGYGSVYKGVLLPGNAHVAVKVLGNSNCNGEEFISEVSTIGRIHHINVVHLVGFCSEEIRRALVYEYMPRGSLDKYIFSSERSFSWDKLNEIALGIARGINYLHQGCDMQILHFDIKPHNILLDVNFVPKVADFGLAKLCPRDQSFVPLSALRGTIGYIAPEMISRSFGIISSKSDVYSFGMLLLEMAGGRRNSDMYAENSNQTYFPSWVYDQLTEQQVGVGEIPAGTVANMHELERKLCIIGLHCIQMKSHDRPTMSEVIEMLEGGVVGLQMPPRPFFCDDEPVSLAVNSHQFSSELSEILEEDE

SEQ ID NO: 8757 - protein, 225 aa, Yersinia pseudotuberculosis IP 32953
MKKYLIAPSILSADFARLGEDTAKVLAAGADIVHFDVMDNHYVPNLTIGPMVCKALRDYGITAPIDVHLMVKPVDRIVPDFAKAGATYITFHPEASEHVDRTLQLIKESGCKAGLVFNPATPLSYLDYVMDKLDVILLMSVNPGFGGQSFIPETLNKLRQVRKLIDDSGYDIRLEVDGGVKVENIRQIAAAGADMFVAGSAIFNQPDYAAVIDAMRNELAMAANG

SEQ ID NO: 8758 - protein, 361 aa, x Citrofortunella mitis
MALPVSAIGFEGYEKRLEVSFFEPGVFADPGGRGLRSLSKHQLDEILKPAECTIVSSLSNEYLDSYVLSESSLFVYPYKVIIKTCGTTKLLLSIPAILKLAESLSLSVRSVRFTRGSFIFAGAQPFPHRSFSEEVAVLDGHFGKFGMDSTAFVMGSPDNTKRWHVYSASAEAGSHVNLVYTLEMCMTGLDRKRASVFYKTNESSAAMMTEDSGIRKILPKSEICDFEFDPCGYSMNSIEGDAVSTIHVTPEDGFSYASFEAVGYDFEVVKLTSLLERVLACFKPAEFSVALHSDIVGDEHGDTFTLDFKGYSCGEKIYEELGNNGSLIYYSFSRTDCSTSPRSILKCCWSEDEKDEEVEGK

SEQ ID NO: 8759 - protein, 352 aa, Leptosphaeria maculans
MPPTGSGSSRKISFNVSEQYDIQDVVGEGAYGVVCSALHKPSGQKVAIKKITPFDHSMFCLRTLREMKLLRYFNHENIISILDIQKPRNYETFTEVYLIQELMETDMHRVIRTQELSDDHCQYFIYQTLRALKAMHSANVLHRDLKPSNLLLNANCDLKVCDFGLARSAASTEDNSGFMTEYVATRWYRAPEIMLTFKEYTKAIDVWSVGCILAEMLSGKPLFPGKDYHHQLTLILDVLGTPTMEDYYGIKSRRAREYIRSLPFKKKIPWKAMFPKTNDLALDLLERLLAFNPVKRITVEEALKHPYLEPYHDPDDEPTADPIPEEFFDFDKNKDNLTKEQLKLLIYQEIMR

SEQ ID NO: 8760 - protein, 461 aa, Brucella suis 1330
MPIEILMPALSPTMEEGKLSKWLKKEGDKVTSGDVIAEIETDKATMEVEAVDEGTIGKLLVDEGTEGVKVNTPIAVLLGDGESAADIGSAPAAKAEAAKEEPKAEENKADAVPAAPKAPAVEVASDPDIPAGTEMVSMTVREALRDAMAEEMRRDPDVFIMGEEVAQYQGAYKITQGLLDEFGPKRVVDTPITEHGFAGVGVGAAFAGLKPIVEFMTFNFAMQAIDQIVNSAAKTLYMSGGQMGAPMVFRGPSGAAARVAAQHSQCYAAWYSHIPGLKVVMPYTAADAKGLLKAAIRDPNPVIFLENEILYGHHFDVPKLDDFVLPIGKARIHKQGNDATIVSFGIGMTYAVKAAEELAGQGIDVEIIDLRTIRPMDIPTVVESVKKTGRLVTVEEGFPQSSVGTEIATRVMQQAFDYLDAPILTIAGKDVPMPYAANLEKLALPSVAEVVEAVKAVTYTA

SEQ ID NO: 8761 - protein, 304 aa, Leptospirillum ferrooxidans
MDEERREGGEAADSGFGPVFVDTTIRDGGQSPGVFFDRPTKMVIVTTLSRIGVQEIEVGTPCLGDHEIEDLRALLSLPVPVELFPWLRPLEADFESALGLGFKRVHVSFPTSDAHRASVQNMGRPDIVERVRKTVLRMTGEGCRVSIGLEDASRAPMDFLKEFIAAVRESGGIRVRYCDTVGKHHPAEIIERISELSKEGLPIEIHCHNDLGMATANTVSACHSGARYLSTTVTGVGERAGNAAMEEVAFALACERGDPSLPESSAIDLPGLAHISRWLYGAIRRTLSPYRPIVGSRIFHHSSG

SEQ ID NO: 8762 - protein, 294 aa, Listeria monocytogenes str. 4b H7858
MVFVTAGMGGGTGTGAAPVIAQIAKEMGALTVGVVTRPFGFEGPKRTKQALTGTEAMKEAVDTLIVIPNDRLLQIVDKNTPMLEAFREADNVLRQGVQGISDLIAVPGLINLDFADVKTIMTNRGSALMGIGIATGENRAAEAAKKAISSPLLETSVDGAKGVLMNITGGSNLSLYEVQEAAEIVSSASDEDVNMIFGSVINDELKDELIVTVIATGFDEEKQAQQQAQANRRPNQSIQVNRPNYAVQDEQQNDYAQNAPQQANAPVHEQQAEPQQNSSDVDVPAFIRNRNRRG

SEQ ID NO: 8763 - protein, 485 aa, Xanthomonas campestris pv. campestris str. ATCC 33913
MATELAPPQNAQILERLGRRYDAGFITEIESDSLPPGLDEDIIRALSAKKEEPQWMTDWRLEAYRHWLKMPMPEWAKLKIAPIDFQALSYYSAPKGPKYASLDDVPKELLDTYDKLGVPLHERARLAGVAVDAVFDSVSVGTTFRKELAEKGVIFCSMSEAIKEHPEIVKQYLGSVVPVGDNYFAALNSAVFSDGSFVFIPKGVRCPMELSTYFRINAGHTGQFERTLIVCEDKAYVSYLEGCTAPMRDENQLHAAVVELVTLEDAEIKYSTVQNWYPGDEEGRGGIYNFVTKRAECRGDRSKVTWTQVETGSAITWKYPSCVLLGDDSVGEFHSVALTHHRQQADTGTKMIHIGKRTKSKIVSKGISAGRGQNTYRGLVKVDRNADGARNYTQCDSLLIGKQCGAHTFPYIEVKNPGATVEHEATTSKISDDQLFYCRARGISQEDAVSLIVDGFCKQVFRELPMEFAVEAKKLLEVSLEGSVG

SEQ ID NO: 8764 - protein, 336 aa, Streptococcus suis 89/1591
MKRIAVLTSGGDAPGMNAAIRAVVRQAISEGMEVYGINEGYAGMVAGDIHELSARSVGDIISRGGTFLGSARYPEFAKLEGQLKGIEQLKKHGIEGVVVIGGDGSYHGAMRLTEHGFPAIGVPGTIDNDIVGTDFTIGFDTAVTTAMDAIDKIRDTSSSHRRTFVIEVMGRHAGDIALWAGIASGADVIVVPEEDFNINDIVDRIKAGYDNGKKHSIIVLAEGVMPAAQFAEELKAAGDTSDLRVTELGHIQRGGSPTARDRVLASRMGAHAVKLLKEGRGGLAVGIRNEQMVENPILGTAEEGALFSLTTDGKIVVNNPHKADLELADLNRNLSI

SEQ ID NO: 8765 - protein, 258 aa, Fusobacterium nucleatum subsp. nucleatum ATCC 25586
MSVISYKQENFIGIVTIERPEALNALNSQVLDELSATFAGINLETTRVVLLTGSGSKSFVAGADIAEMSTLNSDEGTKFGYKGNEIFRKIETFPLPVIAVINGFALGGGCELAMSCDFRICSENAIFGQPEVGLGITPGFGGTQRLARLIGLGKAKEMIYTANTIKADEALNIGLVNHVYPQETLMEEAMKLAGKIAKNAPFAVRACKKAINEGIDTDMDRAIIIEEKLFGSCFATEDQKVGMKAFLDKVKGVEYKNK

SEQ ID NO: 8766 - protein, 500 aa, Magnetospirillum magnetotacticum MS-1
MSKAKKTAVTPTREENFPEWYQQVIKASDMAENSPVRGCMVIKPWGYGIWESIQRDLDRRIKETGHENCYFPLFIPLSFLEKEAAHVEGFAKEMAVVTHHRLVAEDGKLVPSGKLEEPLVVRPTSETIIGDAFARWIQSYRDLPMLVNQWANVVRWEMRPRIFLRTAEFLWQEGHTAHATAEEAMEETLRMLEVYRVMSEEVLAMPVIVGEKPAHERFPGADKTYSIEAMMQDGKALQAGTSHFLGQHFSKAQNIRYQTAQGGEEFCFTTSWGVSTRLIGGVIMSHADDNGLRVPPRIAPKQIVFVPITRADGDEALIDEFLAPVVKELSAQSFGGERLRVHVDRRPLAPPEKRWEWVKKGAPIICEVGPRDVAGGTIAMIRRDGELKGQITPKDEFVARAASILADIQNSLFTQAKTMLESRTVTVKTKDEFLSVFSGDTTFGRKFVRAKWCGDADTLAMLDELSVTVRNVPFDQDGAPGTCVLSGRPATQEVIFAKSY

SEQ ID NO: 8767 - protein, 324 aa, Nocardia farcinica IFM 10152
MITTFAGALNTGMRRALEDDPKVVLMGEDIGRLGGVFRVTDTLQKDFGDNRVIDTPLAESGIIGTAFGMALRGYRPVCEIQFDGFVYPAFDQIVSQVAKIHYRTGGKVSAPITIRIPFGGGIGSVEHHSESPEAYFAHTAGLRVVTPSTPADAYHMLRQAIAAPDPVIFFEPKRRYWDKADVDFDAPPELPLHRARVCRAGTDATVVAYGGTVAPALAAAEIAASEGHSLEVIDLRSLAPLDVDTVAESVTRTGRLVVTHEAPVFGGLGAEIAARITERCFYHLEAPVLRVGGYDIPYPPAKLEKHHLPDPDRILDAVDRSLAA

SEQ ID NO: 8768 - protein, 829 aa, Deinococcus radiodurans R1
MALNNDVNRLGRILGQVLKEQEGEAFFNLVEQTRTLVREVRAGGDPAQLNALLGSLSENDASNLARAFTWYFQLVNIAEEYERVRVLQSRSGVRSQSLAQALADLREQGLSAEDVENLLARVNLELTFTAHPTEMRRRTVRSHLEHIARELPDLGRESAQERVAAHVEALWRTPELRRLKPTVLDEVKGGLNYISTIAQALPKLERDLSDAFQATYGRETAAHVPLRFSSWMGGDRDGNPFVTPEATREALQLHRERARELLLAALRQAYTDLSQEEEEDAAEGTYRTELRALHNAVRDGEPVELLPRLEALNARLHADGQERTAWQLLMPLLSVARVFGQHLVSLDIREHSGQTGAAVAELLKAAGVEADYLGLSEDAKLELLTRELRSHRPLWPAGATFTETLEAVIGPIREVQAAARRVGPLAFGHYVISMSESVSDILEPLILAREVGFRVLPVPLFETLDDLQHAPRIVTDLLALPEYRAVLGDDMQEIMIGYSDSNKDAGFLAANWALHEAQRTISDVCRRAGVRWRFFHGRGTSIGRGGGPASRAILGQPAGTIDAGVRITEQGEALADKYSHPVLARRNLEQALYGVLLAAARPVGDPPADFMAAMTRAAEASATAYRDFVHDPDFLPFFERVTPIHEISRLNIASRPVRRPGAPTLGNLRAIPWVMSWTQNRANLPGWYGLAEGLAEIGPELAAKMYAEWPFFHSMLDNAQMSLAKSDPLVFAEYLTLLEGASTRLADHLRESYARTVAAVESVIGGELMLGEQRLKESIALRNPYIDPIHRLQVELLRRSRSHEGGLDEYERPLLLTLQGIAAGVRNTG

SEQ ID NO: 8769 - protein, 510 aa, Nocardia farcinica IFM 10152
MHDDGNVLEFRLPDLGEGLTDAELVSWSVAVGDHVDLNQTIAEVETAKAVVALPCPYAGTVAALLADPGETVPVGAPLIRVRADGAGSAVGSGGDAARGAENGSGAGSGGGAPGGGGAATADGADIGNGGGSTVPAENAGAGGGAGADASASASFDAGADADADAGGGGGGGAGAGAGADSDAGAASGNGRRSVLVGYGPEAEQQTRRRRTTAPVPVARPAAVAARPAATPAARKLARELGVDLWQVDGSGPNGAVTVDDVRAAATPTGAAVAEPGPAREERTPVTGVRKRTAAAMVTSATTIPQASTFVTVDCTATMELIDHLRTTPAFAGLSLTPLVVVAKAVLAALAEFPGVNAQWDEERQQIVTKRYVHLGIAAATDRGLLVPSVKEAHRLSLRELCAEIGRTIEAARAGTATPADLTGGTFTITNVGVFGVDSGVPLVNPGEAAILCLGAIGRRPWVVADELAVRWVTTLGLSFDHRLIDGELAARFLATVAGLLTDPLTLLSRL

SEQ ID NO: 8770 - protein, 175 aa, Brassica napus
  misc_feature (137)..(137): Xaa can be any naturally occurring amino acid
MISSVKPTPSSFSATSTGARRSIPTKLQFSPLRITRSCHNQSFINSNVSHQKPLHISSAQNLSSFKREVRVEAYEADRSRPLDINIELPDEQSAQKLKIGIYFATWWALNVVFNIYNKKVLNAFPYPWLTSTLSLAXGSLMRLVSWASRIAEAPKTDLDFWKTLSRGLGPVAEAS

SEQ ID NO: 8771 - protein, 269 aa, Absidia cylindrospora
HTFYNELRVAPEEHPVLLTEAPLNPKSNREKMTQIMFETFNAPAFYVAIQAVLSLYASGRTTGIVLDSGDGVTHTVPIYEGYALPHAILRLDMAGRDLTDYLMRILAERGHSFTTTAEREIVRDIKEKLCYTALDFEQEMQTAAQSSALEKSYELPDGQVITVGNERFRAPEALFQPSLLGSESFGIHQTTYNSIMKCDVDIRKDLYSNIVMSGGTTMYPGIADRMQKEITALAPSSMKIKIVAPPERKYSVWIGGSILASLSTFQQMW

SEQ ID NO: 8772 - protein, 420 aa, Arabidopsis thaliana
RLTSPPRLMIVSDLDHTMVDHHDPENLSLLRFNSLWEHAYRHDSLLVFSTGRSPTLYKELRKEKPLLTPDITIMSVGTEITYGNSMVPDHGWVEALNNKWDLGIVKQEASNFPELKLQAETEQRPHKVSFYVEKSKAQEVTKELSQRFLKRGLDVKIIYSGGMDLDILPQGAGKGQALAYLLKKLKTEGKLPVNTLACGDSGNDAELFSIPDVYGVMVSNAQEELLKWHAENAKDNPKVIHAKERCAGGIIQAIGHFKLGPNLSPRDVSDFLEIKVENVNPGHEVVKFFLFYERWRRGEVENSEAYTASLKASVHPGGVFVHPSGTEKSLRDTIDELRKYHGDKQGKKFRVWADQVLATDTTPGTWIVKLDKWEQDGDERRCCTTTVKFTSKEGEGLVWEHVQQTWSKETMVKDDSSWII

SEQ ID NO: 8773 - protein, 237 aa, Glycine max
NSARENVFLHIKLMEQASESQLPRPPPQEECDGEIQGSALRLTFACNSPISWPAMSGALDSSSICCKRMQIFEKKGFTLGVVLLVVLPGHDKLVRTRVENALKFAMKKPKTGAVKLPFGLCGCQEENSKGRELVEIEEETGDGYRGKEFENSSQRIQLQVPLPSSSFVVSVDEWQTIKSGGNEIEKWLLNSDSVEFVEQIGPNSYRGVYMGKRVGIEKLKGCDKGNSYEFELHKDQE

SEQ ID NO: 8774 - protein, 205 aa, Coccidioides immitis RS
MATRKKVLLKVIILGDSGVGKTSLMNQYVNKKYSASYKATIGADYLTKEVLVDDRLVTMQLWDTAGQERFQSLGVAFYRGADCCVLVYDVNNSKSFENLDSWRDEFLIQACPRDPESFPFVVLGNKVDVDESKRMISTKRASTYCQSKGNIPYFETSAKEAINVEQAFEVIAKVALTQEESEEFNGDFTDPINIHLDNDRDTCAC

SEQ ID NO: 8775 - protein, 318 aa, Carica papaya
MENFPVIDLSKLNGEERALTMELIHDACENWGFFELVNHGISHDLMDTVERLTKEHYMKCMEQRFKEMVESNGLEAVQSEINDMDWESTFFLRHLPASNMHEIPDLEDDYRKAMKEFAVGLQKLAEQMLDLLCENLGLQKGYLKKVFYGSKGPNFGTKVSNYPPCPKPDLIEGLRAHTDAGGIILLFQDGKVSGLQLLKDDQWVDVPPMKHSIVINLGDQLEVITNGKYKSVMHRVIAQTDGNRMSLASFYNPGDDAVIYPAPSLVEKEAEKNQIYPKFVFDDYMKLYVGLKFQAKEPRFEAMKAMESTVTPGAIATV

SEQ ID NO: 8776 - protein, 419 aa, Medicago truncatula
MDRLKSSARLMIVSDLDHTMVDHHDAENSSLLRFNALWEASYRHDSLLVFSTGRSPLLYKQLRKEKPMITPDITIMSVGTEITYGKSMVPDDGWVQVLNQKWDKDIVIEEASKFPELKPQAETEQRAHKVSFYVEKDNAKQVTEALSKILEQRGLDVKIIYSGGVDLDILPQGAGKGQALAYLLKKFETEGKLPGNTLVCGDSGNDAELFSIPGVYGVMVSNAQEELLQWHAENAKDNPKILHASERCASGIIQAIGHFNLGPNLSPRDVSDIGQEQSVENVSAVQEIVNFSLLIEKWRRAEVENSELFIAAIKASTDPSGVYIHPSGADHNLNEYINILRKEYGKKQGKQFRIWLDNVLATQISSDIWLVKFDKWELHDEERHGCVVTTILRKDSDWFTWMHVHQSWLEQSGQNEWII

SEQ ID NO: 8777 - protein, 543 aa, Propionibacterium acnes KPA171202
MAHERAGKPAQESDLIDVDAVLSAYHDISPDPSNPDQMVVFGTSGHRGSSLDGAFNDAHIAATTQAIVEYRTCQGIDGPLFIGKDTHALSMPAWTTAIEVLCANDVEVIAEHDDEWTPTPAVSRAIIVHNRLSEGRQADGIVVTPSHNPPRDGGFKYNPPHGGPADTDATGWIADRANELLADPSGIRRKPYEQVRNEVSRYDYRSAYCDDLRNAIDLDAIDEAGVHIGADPLGGASVQYWEYIADHLGIDLTVVNPTVDPTWRFMTLDSDGKIRMDCSSPSAMASLIANKDAYDIATGNDADSDRHGIVTPDAGLMNPNAYLAVAIGYLFAHRPGWRPDAGIGKTLVSSSLIDKVAADLGRRLIEVPVGFKWFVPGLMRGDIGFGGEESAGASFLDLDGQTWTTDKDGILLALLASEIKAVTGRSPSEHYADLEDRFGKSYYARIDADANREQKARLKALSPDDVSANTIAGEKIEKILTKAPGNGAAIGGIKVMTENAWFAARPSGTEDKYKIYAESLRDADHLAAVQEEARHIVDQALKG

SEQ ID NO: 8778 - protein, 455 aa, Lactobacillus plantarum WCFS1
MDLKHTPSSSNTNLDEFGYQQELKRTLSVKDLVIYGLIFMVPIAPMGIYGAVISVSQGMIALTYAIGMLAMFFTALSYGQMSQAFPVAGSVYAYAKLGINKSIGFLSGWMIILDYIFVPALLYIIAANSLKSLLPTIPTWLWLVGFIAINTLINVGGIAFTAIANRIFLIGELIVLAFFIILGSYGLMRGIGNGFTLKPFYDASHFNLNFVMTATSVAVLSFLGFDGISTLAEETTGGNQAVGKGILWSLLIVGALFIIQTYLAALIVPNWHSFNDLNTAFYVVAGKVGGPFLTDLTTIATILSWGFANALAAQAAISRILFGMARDHNLPHVLARVHPRFKTPYMSTLLVAIISLLVGLTFMNDSGTLSEIVNCGALTAFLVIHIAVINHFFIKQHSHDYWHHLIVPIIGFIIIGFVMINLNVLAKEIGGIWLLIGIGYYLILRVLQRNTEMNL

SEQ ID NO: 8779 - protein, 396 aa, Acinetobacter sp. ADP1
MAKAKFERNKPHVNVGTIGHVDHGKTTLTAAIATICAKTYGGEAKDYSQIDSAPEEKARGITINTSHVEYDSPIRHYAHVDCPGHADYVKNMITGAAQMDGAILVCAATDGPMPQTREHILLSRQVGVPYIVVFLNKCDLVDDEELLELVEMEVRELLSTYDFPGDDTPVIRGSALKALEGDAGQYGESSVLALVEALDTYIPEPERAIDKAFLMPIEDVFSISGRGTVVTGRVEAGIVKVGESVEIVGIRDTQTTTVTGVEMFRKLLDEGRAGENCGVLLRGTKREDVQRGQVLAKPGTIKPHTKFDAEVYVLSKEEGGRHTPFLNGYRPQFYFRTTDVTGAIQLKEGVEMVMPGDNVEMSVELIHPIAMDPGLRFAIREGGRTVGAGVVAKVTA

SEQ ID NO: 8780 - protein, 155 aa, Pyrobaculum aerophilum str. IM2
MKYKFRNVVLGGTFDTLHSGHVKLLATATLIGDRILIGLTSDSFASTYKQYKVRPFSVRLANLRNLMSLIAPEREVAYVEIHDPYGPAVFDPRLEAIVASIETAPRALQINDERAKRGLRPMEVFIISTVRDGYGHTLSSTYIRRVLERPESKQS

SEQ ID NO: 8781 - protein, 661 aa, Geobacter metallireducens GS-15
MNLETWRIRNWRLFTKIFLMSTVAVFVIIAGLLGFFLPLLESKLIHERTDNASHIVDAARSIAAHYHSLQLRGELSEPEARRLAVNTLRALRYNVNGYVWVHDLENRMVMHPLQPELEGHYLTRLADARGKPLFLTMNNLVRREGKGEVDYLWPRPGEQEPSRKVSYVSLFEPWQWVLGSGVYLDDVQDEISMLEARVITGALVTLLLSVVFSAYAAYRINRPLRQALFCAAAAMGHDTSVVEDKSHDETHQVLHTIERMVNDLKRSRDEAESASRMKGEFLANMSHEIRTPMNAIIGMTELTLETPLSPSQRENLEIIGSSAESLLGLLNDILDFSRIEAGRLLLEKVPFDLRNTVEGALDVVAPQAHGKGLELILDVARDLPEAFIGDPTRLRQVLINLLSNAVKFTAKGEVGLKVERAPSSGTDDGVMLLFTVSDTGIGIPADKLSLIFESFTQADGSTTRKYGGSGLGLAICRALVSMMGGDISVKSAVGVGSTFRFTARLGTCALQNREIRQAGIPRFGREVKILLAEDNPMNLKVSRLLLEMMGCQVVAVENGGDVVSAMKGERFDVVLMDIQMPVLDGLEATRVIRSGSERGIDQTTPVIAMTAHALKGYEKVCHEAGMNDFISKPVRAGELYNVILRNLPPAPGGGGVTPSAL

SEQ ID NO: 8782 - protein, 181 aa, Brassica napus
  misc_feature (72)..(72): Xaa can be any naturally occurring amino acid
MGSFSSGNLAYDVDSQALAMLFEQAGTVEIAEVIYNRETDQSRGFGFVTMSTVEEAETAVEKFNRYDLNGRXLLTVNKAAPRGSRPERQPRVYEPAFRVYVGNLPWDVDNGRLEQVFSEHGKVVEARVVYDRETGRSRGFGFVTMSNETELNDAIAALDGQNMEGRAIRVNVAEERPRRGF

SEQ ID NO: 8783 - protein, 106 aa, Triticum aestivum
  misc_feature (67)..(67): Xaa can be any naturally occurring amino acid
  misc_feature (100)..(100): Xaa can be any naturally occurring amino acid
MATGSEASKAAEAVVDWHKHDSKRMLHAVYRVGDLDRTIKYYTECFGMKLLRKRDVPDEKYTNAFLXGFGPENTNFAIELTYNYGVDKYDIGTALAFAIXNDDVYN

SEQ ID NO: 8784 - protein, 324 aa, Clostridium thermocellum ATCC 27405
MSSVRTIGVLTSGGDAPGMNAAIRSVVRTGLYYGFKVLGIRKGFNGLINGDIEELTARSVGDIIHRGGTILQTARSPQFKTEEGLKKAMSMAKVFGIDALVVIGGDGSYRGARDISKLGLNVIGIPGTIDNDIGCTDYTIGFDTAMNTVQDAIDKIRDTAYSHERCSVLEVMGRHAGYIAVNVSISGGAEAVVLPEKPFDMDTDVIKPIIEGRNRGKKHYLVIVAEGGEGKAIEIAKEITEKTGIEARATILGHIQRGGSPTVYDRVMASQMGAKAVEVLMENKRNRVIVFKDNQIGDMDLEEALQVKKTISEDLIQLSKILAL

SEQ ID NO: 8785 - protein, 543 aa, Arabidopsis thaliana
MSSINLSSSSPSTISLSRSRLSQSSTTLLHGLHRVTLPSNHPLSTFSIKTNTGKVKAAVISREDDLLSFTNGNTPLSNGSLIDDRTEEPLEADSVSLGTLAADSAPAPANGFVAEDDDFELDLPTPGFSSIPEAIEDIRQGKLVVVVDDEDRENEGDLVMAAQLATPEAMAFIVRHGTGIVCVSMKEDDLERLHLPLMVNQKENEEKLSTAFTVTVDAKHGTTTGVSARDRATTILSLASRDSKPEDFNRPGHIFPLKYREGGVLKRAGHTEASVDLTVLAGLDPVGVLCEIVDDDGSMARLPKLREFAAENNLKVVSIADLIRYRRKRDKLVERASAARIPTMWGPFTAYCYRSILDGIEHIAMVKGEIGDGQDILVRVHSECLTGDIFGSARCDCGNQLALSMQQIEATGRGVLVYLRGHEGRGIGLGHKLRAYNLQDAGRDTVEANEELGLPVDSREYGIGAQIIRDLGVRTMKLMTNNPAKYVGLKGYGLAIVGRVPLLSLITKENKRYLETKRTKMGHMYGLKFKGDVVEKIESESES

SEQ ID NO: 8786 - protein, 344 aa, Bacillus halodurans C-125
MTRKISMSNAINEAMQLAMRQDEHVILLGEDVAGGAEVDHLQDDEAWGGVFGVTKGLVQEFGRDRVLDTPISEAGYVGAAMAAAATGLRPIAELMFNDFIGSCLDQVLNQGAKLRYMFGGKAQVPVTIRTMHGAGFRAAAQHSQSLYAMFTAMPGIKVVVPSTPYDAKGLLLSAIEDNDPVIFFEDKTLYNTMGEVPEGHYTIPLGKADIKRRGDDLSVVAIGKQVHTALTAADLLAKKGIEVEVIDPRSLSPLDSETILTSVEKTNRLIVIDEANPRCSMATDIAALVADEGFDFLDAPIKRITAPHTPVPFSPPLEDLYLPTPENVIQAVSELLGNSSLQSV

SEQ ID NO: 8787 - protein, 410 aa, Bacillus halodurans C-125
MAVEVVMPKLGMSMKEGTISVWNKKEGDMVAKGEAIVSIQSEKIETEIEAPADGTLLKVVVQEDQSVPPGTVIGYIGEPNEQLDQSKSLEKQQADSHAEKATEGAVFDVEKPSSKGATVSSSPVARKMALKAGINLENIVGTGPGGRITKADVEKAIAEQRVEPSEAKRSNSDVTEKGMQDGAKITPASAMRQVIATRMHGSLMQSAQLTMNMKADVTDLMALREEVNHTVQTRYGMKLTVTDFIARAVVLALQEHSNMNSAYIDEHIVTYEYVHLGMAVSLTQGLVVPVVQHAEALSVVELSKQIKSLSEQARTGKLQSDQLTGSTFTVTNLGVYGVDHFTPILNPPEAGILGVGAATDAPVFQGGDWQTRAMLPLSLTFDHRIVDGAPAAEFLQTIKQFLEKPTHLLL

SEQ ID NO: 8788 - protein, 966 aa, Medicago truncatula
MTSRKLEKTTSIDAQLRLLAPSKVSDDDKLVEYDALLLDRFLDILQDLHGHDIRETVQNCYELSAEYEGNNNPQKLEELGNMLTGLDAGDSIVIAKSFSHMLNLANLAEEVQIAYRRRIKLLKKGDFGDENSAITESDIEETFKRLVNQLKKTPLEVFDALKSQTVDLVLTAHPTQSVRRSLLQKHGRVRDCLTQLYAKDITPDDKQELDESLQREIQAAFRTDEIRRTPPTPQDEMRAGMSYFHETIWNGVPKFLRRIDTALKNIGINERIPYNAPIIQFSSWMGGDRDGNPRVTPEVTRDVCLLARMMAANLYFSQIEDLMFELSMWRCNDELRIRAEELHSSAKRDAKHYIEFWKQVPPTEPYRVILGDVRDKLYNTREHARQLLSDGSSAIPQEAIFTNVEQFLEPLELCYRSLCACGDQPIADGSLLDFLRQVSTFGLSLVKLDIRQESDRHTDVMDAITNHLEIGSYREWSEERRQEWLLSELSGKRPLFGPDLPKTEEIADVLDTFRVIAELPSDSFGAYIISMATSPSDVLAVELLQRECDVKQPLRVVPLFEKLADLEAAPAAIARLFSIEWYRNRINGKQEVMIGYSDSGKDAGRFSAAWAMYKAQEELIKVAKEFGVKLTMFHGRGGTVGRGGGPTHLAILSQPPDTIHGSLRVTVQGEVIEQSFGEEHLCFRTLQRFTAATLEHGMHPPVSPKPEWRALMDEMAVIATKEYRSIVFQEPRFVEYFRCATPELEYGRMNIGSRPSKRKPSGGIESLRAIPWIFAWTQTRFHLPVWLGFGAAFKHVIEKDSKNLQMLRDMYNQWPFFRVTLDLVEMVFAKGDPGITTLYDKLLVSDELWSFGERLRSTYEETKSLLLMVAGHKDILEGDPYLKQRLRLRDSYITTLNVLQAYTLKRIRDPDYHVKLRPHLSKDCMESSNPAAELVKLNPMSDYAPGLEDTLILTMKGIAAGMQNTG

SEQ ID NO: 8789 - protein, 228 aa, Streptomyces avermitilis MA-4680
MIGEPAQPGAKKYVLFDVDGTLIDAVDNQRRVWRVWAERYGLDPGEVYQVALRTRPMETFAQVAPDRDPQECLAALHELEDEDVRSGVYAAFDGASELLDALPPESWALVTSNYEHRVRGRFARTGLPVPSIIVDAASVEEGKPSPVPYLLAAKRLGADPQDCLVIEDAPSGVRSALRAGMTVWGVNAPVAVDGVHRHFGSLREAIRDILAVTSGTRPHEPRGSAAVE

SEQ ID NO: 8790 - protein, 1112 aa, Gibberella zeae PH-1
MADIMIPNVRSPLSEASNRINSNHPPQEAHRYKPRHDRPPASTNNPPRASYGHPAAYFSGRPPPTQPQSTGPKPQGNPTLKPPTDMDDDRRHSGASYDSSGSGHSKKNYKTHIGPWQLGKTLGKGSSARVRLCRHNVTHQLAAVKIVNRRMAYLVQDSSLAALSKWDNNLPEQIDGEIRVPMAIEREVAILKLIEHPHIMKIYDIWENRSEVYLILEYIDQGDLFTFINMKGRLSEEVSVYFFRQIISAISYCHSFNICHRDLKPENILISANLKIKIADFGMAALHQTDTHRLNTACGSPHYAAPELLKNRQYRGDKADLWSMGVILFAMLTATLPFDDPDIRVMMSKTKKGQYEMPDYLSPEAEDLIRRMLQVNPDRRITLKEIWRHPLVKKYAYLDNLDDLNSQPPDIRKGFQYTPVPAQDVDSQLVRQLRSMWHTFSENDLKLKLTCDEPNDQKAFYWLLYQYREQQLEDFKPEIAHSTSDYHHMKPGTWKKHPQAASLSKKTTMALTPGNQKGFEVDQVRAVDVEHQLEPPPQDAYYHREARCRPCTAVDKARRMHATRATNEESTSRMSGSVPPYVTEQGSTYQLEMARPFTPDVSELPSTVLPKTKDRHEAQVNTKRASGQAMRIALGSRYASEIFKEELRHFSSNIAKDCDEAFKSSLIEEDSIAGSLTEPDRTQYESTPISFTIDAPDESAPDILDLTAKSFSNRPLPPLPTPLQGHDERSLAPTPIGSRPTTGDSHLEELRAEQVKVAQPVILTRHAERRVVSAPAYHQKSKMNPALPSINETGAISNDKARIVSAPPHTPTKRGVDRIRGIEYLSQVENSIRVVNSPGDESPVKMPKPLNVRKKFCDSEEEEEDVMVKRASKVESTHGRESVDWQDCNSYLTSSDGKRSDSTTTDAPSKKKTFNFNFWKSNKQRDSIMSITKEPDDKEERPSVELSVVGKTNTSTKVSQSRWHESNSGPVRNIEVKQNWLARLFRVKPATDHICMTISRRRARQEVTILLREWRKYGIRDIQVDKQRNIVFARVADKNFLNLKEVSFAAEVITVIEHGKKQPLSIIRFTQERGAASSFYRVVDTMRMMFETRALVISDKNKQKMMIKTLNS

SEQ ID NO: 8791 - protein, 1103 aa, Candida glabrata CBS 138
MSAISSNTVSVIKNNQIGPWKLGETLGSGSTGKVLLASNETTKQQAAVKVISKAVFEAMNNSESNGDATNALPYNIEQEIIIMKLLNHPNVLRLFDVWETNSDLYLVLEYAEKGELFNMLVERGPLPENEAVRAFRQIIIGISYCHSLGVVHRDLKPENLLLDNKLNIKIADFGMAALESEDKLLETSCGSPHYAAPEIISGLPYEGFSSDVWSCGVILFALLTGRLPFDEEDGNIRNLLLKVQKGEFEMPDDDEITKEAQDLLARLLTVDPSKRITIREILKHPLLQKYPSIKDSRSIRNLPREDTYLSPLADTNSKIDDAILQNLVILWHGKDAREIAAKLREPGANTEKTLYALLYRFKCDTQREANRARRQSKIVQRNSTIRSTAPESPSKKKTYTPQKKNKRASIIASSSKRPVSVTKTATNITVNSSITGTPKSAKRMSMNNSARKRMSALYGTRDSPTKTSRSRRSSIITKDFLGNRPRDSVISMSHNKRASKSSKRISLVPNLKRQSVTTKLMATYAKLSEDDDWEYIERETKRTSSDFATLIDEIFEYEKYEQIRKEKAELERKVRETKEREERERKERQEKELQERLERERIEKQKEDIARQMDEEISNLKKELVGDQDNEDKFRSVSEPLESKSKKIEDIEEDIDGILRNRKYSLQTRPVSRLDPGIGFIDKPRQSEQHVPETVNLEPELEETEQKILETIRRSKFLGSSFDIKKELENVKRHRQTSQPIEKEMAPPALPETLPKAVEKKNVSMDPSLRKISDIKVPQFTRKSRHFSTSNRRLSVLSMYSTKESYSNLADILKNGPGEKEMIQTAPTPKSADDSDQLFDTIDEADTPASVSREERLYEVAEESENELANKKIDIADLLNSEGSNLKSVEEQEDSMKLPKLPPLFEDGSTKETKEQSKSMIPENMQSSESQKQIEKNNSDEGGSLNPFMTKHRDVSDKGVTKEKPTVTMKTTSEQVSADKKRNMSFLRKLSKGSSSSKDNVDVTLSTSVSSKQLFSGLVNLLKGWTKYGLKGIAIDSTSQTITGKLANDNILSFRSTAFSILIFSQEKGSAVTFRKVSGSGKAVRRLSDEVKKVLSKEGVLRD

SEQ ID NO: 8792 - protein, 613 aa, Haemophilus ducreyi 35000HP
MEQQSQLELLIAQGREQGYLTISEVHDHLPEELVDAEQIEDIIQMINDMGIKVLETAPDTDELMLAENIADEDVVEEATKVLSTVESELGRTTDPVRMYMREMGTVELLTREGEIDIAKRIEEGINEVQCAVAEYPEALTELIGFYAQVEEGTMRLSDLVTAFVDPNIQAEEDVVELDSDLDEEASDVVADVDDENEDEESDGSADNTDDNSIDPELAREKFYALREQHEKALQAIQKHGRSHKKSKQHIQALSDIFREFRLVPKQFDLLVESMQRMMKQVRAEERQIQRYAVEYAQMKKADFLKLFQGNETSEEWIDKAINARKGAAPKLANYVEQIRINISNLQRMEQDTDLTVAQIREIGGRIASGELKARRAKKEMVEANLRLVISIAKKYTNRGLQFLDLIQEGNIGLMKAVDKFEYRRGYKFSTYATWWIRQAITRSIADQARTIRIPVHMIETINKLNRISRQCLQEMGREATPEELAERMGMPEDKIRKVLKIAKEPISMETPIGDDDSHLGDFIQDENLELPLDSATAESLRLATNEVLEGLTPREAKVLRMRFGIDMNTDHTLEEVGKQFDVTRERIRQIEAKALRKLRHPSRSETLRSFLDD

SEQ ID NO: 8793 - protein, 260 aa, Streptomyces avermitilis MA-4680
MSTAPEAADLVLHERHGGVLTITINRPAQKNAVDHEAAVQLAAAVDLLDADPELSVGVLTGAGGVFSAGMDLKAFAKGELPLLPSRGLGGLTRASVRKPLVAAVEGWALGGGFELVLACDLIVAAEDARFGFPEVMRGLVAAEGGLVRLPRRLPYHVAARVLLTGEPLTAVEAKEYGLVNELTPPGAALDAARELAGRVARNAPLALAAVKEVLRETQGLKESDAFRRQDELTSGLAASEDAREGAQAFAEKRAPVWHGR

SEQ ID NO: 8794 - protein, 420 aa, Pyrococcus horikoshii
MVEQDPFEIAVKQLERAAQHMKISEEALEFLKRPQRIVEVTIPVEMDDGSVKVFTGFRVQYNWARGPTKGGIRWHPEETLSTVKALAAWMTWKTAVMDLPYGGGKGGIIVDPKKLSDREKERLARGYIRAVYDIISPYEDIPAPDVYTNPQIMAWMMDEYETIARRKTPAFGIITGKPLSIGGSLGRNEATARGASYTIREAAKVLGWDGLKGKTIAIQGYGNAGYYLAKIMSEDYGMKVVAVSDSKGGIYNPDGLNADEVLKWKREHGSVKDFPGATNISNEELLELDVDVLAPAAIEEVITKKNADNIKAKIVAEVANGPVTPEADEILFEKGILQIPDFLCNAGGVTVSYFEWVQNITGYYWTLEEVRERLDKKMTKAFYDVYNTAKEKNIHMRDAAYVVAVQRVYQAMLDRGWVKH

SEQ ID NO: 8795 - protein, 351 aa, Rhodopirellula baltica SH 1
MSELPPYDSFLLVSFGGPEGQDDVMPFLENVLRGKNVPRERMLEVAEHYKHFGGVSPINEQNRQLIAALQKRFDANGIDLPIYWGNRNWDPYFADTLRQMKADGKKRSLAFFTSMFSCYSGCRQYRENIIQAREEVGEGAPLVEKVRMGFNHPGFIAAMADNVSKAAQTIGASPARTKVLFTAHSIPMGMADNCDYEKQLRESCRLVADACGAVDWDLVYQSRSGPPSQPWLEPDVLDAIAEMDDAKKLESLVILPIGFVSDHMEVLFDLDEEAAQLCRERGIKMARASAAGTHPDFVEMICGLVQERLGKLNEKPALGELGPWHDVCPQDCCLYTPRRPPVAGGRPVQAN

SEQ ID NO: 8796 - protein, 408 aa, Fusobacterium nucleatum subsp. nucleatum ATCC 25586
MENIKLKKLDNGITLITEKLPDMSTFSMGFFVKTGAMNETKKESGISHFIEHLMFKGTKNRTAKEISEFVDFEGGILNAFTSRDLTCYYIKLLSSKIDIAIDVLTDMLLNSNFDEESIEKERNVIIEEIKMYEDIPEEIVHEKNVEYALRGVHSNSISGTVASLKKINRKAILNYLEKYYVAENLVIVASGNIDEKYLYKELNKKMKNFRKTKKEEVLDLSYEIKKGKKVVKKPSNQIHLCFTTRGVSSKSELRYPAAIISNVLGEGMSSRLFQKIREERGLAYSVYTYLTRFENCGLLSVYVGTTKEDYKEVIKLIKEEFKNIKENGISERELRKAKNKYESAFTFSLESTSSRMNRLASTYIIYGKIISLDKVREDIEKVTLKDIKKAAEFLFDEQFYSQTIVGDI

SEQ ID NO: 8797 - protein, 112 aa, Chromobacterium violaceum ATCC 12472
MKKVEAIIKPFKLDEVREALSEIGINGLTVSEVKGFGRQKGHTELYRGAEYVVDFLPKVKIEVVLPDDLVERAIETIVETARTGKIGDGKIFVVPVEQVVRIRTGETNEQAI

SEQ ID NO: 8798 - protein, 587 aa, Magnetospirillum magnetotacticum MS-1
MEGAVALGMRRLSVIDLAGGNQPIHNENGSISVVFNGEIYNFRELRRELEEEGHIFSSHTDTEVLVHLYESHGRGMLDRLNGMFAFCLLDRRAGRLFLARDRVGKKPLYYAHGDGAFAFASEIKSLLCHPAVRREADPAAAALYFTHGYVPAPFTPFMGIRKLPAGHWLELDLASGEIQVGRYWDLDYSQVDEDLCEEEAVAGLESALLAAVERRLISDVPLGVFLSGGVDSSLVVAMMARFREGRDIHAFSIGFHEKAFDESGYAESVARAWGVDHHVTRFSDAEMFSVIDEILPRMDEPLSDPSLIPTYLLSKVTQDSGIVVALSGDGADEMFGGYPKYYIHRYAAWLDRLPGILGRDVPAWLFSQVPLKAENNIFNYKVERFVSGLRLAPRHRNQFWVAPFMPDELTRLLPEQEVPRAVWEVTDQYDSRFNGRGVVDRMMYFDAKMMLQDMYLAKVDRASMAVSLEVRSPFLDLEVMDAAVHLPWQLKVRGRETKYLLKKLASRYLPHDVVYRFKRGFGLPLAVWMRTLAPRISETLTQGDCGGIDAAYVQSLLREHLDGTRDHAVKLWAVYAYLTWLRNWGGS

SEQ ID NO: 8799 - protein, 61 aa, Cucumis melo
DTLLDADLESDILGWQYISGSLPDGHELERLDDPQIQGSKYDPDGEYIRHWLPELARMPTE

SEQ ID NO: 8800 - protein, 586 aa, Gluconobacter oxydans 621H
MCGIAGLSCLPGHHPDQDALERMSQAIFHRGPDGEGRLDLGGAALRHRRLSIVDIAGGAQPFRLGAAALIANGEIYNDPAIRRRFPKTCFQTHSDCEPPLHLWLHDGAGYTHELRGMYAIAIVENEHGRHEMVLSRDPFGIKPLYIAAYEGGIAFASEPQALLAGGFGRRSVRDGARNELMQLQFTTGQDIIFDGIRRLLPGETLRIVDGRIVESRRRHVLHEARDTVPARLSDEQALARLDTALLDSVSAHLRADVPLGLFLSGGIDSSVILAAAHRLGLPHPRTWTARFDAGKADESADAAALAASVGAEHHVLTVTEDMVWRDLPSIVACMDDPAADYAVIPTWFLAREARKDVTVILSGEGGDELFAGYGRYRRVMKPWWKGGRAPYRSGTFGKRFAEHGRQWRRGIAMTELALGVSGLEGAQALDIAEWLPNDLLLKLDRCLMAHSVEGRTPLLDPVVAKAIWPLPEHFKVRDGYGKWLLRRWLQDALPQARPFAPKQGFTVPVGPWIEKQAHRLGPLVARQPCIRAMMPAADVERLFARASQRGVARQAWTLLFFALWHRHHIEGVPVDGDTFETLARAS

SEQ ID NO: 8801 - protein, 61 aa, Hordeum vulgare
DTLLDADLESDALGWQYISGSLPDSRELDHIDNPQLEGYKFDPHGEYVRRWLPELARLPTE

SEQ ID NO: 8802 - protein, 61 aa, Hordeum vulgare
DTLLDADLESDALGWQYISGSLPDGRELDRIDNPQFEGYKFDPYGEYVRRWLPELARLPTE

SEQ ID NO: 8803 - protein, 380 aa, Mycobacterium sp. KMS
MTGSRFDTDVYARRLQSAAAAARDTGLAGLVITPGYDLRYLVGSRAQTFERLTALVLPADGDPTIVVPRLELAALKESAIPELGVAVRDWVDGDNPYDLVAEALGGGTLRTAVTDSMPALHLLPLAGVLGEVPVLATDVLRRLRMRKDAAEIDALRKAGAAIDRVHARVPEFLVAGRTEADVAADIAEAIVAEGHSEVAFIIVGSGPHGADPHHECSDRELRAGDVVVVDIGGPYEPGYNSDSTRTYSLGEPDPEVARRYAVLQRAQLAAVEAVRPGVTAEQIDAAARDVLAAEGLAEAFVHRTGHGIGLSVHEEPYIVAGNDLPLEVGMAFSVEPGIYFPGQWGARIEDIVIVTEDGAESVNNRPHDLVVVPAGPAAAG

SEQ ID NO: 8804 - protein, 61 aa, Hordeum vulgare
DVLLDADRESDILGWQYISGCLPDGHELGRLDNPEVQGQKYDPDGEYVRTWIPELARMPGE

SEQ ID NO: 8805 - protein, 421 aa, Thermococcus kodakarensis KOD1
MVEIDPFEMAVQQLERAAQFMDISEEALEWLKRPMRIVEVSVPVEMDDGSVKVFTGFRVQHNWARGPTKGGIRWHPAETLSTVKALATWMTWKVAVVDLPYGGGKGGIIVDPKKLSEREQERLARSYIRAVYDVIGPCTDIPAPDVYTNPKIMAWMMDEYETIMRRKGPAFGVITGKPPGVGGIVARMDATARGAAFTIREAAKALGWDDLKGKTIAIQGYGNAGYYLHKIMSEEFGMKVVAVSDSKGGIYNPDGLPPADEVLKWKKEHGSVKDMPGTQNITNEELLELEVDILAPSAIEGVITKENADNVKAKIVAEVANGPVTPEADEILHEKGILQIPDFLCNTGGVTVSYFEWVQNINGFYWTVEETRKRLDDKMTKAFWDVFNTHKEKNIHMRDAAYVVAVSRVYEAMKHRGWVKK

SEQ ID NO: 8806 - protein, 264 aa, Oryza sativa (japonica cultivar-group)
MAATLFSTSLTPTFLPAVPCPKPAPPASACFPCALPPRAALAAPPAPLRRRLSPVAVAVSSEVEEEEGGAESEGEFAEDLKVFVGNLPFSVDSAQLAGLFEQAGSVEMVEVVYDRQTGRSRGFGFVTMSTAEEAGAAVEQFNGYTFQGRPLRVNSGPPPPRDDFAPRSPRGGGSNFDSSNKLYVGNLAWGVDNSTLENLFSEQGTVLDAKVIYDRESGRSRGFGFVTYGSAEEVNNAISNLDGVDLDGRQIRVTVAESKPRRQF

SEQ ID NO: 8807 - protein, 243 aa, Oryza sativa
MSAVVCGKRSSAIFADDLLPPSPPSPHSHHHPAKRSCRSPHRRREAHLHHLSSLFPGMDPQLLEGALDASGDDLDSAIKSLNNLRLESTEAILSATGCKSENGLPTAVYPSVEGIVNNGGVSTANEHPAAADSCQTEVLEKSIVERTGADAAQNLQKENMMLKEQLTVVLRENAVLKRAVAIQHERQKEFDERSQEVQSLKQLVVQYQEQLRTLEINNYALTMHLKQAQQNNSIPGHFNPDVF

SEQ ID NO: 8808 - protein, 60 aa, Brassica napus
MAKSCGALFLLALVVFSLLQTVVMASSGSGGKYNPKRYGPGSLERSQCPKECDRRCSQTQ

SEQ ID NO: 8809 - protein, 88 aa, Oryza sativa
MSSRRSSRGSISEEEINELISKLQSLLPNSRRRGSSQASTTKLLKETCNYIKSLHREVDDLSDRLSDLMATMDHNSPGAEIIRSILRS

SEQ ID NO: 8810 - protein, 489 aa, Arabidopsis thaliana
MSTVESSKPKIINGSCGYVLEDVPHLSDYLPGLPTYPNPLQDNPAYSVVKQYFVDADDSVPQKIVVHKDGPRGIHFRRAGPRQKVYFESDEVHACIVTCGGLCPGLNTVIREIVSSLSYMYGVKRILGIDGGYRGFYAKNTVSLDSKVVNDIHKRGGTILGTSRGGHDTTKIVDSIQDRGINQVYIIGGDGTQRGASVIFEEIRRRGLKVAVIGIPKTIDNDIPVIDKSFGFDTAVEEAQRAINAAHVEAESIENGIGVVKLMGRYSGFIAMYATLASRDVDCCLIPESPFYLEGEGGLFEYIEKRLKESGHMVLVIAEGAGQDLMSKSMESMTLKDASGNKLLKDVGLWLSQSIKDHFNQKKMVMNLKYIDPTYMIRAVPSNASDNVYCTLLAQSAVHGAMAGYTGYISGLVNGRQTYIPFYRITEKQNHVVITDRMWARLLSSTNQPSFLGPKDVFDNKEKPMSALLDDGNCNGVVDVPPVTKEITK

SEQ ID NO: 8811 - protein, 160 aa, Casuarina glauca
MSTLEGRGFTEEQEALVVKSWSAMKPNAGELGLKFFLKIFEIAPSAQKLFSFLKDSNVPLERNPKLKSHAMSVFLMTCESAVQLRKAGKVTVRESSLKKLGASHFKHGVADEHFEVTKFALLETIKEAVPETWSPEMKNAWGEAYDKLVAAIKLEMKPSS

SEQ ID NO: 8812 - protein, 112 aa, Leptospirillum ferrooxidans
MKKVEAIIKPFKLDAVKEAVTALGVYGMTVTEVKGYGQQKGHTEQYRGAEYVVEFITKIKVEIVVADAKVSPVLEAIRRTAMSNSIGDGKVFVSPVETALRIRTGETGDAAL

SEQ ID NO: 8813 - protein, 126 aa, Zea mays
MAARSSSQQLVAAAVLAAALLLLAAGAGTASAAVSCGEVTSSVAPCLGYAMGSAASPSAACCSGVRSLNSRASSTADRQATCNCLKSMTGRLGGGVSMANAANIPGKCGVSVGVPISPTVDCTKIN

SEQ ID NO: 8814 - protein, 108 aa, Oceanobacter sp. RED65
MSDNIITLSDDSFDADVLQSDVPVLVDYWAEWCGPCKMIAPVLEEIAEEYDGKLKVAKLNIDQNEATPPKFGIRGIPTLMIFKGGNVEGTKVGALSKSQLTAFIDSTI

SEQ ID NO: 8815 - protein, 272 aa, Leptospirillum ferrooxidans
GPQDRKNTPKMAKSNAHCGPKHSPLLFLGTFILWLGWFGFNPGSTLMATTPSVGYFAYIAMTTNLAAAAGALAAMFTAWKILGAPDMSMVANGAIAALVAITASCAFVDPWASVVIGAVAGVIAVVGVLAIDRIHIDDPVGAVSVHGMAGIWGTLSNGLFATPDRVKLLAVGTPGLFYGGGFHQLLVQAEGVSASLAYVFFVSLLVFYVIKVTIGLRVSEHDEVSGLDISEHKMWGYPEMFSGGFGGGTAPGELAGRSEMSMSAAKPVTQRT

SEQ ID NO: 8816 - protein, 95 aa, Triticum aestivum
  misc_feature (64)..(64): Xaa can be any naturally occurring amino acid
MASAMAGKKMGRASYIRIKHEEERHEASWKEPEGWVFSATTRTDVAARLGELRDQILAGCASFXDLAAQHSGCSSARRGGDLVCMVEPIDLQKIA

SEQ ID NO: 8817 - protein, 350 aa, Streptomyces avermitilis MA-4680
MIHRRCVGGRRNHGGRVAQGSSRSRLPQQGTPVTMSSTSSTPPWNVQRLPGADGRVFLVTGGNAGIGYFVAEQLSATGATVVLGSRNPAKAEAATASIRARVPGSRVRAVRLDLADLSSLETAVESLEVERLDAVVHNAGVALDDPPREETGDGHELMFGTNHLGHFALTQWLMPLLSAAPAARVVTMGSFAAKSERLDLDDLQSRKDYQPKRTYGRSKLAQMYFGVELDRRLRAAGSTVASVVVHPGGALDSLTPSRPPVHVRSTGARLSAAPAALLLQGKHAGAWPAVRAVLDPAVRGGQLWGPRVFGLRGEPRREPVWDHLADPSVAARLWDASCDLMGTDLSTISG

SEQ ID NO: 8818 - protein, 289 aa, Streptococcus suis 89/1591
MPKTILITGSTDGIGKHLAMKLASEGHEVILHGRNSEKFRVALSDIQLKTGNKKIHGYLADFSKLADVYRFSQEIKRDFEQIDVLVNNAGAYFGDARVATAENIEMTFMLSVQVPYILTTELLPLLEKAVGRVIHTSSFMHHFAQTRGLDFGLEQSYSAAMAYNNAKLYTIWLAIAQAEALEKQGSSVTVNAYHPGLIATNLGNDGVKRNLRSRILTSLMKPFSKDLDQGIETGYYLSLSPEVAGQSGRYFAEKKVAKVSLKGFDVPKSQALLAYLDKKIQVFKESYRD

SEQ ID NO: 8819 - protein, 655 aa, Burkholderia multivorans
MCGIDGFLNSVAFDEETARGTLARMTASLAHRGPDAQGLWVDPAAGIALGHRRLAIVDLSVHGRQPMASACGRYVMVFNGEIYNHRELRAQLERVGRAPAWRGHSDTEVLLAAFAAWGVDATLRRATGMFALALWNRESRVLTLARDRIGEKPLYYGRIGDALVFASELKALRAYPGFGGEIDRDALCLYLRHSAVPAPHTIYRGIRKLPPGSWIQFEHAQDTPRIRTYWALEHAIDAGHHEPFAGTAAEAVDRLDTVLRQAVARQMEADVPLGAFLSGGVDSSAIVALMQAQSAAPVDTFTIGFHEAGYDEAGYAKAVARHLGTRHTELYVTADHALDVVPKLPAIYDEPFSDASQIPTFLVAELTRRHVKVSLSGDGGDELFGGYTRYFLTPRLWRKLHRVPAAVRTRIAGALHALRPDHADQLAAVAQGAWGAGELRDSPTRIGDRLHKLGHVMTADSRIGLYRLLMSSVHHPERIALAGHEPPTPLDTVSAWPAHLSFAEQAMAIDTLTYLPTDILTKVDRAAMAVSLETRMPFLDHHVVEFAWRLPASLRLPEGQSKALLRRLLDRYVPTELIDRPKQGFCAPIDHWLRGALRDWADALLQPSRLRDEGFFDAAAVERLWRQHQTGRMNWQHQLWTVLMFQAWLDAQRAA

SEQ ID NO: 8820 - protein, 114 aa, Pseudoroegneria spicata
KTRPCKVVEVSTSKTGKHGHAKCHFVAIDIFNGKKLEDIVPSSHNCDVPHVTRLDFQLIDITDDGYVSLLTESGSTKDDLKLPTDDALLAQIKAGFADGKDLILSVMSAMGEEQ

SEQ ID NO: 8821 - protein, 524 aa, Aspergillus nidulans FGSC A4
MPSHTYPQRLYTTGYTVPPLKDKSLFIQKAFVNGEWVDAESGKTFEVHAHIDANGWYLDVLTDPATGKLIGTCPEFSASDTEKAIQAASAAFPKFRATLARERARMLRRWYQLMVDNAEDLATLITWENGKPLADAKGEVNYAASFFEWFSEEAPRTYGDTIPASVPGNRVITVKQPVGVCGLITPWNFPAAMITRKIGPALAAGCTVVTKSPGETPFTANALAELANRAGIPKGVVNIVTAMKNTPEVGEMITTHPDIRKVSFTGSTNVGRLLMKQSSSTIKKVSWELGGNAPFIVFDDVEDLDAAVTGAIASKFRSSGQTCVCANRIYVQKGIYDEFVQKFVEKVRNFKVGAGFEDGVTHGPVIHDRAVDKVDQHVQDAISKGAKLIAGGQRRSDLGPNFYDLTVLANMTKDMKIASEETFGPVAGLFPFETEKEVVELANKAEVGLAGYFFSGNIKRIFRVAEALEVGMVGVNTGLISDVASPFGGVKQSGFGREGSKYGIEEFMTIKSVTFGGMGEPLQS

SEQ ID NO: 8822 - protein, 729 aa, Rhodopirellula baltica SH 1
MFGATSVGVGAIVGGGILALAGVAFATTGPSAILAFGLNGVIAILTALSFAEMASKFPESGGTYTFSRKVLSVESAFTVGWVVWFASIVASVLYAIGFGSFATLLLSELYSTQGSVPHWLGEPWSVPVVSLATTVGIGGLMTFRTSGGGAWINVAKVAVFSVLIIGGFWMLTGQPVSKTTAELRPFLASGWGGLVQAMGYSFIALQGFDLIAAVGGEVREPTKNIPRAMLLSLVIALLIYLPLLFVLTTVGTDGSQSIRELAASDPEAVVALAARHYLGTSGYWLVLIAAVLSMFSALQANLFAASRIALAMSRDNTLPNALSRLAAGSGSPWISVLVTTGLVCLLIQLLPDIAAAGAASSLIFLVTFAIAHWLAILVRQRSVLTPPPFRVPGYPAVPVVGGLACLALAIFQGIAVPEAGIIAVMWIAIGGVLFLSLFARRARLTDVSNIASNPELSRLRGNSPLVLVPIANPNNARAMIALADTLVPAALGRVLVQTVVVAPHDWDPLVNHRPSAQLHSVMNEILHASASLGVRCETLTTVSAEPMMEIARVAKLHQCQSVLLGLSEITPEARDTPLEGLLGQLSSDVVVLRAPKDWQLDQSQQILVPVGGRGGHDYLLTRLLSSLSREQQRQVKFLRVIPTDTLRADQKRIRKELDRTTRVNAGRVCEREVVRSNDPVKTIADRAGTAGLIILGAQRLGPRQKLFGDFTRKVALESDCPVIIISRRG

SEQ ID NO: 8823 - protein, 405 aa, Agrobacterium tumefaciens str. C58
MTGRLVIVGAGQAAFALASKLRALKDERPITIIGSEDAYPYQRPPLSKKYLLGEMSFDRLMFRPEEWYAENNVDIRLSTWVEEIDRAAKTVRMQDGSTLSYDKLALATGAAPRLLPASIGGDLEGVLTVRDKRDADRLVEEMKPGRRLLVIGGGYIGLEAAAVARKLGLEVTLIEMADRILQRVAAKETADIMRGIHQAHGVSIREKTGLVRLVGMDGRVAAAELSDGSMLDVDFVIVGIGVTPNDRLARESGLDVGNGIVVDALTRTSDADIHAVGDCNMLPWRGQHVRLESVQNAVDQAEAAAEVLAGTEAAYEAKPWFWSDQYEVKLQIAGFNLGYDETMLRPGAREGSWSVWYFRDGRFVAVDAVNDAKAYVAGKKLLDIGAEPDRAILADAAADLKLLLS

SEQ ID NO: 8824 - protein, 286 aa, Staphylococcus aureus subsp. aureus MSSA476
MVAKILDGKQIAKDYRQGLQDQVEALKEKGFTPKLSVILVGNDGASQSYVRSKKKAAEKIGMISEIVHLEETATEEEVLNELNRLNNDDSVSGILVQVPLPKQVSEQKILEAINPEKDVDGFHPINIGKLYIDEQTFVPCTPLGIMEILKHADIDLEGKNAVVIGRSHIVGQPVSKLLLQKNASVTILHSRSKDMASYLKDADVIVSAVGKPGLVTKDVVKEGAVIIDVGNTPDENGKLKGDVDYDAVKEIAGAITPVPGGVGPLTITMVLNNTLLAEKMRRGIDS

SEQ ID NO: 8825 - protein, 344 aa, Arabidopsis thaliana
  misc_feature (220)..(220): Xaa can be any naturally occurring amino acid
MHIGQALAAAKEGESQMIVMMGNNLSLTSIILNGDPSIEHKGKLPCLDEQVKISQFYHCEGLLLCILKDDSRFVVCNPYLEQTRWIEPRYSHRPHGWDRFSYALGYVNTDSCRCYKLLGLIDYYYNAPEKQFFWYGVYDFDSDLWTTLDVTPHWRIAFCNPGVPLKGSTYWCAAERNVDVDEVLADRLICFDFTSERFGPLLPLPFSGGHLDCTTLSCVXEEKLAVLLQHDESNPYELDLWITTKIETGEVLWSNESFFIDEEKKVAFGFDGRNRERVIVIGEAGYLRGLDLVGDFGDQECRTDLCSYVPSLVQIKQPEGGESKQQSDLEKCRYDENMLRLVSL

SEQ ID NO: 8826 - protein, 583 aa, Lycopersicon esculentum
MSSGGCSIVWFRRDLRLEDNPALAAAVRAGSVIAVFIWAPEEEGYYCPGRVSRWWIKKSLAHLDSSLKKLGTSLITKRSNDSVSSLLQVVKSTGATRVFFNHLYDPISLVRDNCAKETLSAEGVSVCSFNADLLYEPWEVVDDESRPFSTFSDFWEKCLTMPYDPEAPLLPPKRIISGDASRCPSDNLVFESELEKGSNALLARAWSPGWSNADKALTTFINGPLIEYSKNRSKADSATTSFLSPCLHFGEVSVRKVFHRIRTKQTLWANEGNKAGEESVNLFLKSIGLREFSRYMSFYHPYSHERPLLGQLKYFPWLVDEGYFKAWRQGRTGYPLVDAGMRELWATGWLHDRIRVVVSSFSVKVLQLPWTWGMKYFWDTLLDADLESDALGWQFITGTLPDGCEFLGIDNPQFEGYKFDPNGEYVRRWLPELARLPTEWIHHPWDAPESVLQAAGIELGSNYPFPIVEIVAAKERLEEALSQMWQLEAAARSAIENGMEEGHGDSTDEFVPIAFPQAMQIEMEANNVPVRNNNPTITALRRYGDQIVPSMSSSFFRNEDEETSVDIRNSVVDSRAEVPIISM

SEQ ID NO: 8827 - protein, 1442 aa, Magnaporthe grisea 70-15
MAPKKKIAVMTSGGDAPGMNAAVRAIVRMSIHLGCDAFCVYEGYEGLVQGGNFIRQMQAEDVRGWLSEGGTLIGTARCMAFYERPGRLTAAKNMVLNGIDALIICGGDGSLTGADKFRAEWPSLLEELVSKGELKEEQIAPYKHLNIVGLVGSIDNDLSGTDATIGCYSALSRICEMVDYIEATAASHSRAFVIEVMGRHCGWLALLAGVATGADFIFIPEHPQEGNWKEGMYAVVEKHRKLGKRKTIVIIAEGANDRNGKKITPEEVKDLLADKNGLALDTRITTLGHVQRGGRAVAYDRIIATQMGVEAVRAVIEATPETETCFIAVNENKIVRKPLMQAVKDTKKVATAIEAQDFDQAMSLRDSEFAEQYQSFQIMTTPEPALLLPKEKRMKIAFINVGAPAGGMNAAIRAGVLWCQSRGHEAIAIHNGFAGFARHHGDKPLGAVRPFDRLEVDGWASRGGSEIGTNREVPSQSGMELIAKLIGQYGFDALFVIGGFEAFQAVSELRRAQEEYPSLRIPMALLPATISNNVPGTEYSLGSDTALNALVDYSDMIKQSAAATRRRVFVIETQGGKCGYLATLAGMACGASAVYTPEEGISLDMLAADVAHFKEIFAHDKGQSRAGRLVLVNEKASNGGVPSPMDRSRAVRLAIKCIQHLEQYGPKPHEKVKADPRSAGVIGIRGADVVMTPMKEVEDTETDWPNRRPLNAFWTEMKESVDILGSRGPYPRPEPTLKGLKAKDVKRGLEARASEFLTRVLLSAQPREPFVWLACFSTPTALVICNGMEYDGFTDADFVSLLFTSRLCRLSFAILLNFSRDLYWLRKERQQLPFRSRLLLSTTSPTHFGQVLAKVKEGRDAEEVPDSQMDNTIAQSLEGLQAQHQESIKGLRATTAGMVTLASPRALPSCLVLLSLAVQLCSASMAAWWVGDKRAPQILRWNATLGAITYSSCHTKDTPAFPLDPPNVLDVAQKPRNGTSLTGQGWWNSKTTAASIFYQAEDGSLVNTYQECDLSTGKFRRLTTDIISKDAPAPIHPESGLASVLLANEGTNEGYRLFYHDDKKQVNVIGFRPATSKFYYDGIVSQDLPSGMALAAGFNSNRNYSVVFPRDDENLEHARATADDSRHGITILPRPLKDSNVGNMTSLANRTGLVLDKDFNMTTVPRLPNWTSNPKLALSTDSGTKRNVFWLGSDRRPHKLYITTQGWALQDTNVGVDEWPAADADSDLALAYERGTDNVRLYYVVGGILHELRHDKARTGNGYEWKIAAALPVVAPPDSQSGGDGGLSTGAKIGLGVGIALGVVAVGAACMSVWYVRRLKKTQAADRAQADDEEEEKRRRYEQVQQEQQQYNPYQYQQVQQHGGPHYPQSNGTSQFGSEMGSPKTTYHYGGYIPDKKAPLASASPVPQEMNATPVVYELPEQRRATEMDGGSDVMSPQSTHR

SEQ ID NO: 8828 - protein, 61 aa, Musa acuminata
DTLLDADLESDALGWQYISGSLPDGRELDRIDNPQFEGYKFDPHGEYVRRWLPELARLPTQ

SEQ ID NO: 8829 - protein, 61 aa, Musa acuminata
DTLLDADLESDILGWQYVSGSLPDGHELKRLDNPEVLGQKYDPDGEYIRNWIPELARLPTE

SEQ ID NO: 8830 - protein, 1128 aa, Bordetella pertussis Tohama I
MGKGNMKQVTGYCTLCRSRCGSVNHVENGRLVAVTPLAGHPTGGALCAKGRAAPEMMAESHRLLRPLRRTNPRGAADPGWREIEWSEALDEVAARLAVARRRDGAESVAFAVTTPSGTPMVDSFEWVERFVRVFGSPNLIYAVEVCGWHKDYAHALTFGRGIGVPDLEHTDTMLLWGHNPARTWLAQAARIAAARQRGARVVVVDPNREGSSQQADLWLRVRPGADGALALGAIRHLLHTGRFDHDFVARWSNGPYLVDGASGALLRAVDLWPDADPAARVVMQDGSPAASGRGADTARAELFGSWTLRLHDGRACEAVTVMHALRVAVERYTPDEVARLAWLDEAELAQFNAIFENAPRLSYHSWTGVGQHTNATQTDRAIATLYALTGACDRKGGNLWTVAPPYRAVNGYRELLSPVQRAKALGLDELPLGPPSLGWITARDFCRAVLQQDPYPVRTLVSFGSNLLVSQAETARNLEALQALDFHVHVDMSMNPTAMNADIVLPANMPWEREALKLGFEITQAAVEHVQLRPRMVEPAGESRADYEIVLELARRLGLRDAFFGADMDACWNHQLAPLGIDVQALRRQPEGIRFPQPFVHEKYKAVRDGQPVGFPTQDGRVQIHCAALRDIGQPALPVHVEPADTPARHAGAYPLVMSTAKSGWFVHSSHRYVASLRRKSPEPQVYLSVQAARARGIASGDWVRVRTPYGEVALRAKINADLHENVAIAEFGWWQGCEGLGRVDGAIVGPASSNINAIMTDRHRDPVSGSVPLRATVCDIVRDDARNRGSWSGAREFVLAQKRGIAHDVAEFRLLPCDAQALPDFLPGQHVIVSMPGGAARRAYSLTGPNREPAHLSIAVRRVRDGDGPAGVMSNALHELAEGARVLLSAPAGVFTPPLRTARPVILMASGIGITPFHGYLEALAQDAGPAPSVLLVHACRDGSSHPYGAELKRLAQRIGSVCTLTVYAEPASDDAPGRDYQQRGRLDFAWLPPATVAARPLVYLCGSPGFLAFCTDALAARGIPRFDIFSETFTSEKRVPATLAPQPIEIEAEQGGFTWDPSAGTLLDAAERAGLSLPSGCRVGQCESCAMHIVSGQVAHLIDFDGSADTCLTCQAVPITPLTLRR

SEQ ID NO: 8831 - protein, 407 aa, Clostridium tetani E88
MKDIKLNNGTKLIYKKIEEHITSFCIGFDGGAIRENGFPYGTAHVVEHMVFKETKNRTECEINSLCDEIFGFQNAMTNYPYVIYYGTTLSEEFHKGVEVFLDIVLNPTFPAKGFREEIDVIKQELKDWKDDNDQYCEDELFYNAFENRRIKELIIGNEHSLNTITLNQIKDFYNKFYKLNNMTISVVSSLEFEKVKEIIEKYLIKKEEKTSIEKVNENYLYELNNPGTFVKIKQGIEGAKIQYVYPIHMLENKEIKAMDVFNFYFGEGTSGILYNIIRTENSLAYDISSFIKNEKGIKLFCIQLSVHKDNINKAIALINKAIEEIKVDKNYFTEDKIKKAIKGIRLKQELRCERSIQLAKDLTCYEIMYGDYKGVFQTEEDYKDIDGYHINKIIRRILNNPSIQIIQ

SEQ ID NO: 8832 - protein, 817 aa, Debaryomyces hansenii CBS767
MNEFPDEHRNSTSFTMHLLGDQVLGELYQDSRELKQWLIKSNCQHHYNKFIENGITFDLLKELDSSSLKEIGINKLGDRLRLELAISSMKSEKLADNITVDELYKIMNLHLTDSITLLSGGNISNGSVSTPTNESGTLTTLTNNPYLHSNVSSSSNAANKDANKNVTFILQDGSTKKVNVTGCFNAQSIKRKVLKRLGIKQQETLYNTYIHTSLNSKSNPGVNLLFDVELVTICYSPDRLEKHRIILCRKDEYPSDMAIESSKRLMAKYERYSQTDSLKTKSQDNFSQYHMPDPRKTHASPILRNFFGQRPPSELISSNLAEYFPEAHQKDLEATVRNSVRYSVRLSRRFNLPSSILSGASSNISIHNSQNKRSSILSNGTVSGPNGAPGTPSVSSMDQNSVAAKRKPSGRTIGEMMVNNINAIDQAVSSNDVQSVFSKPQSIGSDISGPGQGSFEPKSMKSHTSPILNRSSIAASFVDPFHTDNNRNSRIELLSIDSDDDEDDFIDEYGTYTSGELDHDFKDNMLDSISEDGPKNWLQGARIGAGSFGTVYLGMNPLTGELMAVKQVSLPDKNSINNSLQTAMIEALQHEMTLLKEINHENIVRYLGSSTDDNFLNIFLEYVPGGSVQSMLSSYGPFEEPLIRNFIRQILIGLSYLHGEDIIHRDIKGANILIDIKGTVKISDFGISKKVGNSDVDMDDETNSQKKGERRASLQGSVYWMAPEVVKQTAYTKKADIWSVGCLIVEMFTGKHPFPDFSQMQAIFKIGTHITPQIPEWCTSEAKDFLYKTFELDYEKRPDAIDMLAEPFLNPLIMSKQ

SEQ ID NO: 8833 - protein, 230 aa, Vibrio harveyi
MSSTSLLDEFGTPVQRVERAIEALKNGLGVLLMDDEDRENEGDLIFSAQHLTEAQMALMIREGSGIVCLCLTEERANWLDLPPMVKDNCSKNQTAFTVSIEAKEGVTTGVSAKDRVTTVKTATYFDAQPEDLARPGHVFPLVAKTNGVLARRGHTEGTIDLMYLANLVPSGILCELTNPDGTMAKLPETIEFARRHGMPVLTIEDIVDYRTGIDLRNEYKSGLVREVSWS

SEQ ID NO: 8834 - protein, 224 aa, Mycobacterium sp. KMS
MAHPLIAPSILSADFARLADETAAVTGADWLHVDVMDNHFVPNLTLGLPVVESLLKVTDIPMDCHLMIENPERWAPPYAEAGAHNVTFHAEATDNPIAVARDIRAAGAKAGLAVKPGTPIDPYLEILREFDTLLVMSVEPGFGGQKFIPEVLPKVGIVRRLVDSGELTVLVEIDGGINEDTIAAAAEAGVDCFVAGSAVYSAQDPAAAVRSLREQAAAASKHLS

SEQ ID NO: 8835 - protein, 1264 aa, Arabidopsis thaliana
MAALQTLREWIGIQQFPPATQSKLLEILGKYKEEDVSSLTVLVMGKGGVGKSSTVNSVIGEKAAAVSTFQSEGLRPTLVSRTRSGFTLNIIDTPGLIEGGYVNDQAINIIKRYDELFPGLRSYSPNLGLICGICINLDSWMLNLNRFLLNMTIDVLLYVDRLDVYRVDDLDRQVVGAITDAFGKEIWKKSALVLTHAQFSPPDGLNYNHFVSKRSNALLKVIQTGAQLKKQDLQGFSIPVILVENSGRCHKNESDEKILPCGTSWIPNLFNKITEISFNGNKAIHVDKKLVEGPNPNERGKKLIPLMFAFQYLLVMKPLVRAIKSDVSRESKPAWELRDSVKPDQMSASTVSITANTAAATRRTPILAGEKKSNFDYPQSESLANGGVGEAGGTSRDLSRGEATLDRSQGQDLGPVTRRSVSAATGTNTTATQRRTRKVATPKSEKARWKTVVRIFAKQLGALLIIVGLIQLTRKMILKASSPSSPISSYETEMAFSGLESRIAEVDGLVKATTNSMQVQVELLDKKMEREAKVLRQEIERKASAFQSELKKIESRTESLEKSVDEVNAKPWVTKDELERIYEELKKGNVDDSAFSEISIDELRAYARDIMEKEIEKHAADGLGRVDYALASGGAFVMEHSDPYLVGKGSSWFATTMRRAHTNAVKMLSPSFGEPGQCFPLKGSEGYVQIRLRGPIIPEAFTLEHVAKSVAYDRSSAPKDCRVSGSLQGPESSAETENMQLLTEFTYDLDRSNAQTFNILESSSSGLIDTVRLDFTSNHGSDSHTCIYRFRVHGRAPDPVPVVGTNLDQDSSPERSQSEIVVESLLASSNLRSSMPTQQIQSLRVFVATWNVGGKSPHSGLNLDALLHVHSEFDEIVPLNAGNVLVLGDNEPAAKWLAMINQSLNKSSSSSGGRLSPKTPSFGAGSMFFAKPSLKKISESFRTECRRKLKICNCSTFSEDIVRKYGRESCFRCPEGLVNQSGVLSDDEEDEDDDDDDEDEDEGGGKVASLVSNQMTMKYGLVASKQMVGIFLTVWMRKELIQHVSHLRISSVTRGIMGCLGNKGCIAVSLQLYKTSFCFICSHLASGEREGDERRRNLDVIEILKNTSFPRICRTSFTRVPDRITKHDRVIWLGDLNYRIALSYSETKTLLDKNAWDTLLNKDQLKIERDAGRVFKGWHEGKIFFAPTYKYSYNSDAYAGDTSKEKKNKRRTPAWCDRILWHGDGIRQLSYVRGESRFSDHRPVCSVFVVDVEVCEGKTGTRRQ

SEQ ID NO: 8836 - protein, 435 aa, Leuconostoc mesenteroides subsp. mesenteroides ATCC 8293
MDFSIDDAQQAGAIIKVIGVGGGGSNAVNHMIEEGVSGVEFIVANTDVQALDKSKADTKIQIGPKLTGGLGAGSNPERGTKAAEESSEAIASAMTGADMVVITAGMGGGTGNGAAPVVARIAKEQGALTVAVVTRPFKWEGPKRGRYAAEGLQALSESVDSLIVITNERLKDRIDLRTPLSEAFKVVDEVVAQGVRGISELITNPGFINLDFADVKTVMQDAGPALMGVGQASGETRAADATKQAISSPLLEVDMAGAEDVLLNITGGLDMSLFEAQTASEVISQEAGHDVNVIFGTSIDENLEDSIRVTVIATGLQNVTEKPKMTENTAASAANVFGSNVNTSSTTNTNEAPINNSVFEKPAPSNAAPKPTMAQNDPFADWNITNDTKDVFSEEKRFDDVQKQSFDVFNTPTSSASVDLSNDDDNDQPPFFKKR

SEQ ID NO: 8837 - protein, 362 aa, Photobacterium sp. SKA34
MAGSYNIAVLPGDGIGPEVMQQAHKVLNAIETKFNLTFNRTEYDVGGIAIDNHGCPLPDATLKGCEQSDAVLFGSVGGPKWEHLAPNDQPERGALLPLRKHFQLFCNLRPAQIHRGLEKFSPLRTDISERGFDIAVVRELTGGIYFGQPKGREGEGAQEKAFDTEVYYRYEIERIAKIAFESARLRSKKVCSIDKANVLQSSILWREVVEEIAKDYPDVTLTHMYIDNATMQLIKDPSQFDVMLCSNIFGDIISDECAMITGSMGMLPSASLNQDKFGMYEPAGGSAPDIAGKNIANPVAQILSAALMLRYSLGEETAARAIEQAVSQALEAGELTADLASDKPALTTSEMGDKIAAYIQQA

SEQ ID NO: 8838 - protein, 514 aa, Photobacterium sp. SKA34
MKDQVIIFDTTLRDGEQALSASLTVKEKLQIAYALERLGVDVIEAGFPVSSPGDFESVQTIAKHIKNSRICALSRAVAKDIDVAAKSLKVAEAFRIHTFISTSTVHVQDKLRRSYDDVIDMGVAAVKRARNYTDDVEFSCEDAGRTPIDNLCRMVEAAIDAGANTINIPDTVGYTLPSEFGGIITQLFNRVPNIDKAVISVHCHDDLGMSVANSMAAVQAGARQVEGTINGLGERAGNCSLEEIAMIIKTRQELLGVTTNIKHNEIHRTSKMVSQLCNMPIQANKAIVGANAFSHSSGIHQDGMLKNKNTYEIMTPESIGLKNQALNLTSRSGRAAVKSHMDALGYTENEYSLDKLYADFLKLADRKGQVFDYDLEALMHFSNLRDEDDYFKLNYLSVQSGSVMATTSIKLLCGDEEKCEAAVGNGPVDALYQCIYRLTGYDIVLDKFDLTAKGEGEDGLGQADIIANYKGRKYHGTGLATDIVEASGQALLHVINSIHRADQIEEIKQRSATH

SEQ ID NO: 8839 - protein, 469 aa, Candida glabrata CBS 138
MSALLRALPQVSRTALRGRLVTPMTLRLYASFPPHTVIGMPALSPTMSQGNLAVWSKKEGDSLAPGDVLAEIETDKAQMDFEFQDEGYLAKILVPAGTKDVAVSRPIAVYVEDEADVAAFKDFTVEDAGGSQSSSAPAAEEQKEEPKKEEVKEEKSEKKAAKSNSTPSSVASGDRIIASPLAKTIALEKGIALKSVKGTGPRGRITKADVEKYLESAPKSTSTAAPSATPSTTGGASYEDLEITNMRQIIGDRLLQSRQSIPSYIVSSDISVSKLLKLRKSLNATAKDQYKLSINDILIKAVTVAARRVPDANSYWLQNEGIIRQFKNVDVSVAVATPTGLLTPIVKNAESKGLIEISKEVKELASRAKINKLVPEEFQGGTICISNLGMNPAVSMFTSIINPPQSTILAIGTVKRVAVEDAGAENGIAFDDQVTITGTFDHRTIDGAKGADFMRELKTVIENPLQLLL

SEQ ID NO: 8840 - protein, 783 aa, Gibberella zeae PH-1
MAPKKKIAVMTSGGDSPGMNAAVRAVVRMSLHMGCDAFCVYEGYEGLVQGGDFIRQMQWDDVRGYLGEGGTLIGTARCMAFYERPGRLVAAKNMVLSGIDALIICGGDGSLTGADRFRAEWPSLLEELISTGHLKEEQTTPYKHLNIVGLVGSIDNDLTGTDATIGCYSALARICEMVDYVEATASSHSRAFVVEVMGRHCGWLALMAGVATGADFVFIPERPRENDWQEEMKVVVRRHRALGKRKTIVIVAEGARDNNGTKIGAEEIKDILADKSKGGLALDTRITTLGHVQRGGTAVAYDRMLATLQGVEAVKAVLEATPETETPFIAINENKIVRKPLMQAVAETQELAKAVDAKDFDKAMSLRDAEFADQWNSYMLTTNVMVDDEKLPERERMRIGFINVGAPAGGMNAAVRAAVAYCLSKGHEPLAIHNGFAGFARHHDDKPLGAVRPFDWLEVDGWASKGGSEIGTNRELPAESGMELIANLIEEHNFDALFIVGGFEAFHSVTQMRKARTQFPSLCIPMCLLPATISNNVPGTEYSLGSDTCLNELVNYCDKIKQSASATRRRVFVIETQGGRSGYIATLAGLDVGASAVYIPEEGISLEMLNSDVNHLKEVFRKDKGQTRAGRLILVNEKASKVYSAKLIADIIREEAHDRFESRESIPGHVQQGGVPSPMDRCRAVRLAIKCIQHLEGYGRNAHNHVKKDPKSASVIGIQGSEVVFSGVEDLEENGTDWPNRRPKTAHWMGLSETVDMLAGRPSYPVPEKSLTGLIAKDTKRGL

SEQ ID NO: 8841 - protein, 401 aa, Staphylococcus aureus subsp. aureus COL
MVTRSVLKFGGSSVSDFTKLKRIAEMLKERVNQDEQLIVVVSAMGNTTDQLMTNVSTLTKAPKQQELALLLTTGEQQTVSYLSMVLNDIGMNAKAMTGYQAGIKTIGHHLKSKIAQINPQTFEQAFQENDILVVAGFQGINEHQELTTLGRGGSDTTAVALAVSNQIPCEIYTDVDGVYATDPRLLPKAKRLDIVSYEEMMEMSALGAGVLETRSVELAKNYNIPLYLGKTLSNVKGTWIMSNEEILEKKAVTGVALDKHMMHVTISYPLPDNQLLTQLFTELEEGAVNVDMISQIVNLDGLQLSFTIKDSDFHQISMILETLKNQYEALAYKINEHYVKISLIGSGMRDMSGVASKAFLTLIENNIPFYQTTTSEISISYVIDDFNGQQAVEKLYDAFNI

SEQ ID NO: 8842 - protein, 146 aa, Sinorhizobium meliloti
MRYLHTMVRVKDLDQALHFYCKLFGLQEIRRYENEKGRFTLVFLAAPGDVDRAKDEAAPCLELTYNWDPEEYAGGRNFGHLAYEVDDIYAFCKHLMDNGVTINRPPRDGHMAFVRSPDGISIEILQKGEHLAAQEPWASMANTGVW

SEQ ID NO: 8843 - protein, 511 aa, Alkalilimnicola ehrlichei MLHE-1
MAMAEAAHGRPHRVWCGRVVRPGVAVRYPIIPPWRCETVAVHGGNTGRNCLMRARILMATGLALGLAWLVPPAVAGTPAVHEYTLDNGMTVVVREDHRAPVVVSMVWFAVGSSYEQRPLTGISHVVEHMMFKGTETRPTGEFSRLIAERGGRQNAFTGRDFTGYHQQLAVEHLPLAFELEADRMQNLVFDQGEYEREMEVVREERRQRVEDNPTAKFMERFRAVAWSASPYGQPVIGWMEDLDRLRLSEVEDWYRRWHGPESATLVVVGAVDPDAVFALAEEHFGPVPARERPEPIPGGDIPDPGERAVTVRIPAELPYLAMGWRVPTLGSIDREDEEALREVYALALLRAVLSGGQAAILPERLERQQGVAVGAGASYSATARLQDLFLLAGRPAPGAGLDELEAALREEVQRLQEEPLDEERLVRARRQYVADELFSQDSMRAQAMRLGALESTGIGWEAGERFLEGVQTVTAEDIQRVARRYLVDDQLTVGRLVPADREASTDAGEEQ

SEQ ID NO: 8844 - protein, 114 aa, Secale cereale
KARPCKVVEVSTSKTGKHGHAKCHFVAIDIFNGKKLEDIVPSSHNCDVPHVDRQDYQLIDITDDGYVSLLTESGDTKDDLKLPTDDVLLGQIKTGFADGKDLILSVMSAMGEEQ

SEQ ID NO: 8845 - protein, 549 aa, Triticum aestivum
MERGSNEMLQWQRSGYHFQTAKNYMSDPNGLMYYNGWYHMFFQYNPVGTDWDDGMEWGHAVSRNLVTWRTLPIATHASEWYDILGVLSGSMTVLPNGTVIMIYTGATNASAVEVQCIATPADPNDPFLRRWTKHPANPVIWSPPGIGTKDFRDPMTAWYDESDDTWRTLLGSKDDHDGHHDGIAMMYKTKDFLNYELIPGILHRVQRTGEWECIDFYPVGHRTSDNSSEMLHVLKASMDDERHDYYSLGTYDSAANTWTPIDPELDLGIGLRYDWGKFYASTSFYDPAKKRRVLMGYVGEVDSKRADVVKGWASIQSVPRTIALDEKTRTNLLLWPVEEIETLRLNATKLSDVTLNTGSVIHIPLRQGTQLDIEATFHLDASAVAALNEADVGYNCSSSGGAVNRGALGPFGLLVLAASDRRGEQTAVYFYVSRGLDGGLHTSFCQDELRSSRAKDVTKRVIGSMVPVLDGEAFSMRVLVDHSIVQGFAMGGRTTMTSRVYPMEAYQEAKVYLFNNATGASVTAERIVVHEMDSAHNQLSNMDDHSYVQ

SEQ ID NO: 8846 - protein, 655 aa, Burkholderia cepacia
MCGIDGFLNSVACDEETARGTLARMTASLAHRGPDGQGIWVDPEAGIALGHRRLAIVDLSVHGRQPMASACGRYVMVFNGEIYNHRELRAELERAGRAPAWRGHSDSEVLIAAIVAWGVDATLRRATGMFAFALWNRASRVLTLARDRIGEKPLYYGRIGDALVFASELKALRGYPGFDGAIDRDALCLYLRQSSVPAPHTIYRGIHKLPPGTYIQFEHARDTPRLRAYWTLEQVIEDGRAQPFEGSADDAVGQLDAVLRQAVARQMEADVPLGAFLSGGIDSSTIVALMQAQSSTPVDTFTIGFHEAGYDEAGYAKAVARHLGTRHTELYVTADHALGVVPKLPSIYDEPFSDASQIPTFLVSELTRRHVKVSLSGDGGDELFGGYTRYFLTPRLWRKLHRVPGAVRARIAAALHALRPDHADQLAAVAQGAWGGVEARESAARIGDRLHKLGHVMTAESRIGLYRLLMSSVHHPERLALSGQEPATPLDTVSAWPAHLSFAEQAMAIDTLTYLPTDILAKVDRAAMAVSLETRMPFLDHHVVEFAWRVPAHVRLPEGQSKALLRRLLDRYVPSALIDRPKQGFCAPVDHWLRGALRDWAEALLRPSRLREEGYFDADAVERLWRQHVTGRMNWQHQLWTVLMFQAWLEAQRAA

SEQ ID NO: 8847 - protein, 72 aa, Brassica napus
  misc_feature (10)..(10): Xaa can be any naturally occurring amino acid
  misc_feature (49)..(49): Xaa can be any naturally occurring amino acid
  misc_feature (56)..(56): Xaa can be any naturally occurring amino acid
  misc_feature (62)..(62): Xaa can be any naturally occurring amino acid
GTKKKLCEAXSVSESHIPDTLLERLISGTIEFPPACAIVGGILAQEVIXAVSGKGXPVKNFXYYDAQDGKGV

SEQ ID NO: 8848 - protein, 159 aa, Azoarcus sp. EbN1
MEFQTADLCDANESRVKIVSPMFRSYGGRGAFCGRITTLKVFEDNSLVRTALEGPGQGKVLVVDGGGSMRCALVGDQLALLGVKNQWAGVIVYGCIRDSKAIGTMELGVFALGSHPLKSIKKGAGDVDIAVTFGGVTFTPGHFIYADEDGVVVSESSLL

SEQ ID NO: 8849 - protein, 114 aa, Psathyrostachys juncea
KGRPCKVVEVSTSKTGKHGHAKCHFVAIDIFNGKKLEDIVPSSHNCDVPHVDRQDYQLIDITDDGYVSLLTESGSTKDDLKLPTDDALLAQIETGFADGKDLILSVMSAMGEEQ

SEQ ID NO: 8850 - protein, 503 aa, Geobacillus kaustophilus HTA426
MAVQPKVLHYINGQFVEGAAGAYFDNINPFTNGTINQIAEGRKEDIDAAVRAAKEAFDHGPWRTMPVERRLRYLFRIADLIEQYADDIAYLEALDTGIPISQAKKQAARAAENFRFYAEMVKTRLVGEAYHVNGQFLNYTVYKPVGVAGLITPWNTPFMLETWKVAPALATGNTVVLKPAEWSPLTANKLAEIIDEAGLPRGVFNVVHGFGETAGAALVAHPDVRLISFTGETTTGMEIIRNSAATLKKTSMELGGKSPLIVFADADLERALDAAVWGVFSLNGERCTANSRLLLEQSIYDEFVARLKERVDRIVIGDPMAPATELGPLIHRAHWERVNRYIDIAKQEGADVYAPSVPTGLEKGNFVPPTLLLGCHNGMRVAQEEIFGPVMAVMSFADEEEAIRLANDVKYGLAAYVWTNDMKRGHRVAQAIESGMAWVNSPNVRDLRIPFGGTKYSGIGREGGHYSFDFYTEVQVVHVAVGDPPIPSFGKAKPPSALSAEQK

SEQ ID NO: 8851 - protein, 114 aa, Crithopsis delileana
KSRPCKVVEVSTSKTGKHGHAKCHFVAIDIFNGKKLEDIVPSSHNCDVPHVTRLDYQLIDITDDGYVSLLTESGNTKDDLKLPTDDALLAQIKAGFADGKDLILSVMSAMGEEQ

SEQ ID NO: 8852 - protein, 241 aa, Blastopirellula marina DSM 3645
MVSIDLEEVDQVFRFPGLWSTQRWSLCQFRRADYLGPAERPLVDCVRDLVERQLGLRLNGPIRLLTQIRTFGLVFNPVSLYYCYDAAGERLEAVVAEVTNTPWGERHAYVLPYDADQRIVRFQNAKEFHVSPFLPMEMRYHWRMSTPADRLSIQIENHDDAQCVFDATLQLRRRPLTIGSILTLGLRFPLMSAQIMGAIYWQALRLWWKKAPYFPHPPKQHTIQQTDSATTLSAQPVEELQ

SEQ ID NO: 8853 - protein, 503 aa, Tropaeolum majus
MSGTKATSVSVPLPDFKQSVNLKYVKLGYHYLITHAMYLFLTPLLLIMSAQISTFSIQDFHHLYNHLILHNLSSLILCIALLLFVLTLYFLTRPTPVYLLNFSCYKPDAIHKCDRRRFMDTIRGMGTYTEENIEFQRKVLERSGIGESSYLPPTVFKIPPRVYDAEERAEAEMLMFGAVDGLFEKISVKPDQIGVLVVNCGLFNPIPSLSSMIVNRYKMRGNVFSYNLGGMGCSAGVISIDLAKDLLQVRPNSYALVVSLECISKNLYLGEQRSMPVSNCLFRMGGAAILLSNKMSDRWRSKYRLVHTVRTHKGTEDNCFSCVTRKEDSDGKIGISLSKNLMAVAGDALKTNITTLGPLVLPMSEQLLFFATLVGKKVFKMKLQPYIPDFKLAFEHFCIHAGGRAVLDELEKNLKLSSWHMEPSRMSLYRFGNTSSSSLWYELAYSEAKGRIKKGDRVWQIAFGSGFKCNSAVWKALRNVNPAEEKNPWMDEIHLFPVEVPLN

SEQ ID NO: 8854 - protein, 114 aa, Haynaldia villosa
KGRPCKVVEVSTSKTGKHGHAKCHFVAIDIFNGKKLEDIVPSSHNCDVPHVDRQDYQLIDITDDGYVSLLTESGNTKDDLKLPTDDVLLGQIKTGFADGKDLILSVMSAMGEEQ

SEQ ID NO: 8855 - protein, 762 aa, Zea mays
LLFQKFHLDLARRAAASPRWNVYRAAQLSRRMEAADRGIARWLERHAPAHVIGGVRRLRDEADARIGRLERRVEEIAAATAQPPPPALSVPAAPAKAGVMAMDIADGHEDAEGMVGGGVKVAKEKVKEMVMSGGGSWEVVGISGMGGSGKTTLAMEPAGDHKVRAYFNDRIFFETISQSANLEAIKMKLWEQISGNMVLGTYNQIPEWQLKLGPRDRGPVLVILDDVWSLPQLEELIFKFPGCKTLVVSRFKFPTLVKQTYEMQLLDEAAALSVFCRAAFDQECVPQTADKRLVRQVSAECRGLPLALKVIGASLRDQPPKIWLSAKNRLSRGEAISDCHETKLLERMAASVECLSEKVRDCFLDLGCFPEDKKIPLDVLINIWMEIHDLDEPDAFAILVELSNKNLLTLVNDAQNKAGDLYSSYHDYSVTQHDVLRDLALHMSGRDPLNKRRRLVMPRREETLPRDWQRNKDAPFEAQIVSIHTGEMKESDWFQMSFPKAEVLILNFASSLYYLPPFIATMQNLKALVLINYGSSSAALDNLSAFTTLSGLRSLWLEKIRLPPLPKTTIPLRNLHKISLVLCELNSSLRGSTMDLSTTFPRLSNLTIDHCIDLKELPPSVCEIGSLETISISNCHDLTELPYELGRLRCLSILRVYACPALWRLPASVCSLKRLKYLDISQCINLTDLPEELGHLTSLEKIDMRECSRLRSLPRSSSSLKSLGHVVCDEETALLWREAEQVIPDLRVQVAEECYNLDWLAD

SEQ ID NO: 8856 - protein, 310 aa, Lactococcus lactis
MILTVTLNPSVDISYPLETLKIDTVNRVKDVSKTAGGKGLNVTRVLYESGDKVTATGFLGGKIGEFIESELEQSPVSPAFYKISGNTRNCIAILHEGNQTEILEQGPTISHEEAEGFLDHYSNLIKQSEVVTISGSLPSGLPNDYYEKLIQLASDEGVAVVLDCSGAPLETVLKSSAKPTAIKPNNEELSQLLGKEVTKDIEELKDVLKESLFSGIEWIVVSLGRNGAFAKHGDVFYKVDIPDIPVVNPVGSGDSTVAGIASALNSKKSDADLLKHAMTLGMLNAQETMTGHVNMTNYETLNSQIGVKEV

SEQ ID NO: 8857 - protein, 731 aa, Crocosphaera watsonii WH 8501
MFVMFRREVQLPLGKLVRQTQSLLPEEKRPKLVQWDEMYQLEKLIISLGDYFQELQYLQEEIAEQKASEKALEELNLAKSEFLSMMGHEIRTPLNAVTGMTGLLLDTELSDQQKEFVNIIRNSGENLLTMINNILDFSKIEANKLELEEAPFELGLCIEEVLRLFVSQASQKKLELAYLLEPNTPSGIVGDSTRLKQILANLIGNAVKFTPEGEVVIYVSSTVIEGGEGEVNPNYELRFAVKDTGIGIPKERCHRLFQPFSQVDASTTRQYGGTGLGLVISKRLSELMGGKMWVHSEEGKGSTFNFTLRAKAATSSSPVTSQEGESELMGKRVLIIDDNLTSQKILINQAQSWGMFTCAVDSGEKALEWLKRGITFDVAILDMNLPDMNGLELVREIRKQPNCTRLPLIMLSAITETEKTFQSSEEEFVAVLCKPVQRSQLYNVLMEIFSEIPRAPIRVTQSQSVQCSEKSLMGQTHPLKILVAEDVVVNQQVIHLLLEKLGYCADIVSDGQEVLEALKNFAYDVVLMDIRMPEMDGLTATDHICQNYAPDKRPRIIAMTAESMEGDRERFIAGGMDDYICKPVRIKELQEALSRCQPRSESLAIEPKMFNQLRNIAGKRTNEIIKGYLQDTALRIETMNKAIEKRDTEQLYQAAHALRSPSGNLGATNLYYLCKEMETIAREGSLEEASERILGITIEYDRVYYALKKELMREPIPEPIPEPMVKFGGIS

SEQ ID NO: 8858 - protein, 283 aa, Leptosphaeria maculans 'lepidii' group
HTFYNELRVAPEEHPVLLTEAPINPKSNREKMTQIVFETFNAPAFYVSIQAVLSLYASGRTTGIVLDSGDGVTHVVPIYEGFALPHAISRVDMAGRDLTDYLMKILAERGYTFSTTAEREIVRDIKEKLCYVALDFELEIQTASQSSSLEKSYELPDGQVITIGNERLRAPEALFQPSVLGLESGGIHVTTFNSIMKCDVDVRKDLYGNIVMSGGTTMYPGISDRMQKEITALAPSSMKVKIIAPPERKYSVWIGGSILASLSTFQQMWISKQEYDESGPSIV

SEQ ID NO: 8859 - protein, 633 aa, Aspergillus nidulans FGSC A4
MPGAMSTPSKPTAPAFTRWRPKFHLLAPSNWLNDPCGPGYDPCTGRYHLAYQWNPKDNEWGDICWGRATSCDLVSWEIDPEPCLAPSAPYDSKGIFTGCFQSTNLQGQQDGTLTYFYTSVKSLPIHYTLPYSNGCETLSIALSRDAGRTWERHAQNPILPGPPAGLQVYGWRDPFVCSWPSAPESVREAARQVVGEGDVMYGFISGGLVNKTPTVFVYAITRNTLTEWKYVGILLDVGLNYTLSRWSGDLGVNWEVSNLVTLTNKEGTSRDFLIMGVEGCIPSPDPNRPAARDRRIQRSQLWTCIKQNETRGQTQTALMQTSFGGIFDSGLFYAANSFFDPVTQRQVVFGWITEEDLPDTTRKEQGWSGLVSLPRTLTLQTIHCVKRARSTTSLGDITSVEAVPDEQGTYTVHTLGVELDPRVEELRKGARVLTREALDLSFNVDEAGTVMAATTSTQSSGCFVPLDTTRWEVDAEIAVGRKCSRVGMVIFHDEDYTAKTTLFWDPVHETFQVERPRPSNINPDINHAPEVTPHTLFTYTNPATTTNDNTASEIETEEPLRIHALFDSSVLEVFVNGRTAITTRIYHSGGRTKTDGPKCVGVQFFADAENAGCDADAHAHSGGGAGEIDMLMA

SEQ ID NO: 8860 - protein, 357 aa, Malus sp.
MVSSDSVNSRVETLAGSGISTIPKEYIRPKDELVNIGDIFEQEKNNEGPQVPTIDLKEIESDNEKVRAKCREKLKKAAVDWGVMHLVNHGISDELMDKVRKAGKAFFDLPIEQKEKYANDQASGKIQGYGSKLANNASGQLEWEDYFFHCVYPEDKRDLSIWPQTPADYIEATAEYAKQLRELATKVLKVLSLGLGLDEGRLEKEVGGLEELLLQMKINYYPKCPQPELALGVEAHTDVSALTFILHNMVPGLQLFYEGKWVTAKCVPNSIVMHIGDTLEILSNGKYKSILHRGMVNKEKVRISWAVFCEPPKEKIILKPLPETVSEDEPAMFPPRTFAEHIQHKLFRKSQEALLPK

SEQ ID NO: 8861 - protein, 183 aa, Triticum aestivum
  misc_feature (155)..(155): Xaa can be any naturally occurring amino acid
MATMMTMSSFAGAAVLPRGSAGHFGAQSLPALGRRALIVRAQTEGPSAPPPNTPKASTSIWDALAFAGPAPERINGRLAMVGFVTALAVEAGRGDGLLSQLGSGTGQAWFAYSVAVLSVASLVPLLQGESAEGRAGAIMNANAELWNGRFAMLGXLVALAATEIITGAPLHQRVKLAFVGGPG

SEQ ID NO: 8862 - protein, 528 aa, Geobacter sulfurreducens PCA
MSLVKLYDTTLRDGTQAEDISFLVEDKIRIAHKLDEIGIHYIEGGWPGSNPKDVAFFKDIKKEKLSQAKIAAFGSTRRAKVTPDKDHNLKTLIQAEPDVCTIFGKTWDFHVHEALRISLEENLELIFDSLEYLKANVPEVFYDAEHFFDGYKANPDYAIKTLKAAQDAKADCIVLCDTNGGTMPFELVEIIREVRKHITAPLGIHTHNDSECAVANSLHAVSEGIVQVQGTINGFGERCGNANLCSIIPALKLKMKRECIGDDQLRKLRDLSRFVYELANLSPNKHQAYVGNSAFAHKGGVHVSAIQRHPETYEHLRPELVGNMTRVLVSDLSGRSNILAKAEEFNIKMDSKDPVTLEILENIKEMENRGYQFEGAEASFELLMKRALGTHRKFFSVIGFRVIDEKRHEDQKPLSEATIMVKVGGKIEHTAAEGNGPVNALDNALRKALEKFYPRLKEVKLLDYKVRVLPAGQGTASSIRVLIESGDKESRWGTVGVSENIVDASYQALLDSVEYKLHKSEEIEGSKK

SEQ ID NO: 8863 - protein, 360 aa, Gypsophila elegans
MVIATKVAPSRVETLASSGIECIPKEYVRPEEELTSIGDVFEEEKKDGGPQVPTMDLKDIASEDPEVRDKAIQELKKAAMEWGVMHIVNHGISEELITRVKVAGETFFEFPIEEKEKYANDQDSGNVQGYGSKLANNASGQLEWEDYFFHLAFPEAKRDMSIWPKAPADYIPAVSDYSKELRGLATRILSALSVGLGLEEGRLEKEVGGLEDLNLQMKINYYPKCPQPELALGVEAHTDVSALTFILHNMVPGLQLFYEGKWVTAKCVPNSIIMHIGDTIEILSNGKYKSILHRGLVNKEKVRISWAVFCEPPKEKIILKPLPDLVSDSDPARYPPRTFAQHIQHKLFRKAQDVQSPVTN

SEQ ID NO: 8864 - protein, 405 aa, Geobacter sulfurreducens PCA
MALVVQKYGGTSMGSIERIRNVAKRVAKTYDAGNDMVVVVSAMSGETNKLVALANEICEFPDTREYDVLVASGEQVSIALLAMCLKSMGYKAKSYHGWQIPIITDSAFSKARIESIDDTKVRADLKDGSIVIVAGFQGVDKDGNITTLGRGGSDTSAVAVAAAFKADVCEIFTDVDGVYTTDPNICQDARKIEKVSYDEMLELASLGAKVLQIRSVEFAKKYNVDVHVRSSFNENPGTMVTKEDKDMEAVLVSGIAYDKNEAKIAVMGVPDKPGIAAKILSPLSDANISVDMIVQNVSGGDLTDFTFTVTKADFKKALAITKEVAKEISAKEVAEDENISKISIVGVGMRSHAGVATKMFQTLAKEGINIQMISTSEIKVSVIVDAKYTELAVRVLHEAFGLSGK

SEQ ID NO: 8865 - protein, 232 aa, Zingiber officinale
YHPNIVKLRAAYEDADAVHLVMELCEGGELFDRIVARGHYSERSAAAVLRTVAEVVRMCHANGVMHRDLKPENFLYANKKENSPLKAIDFGLSVFFRPGERFSEIVGSPYYMAPEVLKRNYGPEIDIWSAGVILFILLCGVPPFWAETEQGVVRAILRGMIDFQREPWPPISESAKSLLKQMLNPDPRRRLTAQQVLEHPWLQNAKKASNVPWGDIVRARLKQFSVMNRFKK

SEQ ID NO: 8866 - protein, 344 aa, Anisodus tanguticus
MATLVSNWSSNNVSESFIAPLDKRAEKEVPLGNDVPIIDLQQDHHFVVQQITKACKDFGLFQVINHGFPEKLMVETMEVCKEFFALPAEENEKLQPKGKPAKFELPLEQKAKLYIEGEQLSNEEFFYWKDTLAHGCHPLDEELINSWPEKPATYREVAAKYSVEARKLTMRMLDYICEGLGLKLGYFDNELSQIQMMLTNYYPPCPDPSSTLGSGGHYDGNLITLLQQDLPGLQQLIVKDDNWIAVEPIPTAFVINLGLTLKVITNEKFEGSIHRVVTDPTRDRVSIATLIGPDYSCTIEPAKELLSQDNPPLYKPYPYAEFAEIYLSDKSGYDAGVKPYKINA

SEQ ID NO: 8867 - protein, 549 aa, Pasteurella multocida subsp. multocida str. Pm70
MKNINPTTTNAWKALQQHHKTQSAVTIQQLFAQEKDRFTDYSLSFNNEVLVDFSKNNVTKETLGLLRQLAQECALSEAVDAMFSGAKINKTEDRAVLHTALRNRSNSPVLVDGKDVMPEVNAVLAKMKDFCHRVISGEWKGYTGKAITDVVNIGIGGSDLGPYMVTEALRPYKNHLNLHFVSNVDGTHIAETLKKVNPETTLFLVASKTFTTQETMTNAHSARNWFLATAKDESHVAKHFAALSTNSKAVAEFGIDTNNMFEFWDWVGGRYSLWSAIGLSIALSIGFEHFEALLAGAHEMDKHFRTAPIEQNIPTTLALIGLWNTNFLGAQTEAILPYDQYLHRFAAYFQQGNMESNGKYVDRNGEVIDNYQTGPIIWGEPGTNGQHAFYQLIHQGTTLIPCDFIAPAQTHNPLADHHEKLLSNFFAQTEALAFGKTKEEVEAEFVKAGKSLDEVKEVVPFKVFTGNKPTNSILVQKITPFTLGALIAMYEHKIFVQGVMFNIYSFDQWGVELGKQLANRILPELANRETITTHDSSTNGLINQYKQWR

SEQ ID NO: 8868 - protein, 353 aa, Gypsophila elegans
MVSSNNTTETLDGKHDTKPVQGETVCVTGASGFIGSWLIMRLLERGYTVRGTVRDPDNTKKVQHLLDLPQAKTNLTLWKADLNEEGSFDKAVDGCSGVFHIATPMDFESKDPENEMIKPTINGMLDIMKSCAKAKVKRVVFTSSGGTVNVEETQKAEYDETCWSDLDFIRSVKMTGWMYFVSKILAEQAAWKYAAENNLDFISIIPPLVVGPFIMPSMPPSLITALSPITRTESHYTIIKQGQFVHLDDLCMAHIFLYENPKAQGRYIASACDATIYDIAKMLREEYPEYNVPTKFKDYKEDMDLVHFSSKKLTELGFEFKYGLKDMYTGAVETCRAKGLLPLSLENHENVYA

SEQ ID NO: 8869 - protein, 249 aa, Glycine max
MLGVIRHKSIRPAFSAIRHLSSAAKEITVREALNSALDEEMSADPKVFLMGEEVGEYQGAYKISKGLLDKYGPERVLDTPITEAGFTGIGVGAAYYGLRPVVEFMTFNFSMQAIDHIINSAAKSNYMSAGQISVPIVFRGPNGAAAGVGAQHSQCYASWYGSCPGLKVLSPYSSEDARGLLKAAIRDPDPVVFLENELLYGESFPVSAEVLDSSFCLPIGKAKIEREGKDVTITAYSKMVGYALKVCLL

SEQ ID NO: 8870 - protein, 319 aa, Clostridium tetani E88
MRKIAVLTSGGDAPGMNAAIRAVVRTGLDKGITVLGIERGFDGLLNGEIFEMTRRSVADIIQRGGTILRTARSEEFKTEEGQKKATDILRVFGVEGLVVIGGDGSFQGAKSLSELGVKTIGIPGTIDNDLAYTDYTIGFDTAVNTVLDAINKLRDTSTSHGRASVVEVMGRNCGDIALYAGLAGGAESIIVPELRFDIDKLCKTILEGKKNGKMHNLIIVAEGAGKANDIAKTIEKVTGVGTRATVLGHIQRGGSPTANDRILASRMGNRAVELLLEEKSSRVVGINDNRIVDMDIHEALSIEGKFDEKLYEIAKALSY

SEQ ID NO: 8871 - protein, 489 aa, Novosphingobium aromaticivorans
MRCDMAICPSRSTGIGKFVCGASGNPLDPTRHAGEMAPRKDAGEVSATAPSSLRYQDTENTPMPIAIKMPALSPTMEEGTLAKWLVKVGDKVSSGDIMAEIETDKATMEFEAVDEGTIVSIDVAEGSEGVKVGTVIATLAGEDEDASAPAPKAVAPAAAPVPVPAPKAEPAPAAVSTPAPAAASASKGDRVIATPLAKRIAADKGIDLKGVAGSGPNGRIIRADVEGAKPAAAAPVSTVAPAVASAAAPARAPAAVPDFGIPYEAQKLNNVRKTIARRLTEAKQTIPHIYLTVDIRLDALLKLRGDLNKALEAQGVKLSVNDLIIKALAKALMQVPKCNVSFAGDELRSFKRADISVAVAAPSGLITPIIVDAGSKSVSAIATEMKALANKAREGKLQPHEYQGGTASLSNLGMFSIKNFDAVINPPQAMIMAVGAGEQRPYVIDGALGIATVMSATGSFDHRAIDGADGAELMQAFKNLIENPLGLVA

SEQ ID NO: 8872 - protein, 339 aa, Neocallimastix patriciarum
MIKKQHILKMISNQVSSSAKVAASAVSKRLYSTAYEQTLKNLLINKNTKVITQGFTGKQGTFHAKNALAYGTKMVGGVSPKKAGTTHLGLPVYKSVQDACNALHPEASVIYVPPPGAASAILEAIEAEVPLVVCITEGIPQQDMVKVVDALNSQSKTRLVGPNCPGVIKAEECKIGIMPGHIHTKGRIGIVSRSGTLTYEAVNQTTKAGLGQTLVYGIGGDPFNGTNFIDALKIFLNDESTDGIILIGEIGGSAEEEASEFLKQYNLTRKVPKPVVSFIAGRTAPPGRRMGHAGAIVAGGKGGADDKVKALRSAGVVVSASPAQMGEKLKATFVARNLL

SEQ ID NO: 8873 - protein, 461 aa, Novosphingobium aromaticivorans
MAIELKMPALSPTMEEGTLAKWLVKAGDEVRSGDILAEIETDKATMEFEAVDEGVIAEILVAEGTEGVKVGTVIATIQGEGEDAAPAAATPAVEQKVEMSEAAPSVEARAAPAVAIAPKVDAKPAVDPEIPAGTAMVPTTVREALRDAMAEEMRADDRVFVMGEEVAEYQGAYKVTQGLLDEFGPRRVIDTPITEYGFVGIGAGAAMGGLRPIIEFMTFNFAMQAIDHIINSAAKTNYMSGGQMRCPIVFRGPNGAASRVGAQHSQNYGPWYANVPGLVVIAPYDSADAKGLMKAAIRSEDPVVFLENELVYGRTFDVPQMDDFVLPIGKARIVRQGKDVTIVSYSIGVGLALEAAETLAAEGIDAEVIDLRTLRPLDKDTVLASLAKTNRLVVAEEGFPVCSIASEIMAICMEDGFDHLDAPVLRVCDEDVPLPYAANLEKAALIDAGKIAAAVRKVCYR

SEQ ID NO: 8874 - protein, 387 aa, Oryza sativa (japonica cultivar-group)
MLPAVKLSPGPVAFAGTNLRSRSASVSSVSSLKPSKFVVSSLRPLYLAPLDGPRAAGQKAQRQPLEFRCAASAADDKESKTEVVPVRSEAAQKLKISIYFATWWALNVIFNIYNKKVLNAFPYPWLTSTLSLACGSAMMLVSWATRLVEAPKTDLDFWKVLFPVAVAHTIGHVAATVSMSKVAVSFTHIIKSAEPAFSVLVSRFLLGETFPVPVYLSLLPIIGGCALAAVTELNFNMVGFMGAMISNLAFVFRNIFSKRGMKGKSVSGMNYYACLSIMSLVILTPFAIAMEGPQMWAAGWQKALAEVGPNVVWWVAAQSVFYHLYNQVSYMSLDEISPLTFSIGNTMKRISVIVSSIIIFHTPVRPVNALGAAIAILGTFLYSQAKQ

SEQ ID NO: 8875 - protein, 562 aa, Photobacterium sp. SKA34
MNNDKRPLYIPYAGPALLETPLLNKGSAFSVEERMYFNLEGLLPEAIESIEEQTERAYQQYLKFDNDMDKHIYLRNIQDTNETLFYRLVENHVTEMMPIIYTPTVGSACEDFSNIYRRGRGLFISYPNRDRIEDMLNNASRQNVKVIVVTDGERILGLGDQGIGGMGIPIGKLSLYTACGGISPAYTLPVVLDVGTNNPQRLSDPMYMGWRHSRITGKEYDAFVDEFIQAVKQRWPEALIQFEDFAQKNAMPLLERYKDKVCCFNDDIQGTAAVTVGSLLAACKAAGNKLSEQRVTFLGAGSAGCGIAEAIIAQMVSEGISDAQARSQVFMVDRWGLLIDGMPNLLNFQQALVQKNTQLADWDVADNNISLLDVMRNAKPTILIGVSGVPGLFSEEVIREMYAHCERPIIFPLSNPTSRVEATPFDIIRWTDGNALVATGSPFEPVVYEGKTYPIAQCNNSYIFPGIGLGVLAVNARRVTNEMLMESSQALAECSPLAIHGHGPLLPPLEEIQKVSRKIAFAVAKKAVEQHKAPKNSDERIREKIDANFWKSEYRRYKRTSF

SEQ ID NO: 8876 - protein, 406 aa, Novosphingobium aromaticivorans
MLNELRIPRMGSVENARLLNWRVQEGEAYEPGQVLYEIETDKTSVEVEAEGPGVLARHLAAVGDEFKVGDRIGLWALPGTAPATLRAALSPQPMRASERAPSPSSTLPAAVSAPGLHALRPVSRDAAGGRRVSPLARRLAAQNGVDLATVTGTGMGGKISGKDVLAASAKPRPAPVPVSPPRPGSDGEIVPHSLRRRTIAQRMVEAAAIPTLTADMEVDLTALFARRRSVEGNGASVLGMIAEAAIAALLQHRRLNAHWREDAMVQFGAVHLGIAVDTPEGLVVPVVRNAESLNARGLTDAIAALADKARAGTLRPQDMEGGTFTISNPGSMGPVVRAEALLNPPQVALLGLPGIVRAPVAIKDGDAWAMAVRPLLRLSLSFDHRALDGGPVIAFLNTLKATLERP

SEQ ID NO: 8877 - protein, 572 aa, Saccharomyces cerevisiae
MCGIFAAFRHEDVHRYKPKALQLSKRIRHRGPDWSGNAIKNSTIFVHERLAIVGVESGAQPITSSDGEYMLCVNGEIYNHIQLREECADYEFGTLSDCEPIIPMYLKHDIDAPKYLDGMFAWTLYDAKQDRIVAARDPIGITTLYMGRSSASPKTVYFASELKCLTDDCDTITAFPPGHVYDSKTDKITRYFTPDWLDEKRIPSTPIDYMAIRHSLEKAVRKRLMAEVPYGVLLSGGLDSSLIASIAARETAKATNDVEPSTYDSKARHLAGIDDDGKLHTAGWTSLHSFAIGLPNAPDLQAARKVAKFIGSIHHEHTFTLQEGLDALDDVIYHLETYDVTTIRASTPMFLLSRKIKAQGVKMVLSGEGSDEIFGGYLYFAQAPSAAEFHTESVQRVKNLHLADCLRANKSTMAWGLEARVPFLDREFLQLCMNIDPNEKMIKPKEGRIEKYILRKAFDTTGEPDAKPYLPEEILWRQKEQFSDGVGYSWIDGLKDTAEAVISDEMFASPKAEWGSDIPTTKEAFWYRLKFDALFPQKTVADTVMRWIPKADWGCAEDPSGRYAQIHEKHIE

SEQ ID NO: 8878 - protein, 533 aa, Parachlorella kessleri
MAGGGVVVVSGRGLSTGDYRGGLTVYVVMVAFMAACGGLLLGYDNGVTGGVVSLEAFEKFFPDVWAKKQEVHEDSPYCTYDNAKLQLFVSSLFLAGLVSCLFASWITRNWGRKVTMGIGGAFFVAGGLVNAFAQDMAMLIVGRVLLGFGVGLGSQVVPQYLSEVAPFSHRGMLNIGYQLFVTIGILIAGLVNYAVRDWENGWRLSLGLAAAPGAILFLGSLVLPESPNFLVEKGKTEKGREVLQKLRGTSEVDAEFADIVAAVEIARPITMRQSWASLFTRRYMPQLLTSFVIQFFQQFTGINAIIFYVPVLFSSLGSANSAALLNTVVVGAVNVGSTLIAVMFSDKFGRRFLLIEGGIQCCLAMLTTGVVLAIEFAKYGTDPLPKAVASGILAVICIFISGFAWSWGPMGWLIPSEIFTLETRPAGTAVAVVGNFLFSFVIGQAFVSMLCAMEYGVFLFFAGWLVIMVLCAIFLLPETKGVPIERVQALYARHWFWNRVMGPAAAEVIAEDEKRVAAASAIIKEEELSKAMK

SEQ ID NO: 8879 - protein, 324 aa, delta proteobacterium MLMS-1
MDGKGSRIGVVLLNMGGPEKLDEVEPFLRNLFNDREIIRLGPFPWLQKLIAGRIVKKRAPKSREAYRRIGGGSPLARISAEQGRALADRLNGKEDGVHMVRCAMRYWHPFADEALAEFRQAGVRQLLALPLYPHFSRATTGSSLNDLRRALATHDDFFTCREINAWPEQPDYLAALSETISQGATAFGGEEYTLLYSAHSLPVSFIEDGDPYLEHIKKTIAGLEARLGRSGELCFQSRSGPVRWLSPSTPEMLAQLAGRGVKNVLLVPISFVSDHVETLDEIDHQYHKLAGNLGIRLVRPPALNTHPRLIAALAALVVSVHQGR

SEQ ID NO: 8880 - protein, 505 aa, Acidobacteria bacterium Ellin345
MATTTAETAKATVYKNLIDGEWVESKSGQTFENLNPADTREVVGIFQRSGKEDVEHAIDAASEAYKKWRLVPAPRRAELLFKAAAILEQRKEKYSQEMTREMGKVIKETRGDVQEAIDAGYYNAGEGRRMFGPTTPSELPNKFAMAVRQPLGVCAMITPWNFPMAIPSWKLFPALVCGNTAVIKPAQDTPLSTFNFVQALNDAGVPKGVINIVTGYGGEVGTPMTEHPEVKAVSLTGSTAVGRIVGQAAAKSFKHCSLELGGKNPMIVLDDANLDLALEGALWGSFGTTGQRCTATSRIILQKGIYKKFADELVARARKLKVGNGLDETVDMGPAVNENQMNTDLKYIEIGKGEGAKLAHGGHRLDKGDYAHGWFLEPTIFTDVNHKMRIAQEEIFGPVVALIPCDDLDEAIEIANGIEYGLSSAIYTRDVNKSFRAMRDLHAGITYVNAPTIGAEVHMPFGGVKATGNGHREGGIGALDFYTEWKAIYVDYSDTLQRAQIDNRE

SEQ ID NO: 8881 - protein, 310 aa, Bacillus halodurans C-125
MTKKKIGLLVMAYGTPRTKEEIEPYYTHIRHGRKPSQELLDDLTERYEAIGGVSPLAKITDDQAIALEQKLNELYDDIEFKSYLGLKHIDPFIEDAVEQMKEDGVQEAVSIVLAPHFSTFSVKSYNGRAHEESKKIGGPRIQSVESWYDEPLFIQYWVDQVNDTMAKIEDKDKACVIFSAHSLPEKIVDYGDPYPQQLKETADLIAKGAGITNYAVGWQSEGNTPEPWLGPDVQDLTRDLYETHGYTSMIYCPVGFVADHLEVLYDNDYECKVVTDELGIDYYRPEMPNAKPEFIDCLATVIQKKLAEKE

SEQ ID NO: 8882 - protein, 336 aa, Oryza sativa (japonica cultivar-group)
MDGGGGGGGGGGVMAGPGVAGGGGGGGGGGVGGDVELVSKTLQFEHKLFYFDLKENPRGRYLKISEKTSSTRSTIIVPVAGVAWFLDLFDYYIRTDERDAFSKELRLDTKVFYFDIGENKRGRFLKVSEASVNRNRSTIIVPAGSSGEEGWEAFRNVLLEINNEASRLYVLPNHPNQVQETIPFFDIFMKSQMTSSLNSCHCIWQQHLEPPERLPGLSDDVGAGFIAGHGSQSASGPEVDVERLVDLPPQEEISGMGMSKVIRADQKRFFFDLGSNNRGHYLRISEVAGADRSSIILPLSGLKQFHEMVGHFVDIMKDRLEGMTGANVRTVESSQR

SEQ ID NO: 8883 - protein, 487 aa, Bacillus halodurans C-125
MTNRDQELRQKAKETIKRYERLVERDPYRLVYHLMPPVGLLNDPNGFIDWDGTYHLFYQWHPFEAAHGPKFWGHFVSGDLVFWEEKEPALTPSDWFDKNGCYSGSAVADNGKLKLFYTGNVKNENDERESYQCVAESEDGLTFTKKGVILHVPDGYTAHFRDPKVWKRDGIWYLVIGAQTKQIDGHVLLFRSDDLKEWQFAGIVTGSNVRSMGDFGYMWECPDLFHLDGEDVLLVSPQGLEKQGYLYHNVHNTGYFIGRLDYETGELVHGPFKELDRGFEFYAPQTTIDRYGRRILFGWMGVPDQGEEKHPTVKHQWIHAMTLPRELKLVDGKIYQRPVEELKQLRKNEVSRPSVKISEHPQRFEEISGEAFELLLDVEENQAEVFELTIRDNVRVIFNRGLKRLTLERVSFVDGLTESRHCELAELSSLHLYVDTSAVELFVNEGEEVFTARYFADPANRSIQFKTLHGSLTASLKKWALDSIMKK

SEQ ID NO: 8884 - protein, 668 aa, Ashbya gossypii ATCC 10895
MLRRVTVRQLANVRALARATRPLAVARAFSGAAGRLGAEAQEAPRRRAPGPRGETEPQGAAGAHEMDHSMIGFSGGEIFHEMMRRHNVDTVFGYPGGAILPVYDAIYNSDAFNFVLPKHEQGAGHMAEGYARASGKPGVVLVTSGPGATNVVTPMADALADGVPMVVFTGQVPKAAIGTDAFQEADVVGISRSCTKWNVMVNHVEELPRRINEAFEIATSGRPGPVLVDLPKDVTAAILRSPIPLASALPSTTLAQLTRQAADIDGVRSLADASRLINMAQKPVLYVGAGILNSTRGPEFLRELAEKAQIPVTTTLQALGAFDQEDSKSVDMLGMHGSAAANLTVQNADLIIALGARFDDRVTGNIAKFAPEAQRAAREQRGGIVHFEISPKNINKVVDAQVAVEGDVTANLEKLLPLIKPVAERKEWLGQIASWKSEYPYDYSRETPGSRIKPQTVITRLSEIANATGKEVIVTTGVGQHQMWAAQHWTWKKPRTFITSGGLGTMGFGLPAAIGAQVAKPDAIVIDIDGDASLNMTLMEMSSAVQAGAPVKILLLNNEEQGMVTQWQSLFYEHRYSHTHQLNPDFVKLADAMGFKAMRLEAQSDMEPMLQEFINCKEPVLLEVAVEKKVPVLPMVPAGKALHEFIYFDPEVERQQAELRSRRTGGKH

SEQ ID NO: 8885 - protein, 331 aa, Thermus aquaticus
MKVGINGFGRIGRQVFRILHSRGVEVALINDLTDNKTLAHLLKYDSIYHRFPGEVAYDDQYLYVDGKAIRATAVKDPKEIPWAEAGVGVVIESTGVFTDADKAKAHLEGGAKKVIITAPAKGEDITIVMGVNHEAYDPSRHHIISNASCTTNSLAPVMKVLEEAFGVEKALMTTVHSYTNDQRLLDLPHKDLRRARAAAINIIPTTTGAAKATALVLPSLKGRFDGMALRVPTATGSISDITALLKREVTAEEVNAALKAAAEGPLKGILAYTEDEIVLQDIVMDPHSSIVDAKLTKALGNMVKVFAWYDNEWGYANRVADLVELVLRKGV

SEQ ID NO: 8886 - protein, 507 aa, Staphylococcus aureus subsp. aureus MSSA476
MLNADLKQQLKQLLELMEGNVEFVASLGSDEKSKELKELLTEISDMSPRLSLSEKSLKRTPSFSVNRPGEETGVTFAGIPLGHEFNSLVLAILQVSGRAPKEKQSIIDQIKNLEGSFHFETFISLTCQKCPDVVQALNLMSVINPNITHSMIDGAVFREESENIMAVPAVFLNGEEFGNGRMTIQDILSKLGSTADASEFENKEPYDVLIVGGGPASGSAAIYTARKGLRTGIVADRIGGQVNDTAGIENFITVKETTGSEFSSNLAAHIDQYDIDAMTGIRATDIEKTDEAIKVTLENGAVLESKTVIIATGAGWRKLNIPGEEQLINKGVAFCPHCDGPLFENKDVAVIGGGNSGVEAAIDLAGIVNHVTLFEFASELKADNVLQDRLRSLSNVDIKTNAKTTEVVGEDHVTGIRYEDMSTGEEHLLNLDGIFVQIGLLPNTSWLKDAVELNERGEIVIDCNNNTNVPGIFAAGDVTDQKNKQIIISMGAGANAALNAFDYIIRN

SEQ ID NO: 8887 - protein, 159 aa, Burkholderia mallei ATCC 23344
MSKLYSFNAQALSGGEVPLEQYRGKVLLIVNTASECGFTPQYAGLQQLYDRFRERGLVVLGFPCNQFGKQEPGDASQIGAFCEKNYGVTFPMFGKIDVNGANAHPLYRYLTEEAPGILGLKAIKWNFTKFLVNREGEIVKRYAPSTKPEDIAADVEKLL

SEQ ID NO: 8888 - protein, 661 aa, Kluyveromyces lactis NRRL Y-1140
MQMAETRDLKEAHETGIFDTKPVDAKSEGQAQPEAESDGASNGGAAVVATPAATPVEGEADESIDPAASATEQEQEQKHELKDESAAADTPKSDMVPAPAPPQEPDMNNLPQNPLPPHQKKHAVTAVKAVKRLKDAKPFHKPVDPVALNIPLYFNYIPRPMDLSTIERKLNLDAYETPEQVTDDFNLMVSNCIKFNGDKAVISQMARNIQASFEKHMLNMPAKDAPPQQPKRTKTHPDQPVVIRRAPSNSGRPKREIHPPKTKDIYPYESNKPKSKKHQMEMKFCQQVLKELLSKKYSSFNYPFLEPVDPVALNCPTYFDFVKEPMDLGTVQKKLNNWEYQTSEEFEHDVRLVFKNCYAFNPEGTIVNMMGHRLEDVFNSKWADRPVIPEEESADEGGESEDGYESDEPSEEEQIDETQITNPAIQYLEQQLERMKIELQQLKKQELDRIRKERRAARASMKPKRKGKGTKRKATANSKSMGKRRKKNSLKVVVTYDMKRTISERIGDLPEGKLEKAVDIIRKSMPEIGADDEVELDIEQLDETTILTLYNTFFRKYDTSNNGYAGSDDAILSVPSETDLRHNSLSPNSSKSKGKRRRSKALSEEEQNNQIEQIKNKLASFNANSPMSPNTLNALAHQHHQHQHNDNSSSDDDMSSESEEE

SEQ ID NO: 8889 - protein, 489 aa, Sinorhizobium meliloti
MPAVQETIDQVRQIDVDQYKYGFETTIEMDLAPKGLSEDIIRLISSKKNEPEWMLEWRLEAYRRWQTMEEPTWARVRYPKIDFNDIHYYAAPKGTTGPKSLDEVDPELLKVYEKLGIPLKEQEILAGVEKSKIAVDAVFDSVSVVTTFKEELKKAGVIFMSISEAMREHPDLVRKYLGTVVPQSDNFYATLNSAVFTDGSFVYVPKGVRCPMELSTYFRINEKNTGQFERTLIIADEGAYVSYLEGCTAPQRDENQLHAAVVELIALDDAEIKYSTVQNWYPGDKQGKGGIYNFVTKRGDCRGKNSKISWTQVETGSAITWKYPSCILRGDGSRGEFYSIAVSNGHQQIDSGTKMIHLGKNTSSRIISKGIAAGVSENTYRGQVSAHRKAENARNFTQCDSLLIGDRCGAHTVPYIEAKNSTAQFEHEATTSKISEDQLFYCLQRGIPEEAAIALIVNGFVKEVIQELPMEFAVEAQKLIGISLEGSVG

SEQ ID NO: 8890 - protein, 121 aa, Zingiber officinale
LSPMASSSATMVVSCARSSSGMVAPFSGLKSLSGVPFPTKRANAHLSHLPSNGCRVRCMQVWPIEGKKKFETLSYLPTLKDEALLKQIEYLLRSNWIPCLEFCKRGFVWRRTTKVLMAENT

SEQ ID NO: 8891 - protein, 272 aa, Chromobacterium violaceum ATCC 12472
MPVQNRIHKGINMNSYAHLNVEKRGHTAVVTIDNPPANTWNRASLTALKQLVADLNADRDIYALVITGQGEKFFSAGADLNLFADGDKKVATEMTLLFGEAFEALSAFRGVSIAAINGYAMGGGLECALACDIRIAEEQAQMALPEAGVGLLPCAGGTQNLPWLVGEGWAKRMILCGERVNAATAERIGLVEQVVAKGEALAAALKLAEGVARQSPSSVGVCKQLVQAARTQPPAWNLIKEREAFIKLFDTQDQAEGTRAFLEKRAPNWKNA

SEQ ID NO: 8892 - protein, 314 aa, uncultured bacterium 463
MSDFGSGTSTSEVIEGVDLKGKCALVTGASSGLGVETSRSLASAGAAVIMVARDASKLDTAVAQVRAAVPDAQLDTALLDLADLESVRAGAQTILAKCPSIQLLINNAGVMACPLMRTAQGFEMQLGTNHVGHFLLTCMLAPALVAGAPARVVNLSSAGHRFSAMDLDDPNYHRRDYEKWQAYGQSKTANALFSVGLDQRLQGQGVRSFAVHPGMIMTELSRHMDPSDMEIILAGRNIEDIGFKTVEQGSATSVWAATSQDLDGLGGLYLEDCHIAEPATPDNEAGIESYALDPVTADKLWQLSEDMVGENFNF

SEQ ID NO: 8893 - protein, 112 aa, Neisseria gonorrhoeae FA 1090
MKKIEAIVKPFKLDDVREALTEIGITGMTVSEVKGFGRQKGHTEIYRGAEYAVDFLPKVKIELVLADDAVERAIDVIVEVARSGKIGDGKIFVLPVEEAIRIRTGERSDAAV

SEQ ID NO: 8894 - protein, 534 aa, Parachlorella kessleri
MAGGGVVVVSGRGLSTGDYRGGLTVYVVMVAFMAACGGLLLGYDNGVTGGVVSLEAFEKKFFPDVWAKKQEVHEDSPYCTYDNAKLQLFVSSLFLAGLVSCLFASWITRNWGRKVTMGIGGAFFVAGGLVNAFAQDMAMLIVGRVLLGFGVGLGSQVVPQYLSEVAPFSHRGMLNIGYQLFVTIGILIAGLVNYAVRDWENGWRLSLGPAAAPGAILFLGSLVLPESPNFLVEKGKTEKGREVLQKLCGTSEVDAEFADIVAAVEIARPITMRQSWASLFTRRYMPQLLTSFVIQFFQQFTGINAIIFYVPVLFSSLGSANSAALLNTVVVGAVNVGSTLIAVMFSDKFGRRFLLIEGGIQCCLAMLTTGVVLAIEFAKYGTDPLPKAVASGILAVICIFISGFAWSWGPMGWLIPSEIFTLETRPAGTAVAVVGNFLFSFVIGQAFVSMLCAMEYGVFLFFAGWLVIMVLCAIFLLPETKGVPIERVQALYARHWFWNRVMGPAAAEVIAEDEKRVAAASAIIKEEELSKAMK

SEQ ID NO: 8895 - protein, 512 aa, Burkholderia xenovorans LB400
MSFVSAVLYDMRQESFSMTGHLPKLSMYIGGEWVEPASGEYFETVDPFTAKPWALIPRGNAEDADRAIRAADKAFRDGPWRAMHPSERGLVLQRFGQLIGQHADELAGIEVRDNGRLLAEMRHQIRGIPKWYYYYGGLADKIEGAVHPVEQPALSFTRHEPLGVCVGIVPWNAPLLLLSLKAAPALAAGNTIVLKPAEFTSASALKLMELVEQAGFPPGVVNVVTGFGKEVGEPLVAHPLTRHLGFTGSTATGSHLYALAAKDVKRASLELGGKSANLVFNDADLNNAVRGVVGGIFGAVGQTCIAGSRLLVQRRIHDEFVDKLAAFTKTARIGDPRKPETQIGPIANRMQYNKILGYIDIAREEGAELVMGGARPDIAECGEGFFIEPTIYTGIRNDMRIAREEVFGPVLATIPFDDPEEAIAIANDSDFGLGAGVWTSDMRLALRMSERLEAGSVWINTYRDISYTTPFGGYKKSGIGRENGIEGIREYLQTKAVWISTAEEIENPFVIG

SEQ ID NO: 8896 - protein, 540 aa, Parachlorella kessleri
MAGGGPVASTTTNRASQYGYARGGLNWYIFIVALTAGSGGLLFGYDIGVTGGVTSMPEFLQKFFPSIYDRTQQPSDSKDPYCTYDDQKLQLFTSSFFLAGMFVSFFAGSVVRRWGRKPTMLIASVLFLAGAGLNAGAQDLAMLVIGRVLLGFGVGGGNNAVPLYLSECAPPKYRGGLNMMFQLAVTIGIIVAQLVNYGTQTMNNGWRLSLGLAGVPAIILLIGSLLLPETPNSLIERGHRRRGRAVLARLRRTEAVDTEFEDICAAAEESTRYTLRQSWAALFSRQYSPMLIVTSLIAMLQQLTGINAIMFYVPVLFSSFGTARHAALLNTVIIGAVNVAATFVSIFSVDKFGRRGLFLEGGIQMFIGQVVTAAVLGVELNKYGTNLPSSTAAGVLVVICVYVAAFAWSWGPLGWLVPSEIQTLETRGAGMSMAVIVNFLFSFVIGQAFLSMMCAMRWGVFLFFAGWVVIMTFFVYFCLPETKGVPVETVPTMFARHWLWGRVMGEKGRALVAADEARKAGTVAFKVESGSEDGKPASDQ

SEQ ID NO: 8897 - protein, 419 aa, Thermotoga maritima MSB8
MAERLGILVGGGPAPGINSVISSVTIEAINNGLEVIGIYDGFKHLVEGKTNMVKKLSIEDVSRIHIEGGSILRTSRVNPAKSEETLEKTVQTLKKLGIKYLVTIGGDDTAFSASKVCERSKGEIKVVHVPKTIDNDLPLPENMPTFGFETARHVATELVYNLMQDSRTTNRWYFVAMMGREAGHLALGVGKAASATITIIPEEFKEGVTLEEVCDVLDGAILKRKLMGRDDGVAVIGEGIAEKMDPEELANIPGVIVEKDPHGHLRLAEIPLATILKRAIERRYAERGERIHIVDVTIGYELRSARPIPFDIVYTRTLGYGAVRFLLGDYSDLPGGMVCVVGGRIKILPFDAFMDPKTGRTKVRVVDVRSEDYRVARKYMIRLEKKDLEDPETLEKLAKLAKMEPEEFKKKYWHTTELP

SEQ ID NO: 8898 - protein, 448 aa, Candida glabrata CBS 138
MSRRVVVTGLGCVTPLGKSVKESWHRLLQRDSNGLVKLDQLTKGDFAKWRGIFPPELRVGAVSPIESFEVNSQLFTSQDDRRMSRFIKLATIASYEALVSSGLVNKETKMSEDGRIPIDQHNQGIDPDKVGCLIGSGIGSIEDIYETSVTFDSNTKKNRINPYFVPRILTNMAAGNIAIKFNLRGPTHSVSTACATGNNAIGDGYNMIKLGMQDICLAGASEASVHPLSLAGFLRAKSLSPDGISRPFDEERNGFVLGEGAGIVVLESLESAERRGAPILAEIVGYGLSCDAHHITSPPNDGEGASRAIKMALDLSHGNVNARDIEYVNAHATSTKLGDNTECCAIQNTLIDNVNRQKPLYISSNKGSIGHLLGAAGAAESIFTILSLYNRTIPHTYNLKNVLGNFESSSMRFVKSQPHKVADLEYALCNSFGFGGVNTSLLFRRWHE

SEQ ID NO: 8899 - protein, 245 aa, Mycobacterium sp. KMS
MTDSERPNPVSPTGLPHTVDHQHADVTGGWLRAATFGAMDGLVSNTALIAGVAASASAQTVVLSGVAGLLAGAFSMALGEYTSVQTANEQIDSEVRLERRSFRTQPQAEEDELVGMLMEMGMSDETARKASTEIHQDETRALNFHLVQELGVHPEETPSPWVAAGSSFVMFAIGAIIPLIPYLLGYESLWVGLLFGGVGLLIAGASAARFTRKPIAFAGIRQLGLGAIAIAATYAVGLLIGTTVT

SEQ ID NO: 8900 - protein, 565 aa, Coxiella burnetii RSA 493
MLDITFKTDKNNKPYLETGITGKALLTIPQLNKGTAFTEEERDTFGLRGKLPNRVETLDDQVARAYLQYKSFDMQLNRNFYLNHLLDTNQVLFHRLVKNHVQEMLPTIYTPIVGNAVRAFNKRFMHPRGLYISYEDRNQIKKILNNRSHPIIDLIVVSDGEGVLGIGDQGVGAMAIPVAKLMVYTAIGGINPIRTLPILLDAGTNNEELLNDPLYLGWRHPRLSGNEYAEFIEKFIEAVQATFPQVFLHWEDFGRTNAYRNLIKYREITCSFNDDIQGTGCVALAAILAALKITRSTLPEQRIAVFGAGTAGMGITDTLFRALSQNGLSEKEARNPFWLIDRNGLLTEYSEEVTSAQQPYLRKKEEIASWKIKNPQQISLLEVIENVKPTILIGASAQSHAFDQTIVKAMAKHVEKPIIFPLSNPTDRSEAEPADLHRWSHGKALIATGSPFEDIIFDNQIFPVNQCNNYLAFPGIGLGAIAVKANRVSDNMLWSASQALSRYANESTHRLLPSIAQAQEASRQVAIAVAKTAIEEGLAKFSLDQVETLVDQQIWEPHYLSYRKR

SEQ ID NO: 8901 - protein, 640 aa, Cichorium intybus
MASSTTATTPLILRDETQICPQLAGSPVGRRLSMANVLSGILVFVLVICVLVAVIHDQSQQIMATNNHQGGDKPTSAATFTAPLLQVDLKRVPGKLESNADVEWQRSAYHFQPDKNFISDPDGPMYHMGWYHLFYQYNPESAIWGNITWGHSVSRDMINWFHLPFAMVPDHWYDIEGVMTGSATVLPNGQIIMLYTGNAYDLSQLQCLAYAVNSSDPLLLEWKKYEGNPILFPPPGVGYKDFRDPSTLWMGPDGEWRMVMGSKHNETIGCALVYRTTNFTHFELNEEVLHAVPHTGMWECVDLYPVSTTHTNGLDMKDNGPNVKYILKQSGDEDRHDWYAVGTFDPEKDKWYPDDPENDVGIGLRYDYGKFYASKTFYDQHQKRRVLWGYVGETDPPKSDLLKGWANILNIPRSVVLDTQTGTNLIQWPIEEVEKLRSTKYDEFKDVELRPGSLVPLEIGTATQLDISATFEIDQKKLQSTLEADVLFNCTTSEGSVGRGVLGPFGIVVLADANRSEQLPVYFYIAKDTDGTSKTYFCADESRSSTDKDVGKWVYGSSVPVLGGENYNMRLLVDHSIVEGFAQGGRTVVTSRVYPTKAIYGAAKIFLFNNATGISVKVSLKIWKMAEAQLDPFPLSGWSS

SEQ ID NO: 8902 - protein, 438 aa, Rhodopirellula baltica SH 1
MSPSLFFAAIFCGSCFLLFVGSADAIEEWEWKRLTRKRLPKLRSGKAIDAVSAKLADQSASAAKPDVTNHPSRWKGWRSASVQSVKDESLDCRSFVFVPTDGEPFPPFLGGQYLTVRLKDPSSGKNVSRCYSLSSGPDEPHYRITVKRVPGGTMSNLLHDTIDVGDRIEIQAPKGRFHYSVEESQSANLEPLNLVAAGIGITPMLSMLFQSLNERTDRDVNLFYQVRNAVDAPFLAPIREIAKMLEATTGVRVHLWFSKPEDDDLRPGDSVGRLSAERIVERLGHHRGEYLICGPDVFMNAIAEGLIECGASADRVMFESFGGKSKSAGALAVPACDPCSDASDVDESNSDDSVGWNVTFQTSGKSASFEAGMDGLLDVAESLDVDVDSGCRSGDCGACVRRLLSGEVRYAETPECDVEDGEAVLCVAKPVSEVVVDA

SEQ ID NO: 8903 - protein, 537 aa, Neurospora crassa
MTDNPEEPLIANTQSTERDQDDGSHDVEHAHDSRGGKQHISPPGLFIWLLTFSAGISGLLFGYDTGVISATLVSIGTSLSHRPLTSLDKSVITSCTSLFALLALPFASALADDRGRKRVVLFADTLFIIGALCQAASRTVEVMVIGRSVVGIAIGAASFVTPLYIAELAPATHRGRLVTMNIVFITLGQVVAYVVGWIFGTYGSPETTGWRWMVGLGAVPAVCQVVILLWMPESPRWLVKDGRSQEARAVIAKIAAGDDAQDPSTRREVDAVLKSIEIEVREEATAMRLGGAGAGYANGNAVNAWMEAMRELIRVRRNRRALAIACLLQGLQQLCGFNSLMYFSATIFTMVGFSEPTLTSLVVAVTNFAFTLVALVLIDRVGRRRILLWSLPFMIAGLVLAGYGFSFIELPNSETSSPSTTGGQGGAVIILASIMIYVAGYAIGLGNVPWMQSELFSLSVRSVGSGVATATNWSANFVIGLTFLPLMEALSPSWTFVLYAVICAVGYGLIWTVYPETAGLSLEDAATLLEADDWGVR

SEQ ID NO: 8904 - protein, 472 aa, Mesoplasma florum L1
MEKFKAIINNQEIESNSWLDIMDPTTDEVYAQVSALSAQEIDSAFKAAKAAQKKWEAIGIEKRTEFLIRWRDLLLKNEEDLATTMMHEIAKAYKDCLTEVRRTAEYIDLTISEYNDLQVLTFDKNSKGVTEDIVAEYKRIAKGVGVGISPFNYPINLAVSKLAPGLLTGNTFVFKPATQGSVVGIKIGQLAIEAGIPAGVLNVVTGRGRDIGDVIVTNPLIDFISFTGSVPVGRRLMEISSSKDLVLELGGKDAAILLDEHNLENIAKDIVAGAFSYSGQRCTAIKRVITTDNIADKITPLIKAEVAKLTVGLPNENPIITPMIDKKSADFVTDLINDAVKKGATLVYGGTRDKNLLQPTLLDNVTVEMNVAWEEPFGPVLPIIRINEIEDMISVANKSNFGLQTSIYSKDVDLAYKVAEQLEVGTVNINRRTQRGPDVLPFLGVKDSGFGVQGIKETILSTTRYRGIIIKK

SEQ ID NO: 8905 - protein, 234 aa, Triticum aestivum
MPKSKRNRSVTLSKTKKKPGLERKGKVVTEIKDAIERHSSAYVFTFNNMRNQKLKDLRDQLKSSSRIFLAGKKVMQIALGRSPADEAKTGLHKLSKFLQGASGLLFTNLPRDDVERLFREFEANDFARTGSIATQTVELKEGPLEQFSHEMEPFLRKQGLPVRLNKGVVELVADHVVCEEGKPLSPEAAHTLRVLGRKMATFRLYLVCRWSSDDFEVYKEGLAHLGGEEADESS

SEQ ID NO: 8906 - protein, 175 aa, Oryza sativa
MAPSVMASSATSVAPFQGLKSTAGLPVNRRSSSSSFGSVSNGGRISCMQVWPIEGIKKFETLSYLPPLTVEDLLKQIEYLLRSKWVPCLEFSKVGFVYRENHRSPGYYDGRYWTMWKLPMFGCTDATQVLKELEEAKKAYPDAFVRIIGFDNVRQVQLISFIAYKPPGCEESGGN

SEQ ID NO: 8907 - protein, 192 aa, Rhodopirellula baltica SH 1
MSRFLLLTLALGCLMNAPQPVSAADSTADHECVLAHEAKTIEGKEVDLHDYEGKVVLIVNVASKCGYTKQYAGLQSLYEAHKDDGLVILGFPCNQFGSQEPGTNADILEFCSARYNVTFPMMGKVDVNGDDASPLYKQLTSVEAKPAGKGPISWNFEKFLIGRDGQVVGRYKSKVAPSDEELVSAIKSALKG

SEQ ID NO: 8908 - protein, 112 aa, delta proteobacterium MLMS-1
MKKIEAIIKPFRLDEVKEALNQLGINGMTLTEVKGYGRQLGHTEIYRGAEYVVDFIPKVKLEIIVEAERCAAVVNCIREAANTGKIGDGKIFVTPVEEVIRVRTNERDRDAI

SEQ ID NO: 8909 - protein, 552 aa, Ashbya gossypii ATCC 10895
MNKQNRRGLQLQLFPYSRSIAQRDTMRSIADQKTNWVVQKFGGTSIGKFPTNIVNDIVKVFSHDYGKNVAVVCSARSSYTKSEGTTSRLLMACDAAASYDETFQDIVRVIREDHVENASHHIKDAEIRVRLVEQTNDELDQVERYLQASQILGEVSNRTMDLVMSVGEKLSCLFLTALCEDCGVTAEYVDFSSIVPTDFRCAEGSLDNSFYALLVVAFKERLAQIVQANKEGKRIVPVITGFFGLLPMGLLNGVGRGYTDLCAALVAVALNADELQVWKEVDGIFTADPRKVPQARLLETVTPEEAAELTYYGSEVIHPFTMEQVIRAKIPIRIKNVQNPTGDGTVIYADNIAKKGESTPPHPPISVSSSFFEQRKRGATAITTKNDIVVLNIHSNKKTLSHGFLAQIFTILDNYKLIVDLISTSEVHVSMALPVPDSDSQRSLRNAVEELKKLGTVDLIKKMAIVSLVGKQMKHFIGIAGAMFTTLSEQNINIEMISQGANEINISCVIDEKNSVRALQSIHAKLLEPLAPTSSGAVLNGRLEQLKSLDLS

SEQ ID NO: 8910 - protein, 493 aa, Shewanella sp. MR-7
MSDNQPQAAKHALMWFRQDLRLTDNQALTAACDWVRQAPGAKLRAIYIATPSQWLSHDMAPIQIDFIQRHVNLLAQGLASLGIEFELIQLDSFKEVPAFLASYCEKLGVERVFAGREPEINEQKRDQACLDAGIPLVLSDEHCLLPPGTVLNLSGDMYKVFTPFSRKWREVAAKRAILPLAVPAPLGPMLPEPKPISFKERFPFTSKLTSSEQWAAGEGQAKRILTAFIQQKAQDYKQDRDFPALEGTSVISPYLALGVLSPRQCIAALLGRFPEVIVDDTSPGRTWLNELIWREFYRHLLVAFPDLSKGHNFNRQADHVQWRNNQAEFLAWCEGKTGYPIVDAAMRQLNQTGWMHNRLRMVVASFLTKHLLIDWRWGERYFRQHLIDGDLAANNGGWQWSAGCGCDAQPYFRIFNPISQSEKFDPDGSFIRKYLPELASWGIKRLHQPNMQKTPSLFEVQMLESDSAYPCAIVEHNAARARALAVLGVLKKA

SEQ ID NO: 8911 - protein, 338 aa, Kluyveromyces lactis NRRL Y-1140
MFKERLLNILKHIRPMSTETTAKYYPKIVESAQADQSLKLNHTCFRVKDPKVTVAFYQEQFGMKLLDHKKFPDMKFDLYFLSFPNKQFSNNSQGAIDVFRENGILELTHNYGTESDPAYKVNNGNEEPHRGFGHICFSVSNLEAECERLESNGVKFKKRLTDGSQRNIAFALDPNGYWIELIQNNESGEGNNYKFNHTMVRVKDPIKSLEFYQNVLGMKILDVSDHSNAKFTLYFLGYENDQKGIARGSRESILELTHNWGTENDPDFAYHTGNTEPQGYGHICISNKDPATLCAEIEKLYPDIQWSPKFNQGKMKNLAFIKDPDGYSIEVVPYGLGV

SEQ ID NO: 8912 - protein, 147 aa, Brassica napus
SIDQHFQSTPFEKNIPVIVGLLSVWNVSFLGYPARAILPYSQALEKFAPHIQQVSMESNGKGVSIDGLPLPFETGEIDFGEPGTNGQHSFYQLIHQGRVIPCDFIGTVKSQQPVYLEGEVVSNHDELMSNFFAQPDALAYGKTPEQL

SEQ ID NO: 8913 - protein, 683 aa, Synechococcus sp. WH 5701
MGQASIRTALKLLAVDPGLGGIVIAGRRGTAKSVLARALHALLPPIRVIRRSCCNADPSAPGNWDDATIAHRATISRTPVSALVPAPFVQVPLGVTEDRLLGSVDVSASIRRGRAVFQPGLLAEAHRGVLYVDELNLLDPGIANLLFTVVDGGFNQVEREGISFRHPCRPLLIATYNPAEGELRAHLIDRLAMVLSADTPLELDERVEAVARVLQHAADPQAFWRHFGPGLEELQRRIAAGRRLLPRVCLAQQQLRYLVEEAIRAGVEGHRADLFAARVARAHASLQGRRLVDAGDLRLAVELVILPRSAAVAATPEAAPEPPPPAAPPGDSGSETPPEQEVPPPEPATGEPSSEAIPDTYLFSPEGVLLDPHLLAQAARGKRRHGKAGGGGLVRSLDRGRYVKPLIPHGPIHHVAIDATLRAAAPHQRARRRAILGSSRRGGREWHGPKLLLREDDLRVKQLARKAGALVIFVVDASGSMALNRMQAAKGAALQLLSEAYRSRDQVALITFRGRRAEVQLPPTRSITAASRRLERLPCGGGSPLAHGLAQAVRLGENARRSKDVGEILIVLISDGNANVSLSRSLASAADHGPGGEGPEPMGLEGMRQEVLGIAAAIRRLGMELLVIDTGTRHRDSSLGADLARHGGGRHQRLPRASQREIAATTRGLMGHRAVAANAAAVA

SEQ ID NO: 8914 - protein, 938 aa, Kluyveromyces lactis NRRL Y-1140
MTQSLPLLNGTEAYKLVTTQGLYDKTVKFYEKYLQLVHDKRVGTLTNSLITLKLVVDNSFKPLDVVNDKDWRAIVSSALVFSCTNIQHFRDLAAGETIQAYPNETNPIEIYLKDPNGYIIGITETKNAISIKPTLPKQSVEASLISSRSSRIDIASSGVSTDSSYPAIPKTAKAQKSIAVMTSGGDAPGMNANVRAIVRTAIFKGCNAFVVMEGYEGLVKGGPNYIKQVYWETVRNWSCEGGTNIGTARCKEFREREGRLLGALHLIEAGVDALIVCGGDGSLTGADLFRSEWPSLIRELLDQGRINKVQFDRYQHLNICGTVGSIDNDMSTTDATIGAYSALDRICQAIDYIEATANSHSRAFVVEVMGRNCGWLALLAGISTSADYILIPEKPASSREWQDQMCDIISKHRSRGKRTTIVIVAEGAISADLTPISSKDVHKVLVDRLGLDCRITTLGHVQRGGTAVAYDRILATLQGVEAVNAVLESTPDTPSPLIAINENKITRKPLVESVQLTKSVAEAIHSKDFKKAMQLRDSEFVEHLDNFMAINSADHIEPKLPEHTHMKIAIVNVGAPAGGMNSAVYSMATYCMSQGHKPYAIYNGWTGLTRHESVRSLNWKDLLGWQSRGGSEIGTNRHTPEEADIGLIAYYFQKYGFDGIIIVGGFEAFVSLHQLERARENYTAFRIPMVLIPATLSNNVPGTEYSLGSDTALNSLMQYCDIIKQSAASTRGRVFVVDVQGGNSGYLATHAAVAVGAQVSYVPEEGISLEQLTQDIENLTESFSEAEGRGKFGQLILKSTNASKVLTPEVLAEVITQEAEGHFDAKCAIPGHVQQGGLPSPIDRTRGTRFAIRAVGFIESQHKVLAAEANLDDDDFDFDTPKIIATASVLGVKGSDIVFSSIRQLYDFETELNKRTPKTIHWQSTRTIADHLVGRKKL

SEQ ID NO: 8915 - protein, 73 aa, Bacillus subtilis
LGHIQRGGSPSAADRVLASRSRAYAVELLLEGKGGPCVGIQNNKLVDHDIIEILETKHTVEQNMYQLSKELSI

SEQ ID NO: 8916 - protein, 263 aa, Shewanella sp. MR-7
MSELNSGIYYGSVTHSRYTPVKHHFSYQMALMAIDLDEVDSISAMGRSFASQRRALLRFNPKDYLCTFTTKDNQSRQLEINEPSSFALKQRVLEQVAELGGHQPCDRVLFVGQIRHFGVYFSPVNFYFCYQAQQPLYMLAEVSNTPWDQRHCYLVDLAVPKTTDKVFHVSPFMNLDMRYQWHVEPPAERLNIGIENLPNQTGKRLFNASLSMTRQAINAQSLRALLFRFPFMTLKIFGGIYWQALKLFFKRVPFVPHPAQVEK

SEQ ID NO: 8917 - protein, 419 aa, Mesorhizobium loti MAFF303099
MGDFVIIGSGVAGHRAAAELHRLDPSQSVYVVGTEPGAPYDRPPLSKEYLKTTEPVRPDLGPAEIYKSNVTLRDGLTATSIDRPNQTIALSDGSSIQYDRLLLATGSRLRHLDLPNIDPARVFYLRTILDAQRLRTALDNHLRIAIIGGGFVGLEIAAAAKRNGCTVTLLERAPELLSRGATPPLAEFARKMHSRQDVRIFLGINISEAFQDGSDIVLRWPEGEVRSDILVVGVGIIPNIELALQCGLATADGILVDQQCRTSDEWIFAAGEVTSYPVDRLGVHIRTESWSSASAQGTVAATSMLGRNGMFNELPWFWSDQYDCNIQCLGLPKRASRFHQIGDLNSESWLRIGVDDAGSLVGAESVNKGREMSALRRADRRGEPIPTALIKDSILVQSCSTVGDLGAGSASLNVNVRTQ

SEQ ID NO: 8918 - protein, 615 aa, Oryza sativa
MGSAWEEEDFARNCPPSWCSDSGPEIRFPHQLESSNSSSSSSCSASCARLACSGPDTILHHPFLGPCKVTAIDYKKAVFQIIPLVDSLSSYPLQKLIIDNLPEPDYHSSRCSLYNAQPGKIVCCSKVLTPSMSPTNDYDGNIADHAVVGPISCLSDPSHFSYLVDAYEDIYSLPLDCKAVSKGIVPISGAVTADGPTFKQLAERILNFAETTVSWSEGGIPDNCVQCEQQGQRCAFSSQRNQTFCMGHKPHGSRVKVIAATSSVAAFVVISLVVATAIYLSLKLSYNEEVHLKVEMFLRTYGTSKPTRYTFSEVKKIARCFKEKVGQGGFGTVYKGKLPNGVPVAVKMLENPTGDGEEFINEVATIGTIHHTNIVRLLGFCSEGTRRALVYELMPNESLEKYIFLRDPNTQELLSPDKMLDIALGIARGMEYLHQGCNQRILHFDIKPHNILLDYNFSPKISDFGLAKLCPRDQSIITLTKARGTMGYIAPELYSRNFGEISYKSDVYSFGMVVLEMVSGRRSWDPSIENQNEVYFPEWIYEKVITEQDFILSREMTEEEKQMVRQLALVALWCIQWNPRNRPSMTKAVNMITGRLQNIQVPPKPFVSYESHPMP

SEQ ID NO: 8919 - protein, 558 aa, Mesorhizobium loti MAFF303099
MPDAARKYQPYPTVGLTDRTWPNKVIDKAPIWCSVDLRDGNQALIDPMGHERKARMFGLLLDMGFKEIEIGFPSASQTDFDFARWCIEEGNVPADVSLQVLVQCRPELITRTFEALKGATNPIVHFYNSTSELQRRVVFEKDVGGIKRIATDAAKMITDMAAKAGGGYRFEYSPESFTGTELEVALEICNAVTEIVRPKPDNKLIINLPSTVEMSTPNIYADRIEWMCRNLDNRENLIISLHPHNDRGTGIATTELGLMAGADRVEGTLFGNGERTGNVDIVTLALNMYTQGVDPGIDCSDINRMKDVYEYSNQLKIPERHPYVGELVYTAFSGSHQDAINKGMKALKKANTSLWEVPYLPIDPADVGRSYEAIIRINSQSGKGGIAYVLQADYGLNLPRNLQIEFSQAIQAITDAEGKEVPAKRIHERFLETYVDQPGARLKFLDHHTYPDTAVKGRRVIEAVILDKGKEVTISGTGTGPIDGFVDALSRHVGVEMSVLDYSEHSMQRGSNASAISYVEMEYPGGKLFGAGINTNIVAASLEAVTSAANRIVGRKAR

SEQ ID NO: 8920 - protein, 659 aa, Magnaporthe grisea 70-15
MKFTFVSSALLALVSSAAAQAPPVPQPLTADWLLNKAGNNSLFTRWRPRSHFIAPSGWMNDPCGAVHDPATDTYHLHYQFHPNHVGWGNVSWGHAVSKDLFHWTDVGGWENDTAVSLAASHYKTSPLSVFTGTTQPVNLQGEHDGTLLTFLTGIHRLPTNWKIHYQNGTEVQALFTSKDAGLTWQEQGIAIPGPPEGWNVTGFRDPSFFPNPDLDAMRNVSEPHYYAVLGSGLKGPDVPAELPGAARPGYIGPRMPLYTAPASNLTDWKFLGALWEPAANSSLGNPDVTGSFGYNFEVSGLFELKANGSDDGAFFVTTGAEGGNTTRHVREQWAVWARGNLSPRANGSIELKPSSGGAVDWGLSYAQASFVDSRKGNQERRVMWGWANEDIEDDVELAVARTMGYAGAITLPTELFLMETRGVQKHDYVDGNEWIPDNGAFTAQTLGIRPLPDVIEKLKTGAALNTFDVATVTAGTPKKVSENVGDSYVLTATLAAPNGTAGIVIAQSPDNSEYTSIVYDAAAKTIGVRRDHSSSLVGIFSNYTHEGHFAPYKTAGGAAEDIKFTIVYDKSLLEVFVNDRFALTSRIYPVRTDSTALSFFTGAFGSDKKTDATETTVWKDVKLWMGLAKAWTERPDDSSSPLHWDSAEQTNNYTWWNGW

SEQ ID NO: 8921 - protein, 430 aa, Staphylococcus aureus subsp. aureus MSSA476
MAFEFRLPDIGEGIHEGEIVKWFVKAGDTIEEDDVLAEVQNDKSVVEIPSPVSGTVEEVMVEEGTVAVVGDVIVKIDAPDAEDMQFKGHDDDSSSKEEPAKEEAPAEQAPVATQTEEVDENRTVKAMPSVRKYAREKGVNIKAVSGSGKNGRITKEDVDAYLNGGAPTASNESAASATSEEVAETPAAPAAVTLEGDFPETTEKIPAMRRAIAKAMVNSKHTAPHVTLMDEIDVQALWDHRKKFKEIAAEQGTKLTFLPYVVKALVSALKKYPALNTSFNEEAGEIVHKHYWNIGIAADTDRGLLVPVVKHADRKSIFQISDEINELAVKARDGKLTADEMKGATCTISNIGSAGGQWFTPVINHPEVAILGIGRIAQKPIVKDGEIVAAPVLALSLSFDHRQIDGATGQNAMNHIKRLLNNPELLLMEG

SEQ ID NO: 8922 - protein, 500 aa, Chromobacterium violaceum ATCC 12472
MSQSVPNIKLLIGGEFVESQTTEWRDIVNPATQEVLARVPLATADEVNAAVAAAKEAFKTWKKTPIGTRARIFLKYQQLIRENMKELAAILTAEQGKTLADAEGDIFRGLEVVEHAANIGTLQMGEYAENVAGGVDTYTVQQPLGVCAGITPFNFPAMIPLWMFPMAIATGNTFVLKPSEQDPMVTMRLVELALEAGIPKGVLNVVHGAASVVDAICDHPDIKAVSFVGSTKVGTHVYQRATLSGKRAQCMMGAKNHAIVLPDANKEQALNQLTGAAFGAAGQRCMALSVAVLVGEAQQWIPELVAKAKGLKVGPGKDNPDLGPVISCAALDRVKSLIARGVEEGAKLELDGRGVKVAGFESGNFVGPTIFSGVKPEMAIYHQEIFGPVLCLMAADTLDEAIAIINANPNGNGTAVFTQSGAAARKFQEEIDVGQVGINVPIPVPVPLFSFTGSRASKLGDLGPYGKQVVAFYTQTKTVTSRWFDDEASSGKVHTTISLR

SEQ ID NO: 8923 - protein, 428 aa, Zea mays
MEDEDAGLGDGGEASPPHHAAASGDRARDLAASPTSSRSVTQTVNGSHRFVIQGYSLAKGMGVGKHIASDTFTVGGYQWAIYFYPDGKNPEDNSGYVSVFIALASDGTDVRALFELTLLDQSGKGKHKVHSHFDRSLESGPYTLKYRGSMWGYKRFFRRTALELSDYLKDDCLKINCTVGVVVSTIDYSIPHSIHVPDSDIGYDFGSLLDSQEGADVILNVGGERFHAHKLVLAARSHVFGSQFFDDESDGEKSEVNETDELKEFSIDDMEPNVFKAMLHFIYRDTLVDDDELGASSSDGSIFDTPAAKLLAAADKYHLARLKSLCESYLCKGISVASVASTLALADRHHAMELKAVCLKFAAENLSAVMRSEGFIYLKDNCPSLQSEILKTVAGCEDQCSSVGKSQSVCGQLSDGGDSSCRRVRQRT

SEQ ID NO: 8924 - protein, 260 aa, Lycopersicon esculentum
FDYVSRKLLIVVTPTYNRALQAYYLLRLSEVLKLVKSPLLWVVVEMNVASAETADILRKTGVMYRHLVCSKNMTDIKDRGVHQRNVALEHIEHHRLNGIVYFADDDNIYSLELFESIRSINRFGTWPVAMLAQSKSKAILEGPVCNGSQVIGWHTNEKSKQLRRFHVDMSGFAFNSTILWDPKKWHRPTSDPIRQLDNVKEGFQETTFIEQIVEDESQMEAVPPGCSRVWNWHLHLEAHGAVYPGGWLLQKNLDAIISTT

SEQ ID NO: 8925 - protein, 431 aa, Lactobacillus plantarum WCFS1
MAYEFKLPELGEGLEEGEIASWLVKPGDEVKEDDSLVEIQNDKSVEELPSPVSGKVIDILVPEGETAKIGDVIVTIDDGSGDAAPAATKTEAPASEAAETPAATSAQPTGTPAAGNPNKRVLAMPSVRQYARDKDIDITLVTPTGAHGQITKQDIDNYTGAPAATGAKPAATPATTAPAASEAPAPTPVKPYVSDTPELETREKMTPIRKAISKAMVNSKHTAPHVTLFDEVEVSALMAHRKKYKQVALDRDIHLTFLPYFVKALVAVLQQFPELNASIDDANKEIVYKHYFNIGVATDTDRGLLVPNIKHAEGKGLFAIAKEITDNTQKAYDGKLKASEMSGGSITISNIGSIGGGWFTPVINQPEVAILGVGRIGKEPYVNDDGEIVVGKMQKLSLSFDHRLIDGATAQRAMNLLKQLLHDPELLLMEG

SEQ ID NO: 8926 - protein, 160 aa, Dechloromonas aromatica RCB
MSQTLYDFSAQRLNGEPQDFEAYRGKVLLIVNTASECGFTPQYTGLEELYWMFKDRGFVVLGFPCNQFGGQEPGDAEAIGQFCQTRFDVTFPLFAKVDVNGDSAHPLYTWLKHEAAGVLGTEAIKWNFTKFLIDREGKVVHRYAPATRPDELVEAVEAQL

SEQ ID NO: 8927 - protein, 325 aa, Lactobacillus plantarum WCFS1
MSKKTYIQAITDALRLELGSDEKTLVFGEDVGKNGGVFRATDGLQAEFGEDRVFDTPLAESGIGGLSIGLALEGFRPIPEIQFLGFIFETLDSIAGQMSRERFRTGGTRHMPITIRSPYGGGTHTPEMHADSLEGYLAQIPGLRVVTPSNPYDAKGLLISSIRNNDPVFFLENLKLYRSMKADIPDEAYTVPLDKANVVREGTDISLIAYSAQVNQSLKVAEKLEKEGISVEVVDLRTLSPLDEETILKSVQKTGRAVAIQEAQRQAGIAANVASLIAEKGALYLSAPVGRVYAPDTVYPFGLAEDDWLPAEDEIEAKTREILNY

SEQ ID NO: 8928 - protein, 191 aa, Gluconobacter oxydans 621H
MSDDSHDRPTEESGKSRPSRGLFGLFNRRGRDQGLRESIATLVQEAGQPIEDAGDEPELDRQERALIMNVLRLRDITADDVMIPRADIVAMPEALPFNEALDLMRRENHSRLPVYRDQLDDIAGMIHVKDLIAYVGDPEAFDIRPLLRQPLMIAPTIPVLDLLLQMRQRQMHMALVIDEYGSIDGLVTIEI

SEQ ID NO: 8929 - protein, 170 aa, Arabidopsis thaliana
MGASASVPERSVHQFTVKDSSGKDLNMSIYQGKVLLIVNVASKCGFTETNYTQLTELYRKYKDQDFEILAFPCNQFLYQEPGTSQEAHEFACERFKAEYPVFQKVRVNGQNAAPIYKFLKASKPTFLGSRIKWNFTKFLVGKDGLVIDRYGTMVTPLSIEKDIKKALEDA

SEQ ID NO: 8930 - protein, 276 aa, Hordeum vulgare
QRLPDAAGSSAEEHSGQDKLLIVVTPTRARASQAYYLSRMGQTLRLVRPPVLWVVVEAGKPTPEAALELRRTAVMHRYVGCCDALNASASPAVDFRPHQLNAGLEVVENHRLDGVVYFADEEGVYSLPLFDRLRQIRRFGTWPVPTISDGGHGVVLEGPVCKQNQVVGWHTSGDANKLQRFHVAMSGFAFNSTMLWDPRLRSHKAWNSIRHPEMVEQGFQGTTFVEQLVEDESQMEGIPADCSQIMNWHVPFGSESPVYPKGWRSAANLDVIIPLK

SEQ ID NO: 8931 - protein, 411 aa, Arabidopsis thaliana
MLEGAKFNVLAVGNHHNNDNNYYAFTQEFYQKLNEGSNMSMESMQTSNAGGSVSMSVDNSSVGSSDALIGHPGLKPVRHYSLSVGQSVFRPGRVTHALNDDALAQALMDTRYPTEGLTNYDEWTIDLRKLNMGPAFAQGAFGKLYKGTYNGEDVAIKILERPENSPEKAQFMEQQFQQEVSMLANLKHPNIVRFIGACRKPMVWCIVTEYAKGGSVRQFLTRRQNRAVPLKLAVKQALDVARGMAYVHGRNFIHRDLKSDNLLISADKSIKIADFGVARIEVQTEGMTPETGTYRWMAPEMIQHRAYNQKVDVYSFGIVLWELITGLLPFQNMTAVQAAFAVVNRGVRPTVPNDCLPVLSDIMTRCWDANPEVRPCFVEVVKLLEAAETEIMTTARKARFRCCLSQPMTID

SEQ ID NO: 8932 - protein, 918 aa, Dechloromonas aromatica RCB
MHDASPSKDEPLRTDIRLLGRILGDTVREQEGESVFDIVERVRQTAVRFARDGDPAARDELAALLDPLPGDTTQAVVRAFSYFLQLANIAEDEHHIRRRRAHDLAGSPPREGSLIFALDALSTAAVSPEAIADFFAHAVVAPVLTAHPTEVQRQSLIRNHRDLAHLLDQRERLQMTPEEEAENDLALANAILTLWQSRMLRPVRLKVLDEVKNGITYFKETFFTELPRLYIQATEQLQKRYPEKTWALPPFFRVGSWIGGDRDGNPFVTADILREALRLQSSAALNHYLNEVHELGGELPLSDLLVKVTPELLALAEHSTDHSPQRADEPYRRALSGIYARLAATARALDQFEPVRHEIGHATPYDTPDALRADLKLLANSLKLNGSAKLAGGRLRRLLRGVQIFGFHLAPIDLRQNSDVHARSVAELLAGAGRCPDYEALSEAERIKLLVDEISTPRPLYSPYLNYSEETQGELAIFFAARELRQKYGSAALPNCIISKTDGVSDLLELALLLKESGLLLPGAKPQLKVNIIPLFETIEDLQKSAATMAGVFAIPAYRELIAGRGDEHEVMLGYSDSNKDGGFLTSGWELYKAEIELARIFGQHGVRLRLFHGRGGSVGRGGGPTYHAILAQPAGAVAGQIRLTEQGEVISTKYGNADTGRRNLEVLLAATLEASLTDHENRVEPAEQFHAVMDELSARAFNAYRGLVYETPGFTTYFRQSTVVSEIASLNIGSRPASRKASERIEDLRAIPWVFSWAQCRLMLPGWYGFGAAVEGYLQANPAGLATLRRMVHAWPFFKSLLSNMDMVLAKTDLAIASRYAELVADVELREHIFSRIKAEWALTRQHLLAILEQDEFLADNPLLARSLQLRSPYMDPLNHLQVELLKRHRAGDTDERLARGIHLTINGIASGLRNSG

SEQ ID NO: 8933 - protein, 357 aa, Helicobacter pylori 26695
MKGLERESHFTLNENAMFFECAYSCDNALFLQLDDRSFFITDSRYTQEAKESVQPKNGVLAEVVESSDLVQSAIDLIVKSSVKKLFFDPNQVNLQTYKRLNSALGDKVALEGVPSYHRQKRIIKNEHEIQLLKKSQALNVEAFENFAEYVKKIFDEKESLSERYLQHKVKDFLTREGVYDLSFEPILALNANASKPHALPSAKDFLKAEHSILLDMGIKYERYCSDRTRTAFFDPKDFVFKREQSFKDKERQKIYDIVKEAQEKAISGIRAGMTGKEADSLARGVISDYGYGQYFTHSTGHGIGLDIHELPYISSRSETILEEGMVFSVEPGIYIPGFFGVRIEDLVVIKNSRSELL

SEQ ID NO: 8934 - protein, 94 aa, Zea mays
MQKTKGGGFRVRLGGLFYATGTESGPSSSCCSGVRNLKSAVSTACYRCAGCNCLKNAGRGVSGLNAGNAASIPSKCGVSIPYTISTFTDCFRVN

SEQ ID NO: 8935 - protein, 441 aa, Haloferax mediterranei
MQTSEPEGSSPNTAEAASQSSEPKPASESALETARRQLYRAADHLDIDPNVVERLKHPEAVHEVTVPIERDDGSVSVYTGYRAQHDSVRGPYKGGLRYHPGVTRDECVGLRMWMTWKTEVRRDGPIFGGAKGGIAVNPKDLTLDEKERLTRRFTQEIRTIIGPMKDIPAPDMGTDPQTMAWVMDAYSMQEGETVPGVVTGKPPIVGGSEGRDTAPGRSVAIIAREAIDYLSWDIEDTTVAVQGFGSVGAPAARLLDDYGANVVAVSDVNGAIYDPDGLDTHAIPTHEEEPEAVMTHDAPETFSNEELLELDVDVLIPAAVGNVLTAENADDVQANLIVEGANGPTTSAADANFAERGVPVIPDILANAGGVTVSYFEWLQDINRRTWSLERVHDELETEMLNAWSVVRDEYESRDVPWRDAAYIVALSRIAAAHDARGLWP

SEQ ID NO: 8936 - protein, 356 aa, Verticillium fungicola
MSRANPPNNASASRKISFNVSEQYDIQDVVGEGAYGVVCSAIHKPSGQKVAIKKITPFDHSMFCLRTLREMKLLRYFNHENIISILDIQKPRGYDSFNEVYLIQELMETDMHRVIRTQDLSDDHCQYFIYQTLRALKAMHSANVLHRDLKPSNLLLNANCDLKVCDFGLARSAASQEDNSGFMTEYVATRWYRAPEIMLTFKEYTKAIDVWSVGCILAEMLSGKPLFPGKDYHHQLTLILDVLGTPTMEDYYGIKSRRAREYIRSLPFKKKVPFRTLFPKTSDLALDLLEKLLAFNPVKRITVEEALKHPYLEPYHDPEDEPTAPPIPEEFFDFDKHKDNLSKEQLKQLIYQEIMR

SEQ ID NO: 8937 - protein, 606 aa, Triticum aestivum
  misc_feature (46)..(46): Xaa can be any naturally occurring amino acid
  misc_feature (377)..(377): Xaa can be any naturally occurring amino acid
  misc_feature (379)..(379): Xaa can be any naturally occurring amino acid
  misc_feature (387)..(387): Xaa can be any naturally occurring amino acid
  misc_feature (397)..(398): Xaa can be any naturally occurring amino acid
  misc_feature (400)..(400): Xaa can be any naturally occurring amino acid
  misc_feature (406)..(406): Xaa can be any naturally occurring amino acid
  misc_feature (411)..(411): Xaa can be any naturally occurring amino acid
  misc_feature (414)..(414): Xaa can be any naturally occurring amino acid
  misc_feature (416)..(416): Xaa can be any naturally occurring amino acid
  misc_feature (421)..(421): Xaa can be any naturally occurring amino acid
  misc_feature (431)..(431): Xaa can be any naturally occurring amino acid
  misc_feature (434)..(434): Xaa can be any naturally occurring amino acid
  misc_feature (441)..(441): Xaa can be any naturally occurring amino acid
  misc_feature (476)..(476): Xaa can be any naturally occurring amino acid
  misc_feature (485)..(485): Xaa can be any naturally occurring amino acid
  misc_feature (500)..(500): Xaa can be any naturally occurring amino acid
  misc_feature (511)..(511): Xaa can be any naturally occurring amino acid
MARLSLAACAVVFHLCLLISSSASLRWLSDKSAAVTTAGGVRTRSXAYHFQPAKNWQNDPNGPMYHNGLYHFFYQYNPDGVTWGNGNLSWGHSVSVDLVNWFALDAALQPSRSFDANGCWSGSATILPDGSPVMLYTGIDARGDQVQNVAFPKNASDPLLVEWVKPEYNPVIPVPADIKRDDFRDPSTAWLGADGLWRIAVAARVHDVGGATLIYRSKDFLRWERNADPLYWAHAAGMVECPDLFPVSAPGLVLRLPASGAGARHVLKMSVMDTVQDYYVVGRYDDTAGTFVPEDDDDCRSWRRLDYGHVYASKVLLRPQQRTGACSGAGPTSPTACPTTSSGDGPVFRLFRRKIWAGRKTAKQLRQWPVEEIENAXEXQAKLKPAXYREVKRPAGXXTXINPAVXWGTPXRNXGXSVFRXVPGPLEPTPXVLXRPNWLLXDPQSLCGEKGAFVPGSVGPFGLLVMASGDMQEHTXVFFRVFRQXQYKVLMCTDLSRSSXRDGVYKPPYGXFVDMDIEAHGGIISLRTLVDHSVVESFGGGGRTCITARVYPDHVVNGNSHLYVFNNGTGAVKVSSLDAWEMATATVNVLPDGLIAASSVGRAQAY

SEQ ID NO: 8938 - protein, 556 aa, Burkholderia vietnamiensis G4
MRRRGIPPDSRFTRTAMTLNSLPAWTALQSHFAEIRHARLRDWFAPENDRAPTRAERFTIAGGGLAADFSKNRINDDTLRLLVQLARDTRVEARRDAMFAGDVVNPTEGRAALHTALRATDPNAPFHAQVSAERAKMASFARAVRSGAWTGHTGKRIRHVINIGIGGSDLGPKMVTHALHHVATPDISTHFVSNVDGADLARVLEQVDPEETLAIIVSKTFTTLETMTNARSLRDWFIARGCPEDALAKHFVGVSANPSEVVRFGIAADNVFEMWDWVGGRYSLWSAVGLSIMIAVGPDQFDELLAGANDMDRHFREAPLERNLPVLLGMIGIWYRNFFGSQSYLVAPYSEALHYLPSYLQQLEMESNGKSARLDGTFVDYPTSAVTWGEPGTNGQHAFFQMLHQGPTIVPIDFIAVLTPEHPLASHHPKLLANCFAQSEALMLGRTLDEARKIAGPGEEALAPHLTFPGNRPTTTLLVDALTPRTLGALIALYEHKVLVQATVWDINPFDQWGVELGKILGKVVEADLSADSVDPAKHDSSTTALIERARAALKR

SEQ ID NO: 8939 - protein, 131 aa, Pseudomonas aeruginosa PAO1
MRILHSMLRVADLEAALEFYTRALDMRLLRRRDYPEGRFTLAFVGYQDERAAAALELTHNWDRDGYTQGDGYGHLAIEVEDAAVTCARARALGYRVTREAGLMQHGRSVIAFLEDPDGYKVELIQKGTQFD

SEQ ID NO: 8940 - protein, 598 aa, Oryza sativa
  misc_feature (592)..(592): Xaa can be any naturally occurring amino acid
MARLGLAVCAASFHLFLLLASISSLRRAPTEADTANHARRTAYHFQPAKNWQNDPNGPMYHNGMYHLFYQYNPHSALWDIGNLSWGHSVSGDLLNWAALDTALDPTSPFDANGCWSGSATILPGALPAILYTGIDASKEQVQNVAFAKNPSDPLLREWEKPAYNPVIALPADVPGDKFRDPSTAWLGRDGLWRIAVSAEVDGVASTLVYRSKDFVRWERNAAPLHASRAAGMVECPDLFPVAERGEDGLDTSANGAGGVRHVLKLSVMDTLQDYYMVGTYDDAADAFSPAEPERGDDCRSWRRLDYGHVYASKSFFDVRKNRRVLWAWANESDSQADDVARGWSGVQTFPRKMWLAKDGKQLLQWPIEEIKTLRRKRAGLWQGTRLGAGAVQEIVGVASSQADVEVVFKIPSLEEAERVDDPNRLLDPQKLCGEKGAAVRGGVGPFGLLVMASGDLHEHTAVFFRVFRHHDKYKLLMCTDLTKSSTRAGVYKPAYGGFVDMDIDDHKTISLRTLIDHSVVESFGGGGRACITARVYPEHVATSSSHLYVFNNGSDAVKVAKLEAWDLATATVNVVVGDHHGLVAPALELEPXTHDAVI

SEQ ID NO: 8941 - protein, 632 aa, Coxiella burnetii RSA 493
MCGIAGIFNLNGKPVAFDQIKAMTDSIAHRGPDGEGQFTDKYIGLGHRRLAIIDLSPAGHQPMQTKDGRYLITYNGEVYNFKILRKELETLGYSFFSNTDTEVVLNAYVQWGEKCLEKFNGMFAFAVWDRKEKTLFLARDRYGIKPLYYYQTNDCFVFASEIKAIIASGLYGAEINKEALVEYLTFQNFFTDRTLFKDVRIMPAGHFMMVKRENSSLHQYWDFNFTNDSALSEKMLLEKINDLFQQAVNRQLVSDVPVNSYLSGGVDSGSITMIAAKQLPHIRTFTVGFDLSSASGLELAFDERQAAEHLSYLAGTEHYEMVLKAGDMERCMQDLVWHLEEPRIGQSYPNFYAAKLASKFGKVVLAGTGGDELYAGYPWRYLCGQSSENFEDYIDKYYQYWQRLMSNKNLFKVLAPIAEEVKSIWTRDIFANVFRIKDTPIKTEDYINYSLYFEAKTFLHGLLVVEDKLSMAHGLETRVPCLDNDFVDFALQVPVKYKLSDFAFERVNENDTFSKREKRMNGKKILRKMMSRYVPDNVAHAPKQGFSAPDASWFKGESIEFVRSLLGDRNAKIFELLDYSVVNHLVNDHIQNHHNHRLLIWSLIYLEIFMQVHLSKGHKSNYHLFTPETVEL

SEQ ID NO: 8942 - protein, 569 aa, Clarkia lewisii
MATPALISETEAWKDLKAHLEGIKRTHLRELMGDTERCQSMMVEFDNIFLDYSRQQASPDTINKLYKLAEAAHLKQKIDRMYNGDHINSTENRSVLHVALRAPRNSAICSDGKNVVPDVWNVLDKIKDFSERVRNGSWVGATGKELKDVIAVGIGGSFLGPLFVHTALQTDPEASKNARGRELRFLANVDPIDAARNISGLNPETTLVVVVSKTFTTAETMLNARTLREWISSALGVAAVAKHMVAVSTNLPLVEKFGIDPNNAFAFWDWVGGRYSVCSAVGVLPLSLQYGFAVVEKFLQGAHNIDQHFSSAPFEKNIPVLLGLLSVWNVSFLGYPARAILPYSQALEKLAPHIQQVSMESNGKGVSIDGLPLPFESGEIDFGEPGTNGQHSFYQLIHQGRVIPCDFIGVVKSQQPVYLKGEVVNNHDELMSNFFAQPDALAYGKTPEELKKENVSEHLIPHKTFTGNRPCLSILLPTLDAYRIGQLLAIYEHRVAVQGFVWGINSFDQWGVELGKSLATQVRKQLHASRVKGEPVEEGFNFSTKTLLTRYLQATTDVPADPSTLLPNI

SEQ ID NO: 8943 - protein, 285 aa, Rickettsiella grylli
MTAIIIDGKAIAQETRLALKQRLEQRRNQNLVTPGLAVVLVGEDPASQIYVRNKRDACRDIGMNSFAYDLPQHTTELALLNLIKRLNSDQKVHGILIQLPLPLSMNTGHILDSIDPRKDVDGFHPTNLGLLAQGRPFLRPCTPYGVMRLLAYEKIQLKGLNAVIVGTSNIVGKPLALELLNAGCTITLCHSATRNLHTHIRQADVLVSAIGKAGIIQSPWIKPDAIVIDIGITRTPSGKLHGDIEFSSAKEIAGYITPVPGGVGPMTVAMLLENTLFAAECQDIE

SEQ ID NO: 8944 - protein, 620 aa, Candida glabrata CBS 138
MINPHVQENLQAIQNTLSNYDTSFLSEDEEDYCPLCIEPMDITDKNFFPCPCGYQICQFCYNNIRQNPELNGRCPACRRKFDDESVRYVVLTPEELKMERAKLARKEKERKQREKEKKEYEQNNRKHLAGTRVIQKNLVYVIGVNPPVPPEEVAATLKSDKYFGQYGKINKIVVNRKAPHGGSNNDHYHHHAPGYGVYITFSSKDDAARCIAQVDGTYMDGRLIKAAYGTTKYCSSYLKGMVCPNPNCMFLHEPGEEVDASNKRELSKPQLHTQNSMNSGSFRNGSEFGSAAASPLPLKAHLNSATSSVAANNDSSASTPVLTPAPAPPSTSNPWGISQTASAIANINLSKPNSSINLPTLNDNVTQDNDNNNEVPSKPKPVSNTNTSSSKKKNSSKEYVDPYDALNGCITFMNERFKSLSNYQNKTFSLRSDAIDQETLKSYPPLFTASNIKISETSENILTQKLVEILAIKPTDYSQSVIQFLQSVSASQPELINLPSVQSFTSANNAQATQTPINNPINPNLAQLGNGGVMGPGTPGPQNVMLQAMQPPQQMQAQPPQQMQQMPMNMGGNANGMFVSPQELAQKQAQPQMAQMQSNNVGSNDLLNQLISGKRLAAAN

SEQ ID NO: 8945 - protein, 398 aa, Gloeobacter violaceus PCC 7421
MTLRVAVVGSGPGGSSAAEICAKAGFETYLIEKNLSNAKPCGGAIPLCMVSEFDLPSEIIDRRVRNMSMIAPSNHAVDISLTKQDEYIGMCRREVLDGFLRNRAASVGAHLIEGTFTELKRGTPYVLEYRDKDGNARSLKADIVIGADGFHSKIAKTIDAGDVPYAIAFQERIELPPEKMAYYEDRAEMYLGFDVSPDFYAWIFPKSNHVAVGTGTMSPNKDGIRRMQKALRERAGAKIAGGKIIKIEAHPLPERSRPRRVVDRVMLVGDAAGYVTKSSGEGIYFAAKSGRMAAQTIVEAAAGGKLPSEAQLGEYVRRWDRQYGLTYRVLSILQDVFYRSDATREAFVEMCADRDVQRLTFDSYLYKTVVPAGPFVQTKITLKTLGSLLRGNALSPTR

SEQ ID NO: 8946 - protein, 563 aa, Coccidioides immitis RS
MGYRKLINVNDVNPEEVIEQLRNDPEESHRQHVFTLNAVATRTAYSTRYASSEEIPKFRIPQLGASAEAVYRLLRDELDLDGIPNLNMASFVGTFMEREAQQLLVENIGKNLADADEYPALMDLHARCISMIANMWHPQPGEQPIGTATTGSSEAIQLGGLAMKRRWQEKRRAEGKDTSKPNILMGANAQVALLKFARYFDVEARILDVSENSHYRLDPNDIKKNVDENTIGIFVILGSTYTGHYEPVEELSRILDQVQEEHGWDIPIHVDAASGGFIAPFTYAGAGGSKWDFELPRVHSINVSGHKFGLVYVGLGWIIWRDRAYLPKDLIFELHYLGGTEESFGLNFSRPGIQVIGQYYNLIRLGFDGYREVMENCLRNARLLSKALERTGWYVCVSDIHRKKGDYRFRGVGEIQPHRPGETSADYNEGLPVVAFRFSEQFKKEYPDVKQEAISLLLRAKQYIIPNYPLPPKTDNIEILRVVVRESMSGDLIDKLISDIVEVTERVMTSEPIDVAVLQSRPTSLARRHGRLETKLPAKKITKVKAGEKARHPMAKGGHRSVC

SEQ ID NO: 8947 - protein, 335 aa, Geobacillus kaustophilus HTA426
MAVKVGINGFGRIGRNVFRAALKNPDIEVVAVNDLTDANTLAHLLKYDSVHGRLDAEVSVNGNNLVVNGKEIIVKAERDPANLAWGEIGVDIVVESTGRFTKREDAAKHLEAGAKKVIISAPAKDEDITIVMGVNQDKYDPKAHHVISNASCTTNCLAPFAKVLHEKFGIVRGMMTTVHSYTNDQQILDLPHKDLRRARAAAESIIPTTTGAAKAVALVLPELKGKLNGMAMRVPTPNVSVVDLVAELEKEVTVEEVNAALKAAAEGELKGILAYSEEPLVSRDYNGSTASSTIDALSTMVIEGKMVKVVSWYDNETGYSHRVVDLAAYIASKGL

SEQ ID NO: 8948 - protein, 671 aa, Shewanella sp. MR-7
MAELKEVFVPDIGGDEVQIIEICASVGDTLAAEESILTVESDKATMDIPAPFAGVLAELKVAVGDKVSEGTLIAMMQAAGTANVQAAPVAQAAAPAPAPAAPAPVQAAPAPVAAAPATGATQVVEVTVPDIGGDTDVSVIEVLVAAGDKIEVDAGLITLETDKATMDVPSPFAGVVKEVKVAVGDKVSQGSLVIMLEVGGAAPAAAPQASAPAASAPVAQAAPAAPVAPVAAASPVVAVKEIQVPDIGDASNVDVIEVLVSVGDDITVDQGLITLETDKATMEVPAPFAGKLLSLTVKVGDKVSQGSVIATIETVTAGAAPAPQAAAPAPVAQEAAPAPVAAAPSRPPVPHHPSAGAPVATGVVHASPAVRRLAREFGVDLTQVTGSGRKGRIMKEDVQAYVKYELSRPKATAATSVAAGNGGGLQVIAAPKVDFSKFGEVEEIPLSRIQKISGPNLHRNWVTIPHVTQFDEADITEMEEFRKQQNDAAAKKKADYKITPLVFMMKAVAKTLQQFPVFNSSLSSDGESLIQKKYYHIGVAVDTPNGLVVPVVRDVDKKGIIELSRELADISVRARDGKLKSADMQGSCFTISSLGGIGGTAFTPIVNYPDVAILGVSKSEIKPKWNGKEFEPKLMLPLSLSYDHRVIDGAMAARFSVTLSGILSDIRTLIL

SEQ ID NO: 8949 - protein, 159 aa, Oryza sativa
MAAPLRRSLPSLGRTLLSPSPAPARMLSAAASDALVEIKPGEIGMVSGIPEEHLRRKVVIYSPARTASQQGSGKVGRWKINFVSTQKWENPLMGWTSTGDPYANVGEAGLTFDSADSAKAFAEKHGWDYVVRKRHTPLLKAKSYAENFKWRGPPKAEQA

SEQ ID NO: 8950 - protein, 308 aa, Oryza sativa
MDGGGGGGGGGGVMAGPGVAGGGGGGGGGGVGGDVELVSKTLQFEHKLFYFDLKENPRGRYLKISEKTSSTRSTIIVPVAGVAWFLDLFDYYIRTDERDAFSKELRLDTKVFYFDIGENKRGRFLKVSEASVNRNRSTIIVPAGSSGEEGWEAFRNVLLEINNEASRLYVLPNHPNQQHLEPPERLPGLSDDVGAGFIAGHGSQSASGPEVDVERLVDLPPQEEISGMGMSKVIRADQKRFFFDLGSNNRGHYLRISEVAGADRSSIILPLSGLKQFHEMVGHFVDIMKDRLEGMTGANVRTVESSQR

SEQ ID NO: 8951 - protein, 404 aa, Arabidopsis thaliana
  misc_feature (267)..(267): Xaa can be any naturally occurring amino acid
MAAFLQTNIRLEIIPGRYSSLTDHKFRAPYRIRCAAASPVKKRYNITLLPGDGIGPEVISVAKNVLQKAGFLQGLEFDFQEMPFGGAALDLVGVPLPEETSTAAKQSDAILLGAIGGYKWDKNEKHLRPEMGLLNIRRDLNVFANLRPATVLPQLVDASTLKKEVAQGVDMMIVRELTGGIYFGEPRGITINENGEEVGFNTEIYAAHEIDRIARVAFETARKRRGKLCSVDKANVLDASILWRKRVTALASEYPDVELSHMYVDNXAMQLVRDPKQFDTIVTNNIFGDILSDEASMITGSIGMLPSASLGESGPGLFEPIHGSAPDIAGQDKANPLATILSAAMLLKYGLGEEKAAKMIEDAVVDALNKGFRTGDIYSPGNKLVGCKEMGEEVLKSVDSKVPV

SEQ ID NO: 8952 - protein, 643 aa, Haemophilus influenzae 86-028NP
MPIITLPDGSQRQFDRPVSVLEVAQDIGAGLAKATIAGRVNGERRDACDVIEQDATLEIITAKDEDGLEIIRHSCAHLLGHAIKQLFPDVKMAIGPTIENGFYYDVDLDRSLTQEDIDAIEKRMLELAKTNYDVVKKRVTWQEARDTFEKRGEPYKMAILDENIERTATPALYHHLEYIDMCRGPHVPNMRFCQHFKLQKVAGAYWRGDSKNKMLQRIYGTAWADKKQLAEYLTRLEEAAKRDHRKIGKALDLYHMQEEAPGMVFWHNDGWTIFRELETFVRTKLKQYDYQEVKGPFMMDRVLWEKTGHWQNYADLMFTTQSENREYAIKPMNCPGHVQIFNQGLKSYRDLPIRMAEFGSCHRNEPSGSLHGLMRVRGFTQDDAHIFCTEDQIESEVTSCIKMVYDIYSTFGFTNIAVKLSTRPENRIGSDEMWDRAEAGLAAALAHNGLEYEIQEGEGAFYGPKIEFALRDCLGREWQCGTVQLDFALPGRLDATYVAEDNSRKTPVMIHRAILGSIERFIGIITEEYAGFFPAWLAPTQAVVMNITDSQADYVQQVVKTLSDAGLRVKADLRNEKVGFKIREHTLRRVPYMLVCGDKEIAEGKVAVRTRKGADLGTFTVEEFAEILKNQVRSRELKLLNEE

SEQ ID NO: 8953 - protein, 457 aa, Staphylococcus aureus subsp. aureus NCTC 8325
MAIAVLLNRMFRMEHNPLFEYIYQQKEDIDACYFIIPEEDMSSASDLKAQFYRGTLQRFYQSLHAEKLTPYVMSYDDIISFCKENNISEVVTAGDIMSYHLEEYDILHQRSLFNEARIAVTLIRGNHYFKASKTMNQQGEPYNVFTSFYKKWRPYLRHRDVYHYDLKSFENFVIASPDDLVFDDIAFGSSQIIEQNKWQHFLDQDIQNYESGRDYLPEVLTSQLSVALAYGLLDIIEIFNDLLARYDEDEANYEAFIRELIFREFYYVLMTQYPETSYQAFKPKYRQIKWSQNEADFNAWCEGQTGFPIIDAAIMELTQTGFMHNRMRMVVSQFLTKDLFIDWTWGEKFFRKHLIDYDAASNIHGWQWSASTGTDAVPYFRMFNPIRQSERFDAKALYIKTYLPIFNQIDAKYLHDTQRNESNLFEQGIELGSHYPRQMVDHQEKRTQVLATFKALD

SEQ ID NO: 8954 - protein, 189 aa, Triticum aestivum
MTSVWKTKVLPGLNKIFDKDGKKAAAAEFLKSFNKEEIDKEIEDKKTDLEPKVVETIEASPPEIKGLMKDKKTSKIKKNSVAVTKFLDDLAKIDFPGAKLVSDAVAKSGTTPLSPAIVFILDKVAPFVPAPKEEPKAEPEDAAPAEETTTREVAVEEKKEEAEPSAATEEAAALKYPSRGPSLRVPQLS

SEQ ID NO: 8955 - protein, 164 aa, Glycine max
MAQKTEKEETDFKVPETITLCVNNCGVTGNPATNNMCQKCFTAFTTSTATTSGAGGAGIASPATRSGISARPLKRSFPEEPSPPADPPSSDQTTPSEAKRVVNRCSGCRRKVGLTGFRCRCGELFCAEHRYSDRHDCSYDYKAAGREAIARENPVIRAAKIVKV

SEQ ID NO: 8956 - protein, 637 aa, Coxiella burnetii RSA 493
MCGIVGFWDFRRSWKKEQYQKVAAKMADQITSRGPDSSGVWCDEKTGLAFGHRRLAVIDLSTAGHQPMLSHSGNTAIIYNGEIYNAPFIRRELENAGIYCCGHSDTEVLLEACELWGVKSAVKKMNGMFAFAYWNKLEKKLYLGRDRLGIKPLFWSLKNNIFYFSSQLKALAAHPVWNVEIDRTALTSYFRFNYIPAPLSIYKGVYKLKPGTILTIDPNQKIIEETFWSLETVCQKNINKKKIDDNEVLEKTETLLRDAVKCRMYSDVPLGAFLSGGIDSSAVVALMQAQSTNRIKTFSIGFYEKEYNEASYAKEVAQHLKTDHHELYLHVDEAARLIPQIPEWYDEPFADSSQIPTYLVSQLARQHVTVSLSGDGGDELFAGYNRYLLAENLWSKLVRFPLWMRQSGSKTINFFSPSAWDKFANVIPRKLRPSSVGDKAHKLAALLTQSSEDLYKGLVSLWERPAELVIDGSDISLWPEPLPDLNFTERMQYIDTLTYLPDDILTKVDRASMAVSLEARIPLLDYRLVEYIWSLPMRFKLERGETKWLLRRVLGKYVPEKLFTRPKMGFGVPIDHWLRCQLREWAEDLLSVPKLEKDGLLHSSLIRQRWQEHLSGKRNWQYSLWSVLMFQLWRERW

SEQ ID NO: 8957 - protein, 125 aa, Glycine max
  misc_feature (61)..(61): Xaa can be any naturally occurring amino acid
  misc_feature (73)..(73): Xaa can be any naturally occurring amino acid
MAAVLNSRKTPQVVAVLVAAALLASSASAAITCGQVGSSLAPCIPYATGRASALPASCCSXVKSLNSAARTSXADRQAACRCLKEARQTAVRSVKHGPSTPIPGRGGGLRRIPHQDGHRLETDSG

SEQ ID NO: 8958 - protein, 447 aa, Yersinia pseudotuberculosis IP 32953
MNGLVSLESFLESLQRRDANQPEYLQAVREVFTSLWPFLEQNPHYREQSLLERLVEPERVIQFRVAWTDDKGHVQVNRAWRVQFSSAIGPYKGGMRFHPSVNLSILKFLGFEQTFKNALTTLPMGGGKGGSDFNPKGKSQAEVMRFCQALMTELYRHLGPDTDVPAGDIGVGGREVAFMAGMMKKLSNNTACVFTGKGLSFGGSLIRPEATGYGLVYFTDAMLKRHGLGFEGRKVSVSGAGNVAQYTIEKAMELGAKVVTASDSGGTVVDEVGFTPEKLAHLAEIKNKRYGTIEDYARERNLVYLAGQQPWSVPVDIALPCATQNELDLPAALQLIANGVKAVAEGANMPTTIQATDAFLEAGVLFAPGKAANAGGVATSGLEMAQNAARMSWKSEKVDVRLHHIMLDIHQSCVEYGGEGKQTHYVHGANIAGFVKVADAMLAQGVL

SEQ ID NO: 8959 - protein, 540 aa, Zea mays
MASSSSLFSPCALTAKLGIGHASYGSGRRANLRRRGRLSVVAVQTGPQKPSPSSSQAAAAEDEADALQKLLKREYKYGFVSDFESFSIPKGLSEATVRRISELKAEPAWMLDFRLAAYRRFLTMVEPTWSDNEYAPVDLQSICYYSAPKTKPKLNSLDEVDPELLKTFDRLGIPLTEQKRLSNVAVDAVIDSTSIATTHREALMAKGVIFCSISEAIREYPDLIRRYLGSVVPPGDNYYAALNSAVFSDGSFCFVPKDTVCPMEISTYFRINDKETGQFERTLIVADERSTVSYLEGCTAPAYDSNQLHAAVVELVCEEGAEIKYSTVQNWYSGDEEGKGGIYNFVTKRGRCKGHGSKISWTQVETGSAITWKYPSVELIGDDSVGEFYSVALTKDCQQADTGTKMIHKGKNSRSRIISKGISAGKSRNCYRGLVLMNPSAENAYNSSQCDSLLIGDNAAANTYPTIQVGCTSGRVEHEASTSKIGEDQLFYFQQRGVDHEKAVAAMIGGFCRSVFEHLPYEFAQEVDALMNLKLEGSVG

SEQ ID NO: 8960 - protein, 373 aa, Oryza sativa (japonica cultivar-group)
MERELLEAFEAARKAADAVGEAAAAAGAGEGESPEAARCVDALRRLRGARVTTAALVSTQIGRRIRYLTKHPHSSIKATASDLLGHWKKVVIEEDKKNGALQNGKSSSTVVKVEKVEPMKVEKASPRATVNNNNMDTRVVNHKGGKVEKFSNAELRTQSIKVEKVQKVVHKVSSVEKPSPVQGGPPRLTSVVKCGDASRDRIRAILGDAFSRVSEETRKDDREEVRNIIEEVKACDPFRIAVMVECALFQKLGNFNGPNKQRYRSLMFNLKDDHNTDFRRRVLLGQVQPERIADLTPTEMASDTRKLENKKIEEKALFECERGGAPKATTDQFKCGRCGQRKTTYYQLQTRSADEPMTTFVTCVNCNNHWKFC

SEQ ID NO: 8961 - protein, 614 aa, Bacillus subtilis subsp. subtilis str. 168
MCGITGWVDFKKQLVQEKQTMDRMTDTLSKRGPDDSNVWGEHHVLFGHKRLAVVDIEGGRQPMACTYKGDTYTIIYNGELYNTEDLRKELRARGHQFERTSDTEVLLHSYIEWQEDCVDHLNGIFAFAVWDEKRNLLFAARDRLGVKPFFYTKEGSSFLFGSEIKAILAHPDIKARVDRTGLSEIFGLGPSRTPGTGIFKGIKEIRPAHALTFSKDGLNIWRYWNVESEKHTDSFDDTVANVRSLFQDAVTRQLVSDVPVCTFLSGGLDSSAITAIAAGHFEKEGKAPLHTYSIDYEENDKYFQASAFQPNDDGPWIEKMTEAFGTTHHKCVISQKDLVDHLEEAVLVKDLPGMADVDSSLLWFCREIKKDFVVSLSGECADEIFGGYPWFHTADVESGFPWMRSTEERIKLLSDSWQKKLNLKEYVNAKYEETLAETPLLDGETGVDKARRQLFYLNMLWFMTNLLDRKDRMSMGASLEVRVPFADHRLVEYVWNIPWEMKMHDNREKGILRKALEGILPDDILYRKKSPYPKTHHPEYTKGVSEWLKTIRSQKDSVLHTLLDRKQLDQLLETEGSSFKVPWFGQLMKGPQLIAHLAQIHTWFEAYRIDIDER

SEQ ID NO: 8962 - protein, 433 aa, Ashbya gossypii ATCC 10895
MHPRVVVTGIGCYTPLGPSLAQSWKELLRGTSGLVRLQDLAEYEGDYKPLSRLISGDLRVGKVGFEARDQELLSSQEQRRTSRAAQLAMVTAEEALRHAGLLSGSHLVASVDRNRAGCIIGAGLPSMEDISQATASLSSARRPSVSPFFIPKMLNNMAAGNVAIKFQLRGASNCPSTACASGNNAIGDAYNFIRLGYSDVIVAGASELSVHPLALAGFVKAKSISASGISRPFDARRDGFVLGEGCGLLVLESLEHARHRGAEIIAEVVGYGVCSDAHHITSPSEGGDGARRAMHMALQDAGIWDTRDQVGYVNAHATSTPLGDRAEARAIQAVFGATGTGSTLVSSNKGHMGHLLGAAGAVEAVFTVQSLREGIVPHTLNLQTVGEGLADKKDGFGGITFVQDNPVPAPLTYAMNNSFGFGGINSSLLFKKW

SEQ ID NO: 8963 - protein, 253 aa, Ashbya gossypii ATCC 10895
MTSTADHKQPISLKVNGALFDVDGTIIISQPALAAFWREFGKDKPYFDAEHVISATHGWRTYDAIATFAPDYLSEEYVTRLEGEIPDKYGKFSVEVPGAVTLCNALNELPKEKWAVGTSGTFEMAHKWFDVLGIKRPSTFITANDVKQGKPHPEPYIKGRNALGFPINEQNPKGSKVIVFEDAPAGIAAGKAAGCKIVGVATTFDVEYLKERGCDIIVKDHRSIRVGGYNPETDEVEFVFDDYLYAKDDLLDW

SEQ ID NO: 8964 - protein, 339 aa, Glycine max
MGSKSETVCVTGASGYIGSWLVMRLIERGYTVRATVLDPADMREVKHLLDLPGAESKLSLWKAELTEEGSFDEAIKGCTGVFHLATPVDFKSKDPENEMIKPTIQGVLNIMKACLKAKTVRRLVFTSSAGTTNITEHQKPIIDETCWTDVEFCRRLNMTGWMYFVSKTLAEKEAWKFAKEHGMDFIAILPALVIGPFLLPTIPSSVISALSPINGIEAHYSIIKQAQFVHIEDICLAHIFLFEQPKAEGRYICSACDVTIHDIVKLINEKYPEYKVPTKFQNIPDQLEPVRFSSKKITDLGFQFKYSLEDMYTGAIDTCIEKGLLPKPAEIPANGIEHK

SEQ ID NO: 8965 - protein, 957 aa, Escherichia coli K12
MTQTLSQLENSGAFIERHIGPDAAQQQEMLNAVGAQSLNALTGQIVPKDIQLATPPQVGAPATEYAALAELKAIASRNKRFTSYIGMGYTAVQLPPVILRNMLENPGWYTAYTPYQPEVSQGRLEALLNFQQVTLDLTGLDMASASLLDEATAAAEAMAMAKRVSKLKNANRFFVASDVHPQTLDVVRTRAETFGFEVIVDDAQKVLDHQDVFGVLLQQVGTTGEIHDYTALISELKSRKIVVSVAADIMALVLLTAPGKQGADIVFGSAQRFGVPMGYGGPHAAFFAAKDEYKRSMPGRIIGVSKDAAGNTALRMAMQTREQHIRREKANSNICTSQVLLANIASLYAVYHGPVGLKRIANRIHRLTDILAAGLQQKGLKLRHAHYFDTLCVEVADKAGVLTRAEAAEINLRSDILNAVGITLDETTTRENVMQLFNVLLGDNHGLDIDTLDKDVAHDSRSIQPAMLRDDEILTHPVFNRYHSETEMMRYMHSLERKDLALNQAMIPLGSCTMKLNAAAEMIPITWPEFAELHPFCPPEQAEGYQQMIAQLADWLVKLTGYDAVCMQPNSGAQGEYAGLLAIRHYHESRNEGHRDICLIPASAHGTNPASAHMAGMQVVVVACDKNGNIDLTDLRAKAEQAGDNLSCIMVTYPSTHGVYEETIREVCEVVHQFGGQVYLDGANMNAQVGITSPGFIGADVSHLNLHKTFCIPHGGGGPGMGPIGVKAHLAPFVPGHSVVQIEGMLTRQGAVSAAPFGSASILPISWMYIRMMGAEGLKKASQVAILNANYIASRLQDAFPVLYTGRDGRVAHECILDIRPLKEETGISELDIAKRLIDYGFHAPTMSFPVAGTLMVEPTESESKVELDRFIDAMLAIRAEIDQVKAGVWPLEDNPLVNAPHIQSELVAEWAHPYSREVAVFPAGVADKYWPTVKRLDDVYGDRNLFCSCVPISEYQ

SEQ ID NO: 8966 - protein, 407 aa, Xanthobacter autotrophicus Py2
MRRVVVTGMGIVSSIGNSTQEVLASLREAKSGISFAEDQAKLGFRCQVQGAPTLNAEEVVDRRAMRFHGGGTAWNHVAMDQAIRDSGLEPSEVSNPRTGIVMGSGGPSTRTIVEAADIARTKGPKRIGPFAVPKAMSSTASATLATWFKIKGVNYSISSACATSNHCIGNAYEQIQYGKQDVVFAGGCEELDWTLSSLFDAMGAMSSKFNATPHKASRAYDVNRDGFVIAGGAGVLVLEELEHAKARGAKIYGEVAGYGATSDGYDMVAPSGEGAERCMRMALSTVNLPIDYINPHATSTPAGDPPEIEAIRKVFGVGEKCPPISATKSLTGHSLGATGVQEAIYCLLMMQNGFICESANIEELDPVFADMPIVRARQDNVKLGAVLSNSFGFGGTNASLVFKHVDA

SEQ ID NO: 8967 - protein, 407 aa, Triticum aestivum
  misc_feature (225)..(225): Xaa can be any naturally occurring amino acid
  misc_feature (256)..(256): Xaa can be any naturally occurring amino acid
  misc_feature (263)..(263): Xaa can be any naturally occurring amino acid
MASPMLSTAMAPLQGGMLEFSGLRSSSSLPLRRNATSDDFMSAVSFRTYAVSTSGGSRKAPTEAKLKVAINGFGRIGRNFLRCWHGRGDSSPLEVIAINDTGGVKQASHLLKYDSTLGIFDADVKPVGDNAISVDGKVIKVVSDRNPSNLPWGEMGIDLVIEGTRRLPSTAPGRGQASPRPGAKKVLITRTPARATSPTYVCGVNADLYTHADTIISNGPPGTNXTASPPFVKVLDQKFGIIKGTMTTTHSYTGDXQRLLDGXHRDLRRARAAALNIVPTSTGAAKAVALVLPNLKGKLNGIALRVPTPNVSVVDLVVQVSKKTLAEEVNQAFRDAAANELKGILDVCDEPLVSVDFRCSDVSSTIDASLSMVMGDDMVKVIAWYDNEWGYSQRVVDLADIVANQWK

SEQ ID NO: 8968 - protein, 327 aa, Mesostigma viride
MTVRFLFEALNMAIDEEMARNDKVALLGEDIGHYGGSYKVTQNLYAKYGEHRVIDTPIAENSFVGAAIGAAMTGLVTVVEGMNMGFILLAFSQISNNMGMLSATSGGHYHIPIVLRGPGGVGKQLGAEHSQRLECYFQSVPGLQIVACSTPYNAKGLLKSAIRSKNPIFFLEHVLLYNLKAEVPDNDYVLPLEKAEIVRQGNDITILTYSRMRYNVIQAVKVLVEKGYDPEIIDLISLKPFDIETIGKSIQKTHKVLIVEESMMTGGISNVLQSLILENFFDDLDNRPMCLSSPNVPTPYSGPLEEVSIVQTADIIESVEQILTNKM

SEQ ID NO: 8969 - protein, 330 aa, Deinococcus radiodurans R1
MKVGINGFGRIGRLVFRILEARGVEVVAINDLTDNHTLAHLLKYDSTAGRFDGTVEYDESSLTVNGKKIQAIAERDPANIKWGEYGADIVIESTGIFTSREGASKHMQGGAKKVIITAPAKGEDFSIVLGVNDEQYDPANHHIISNASCTTNSLGVPMKVIDEAFGIEKAIMTTVHSYTNDQRVLDLPHSDLRRARAAAINIIPTSTGAAKAVSQVYPALKGKFDGTSLRVPTPTGSISDVSVILGRDVTVEEVNNVFREAANGKYKGIMAYTEDPIVLTDIQGDPHSAIIDGGLTMAMGNLVKFFSWYDNEWGYSNRIADLVQLVQNKG

SEQ ID NO: 8970 - protein, 318 aa, Geobacillus kaustophilus HTA426
MADEKIYDVIIAGAGPAGLTAAVYTSRANLSTLMIERGVPGGQMVNTEEVENYPGFETILGPELAAKMFEHAKKFGAEYAYGDVKEIIDGEAYKTVIVGDKEYKARAVIIATGAEYKKLGVPGEAELGGRGVSYCAVCDGAFFKGKDLVVVGGGDSAVEEGVYLTRFANKVTIVHRRDKLRAQKILQDRAFANEKIDFIWNHTVKQINEKDGKVGSVTLVHTQTGEEREFPCDGVFIYIGMVPLSKPFANLGITNENGYIVTNEKMETKVPGIFAAGDVREKTLRQIVTATGDGSIAAQSAQHYVEELKEKLNKQGVS

SEQ ID NO: 8971 - protein, 310 aa, Lactobacillus delbrueckii
MTKEVDVVIIGAGPAGMTAAVYAARANLKTVLLDRGIYGGQMNNTADIDNYPGFVEVQGPELGEKMYQTVQNAGASYEYGDVQAVKLEGDYKRVITDSEEYLAPAVIIATGSEHKHLNVPGEEIYSGHGVSYCAVCDAAFFRDEDVTVIGGGDSAIQEGLYLAQSAKSVTVVHRRDQLRAKPELQEKAFKHPKIKFVWNALTEEIIGEDGKVSGIRYKDKVSGEEKEFATKGVFIYVGVLPVTKALDGLDILDENGWIPTDELMRTRQEGIFAAGDVRPKDLRQVTTAVGEGSVAGQEAYNYLQAKGFLK

SEQ ID NO: 8972 - protein, 112 aa, Alkalilimnicola ehrlichei MLHE-1
MKKVEAIIKPFKLDDVREALSDIGITGMTVTEVKGFGRQKGHTELYRGAEYVVDFLPKMRLEVVIADDQVDRCLEVITKAAHTGKIGDGKIFVSDVERVIRIRTGEEDENAI

SEQ ID NO: 8973 - protein, 406 aa, Arabidopsis thaliana
MFGPTGGLGMNPSMDDMNLIQQAQRHQLVVSNLGEEIDLEIGPGEDDAAFANNSLIGGPPREPSTGEHDETKHMVLVSDLPSEDQDISKGTPAKRKKKVVKRWREEWADTYKWAYVDMKDGTARIFCSICREYGRKHRRNPYGNEGSRNMQMSALEEHNNSLLHKEALRLQTASKDKIVVDKPIYVKTVMSKSAGSIVEGALKRDPNEIEFVQSVQESVHALERVIAKNSHYVNIMERLLEPERMIVFRVPWIDDRGETHVNRGFRVQFNQALGPCRGGIRFHPSMNLSIAKFLGFQQTLKNALSPYKLGGASGGSDFDPKGKSDNEIMRFCQSFMNEMYRYMGPDKDLPSEEVGVGTREMGYLFGQYRRLAGQFQDRGYIGLLLASELKLVAMAWCTLHDLYLQI

SEQ ID NO: 8974 - protein, 430 aa, Agrobacterium tumefaciens str. C58
MQDKILLIEDSVALSMLLRTRLSDETEAEVVHCASMAEADALMQANNFTLALTGLNLPDAPKGEILTLLSERKVPAIVFTATVDEEARKRYAEKKIIDYIVKDGHRTVDAVVKTVDRIMTNKRFSVLVVDDARTARSGLVEILERQNFKVSEAHSGNRALEILSQDPSIQLVITDYHMPDMDGYELTRRIRDSRSSEDLRVIGISSSTDRLLSASFLKAGASDFVYRPFVPEELQCRIDNNIETLKQLKRLRELAERDHLTGLPNRRSFFERTRALMDVINDNDESGAVAILDIDHFKKINDTLGHDAGDRALKKLAELLQGMCDEQRHIPARLGGEEFAVFLRGLDARAAYAFCEELREQVEKNGRQLSGSSLALTISLGVVEIEKGEPFDNQLNAADQLLYLAKANGRNRVYSDIMIQEGLQKIGLNG

SEQ ID NO: 8975 - protein, 606 aa, Aspergillus nidulans FGSC A4
MLEDESGRLRLTGSKLQSVQLATGVIIAVLGTENANGDFEAIDIKVPDLARQPRRWERDEAKAPKEAKKGKIAMVSGLGITGTSSDTLALELLTDYLLGYTGSSKGEEGSPPDASRITRLIIAGNSLGASTIEAAPATDGVPAKKIAHQKKYGYDASAYNASPITQLDSFLAELLPSIPITLMPGESDPANFALPQQPIHRAMFPRSRAYCSAPPIGEDKVEPGWFDSVTNPWEGDVEGWRFWGSSGQNVDDVLRYLDFADEDGNVDMNGDTEARIRVMEAMLRWRCGVPTAPDTLWSYPFQTHDPFVMESCPHLFFAGNQPQFKTAVIEGDLPLRPDGEDTEMGGTAQNAAVPTVRLISLPKFRETAISTSKVLLVPYSKWHVPRYHEWMKDEEIQQATASEPLSLSEEYAMQQSWRNDADKLTFIICLPVAPETDNGNLSLTDEDDAPTRMIGDINLFLRVEEDEEDGDEERNSSNPQIIGEIELMIAEKKDQGKGFGKAALLAFLTYVIEREREVLGEFVVGDEEAKKAIGKEVKELKFGALSVKIGQANERSLKLFEGLGFSKIGDSPNYFGEWELRRKELDIESENLTVDGYREVAYKRIA

SEQ ID NO: 8976 - protein, 476 aa, Lycopersicon esculentum
MNSAPLSTPAPVTLPVRSIPGSYGLPLVGPIADRLDYFWFQKPENFFTKRMEKHKSTVFRTNVPPCFPFFGSVNPNVVAVLDVKSFSHLFDMEIVEKANVLVGDFMPSVVYTGDMRVCAYLDTSEPKHAQIKNFSQDILKRGSKTWVPTLLKELDTMFTTFEADLSKSNTASLLPALQKFLFNFFSLTILGADPSVSPEIANSGYIFLDSWLAIQLAPTVSIGVLQPLEEILVHSFAYPFFLVKGNYEKLVQFVKNEAKEVLSRAQTGFQLTEQEAIHNLLFILGFNAFGGFSIFLPTLLGNLGDEKNADMQEKLRKEVRDKVGVNPENLSFESVKEMELVQSFVYETLRLSPPVPSQYARARKDFKLSSHDSVYEIKKGELLCGYQPLVMKDPKVFDEPEKFVLERFTKEKGKELLNYLFWSNGPQTGRPTESNKQCAAKDMVTLTASLIVAYIFQKYDSVSFSSGSLTSVKKAS

SEQ ID NO: 8977 - protein, 150 aa, Triticum aestivum
MVAGCFITDECALAVSTERMWKAVFSGEDTDVLPKACAGFIDAVDVEGDGGPGSVSTMTLSPAAAELAGSSVMRSRLVARDNAGRVIKTELLEGSKVSAQLKSQGGRGESSRRAGGGWLAVAKPPGWEYPEGLQRVVEGSLDLVRQGPKV

SEQ ID NO: 8978 - protein, 620 aa, Oryza sativa
MAGAFRRSAALQAMAAFSVLALVVPDQVQGRGKCPSFSCGRLSYVHFPFRRQGDPAECGVPSYELTCADSNATIQIDKATYLVTDINYSDQYFWVVDASLDSANNCPLPRWSQTPYNENYRLGEDSHRRVQVQLSPDVDWFATFVKCSQEMNSSNVMYRPVACRSGNSSFVYVLTGLGSYLAENLEPSCGYLAMTPLALGGLENWRTATAAATLEDVNYEDVVRSMSEGFAVRFPFRSGGFIDCLRGLIRFVLVMLLMWTSVAYMYWKIKMRVDEVEKFLQLQQMLTPTRYSYTDIIAITSHYRDKLGQGGYGSVYKGVLLPGDVRVAIKMLKGDANCKGEEFISEVSTIGRIHHVNVVRLVGFCSEEIRRALVYEYMPQGSLDKYIFSSEKSFSWDKLNEIALGIARGINYLHHGCDMQILHFDIKPHNILLDNNFVPKVADFGLAKLYPRDKSFVPVSAARGTVGYIAPEMISRGFGAISSKSDVYSFGMLLLEMAGGRRNADPNAENSSQAYYPSRVYRQLTRQETGEITAAADMHELEKKLCIVGLWCIQMRSCDRPMMSEVIEMLEGGVDCLQIPPRPFFCDDDYIPAMESLYLSSEVELAAISEEEDESITELN

SEQ ID NO: 8979 - protein, 200 aa, Oryza sativa (japonica cultivar-group)
MAVATMALSSSFAAAAAGSAPWRGVVAAGRAAVGFPPRRRAAALVVRAQAEPEVEPTKEEAATSSSPTPTPSPAAAAPRAKPAASTGLWDVLAFSGPAPERINGRLAMVGFVSALAVEASRGGGLLEQAGSGGGLAWFAATAAVLSAASLVPLLRGESAEARSGGVMSADAELWNGRFAMLGLVALAFTEFLTGSPLVNV

SEQ ID NO: 8980 - protein, 469 aa, Oceanobacillus iheyensis HTE831
MNDSDKLLKSLGKKETFALAFGAMIGWGWVVTSGLWITEAGALGAIIAFLLGGLLVVFVGLTYAELSSALPFVGGEHVYTYKAMGRVTSFIATWAIILGYVSVIAFEAVALPTVFEYLVPNYSQGYLYTIAGWDVTLTWAGVGIIGSVLVAWINYRGIKLSSIINFILTILILIAGIMLITGSTFSGNMSNMNPLFETGMTGIMTVLMMTSFMFVGFDVIPQAAEEINLPNKKIGQLLILSVVVAVIWYIAIIFGVSRMLTPSEINASNLVTADAVAKAFGNSEMMGNFLVLGGIGGILTSWIGFYVGGSRAIYALAKAGMLPKSLGQLHPKYNTPHKAILLIAVLSTAAPLLGRPALVWLVNAGGLGLVVAWLMVTISFIILRKKAPEMQRPFRLPGGTTIGWIATIMAIGVTILYLPGMPSALIWPYEWLIIGTWIILGFVLYNYSMRKYGKKNTDDYMKKEVNKSA

SEQ ID NO: 8981 - protein, 187 aa, Oryza sativa (japonica cultivar-group)
MALSSSFAAVAAAAGGAPWRAAVRFPPRRRVALVVRAQAEPEVEPTKEETATSSSPTPSPAAAAPRAKPAASTGLWDVLAFSGPAPERINGRLAMVGFVSALAVEASRGGGLLEQAGSGDGLAWFAATATVLSAASLVPLLRGESAEARSGGVMSADAELWNGRFAMLGLVALAFTEFLTGSPFVNV

SEQ ID NO: 8982 - protein, 547 aa, Coxiella burnetii RSA 493
MSLVESPPWQALKSKYQELSSLHMRDFFAQDKKRGTRLSLEAAGLYFDYSKNRVDEKTIDLLCESANACNLPLRIEQLFSGKLTNESGEMVGFHTALRQVNNFSFKTNNNAIQEIHASWEKIKKLSIRIREGDYKGFTNKSITDIVNIGIGGSSLGPQMAYNALKPYVKAPLRCHFISNLDDTDFYETVRTLNPETTLFIITSKTFTTKETLENARRATEWLMQAAKKENLIQTHFMAVTAAPEKAHEFGIQKDNIFMLWPWVGGRFSVWSAAGLSLAIAIGWEEFFEFLRGAHAMDTHFRQAEFNKNMPILLALLSIWYINFFHAKTQAIIPYSQRLVYLPDYLTQLHMESLGKSVQLDGSAVHWQTGAVVWGDLGTNSQHSFHQLFLQGTMVIPVDFIAVLKNSRESHWQLPLIANCLGQSQTLMEGYDKEGVMRDLINQGIEHEKAEKLATYRLIRGNNPSNTIILEELNPYSLGSLLALYEHKVYVQSVIWNINPFDQWGVERGKHLAKDILQALQAETDQSSFDSSTERLINYVLKIKGNRP

SEQ ID NO: 8983 - protein, 524 aa, Ralstonia solanacearum
MLDADVKAQLKAYLERLVQPIELVASIDDSEGSRDMMDLLRDVAAQSGMIALTEQRDDAERKPSFLIRRTGTDVGVRFAAIPTGHEFTSLVLALLQVGGYAPKLDDDVIEQIRNIEGDFRFETYMSLTCQNCPDVVQALNVMSVINPRIQHVAIDGALFQDEVEARKIMAVPTLFLNGEVLGQGRMGVEEILAKIDTGAAARDAEKLNARAPYDVLIVGGGPAGAAAAVYAARKGVRTGVVAERFGGQVLDTMSIENFISVPETEGPKFAAALEQHVRQYNVDIMNVQRAVKLTPADEPGGLAEVTLANGAVLKGRSIIVSTGARWRNVNVPGEQEYRNRGVAYCPHCDGPLFKGKRVAVIGGGNSGVEAAIDLAGIVSHVTLLEFGDQLKADAVLVRKLESLPNATILTNAQTTEITGNGEKVNGLRYRHRTNGAEHDVALEGVFVQIGLVPNTEWLDGVVERNRFGEIIVDARGHTSVPGVFAAGDSTTVPFKQIIIATGEGAKAALSAFDHLIRVPLAEAA

SEQ ID NO: 8984 - protein, 449 aa, Staphylococcus aureus subsp. aureus NCTC 8325
METSTIISLIIFILLIALTTVFVGSEFALVKIRATRIEQLADEGNKPAKIVKKMIANLDYYLSACQLGITVTSLGLGWLGEPTFEKLLHPIFEAINLPTALTTTISFAVSFIIVTYLHVVLGELAPKSIAIQHTEKLALVYARPLFYFGNIMKPLIWLMNGSARVIIRMFGVNPDAQTDAMSEEEIKIIINNSYNGGEINQTELAYMQNIFSFDERHAKDIMVPRTQMITLNEPFNVDELLETIKEHQFTRYPITDDGDKDHIKGFINVKEFLTEYASGKTIKIANYIHELPMISETTRISDALIRMQREHVHMSLIIDEYGGTAGILTMEDILEEIVGEIRDEFDDDEVNDIVKIDNKTFQVNGRVLLDDLTEEFGIEFDDSEDIDTIGGWLQSRNTNLQKDDYVDTTYDRWVVSEIDNHQIIWVILNYEFNEARPTIGQSDEDEKSE

SEQ ID NO: 8985 - protein, 130 aa, Glycine max
MVFVMASLQTRVFLMALLCLLALGATIIPMAQGEVSCGQVVSNLTPCISYVLYGGATVPAQCCNGIRNLYGMAQTKPDRQAVCNCIKNAVRNSGFTYSHFNLNLAANLPKNCGVNIPYQISPDTDCTRVQ

SEQ ID NO: 8986 - protein, 157 aa, Arabidopsis thaliana
MSDLFPGDFAAAETGIFWDIEDCKIPDDLNAGDALKNIKSALSSDGHHGTVSVRAYGDTTGLDFPSEGIKLNHFPAGERYARQTKMLEDIVSWSAEHPEPSTLFLIVGDTSRDFLDVVQLLKSKKNYNFIIYNFILYVYYQKTEHSYLAPIPSILLI

SEQ ID NO: 8987 - protein, 497 aa, Pseudomonas aeruginosa PAO1
MGTLHHLINGEMVADNGRSADVFNPSTGEAIHKVPLADGKTLQKAIDAARAAFPAWRNTPPAKRAQVLYRFKQLLEQNEARISKLISEEHGKTLEDAAGELKRGIENVEYACAAPEILKGEYSRNVGPNIDAWSDFQPIGVVAGITPFNFPAMVPLWMYPLAIACGNTFILKPSERDPSSTLLIAELFHEAGLPKGVLNVVHGDKEAVDGLLQAPEVKAISFVGSTPIAEYIYAEGTKRGKRVQALGGAKNHAVLMPDADLDNAVSALMGAAYGSCGERCMAISVAVCVGDQVADALIAKLVPQIKALKIGAGTSCGLDMGPLVTAAAQAKVTGYIDSGVAQGAELVVDGRGYQVAGHENGFFLGGSLFDRVTPEMTIYKEEIFGPVLCVVRVNSLEEAMQLINDHEYGNGTCIFTRDGEAARLFCDEIEVGMVGVNVPLPVPVAYHSFGGWKRSLFGDLHAYGPDGVRFYTRRKAITQRWPQRASHEASQFAFPSL

SEQ ID NO: 8988 - protein, 646 aa, Ashbya gossypii ATCC 10895
MENPHVHDNLQHIQAVLSNYDTSFLSDDEEDYCPLCMEPLDITDKNFKPCPCGYQICQFCYNNIRQNPELNGRCPACRRKYDDESVEYIVLSPEELKLERAKQARKERERKQREKERKENEYANRKHLAGMRVIQKNLVYVIGLNPPVPYEEVGALLRSDKYFGQYGKINKIVVNRKTGHNDHQTGYGIYVTFSRKEDAARCIQAVDGTFMDGRQVKAAYGTTKYCSSYLRGQSCPNPNCMFLHEPGEEADSFNKRELSGKQQPHQQPGQQLHQHGSQHLPSQLQSSVHQPAQVHVHQLNAQPHIHHPSPFKGPHNSGAAASNNSNGASAVPSPAQAKAQLHMDDSSSSSTPAAHTPILTPAPLPTGANPWGITQSSTPVSALSKVSSSTAFPTLGEAINTPAPTFNGVQAAASSYNQNGSSKNKKNNDTKNYEDPYDPLCSAVKFIDDTIAFLSDYKCVSYNLRSGLIDDATYASYPSLFSFSNIDVSAESEGILGRKLIDMLAVKPWDQVAATFPAVNEMSPQLQRQVLRQQQMATTPKQQQLVQMQRNNPDPNSQVSPTSQLQQQQLQHSHSQSQQEPPQEPPFSQQQQHRTVVHTPPPGMFVQNGQMSQTQSVPHMVAQTRSNNSTDLLNQLINGKKVTAGT

SEQ ID NO: 8989 - protein, 338 aa, Brassica napus
MGVDYYNVLQVDRNASEDDLKKAYRKLAMKWHPDKNPNNKKDAEAKFKQISEAYEVLSDPQKKAVYDQYGEEGLKGNVPPPDAGGATYFATGDGPTSFRFNPRSADDIFAEFFGFSRPFGGGGGGGTRFSSSMFGDNIFASFGEAGGGGGAMHHGGGARKAAPIENRLPCSLEDLYKGTTKKMKISREIADVSGKTMPVEEILTIDVKPGWKKGTRITFPEKGNEQPGVTPADLVFIIDEKPHPVFTREGNDLIVTQRISLAEALTGYTVNLTTLDGRRLTIPVTNVIHPEYEEVVPKEGMPLQKDQTKRGNLRIKFNIKFPTRLTSEQKAGVKKLLG

SEQ ID NO: 8990 - protein, 318 aa, Acinetobacter sp. ADP1
MINMDVIIHKIHQLTPSIRAFELISANGSDLPAFDAGSHIDVHLKNGLTRQYSLSNCCSEQHRYVIGVLHDENSRGGSRCIHQDYREGDHLNIGTPRNLFEIHSKTQKAVLFAGGIGITPILSMAYRLKHQQIPFELHYFVRSHEMIAFYGNLTEHFPEQIHFHIQNQSETQCEMSKVLEEVAPDRHLYVCGPAGFMQFVMDSAQQAGWSDEQLHQEHFVAPQIDQSQNEAFTIEVLGSDRKIEVSAHQTATQALLEHGFDVPVSCEQGICGTCITRVVSGTPDHRDVFMTDEEHALNDQFTPCCSRAKSKILVIDLA

SEQ ID NO: 8991 - protein, 516 aa, Brassica napus
MAQSSRICHGVQNPCVIISNLSKSNQNKSPFSVSLKTHQPRASSWGLKKSGTMLNGSVIRPVKVTASVSTSEKASEIVLQPIREISGLIKLPGSKSLSNRILLLAALSEGTTVVDNLLNSDDINYMLDALKKLGLNVERDSVNNRAVVEGCGGIFPASLDSKSDIELYLGNAGTAMRPLTAAVTAAGGNASYVLDGVPRMRERPIGDLVVGLKQLGADVECTLGTNCPPVRVNANGGLPGGKVKLSGSISSQYLTALLMAAPLALGDVEIEIIDKLISVPYVEMTLKLMERFGVSAEHSDSWDRFFVKGGQKYKSPGNAYVEGDASSASYFLAGAAITGETVTVEGCGTTSLQGDVKFAEVLEKMGCKVSWTENSVTVTGPSRDAFGMRHLRAVDVNMNKMPDVAMTLAVVALFADGPTTIRDVASWRVKETERMIAICTELRKLGATVEEGSDYCVITPPAKVKPAEIDTYDDHRMAMAFSLAACADVPVTIKDPGCTRKTFPDYFQVLESITKH

SEQ ID NO: 8992 - protein, 399 aa, Mycobacterium sp. JLS
MTVTAYVAVGEELDPQHAEIITATLPLVGAHIDEITKVFYSRMFAARPELLRNLFNRGNQAQGAQQRALAASIATYATHLVDPKLPHPAELLSRIGHKHASLGITADQYEIVHEHLFAAIVEVLGADTVTAEVAGAWDAVYWMMARTLIELERNLYAEAGVDDGDVYRRASVVAREDDPSGAVLLTVRSTGRPFATFRPGQYVSVGVTLPDGARQLRQYSLINTPADGDLTFAVRPLGEVSNWIRANVQAGDVLDVTVPFGDLPDPEAHHRPLVLVSAGIGITPMVGILEHLAAVAPATSVTVWHADRSAVTHPLKERQRELVAALPDATLEVWYEEADADAREGLLDVSAVELPDDAEVYLCGGNGFVQAVRAQLQERGVPNERLHCELFSPNDWLLA

SEQ ID NO: 8993 - protein, 449 aa, Haemophilus somnus 129PT
MSAIVSLEDFLAKVEQRDGHQPEFLQAVREVFTSIWPFLEKNPKYRSEALLERLVEPERAFQFRVAWTDDKGQVQVNRAFRVQFNSAIGPFKGGMRFHPSVNLSILKFLGFEQIFKNALTTLPMGGGKGGSDFDPKGKSDAEVMRFCQALMAELYRHVGADTDVPAGDIGVGGREVGYLAGYMKKLSNQAACVFTGRGLSFGGSLIRPEATGYGLVYFAQAMLAEKGQSFAGKTVVVSGSGNVAQYAIEKALQLGAKVVTCSDSSGYVYDPEGFTQEKLTALLDIKNVKRGRVKDYAEQFGLQYVEGARPWGVKADIALPCATQNELELSDAQQLIANGVQLVAEGANMPTTIEATDAFLEAGVLFGPGKAANAGGVATSGLEMAQSSQRLYWTAEEVDEKLHRIMLDIHANCKKYGTVEGQENINYVVGANVAGFVKVADAMLAQGVY

SEQ ID NO: 8994 - protein, 497 aa, Magnaporthe grisea 70-15
MVKLEDVSSSLLQKPSNSNDSEIPLERRQSSYKSLKTFALDKEKQYQQQYGDMYFLRLTKIKPAVEEIASTAFGDLVIGGEPARQVPRVLDVRQGELCWVAGTVYMDMPLKPSILEDVAKDRWISAPTSVQKYFSKDGRDSILLEDDSGRVRLVGDILKSVVLVTGCIIAVMGTENASGEFEVIDLKFPDLAPQPERWSLSKPADDDVEMGNGGYSSNRGKTAILSGLNFSSTDTSYAMELNLLLEYLLGDALDPIAQKDISQISRLIVAGDSISPDTGKPAAEEEVAGKKVHKKYGYDASSYNPIPSQLLDEFLSELLPTIPVTFLPGAHDPANASYPQQPIHPAMFTKSRTYSALPGPTAEPGWFDTVTNPWEGEVEGWRVLGTSGQNVDDVFKYVDSDDRLGMMEAMCRWRCSAPTAPDTLWSYPFQDDDPFVMNQCPHLYFVGNQPEFGTKTITGTEGQEVRLITVPTFSASRELVLVDNETLEVTRVKISAT

SEQ ID NO: 8995 - protein, 435 aa, Fusobacterium nucleatum subsp. nucleatum ATCC 25586
MSAASKAKRIDKSLDITVYEMTDAISWGACGLPYYVGDFYPNASLMVAKTYEEFQKEGINVKIKHKVENIDFKNKRIFVRNLNENKVFEDNYDKLVIATGASSTSPKDIKNLDAEGVYHLKTFNEGLEVKKEMMKKENENIIIIGAGYIGIEIAEAALKLGKNVRIFQHSARILNKTFDKEITDLLENHIREHEKISLHLNESPVEVRTFEDKVIGLKTDKKEYVANLIIVATGVKPNTEFLKDTGIELFKNGAIIINRFGETNIPNVYAAGDCATVYHSVLEKNVYIALATTANKLGRLIGENLTGTNKVFIGTLGSAGIKVLEFEAARTGITEQEAKDNNINYKTIFVDGEDHSAYYPGGEDVYIKLIYNADTKILLGAQLAGKRGAALRTDSLAVAIQNKMTVQELANMDFLYAPPFATTWDIMNVAGNVAK

SEQ ID NO: 8996 - protein, 99 aa, Triticum aestivum
  misc_feature (61)..(61): Xaa can be any naturally occurring amino acid
  misc_feature (72)..(72): Xaa can be any naturally occurring amino acid
  misc_feature (80)..(80): Xaa can be any naturally occurring amino acid
ALAPCVAYAKGSGTSPSGACCSGVRKLAGLARSTADKQATCRCLKECCRKGQPQQAASIPXNCGVQLPYTIXRSLGCPKXHWIHFAAPPPDYPDLMLTF

SEQ ID NO: 8997 - protein, 119 aa, Leptospira interrogans serovar Lai str. 56601
MSLICIVGKKEKESKMALAEVNDTNFKSETSGGLVLIDCWAEWCGPCRMVAPVLEELSGELDGLVKIKKLNVDDNQDTAQSLGISSIPTLLLYKDGQLVDKVIGALPKAQIKNFIERHK

SEQ ID NO: 8998 - protein, 480 aa, Capsicum annuum
MIPIMSSAPLSTATPISLPVRKIPGSYGFPLLGPLWDRLDYNWFQKLPDFFSKRVEKYNSTVFRTNVPPCFPFFLGVNPNVVAVLDVKSFAHLFDMEIVEKANVLVGDFMPSVVYTGDMRVCAYLDTSEPKHTQIKNFSLDILKRSSKTWVPTLVKELDTLFGTFESDLSKSKSASLLPALQKFLFNFFSLTFLGADPSASPEIANSGFAYLDAWLAIQLAPTVSIGVLQPLEEIFVHSFSYPYFLVRGGYEKLIKFVKSEAKEVLTRAQTDFQLTEQEAIHNLLFILGFNAFGGFTIFLPTLLGNLGDEKNAEMQEKLRKEVREKVGTNQENLSFESVKEMELVQSFVYESLRLSPPVPSQYARARKDFMLSSHDSVYEIKKGELLCGYQPLVMKDPKVFDEPEKFMLERFTKEKGKELLNYLFWSNGPQTGRPTESNKQCAAKDAVTLTASLIVAYIFQKYDSVSFSSGSLTSVKKAC

SEQ ID NO: 8999 - protein, 142 aa, Coffea canephora
RRHNSATPEEQIKMVENCGFPSLDSLIDATVPKSIRLDGMTFSKFDEGLTEAQMIDHMEKLASKNKVFKSYIGMGYYNTFVPPVILRNLLENPAWYTQYTPYQAEISQGRLESLLNYQTMIADLTGLPMSNASLLDEGTAAA

SEQ ID NO: 9000 - protein, 240 aa, Gloeobacter violaceus PCC 7421
MVARAGSLKISSMNDKLIVRDYFNNTGFERWRRIYGDEAVNRIQHSIRVGHQRTCERVLEWLGDVHDQSICDAGCGLGSLSFPLAERGARVFATDISEKMILEARRRQKSRLPDSDNPRFEVLELEQIDGRYDTVVCLDVLIHYPLDQVEKMLAHLSNRAGEHLILTYAPKTLLFAALKKVGEFFPGANKTTRAYQHRSEDIEAILTRLGWKILRRAAIDDKFYFARLVMTARSASAVAA

SEQ ID NO: 9001 - protein, 105 aa, Brassica napus
  misc_feature (58)..(58): Xaa can be any naturally occurring amino acid
  misc_feature (85)..(85): Xaa can be any naturally occurring amino acid
  misc_feature (91)..(91): Xaa can be any naturally occurring amino acid
IPNRIADPNYVRIFETTLGDGEQSAGATLTSNEKLDIARQLAKLGVDIIEAGFTTASXDDFDAVKTISETVGNAVDENGYVPSTXGLSTGXKKDIQTAWEAVRYA

SEQ ID NO: 9002 - protein, 433 aa, Mesorhizobium loti MAFF303099
MRRIVVTGMGAVTPLAANVEASWSRLLAGRSGIRRLPDDVVGDLPAKIGGVVPSLDEDPGAGFDPDGILAAKDQRRVDRFILFALAAAEEALAQAKWKPALETDRLRTATIIASGVGGFPAITEAVRTVDLRGARRLSPFTVPSFLVNLAAGHISIRHGFKGPLGAPVTACAAGIQAIGDAARLIRANEADIAVCGGTEACMNTVSLGGFAAARSLSTGFNWAPAQASRPFDISRDGFVMGEGAGVLVIEALGHALARGAKPLAELVGYGTTADAYHVTSGPEDGGGARRAMEIAIAQAGISPSEVRHLNAHATSTPVGDLGEIEAIKSVFGRDLAIAVSATKSATGHLLGAAGGLGAIFSILAIRDQVAPPTLNLSAPDPAADGIDFVANEPRPMEMEYAISNGFGFGGVNASALFRRWIAPAARRERQGQS

SEQ ID NO: 9003 - protein, 170 aa, Oryza sativa
  misc_feature (121)..(121): Xaa can be any naturally occurring amino acid
MALVEGNNGVSGGAVSFSEEQEALVLKSWAIMKKDSANIGLRFFLKIFEVAPSASQMFSFLRNSDVPLEKNPKLKTHAMSVFVMTCEAAAQLRKAGKVTVRDTTLKRFGATHFKYGVGDAXHFEVTRFALLETIKEAVPVDMWSPAMKSAWSEAYNQLVAAIKQEMKPAE

SEQ ID NO: 9004 - protein, 606 aa, Dechloromonas aromatica RCB
MSTPVESFADLGLSETLLQTLTQIGYETPSPIQAQCIPVLLEGHDLIGMAQTGTGKTAAFALPLMEQIDVKLTKPQALILTPTRELAIQVAEALQTYAKNLPGFHVLPIYGGQSYTIQLKQLSRGAHVIVGTPGRVMDHLERKTLNLDHLKTMVLDEADEMLRMGFIDDVEWILERTPAQHQTALFSATMPEQIRRVAQKYLVEPREIKIKSATATVAAIRQVYWQVSGMHKLDALTRILEVEEDFDAAIIFVRTKTATVELADKLSARGYAAAALNGDLNQQMRERVIEQLKSGALDIVIATDVAARGIDVPRVSHVVNYDIPYDTEAYVHRIGRTGRAGRTGNAILFVAPREIRMLRTIERATRSPIAPLTLPSRADVTNKRVADFKSKVVEVLNAEGLDFFSNIVSQIAEEQNVGAEEVAAALAMMAQEGKPLQIAGEDPRPAPAPRPGSFGESDRKPRFEDRGDRPRFEDRGERPRREDRPARQAPAGDMVRYRIDVGRDHGVEVRDIVGAIANEAGIESRFIGRIGLYEDSSTVELPAGMPAEASNALKRTRIRGVPINLRPDEGRPGAGGAGGGERKFGGGDRKPEGDRGGFKKKKFGDR

SEQ ID NO: 9005 - protein, 484 aa, Oceanobacillus iheyensis HTE831
MAELKAITTYQMYINGEFVNASNNETLEVTNPATEEIVSTVPKASLEDTRRAIDGSAKAQKDWANLPSSKRASYLFAISKEIRSNIDEYAKIISEEMGKPLDQAVVEVSVTADYFEYIAGWARKYEGEIVPSDREKENILVFKQPIGVVAGILPWNFPFFLIARKAAPAILTGNTIVLKPSSVSPNNALAFAKILDKVGLPKGVINIVTGAGSIVGEELSKNEKIGMISLTGSTEAGSRVMEKASKNITKVSLELGGKAPSIVMEDADIDLAVKSVLDSRIINTGQVCNCTERVYVHEDVADEFIEKITKAMSNVSYGNPLGNEQIDMGPLSNEAGLKNVEDMVKRAVENGATVLTGGNRVNTEAGYYYEPTVLSNVDNSFEIMKEEVFGPVLPIATFTSLDEAIELANDCQYGLTSAIFTNNVNYMMRASNELEFGETYVNRESFEAIQGFHAGWKKSGIGGADGKHGLGEFLQTHVVYIQYK

SEQ ID NO: 9006 - protein, 427 aa, Lactobacillus plantarum WCFS1
MEFSLDSTQNSGANIKVIGVGGGGGNAVNRMIAEDVKGVEFIVANTDVQALQTSNAETKIQLGPKLTRGLGAGSNPDVGSKAAQESEEALTEALQGSDMVFVTAGMGGGTGNGAAPVVAKIAKDSGALTVGVVTRPFTFEGPKRARNAAEGIAQMKDNVDTLIIIANNRLLEIVDKKTPMMEAFQEADNVLRQGVQGISDLITSPGYVNLDFADVKTVMQNQGSALMGIGSASGENRTADATKQAISSPLLEVSIDGAEQVLLNITGGPDMSLYEAQAASDIVSQAATTDVNIIFGTSIDESLGDEVRVTVIATGIDQKQRELKMDSQPSRSEASQQRGGMFATPTDQPATSEAAQSSESQANDPFGNWDIRREPNNSRPVNNGQEFNNVEKTDFDVFNDNSQADDSKDDNSGDSLDTPPFFKRRRK

SEQ ID NO: 9007 - protein, 291 aa, Vibrio vulnificus CMCP6
MNDDNSQNSEGPSRKSFFGRLGQLFQGEPKDRQELVDVIRDSEVNDLIDHDTRDMLEGVMEIAEMRVRDIMIPRSQMVTIERKDNLDSLIALITDAQHSRYPVISEDKDHVEGILLAKDLLKYLGSDSAPFDIEEVIRPAVVVPESKRVDRLLKEFRQERYHMAIVVDEFGGVSGLVTIEDILEEIVGDIEDEFDEEEDADIRKLSKHTYAVKALTTIEEFNETFGSRFSDEEVDTVGGLVMTAFGHLPTRGEIVEIDGFNFKVTAADNRRVIQLQVTVPDSVSVAETTPE

SEQ ID NO: 9008 - protein, 429 aa, Lactobacillus reuteri
MTELNSAKEQIIAASKANNEPQQLIDRRLSAWELMEKLRLPRMQRFDFRTWPLIAERPLKWVESDADLVKKPVTDDEVIKVTQFGQTLLHVNLPQKLQDQGVILTDIFTAAREYPELFNKYFMTAINPEENLLTAYHLAYLNAGLFLYIPKNVEIEKPIEAEIIQDSTQDEPLISHILVIADRGSRIKFIQHLTTVGDHENAANMMIELMAQENSEIDFSSLDEFGPHTHTYFKRRADIGKDAHVEWAVGLMNDGATVGDMDSELLGDGGYANSKMIAVTTRDQEVGVNNRVTNHGKHTTGLINQRGVILEKSELIFNGIGQIIHGAHGAKADQQNRVLIMSDQARGDANPILLIDENDVEAGHAASVGPVDQQQMYYLMSRGIPRAQAERMVIRGFLGAVLSAIPAADVRNKLITILERKLADGQQYE

SEQ ID NO: 9009 - protein, 223 aa, Enterobacter cloacae
  misc_feature (25)..(25): Xaa can be any naturally occurring amino acid
IWYNNFFGAETEAILPYDQYMHRFXAYFQQGNMESNGKYVDRNGNAVDYQTGPIIWGEPGTNGQHAFYQLIHQGTKMVPCDFIAPAITHNPLSDHHPKLLSNFFAQTEALAFGKSRDVVEQEYRDQGKDPATLDHVVPFKVFEGNRPTNSILLREITPFSLGALIALYEHKIFTQGAILNIFTFDQWGVELGKQLANRILPELGDDNAINSHDSSTNGLINRY

SEQ ID NO: 9010 - protein, 159 aa, Mycobacterium sp. JLS
MTIEPRATADLVDDIGPDVRSCDLQLRQFGGRPEFAGRVTTVRCFQDNALLKSVLSEPGDGGVLVIDGDGSLHTALVGDVIAALGRDNGWSGLIINGAVRDASTLRTLDIGIKALGTNPRKSTKTGAGERDVPVEFGGVTFTPGDVAYSDDDGIVIVTP

SEQ ID NO: 9011 - protein, 286 aa, Helicobacter hepaticus ATCC 51449
MTLLDGKSLSVTIERDLTEQIAALVSQGVTPGLAVILVGNNPASCAYVQMKAKACKRVGIYSVTHEMPSKITQDELLSVIEILNNDPNIDGILVQLPLPAHIQTSKVLEAINPKKDVDGFHPFNIGRLSVNVDTFVPATPLGVMKLLESYHIDVRGKDVVIIGMSNIVGKPLMSLMLNAGASVSCCHILTRDVKQYTKNADIVCVAVGKVGLLSADMIKEGAVVVDVGINRLESGTLVGDVDFENVAPKSSFITPVPGGVGPMTIVSLLQNTYKAAMYRLEQRMRV

SEQ ID NO: 9012 - protein, 223 aa, Enterobacter cloacae
IWYNNFFGAETEAILPYDQYMHRFAAYFQQGNMESNGKYVDRNGNAVDYQTGPIIWGEPGTNGQHAFYQLIHQGTKMVPCDFIAPAITHNPLSDHHPKLLSNFFAQTEALAFGKSRDVVEQEYRDQGKDPATLDHVVPFKVFEGNRPTNSILLREITPFSLGALIALYEHKIFTQGAILNIFTFDQWGVELGKQLANRILPELGDDNAINSHDSSTNGLINRY

SEQ ID NO: 9013 - protein, 365 aa, Listeria monocytogenes str. 4b H7858
MEKNIDVLQNWLKDQGAEVAFLTDPENIAYFSGYHSEPHERVLGLAVFPDSEPFLFTPALEVEDVRGGDWTHPAYGYNDTENPFTIIADEIKKRVANPSKFAIEKKHMSVDRYEQLGGLFSGSSFIPIEHKIEQIRLIKTEAELKILKEAALLADYAVQVGVNEIAEGKTEAEIVAKIEYEMKKKGVTAMSFDTMVLTGKNGALPHGTPGETKIKKGDLVLFDLGVVHKGYCSDITRTVAFGDISDEQKKIYDTVLEAQIAAVEKVKDGVKASEIDLTARNIIREAGYGDYFPHRLGHGLGASVHEFPSITETNNMELQENMVFTIEPGIYVPGVAGVRIEDDLVVTKDGVQVLTEFPKTLQVID

SEQ ID NO: 9014 - protein, 218 aa, Glycine max
MATISAVQVEFLEFPAVVTSPASGKTYFLGGAGERGLTIEGKFIKFTGIGVYLEDKAVPSLAAKWKGKTSEELVHTLHFYRDIISGPFEKLIRGSKILPLAGAEYSKKVMENCVAHMKSVGTYGDAEAAAIEKFAEAFKNVNFAPGASVFYRQSPDGILGLSFSEDATIPEKEAAVIENKAVSAAVLETMIGEHAVSPDLKRSLASRLPAVLSHGIIV

SEQ ID NO: 9015 - protein, 115 aa, Glycine max
MARTAATKLVLVALVAAMLLVASDAAISCGQVNSALASCVSYAKGSGASPPGACCSGVRRLAGLARSTADKQAACRCIKSAAGGLNPGKAASIPSKCGVSIPYSISASVDCSKIH

SEQ ID NO: 9016 - protein, 264 aa, Pyrococcus furiosus DSM 3638
MRRIFVQNRELVVPGTLLAQGPYKNGRGTFKEGSRIYSTVIGLVDIKGNTIRVIPLEGPYIPEVGDNVLGKIVDVKFSSWTVDIGSPYSATLKIQDYTDEKIDLLRTDLRKFFDIGDIIYAKVKGINEVNNIELTTKGMPFNGGPLRGGQIIKITSSKVPRVIGKGGSMINMIKKLTQSRIIVGQNGWIWISSKNPELEKLAIEAILKIERESHTRGLTDRIKNMLLSKLQELKERGVIEEIPSLEEETQEETVMENDVEARGP

SEQ ID NO: 9017 - protein, 103 aa, Zea mays
MATGSEASKAAEAVVDWHKQDNKRMLHAVYRVGDLDRTIKYYTECFGMKPLRKRDVPYEKYTNAFLGFGPENTNFAVELTNFAEVSRPACVAPLPGSVLAVPL

SEQ ID NO: 9018 - protein, 498 aa, Geobacillus kaustophilus HTA426
MSMNWGMAMHNDQPLIFERSKPGRIAYSLPALDVPAVDVSELVPADYLRTEEPELPEVSELDLMRHYTALSKRNHGVDSGFYPLGSCTMKYNPKINENVARLAGFAHIHPLQPEKTVQGALELMYDLQEHLKEITGMDAVTLQPAAGAHGEWTGLMMIRAYHEANGDFNRTKVIVPDSAHGTNPASATVAGFETVTVKSTADGLVDLEDLKRVVGPDTAALMLTNPNTLGLFEEQIVEVAEIVHAAGGKLYYDGANLNAILGKARPGDMGFDVVHLNLHKTFTGPHGGGGPGSGPVGVKADLVPFLPKPVIEKGENGYYLDDDRPQSIGRVKPFYGNFGINVRAYTYIRSMGPDGLKAVSEYAVLNANYMMRRLADYYDLPYDRHCKHEFVLSGRRQKKLGVRTLDIAKRLLDFGFHPPTIYFPLIVEECMMIEPTETESKETLDAFIDAMIQIAKEAEENPEIVQEAPHTTVVKRLDETTAARKPILRYQKPKHSDN

SEQ ID NO: 9019 - protein, 448 aa, Geobacillus kaustophilus HTA426
MLHRYLPMTEEDKQEMLKTIGVASIDDLFADIPEQVRFRGELKVKPAKSEPELWKELAALAEKNASVKQYVSFLGAGVYDHYIPAVVDHVLSRSEFYTAYTPYQPEISQGELQAIFEFQTMVCELTGMDVANSSMYDGGTALAEAVLLSAAHTKRKKVLISTAVHPQYREVVRTYAKGQKLEVKEIPYDGGITDLKALEAEMGDDVACVVVQYPNFFGQIEPLKAIAPLAHEKKSLFVVASNPLALGVLTPPGAFGADIVVGDMQPFGIPTQFGGPHCGYFAVKAPLMRKIPGRLVGQTTDEDGRRGFVLTLQAREQHIRRDKATSNICSNQALNALAASVALSALGKRGVKEMAAMNIQKAHYAKVELEKRGLSSPFAGPFFNEFVIRLGRPVSDVNDRLLEKGIIGGYDLGADYPELAGHMLVAVTELRTKEEIDRFVNELGDGHA

SEQ ID NO: 9020 - protein, 246 aa, Methanosarcina barkeri str. fusaro
MSGSTVYECLTYRNENINQALEALRAGKMIQIYDSDTREGETDLVIPAKAVTFKDVKWMRKDAGGLICVAVDPVASKQLRLPFMAELVREASKTSDVLGEIAEKEGDLKYDAHSSFSLWVNHRETRTGIPDNERALTIRKIGEITEKKLSGDVIHFGEEFRTPGHVALLRAAEGLLDERKGQTELSVALARMAGITPAMVVCEMLDDNNGKALSKEDSKEYGKEHELVFLEGQEIVEAYMMWAGSE

SEQ ID NO: 9021 - protein, 509 aa, delta proteobacterium MLMS-1
MSNDDIVHFSQLPLAPAVSQAVAEIGYETPTPIQAAAIGPLLAGRDLLGQAQTGTGKTAAFALPLLSRLDTSRKYPQLLVLAPTRELALQVADEIQAYSRHLPGFQVLPLYGGQNMAQQLRALQRGVQAVVGTPGRIQDHLRRGTLKLDRLTAVVIDEADEMLKMGFVDEVEKILAQTPPQRQVALFSATMTQEIMRIARRHLKDPEEIRLKTRTTTVETISQHYWLVQGLQKLDALTRILEAEAVEAMLIFVRTKVATVELAEKLAARGFASAALNGDMTQGLREKTVEQLKDGTLDIVVATDVAARGLDVQRISHVVNYDIPYDTESYVHRIGRTGRAGRQGQAIIFVAPREMRMLHAIEKATRQQISRLQLPSRREVNQRRIDQFKEKIIAASRQPGLEFFEELIAQATAEAEIDSQQLAAGLAYLLQQARPLLPEEGGPPPAEEQQQRPRPQGPRKPAPTGRLRGQYPGRRESPSRKGKAQGKAQGKRTPQGRTGGGPTTHRKKP

SEQ ID NO: 9022 - protein, 142 aa, Coffea congensis
RRDNSATPEEQIKMVENCGFPSLDSLIDATVPKSIRLDGMTFSKFDEGLTEAQMIDHMEKLASKNKVFKSYIGMGYYNTFVPPVILRNLLENPAWYTQYTPYQAEISQGRLESLLNYQTMIADLTGLPMSNASLLDEGTAAA

SEQ ID NO: 9023 - protein, 142 aa, Coffea eugenioides
RRHNSATPEEQIKMVENCGFPSLDSLIDATVPKSIRLDGMTFSKFDEGLTEAQMIDHMQKLASKNKVFKSYIGMGYYNTFVPPVILRNLLENPAWYTQYTPYQAEISQGRLESLLNYQTMIADLTGLPMSNASLLDEGTAAA

SEQ ID NO: 9024 - protein, 410 aa, Streptococcus pyogenes MGAS10394
MTFKRVVVTGYGLTSPIGHDPETFWNNLKAGQIGIGPITKFDTTDYAVKNAAEIQDFPFDKYFVKKDLNRFDRYSLYALYAAKEAINHADLNIEMIDSDRFGVIVASGIGGIAEIEEQVIRLHEKGPKRVKPMTLPKALPNMAAGNVAMSLKAQGVCKSINTACASSNDAIGDAFRAIKFGTQDVMIVGGSEAAITKFAIAGFQSLTALSTTEDPSRSSIPFDKDRNGFIMGEGSGMLVLESLEHAQERGATILAEIVGYGNTCDAYHMTSPNPEGLGARKAIHLALQEAGIEASAINYVNAHGTSTPANEKGESQAIVAVLGKDVPVSSTKSFTGHLLGAAGAIEAIATIEAMRHNYVPMTAGTQALSEDIEANVIFGEGKETAINYAISNTFGFGGHNAVLAFKCWEE

SEQ ID NO: 9025 - protein, 361 aa, Synechocystis sp. PCC 6803
MGEIKRIGILTSGGDCAGLNAVIRSVVHHAIGTYGWEVIGIQEATQGLMENPSKAIALHRDNIDHLLMMGGTFLGTTNKGNPFAFPMADGTVRDRTEDIIAGYRQLGLDALIGIGGDGSLAILRRIAQQGGINLVGIPKTIDNDVGATEISIGFDTATNIATEALDRLHFTAASHNRVMVLEVMGRDAGHIALAAGIGGGADIILIPEIPYRIQSVCNKIRQRQAEGKNFCLVMVSEAVRTELGDQVKQIQQFGEDRYGGIGKYIAEQIAQRTGAETRVTVLGHIQRGGIPSPFDRLLGSVFGVAAVDLIAEGKFDHMVAWRNRQTISVPIEEAIQTYQTVQLDGTLVKTARGLGICLGND

SEQ ID NO: 9026 - protein, 410 aa, Methanothermobacter thermautotrophicus str. Delta H
MLRDTLKKAEKAREKKALYGEDIDLEKFIKEEAGEHEEVTRAKEVPKEVQETLLRVGVDPEERERAGTFIQVDQSGICTTCASESIEIMGMNVALDKYSWLKDYMWKAVAVDTDKYTATTALREAEGEMGGYFIRSKPGAREVFPLQACMFIGDERVMQTAHNIVIAEENSELHIITGCATGEDVSSALHVGVSEFYLKKGARITFTMVHNWAEQVEVRPRTGIMVGDDATYINNYILTSPVKSIQSYPTAYCTGENSRVVFQSILGGQKDSVLDMGSRVILEGRGSSAEMVSRAVSKDSSQIYSRGHLAGRVPEVKGHLECHGLVLSDDSMIYAVPELEGSATELEMSHEAAVGKIAEEEVMYLTSRGLTEEEAASMIVRGFLSMDITGLPPELAAETKRMLDMSLKGM

SEQ ID NO: 9027 - protein, 484 aa, Zea mays
GDPYLQHCVETAVLLAKIGANATVVSAGLLHDSIDDSFIDYDHIFHIFGAGVADLVEGVSKLSHLSKLARDNDTASRTVEADRLHTMLLAMADARAVLIKLADRLHNMKTLEALPWVKQQRFAKETREIFVPLANRLGIASWKEQLENLCFKYLNPEEHRELSSKLTESFDEELITSAVDKLDKGLRDAGVSYHNLSGRHKSVYSIHSKMLKKNLAMEEIHDIHGLRLVVDNEEDCYEALCVVHRLWPRVTGRFKDYISRPKLNGYRSLHTVVMGEGVHPLEVQIRTKEMHLQAEYGFAAHWRYKEGRTCRHSFVLQMVEWARWVLTWQCEAMDKERTASSLGSGDAASARPPCPFPLHSEDCPYSYTRQCNHDGPLFVILLEHDKMSVQEFPADSTVMDFMDRAGANSSRWSPYSIPVKEDLRPRVNREPICDPNRKLSMGDVVELTPALPRRSLSGYREEIQRMYDRGGFALSAQGGGSRRC

SEQ ID NO: 9028 - protein, 356 aa, Bifidobacterium longum DJO10A
MHTSRGDLKTFGILIATGASPRKLGFEGEAEYAGRGVAYCATCDGEFFTGKEVLVVGGGFAAAEESVFLTKYASKVTVLVREPDFTCDAAVAAEAKNNPKIDVRYQVELKGVTAGQGGLREASILNLATGQTETWKPADAGTFGVFVFAGYVPATDLVRGVVELDDHGYVVTHDYLRTSVPGVYAAGDLRVKNLRQVVTATADGAIAAVELERYAKQMSEKTGLVPPRPTASAYEESEAKAASAASAAGTTPAPAPAKRSADAAAAASAAKKPGELFSAAVKQQLGVVFGRMTRPVTLALELDGTPLSAELQGFIGEMVALSGGKLNSVAVDAAGLITAVDGASVPTSLVVGEPLS

SEQ ID NO: 9029 - protein, 1574 aa, Coccidioides immitis RS
MDGQRQQPYVPGPPPQTIQQTASQGHVMQLPPPPPQPPPPRVTHAASHGGLPPPPPVPPRVSGYGNQPGWQQAWSRQQGMGQSFYLPPPPSMLSSNQVYNQPLAYNPHQPPNSGSLSIQPPPTNDQPLTSATYIPGGSSFGPGVGIPPLDSYDNFSRADRAGYPPDSDTMRYIPQSYADQMNRSHQVPSSFREQSDSGNPLALNQNVHGQSSLQHSQGPTRENSSRHATSAISSGLSIHEADERWPLDRVLQWLVHNGFSTEWQETFKSLDLKGADFIDLGCGGANGMGNLGKMHQDIYPQLAKECVKSGTGWDQSREREEGVRMRKLIRGINSENAPSARFYENLHPSASTDGGVETSPHLRADSFPFDPSSTESGYQEPSSRSELSRNILVNAFGEWRRHSPSASSDHGAGLRASSNSRAGSPATQFASMATAEPAFLTGEFGHAKRNSSDSIISRGLRQAQGSSNPDHSTKQTELSTKDHKGFLNAIRKKIGPSHPSEEPHHDASISPVRNNQSFPYSGKPSLNASETSLVMGMSLPSSESHARKAISNLPPKKFIFVTLDGWNYRLVDVTDVDAADLLRARLCNGVGIKDPSSALIYVTEPGQVDHEEPLSDTMLVVNRRSRSDAQGSLKLYIQSMTPSAFNVSQYAGLGLSFSDRVANGAKPQRNILEDDTRNRTNQPSHTRRVSPSLAHRSSMQNLPSYSPFPEDDRLGENLSEDKERNAAILAAHEEHRRITEQKQQAFLQSRREQLQKKQASTVTTYGIKRGGFIDFDLPRTSPYEDKRTDDLVPRREPPTAPSASSTLTKVNSLNKKPGEKATDNTCHQRRSSKDFLSDNRQRSSSFSPKNASPSMGIAAAIANMGKISGSIAKPLASSTSFGHSPRTPSGSEFGRFSTESVDAGSASPHCGSSSSPRPSAFARSVSANSEIIARKSTPTQAESTPPDKSVHSFSASPSRASAIPPSRLSHGPDFDFQETEVSFVKSPQPAPQDSDEDSDEGLFAIPLANGKNKPQVNKKPPATRSRLAKPALTVNTNSRAAKGLSVTFESPGPCDSFTPLTDHSDSRSGHYSGDPDTDDLSPEDSRSARRRSFVRDDVWASRPPVEGMIEHLDDFFPNIDLDEPYLEAMPLTPPISPTATSSHPDTEPEQSFTLRDRVGQGGPPTTSIPRNASDTLGSDESTLKGKAAPKTVAHRNVGRSTGLSRMKSIREVAKGAHQIRRNQSIAASKNAQSGMLRRKSTKMFGARIMQISPKPGSRLSDLDPLPQHPVPQEKLPQRQATFRIIRGQLIGKGTYGRVYLGMNAETGEILAVKQVEVNQKAAGYDKDRIKEMVQAMDHEIDTMQHLEHPNIVQYLGCHRSELSMSIYLEYIPGGSIGSCLRKHGKFEESVVQSLTIQTLRGLAYLHDKGILHRDLKADNILLDLDGTCKISDFGISKKSDNIYGNDVTNSMQGSVFWMAPEVVQSQGQGYSAKVDIWSLGCVVLEMFAGRRPWSKEEAIGAIFKLGSLNQAPPIPEDVSMNICPAAIAFMYDCFTINTFDRPTAETLLSQHPFCIPDPNFNFLDTELHAKIGHL

SEQ ID NO: 9030 - protein, 174 aa, Arabidopsis thaliana
MLVGENCVHETYYEILSVKEDASYEEIRNSYRSAILHSHPDKLNNTSRSSSDDEKFLKIQKAWEVLSDAELRVVYDNDLRSSRHDGITADEISIEDMSVEITGDVIDLFYQCRCGDYFCVDSSELGTMGFALLRDGDFVYVKRLGAFVASVVLPCGSCSLKTRVWVDSDMKIPI

SEQ ID NO: 9031 - protein, 179 aa, Fusobacterium nucleatum subsp. nucleatum ATCC 25586
MDNDVKLGRFISLILRHKPETINLKLDKNGWANTKELIEKISKSGREIDFEILERIVNENNKKRYSFNEDKTKIRAVQGHSIEVNLELKEVVPPAILYHGTAFKTLESIKKEGIKKMSRQHVHLSADIETAKNVATRHSGKYIILEIDTEAMLKENYKFYLSENKVWLTDFVPSKFIKF

SEQ ID NO: 9032 - protein, 428 aa, Gluconobacter oxydans 621H
MSGTATNGRRVVVTGIGVVSPLAVGAELTWKRLIEGQSGIGRITHFDPSELPAQVAGQVPDGPTAEGGLTLSDWVPVKDQKKMDRFIHLGLAAAIQAVEDSGWKPEDEDGRCATGVMIGSGIGGLQTIYDGSLTVSSGKARRLSPFFIPSALINLISGHLSIRYGFKGPNHAVVTACATGVHAIGDASRLIQYGDADVMVAGGAEAAICSLGIAGFCSARALSTGSNDDPTKASRPWDKDRDGFIMGEGAGVVVLEELEHAKRRGAKIYGEIGGYGMSGDAYHITAPAEGHNGAFRAMKAALRNSGGLTTADIDYVNAHGTSTMADDLELDAVERFFGDDAKRLAMSSTKSAIGHLLGAAGAVEAIFCLQAIRDGIVPPTLNLDNPARESVIDRVAHVAQERKIDVALSNSFGFGGTNASIILKRFKD

SEQ ID NO: 9033 - protein, 422 aa, Triticum aestivum
MDKLKGSARLMIVSDLDHTMVDHHDEENLSLLRFGALWESVYCQDSLLVFSTGRSPTLYKELRKEKPMLTPDITILSVGSEITYGEAMVPDHGWEEYLNNKWDRNIVLEETAKFSELKLQVETEQRPHKVSFLVDKKNAQGVIKSLSEKFEKRGVDAKIIYSGGQDLDILAQGAGKGQALAYLLKKLGSCGKTPNNTLACGDSGNDAELFSIPGVHGVMVSNAQEELLQWHAENAKDNPKIIHATERCAAGIIQAIGHFKLGPNVSPRDVEFPYIKEDPFKPTAAIVKFYVLYEKWRRADVPKADSVIEYFKNTTDANGVIIHPSGVELSIHSSIDELASCYGDKQGKKYRSWVDRLVILQTAPDSWLVRFDLWEAEGNAWACCFTTLALNVKPETPGGFVVTHIHKTWRKEYPGVEQSSKL

SEQ ID NO: 9034 - protein, 308 aa, Arabidopsis thaliana
MWFFGSKGASGFSSRSTAEEVTHGVDGTGLTAIVTGASSGIGVETARVLSLRGVHVVMAVRNTDSGAKVKEDIVKQVPGAKLDVMELDLSSMQSVRKFASDNNAGIMACPFMLSKDNIELQFATNHLGHFLLTKLLLDTMKSTSRESKREGRIVNLSSEAHRFSYPEGVRFDKINDKSSSMRAYGQSKLCNVLHANELTKQLKEDGVNITANSLHPGAIMTNLGRYFNPYLAVAVGAVAKYILKSVPQGAATTCYVALNPQVAGVSGEYFQDSNIAKPLPLVKDTELAKKVWDFSTKLTDSQSGESSS

SEQ ID NO: 9035 - protein, 521 aa, Pseudomonas aeruginosa PAO1
MLDANLKTQLKAYLEKVSQPFEIVASLDDSDKSRELLGLLQDIVGLTDKITLKTDGSDARKPSFSLNRPGADIGLRFAGIPMGHEFTSLVLALLQVGGHPSKLDADVIEQVKGIEGTFEFETYFSLSCQNCPDVVQALNLMAVLNPNIRHVAIDGALFQDEVEARQIMSVPSIYLNGEVFGQGRMGVEEILAKIDTGAAARDAEKLTARDAFDVLVVGGGPAGAAAAIYAARKGIRTGVAAERFGGQVLDTMAIENFISVQETEGPKLARALEEHVRHYEVDIMNLQRASKLVPAKNAGELHEVRFESGGSLKAKTLILATGARWREMGVPGEQEYKAKGVCFCPHCDGPLFKGKRVAVIGGGNSGVEAAIDLAGIVAHVTLLEFDSKLRADAVLQRKLYSLPNVEVITSALTSEVKGDGQKVTGLVYKDRNSEEFKSIELEGIFVQIGLLPNTEWLKGSVELSPRGEIIVDARGETSLPGIFAAGDVTTVPYKQIVIAVGEGAKASLSAFDHLIRTSAPE

SEQ ID NO: 9036 - protein, 371 aa, Clostridium tetani E88
MLDFDVDEKQFAQIKVIGCGGGGNNAVNRMIEEGLKNVEFIAVNTDKQALMLSKASQKIQIGDKLTKGLGAGANPEIGQKAAEESGEEISQAIKGADMVFITAGMGGGTGTGAAPVIAEIAKSMDILTVGVVTKPFPFEGRKRMLHAEMGVQNLKDSVDTLVTIPNERLLNIVDKKTTLMDSFKLADDVLRQGVQGISDLITIPGLVNLDFADVKTIMTDRGLAHMGVGRGSGDNRAQEAAKQAISSPLLETSIVGATGVLLNITGGADLGLLEINEAAEVVQQAADPDANIIFGAVIDENLKDEIRITVIATGFEKEYEKEPREKFSESEIVKNKDKEGMSSEVAASKEEYDNYTENDLEIPTFLRRQRK

SEQ ID NO: 9037 - protein, 223 aa, Escherichia coli
IWYNNFFGAETEAILPYDQYMHRFAAYFQQGNMESNGKYVDRNGNVVDYQTGPIIWGEPGTNGQHAFYQLIHQGTKMVPCDFIAPAITHNPLSDHHQKLLSNFFAQTEALAFGKSREVVEQEYRDQGKDPATLDYVVPFKVFEGNRPTNSILLREITPFSLGALIALYEHKIFTQGVILNIFTFDQWGVELGKQLANRILPELKDGKEISSHDSSTNGLINRY

SEQ ID NO: 9038 - protein, 224 aa, Oryza sativa (japonica cultivar-group)
MASPSICLLAALLALVSWQAIASDPSPLQDFCVADMHSPVLVNGFACLDPKYVNADHFFKAAMLDTPRKTNKVGSNVTLINVMQIPGLNTLGISIARIDYAPLGENPPHTHPRATEILTVLEGTLYVGFVTSNPNNTLFSKVLNKGDVFVFPEGLIHFQFNPNPHQPAVAIAALSSQNPGAITIANAVFGSKPPISDIVLAKAFQVEKGTIDWLQAQFWENNHY

SEQ ID NO: 9039 - protein, 199 aa, Craterostigma plantagineum
MASSTCYATIPAMSCRGQSTITRFGPNNLFLGKQSYELPLMRRNAKFTVRSMREDNEKEEQQQQKQQQTHDGGPDLTPNRTEVTTKRTVDLFSFDGLAPERINGRSAMIGFVAAVGVELATGRDVFSQVFNGGVMWFLLTSAVLVLATLIPIYRGLSPEAKNNGFWNSDAEIWNGRFAMIGLVALAFTEYVKGGPLINV

SEQ ID NO: 9040 - protein, 183 aa, Escherichia coli
DRNGNVVDYQTGPIIWGEPGTNGQHAFYQLIHQGTKMVPCDFIAPAITHNPLSDHHQKLLSNFFAQTEALAFGKSREVVEQEYRDQGKDPATLDYVVPFKVFEGNRPTNSILLREITPFSLGALIALYEHKIFTQGVILNIFTFDQWGVELGKQLANRILPELKDGKEISSHDSSTNGLINRY

SEQ ID NO: 9041 - protein, 223 aa, Escherichia coli
IWYNNFFGAETEAILPYDQYMHRFAAYFQQGNMESNGKYVDRNGNVVDYQTGPIIWGEPGTNGQHAFYQLIHQGTKMVPCDFIAPAITHNPLSDHHQKLLSNFFAQTEALAFGKSREVVEQEYRDQGKDPATLDYVVPFKVFEGNRPTNSILLREITPFSLGALIALYEHKIFTQGVILNIFTFDQWGVELGKQLANRILPELKDDKEISSHDSSTNGLINRY

SEQ ID NO: 9042 - protein, 427 aa, Oryza sativa (japonica cultivar-group)
MAPPPPPPQAGVAGGGGAPPQWGAIPPPVPHQQQQYAPPPPQMWGQAPPPPPQMWGQAPPPPQPAYGQPPPAQAGYYGAPPQAAPAVPAGPNEVRTLWIGDLQYWMDENYISACFAPTGELQSVKLIRDKQTGQLQGYGFIEFTSHAGAERVLQTYNGAMMPNVEQTYRLNWASAGEKRDDTPDYTIFVGDLAADVTDYILQETFRVHYPSVKGAKVVTDKMTMRSKGYGFVKFGDPSEQARAMTEMNGMVCSSRPMRIGPAANKKATGVQEKVPSAQGVQSDSDPSNTTIFVGGLDPSVTDDMLKQVFTPYGDVVHVKIPVGKRCGFVQFANRASADEALVLLQGTLIGGQNVRLSWGRSPSNRQAQPQQDSNQWGGANAGYYGYGQGYEGYGYAQPQDPNMYGYGAYAGYPNYQQPLAQQPQQQQ

SEQ ID NO: 9043 - protein, 396 aa, Glycine max
MAVEYTCCSTAFFVHILVIVLLVLFAGLMSGLTLGLMSLSLVDLEVLAKSGTPQDRKHAEKILPVVKNQHLLLCTLLICNAAAMETLPIFLDGLVTAWGAILISVTLILLFGEIIPQSVCSRYGLAIGASVAPFVRVLVCICFPVAYPISKAGKGGELTHDETTIIAGALELSEKTASDAMTPISETFTVDINSKLDRELMNEILEKGHSRVPVYYEQPTNIIGLVLVKNLLTVHPEDEAPVKSVTIRRIPRVPESMPLYDILNEFQKGHSHMAVVVRRCDKTNQQSSQNNANDSVRDVKVDIDGEKPPKEKALKPKMPLHKWKSFPNTNKSSNRGSRSRKWSKNMYSDILEIDGSPLPKLPEEEEAVGIITMEDVIEELLQEEIFDETDHHFEDS

SEQ ID NO: 9044 - protein, 384 aa, delta proteobacterium MLMS-1
MSFKLAETESRARIKVFGVGGGGGNAVNTMVESGLVGVEFIACNTDLQALELSRADVRLQLGPSLAKGLGAGAKPNIGQAAAEESIEEIRNLLKDSDMVFVTAGLGGGTGTGGAPVVAKVARESGALTVGVVTKPFAFEGRSRTKNADGGWKELKEHVDTIITIPNDRLISLAEKGTTFIAGMKMADDVLVQAVKGITDLINLPGYINPDFADVRTVMDEMGPALMGAGHGVGENRAVEAVNMAIASPLLQDISIDGAKGVLVNISARQDTLTMAEVTQATTKIYEEVHDDANIILGIIFDDNLGDELRVTVIATGIRAMEDVEEVSDNIRPLLPKREKKARQLPLDGRDNKNKAAAQGGRQSFPANFFEEDFERPTFLRKNES

SEQ ID NO: 9045 - protein, 832 aa, Colwellia psychrerythraea 34H
MTINRREFIKANAIAAAAAVAGVSVPAVASNLITSSDITKLKWDKAACRFCGTGCSVNVGVMDGKVVATHGDIKSPVNKGLSCVKGYFLSKIMYGKDRLTTPLLRMTNGKYDKEGEFTPISWDQAFNVMAEKANDALKKDGPEALGMFGSGQWTVQEGYAAVKLMKAGFRTNNIDPNARHCMASAVGGFMRTFGIDEPMGCYDDLEAADAFVLWGSNMAEMHPILWTRLTDRRLSAPHVKVAVLSTFEHRSFDLADNGMIFTPQTDLAILNYIANYIIQTGRVNKDFVSKHTNFRLGETDIGYGLRPEHPLEQKAKNNGKTKGSSTPIDFDEYAKFVSTYTVESVSKLSGVPEHKLKELAEMYADPKIKVTSFWTMGFNQHTRGVWANNLVYNIHLLTGKISTPGNSPFSLTGQPSACGTAREVGTFSHRLPADMVVKNPKHRAIAEKIWDLPEGTIPAKPGYHAVLQNRMLKDGKLNFYWVQCNNNMQAAANINEEAYPGYRNPKNFIVVSDPYPTVTAQAADLILPTAMWVEKEGMYGNAERRTQSWYQMVEAPEGAKSDMWQLVEFSKRFKVEDVWPEELIAKKPEVRGKTLFDVLYKDASVGKFPLSEIPEDRLNDESRDFGFYIQKGLFEEYASFGRGHAHDLAPYDRYHKERGLRWPVVNGKETKWRFKEGSDPYCKPGSDWDFYGKPDGRAVIFALPYEPAAESPDEEYDLWLSTGRVLEHWHSGSMTQRVPELYKAMPDALVYMHPDDAKKRNMRRGDLVKLISRRGEVQTRVETRGRNKPPVGLVYMPWFDASRLVNKVTLDATDPLSKETDYKKCAIKIVKV

SEQ ID NO: 9046 - protein, 383 aa, Desulfovibrio desulfuricans G20
MSGNGLFRYDAVVVGGGPCGASAAFTLARNGYTVMVIDAGKFPRFKLCGGLLTGKSTAFLRDCFGMDASCLARAGALEGCENSYHIYAGGRRIVAGSNGSPFYFVRRDRFDSRLLKSVAAAGAVVREGTKVVHADCRTGKVHCHDGSSVCAEFIIAADGVHSTVRKAVCGGLRHSVRQAVAVEVAVPRRHMPQGVQLPSVHLGLLQRGYGWLFPNRRNIVAGVGGLLCRGEHPARVLRTLLCGCGVQAGHIPQPRGYTLPFGGHLRRPFSGRVLLAGDAAGFADAVFGEGIYYAMLSGSLAAQAVMQALPVRAAGSVLHEEHGAGTFYMQLLQRNLFRTLGQAAVLHRFLYRPPDGPDRAAVRLFLRCAHRLLVNRLHSVPDR

SEQ ID NO: 9047 - protein, 505 aa, Burkholderia vietnamiensis G4
MTRSDLPHEARPVVVWFRDDQRLADNPALTHALDTGHPVVCVYVHDAAPKHGRAMGGAQRWWLHESLSKLDDALAAHGGSLILLRGNEHEAITGFAAAIGAAMVVWNRRYAKAQTGTDASIKRDLIDRGIAVSTFNGHLLREPWTVTTREGLPFQVFSAYWRAARRDDFFPPVPLPAPSHIRFFPVPAHATPHVCTLRELELQPSAPDWAGGLRETWQCGEQAASDQLEAFLENSLSDYPTLRDFPAARATSRLSPYLRFGNISVRQVWYATLSAADAMRSARIVRGVDSKDGPLSKFLSEIGWREFSYHLLYHFAPLHQVNFRRQFDSMPWRDDAKSLRKWQTGRTGYPLVDAGMRELWHTGWMHNRVRMVAASFLSKHLLIDWRQGEAWFWDTLVDADEASNPASWQWVSGSGADAAPYFRIFNPVLQAQKFDPHGDYTRRWVPELAQLSADTVHAPWAASREQLQRASVTLGRSYPMPIVDHQCARARALESVKRLDSESHA

SEQ ID NO: 9048 - protein, 415 aa, Bacteroides fragilis YCH46
MKQLSTRAEMQYNIHTLSNGLRIIHEPSSSKVAYCGFAVDAGTRDEAENEQGMAHFVEHLIFKGTRKRKAWHILNRMENVGGDLNAYTNKEETVIYSAFLTEHFGRALELLADIVFHSTFPQNEIEKETEVIIDEIQSYEDTPSELIFDDFEDMIFRNHPLGRNILGRPDLLKKFRSEDAMAFTSRFYQPSNMVFFVLGDFNFQKIVRQVEKLLVDLPLVTVENQRTIPPLYVPEQLVVHKETHQAHVMIGSRGYNAYDDKRTALYLLNNILGGPGMNSRLNVSLRERRGLVYTVESNLTSYTDTGAFCIYFGTDPEDVDTCLKLTYKELKRMRDVKMTSSQLMAAKKQLIGQIGVASDNNENNALGMAKTFLHYNKYESSESVFRRIEALTAEGLLEVANEMFAEEYLSTLIYR

SEQ ID NO: 9049 - protein, 414 aa, Magnaporthe grisea 70-15
MDANRHHPSLLLLPAPPSPATKESLSAAYRPPLEAAISKCRNPEHATVLIVALVAPILTGPYRFSKTLIWQHAQSLVAGLYAIASAVCAKLSVDAHIGAGPGSVDVRVLLVDRQNGGGDDGKKPAPLPADVAKAVAVPEPNNTAVADLPTFAASHRPWTTIYHCGTEAGLGLFADYLRLAEAGRLVLRQEQLVAVPGGVTMHDPSSTADGESGQTKGHGIVCIGGTFDYLHAGHKLLLTGGALLLDLPRMDEGEKPATFIVGITGDELLKNKKYAELVQSWDSRARSVIDFLATVLCLSPEEARPKIEEKDGLFVARLRGGAVEVNCVRIQDAFGPTITMQEVSSLVLSAETRAGGKAVNDKRAELGWAPLELFEVDVLDAGDVQSSDEPTKTAEFASKISSTTIRKLKAESRG

SEQ ID NO: 9050 - protein, 348 aa, Carica papaya [sequence omitted]

SEQ ID NO: 9051 - protein, 402 aa, Ustilago maydis 521
MGKDYYQVLGVAKDADDETLKKAYKKAALKWHPDRNKDNIETANKKFKEVGEAFEVLSDKNKRAIYDQFGEEGLKAGGPPPPGADGAAGGFSGFPGGAAGFSGGFPGGGGRTFTFTTGGAGGAGGAGGMGGMGGFSPSDPNDIFASIFGGASPFGGGMGGMPMGGMGGMSGMEDMFGGAGGGGARRKAGGGMPGAFNFGASPNTGAGAAADEKPSDVEKQLPLSLQDLYTGTTKRLKVGRKLASGGSEEKILTVEVKPGWKKGTKIRFGGAGHEVSPGSFQDVVFIVDEKPHAHFRRDGDDLRLTIPLKLIDALDPPKPGTPGSRKQVETLDGRKIDVPIPQPVAGTSCITPGKTTRLANEGMPISKTGGKRKGDLVVEWSVQLPEHLTPAQKEGLRKVLAP

SEQ ID NO: 9052 - protein, 530 aa, Gibberella zeae PH-1
MRFLTGLLVLGMSLWTTQAYEIGLSNKEGYQEYCTGMYSKSSWGGPVDPFILVKFLNSSDSGVKDPTASLVIFEWKDRNLVGIPDPDVPGNRLGVCGDDFVKQGYCNKTDIGKFILNPDVDKKSSSVVLTKAVHLNTAAPINYAIKKTGYYCVLTDVVNTKKYDLVVEYRNAYGELEATQIPKLPFYGGMSILYALLAAYWGFLYYQHRHDISILIFLVVEMLITWGFYEYQNRHGSNIGSKVFLTIVGILNAGRNSFSFFLLLIVCMGYGVVKHTLGKSMIRVRWLAAAHFLFGLVYSLTFLSITPETAGPFVLLIVLPLAGTLTAFYVWTLNSLNWTLKDLRERKQHAKEAMYRKLWWAILISVMVIFGFFFFNSFTFASASDPDFVPFHWKTRWFILDGWLNVVYFADVAWIAYLWRPTSNNRRFAMSDEIAQDDDGNFDLGDIGVPGEDSDDEEAEVAKPQNNSQNANGLSFSSASRSAPQQPRNTRTGPRESLENETIFAVGEDGDKFSDDDDSDEEDAKLVKAK

SEQ ID NO: 9053 - protein, 314 aa, Magnetococcus sp. MC-1
MSEAKHHKLIILGSGPAGFTAAIYAARANLSPVVIQGLQPGGQLTITTDVDNYPGFADGIQGPELMQRMQAQAERFNTEVIFDTVMHADLSKRPFTLNCDSGDVYTCDALIISTGASARWLGMESEKKLNGFGVSACATCDGFFFKNQDVCVVGGGDTAVEEALYLSNICNKVYLIHRRDALRAEKIMQDHMFAKENIIPVWDSVPDEMLGDPNKGGLTGVRIKNVKTGALSELTVTGCFIAIGHRPNTEIFGDQLDKDANGYLVTKPGSTAMNIEGVFAAGDVQDTVFRQAITAAGTGCMAAIEAERWLAAHA

SEQ ID NO: 9054 - protein, 633 aa, Magnaporthe grisea 70-15
MSGTGSRQPLDASAGRDVVYCHACENEWFQDQNGLVCPQCHSEATEIVTPENDPRPVNTHDSRTEPQGHRDRYDDSDPEEEDIEEHSHRAPGGIYFTSRVFRMPVNHGAGTESPHVHPSDGNAVMERFYEMMNRDMGSSAAPGASNSDGTRSATGQGASENSGTRHYTTRTTMFPGGSTSFTITTAPLQRDGNNPPIGEFDAYADPHPRTRRRIVIVMLDSRGADSNASILSTIMGNITNPVGNTPHRGGETSSNDEASGLPPHGFPIAFQQLLGALMTGYGGTRNWGDVVTSQEEFDRIISQMMEANPMSNAAPPASEAAIEKLERKKLDEKMLGTDETVECTICMDDLSLGDEATVLPCKHFFHGECVTIWLKEHNTCPICRTPMEQRSSAERTQAPQNQSSSGPRAARPEPPRGIFPWAFQPSGSGTGSFVNSSSQRPSQSSQQSPIDIQQNDSGHTSHRRELLRSPSTNEERLRAIRDLANSDRHGGSDRPTTPPFAGRRRNSLSPPSPSMQAPWNLSYDPVHDFTSASRDRTRERDGDRSNSQSSSRFTSTNRDQEGHRDRERYRQQTYESSQPPSREQRDQERNDDNGSRRGDPNQTSSGSTFDPFSWIRDRLPGGGNSSGDSHRRG

SEQ ID NO: 9055 - protein, 342 aa, Alkalilimnicola ehrlichei MLHE-1
MADLTRLDAEEPAVDMDIVDSDDRDNRSEPVSLDGDTPQALTGETEPVNRPEPRLPRRRTQSAYQASLDATQIYLNEIGYSPLLSAEEEVYFSRRAQRGDAAARARMIESNLRLVVKIARRYMNRGLAFLDLIEEGNLGLIRAVEKFDPERGFRFSTYATWWIRQTIERAIMNQTRTIRLPIHVIKEINQYLRAARKLTQELDHEPSVEEIADHMGRDVEDVRRMRGLNEGTTSVDVPIGRDADRVLLDAIPDENNVDPVSALQDGDVFGNLEAWLGELTEKQRAVVERRFGLNGHDRATLEQVGNEIGVTRERVRQIQIDALRRLREVMEREGFSQDAVFG

SEQ ID NO: 9056 - protein, 520 aa, Sinorhizobium meliloti 1021
MTAGNDFQHQAIAAHVAQRLAGPARAILGFQELLVEQARDLGLIHIKGDLDRIGAAARQLNGFIDRLLEGAACPLEEGEAEAEARLRHDLRTPLNAIIGYSEMILEEASDAPEHALKEDLHVILSAAAELLTQVDAIASLSRGETVEMLQPGERAEIDAAGLERLLFKAQEVACPEQGGRILVVDDVASNRDLLSRRLRREGHRVVTAESGLSALARLAEDEFDLILLDILMPDMNGIEMLSRLKSEERWQHVPVIMISGLSDVTAVARCIEAGADDYLTKPFNPILLRARINSTLEKKRWLDREHRYLQQIKTEKLRADSLIRAILPDQIVARLQDGEEIIADRFDEVSILFADIVGFSPIAASLTASDLVRRLDRMFRRFDLLTEQHRVEKIKTIGDAYMAACGIPEPAPDHADRIVALGKSMLRSLQDMEAGPDRFRVRIGIHTGPVVAGLIGRLRFVYDVWGETVNIASRLESQGVADVIQISEATRRALRGPWTLERRCALELRGIGAVETYLVR

SEQ ID NO: 9057 - protein, 223 aa, Klebsiella oxytoca
IWYNNFFGAETEAILPYDQYMHRFAAYFQQGNMESNGKYVDRNGNAVDYQTGPIIWGEPGTNGQHAFYQLIHQGTKMVPCDFIAPAITHNPLSDHHPKLLSNFFAQTEALAFGKSREVVEQEYRDQGKDPATLEHVVPFKVFEGNRPTNSILLREITPFSLGALIALYEHKIFTQGVIMNIFTFDQWGVELGKQLANRILPELKDGSEVSSHDSSTNGLINRY

SEQ ID NO: 9058 - protein, 198 aa, Klebsiella oxytoca
AYFQQGNMESNGKYVDRNGNAVDYQTGPIIWGEPGTNGQHAFYQLIHQGTKMVPCDFIAPAITHNPLSDHHPKLLSNFFAQTEALAFGKSREVVEQEYRDQGKDPATLEHVVPFKVFEGNRPTNSILLREITPFSLGALIALYEHKIFTQGVIMNIFTFDQWGVELGKQLANRILPELKGGSEVSSHDSSTNGLINRY

SEQ ID NO: 9059 - protein, 363 aa, Vibrio parahaemolyticus RIMD 2210633
MTDKSYKIAVLPGDGIGPEVMAQAHKVLDAIEQKHGISFEREEHDVGGIAIDNHGCPLPESTVTACEESDAVLFGSVGGPKWEHLPPNDQPERGALLPLRKHFQLFCNLRPAQIHAGLEAFSPLRADISGRGFDIVVVRELTGGIYFGQPKGREGEGANEKAFDTEVYHRYEIERIAKIAFESARLRRKKVCSIDKANVLQSSILWREVVEEIAKDYPDVELSHMYIDNATMQLIKDPAQFDVMLCSNIFGDIISDECAMITGSMGMLPSASLNESKFGLYEPAGGSAPDIAGKNIANPVAQILSAALMLRYSLGEEAAAQDIESAVSKALSAGELTADLASDKPALTTSEMGDKIAEYILNS

SEQ ID NO: 9060 - protein, 108 aa, Synechococcus sp. WH 7805
MSAAVSDFTDAGFDQDVLKASGTVLVDFWAPWCGPCRLMVPLMDWAAETYSGRLQVGKLEVDGNPATRDAYQVQGIPTLILFRDGGEIGRHEGAIARPQLQAFLDAHL

SEQ ID NO: 9061 - protein, 554 aa, Zea mays
  misc_feature (305)..(305): Xaa can be any naturally occurring amino acid
  misc_feature (320)..(320): Xaa can be any naturally occurring amino acid
  misc_feature (417)..(417): Xaa can be any naturally occurring amino acid
MAANPLATLAIAVFLICLLLPTSSSSSSICVARTQDHVRTAFHFQPAKNWQNGPVYYNGMYHLFYQYNPHGALWDVGNLSWGDSVSGDLVNWAALGNALDPTAPFDANGCASGSVTILPDGTPAILYSGIDADRRQVQNVAFPKNPRDPLLREWAKPAYNPVVPLPADVSANDFRDPTTAWVGRDGLWRFAISAVADGVGATLVYRSADFLRWERRAAPLHASQDAVMAECPDLFPVAARGAEGLDASARGAGVRHVLKVSMPDTLEDYYAVGTYDDAADTFTPDEDCGGGDYRRWRRIDRGHLXFPRALWLDGGGKQLXQCPVKEIETLMTKRAAPLQEVEPGGGVREVTGIVSSQADVDVVFEIPSLRRAEGLDPGRLHDPDALCREKGGSLTGGVGPFGLLVMASGDMREHTAXFFRVFRILHEYAVLMCTDLSRSSTKAGVYKPTHGGFVDVDIEKDMSISLRTLIDHSIVESFGGGGRTCMTARVYPEHVAAGSSSHLYVFNNGSAAVKVSKLEAWELASASVNVDDDGGLMAGGSFANMCRAEEYNSS

SEQ ID NO: 9062 - protein, 223 aa, Klebsiella pneumoniae
IWYNNFFGAETEAILPYDQYMHRFAAYFQQGNMESNGKYVDRNGHAVDYQTGPIIWGEPGTNGQHAFYQLIHQGTKMVPCDFIAPAITHNPLSDHHQKLLSNFFAQTEALAFGKSREVVEQEYRDQGKDPATLEHVVPFKVFEGNRPTNSILLREITPFSLGALIALYEHKIFTQGAILNIFTFDQWGVELGKQLANRILPELKDGSEVSSHDSSTNGLINRY

SEQ ID NO: 9063 - protein, 515 aa, Vibrio parahaemolyticus RIMD 2210633
MNDQVIIFDTTLRDGEQALSASLTVKEKLQIAYALERLGVDVIEAGFPISSPGDFESVQTIAKHIKNSRVCALSRAVAKDIDAAAEALKVADQFRIHTFLATSTIHVQDKLRRSYDDVLEMAVNAVKHARNYTDDVEFSCEDAGRTPIDNLCRMVEAAIDAGASTINIPDTVGYTVPSEFGGIIQTLFNRVPNIDKAIISVHCHDDLGMSVANSIAAVQAGARQIEGTINGIGERAGNCSLEEIAMIIKTRQELLGVSTGIKHEEIHRTSKLVSQLCNMPIQSNKAVVGANAFSHSSGIHQDGMLKNKNTYEIMTPESIGLKNQALNLTSRSGRAAVKSHMDSMGYKEDEYNLDALYADFLKLADRKGQVFDYDLEALMHFSNLREEDDFYKLNYLSVQSGSVMATTSIKMQCGDAEMCEAAVGNGPVDALYQCIYRVTGYEIVLDKFDLTAKGEGEDGLGQADIIANYKGRKYHGTGVSTDIVEASGQALLHVINSIHRADTIAEMKQKKIATV

SEQ ID NO: 9064 - protein, 310 aa, Triticum aestivum
  misc_feature (231)..(231): Xaa can be any naturally occurring amino acid
  misc_feature (246)..(246): Xaa can be any naturally occurring amino acid
AQHHIRGWGYPARASHHHTEARPPVHIRPGGHAAILLAIVDTAAFTALFDPELVDKRDCLIGPYNPSDSFTGGTRVGVYLDTEEPEHERTKAFAMDLLRRSSRVWAPEFLEGVDGMLAAIESDLDAGKGKDGGASFLVPLQKCIFRFLCRSVASADPAAEDLVDRYGLFILDVWLGLQLVPTQKIGAIPQPLEELLLHSFPFPSILVKPGYDLLYRFLEKHGAESVAVGVXGHGMTDKGTHHNILXLLGFNAFGGSRSSPPHPAGRKDAGSGPAPERCAPPEPHPAKSVPFGPGMRCCAQGTGAPITAVR

SEQ ID NO: 9065 - protein, 361 aa, Arabidopsis thaliana
MILKISGRNIIHFLHTHNNRLKANATHIQSLLNANNRVTVTTRKMVTLIVATTADPASINPAAALLAMPGWTAGPILPPDIKSFSNKQTRVIQHDRSIVKEDDLDLRWEEATGEVVDEVIFLSRHTAVSNRPALTVHPIGVLHLKDGESPPQGGKPGWAALPSTRIGPWFRLLKKMAEAHGLVPEFEITLEATHHGPITNKPTMFLEIGSTEEYWKRQDAAQVMALLMWEGLGLGGSEEVGKWKSETGKRKVLLGIGGGHYAPRHMDIALKDDIWVGHLLSGYSLPMEDPTQTKTTPGENYIGGNWRQSIKAAFEATKASFPGGEILAHLDHKSFKGWQKKAITEFLAEESINVGKPNDFT

SEQ ID NO: 9066 - protein, 948 aa, Ralstonia eutropha JMP134
MHDVPSLDFSTLSPIPADDSNKCFRADANKQCGERGSPWRQKGSTLGLHIGRALFAGGLFLFLLDEAAQVMTERGGMLRAVWPLLLPFMFASGVLAIGYLRMRRLITQRTKAEAKLGHELALRKALLACLPEPVAAKDPDLRYIELNPAFEHFFGIAKADAMGRHALEVESLRERMTGDLLGLQDEAIRTMEPRQARLQMRNASGQSRRVNFWALPFRNPDGMPGGIVTVHFDVTDIDESRERAQAFERRLKDVVDSLPVTVFQSRLPQDASDRGWEVTYAAGDGVGRGIDTVAALGAAPSDSTAFCPQDRPRLRAAILESARTCQPLDVEGRLNRGPAPGWIRVRAMPRRDGNCTVWNGVVIDVTDVHRQAEALHEAKDAAEADLRAKEGFLAMMSHEIRTPMNGILGLVELLRNTALTPAQHRMLTLAHESGHALAQILDDILDYARIEAGRLAIVPAPVDLRELLDSVSSLLLPQAQQKGLQLRVHVSADVPATVRADGIRMRQILFNLLGNAIKFTDRGSVTLHASAETSDGETAALLLEVQDTGIGIASADMPRLFTPFMQGERSVTRRMGGTGLGLAISRSLAAMMGGSLVLTSEEGTGTTASLRVPCPVMPEESGPPMPMGQSEAISVGETEMSEMPACWRILVAEDHYISQEVIRQQLVVLGHSPTVVDNGEAALDALCAGTFDLLLTDFHLPRMDGFALTQALRNSRDATLRALPVVGITATTVREQHQRGFEAGMNACVLKPITLASLRQGLASAMHAEFSANVPVGSRRPQWEATDAPRFDATRVRRDDLLAVLVPGSGEAGLQACINALQADRKALLDGLATGATPVLRAWCHRMRGALSVFGQPHLDDIIDSLQRAVERGNGDRIRNASRPVLDAIAHLTQALAQDTRDAEARAQAPVNCRNCMLSRAECAMGDSHGGLESGEGRSNGNQGNSRG

SEQ ID NO: 9067 - protein, 176 aa, Pseudomonas aeruginosa UCBPP-PA14
MSFNTEVQPGICMEPDAITQEYVFNHTMLRVKDPKRSLDFYSRVLGMRLLRRLDFEEGRFSLYFLAMTRGEEVPDALDERQRYTFGRQSVLELTHNWGSESDDSQYHNGNQDPRGFGHICFSVPDLVAACERFETLGVNFVKPLDRGMKNVAFISDPDGYWVEIVQASLNGEMGRG

SEQ ID NO: 9068 - protein, 357 aa, Arabidopsis thaliana
MVRIIPMAASSIRPSLACFSDSPRFPISLLSRNLSRTLHVPQSQLFGLTSHKLLRRSVNCLGVAESGKAAQATTQDDLLTWVKNDKRRMLHVVYRVGDMDRTIKYFTLAFLFYTECLGMKLLRKRDIPEEKYTNAFLGYGPEDSHFVIELTYNYGVDKYDIGAGFGHFGIAVDDVAKTVELVKAKGGKVSREPGPVKGGKTVIAFIEDPDGYKFELLERGPTPEPLCQVMLRVGDLDRAIKFYEKAFGMELLRTRDNPEYKYTIAMMGYGPEDKFPVLELTYNYGVTEYDKGNAYAQIAIGTDDVYKTAEAIKLFGGKITREPGPLPGISTKITACLDPDGWKSVFVDNIDFLKELE

SEQ ID NO: 9069 - protein, 243 aa, Triticum aestivum
MSAAGDRDLRELAPLEAILFDIDGTLCDSDPFHFLAFRELLQEVGFNNGVPITEEFYSANISGWHNDALAGALFPELDHAKGMEFMDRKEALFRKLAAGELKGLAGLQELCTWIGGRNLKRAAVTNAPRANAELVLSLLGLPSFFPVLVIGSECERAKPSPDPYLKALDLIGASPDHTFIFEDSASGIRAGVAAGVAVVGLTTGNPEKVLRDAGASLLIEDFRDPKLMAVLQELDPAPADKQG

SEQ ID NO: 9070 - protein, 403 aa, Burkholderia vietnamiensis G4
MLTQKTKDIVKATAPVLAQHGYDIITCFYRKLSDAHPELRNAFNMAHQEQGQQQQALARAVYAYAENIEDPGSLAAVLKNIANKHASLGVRPEHYPIVGENLLAAIKETLGDAATDDIVSAWAQAYGNLADLLMGMESTLYERSSERLGGWTGWRTFVVREKRPESSVITSFVLEPADGEPVANFEPGQYVSVAMDVPELGLQQIRQYSLSDMPNGRTYRISVKRESGGDYPPGYVSCLLHDYVEVGQTLALAAPYGSFHIDVEAKTPIVLISGGVGLTPMISMLTRAIQDSHRQVVFVHGARNSGVHAMRDRLRETASTHANFKLVVFYDDPLPQDVEGVDYDLKGLVDVNAIKDALLLPDADYYICGPVPFMRLQHDALKQLGVPETRIHYEVFGPDLFAE

SEQ ID NO: 9071 - protein, 490 aa, Acinetobacter sp. ADP1
MSDVKLHRLYIHGQYTDATSGKTFDSINPATGEVIATIQQASQTDIEAAVKSAAEGQKVWAAKTAVERSRILRRAVDILRERNDELAQLETLDTGKAFSETSTVDIVTGADVLEYYAGLATAIQGEQVPLRESSFFYTRREPLGVVAGIGAWNYPIQIALWKSAPALAAGNAMIFKPSEVTPLTAFKLAEIYSEAGLPAGVFNVVQGAGREIGQWLTEHAVIEKISFTGGVETGKKVMASAAGSTLKEVTMELGGKSPLIICEDANLDRAADIAVMANFFSSGQVCTNGTRVFIPQRLKAAFEQAVVERVKRIRMGDPQHTDTNFGPLVSFPHMEKVLSYIESGKQQGAKVLIGGERATTGLLAQGAYVQPTVFTDCHDDMKIVQEEIFGPVMSILTYDTIEEAIERANNTNFGLAAGVVTQNISQAHQIIHQLEAGICWINTWGESPAEMPVGGYKESGVGRENGISTLNHYTRTKSIQVELGDYQSVF

SEQ ID NO: 9072 - protein, 434 aa, Candida glabrata CBS 138
MFGNAFHLRNRIHKRSSSSDRLDQDESSDDGDNAPNIVEQKTKDIKLVKPLKRPRLSNCCSPTTPMANRLQTMAVAWHISSFVLFSIFSLLIISNPFTWIVVIPYLIYFFNDRSPANGDVVYRYSPWVRSLKIWKYYCDYFPIELVKTVDLEPTFTPCNEEEEKENKKLQEYYTLRLWPSDYEIRLFKKNTVYSHGYKRTGPKYIFGYHPHGIGALGSFGAFATEGRGWSNKFPGIPVSLLTLVTQFHIPFYRDYLLSVGISSVSRKNALKVLDNNQSICIVVGGARESLISIPGTSGLILNKRKGFIKLAIQAGNVSLVPVYTFGENDCYNILATDETSIIRKLQLWVKENFGFTIPIFYARGLFNYDFGLLPFRAPLHVVVGRPIHVKEQQENPEQSLVDHYHELYVEELKRIYLENRDRYGYGAADFEILG

SEQ ID NO: 9073 - protein, 400 aa, Rickettsiella grylli
MATGKFVRNKTHVNVGTIGHVDHGKTTLTAAITKCMADKFGGEAIAFDKIDKAPEEKARGITISTSHVEYESEKRHYAHVDCPGHADYVKNMITGAAQMDGAILVVSAADGPMPQTREHILLARQVGVPNIVVFMNKCDMVDDAELLDLVEMEIRELLSKYEFPGDDIPVIRGSAKKALEGDCEGGGVFALIKAMDEYFPEPVRDTDKPFLMPIEDVFTISGRGTVVTGRVERGVVKVGDAVQVVGLRAVQDTAVTGVEMFRKLLDQGEAGDNIGALIRGLKREDVERGQVLAKPGTVEAWTEFEAEIYVLTKEEGGRHTAFMNNYKPQFYFRTTDVTGTIKLPSGSEMVMPGDNVKITVTLMNEYGVAMEQGLRFAIREGGKTVGSGVVSKLIKKGKKA

SEQ ID NO: 9074 - protein, 177 aa, Triticum aestivum
  misc_feature (99)..(99): Xaa can be any naturally occurring amino acid
  misc_feature (108)..(108): Xaa can be any naturally occurring amino acid
MAPTVMASSATSVAPFQGLKSTAGLPVSRRSNGASLGSVSNGGRIRCMQVWPIEGIKKFETLSYLPPLSTEALLKQVDYLIRSKWVPCLEFSKVGFIFXREHNASPGXYYDGRYWTMWKLPMSGCTDATQVINEVHEVNKEYPDAYVRIIGFDNMRHVQRVSFIAFKPPGCDESGKA

SEQ ID NO: 9075 - protein, 311 aa, delta proteobacterium MLMS-1
MWNNIRIGTRASMLALAQANWIKGRIEAQHPQCRVELVKIITKGDKIVDVPLAKVGGKGLFVKEIEEAMLRGEVDIAVHSMKDVPAELPQGLHIGIITQRENPFDAFVSNLYQNIEALPTGARVGTSSLRRKSQLAALRPDLTIEDLRGNLDTRLRKLDEGQYDGIILAAAGLNRLDLAHRATFYFQAEQMLPAVAQGAVGIELRRADADLLEMLSFMDHRATTLAVKAERAYLKRLEGGCQVPLAGFATLDGDRLQLDTLVAAIDGSRLLKVSKSGPAEEAEEIGLAAAEELLAAGGREILEEVYGTSLS

SEQ ID NO: 9076 - protein, 517 aa, Haemophilus somnus 129PT
MQNNIIIFDTTLRDGEQALKASLTVKEKLQIALALERLGVDVMEVGFPVSSAGDFESVQTIARHIKNSRVCALSRAMDKDIDIAADALKVAEAFRIHTFIATSALHVEAKLRRTFDDVVEMAIQAVKRARRYTDDVEFSCEDAGRTGVDNICRIVEAAIKAGATTVNIPDTVGFCLPTEYGNIINQVMNRVPNIDKAVISVHCHNDLGMATANSLTAVQNGARQIECTINGIGERAGNTALEEVVMAIKTRQDIFKGLDTRINTQEIHRVSQMVSQLCNMPIQPNKAIVGSNAFAHSSGIHQDGMVKNKNTYEIMSPETIGLKKEKLNLTARSGRAAVKSHMDAMGYQQNDYDLDKLYAAFLKLADKKGQVFDYDLEALAFIDMQQGDEDRLSLDVITSQTISNLPASAFVQVELDGKKISQVSNGGNGPVDAVYNAILAITDMDITMLHYNLTAKGEGAEALGQVDIVVEHKGRRFHGVGLATDIVESSARALIHAINAIYRANKVADLKSHKISQ

SEQ ID NO: 9077 - protein, 464 aa, Escherichia coli K12
MPDAKKQGRSNKAMTFFVCFLAALAGLLFGLDIGVIAGALPFIADEFQITSHTQEWVVSSMMFGAAVGAVGSGWLSFKLGRKKSLMIGAILFVAGSLFSAAAPNVEVLILSRVLLGLAVGVASYTAPLYLSEIAPEKIRGSMISMYQLMITIGILGAYLSDTAFSYTGAWRWMLGVIIIPAILLLIGVFFLPDSPRWFAAKRRFVDAERVLLRLRDTSAEAKRELDEIRESLQVKQSGWALFKENSNFRRAVFLGVLLQVMQQFTGMNVIMYYAPKIFELAGYTNTTEQMWGTVIVGLTNVLATFIAIGLVDRWGRKPTLTLGFLVMAAGMGVLGTMMHIGIHSPSAQYFAIAMLLMFIVGFAMSAGPLIWVLCSEIQPLKGRDFGITCSTATNWIANMIVGATFLTMLNTLGNANTFWVYAALNVLFILLTLWLVPETKHVSLEHIERNLMKGRKLREIGAHD

SEQ ID NO: 9078 - protein, 418 aa, Saccharomyces cerevisiae
MSGTFNDIRRRKKEEGSPTAGITERHENKSLSSIDKREQTLKPQLESCCPLATPFERRLQTLAVAWHTSSFVLFSIFTLFAISTPALWVLAIPYMIYFFFDRSPATGEVVNRYSLRFRSLPIWKWYCDYFPISLIKTVNLKPTFTLSKNKRVNEKNYKIRLWPTKYSINLKSNSTIDYRNQECTGPTYLFGYHPHGIGALGAFGAFATEGCNYSKIFPGIPISLMTLVTQFHIPLYRDYLLALGISSVSRKNALRTLSKNQSICIVVGGARESLLSSTNGTQLILNKRKGFIKLAIQTGNINLVPVFAFGEVDCYNVLSTKKDSVLGKMQLWFKENFGFTIPIFYARGLFNYDFGLLPFRAPINVVVGRPIYVEKKITNPPDDVVNHFHDLYIAELKRLYYENREKYGVPDAELKIVG

SEQ ID NO: 9079 - protein, 147 aa, Triticum aestivum
  misc_feature (72)..(72): Xaa can be any naturally occurring amino acid
GRPLFPPYIEVNADVKEVLDTFRVAAELGSDSLGAYVISMASNASDVLAVELLQKDARLTVSGDLGRECPGXTLRVVPLFETVKDLREAGSAIRKLLAIDWYREHIIKNHNGHQEVMVGYSDSGKDAGRFTAAWELYKAQEDVVAAC

SEQ ID NO: 9080 - protein, 332 aa, Photobacterium profundum SS9
MILMNVQWVAMKNNNYGVLLVNLGTPDEASPAAIKRFLSEFLHDKRVVDMTRWLWCPILHGVILPIRSPKVAKLYQSVWMEDGSPLMVYSQRQRQALEKQLNVPVALGMTYGTPSIATGLAELKQQGCNKVLVLPLYPQYSGTTTAAVFDRIAKELKQQPHIPELRFINHYFDHPDYIDALALSVTDFWAENGEPDYLLCSYHGIPKRYADNGDPYPQHCHATTEKLAERLAMPREKMSMSYQSIFGREEWLQPYTEVTIEALAQKGIKRLDVMCPAFSVDCLETLEEIAEQCKETFIKAGGDVFNLIPCLNDNEAHIRMMKNLVTQHSQGW

SEQ ID NO: 9081 - protein, 276 aa, Lycopersicon esculentum
MAQTMLLTANAKVDLRSKESLVERLKPKPLSSLFLPSLPLRFSSSSTNASSSKFTSTTVALFKSKAKAPPKKVAPPKEKQKVEDGIFGTSGGIGFTKQNELFVGRVAMIGFAASLLGEAITGKGILAQLNLETGIPIYEAEPLLLFFILFNLLGAIGALGDRGKFVDDPTPPTGLEKAVIPPGKSFKSALGLSEGGPLFGFTKANELFVGRLAQLGIAFSIIGEIITGKGALAQLNFETGVPINEIEPLLLFNIAFFFFAAINPGTGKFITDEEED

SEQ ID NO: 9082 - protein, 579 aa, Staphylococcus epidermidis RP62A
MAQIKANEALVKALQTWNIDHLYGIPGDSVDAVVDSLRTVRDQFKFYHVRHEEVASLAAASYTKMTGKIGVALSIGGPGIVHLLNGMYDAKMDNVPQLIIAGQTNSTLLGTKFFQETNISKMVDDVAVYHHQIQKGDNVFEITNEAIRTAYEKKGVSVIICPNDLLTQKIKDTTNRAVDTTKPKPASPKFKSIKKAAKLIDKAKKPVMLIGLGTQHAKDELREFIEAAKIPVIHTLPAKTILPDDHPYSIGNLGKIGTKTSYQTIQDADLLIMAGTNYPYVNYLPKKNIKAIQIDTNEENIGARFKINVGILGDSKVAFHQLTENIKHVAKRPFLDKTLERKAVWDKWMKQDLNNDNSPLRPERLMKAINANLKDDAIISADVGTSTVWSTRYLNLSVNNKFIISSWLGTMGCGLPGAMAAKIAYPNRQAVAITGDGAFQMVMQDFATAVQYNLPMTIFVLNNKQLSFIKYEQQAAGELEYAIDFSDMDHAKFAEAAGGKGYVVRDVSRLDDIVEEAMAQDVPTIVDVHVDPNAAPLPGKIVNEEAFGYSKWAYRSITEDKNLDFDQIPPISVAAKRFL

SEQ ID NO: 9083 - protein, 555 aa, Photobacterium profundum SS9
MCSVFGILDIKSDPSALRATALEMSKKMRHRGPDWSGIYSSDKAILVHERLAIVDLNSGEQPLYNQDKTHILAVNGEIYNHKELSAEFAPDYPFQTESDCEIILALYKEKGPELLDYLNGIFGFILYDAVEDAYLIGRDHIGIIPLYQGYDEHGNYYIASEMKALVPICKTISEFPPGSFLWSKKGEPTRYYKRDWMEFETVADAPTDKVALKEALESAVKRQLMTDVPYGVLLSGGLDSSIISAITKKFAARRIEDDEKSQAWWPTLHSFAVGLEDAPDLKAAKIVADSIGTVHHELTYTIQEGIDAIRDVIYHIETYDVTTIRASTPMYLMSRKIRAMGIKMVLSGEGADEVFGGYLYFHKAPNKREFHEETVRKLLALNMFDCARANKSMAAWGIEARVPFLDKEFLEVAMRINPEDKMCGNGKMEKHILRECFEDHLPESVAWRQKEQFSDGVGYSWIDSLKEVAEAKVTEQQLETASFRFPYNTPTTKEGYMYREIFDELFPLESAAKCVPGGPSIACSSAKAIEWDESFKNSADPSGRAIAAVHNEAYK

SEQ ID NO: 9084 - protein, 125 aa, Methanosarcina barkeri str. fusaro
MKEIIAIIRPKKVVPTKEALEKLGVPSLTAIPVFGRGKQKGIATELDIEIRPEILDQSIKAGRRMEYIPKRLFSIVTRNEDVDTIIETIMKVNQTGDIGDGRIFICPVDDAIRVRTDEHGDNALL

SEQ ID NO: 9085 - protein, 816 aa, Mesorhizobium loti MAFF303099
MTERLVIIGNGMAPGRMLEHLLEQAPSRYSVTIFNAEPRVNYDRIMLSPVLSGEKAYEEIIIHGDGWYIANNITLYKGHKIVAIDRAAKTVTSDHGVTEPYDKLVIATGSVPFIIPVPGHNLPGVLTYRDLDDVQAMMLAAQSRAKAVVIGGGLLGLEAAAGLNAQGMDVTVLHVMPTLMERQLDPAAGYLLQRAVEQRGIKVITKANTQAITGNGKVEQVELADGTVIPATLVVMAVGIRPNSALAKEAGIAVNRGIVVDAGMRSNDPDIYALGECAEVNGMVYGLVAPLYEMARVAAHQLAGNEAAAFVHMDTPTKLKVTGIDLFSLGDFAEGEDRQEIVLRDAAAGVYKRLVLKDDRIIGTVLYGETADGAWFNDLKKKQTDISQMRDTLIFGQSYQGGAPLDPMAAVAALPDDAEICGCNGVCKGKITGAITAKGLTSLDDVRAHTKASASCGSCTGLVEKLMVLTLGDSYNPAAVQPMCTCTTLGHDEVRRLIKAKHLKTIPAVMQELEWKTSCGCAKCRPALNYYLVCDWPDDYADDYQSRFINERVHANIQKDGTYSVVPRMWGGVTNAAELRAIADVVDKFEIPMVKVTGGQRIDMLGIRKEDLPAVWADLGQAGFVSGHAYAKGLRTVKTCVGSDWCRFGTQDSTGLGIRIEKFMWGSWTPAKVKMAVSGCPRNCAEATCKDVGVICVDSGYEIHFAGAAGLDIKGTEVLGLVKTEDEALEHIVALTQMYREQGRYLERIYKWAKRIGIPEIKRQIMDDDAKRKTYYERFVFSQKFAQVDPWSERVSGKDKHEFRPMASVGFAEAAE

SEQ ID NO: 9086 - protein, 972 aa, Mesorhizobium loti MAFF303099
MRTTCPYCGVGCGVLAKVAADGQVSVRGDPDHLANFGRLCSKGSALAETIGLDGRLLHPEIHGRRTGWNEALDIVASTFSQTIAEHGSDAVAFYVSGQLLTEDYYLANKLMKGFVGSANIDTNSRLCMASSVAGHRRAFGSDTVPGTYEDLERADLIVLVGSNVAWCHPVLYQRIAAAREKRPEMKIVLVDPRRTMTSDIADMHLAIAPDGDVALFTGLLAWLGQHNALDRAYITAHTTGFGQALFAASALDLAGVAAATGLSEDELGGFYSLFAATAKTVTVYSQGVNQSSSGTDKVNAIINCHLATGRIGKPGAGPFSVTGQPNAMGGREVGGMANMLAAHMEIENPEHRDRVQRFWNAPGIAQKPGLKAVEMFQGVADGRIKALWVMATNPVDSMPDADAVEAAIKACPFVVVSDVLASTDTVRHAHVRLPAAAWGEKDGTVTNSERRISRQRSFLSAPGEARPDWWIIAEVARRMGFGEAFAHETPAEIFGEHAALSGFENDGGRDFDIGAYAGIDSVSYASLEPFQWPAPSQGTPLWPAGHIPRKGGDQPSLLPSPIVNVSERVAGPKLPISPLEGGEEWSAQRTESQLLGFPNDERPERQRRAGTGRTEGGDQARHLQQANGTTERDPTRFFANGHFYTADRKARFIAIRPTTETRTTPDFPLILNTGRIRDHWHTMTRTGKSPRLSQHIAEPFVEIHPLDAQHHGIGDADIVRISSPRGDVLVRALITPRQRQGSVFAPMHWTDQFAAKGRLDALTAPLIDPVSGQPALKHVAARIEKFAAKAFAFAVMRRRPEAIAADYWAVARCRGGWRVELAFANDDADWTAFAGSLFEAPSTEMLAYHDRDAGQHRIAAFDGEHLTGALFVARGPVAVSRGWAAEQLEEVQASQRERFRIVAGRAGAERPDAGATVCSCFSVGANQIVAAVAAGCTTVEAIGGALKAGTNCGSCRSEIRALIQASRVQAAE

SEQ ID NO: 9087 - protein, 183 aa, Geobacillus kaustophilus HTA426
MMYNVRGENLEVTPALREYVEKKIGKLERYFDGTEDVHVHVNLKVYNDGQGKIEVTIPMPHLLLRAEERHEDMYAAIDLVTDKLERQIRKHKTKVNRKLRDREKEAKLAAPVPSGASAAENNEEEFEIVRTKHFSLKPMDSEEAILQMNLLGHNFFIFTNAETNRTNIVYRRKDGKYGLIEAN

SEQ ID NO: 9088 - protein, 141 aa, Glycine max
MAASVMLSSVTLKPADFTVEKMSARGLPSLTRASPSSFKIVASGGKKIKTDKPFGVNGSMDLRDGVDASGRKGKGYGVYKFVDKYGANVDGYSPIYNEDEWSASGDVYKGGVTGLAIWAVTLAGILAGGALLVYNTSALAQ

SEQ ID NO: 9089 - protein, 538 aa, Brucella melitensis 16M
MTINLQKPDITELKPRITVFGVGGGGGNAVNNMINAGLRGVDFVVANTDAQALTMSKSDRIIQLGAAVTEGLGAGSQPEVGRAAAEECIDEIVDHLNGTHMCFVTAGMGGGTGTGAAPVVARAARERGILTVGVVTKPFHFEGARRMKTADLGIEELQKNVDTLIVIPNQNLFRIANDKTTFADAFAMADQVLYSGVACITDLMVKEGLINLDFADVRSVMREMGKAMMGTGEASGEGRAMAAAEAAIANPLLDETSMRGAKGLLISITGGRDMTLFEVDEAATRIREEVDPEANIILGATFDEGLEGVIRVSVVATGIDKQQGDAAPAPLEFRQPVKPTAAQAKPMAPHGALRPPVAEQPRQADPVAQVIQAAEAEMPVAPAASAASAEPEFRPQSRIFQAPAPEAFERAPVARAPMQPAQAMHAPQPQQYQQPQMHEQPVREPRPAPRMPAVSDFPPVAQAEINARRAPQQPVQEEPRGPMGLLKRLTHGLSRREEEQPAARLEPAQHREPGYAPSRTAPPDAAGFVDLCTGPRSA

SEQ ID NO: 9090 - protein, 420 aa, Agrobacterium tumefaciens str. C58
MRRVVITGTGMVSPLGCGTEVTWERLLAGQNGARLVTEFEVEDLPAKIACRIPVGDGSNGTFNADDWMEPKEQRKVDPFILYGMAAADMALADANWHPETDDDQIATGVLIGSGIGGLEGIVEAGYTLRDKGPRRISPFFIPGRLINLVSGQVSIRHKLRGPNHSVVTACSTGAHAIGDAARLIALGDAEVMVAGGAESPVCRISLAGFAACKALSTQHNDDPQKASRPYDRDRDGFVMGEGAGIVVLEELEHAKARGAKIYAEVVGYGLSGDAFHITAPSEDGDGAYRCMSMALKRAGLTPDDIDYINAHGTSTMADTIELGAVERLVGESAPKISMSSTKSATGHLLGAAGAIEAIFATLAIRDNIVPPTLNLDNPDVETKIDLVPHKARKRQVNVALSNSFGFGGTNASLVLRRYEA

SEQ ID NO: 9091 - protein, 391 aa, Arabidopsis thaliana
MDDDKLVFETTDGIEPITSFNDMGIKEDVLRGVYEYGFEKPSAIQQRAVMPILQGRDVIAQAQSGTGKTSMIALSVCQVVDTSSREVQALILSPTRELATQTEKTIQAIGLHANIQAHACIGGNSVGEDIRKLEHGVHVVSGTPGRVCDMIKRRSLRTRAIKLLILDESDEMLSRGFKDQIYDVYRYLPPDLQVCLVSATLPHEILEMTSKFMTEPVKILVKRDELTLEGIKQFFVAVEKEEWKFDTLCDLYDTLTITQAVIFCNTKRKVDYLSEKMRSHNFTVSSMHGDMPQKERDAIMNEFRSGDSRVLITTDVWARGIDVQQVSLVINYDLPNNRELYIHRIGRSGRFGRKGVAINFVKSDDIKILRDIEQYYSTQIDEMPMNVADLI

SEQ ID NO: 9092 - protein, 352 aa, Pseudomonas fluorescens PfO-1
MNDHNNNIQLETAMTTTTMTMIQALRSAMDVMLERDDNVVVFGQDVGYFGGVFRCTEGLQTKYGTSRVFDAPISESGIVGVAVGMGAYGLRPVAEIQFADYVYPASDQIISEAARLRYRSAGEFTAPMTLRMPCGGGIYGGQTHSQSIEAMFTQVCGLRTVMPSNPYDAKGLLIASIENDDPVIFLEPKRLYNGPFDGHHDRPVTPWSKHPQAQVPDGYYTVPLDVAAITRPGKDVTVLTYGTTVYVSQVAAEESGVDAEVIDLRSLWPLDLETIVKSVKKTGRCVVVHEATRTCGFGAELVSLVQEHCFHHLEAPIERVTGWDTPYPHAQEWAYFPGPSRVGAALKRVMEV

SEQ ID NO: 9093 - protein, 188 aa, Prochlorococcus marinus str. MIT 9313
MTGSSPSSTLGQGQRLILLFTALGLAVVLFLLRGGLNAEAPLEQLARRSLDPDVALTNGRPTVIEFYADWCQACREMAPAMLKTERDREDQLDVVLVNVDNPRWQDLVDRYDVNGIPQLNFFDNKGKLQGLSLGARTQEQLQQLTDALIQNQPLPNFAGVGAISNLNASQERTEKQNDLEAIRPMSHG

SEQ ID NO: 9094 - protein, 311 aa, Arabidopsis thaliana
MELLFLLCSIIYTSITSIFFSLLLPFRFLLHRLLPSRAAVDPNVSFYEGTVWHDRLRPVRHSFRYSVRYALFDLDKAINTPPDHFSADEARRVSRTTGSIFLLTIPPSVGYEQNPLSLYYCYDLEGSSKRLSKCIAQVTNTPWGERVTFVFDLESDLVAKSLQVSPFMDMLGNWKIRANEPGDDLSVSIASQHPHFGNYFSATLKAKRIPLSRVSDPAVFFWLMPHKVAIWIYWHALQLWWKSVPFIQHPRYSNPSYREEAAKRDQELRCPGLDGSDSDKTNKFDGLKGDGCSSSFGGCRFAWRDANWPWS

SEQ ID NO: 9095 - protein, 463 aa, Methanocaldococcus jannaschii
MFIDGKWINREDMDVINPYSLEVIKKIPALSREEAKEAIDTAEKYKEVMKNLPITKRYNILMNIAKQIKEKKEELAKILAIDAGKPIKQARVEVERSIGTFKLAAFYVKEHRDEVIPSDDRLIFTRREPVGIVGAITPFNFPLNLSAHKIAPAIATGNVIVHHPSSKAPLVCIELAKIIENALKKYNVPLGVYNLLTGAGEVVGDEIVVNEKVNMISFTGSSKVGELITKKAGFKKIALELGGVNPNIVLKDADLNKAVNALIKGSFIYAGQVCISVGMILVDESIADKFIEMFVNKAKVLNVGNPLDEKTDVGPLISVEHAEWVEKVVEKAIDEGGKLLLGGKRDKALFYPTILEVDRDNILCKTETFAPVIPIIRTNEEEMIDIANSTEYGLHSAIFTNDINKSLKFAENLEFGGVVINDSSLFRQDNMPFGGVKKSGLGREGVKYAMEEMSNIKTIIISK

SEQ ID NO: 9096 - protein, 126 aa, Zea mays
MAISVTAVAALPAFSAQRSLPQPSRQRVVAFIVVRPVRAHRRFVGVAASSPPTPPDLAKKVSESIKQAQETCADDPVSGECVAAWDEVEELSAAASHLRDRQKGADPLEEYCKDNPETDECRTYED

SEQ ID NO: 9097 - protein, 223 aa, Klebsiella pneumoniae
IWYNNFFGAETEAILPYDQYMHRFAAYFQQGNMESNGKYVDRNGHAVDYQTGPIIWGEPGTNGQHAFYQLIHQGTKMVPCDFIAPAITHNPLSDHHPKLLSNFFAQTEALAFGKSREVVEQEYRDQGKDPATLEHVVPFKVFEGNRPTNSILLREITPFSLGALIALYEHKIFTQGAILNIFTFDQWGVELGKQLANRILPELKDGSEVSSHDSSTNGLINRY

SEQ ID NO: 9098 - protein, 543 aa, Ralstonia solanacearum
MEKHVQRNLGAWPLMLTGLGSIIGSGWLFGAGHAAKVAGPAAIFTWVIGAVVILAIALTYAELGAMFPESGGMVRYARYSHGSLVGFVAAWANWIAIVTVIPIEAEASIQYMSSWPWPWAQGLFQHGELTPLGLALSAVLVIIYFLLNYWGVKVFAKANTTITVFKFVIPGLTAVALIGAGFHPSNFGGTDAASFAPYGWSSVLTAIATCGIVFSFNGFQSPINLAGEARNPGRNVPLAVIGSIVLAAIIYVALQIAFLGAVPAESLVKGWHGIDFHSPFAQLAIALNLNWLAIVLYLDAFVSPSGTGSTYMATTTRMIYAMERNNTMPAMFGRVHPIFGVSRSAMWFNLAVSFIFLFFFRGWGALAAVISVATVISYLTGPTSVMSLRKSSPGLHRPLRLPGLSLIAPFAFVCASLILYWAKWPLTGEIIVLMLVALPVYFYYQAKAGWPDFKRELKGAWWMIGYLPAIAALSYFGSTEFGGLGLLPYGWDMVIVSAVSLFFYYWGVASGWHTRYLDEVEYVHEDAVAPAGERVPGGVPQGV

SEQ ID NO: 9099 - protein, 162 aa, Alcaligenes sp.
MTQFLIVVATVLVMELTAYSVHRWIMHGPLGWGWHKSHHEEHDHALEKNDLYGVVFAVLATILFTVGAYWWPVLWWIALGMTVYGLIYFILHDGLVHQRWPFRYIPRRGYFRRLYQAHRLHHAVEGRDHCVSFGFIYAPPVDKLKQDLKRSGVLRPQDERPS

SEQ ID NO: 9100 - protein, 223 aa, Citrobacter freundii
IWYNNFFGAETEAILPYDQYMHRFAAYFQQGNMESNGKYVDRNGNAVDYQTGPIIWGEPGTNGQHAFYQLIHQGTKMVPCDFIAPAITHNPLSDHHPKLLSNFFAQTEALAFGKSREVVEQEYRDQGKDPATLDHVVPFKVFEGNRPTNSILLREITPFSLGALIALYEHKIFTQGAILNIFTFDQWGVELGKQLANRILPELNDDKEITSHDCSTNGLINRY

SEQ ID NO: 9101 - protein, 130 aa, Arabidopsis thaliana
MTENVASILSLDEMLPAVAQGAIGIACRTDDDKMATYLASLNHEETRLAISCERAFLETLDGSCRTPIAGYASKDEEGNCIFRGLVASPDGTKVLETSRKGPYVYEDMVKMGKDAGQELLSRAGPGFFGN

SEQ ID NO: 9102 - protein, 223 aa, Citrobacter freundii
IWYNNFFGAETEAILPYDQYMHRFAAYFQQGNMESNGKYVDRNGNAVDYQTGPIIWGEPGTNGQHAFYQLIHQGTKMVPCDFIAPAITHNPLSDHHPKLLSNFFAQTEALAFGKSREVVEQEYRDQGKDPATLEHVVPFKVFEGNRPTNSILLREITPFSLGALIALYEHKIFTQGAILNIFTFDQWGVELGKQLANRILPELNDDKEITSHDCSTNGLINRY

SEQ ID NO: 9103 - protein, 330 aa, Saccharomyces cerevisiae
MLDPRILPYYDPAVERKIAVVTGGNTGIGWYTVLHLYLHGFVVYICGRNSHKISKAIQEILAEAKKRCHEDDDGSSPGAGPGPSIQRLGSLHYIHLDLTDLKCVERAALKILKLEDHIDVLVNNAGIMAVPLEMTKDGFEVQLQTNYISHFIFTMRLLPLLRHCRGRIISLSSIGHHLEFMYWKLSKTWDYKPNMLFTWFRYAMSKTALIQCTKMLAIKYPDVLCLSVHPGLVMNTNLFSYWTRLPIVGIFFWLLFQVVGFFFGVSNEQGSLASLKCALDPNLSVEKDNGKYFTTGGKESKSSYVSNNVDEAASTWIWTVHQLRDRGFDI

SEQ ID NO: 9104 - protein, 358 aa, Haemophilus somnus 129PT
MKSYTIAVLSGDGIGPEIMAEAIKVLDAVQKKYNFKLNYRTFDVGGIAIDNHGTPLPASTLNGCEESDAILFGSVGGPKWEHLPPNQQPERGALLPLRKHFKLFCNLRPATLYQGLEKFCPLRADIATKGFDMMTVRELTGGIYFGQPKGRDGEGMQTRAFDTEVYYKYEIERIAKVAFETAMKRRKHVTSVDKANVLISSVLWRETVNEVAKNYPDVTLDHIYIDNATMQLIKQPEFFDVLLCSNIFGDIISDEAAMITGSMGMLPSASLNEHGFGLYEPAGGSAPDIAGKGIANPIAQILSAAMMLRYSFNLNEAADSIENAVKQVLSQGYRTADLADEHPPISTAEMGDLIVNAI

SEQ ID NO: 9105 - protein, 214 aa, Enterobacter cloacae
IWYNNFFGAETEAILPYDQYMHRFAAYFQQGNMESNGKYVDRNGNAVDYQTGPIIWGEPGTNGQHAFYQLIHQGTKMVPCDFIAPAITHNPLSDHHPKLLSNFFAQTEALAFGKSRDVVEQEYRDQGKDPATLDHVVPFKVFEGNRPTNSILLREITPFSLGALIALYEHKIFTQGAILNIFTFDQWGVELGKQLANRILPELGDDNAINSHDS

SEQ ID NO: 9106 - protein, 209 aa, Klebsiella oxytoca
IWYNNFFGAETEAILPYDQYMHRFAAYFQQGNMESNGKYVDRNGNAVDYQTGPIIWGEPGTNGQHAFYQLIHQGTKMVPCDFIAPAITHNPLSDHHPKLLSNFFAQTEALAFGKSREVVEQEYRDQGKDPATLEHVVPFKVFEGNRPTNSILLREITPFSLGALIALYEHKIFTQGVIMNIFTFDQWGVELGKQLANRILPELKDGSEV

SEQ ID NO: 9107 - protein, 339 aa, Acinetobacter sp. ADP1
MPNKSYRNAIKEAIELEMRRDPTVIVVGEDVRGGHGGKNTDENKLEGFGGVLGVTKGLWTEFGSERVIDTPITESAIIGMTAGAAATGLRPVADLMFMDFYGVCHDMLYNQAAKFRYMFGGKAKAPMVVRGMIGAGFSAAAQHSQSPYNVFASVPGLKVVVPSSPYDVKGLLIQAIRDNDPVVFCEHKLLYDIKGEAPDEAYTIPFGVANYTREGTDVTIIALSLMVHRANEVADKLAKEGISVEVVDPRTVSPLDEDGILESVASTGRVVIVDESAARCGFGHDVAALIAQKGFHYLKAPIELVTPPHTPIPFSPVLEKEWIPSVERIEQAVRKILEA

SEQ ID NO: 9108 - protein, 404 aa, Deinococcus radiodurans R1
MSDSITLSTIPDLLAELRAGRPVILVDDENRENEGDLLMPAATATPQWVNFMAREGRGLICVTLTPERARRLDLTPMVGAGAYGQGTDPNGTAFTVSVDHSSNSTGISAYDRAATIAALLEDTSQPTDFRRPGHIFPLVARPGGVLRRAGHTEAGCDLARLAGFAPVGVICEIMGDDGEMSRLPDLLAFGEKHGLKVGSIEALIAYRMEHDPFMEPVAEAELPTRFGDFRLIGFQDTLSGAEHVALVMGEVTPEPLLVRVHSECLTGDAFHSLRCDCGPQLDAALQAIAEEGRGAVIYLRQEGRGIGLLNKIRAYALQDGGADTVDANLQLGLPADARDFGIGAQILHLLGARKLRIMTNNPRKLHSLSGFGLEVVERVPLHVGEDPHNAGYLRTKREKLGHLR

SEQ ID NO: 9109 - protein, 672 aa, Kluyveromyces lactis NRRL Y-1140
MSLEETFSKLQINASDDAVVVKSLVFKPKTPKSQTPVPIVVVALHSTTTPSGLIASVTSTKDPRLARDELFQSQFKIQSGKEFHLGHLAQAEGAFKLLLDQQLVALADDTVLQLNDEKFVKKSDLIGKYLNSFEPLEVDFSQVVEVAKKEASAPAPAKSAASLEDAKLIGVTVDKALDFSGWYQQILTKGEMLDYYDVSGCYILRPASYAIWEQIQRWFDDRIKGLGVQNAYFPMFVSSRVLEKEKDHIEGFAPEVAWVTRAGTSELDEPIAIRPTSETVMYPYYAKWIQSYRDLPIKLNQWNSVVRWEFKHPQPFLRTREFLWQEGHTAHLTKEAAEEEVMQILDFYAGVYEELLAVPVVKGRKTEKEKFAGGDFTTTCEGYIPQTGRGIQGATSHHLGQNFSKMFNISVENPLGSEHPKIFAYQNSWGLSTRVIGVMVMIHSDNKGLVIPPRVSQFQSVVLPVGITTKTSDEQRAKIHENARAIESRLKKAGIRAFGDYNDNYTPGWKFSQYELKGIPLRIELGPKDLEKEQVTCVRRNDGKKIVVSLNDLEKRIPEILEELQQDLFNKAKELFDTHRVIVDEWKDFVPALNKKNVILSPWCGVEECEEDIKDASAKKDDGEEIEVDDKSPSMGAKSLCIPFNQPTLKPGQKCVKCTRLAKTYCMFGRSY

SEQ ID NO: 9110 - protein, 424 aa, Methanothermobacter thermautotrophicus str. Delta H
MKPNLRRELGLFDAVNLVVGTIVGADIYIVAAYGAGSLGPASILAWLLAGLMALIIALVFSEASAMLPRTGGPYVYAGEALGRFTGFITGWSLWVSSWVAIAVFPLAFIYYLEYFIPLDPPAEAVIKVLFILSLTIINIAGVGRAGKVNDILTILKVAPVLLFAVLGAIHLALNPGLLVSNYTPAAPMGLGALGTVTVLVFWAYVGFELVTVPADEVRDPERTIPLSITLGMIFVTLFYILTNAVILGLVPWRVLASSTAPLTVAGYSLMGGIGALILTAGAVFSIAGSEEAGMLTTARLLFAMSEDGFLPGFLSRVHRRFGTPHMSILVQNLTALLAALTGTVSGLIELSVVTLLLPYAVTCISLAILRRRDGSGIPLKSVLGVLVCIYLLMNTTPSTTAWGLLLILSGAPLYLIFGFKRLRR

SEQ ID NO: 9111 - protein, 851 aa, Magnetospirillum magnetotacticum MS-1
MPEIIRTTCPYCGVGCGVIAARLDQSAPWTVKGDPEHPANYGKLCVKGSALAETLDLDGRLLHPLISGNRASWDEALDLVAETFSTAVREHGPDSVAFYVSGQLLTEDYYAANKLMKGFIGSGNIDTNSRLCMSSTVAGHVRAFGSDTVPGCYEDLDLADLVVLVGSNAAWCHPVAFQRTLAAKARRPEMRIVVVDPRRTATAECADLHLAIRPGSDAILFNGLLAHLKGEETQLDVGVPLDQIVQFFSWFADTEKTVTVWSQGINQSSSGTDKVDAIINCHLQTGRIGRPGMGPFSLTGQPNAMGGREVGGLANMLAAHMGFDEASIDRVGRFWNATQMAGKPGLKAVDMFKAVAEGKIKALWIMCTNPAVSMPEADLVKSAIAACPFVVISECEANTDTARLAHVKLPALTWGEKDGTVTNSERRISRQRPFLPAPGEAKGDWWIITQVARRMGFGPAFAWNGPGEIFDEFCRLTAFENASTRDLDLSGLVGADYAAIEPIQWPVRAPGQGTARLFADGRFYHADGKARMLDITPRPPARAADLAFPLILNTGRMRDQWHTMTRTGRAARLAAHAPEPVLLVHPKDALRFRLSDGGLARVSGNRTSVVLRVALDPGQRIGEVFAPIHWNDQTASSAVIGSLIDAATDPHSGQPELKQAPVLVEPLEAAWHGVLLSRNPVDLPRSFYWAKASGAAHSIWRLAGEAGEDWPITAKQWLGTDGEWIEFLDPNRGHYRGARLVEGRLDAVLFVFPWAMDFSPDWVAAAFGRAAIAGDERATLVAGAPPGGDRGRDKTVCACFNVGLSAIRAAIRDHRLSSAAEVGAMLKAGTNCGSCVPEIRAILTEAAPKVA

SEQ ID NO: 9112 - protein, 443 aa, Leuconostoc mesenteroides subsp. mesenteroides ATCC 8293
MAENKITLSRSLSTKDLVVYGIIFMIPVAPIAFYGSFLSPAHGMVALAYLIGMIAMLFTGFSYASMASEFPYSGSVYTYVQKGTNPVLGFLSGWGITLDYILIPVITYLISASFGQSLLPAVPFWVWILGIAIFNTVINLLGIKVVSKFSWLLFGLQGVVLIAFIVGTIVALANGTVSFNVSSFYNASHFDLSGVVQATGIVIVSYLGFDAISTLSEEANDPTKSIGKAIVLSIILIGSLFVIVTFFAGFVAPNYSELNPDTAFLTILGKVGGSWLVHLAEFTLVLSFGLAGGQEGQTAVSRILYSMGRDGILPKRLSYLHPRYNTPWVAIILVGIVSVALSLSLSLTTVSNLISFGALFGFLSLNIAVIWHFYIKRPDKNIESFVKYLVSPFIGFSVSLWIFLSLALEAKLTGLFWLIIGLVILVYKTSIFKKPVPQFDFSE

SEQ ID NO: 9113 - protein, 423 aa, Pseudomonas fluorescens PfO-1
MGTHVIKMPDIGEGIAEVELSQWHVKVGDLVVEDQVLADVMTDKAMVDIPSPVHGKVIALGGQPGEVMAVGSILISIEVEGAGNLKESDKPAPVAAKETPVAPKVEAVVESKPAAPRTAPVCQGPMVARQADERPLASPAVRKHALDLGIQLRLVRGSGPAGRVLHEDLDAYLAQGQSNASAPVAAAYAQRNDEEQIQVIGMRRKIAQRMQDATQRAAHFSYVEEIDVTAIEELRAHLNEKHGASRGKLTLLPFLVRALVVALRDFPQMNARYDDEAQVITRLGAVHVGVATQSDVGLMVPVVRHAEARSLWDSAAEISRLANAARNGKASRDELSGSTITLTSLGALGGIVSTPVLNLPEVAIVGVNKIVERPMVVKGQVVIRKMMNLSSSFDHRVVDGMDAALFIQAIRGLLEQPATLFVE

SEQ ID NO: 9114 - protein, 608 aa, Brucella melitensis 16M
MAFQTFDVTTNPANGAPRVEKLRKKMAELGLDGFLVPRADEHQGEYVPPHAQRLGWLTGFTGSAGAALVLKNSAYIFVDGRYELQVRAQTDGKVFSYESLVSTPPASWLAENGKGLTIGFDPWLHTIYEAEALRNALEKQGGQLIPVETNLVDAVWDDQPEAPAAEVTIQPARFSGHEAKDKISEMKAAVAASGASATVLTDPSSVAWVFNIRGKDVSNTPLPLSFAIIPAQGEPELFIDERKLAIEPRAYLTQLAKLSAPADLEGHLGARAARGEAILLDPVLAAEKLRLIVTSAGGSVIEGKDPARIPRAIKNKAELDGSRAAHERDGVAMVNFLSWIDAQKPGTIDEISAAKKLEESRANAGRDFQMPLEDISFDTISGAGPNGAIIHYRVNTDTNRTLQDGELYLVDSGAQYRDGTTDITRTVPIGRIDPETVKAFTLVLKGVIAITTARFPKGTRGQDIDILARIALWKHGFDYAHGTGHGVGSYLSVHEGPQSISRKGAQELLPGMILSNEPGYYKPGAFGIRIENLIIVTEPEVLPGGDIPMMGFETLTFCPIDRRLVDKALLTQEELDWLNTYHAKVRAKLSGHLGDAERKWLEAATAPF

SEQ ID NO: 9115 - protein, 488 aa, Leptospira interrogans serovar Copenhageni str. Fiocruz L1-130
MSEKTKIAIAYGDGIGPEIMDATLKILNAAGAKIEPIEIEIGEKVYKEGHSSGIKPEAWDILRQTKVFLKAPITTPQGGGYKSLNVTVRTTLGLFANVRPCFSLYPYVETKHPSLDIVIIRENEEDLYTGIEHRQTNDTVQCLKLISHPGSEKIIRYAFEYARAYGRKKVTAMVKDNIMKQTDGLFHDIFKEVAKEYPELEVNSQIIDIGAANLADRPQNFDVVVTLNLYGDIISDIVAQIAGSVGMAGSSNIGEIVSMFEAIHGSAPDIAGKNLANPSGLLNAAVMMLVHIGQPDIAAKINNAWLLTIEEGIHTGDIFKPGVSRIKVGTKEFSDAVIGNLGHLPGKFKPVSFGKAKKIIIPEYKRNIQKKDLVGVDIFLDWVGKDPNELGNKLKSVSDELMLKIITNRGVKVYPDGQPETFLIDHWRCRFVSKNALIKQEDPSYHPISHKQVAELLLKLDLAGFDTIKTENLYYFNGKRAFSLGQGE

SEQ ID NO: 9116 - protein, 487 aa, Sinorhizobium meliloti 1021
MNPETTAVPYERLGILIDGRWIYEAERSTEVVDPATGQTIARLPFAADGEIAEAVASSQRAFESWKDRSPLERGRILRRFADLARKHADEIARNMTRDQGKPLSEAIGEIRFAADHADWHAEEARRIYGRVIPARDPRVQQMVLREPVGVCIAFTPWNFPFSQALRKVVAALASGCTIILKGPGESPSSTVAIGRLMQEAGLPDGCLNILWGDPAHLSETLLAAPEVRKISFTGSVEVGKHLASLAGRHMKRSTMELGGHAPVILFDDADIEAAADALAGQKVRNAGQVCISPTRFYVQAKGHDRFLARFAEKIASTRVGNGFQESVQMGPLCHGRRVAAMEGFIQDAREQGAEIVTGGERVGNAGFFYAPTVVAAGTDELRLMKEEPFGPIAVVTPFGDFDEVIRRANSLPFGLASYVFTGSSSRAQNAARALAAGMVSVNHFGLALPETPFGGINDSGYGSEGGSETFDGYLNTKFVTRFDQIPQ

SEQ ID NO: 9117 - protein, 150 aa, Nostoc sp. PCC 7120
MHIQFREFDQFDVWMWLKFSTIPSQREKQYVEEVFNSWFYLGKLGAFNAENLQVQETGVDLSYLNYDSRGYDKSLLALMHNMGEFEYEGQWARCWFDLGTSDAIAIDLLINALTQLSEEYVTIEAFYVGGENENWPVEDSDSRPHSIYDN

SEQ ID NO: 9118 - protein, 473 aa, Gibberella zeae PH-1
MADAGAPSNPGQLPPPQAGAGAPGYEAGQNGQPMAPPPLHIPQNNNPIPTAITSPRSADNGGIMSPTSAGGFRRAAPEPNKRALYIGGLDQRVTEEVLRQIFETTGHVQNVKIIPDKNARGYNYGFVEYDDPGAAERAMQTLNGRRVHQSEIRVNWAYQSNTTNKEDTSNHFHIFVGDLSNEVNDEVLTQAFSAFGSVSEARVMWDMKTGRSRGYGFVAFRDRPEAEKALSSMDGEWLGSRAIRCNWANQKGQPSMAQQQAMQAMGMTPTTPYGHHQFPAHGVASYEVILTQTPSWQTTVYVGNLTPYTTPNDVVPLFQNFGFVVESRFQADRGFAFIKMDSHENAAMAICQMNGYNVNGRPLKCSWGKDKTPNAQGGFDPVQPFSPQSAQAPGFPGTPTGYYPQYGAQYGGQPGNYGGPQAGSPAGYAGSPMGYAAPQSAGGYGRGQQPPNAEWAQPRPGQNFNNGFGGYQA

SEQ ID NO: 9119 - protein, 411 aa, Bartonella vinsonii subsp. berkhoffii
MTTEIRVPTLGESVTEATVGKWFKKLGEAVAIDEPLVELETDKVTVEVPSPVAGKLFEIIAKEGDTVEVNALLGAVEAGAASVAKSPSSSETSVSAAPSELEQSSSSNTMPPAPSAAKLMAENNIAKSDILGSGKRGQILKEDVLNVLAQGVKTSPPAVSASSSTPVSVSSSAVAPVQEMREERVRMTKLRQTIARRLKDAQNTAAMLTTFNEVDMSAVMGLRKRYKDLFEKKHGVKLGFMGFFTKAVCHALKELPAVNAEIDGTDIIYKNYVNAGIAVGTDKGLVVPVVRDADQMSLAEIEKEIGRLGRLARDGKLAVSDMQGGTFTITNGGVYGSLMSTPILNAPQSGILGMHAIKERAMVVDGQIAIRPMMYLALSYDHRIVDGQEAVTFLVRVKESLEDPERLVLDL

SEQ ID NO: 9120 - protein, 233 aa, Zea mays
  misc_feature (224)..(224): Xaa can be any naturally occurring amino acid
MAMERELMETFEAAKKAADAAAEEADGSSPEAERCLDALRRLREFRVNTDVLVSTQVGKRLRYLTKHPNSDIQAVAADLFGYWKKVVIEETGKKNGTPANGKSNNSAAKAEKPQPMKVEKKSAHVKVEKNSTSTTVKSEKNATVKTEKNSMSASVKIEKTANSDSKVQVKVEKVSKEVSRTSETKKPSSVPNGPPKLTSLVRCNDAARDKYRELLGDAFVKVPXETSDDDREE

SEQ ID NO: 9121 - protein, 121 aa, Triticum aestivum
MAAPRGAAVVLAMVLAAMVVAPPATVHAAISCSTVYSTLMPCLQYVQQGGSPARGCCTGIQNLLAEANNSPDRRTICGCLKNVANGASGGPYITRAAALPSKCNVALPYKISPSVDCNSIH

SEQ ID NO: 9122 - protein, 341 aa, Methanococcoides burtonii DSM 6242
MNNIIIWILIALCLIQSGIFSGLTIGLFGLSRLRLEIEAEANNIHAQKVLKLRHDPHLLLSTLLWGNVCVNVLITLLTDSVMVGSAAFIFSTVFITCFGEIMPQAYFTRNALKMGASLTPLVKLYILLLYPFTKPSAMILDRWLGKEKLEYFKETSLRIMLQKHMKSDASDIDKMEGLGALNFLSLDDLSIKQEGSLIDEKTIIEIDTINNRPVFPEVGTPDFEILLHKIAVPAKKWIIAVDKNRYPVVAIDSTSFIRDAIYKKNNFHPLIYCHTPLIVKSPNVKIGDVLHKLKVYPVDSEDDVIDNDLILYWNDDDPEKIVITGSDILGRLFRGIVYRVR

SEQ ID NO: 9123 - protein, 668 aa, Zea mays
MTASQSSMSGGGEPGVRTVVWFRRDLRVEDNPALAAAARTAGEVVPAYVWSPEEDGPYYPGRVSRWWLSQSLKHLDASLRRLGACRLVTRRSSDAVVALIDLVRSTGATHLFFNRLYDPLSLVRDHRVKEQLSAEGITVQSFNADLLYEPWEVLDDDGFPFTMFAPFWNRCLCMPDPAAPLLPPKRINSGDLSRCPWDELIFEDESEKGSNALLARAWSPGWQNADKALTAFLDGPLVDYSANHKKADSASTSLLSPYLHFGELSVRKVFHQVRMKQLMWSNDGDRAGEESCTLFLRAIGPAGVLEVWRQGRTGYPLVDAGMRELWATGWVHDRIRVVVSSFFVKVLQLPWRWGMKYFWDTLLDADLESDALGWQYISGSLPDGRELDRIDNPQFEGYKFDPHGEYVRRWLPELARLPTEWIHHPWDAPESVLQAAGVELGSNYPRPIVELDAANSRLQGALSEMWELEAASCAAIENGMEEGLGDSTDEPPIDFPQELRMEVDRQPAQPAIIHTPVVAGWRREDQRVPSMTSSLIRAETELTADFGNTSEDSRPEVPSNIHLQARAEREETVDGATGNTVRVNGNQQQQNLQNNMHRVLGIAPSISEASSSWTGREGGLVPVWSPPAASVHSDPYTADEADISSRSYLDRHQQSNTMMNWSQLSQSL

SEQ ID NO: 9124 - protein, 387 aa, Debaryomyces hansenii CBS767
MGKQYISTASASDAHKLDILGLSVTDRYTITVSSDGYANFWDNKKYELQEPNEIVVKQFVNKMGVHHVVAYESILPASHVKIVLIAFASFDGSISFKYFINDELSSLTDAEIPFGANSANWSPCFYKDPESKQDYFIVTQANGSALVYYLNIESSKDSADIGIKLEKFGDLNNANSSLFPNSVAVSPGVDKKVAVGYTNGDVLLYDLTTLKPIYTFRSTDLQVSNKSTSASSIPRVLAFSPGGSLLAVARDNQSAGSITLYDVKYGENVGSLTTPSHSSKTTIGGFAHDGWIMGLSFDESGEILASCAFDNCVRIWNIETREREATINISPSDLEGTNDNELDNSIASGVQFIKKGIRAGANGDSNEGLCVVSFDRAVRWYREAGGI

SEQ ID NO: 9125 - protein, 362 aa, Araucaria excelsa
SDSGKDAGRLSAAWQLYKAQEDLIKVAKEFGIKLTMFHGRGGTVGRGGCPTHLAILSQPPDTIHGSLRVTVQGEVIEQSFGEEHLCFRTLQRFAAATLEHGMHPPVSPKPEWRELMDEMGVVATEKYRSIVFKEERFVEYFRSATPELEYGRMNIGSRPSKRKPSGGIESLRAIPWIFAWTQTRFHLPVWLGFGAAFKHVIEKDSKNLHILRQMYNEWPFFRVTIDLVEMVFARGDPGITALYDKLLVSEDLWSFGEKLRANFLETRDLLLKVAGHRDLLEGDPYLKQRLRLRDSYITTLNVCQAYTLKRIRDPNFHVQLRPHLSKESSTNSAAELLKLNTTSEYAPGLEDTLILTMKGIAA

SEQ ID NO: 9126 - protein, 624 aa, Oryza sativa (japonica cultivar-group)
MASISGAAALRPRRRRAGCGCGGTPPPPLPPPPPRPPLHRGPLPLLLVLVGAAALLYPGGAARLQAGAERQHPRRVEKDPIKLWERYVEWLYQHKELGLFVDVSRMGFTEEFLRRMEPRMQRAFAAMRELEKGAIANPDEGRMVGHYWLRDPGLAPNSFLRTKIETTLDRILAFSQDVVSGKIKPPSSPAGRFTQILSIGIGGSALGPQFVSEALAPDNPPLKIRFIDNTDPAGIDHQIAQLGPELASTLVIVISKSGGTPETRNGLLEVQKAFRDAGLDFSKQGVAVTQENSLLDNTARIEGWLARFPMFDWVGGRTSEMSAVGLLPAALQGIDIKEMLVGAALMDEETRNTVVKENPAALLALCWYWASEGIGNKDMVVLPYKDSLLLLSRYLQQLVMESLGKEFDLDGNRVNQGLTVYGNKGSTDQHAYIQQLREGVHNFFVTFIEVLRDRPPGHDWELEPGVTCGDYLFGMLQGTRSALYSNDRESISVTVQEVTPRAVGALVALYERAVGIYASLVNINAYHQPGVEAGKKAAGEVLALQKRVLTVLNEASCKDPAEPLTLDQIAERCHCPEDIEMIYKIIQHMAANDRALIAEGSCGSPRSIKVYLGECNVDEDMLAA

SEQ ID NO: 9127 - protein, 175 aa, Citrobacter freundii
IWYNNFFGAETEAILPYDQYMHRFAAYFQQGNMESNGKYVDRNGNAVDYQTGPIIWGEPGTNGQHAFYQLIHQGTKMVPCDFIAPAITHNPLSDHHPKLLSNFFAQTEALAFGKSRDVVEQEYRDQGKDPATLDHVVPFKVFEGNRPTNSILLREITPFSLGALIALYEHKIFTQ

SEQ ID NO: 9128 - protein, 362 aa, Araucaria excelsa
SDSGKDAGRLSAAWQLYKAQEELVQVAKQYGVKLTMFHGKGGTVGRGGGPTHLAILSQPPETINGSLRVTVQGEVIEQSFGEERLCFRTLQRYTAATLEHGMRPPTSPKPEWRAILDEIAVVATEEYRSVVFKEPRFVEYFRLATPLTRYGRMNIGSRPSKRKPSGGIESLRAIPWIFAWTQTRFHLPVWLGFVAAFNHILAKDKKNLQHIRQMYNEWPFFRVTLDLIEMVFAKGDPGIAALYDKLLVSEDLWSFGEKLRANFLETRDLLLKVAGHRDLLEGDPYLKQRLRLRDSYITTLNVCQAYTLKRIRDPNFHVQLRPHLSKESSTNSAAELLKLNTTSEYPPGLEDTLILTMKGIAA

SEQ ID NO: 9129 - protein, 172 aa, Populus tomentosa
YHLFYQYNPKGAVWGNIVWAHSVSKDLINWESLEPAIYPSKWFDNYGCWSGSATILPNGEPVIFYTGIVDGNNRQIQNYAVPANSSDPYLREWVKPDDNPIVYPDPSVNASAFRDPTTAWRVGGHWRILIGSKKRDRGIAYLYRSLDFKKWFKAKHPLHSVQGTGMVECPDF

SEQ ID NO: 9130 - protein, 120 aa, Citrobacter freundii
IWYNNFFGAETEAILPYDQYMHRFAAYFQQGNMESNGKYVDRNGNAVDYQTGPIIWGEPGTNGQHAFYQLIHQGTKMVPCDFIAPAITHNPLSDHHPKLLSNFFAQTEALAFGKSREVVE

SEQ ID NO: 9131 - protein, 362 aa, Araucaria excelsa
SDSGKDAGRLSAAWQLYKAQEELVQVAKQYGVKLTMFHGKGGTVGRGGGPTHLAILSQPPETINGSLRVTVQGEVIEQSFGEERLCFRTLQRYTAATLEHGMRPPTSPKPEWRAILDEIAVVATEEYRSVVFKEPRFVEYFRLATPELEYGRMNIGSRPSKRKPSGGIESLRAIPWIFAWTQTRFHLPVWLGFGAAFKHILRKDKKNLQHIRQMYNEWPFFRVTLDLIEMVFAKGDPGIAALYDKLLVSEDLWSFGEKLRANFLETRDLLLKVAGHRDLLEGDPYLKQRLRLRDSYITTLNVCQAYTLKRIRDPNFHVQLRPHLSKESSTNSAAELLKLNTTSEYPPGLEDTLILTMKGIAA

SEQ ID NO: 9132 - protein, 312 aa, Pseudomonas aeruginosa
MTDTAKRPLYVPHAGPSLLEMPLLNKGSAFSTQERIDFNLQGLLPHNIETIEEQTERAYSQYNLCNTDLDRHIFLRSIQYNNETMFFRLLEEHLEEMMPIIYTPTVGQACQEFSKIYRTHRGLFISYPDRERIDDILRSATKNNVKIVVVTDSERNLGLGDQGIGGMGIPIASCPCTCGGISPAYTLPVVLDVGTNKPDLLNDPMYMAWRHERVSGAQYEEFVDLFIQAIKRCWPNVLLQFEDFAQTNAMPLLERYKDELCCFNDDIQGTAAVAVGTLLAACKAKGEKLSEQTVTFVGWPPPVAASPNRSSR

SEQ ID NO: 9133 - protein, 461 aa, Burkholderia xenovorans LB400
MTFLKSPPPTPDAVADEYAAMISGSSLPKYRIPEASSDRRAVFDLVRDELFMDGNSRQNVATFCTTYADDEVRRLMDLSIDKNMIDKDEYPQTAEIEMRCVHMLADLWHATKSWKTTGCSTTGSSEACMLGGLALKWQWKKRREAQGKPTGKPNFVCGPVQVCWAKFARYFDVEMRQVPLSGDATGLRPEDLAQYCDENTIGVVATLGITFTCVYEPVKALAGALDALQANVGLDIPIHVDAASGGFVAPFIQPDLEWDFSVPRVKSINASGHKYGLAPLGVGWIVWRSTQDLPDELIFRVDYLGGDMPTFALNFSRPAGQIIAQYYMLLRLGREGYRHIQQECADTAQALADGLAKIDALDMIYDGRGALPAVCYKLKHPDTAGFTLFDLSDRVRMRGWQIASYELPAGREDTIVQRVLIRRGVTRDMAAMLLEDIKHAIAHLTKNPVPNSTAGPTFHHD

SEQ ID NO: 9134 - protein, 119 aa, Brassica napus
  misc_feature (31)..(31): Xaa can be any naturally occurring amino acid
MGRKRKHSETEAAARAKKDDSAPERPKRTLXGWKDKNEDAEESKAKAASGFRNKEKVLVTCSRRISFRYRHLMLNMVSLLPHCKKDSKVEAKSSKGATLNELVELKGSSSCLFFECRKH

SEQ ID NO: 9135 - protein, 337 aa, Delftia tsuruhatensis
MAKRAQSLTITDVTAQGSDAILLSLRVDDEQQPKFTFQPGQYLTLAVEVQGDEHWRCYSITSEPVTGQPISVLVRRVAGGRVSNWLCDNARPGRQLQVLPPAGHFTLARPGQPLLLYAGGSGIAPVFALAREALARGAARVRLFYANRDRATAMLLAELQALQDAAAGRLEIVHWYDAEQGLPTQAVLVAQAQGLDQADAYMCGPEPFMHAVGASLQVAGFDAQRVHREDFGAAVEGASEEAAGDGPEALLTVLMKGQTHAVPVRAGELLLSAMLRAGLPAPHACRVGECASCMCRLQAGEVQRLDSSVLDEDDVAAGWLLACRTRAASPALQVRFS

SEQ ID NO: 9136 - protein, 303 aa, Burkholderia vietnamiensis G4
MSGFTNADVPDQSGKTFIVTGANTGIGLEIASTLAARRARVLLARRDEAKAEAAISRIRLKTPEANLAFLPLDLADLTSVRNAAKLVEKEPRVDVLINNAGVQGPKLKRTVQGFELTFGVNHLGCFAFTVLMLPRLTETSGSRIVVTSSGLHKSAKIEWDDLNAEKSYKWMPRYAASKLANLLFVFELDRRLRAAGIAVTALACHPGLAGTNLARDSWWGNIAMSLIGLFFNTPAQGAWGALQAATGQIKSGGYYGPTKTSELRGPSGECTPSQDARNPELAKRLWDVSVQLTRIDVELPSNA

SEQ ID NO: 9137 - protein, 420 aa, Pyrococcus furiosus DSM 3638
MVEQDPYEIVIKQLERAAQYMEISEEALEFLKRPQRIVEVTIPVEMDDGSVKVFTGFRVQHNWARGPTKGGIRWHPEETLSTVKALAAWMTWKTAVMDLPYGGGKGGIIVDPKKLSDREKERLARGYIRAIYDVISPYEDIPAPDVYTNPQIMAWMMDEYETISRRKTPAFGIITGKPLSIGGSLGRIEATARGASYTIREAAKVLGWDTLKGKTIAIQGYGNAGYYLAKIMSEDFGMKVVAVSDSKGGIYNPDGLNADEVLKWKNEHGSVKDFPGATNITNEELLELEVDVLAPAAIEEVITKKNADNIKAKIVAEVANGPVTPEADEILFEKGILQIPDFLCNAGGVTVSYFEWVQNITGYYWTIEEVRERLDKKMTKAFYDVYNIAKEKNIHMRDAAYVVAVQRVYQAMLDRGWVKH

SEQ ID NO: 9138 - protein, 322 aa, Oryza sativa
MASSIAMSLRSLAATDAFLPKPSPSSAPFLLLLSPSTPRLRLHLHLRSTRRLPLAPLAASDSFESASSSSAAALDFAEPGAAEESDVPEESDQEEEGYAPEAEEEAEADEEVEEEAVEASAEVAEEAEDVEEVGEYVEPPEEAKVYVGNLPYDIDSERLAQLFEQAGIVEVSEVIYNRETDRSRGFGFVTMSTVEEAEKAVEMFHRYDVDGRLLTVNKAAPRGARVERPPRQFGPSFRIYVGNLPWQVDDSRLVQLFSEHGKVVDARVVYDRETGRSRGFGFVTMATQEELDDAIAALDGQSLDGRALRVNVAEERPPRRGF

SEQ ID NO: 9139 - protein, 661 aa, Candida glabrata CBS 138
MATIPKRHTYGGGPEVHYTRNPYSAAPRNSMSSRGKKHVTFGPYIVGSTLGEGEFGKVKLGWTRTPSTGPEQRPAVSKQVAIKLIRRDTIVKNSEKEIKIYREINALKHLTHPNVVRLEEVLQNSKYIGIVLEYASGGEFYKYIQRKRRLKESTACRLFAQLISGVTYMHSKNLVHRDLKLENLLLDKNENLVITDFGFVNEFLPDNEYMKTSCGSPCYAAPELVISTRPYVARKADVWSCGIILYAMLAGYLPWDDDSTNPEGDDIGKLYQYITRTPLKFPEYITPIPRDLLRKILVPDPNKRVNMQYIHRHEWLKPHRPFLAVSTSQWDKLIKNSANVQLDHTKRVSRTSQHFETEQENSSVNQPVRSDMVNKAMDTSNTTDDAQHSIPNRQPLANVFINSRTYSARSASYAPRHSMSDDPNAIESARHAVQNKHESNLATVMGSPNKDKDDTTEDNNLETVARTSSHHRKPRPTSYYPVDINRSANNFSPIVLNLTNSDENDNSKHPYSTSTSNNPVAPTPQRDQSQVVTDEHGLQLEKNRVREQPLTSDKSRMSSLRSNATAKSSDSKKNKRFSLLSFYTNNGSKTSLHNDSKVSVTPSSKEESATVPPSIPSVVHHTDTTENKRNHRASMMGPSAGGDKSTARRVIDFFKRRSMRM

SEQ ID NO: 9140 - protein, 483 aa, Burkholderia pseudomallei K96243
MGVHVIKMPDIGEGIAEVELGLWHVKVGDRVKEDQAIADVMTDKASVEIPSPVTGVVVALGGKEGDVLAVGSELVRLEVEGDGNHKAEPDGGARAAAAQPERVADTAHAHASAAAKSARGEHGAGHGRDDARAASSGTSSGASHTQHAEREARGHRESSEYREDRSVSRGASQTDVERGPASPPPARRPGERPLASPAVRKRAWDLGVELRYVHGTGEAGRILHEDLDAYLQGRGAAAQRARGGQAAYVERHDEEAVPVIGLRRKIAQRMQDAKRRIPHFSYVEEIDVTELEALRAELNRKYGDTRGRLTVLPLLARAMVIALREFPQINARYDDEAGVVTRHGAVHLGIATQSKAGLMVPVVRHAEARDPWSIAAEVARLADAARAGRAERDELSGSTITITSLGALGGIASTPVINSPEVGIVGVNRIVERPMFRGGAVVARKLMNLSSSFDHRVIDGMDAAEFIQAVRGLLEQPALLFVE

SEQ ID NO: 9141 - protein, 395 aa, Methanothermobacter thermautotrophicus str. Delta H
MKNLIFPFTAIVGQEKVKKALILNAINPGIGGVLIKGDKGTGKTTAVRALADLLPSLRTVKGCPFNCDPDEPEGACDMCRGGDVDVEYRKMRVVELPLGATEDRVVGSLDISKALTEGIKALEPGILAEANRNILYVDEINLLDDHLVDVLLDAAAYGVNTVEREGISLQHPSRFILVGTMNPAEGELRPQLSDRIGIHINVETVTDIKQRVLIMKRRDEFEDDPEGFVERFAESQSSLRDRIMAARKLLPAVTIDDDLLELIARVCVDAGVDGHRSDIAIVRTSKAIAAFNGRRRVREEDVEDAIVLVLGERIPGRSYNRENTRREMQRAREEMERERESEEDQGNSDSSSGGEGSGGSEGEESGQESGASSRGEASGSGASASLAGLSAEGSL

SEQ ID NO: 9142 - protein, 347 aa, Burkholderia pseudomallei K96243
MTTASKEGPAASPMTMIQALRSAMDVMLERDGNVVVFGQDVGYFGGVFRCTEGLQNKYGKSRVFDAPINEGGIVGAAVGMGAYGLRPVCEIQFADYFYPASDQIVSEAARLRYRSAAEFIAPLTIRMPCGGGIYGGQTHSQSPEAMFTQVCGLRTVMPSNPYDAKGLLISAIENDDPVIFLEPKRLYNGPFDGHHERPVTPWSKHPASLVPDGYYTVPLDSAAIVRAGGDVTVLTYGTTVHVSLAAAEETGIDAEVIDLRSLWPLDLDTIVESVRRTGRCVVVHEATRTCGFGAELIALVQEHCFHWLEAPVERVTGWDTPYPHAQEWAYFPGPNRVGDALRRAMEN

SEQ ID NO: 9143 - protein, 548 aa, Photobacterium profundum SS9
MAIHPRAGQRAQQEDMHNIPALVANYFLIEPSASNPQQHVAFGTSGHRGTADKGTFNQHHIWAIAQAVAEVRAEKGVTGPLFLGKDTHALSEPAFTSTLEVLVANNVKVVIQEDNGYTPTPGVSHAILCHNLANADKADGIVITPSHNPPQDGGIKYNPVHGGPAEGELTSAIEKRANEIIAKGLVDVKRVAIEVARASDLVVEKELVAPYVDDLVNVVDMAAIQKANLKIGVDPLGGSGIEYWRQIGQHYGLDLTLINESIDPSFRFMSLDKDGAIRMDCSSPYAMAGLLAHKDNYDLAFGNDPDYDRHGIVTPAGLMNPNHFLAVCIDYLYRHRPEWSQSVAVGKTLVSSALIDRVVADLGRDLCEVPVGFKWFVDGLYSGELGFGGEESAGASFLRMNGTPWSTDKDGILLCLLAAEITAVTGKNPQQYYEELAAKHGASEYNRLQAVANAEQKSVLSKLSADMVAVETLAGDAITARLTHAPSNGAAIGGLKVTTENGWFAARPSGTEDIYKIYCESFKGKEHLSLIEKEAQEIVSKVFADAGL

SEQ ID NO: 9144 - protein, 732 aa, Azoarcus sp. EbN1
MDAAAIPAPGPFGSPSGLPVSSDFAALRQKLETYLRPEDVEKVEAAYHFSASAHEGQLRISGDPYISHPVAVADIVSDWHLDAQALIAALLHDVMEDTHISKQEIVDRFGRTAAELVDGLSKLDKIEFRSHEEAQAENFRKMLLAMASDLRVILIKLADRLHNMRTLQCIRSAKRRRIASETLEIYAPIANRLGLNNLYRELQELAFEHKYPLRYRVLSRAIKAARGNRREVVGKVLQGIEERLPQWGITAEVQGREKHLFGIYRKMAEKRLSFSQVLDIYGFRVIVRDVPSCYLAIGALHSMYKPVPGKFKDYLSIPKANGYQSLHTTLIGPFGTPVEVQVRTAEMHHIAETGVASHWLYKEDEKTLTELQQKTHSWLQSLLELQSASGGATEFLEHVKIDLFPGEVYVFTPQGRILSLPKGSTPVDFAYAVHTDIGNRCVACRVNGDLMPLRTELHNGDQIEIITAAHANPNPAWLAYVRTGKARAQIRHFLKGAQQEESVVLGERLLNQALRPHGLTLGQISTFAWERFLRDRSMRSKKEVFADIGLGRRLPVIVARRVAQAQDLESGRPNVIKPKPAGAILIRGSEGIAVQLARCCQPIPGDPIIGMIRKGQGLEVHLHDCAVVAKLRGDRGRWVDVEWETGEDRVFDVTIRVLTRNTRGVLAKVASAISEEDCNIQNVSMDNEQGIYTAINLVLQVRDRMHLAKVMRGVRRVQEVVRIGRLKGDVRS

SEQ ID NO: 9145 - protein, 541 aa, Rickettsiella grylli
MNGAPSRFTHSDEWKNLKQHASDLKKIPLTELFLNDPFRAKTFSLTEKPLTVDYSKNPILEKTLTLLIQLADRLHLKQKINDLFQGACVNTTQHLPALHTALRNPHKKGLLINGEDILVKIHTNLDKMQQFVDAIHQHRWRGWSGKKITDIIHLGIGGSDLGPRMVVHALKKTWKENSINLHFISPIDDSLSYLIKKINLETSLFIITSKSFRTHETLSSATQLFKHFQEKYGAQSTKRHFLAVTHHIEKAIAFGIDPAHIFPLWNWVGGRYSLWSAVGLPIALAVGMSNFRTLLQGAYTMDQHFLNQPWRTNLPVILGLLGVWQVNFFQTSAHAILPYDTRLHYLPAYLQQLEMESNGKSISIHGKPIDYATCPIIFGAHGLNAQHTFYQLFHQGTAHFSADFICTLRDPSMNINDHRQVISSVLSQSKVFMEGYVSDNGYQCLPGNHANTILALNELNPFSLGLLIALYEHKVFVQSVIWQINPFDQWGVEYGKQLNKTIYQQLNNTDTSLMTPLDSSTRAFIERFQTLNCSLKHTRKI

SEQ ID NO: 9146 - protein, 345 aa, Acidiphilium rubrum
MALYPFTAIVGQTEMIRAMLIATVEPTLGGVLAFGDRGTGKSTAVRALAALLPTMRAVAGCRYHCDPAARSALCPECRNRRAAGRLASERVRIPVVDLPLGATEDRVVGALDLERALADGVKAFEPGLLARAHRGFLYIDEINLLEDHLVDLLLDVAASGENVVEREGLSLRHPARFVLIGSGNPEEGELRPQLLDRFGLCVEVKTPTDLDQRIEVVRRRDAFEHDQAGFTRRFAADEAALRRQLVTAMKLLPLVSVPEAILRLAAKLCIELGTDGLRGELTLLRAARAEAALEGDTVVTESHLRAVAPAALRHRLRRDPLDESLAGARVERAMAALFSQAAIAR

SEQ ID NO: 9147 - protein, 192 aa, Nostoc sp. PCC 7120
MSTDSPIKPETTAGERLRNFLVAIVAIALTVALVLGLRTETAAVSLDKLYAASTPLEVAISNGKPSMVEFYANWCTVCQKMAPDIAEFEQQYADKMNFVMLNVDNTKWLPEMLKYRVDGIPHFVFLNKTGESLAQAIGDQPHTIMASNLEALVTGSALPHAQTSGQVSQVSTPVAPIGSQDDPRSHGSQVVN

SEQ ID NO: 9148 - protein, 177 aa, Candida albicans SC5314
MASTSTGLPPNWTIRVSRSHNKEYFLNQSTNESSWDPPYGTDKEVLNAYIAKFKNNGYKPLVNEDGQVRVSHLLIKNNQSRKPKSWKSPDGISRTRDESIQILKKHLERILSGEVKLSELANTESDCSSHDRGGDLGFFSKGQMQPPFEEAAFNLHVGEVSNIIETNSGVHILQRTG

SEQ ID NO: 9149 - protein, 583 aa, Zea mays
MGLFTVTKKATTPFDGQKPGTSGLRKKVTVFQQPHYLQNFVQSTFNALPVDQVRGATIVVSGDGRYFSKDAVQIITKMAAANGVRRVWVGQNSLMSTPAVSAVIRERVGADGSKATGAFILTASHNPGGPKEDFGIKYNMGNGGPAPESVTDKIFSNTTTISEYLISEDLPDVDISVVGVTSFSGPEGPFDVDVFDSSVDYIKLMKSIFDFEAIKKLLTSPKFTFCYDALHGVAGAYAKHIFVEELGADESSLLNCVPKEDFGGGHPDPNLTYAKELVERMGLGKSSSNVEPPEFGAAADGDADRNMILGKRFFVTPSDSVAIIAANAVQSIPYFASGLKGVARSMPTSAALDVVAKNLNLKFFEVPTGWKFFGNLMDAGMCSICGEESFGTGSDHIREKDGIWAVLAWLSIIAFKNKDNLGGDKLVTVEDIVRQHWATYGRHYYTRYDYENVDAGAAKELMANLVSMQSSLSDVNKLVKEIRSDVSEVVAADEFEYKDPVDGSVSKHQGIRYLFGDGSRLVFRLSGTGSVGATIRVYIEQYERDSSKTGRDSQDALAPLVDVALKLSKMQEYTGRSAPTVIT

SEQ ID NO: 9150 - protein, 239 aa, Synechococcus sp. WH 5701
MATSPAPDAGAKLAEKAEVRDYFNSTGFERWKRIYSDSDDVNKVQRNIRLGHQKTVDQVLEWLQEEGDLPQRSFCDAGCGVGSLSLPLAQLGAGSIAASDLSEAMVEEARRRLEDSGLPADRVQFSASDLESLQGRYDTVICLDVFIHYPQAAAEEMVRHLGGLAERRLIVSFAPYTPLLALLKSIGQLFPGPSKTTRAYTLREDGIVSAAAEAGFQPRRRSLNQAPFYFSRLIEFERG

SEQ ID NO: 9151 - protein, 158 aa, Staphylococcus epidermidis RP62A
MSIYDIAVENYDGSTYLLKRYKGKVLIIVNTATNCTLNDQFNKLEMLYKKYHKYGLEILSFPCNDFNNQEPGLIKDIYRVYKYKFGITFPIHAKINVNGEHEHPLYTLLKCKQPGLFGSQIKWNFTKFVVDQQGNIVKRFLPCDNPNQMEKLIRQLLK

SEQ ID NO: 9152 - protein, 318 aa, Wolbachia sp.
LCDKKIQLGINLTKGLGAGALPDVGKGAAEESIDEIMEHIKDSHMLFITAGMGGGTGTGAAPVIAKAAREARATVKDKGLKEKKILTVGVVTKPFGFEGVRRMRIAELGLEELQKYVDTLIVIPNQNLFRIANDKTTFADAFKLADNVLHIGIRGVTDLMVMPGLINLDFADIETVMSEMGKAMIGTGEAEGEDRAISAAEAAISNPLLDNVSMKGAQGILINITGGGDMTLFEVDAAANRVREEVDENANIIFGATFDQAMEGRVRVSVLATGIDSCNDKPEASSINQNKIPAEEKNFKWPYNQIPILETKKYASTE

SEQ ID NO: 9153 - protein, 115 aa, Triticum aestivum
  misc_feature (14)..(14): Xaa can be any naturally occurring amino acid
MARGAAIPLVLVAXVATMLLVATDAAISCGQVTSALSPCISYARGNGANPTAACCSGVRSLAGAARSTADKQAACKCIKSAAGGLNAGKAAGIPSKCGVSVPYAISANVDCSKIR

SEQ ID NO: 9154 - protein, 146 aa, Pisum sativum
MGFTDKQEALVNSSWELFKQNPGYSVLFYNIILKKAPATKGMFSFLKDSAGVVDSPKLQAHAEKVFGMVHDSAVQLRVSGEVVLGDATLGAIHIQKGVVDSHFVVVKEALLETIKEASGEKWSEELSTAWEVAYEGLASAIKKAMS

SEQ ID NO: 9155 - protein, 377 aa, Phycomyces blakesleeanus
MTQPSRRNDMSRLQQFDAGEQYSIVDIVGEGAYGVVCSAVHKPTGQTVAIKRILPFDHAMFCLRTLREIKLLKYFNHENIISILDIVKPKSYDEFTEVYLIQELMETDLHRVIRTQDLSDDHCQYFTYQTLRALKAMHSANVLHRDLKPSNLLLNANCDLKICDLGLARSANSADENSGFMTEYVATRWYRAPEIMLTFKEYTKAIDVWSVGCILAEMLSGKPLFPGRDYHHQLTLILDVLGTPTMDDFYGIKSRGARDYIRSLPFKKRIPFARLFPEATVDLLEKLLSFNPDRRITVEEALKHPYLEAYHDPDDEPNATPIHESFFDFDKYKDQLTKEQLKRKFFFHIIKRKKERLTQNIYINMYITEMLYEEITQ

SEQ ID NO: 9156 - protein, 362 aa, Araucaria excelsa
SDSGKDAGRLSAAWQLYKAQEDLIKVAKEFGIKLTMFHGRGGTVGRGGGPTHLAILSQPPDTIHGSLRVTVQGEVIEQSFGEEHLCFRTLQRFAAATLEHGMHPPVSPKPEWRELMDEMGVVATEEYRSIVFKEERFVEYFRSATPELEYGRMNIGSRPSKRKPSGGIESLRAIPWIFAWTQTRFHLPVWLGFGAAFKHVIEKDSKNLHTLRQMYNEWPFFRVTIDLVEMVFAKGDPGITALYDKLLVSEDLWSFGEKLRANFLETRDLLLKVAGHRDLLEGDPYLKQRLRLRDSYITTLNVCQAYTLKRIRDPNFHVQLRPHLSKESSTNSAAELLKLNTTSEYAPGLEDTLILTMKGIAA

SEQ ID NO: 9157 - protein, 362 aa, Smittium simulii
SGMCKAGFAGDDAPRAVFPSIVGRPRHHGVMVGMGQKDSYVGDEAQSKRGILSLKYPIEHGIVTNWDDMEKIWHHTFYNELRVAPEEHPVLLTEAPLNPKSNREKMTQIMFETFNVPAFYVNIQAILSLYSSGRTTGIVFDSGDGVSHVVPIYEGYSLPHAILRLDLAGRDLTERLMTLLTERGHTFTTSAEREIVRDIKEKLCYVALDYDQEMETALQSGSTEKSYELPDGQIITVGAERFRCPEALFQPSLLGLECSGIHESTYNSIMKCDLDIRRDLYGNIVMSGGTTMYPGIADRMQKEISSMAPSSMKIKIVAPPERKYSVWIGGSIVASLSTFQQMWISKQEYDESGPSIVHRKCF

SEQ ID NO: 9158 - protein, 146 aa, Pisum sativum
MGFTEKQEALVNSSWELFKQNPSYSVLFYTIILKKAPAAKGMFSFLKDSAEVVDSPKLQAHAEKVFGMVHDSAIQLRASGEVVVGDATLGAIHIQKGVVDPHFVVVKEALLETIKEASGEKWSEELSTAWEVAYEGLASAIKKAMN

SEQ ID NO: 9159 - protein, 363 aa, Ananas comosus
SDSGKDAGRLSAAWQLYKAQEELVQVAKQYGVKLTMFHGKGGTVGRGGGPTHLAILSQPPETINGSLRVTVQGEVIEQSFGEERLCFKTLQRYTAATLEHGMRPPTSPKPEWRAILDEIAVVATEEYRSVVFKEPRFVEYFRLATPELEYGRMNIGSRPSKRKPSGGIESLRAIPWIFAWTQTRFHLPVWLGFGAAFKHILRKDRRNLRILKEMYNEWPFFRVTLDLLEMVFAKGDPGIAALYDKLLVSDELKPFGEQLRANYEETKQLLLKVAGHTDLLEGDPYLKQRIRLREAYITTLNVCQAYTKKRIRDPNFKVDVRPPLSKEILDSNKQAELVKLNPASEYAPGLEDTLILTMKGIAA

SEQ ID NO: 9160 - protein, 301 aa, Chytriomyces confervae
YVTNWDDMEKIWHHTFYNELRVAPEEHPVLLTEAPLNPKANREKMTQIMFETFNTPAFYVAIQAVLSLYASGRTTGIVLDSGDGVSHTVPIYEGYALPHAILRLDLAGRDLTDYLMKILTERGYAFTTSAEREIVRDIKEKLCYVALDYEQEMQTAAQSSALEKSYELPDGQVITIGNERFRAPEALFQPSFLGLESVGIHETTYNSIMKCDVDIRKDLYGNIVLSGGTTMYPGIGDRMQREITALAPSSMKIKIVAPPERKYSVWIGGSILASLSTFQAMWISKQEYDESGPSIVHRKCF

SEQ ID NO: 9161 - protein, 238 aa, Ananas comosus
SDSGKDAGRLSAAWQLYKAQEELVQVAKQYGVKLTMFHGKGGTVGRGGGPTLFAILSQPPETINGSLRVTVQGEVIEQSFGEERLCFKTLQRYTAATLEHGMCPPTSPKPEWRAILDEIAVVATEEYRSVVFKEPRFVEYFRLATPELEYGRMNIGSRPSKRKPSGGIESLRAIPWIFAWTQTRFHLPVWLGFGAAFKHILRKDRRNLRILKEMYNEWPFFRVTLDLLEMVFAKGDPG

SEQ ID NO: 9162 - protein, 135 aa, Hafnia alvei
DRNGNPVTYQTGPIIWGEPGTNGQHAFYQLIHQGTKLVPCDFIAPAISHNALGDHHSKLLSNFFAQTEALAFGKSREEVEEEFAKAGKTAAEVAHIVPFKVFEGNRPTNSILLREITPYSLGLLIALYEHKIFTQ

SEQ ID NO: 9163 - protein, 363 aa, Ananas comosus
SDSGKDAGRLSAAWQLYKAQEELVQVAKQYGVKLTMFHGKGGTVGRGGGPTHLAILSQPPETINGSLRVTVQGEVIEQSFGEERLCFKTLQRYTAATLEHGMRPPTSPKPEWRAILDEIAVVATEEYRSVVFKEPRFVEYFRLATPELEYGRMNIGSRPSKRKPSGGIESLRAIPWIFAWTQTRFHLPVWLGFGAAFKHILRKDRRNLRILKEMYNEWPFFRVTLDLLEMVFAKGDPGIAALYDKLLVSDELKPFGEQLRANYEETKQLLLKAAGHTDLLEGDPYLKQRIRLREAYITTLNVCQAYTLKRIRDPNFKVDVRPPLSKEILDSNKQAELVKLNPASEYAPGLEDTLILTMKGIAA

SEQ ID NO: 9164 - protein, 363 aa, Ananas comosus
SDSGKDAGRLSAAWQLYKAQEELVQVAKQYGVKLTMFHGKGGTVGRGGGPTHLAILSQPPETINGSLRVTVQGEVIEQSFGEERLCFRTLQRYTAATLEHGMRPPTSPKPEWRAILDEIAVVATEEYRSVVFKEPRFVEYFGRATLELEYGRMNIGSRPSKRKPSGGIESLRAIPWIFAWTQTRFHLPVWLGFGAAFKHILRKDRRNLRILKEMYNEWPFFRVTLDLLEMVFAKGDPGIAALYDKLLVSDELKPFGEQLRANYEETKQLLLKVAGHTDLLEGDPYLKQRIRLREAYITTLNVCQAYTQRRIRDPNFKVDVRPPLSKETLDSNKQAELVKLNPASEYAPGLEDTLILTMKGIAA

SEQ ID NO: 9165 - protein, 369 aa, Lactobacillus plantarum WCFS1
MTDYTKLQQVRQWTQDNHVDVTYISNFHTISYLTGFESNPYERTLALFVFADAEPFLFAPALEVEAIKEMGWPYKVFGYLDHENPYALIADHIHAQLTDPKVWALETGNLTLDRFTALKQQFPAAHFDKDLSPYIQQLRLVKTADELEKLNIAGKWADFAFEQGFAAVKAGRTEQQIAAELQYALMKKGIMEMSFDTLVQAGEHAANPHGATNETQVKPNELVLFDLGVMYEGYASDASRTIAYGQPSAKQKEIFDVCLEANLTAQAAIKPGMAAEDVDKIARDIITKAGYGEYFIHRLGHGIGQTDHEFPSIMAGNHMPLVEGMCFSVEPGIYIPGVAGVRIEDCGVVTKEGFKPFTHTPKELKVLDL

SEQ ID NO: 9166 - protein, 140 aa, Brassica napus
  misc_feature (132)..(132): Xaa can be any naturally occurring amino acid
MDQNEPISKKLWNIVRFLLYMIRKGVSKHKLIADFNATLKRGKNLMFHHRRRVPAAATSSSAAANAPQRQEYEFSCSNTPNYSFPFPNIGFMKKKSHINLFACGQTPQTLDDDAAAARAVLELLNGVGDKGXVTPAVFVG

SEQ ID NO: 9167 - protein, 101 aa, Serratia plymuthica
DRNGNPVDYQTGPIIWGEPGTNGQHAFYQLIHQGTKLVPCDFIAPAISHNPLGDHHAKLLSNFFAQTEALAFGKSLETVEAEFAAQGKTPEQVKHVAPFKV

SEQ ID NO: 9168 - protein, 311 aa, Zea mays
  misc_feature (267)..(267): Xaa can be any naturally occurring amino acid
MAKKRKRTDAPAEATGAEKPDDSAPARPERTLFGFKDPVPDAEPASAGAEAAVAPFRNREKVLITCSRRITYRYRHLMQDVLSLLPHAKKDSKVESKQSKGNALNELLELRSCSSCLFFECRKQKDLYLWMVKSPGGPSVKFLVNAVHTMEELKLTGNHLKGSRPLLTFSTNFDEQPHWKLVKEMITHIFTTPKDHRKAKPFHDHVFVFSIVDGHVWFRNYQISVPHNEIDKVDKGGMDKMTLIEVGPRFCLNPIKIFGGSFGGPTXIRALEKRQKAGKYAKKVKAKVRRKMHEMENTLEPDEFAELWKGE

SEQ ID NO: 9169 - protein, 757 aa, Burkholderia pseudomallei K96243
MREFDYLLVGGGIASVTAARTLRGEDASASIAILCGEPVLPYQRPPLSQEWLMGAVQPASITLHDAAFYVAQRIDIALGVRAEQLDRAKRIVRTSSGATFRYGKLLIATGASAKAPALPGFGLDGVHVLHTFAQAQALKDAAAHARRATVLGGGFLGVEIAATLQALGLQVTLVERAPGVMPSLRAPALGGHFEALCRARGIDVLTRCEVRRVLGAQCVEAVETSDGGTRPCDLFVAAVGVTPNCGWLDGSGLALGDGVEVDAFLQTADPDVFAAGDVAHFDDPIFGVRRRIEHWDNAVRQGRIAARNMLGHRLPYRDVSIFYGSVFGLSYNLLGYPVGATETIERGAFDEASYMQLYLADDVLRAAFTIDRPAVEIAALNDAIRLHVNVAAHKTKLSDPNYPLDKLPVQTILILQGGGALGAFECGAVKALEQHGVRPDVISAVSIGAFNGAIVASHPKGATKALEAFWRELSIALPLPYESQWREAWLSSYVLSFGVPNFLKPQWSQLGFDADRLRAKWTSFFDATAIEQLIARYVDFDSLGMSPTRLLIGAVDVETGEPRIFDSYVDRLSPAHVLASGSLPPGMPWTVVDGRPYWDGGVVSNSPLDLVIARCGQIGGRVFIVDLFSGSKALPTNLVEVMLRREEIAYMDRVRNDLRFEEYASDFRDLVDGILAHVDAPSANEIRQQPLYIRLMGNRAAIDIARITLNREGRLSFIEDYDFSSDAIAQLQQQGYDAALVALANGRSRRRRGRRRA

SEQ ID NO: 9170 - protein, 480 aa, Ralstonia eutropha JMP134
MSTPATSNIRHEALRIAGEKVYRDRVIEVTYPYTGEVIATVPKANIEDVRRALRIAHQYRSTLTRYERYRILMRAGEIIAKRKEEIATLITLESGLSLKDTLYEVGRASDVLLFAANQALVDDGQVFSCDLTPHGKSRKVYTLKEPLLGAISAITPFNHPLNQVIHKVAPAVATNNRMVLKPSEKTPLAAFALADILYEAGLPPQMLSVVTGDPREIADELLTSQYVDLVTFTGGVSIGKYIAAKAAYKRQVLELGGNDPIIVMEDADLEEAATLAAGGSYKNSGQRCTAVKRMLVQESVADRFVELLVAKTQEVKYGDPLDPATDMGTVIDEAAAIQFESVVNAAIAGGARLLAGHTRDGALYAPTVLDHVDPEMAVVRHETFGPVSPVIRFKDIDDAIRISNGTAYGLSSSVCTNRLDYITRFIRELQVGTVNVREVPGYRLEMTPFGGIKDSGLGYKEGVLEAMKSFCNTKTYSLPW

SEQ ID NO: 9171 - protein, 293 aa, Methanothermobacter thermautotrophicus str. Delta H
MRGSIMILLDEDTRCLVQGITGKQGSFHTRQMLEYGTRIVAGVTPGKGGQEFLGVDVYNSVEEVTEEMDVNASIIFVPAPFAKDAAFESIKHLDLVVIITEHIPVHDSMQIMEYASRMGKTVIGPNTPGIITPGIGKLGIMPTHIFTEGTIGIVSRSGTLTYEFAAQLTEAGFGQSTCVGIGGDPVTGLGFVDVLERFEDDPGTDAVVLIGEIGGDAEERAASYIEQMSKPVFAFISGATAPPGKRMGHAGAIIEGGTGTASSKREALEAAGAVVVDRPSAIVDEIRAQLGVR

SEQ ID NO: 9172 - protein, 401 aa, Photobacterium profundum SS9
MTIEILVPDLPESVADATVATWHKQPGDFVTRDEVLVDIETDKVVLEVPAPQDGILEAIIEADGTTVLSKQLIGKIKVGAVAGEPTKDVPVAAESSPNKRNTASLTEETNEALSPAVRRLLGEHSIEASAVKGTGVGGRITREDVEAYLKKSSAPAVAPEAKAEAPLAARSQKRVPMTRLRKRVAERLLEAKNSTAMLTTFNEVNMKPIMDLRKQYKDIFEERHGIRLGFMSFYVKAVVEALKRYPEVNASIDGDDIVYHNFFDVSIAVSTPRGLVTPVLRDCDKLSLAEIEKGIRELAIKGRDGKLTVDELIGGNFTITNGGVFGSLMSTPIINLPQAAILGMHKIADRPMAIDGKVEILPMMYLALSYDHRLVDGRESVGYLVTIKDLLEDPTRLLLDV

SEQ ID NO: 9173 - protein, 225 aa, Arabidopsis thaliana
MVSPKIAPSMLSSDFANLAAEANRMIDLGANWLHMDIMDGHFVPNLTIGAPVIESLRKNTNAYLDCHLMVTNPMDYVAQMAKAGASGFTFHVEVAQDNWQQLVEKIKSTGMRPGVALKPGTPVEQVYPLVEGTTPVEMVLVMTVEPGFGGQKFMPDMMDKVRALRQKYPTLDIQVDGGLGPSTIDTAAAAGANCIVAGSSVFGAPEPGDVISLLRTSVEKAQPTT

SEQ ID NO: 9174 - protein, 517 aa, Agaricus bisporus
GLIGGILSLRSFQEYLGINTKNAVKKAILDGNIISVLQAGCFFGALGTGYLSSRFGRRPCLIASGIVYITGGLLQCTVGLGPSQAAALHVFYIGRFISGIGVGMVSTLVPLYISECVPRTIRGRCTGTLQFATNSGLMLGFWVNYSVSKNVPFGEMQWRIPLIIQMIPSLLFIIAMFFQPESPRWLVEHGKHKEAATVLARTGGKDVDHPSVVQTLEEIKQEFVASKQPSFLKQIRLVGESRAVALRCFIPPLVMFFQQWTGTNAINLYSPEVFRHLGIHGTSGALFATGVYGVVKVVSVALALTFAVERFGRKRGLIFGGIGQALMMFWLGGYSATHQDGTVSPASHVSIVALYLYGAFFSMGWGPLPWVVAGEVAPNHVRSFALSIAVGTHWLFGFVISKVTPIMLDRIKYGTFLLFGFCCMIVATWAYFCLPETSGFALEDIKYLFERDVIIRSLQDAPGGKIFLGGRRVESVASLKERRVGVAGEQGEKITGLNSELEDVSSKKSTLKETSSV

SEQ ID NO: 9175 - protein, 290 aa, Photobacterium profundum SS9
MSVLINKDTKVICQGFTGGQGTFHSEQAIAYGTKMVGGVSPGKGGTTHLGLPVFNTVREAVEETGATASVIYVPAPFCKDAILEAIDAGIKLIVTITEGIPTLDLLDVKVRLDEAGVVMIGPNCPGVITPDECKIGIMPGNIHQKGKVGIVSRSGTLTYEAVKQTTDEGFGQSTCVGIGGDPIPGSNFIDILKLFQEDPETEAIVMIGEIGGTAEEEAAAFIKANVTKPVVSYIAGVTAPPGKRMGHAGAIISGGKGTAEDKFAALEDAGVKTVKSLADIGKALREVTGW
